United States Patent Application Publication US 2025/0311734 A1 - sequence listing, part 11

SEQ ID NO: 43601 - protein, 479 aa, Synthetic construct
NGTMMQYFEWDLPNDGTLWTKVKNEATNLFSLGITALWLPPAYKGTSQSDVGYGVYDLYDLGEFNQKGTIRTKYGTKTQYIQAIQAAKAAGMQVYADVVFNHKAGADATEWVDAVEVNPSNRNQEVSGTYKIQAWTKFDFPGRGNTYSSFKWRWYHFDGTDWDQSRQLNRIYKFRGTGKAWDWEVDTENGNYDYLMFADLDMDHPEVVTELKNWGTWYVNTTNIDGFRLDAVKHIKYSFFPDWLTYVRNQTGKNLFAVGEFWSYDVNKLHNYITKTNGSMSLFDAPLHNNFYTASKSSGYFDMRYLLNNTLMKDQPSLAVTLVDNHDTQPGQSLQSWVEPWFKPLAYAFILTRQEGYPCVFYGDYYGIPKYNIPGLKSKIDPLLIARRDYAYGTQRDYIDHQDIIGWTREGIDTKPNSGLAALITDGPGGSKWMYVGKKHAGKVFYDLTGNRSDTVTINADGWGEFKVNGGSVSIWVAK

SEQ ID NO: 43602 - protein, 482 aa, Bacillus sp. YR288
NGTMMQYFEWYVPNDGQHWNRLRNDAAYLKSIGVSAIWTPPAYKGTSQNDVGYGAYDLYDLGEFNQKGTIRTKYGTKAELKSAVSTLKSNGIQVYGDVVMNHKGGADYTENVTAVEVNPSNRNQETSDEYTIQAWTGFNFPGRGTTHSPFKWQWYHFDGTDWDQSRNASRIFKFRGTGKAWDWPVSSENGNYDYLMYADLDFDHPDVRNEMKNWGVWYANEVGLDGFRLDAVKHIKFQFLGDWVNHVRTKTGKEMFTVAEYWQNDVNAINNYLAKVNYNHSVFDAPLHYNFHYASQSGGNYDMRNLLNGTVVAAHPTKAVTLVENHDSQPGQSLESVVQPWFKPLAYAFILTRAEGYPSIFYGDMYGTKGNSSYEIPALKTKIEPLLKARKDYAYGTQHNYMDHWDVIGWTREGDSTKEKSGLATLVTDGAGGSKWMYVGKQNAGEVWYDITGNRTDKITINTDGWGNFQVNGGSVSVYVQQ

SEQ ID NO: 43603 - protein, 482 aa, Bacillus sp. YR288
NGTMMQYFEWYVPNDGQHWNRLRNDAAYLKSIGVSAIWTPPAYKGTSQNDVGYGAYDLYDLGEFNQKGTIRTKYGTKAELKSAVSTLKSNGIQVYGDVVMNHKGGADYTENVTAVEVNPSNRNQETSDEYTIQAWTGFNFPGRGTTHSPFKWQWYHFDGTDWDQSRNASRIFKFRGTGKAWDWEVSSENGNYDYLMYADLDFDHPDVRNEMKNWGVWYANEVGLDGFRLDAVKHIKHSYLGDWVNHVRTKTGKEMFTVAEYWQNDVNAINNYLAKVNYNHSVFDAPLHYNFHYASQSGGVYDMRNLLNGTVVAAHPTKAVTLVENHDSQPGQSLESVVQPWFKPLAYAFILTRAEGYPSIFYGDMYGTKGNSSYEIPALKTKIEPLLKARKDYAYGTQHNYMDHWDVIGWTREGDSTKEKSGLATLVTDGAGGSKWMYVGKQNAGEVWYDITGNRTDKITINTDGWGNFQVNGGSVSVYVQQ

SEQ ID NO: 43604 - protein, 482 aa, Bacillus sp. YR288
NGTMMQYFEWYVPNDGQHWNRLRNDAAYLKSIGVNAIWTPPAYKGTSQNDVGYGAYDLYDLGEFNQKGTIRTKYGTKAELKSAVSTLKSNGIQVYGDVVMNHKGGADYTENVTAVEVNPSNRNQETSDEYTIQAWTGFNFPGRGTTHSPFKWQWYHFDGTDWDQSRNASRIFKFRGTGKAWDWEVSSENGNYDYLMYADLDFDHPDVRNEMKNWGVWYANEVGLDGFRLDAVKHIKHSYLGDWVNHVRTKTGKEMFTVAEYWQNDVNAINNYLAKVNYNHSVFDAPLHYNFHYASQSGGNYDMRNLLNGTVVAAHPTKAVTLVENHDSQPGQSLESVVQPWFKPLAYAFILTRAEGYPSIFYGDMYGTKGNSSYEIPALKTKIEPLLKARKDYAYGTQHNYMDHWDVIGWTREGDSTKEKSGLATLVTDGAGGSKWMYVGKQNAGEVWYDITGNRTDKITINTDGWGNFQVNKGSVSVYVQQ

SEQ ID NO: 43605 - protein, 482 aa, Bacillus sp. YR288
NGTMMQYFEWYVPNDGQHWNRLRNDAAYLKSIGVSAIWTPPAYKGTSQNDVGYGAYDLYDLGEFNQKGTIRTKYGTKAELKSAVSTLKSNGIQVYGDVVMNHKGGADYTENVTAVEVNPSNRNQETSDEYTIQAWTGFNFPGRGTTHSPFKWQWYHFDGTDWDQSRNASRIFKFRGTGKAWDWEVSSENGNYDYLMYADLDFDHPDVRNEMKNWGVWYANEVGLDGFRLDAVKHIKHSYLGDWVNHVRTKTGKTMFTVAEYWQNDVNAINNYLAKVNYNHSVFDAPLHYNFHYASQSGGNYDMRNLLNGTVVAAHPTKAVTLVENHDSQPGQSLESVVQPWFKPLAYAFILTRAEGYPSIFYGDMYGTKGNSSYEIPALKTKIEPLLKARKDYAYGTQHNYMDHPDVIGWTREGDSTKEKSGLATLVTDGVGGSKWMYVGKQNAGEVWYDITGNRTDKITINTDGWGNFQVNGGSVSVYVQQ

SEQ ID NO: 43606 - protein, 482 aa, Bacillus sp. YR288
NGTMMQYFEWYVPNDGQHWNRLRNDAAYLKSIGVSAIWTPPAYKGTSQNDVGYGAYDLYDLGEFNQKGTIRTKYGTKAELKSAVSTLKSNGIQVYGDVVMNHKGGADYTENVTAVEVNPSNRNQETSDEYTIQAWTGFNFPGRGTTHSPFKWQWYHFDGTDWDQSRNASRIFKFRGTGKAWDWEVSSENGNYDYLMYADLDFDHPDVRNEMKNWGVWYANEVGLDGFRLDAVKHIKHSYLGDWVNHVRTKTGKEMFTVAEYWQNDVNAINNYLAKVNYNHSVFDAPLHYNFHYASQSGGTYDMRNLLNGTVVAAHPTKAVTLVENHDSQPGQSLESVVQPWFKPLAYAFILTRAEGYPSIFYGDMYGTKGNSSYEIPALKTKIEPLLKARKDYAYGTQHNYMDHWDVIGWTREGDSTKEKSGLATLVTDGAGGSKWMYVGKQNAGEVWYDITGNRTDKITINTDGWGNFQVNGGSVSVYVQQ

SEQ ID NO: 43607 - protein, 482 aa, Bacillus sp. YR288
NGTMMQYFEWYVPNDGQHWNRLRNDAAYLKSIGVNAIWTPPAYKGTSQNDVGYGAYDLYDLGEFNQKGTIRTKYGTKAELKSAVSTLKSNGIKVYGDVVMNHKGGADYTENVTAVEVNPSNRNQETSDEYTIQAWTGFNFPGRGTTHSPFKWQWYHFDGTDWDQSRNASRIFKFRGTGKAWDWEVSSENGNYDYLMYADLDFDHPDVRNEMKNWGVWYANEVGLDGFRLDAVKHIKHSYLGDWVNHVRTKTGKEMFTVAEYWQNDVNAINNYLAKVNYNHSVFDAPLHYNFHYASQSGGNYDMRNLLNGTVVAAHPTKAVTLVENHDSQPGQSLESVVQPWFKPLAYAFILTRAEGYPSIFYGDMYGTKGNSSYEIPALKTKIEPLLKARKDYAYGTQHNYMDHWDVIGWTREGDSTKEKSGLATLVTDGAGGSKWMYVGKQNAGEVWYDITGNRTDKITINTDGWGNFQVNGGSVSVYVQQ

SEQ ID NO: 43608 - protein, 482 aa, Bacillus sp. YR288
NGTMMQYFEWYVPNDGQHWNRLRNDAAYLKSIGVSAIWTPPAYKGTSQNDVGYGAYDLYDLGEFNQKGTIRTKYGTKAELKSAVSTLKSNGIQVYGDVVMNHKGGADYTENVTAVEVNPSNRNQETSDEYTIQAWTGFNFPGRGTTHSPFKWQWYHFDGTDWDQSRNASRIFKFRGTGKAWDWEVSSENGNYDYLMYADLDYDHPDVINEMKNWGVWYANEVGLDGFRLDAVKHIKFQYLGDWVNHVRTKTGKEMFTVAEYWQNDVNAINNYLAKVNYNHSVFDAPLHYNFHYASQSGGNYDMRNLLNGTVVAAHPTKAVTLVENHDSQPGQSLESVVQPWFKPLAYAFILTRAEGYPSIFYGDMYGTKGNSSYEIPALKTKIEPLLKARKDYAYGTQHNYMDHWDVIGWTREGDSTKEKSGLATLVTDGAGGSKWMYVGKQNAGEVWYDITGNRTDKITINTDGWGNFQVNGGSVSVYVQQ

SEQ ID NO: 43609 - protein, 482 aa, Bacillus sp. YR288
NGTMMQYFEWYVPNDGQHWNRLRNDAAYLKSIGVSAIWTPPAYKGTSQNDVGYGAYDLYDLGEFNQKGTIRTKYGTKAELKSAVSTLKSNGIQVYGDVVMNHKGGADYTENVTAVEVNPSNRNQETSDEYTIQAWTGFNFPGRGTTHSPFKWQWYHFDGTDWDQSRNASRIFKFRGTGKAWDWEVSSENGNYDYLMYADLDFDHPDVRNEMKNWGVWYANEVGLDGFRLDAVKHIKFDYLGDWVNHVRTKTGKEMFTVAEYWQNDVNAINNYLAKVNYNHSVFDAPLHYNFHYASQSGGNYDMRNLLNGTVVAAHPTKAVTLVENHDSQPGQSLESVVQPWFKPLAYAFILTRAEGYPSIFYGDMYGTKGNSSYEIPALKTKIEPLLKARKDYAYGTQHNYMDHWDVIGWTREGDSTKEKSGLATLVTDGAGGSKWMYVGKQNAGEVWYDITGNRTDKITINTDGWGNFQVNGGSVSVYVQQ

SEQ ID NO: 43610 - protein, 482 aa, Priestia flexa
NGTMMQYFEWYVPNDGQHWNRLRNDAAYLKSIGVSAVWTPPAYKGTSQNDVGYGAYDLYDLGEFNQKGTIRTKYGTKAELKSAVNTLKSNGIQVYGDVVMNHKGGADYTENVTAVEVNPSNRNQETSDEYTIQAWTGFNFPGRGTTHSPFKWQWYHFDGTDWDQSRNASRIFKFRGTGKAWDWEVSSENGNYDYLMYADLDFDHPDVGNEMKNWGVWYANEVGLDGFRLDAVKHIKHSYLGDWVNHVRTKTGKEMFTVAEYWQNDVNAINNYLAKVNYNHSVFDAPLHYNFHYASQSGGNYDMRNLLNGTVVAAHPTKAVTLVENHDSQPGQSLESVVQPWFKPLAYAFILTRAEGYPSIFYGDMYGTKGNSSYEIPALKTKIEPLLKARKDYAYGTQHNYMDHWDVIGWTREGDSTKEKSGLATLVTDGAGGSKWMYVGKQNAGEVWYDITGNRTDKITINTDGWGNFQVNGGSVSVYVQQ

SEQ ID NO: 43611 - protein, 479 aa, Bacillus sp. (in: firmicutes)
NGTMMQYFEWNVPNDGQHWNRLHNNAQNLKNAGITAIWIPPAWKGTSQNDVGYGAYDLYDLGEFNQKGTVRTKYGTKAELERAIRSLKANGIQVYGDVVMNHKGGADFTERVQAVEVNPQNRNQEVSGTYQIEAWTGFNFPGRGNQHSSFKWRWYHFDGTDWDQSRQLANRIYKFRGKKAWDWEVDTEFGNYDYLMYADVDMDHPEVINELNRWGVWYANTLNLDGFRLDAVKHIKFSFMRDWLGHVRGQTGKNLFAVAEYWKNDLGALENYLSKTNWTMSAFDVPLHYNLYQASNSSGNYDMRNLLNGTLVQRHPSHAVTFVDNHDTQPGEALESFVQGWFKPLAYATILTREQGYPSVFYGDYYGIPSDGVPSYRQQIDPLLKARQQYAYGRQHDYFDHWDVIGWTREGNASHPNSGLATIMSDGPGGSKWMYVGRQKAGEVWHDMTGNRSGTVTINQDGWGHFFVNGGSVSVWVKR

SEQ ID NO: 43612 - protein, 348 aa, Bacillus sp.
WRWYHFDGTDWDQSRQLANRIYKFRGDGKAWDWEVDTENGNYDFLSYCWPHQRIMTNKVADEGLMYADVDMDHPEVINELNRWGVWYANTLNLDGFRLDAVKHIKFSFMRDWLGHVRGQTGKNLFAVAEYWKNDLGALENYLSKTNWTMSAFDVPLHYNLYQASNSSGNYDMRNLLNGTLVQRHPSHAVTFVDNHDTQPGEALESFVQGWFKPLAYATILTREQGYPQVFYGDYYGIPSDGVPSYRQQIDPLLKARQQYAYGRQHDYFDHWDVIGWTREGNASHPNSGLATIMSDGPGGSKWMYVGRQKAGEVWHDMTGNRSGTVTINQDGWGHFFVNGGSVSVWVKR

SEQ ID NO: 43613 - protein, 483 aa, Synthetic construct
GDNGTMMQYFEWYLPNDGTLWTKMGSDASHLKSIGITGVWFPPAYKGQSQSDVGYGVYDMYDLGEFNQKGTVRTKYGTKAQLQSAITSLHNNGIQAYGDVVLNHKGGADATEMVRAVEVNPNNRNQEVSGEYTIEAWTKFDFPGRGNTHSNFKWRWYHFDGVDWDQSRKLNNRIYKFRGDGKGWDWEVDTENGNYDYLMYADIDYDHPDVQTEVKNWGKWFVNTLNLDGVRLDAVKHIKFDYMSSWLSSVKSTTGKSNLFAVGEYWNTSLGALENYENKTNWSMSLFDVPLHMNFQAAANGGGYYDMRNLLNNTMMKNHPIQAVTFVDNHDTEPGQALQSWVSDWFKPLAYATILTRQEGYPCVFYGDYYGIPSQSVSAKSTWLDKQLSARKSYAYGTQHDYLDNQDVIGWTREGDSAHAGSGLATVMSDGPGGSKTMYVGTAHAGQVFKDITGNRTDTVTINSAGNGTFPCNGGSVSIWVKQ

SEQ ID NO: 43614 - protein, 490 aa, Penicillium oxalicum 114-2
LGLAALFLAQTVAGLTAAQWRSQSIYFLMTDRFGRTDNSVTASCNTNDRVYCGGTWQGIINQLDYIQGMGFTAIWITPVTEQLPQDTGDGEAYHGYWQQEIYNVNNNYGTAADLKALSQALHSRGMYLMVDVVANHMGYAGAGNTVDYSVFKPFSSSSYFHPYCLISDYSNQTNVEDCWLGDTTVSLPDLDTTLSSVQTIWYNWVSDLVSNYSIDGLRIDTVKHVEKSFWPGYQSAAGVYCVGEVFSGDPAYTCPYQNYLDGVLNYPIYYQLLGAFKSTSGSISSLYNMINSVASDCADPTLLGNFIENHDNPRFASYTSDYSQAKNVISFIFLSDGIPIVYAGQEQHYSGGNDPANREATWLSGYSKNAQLYQHIASTNKIRSLAISKDANYITSKNNAFYTDSNTIAMKKGSSGSQVVTVLSNRGSSGSSYTLSLSGSGYEAGTKLVEMYTCTAVTVDSNGNIAVSMTSGLPRVFMLASSACSLCSSA

SEQ ID NO: 43615 - protein, 479 aa, unidentified
NGTLMQYFEWYTPNDGQHWKRLQNDAEHLSDIGITAVWIPPAYKAISQADVGYGAYDLYDLGEFHQKGTVRTKYGTKGELQSAIKSLHSRDINVYGDVVINHKAGADATEDVTAVEVDPADRNRVISGEHLIKAWTHFHFPGRGSTYSDFKWYWYHFDGTDWDESRKLNRIYKFQGKTWDWEVSNEFGNYDYLMYADFDYDHPDVVAEIKRWGTWYANELQLDGFRLDAVKHIKFSFLRDWVNHVREKTGKEMFTVAEYWSNDLGALENYLNKTNFNHSVFDVPLHYQFHAASTQGGGYDMRKLLNGTVVSKHPLKSVTFVDNHDTQPGQSLESTVQTWFKPLAYAFILTRESGYPQVFYGDMYGTKGDSQREIPALKHKIEPILKARKQYAYGAQHDYFDHHDIVGWTREGDSSVANSGLAALITDGPGGAKRMYVGRQNAGETWHDITGNRSEPVVINSEGWGEFHVNGGSVSIYVQ

SEQ ID NO: 43616 - protein, 392 aa, Bacillus sp.
NGTMMQYFEWHLPNDGNHWNRLRDDASNLRNRGITAIWIPPAWKGTSQNDVGYGAYDLYDLGEFNQKGTVRTKYGTRSQLESAIHALKNNGVQVYGDVVMNHKGGADATENVLAVEVNPNNRNQEISGDYTIEAYTKFDFPGRGNTYSDFKWRWYHFDGVDWDQSRQFQNRIYKFRGKAWDWEVDSEFGNYDYLMYADYDMDHPEVVNELRRWGEWYTNTLNLDGFRIDAVKHIKFSFTRDWLTHVRNATGKGMFAVAEFWKNDLGALENYLNKTNWNHSVFDVPLHYNLYNASNSRGNYDMAKLLNGTVVQKHPMHAVTFVDNHDSQPGESLESFVQEWFKPLAYALILTREQGYPSVFYGDYYGIPTHSVPAMKAKIDPILEARQNFAYG

SEQ ID NO: 43617 - protein, 477 aa, Neosartorya
TPAEWRSQSIYFLLTDRFGREDNSTTAACDVTQRLYCGGSWQGIINHLDYIQGMGFTAIWITPVTEQFYEDTGDGTSYHGYWQQNIYEVNYNYGTAQDLKNLADALHARGMYLMVDVVANHMGYDGAGNTVDYSVFTPFDSSSYFHPYCLISDYSNQTNVEDCWLGDTTVSLPDLDTTDTTVRTIWYDWVKGLVANYSIDGLRIDTVKHVEKDFWPGYNDAAGVYCVGEVFSGDPTYTCPYQNYLDGVLNYPIYYQLLYAFESTSGSISNLYDMINSVASDCADPTLLGNFIENHDNPRFASYTSDYSQAKNVISFIFFSDGIPIVYAGQEQHYSGGADPANREAVWLSGYSTSATLYSWIASTNRIRKLAISKDAAYITSKNNPFYYDSNTLAMRKGSIAGAQVITVLSNKGSSGSSYTLSLSGTGYSAGASLVEMYTCTTLTVDSSGNLPVPMASGLPRVLVPSSWVSGSGLCGS

SEQ ID NO: 43618 - protein, 480 aa, Synthetic construct
NGTLMQYFEWYLPNDGNHWNRLNSDASNLASKGITAVWIPPAYKGTSQADVGYGAYDLYDLGEFNQKGTVRTKYGTRSQLQAAVTSLKNNGIQVYGDVVINHKAGADATEMVQAVEVNPNNRNQEVTGEYTIEAYTRFDFPGRGNTHSSFKWRWYHFDGVDWDQSRSLNNRIYKFQGHGKAWPWEVDTENGNYDYLMYLDIDMDHPIVVNELRNWGVWYTNTLGLDGLRIDAVKHFKYLFTRDWINHVRSATGKNMFAVYEFWKNDLGAIENNFQKTNWNHSVFDVPLHYNAYNTSKSGGNYDMRNIFNGTVKQRHPSHAVTFVDNTDSQPSEALESQPEEWFKPLAYALTLTREQGYPSVFYGDYYGIPTIGVLAMRSKIDPILEARQKYAYGPQHDYLDHIDVIGWTREGDSSHPKSGLATLITDGPGGSKRMYAGLKNAGETWYDITGNRSDTVKIGSDGWGEFHKNDGSVSIYVQK

SEQ ID NO: 43619 - protein, 480 aa, Synthetic construct
VNGTMMQYFEWDLPNDGTLWTKVKNEATNLFSLGITALWLPPAYKGTSQSDVGYGVYDLYDLGEFNQKGTIRTKYGTKTQYIQAIQAAKAAGMQVYADVVFNHKAGADATEDVTAVEVNPANRNQETSEEYQIKAWTDFRFPGRGNTYSDFKWHWYHFDGADWDESRKISRIFKFRGEGKAWDWEVSSENGNYDYLMYADVDMDHPEVVTELKNWGTWYVNTTNIDGFRLDAVKHIKYSFFPDWLTYVRNQTGKNLFAVGEFWSYDVNKLHNYITKTNGSMSLFDAPLHNNFYTASKSSGYFDMRYLLNNTLMKDQPSLAVTLVDNHDTQPGQSLQSWVEPWFKPLAYAFILTRQEGYPCVFYGDYYGIPKYNIPGLKSKIDPLLIARRDYAYGTQRDYIDHQDIIGWTREGIDTKPNSGLAALITDGPGGSKWMYVGKKHAGKVFYDLTGNRSDTVTINADGWGEFKVNGGSVSIWVAK

SEQ ID NO: 43620 - protein, 480 aa, Bacillus sp.
INETMMQYFEWDLPNDGTLWTKVKNEAANLSSLGITALWLPPAYKGTSQSDVGYGVYDLYDLGEFNQKGTIRTKYGTKTQYIQAIQAAKAAGMQVYADVVFNHKAGADGTEFVDAVEVDPSNRNQETSGTYQIQAWTKFDFPGRGNTYSSFKWRWYHFDGTDWDESRKLNRIYKFRSTGKAWDWEVDTENGNYDYLLFADLDMDHPEVVTELKNWGTWYVNTTNIDGFRLDAVKHIKYQFFPDWLTYVRNQTGKNLFAVGEFWSYDVNKLHNYITKTNGSMSLFDAPLHNNFYTASKSSGYFDMRYLLNNTLMKDQPSLAVTLVDNHDTQPGQSLQSWVEPWFKPLAYAFILTRQEGYPCVFYGDYYGIPKYNIPGLKSKIDPLLIARRDYAYGPQHDYIDHPDVIGWTREGDSSAAKSGLAALITDGPGGSKRMYAGLKNAGETWYDITGNRSDTVKIGSDGWGEFHVNDGSVSIYVQK

SEQ ID NO: 43621 - protein, 482 aa, Geobacillus stearothermophilus
NGTLMQYFEWYXPXDGXXWXKLXNDAXXLSXIGITALWIPPAYKGXSXSDXGYGXYDLYDLGEFNQKGTVRTKYGTKAXXXXAIXAXHAXXMQVYADVVXXHKAGADATEXVXAVEVNPAXRNQEXSXXYQIXAWTXFXFPGRGNTYSXFKWXWYHFDGXDWDESRKISRIFKFRGXGKAWDWEVXSENGNYDYLMYADLDXDHPDVVXEXKXWGXWYXNXXXIDGFRIDAXKHIKFSFXXDWLXXVRXXTGKXLFTVAEYWXXXXXKLXNYIXKTXXXXSLFDXPLHXXXXXASXXGGAFDMRXLLXXTLMXXXPXXAVTFVDNHDTXPGQALXSXVXXWFKPLAYAFILTRXXGYPXVFYGDXYGXXXXXPKEIPSLKXXIDPILXARKDYAYGXQHDYIDHXDIIGWTREGXSXXXXSGLAALITDGPGGSKXMYXGXXXAGXXFYDITGNRSDTVXIXSDGWGEFXVNXGSVSIWVXK

SEQ ID NO: 43622 - protein, 482 aa, Synthetic construct
NGTLMQYFEWYXPXDGXXWXKLXNDAXXLSXIGITALWIPPAYKGXSXSDXGYGXYDLYDLGEFNQKGTVRTKYGTKAXXXXAIXAXHAXXMQVYADVVXXHKAGADATEXVXAVEVNPAXRNQEXSXXYQIXAWTXFXFPGRGNTYSXFKWXWYHFDGXDWDESRKISRIFKFRGXGKAWDWEVXSENGNYDYLMYADLDXDHPDVVXEXKXWGXWYXNXXXIDGFRIDAXKHIKFSFXXDWLXXVRXXTGKXLFTVAEYWXXXXXKLXNYIXKTXXXXSLFDXPLHXXXXXASXXGGAFDMRXLLXXTLMXXXPXXAVTFVDNHDTXPGQALXSXVXXWFKPLAYAFILTRXXGYPXVFYGDXYGXXXXXPKEIPSLKXXIDPILXARKDYAYGXQHDYIDHXDIIGWTREGXSXXXXSGLAALITDGPGGSKXMYXGXXXAGXXFYDITGNRSDTVXIXSDGWGEFXVNKGSVSIWVXK

SEQ ID NO: 43623 - protein, 482 aa, Geobacillus stearothermophilus
NGTLMQYFEWYLPDDGTLWTKLANDANNLSSIGITALWIPPAYKGTSRSDVGYGVYDLYDLGEFNQKGTVRTKYGTKAQYLQAIQAAHAAGMQVYADVVFDHKAGADATEWVDAVEVNPADRNQEISGTYQIQAWTKFDFPGRGNTYSSFKWRWYHFDGVDWDESRKISRIFKFRGIGKAWDWEVDSENGNYDYLMYADLDMDHPDVVTELKNWGKWYVNTTNIDGFRIDAVKHIKFSFFPDWLSYVRSQTGKPLFTVAEYWSYDINKLHNYITKTNGTMSLFDAPLHNKFYTASKSGGAFDMRTLLTNTLMKDQPTLAVTFVDNHDTEPGQALQSWVDPWFKPLAYAFILTRQEGYPCVFYGDYYGIPQYNPKEIPSLKSKIDPILIARKDYAYGTQHDYIDHSDIIGWTREGVSEKPGSGLAALITDGPGGSKWMYVGKQHAGKVFYDITGNRSDTVTINSDGWGEFKVNGGSVSIWVPK

SEQ ID NO: 43624 - protein, 475 aa, Bacillus sp.
NGTIMQYFEWNVPNDGQHWNRLHNNAQNLKNAGITAIWIPPAWKGTSQSDTGYGAYDLYDLGEFNQKGTVRTKYGTKAELERAIRSLKANGIQVYGDVVMNHKAGADFTEWVQAVEVNPQNRNQEVSGTYQIEAWTGFNFPGRGNQHSSFKWRWYHFDGTDWDESRKLNRIYKFRGKAWDWEVDTEFGNYDYLMYADLDMDHPEVINELNRWGVWYANTLNLDGFRLDAVKHIKFSFMRDWLGHVRGQTGKNLFAVAEYWKNDLGALENYLSKTNWTMSAFDVPLHYNLYQASNSSGNYDMRNLLNGTLVQRHPSHAVTFVDNHDTQPGEALESFVQGWFKPLAYATILTREQGYPQVFYGDYYGIPSDGVPSYRQQIDPLLAARQQYAYGTQHDYLDNQDVIGWTREGDSAHAGSGLATVMSDGPGGSKTMYVGTAHAGQVFKDITGNRTDTVTINSAGNGTFPCNKGSVSIWV

SEQ ID NO: 43625 - protein, 475 aa, Bacillus sp.
NGTIMQYFEWNVPNDGQHWNRLHNNAQNLKNAGITAIWIPPAWKGTSQSDTGYGAYDLYDLGEFNQKGTVRTKYGTKAELERAIRSLKANGIQVYGDVVMNHKAGADFTERVQAVEVNPQNRNQEVSGTYQIEAWTGFNFPGRGNQHSSFKWRWYHFDGTDWDESRKLNRIYKFRGKAWDWEVDTEFGNYDYLMYADLDMDHPEVINELNRWGVWYANTLNLDGFRLDAVKHIKFSFMRDWLGHVRGQTGKNLFAVAEYWKNDLGALENYLSKTNWTMSAFDVPLHNNLYQASNSSGNYDMRNLLNGTLVQRHPSHAVTFVDNHDTQPGEALESFVQGWFKPLAYATILTREQGYPQVFYGDYYGIPSDGVPSYRQQIDPLLAARQQYAYGTQHDYLDNQDVIGWTREGDSAHAGSGLATVMSDGPGGSKTMYVGTAHAGQVFKDITGNRTDTVTINSAGNGTFPCNKGSVSIWV

SEQ ID NO: 43626 - protein, 475 aa, Bacillus sp.
NGTIMQYFEWNVPNDGQHWNRLHNNAQNLKNAGITAIWIPPAWKGTSQSDTGYGAYDLYDLGEFNQKGTVRTKYGTKAELERAIRSLKANGIQVYGDVVMNHKAGADFTERVQAVEVNPQNRNQEVSGTYQIEAWTGFNFPGRGNQHSSFKWRWYHFDGTDWDESRKLNRIYKFRGKAWDWEVDTEFGNYDYLMYADLDMDHPEVINELNRWGVWYVNTLNLDGFRLDAVKHIKFSFMRDWLGHVRGQTGKNLFAVAEYWKNDLGALENYLSKTNWTMSAFDVPLHYNLYQASNSSGNYDMRNLLNGTLVQRHPSHAVTFVDNHDTQPGEALESFVQGWFKPLAYATILTREQGYPQVFYGDYYGIPSDGVPSYRQQIDPLLAARQQYAYGTQHDYLDNQDVIGWTREGDSAHAGSGLATVMSDGPGGSKTMYVGTAHAGQVFKDITGNRTDTVTINSAGNGTFPCNKGSVSIWV

SEQ ID NO: 43627 - protein, 475 aa, Bacillus sp.
NGTIMQYFEWNVPNDGQHWNRLHNNAQNLKNAGITAIWIPPAWKGTSQSDTGYGAYDLYDLGEFNQKGTVRTKYGTKAELERAIRSLKANGIQVYGDVVMNHKAGADFTERVQAVEVNPQNRNQEVSGTYQIEAWTGFNFPGRGNQHSSFKWRWYHFDGTDWDESRKLNRIYKFRGKAWDWEVDTEFGNYDYLMYADLDMDHPEVINELNRWGVWYANTLNLDGFRLDAVKHIKFSFMRDWLGHVRSQTGKNLFAVAEYWKNDLGALENYLSKTNWTMSAFDVPLHYNLYQASNSSGNYDMRNLLNGTLVQRHPSHAVTFVDNHDTQPGEALESFVQGWFKPLAYATILTREQGYPQVFYGDYYGIPSDGVPSYRQQIDPLLAARQQYAYGTQHDYLDNQDVIGWTREGDSAHAGSGLATVMSDGPGGSKTMYVGTAHAGQVFKDITGNRTDTVTINSAGNGTFPCNKGSVSIWV

SEQ ID NO: 43628 - protein, 475 aa, Bacillus sp.
NGTIMQYFEWNVPNDGQHWNRLHNNAQNLKNAGITAIWIPPAWKGTSQSDTGYGAYDLYDLGEFNQKGTVRTKYGTKAELERAIRSLKANGIQVYGDVVMNHKAGADFTERVQAVEVNPQNRNQEVSGTYQIEAWTGFNFPGRGNQHSSFKWRWYHFDGTDWDESRKLNRIYKFRGKAWDWEVDTEFGNYDYLMYADLDMDHPEVINELNRWGVWYANTLNLDGFRLDAVKHIKFSFMRDWLGHVRGQTGKNLFAVAEYWKNDLGALENYLSKTNWTMSAFDAPLHYNLYQASNSSGNYDMRNLLNGTLVQRHPSHAVTFVDNHDTQPGEALESFVQGWFKPLAYATILTREQGYPQVFYGDYYGIPSDGVPSYRQQIDPLLAARQQYAYGTQHDYLDNQDVIGWTREGDSAHAGSGLATVMSDGPGGSKTMYVGTAHAGQVFKDITGNRTDTVTINSAGNGTFPCNKGSVSIWV

SEQ ID NO: 43629 - protein, 475 aa, Bacillus sp.
NGTIMQYFEWNVPNDGQHWNRLHNNAQNLKNAGITAIWIPPAWKGTSQSDVGYGAYDLYDLGEFNQKGTVRTKYGTKAELERAIRSLKANGIQVYGDVVMNHKAGADFTERVQAVEVNPQNRNQEVSGTYQIEAWTGFNFPGRGNQHSSFKWRWYHFDGTDWDESRKLNRIYKFRGKAWDWEVDTEFGNYDYLMYADLDMDHPEVINELNRWGVWYANTLNLDGFRLDAVKHIKFSFMRDWLGHVRGQTGKNLFAVAEYWKNDLGALENYLSKTNWTMSAFDVPLHYNLYQASNSSGNYDMRNLLNGTLVQRHPSHAVTFVDNHDTQPGEALESFVQGWFKPLAYATILTREQGYPQVFYGDYYGIPSDGVPSYRQQIDPLLAARQQYAYGTQHDYLDNQDVIGWTREGDSAHAGSGLATVMSDGPGGSKTMYVGTAHAGQVFKDITGNRTDTVTINSAGNGTFPCNKGSVSIWV

SEQ ID NO: 43630 - protein, 475 aa, Bacillus sp.
NGTIMQYFEWNVPNDGQHWNRLHNNAQNLKNAGITAIWIPPAWKGTSQSDTGYGAYDLYDLGEFNQKGTVRTKYGTKAELERAIRSLKANGIQVYGDVVMNHKGGADFTERVQAVEVNPQNRNQEVSGTYQIEAWTGFNFPGRGNQHSSFKWRWYHFDGTDWDESRKLNRIYKFRGKAWDWEVDTEFGNYDYLMYADLDMDHPEVINELNRWGVWYANTLNLDGFRLDAVKHIKFSFMRDWLGHVRGQTGKNLFAVAEYWKNDLGALENYLSKTNWTMSAFDVPLHYNLYQASNSSGNYDMRNLLNGTLVQRHPSHAVTFVDNHDTQPGEALESFVQGWFKPLAYATILTREQGYPQVFYGDYYGIPSDGVPSYRQQIDPLLAARQQYAYGTQHDYLDNQDVIGWTREGDSAHAGSGLATVMSDGPGGSKTMYVGTAHAGQVFKDITGNRTDTVTINSAGNGTFPCNKGSVSIWV

SEQ ID NO: 43631 - protein, 475 aa, Bacillus sp.
NGTIMQYFEWNVPNDGQHWNRLHNNAQNLKNAGITAIWIPPAWKGTSQSDTGYGAYDLYDLGEFNQKGTVRTKYGTKAELERAIRSLKANGIQVYGDVVMNHKAGADFTERVQAVEVNPQNRNQEVSGTYQIEAWTGFNFPGRGNQHSSFKWRWYHFDGTDWDESRKLNRIYKFRGKAWDWEVDTEFGNYDYLMYADLDMDHPEVINELNRWGVWYANTLNLDGFRLDAVKHIKFSFMRDWLGHVRGQTGKNLFAVAEYWKNDLGALENYLSKTNWTMSAFDVPLHYNLYQASNSSGNYDMRNLLNGTLVQRHPSHAVTFVDNHDTQPGEALESFVQGWFKPLAYATILTREQGYPQVFYGDYYGIPSDGVPSYRQQIDPLLAARQQYAYGTQHDYLDNQDVIGWTREGDSAHAGSGLATVMSDGPGGSKTMYVGTAHAGQVFKDITGNRTDTVTINSAGNGTFPCNGGSVSIWV

SEQ ID NO: 43632 - protein, 475 aa, Bacillus sp.
NGTIMQYFEWNVPNDGQHWNRLHNNAQNLKNAGITAIWIPPAWKGTSQNDVGYGAYDLYDLGEFNQKGTVRTKYGTKAELERAIRSLKANGIQVYGDVVMNHKGGADFTERVQAVEVNPQNRNQEVSGTYQIEAWTGFNFPGRGNQHSSFKWRWYHFDGTDWDESRKLNRIYKFRGKAWDWEVDTEFGNYDYLMYADVDMDHPEVINELNRWGVWYANTLNLDGFRLDAVKHIKFSFMRDWLGHVRGQTGKNLFAVAEYWKNDLGALENYLSKTNWTMSAFDVPLHYNLYQASNSSGNYDMRNLLNGTLVQRHPSHAVTFVDNHDTQPGEALESFVQGWFKPLAYATILTREQGYPQVFYGDYYGIPSDGVPSYRQQIDPLLKARQQYAYGTQHDYLDNQDVIGWTREGDSAHAGSGLATVMSDGPGGSKTMYVGTAHAGQVFKDITGNRTDTVTINSAGNGTFPCNGGSVSIWV

SEQ ID NO: 43633 - protein, 479 aa, Bacillus licheniformis
NGTLMQYFEWYMPNDGQHWKRLQNDSAYLAEHGITAVWIPPAYKGTSQADVGYGAYDLYDLGEFHQKGTVRTKYGTKGELQSAIKSLHSRDINVYGDVVINHKGGADATEDVTAVEVDPADRNRVISGEHLIKAWTHFHFPGRGSTYSDFKWHWYHFDGTDWDESRKLNRIYKFQGKAWDWEVSNENGNYDYLMLADIDYDHPDVAAEIKRWGTWYANELQLDGFRLDAVKHIKFSFLRDWVNHVRAKTGKEMFTVAEYWQNDLGALENYLNKTNFNHSVFDVPLHYQFHAASTQGGGYDMRKLLNGTVVSKHPLKSVTFVDNHDTQPGQSLESTVQTWFKPLAYAFILTRESGYPQVFYGDMYGTKGDSQREIPALKHKIEPILKARKQYAYGAQHDYFDHHDIVGWTREGDTSVANSGLAALITDGPGGQSECMSAGKTRETWHDITGNRSEPVVINSEGWESFTVNGGSVSIYVQR

SEQ ID NO: 43634 - protein, 478 aa, Cytophaga sp.
NGTMMQYFEWYLPNDGNHWNRLNSDASNLKSKGITAVWIPPAWKGASQNDVGYGAYDLYDLGEFNQKGTVRTKYGTRSQLQAAVTSLKNNGIQVYGDVVMNHKGGADATEMVRAVEVNPNNRNQEVTGEYTIEAWTRFDFPGRGNTHSSFKWRWYHFDGVDWDQSRRLNNRIYKFRGKAWDWEVDTENGNYDYLMYADIDMDHPEVVNELRNWGVWYTNTLGLDGFRIDAVKHIKYSFTRDWINHVRSATGKNMFAVAEFWKNDLGAIENYLQKTNWNHSVFDVPLHYNLYNASKSGGNYDMRNIFNGTVVQRHPSHAVTFVDNHDSQPEEALESFVEEWFKPLAYALTLTREQGYPSVFYGDYYGIPTHGVPAMRSKIDPILEARQKYAYGPQRDYIDHPDVIGWTREGDSTKAKSGLATVISDGPGGSKRMFVGRSNAGEIWYDLTGNRTDKITIGADGYGTFPVNGGSVSIWVQQ

SEQ ID NO: 43635 - protein, 456 aa, Jeotgalibacillus campisalis
NNTMMQYFEWYLPNDGLHWNRLTNDASNLKSLGVTTVWIPPAYKGTSQNDVGYGAYDLYDLGEFNQKGTVRTKYGTRGQLQTAINTLKNQGIGTYGDVVMNHKGGADFTESVQAVEVNPNNRSQETSGEYTISAWTGFNFAGRNNLHSAFKWRWYHFDGTDWDQSRSLKRIYKFRGSGKSWDTEVSNEFGNYDYLMYADVDFDHPEVKAELKNWGKWYVQSLNLDGFRLDAVKHIKHDYIPEWLADVRRTTGKELFTVAEYWQNDLGAINNYLAKTSYSHSVFDVPLHYNFQRAANSGGNFDMRTIFNGSVVQQHPTLAVTIVDNHDSQPGQSLESTVDAWFKPLAYAMIMTREQGYPNLFYGDFYGTKGSSNREIPNLSSKLTPILKARKDMAYGTQHDYLNHQDVIGWTREGVTDRSKSGLATILSDGPGGNKWMYVGKRNAGETWRDKTGNSS

SEQ ID NO: 43636 - protein, 456 aa, Jeotgalibacillus campisalis
NMTMMQYFEWYLPNDGLHWNRLTNDASNLKSLGVTTVWIPPAYKGTSQNDVGYGAYDLYDLGEFNQKGTVRTKYGTRGQLQTAINTLKNQGIGTYGDVVMNHKGGADFTESVQAVEVNPNNRSQETSGEYTISAWTGFNFAGRNNLHSAFKWRWYHFDGTDWDQSRSLSRIYKFRGSGKSWDTEVSNEFGNYDYLMYADVDFDHPEVKAELKNWGKWYVQSLNLDGFRLDAVKHIKHDYIPEWLADVRRTTGKELFTVAEYWQNDLGAINNYLAKTDYSHSVFDVPLHYNFQRAANSGGNFDMRTIFNGSVVQQHPTLAVTIVDNHDSQPGQSLESTVDAWFKPLAYAMIMTREQGYPNLFYGDFYGTKGSSNREIPNLSSKLTPILKARKDMAYGTQHDYLNHQDVIGWTREGVTDRSKSGLATILSDGPGGNKWMYVGKRNAGETWRDKTGNSS

SEQ ID NO: 43637 - protein, 456 aa, Jeotgalibacillus campisalis
NMTMMQYFEWYLPNDGLHWNRLTNDASNLKALGVTTVWIPPAYKGTSQNDVGYGAYDLYDLGEFNQKGTVRTKYGTRGQLQTAINTLKNQGIGTYGDVVMNHKGGADFTESVQAVEVNPNNRSQETSGEYTISAWTGFNFAGRNNLHSAFKWRWYHFDGTDWDQSRSLKRIYKFRGSGKSWDTEVSNEFGNYDYLMYADVDFDHPEVKAELKNWGKWYVQSLNLDGFRLDAVKHIKHDYIGEWLADVRRTTGKELFTVAEYWQNDLGAINNYLAKTSYSHSVFDVPLHYNFQRAANSGGNFDMRTIFNGSVVQQHPTLAVTIVDNHDSQPGQSLESTVDAWFKPLAYAMIMTREQGYPNLFYGDFYGTKGSSNREIPNLSSKLTPILKARKDMAYGTQHDYLNHQDVIGWTREGVTDRSKSGLATILSDGPGGNKWMYVGKRNAGETWRDKTGNSS

SEQ ID NO: 43638 - protein, 456 aa, Jeotgalibacillus campisalis
NSTMMQYFEWYLPNDGLHWNRLTNDASNLKALGVTTVWIPPAYKGTSQNDVGYGAYDLYDLGEFNQKGTVRTKYGTRGQLQTAINTLKNQGIGTYGDVVMNHKGGADFTESVQAVEVNPNNRSQETSGEYTISAWTGFNFAGRNNLHSAFKWRWYHFDGTDWDQSRSLSRIYKFRGSGKSWDTEVSNEFGNYDYLMYADVDFDHPEVKAELKNWGKWYVQSLNLDGFRLDAVKHIKHDYIPEWLADVRRTTGKELFTVAEYWQNDLGAINNYLAKTKYSHSVFDVPLHYNFQRAANSGGNFDMRTIFNGSVVQQHPTLAVTIVDNHDSQPGQSLESTVDAWFKPLAYAMIMTREQGYPNLFYGDFYGTKGSSNREIPNLSSKLTPILKARKDMAYGTQHDYLNHQDVIGWTREGVTDRSKSGLATILSDGPGGNKWMYVGKRNAGETWRDKTGNSS

SEQ ID NO: 43639 - protein, 456 aa, Jeotgalibacillus campisalis
NPTMMQYFEWYLPNDGLHWNRLTNDASNLKALGVTTVWIPPAYKGTSQNDVGYGAYDLYDLGEFNQKGTVRTKYGTRGQLQTAINTLKNQGIGTYGDVVMNHKGGADFTESVQAVEVNPNNRSQETSGEYTISAWTGFNFAGRNNLHSAFKWRWYHFDGTDWDQSRSLKRIYKFRGSGKSWDTEVSNEFGNYDYLMYADVDFDHPEVKAELKNWGKWYVQSLNLDGFRLDAVKHIKHDYIGEWLADVRRTTGKELFTVAEYWQNDLGAINNYLAKTSYSHSVFDVPLHYNFQRAANSGGNFDMRTIFNGSVVQQHPTLAVTIVDNHDSQPGQSLESTVDAWFKPLAYAMIMTREQGYPNLFYGDFYGTKGSSNREIPNLSSKLTPILKARKDMAYGTQHDYLNHQDVIGWTREGVTDRSKSGLATILSDGPGGNKWMYVGKRNAGETWRDKTGNSS

SEQ ID NO: 43640 - protein, 480 aa, Synthetic construct
NGTMMQYFEWDLPNDGTLWTKVKNEAANLSSLGITALWLPPAYKGTSQSDVGYGVYDLYDLGEFNQKGTVRTKYGTKDQYIQAIQAAKAAGMQVYADVVFNHKGGADATEMVRAVEVNPNNRNQEVTGEYTIEAWTRFDFPGRGNTHSSFKWRWYHFDGVDWDQSRRLNNRIYKFRGHGKAWDWEVDTENGNYDYLMYADIDMDHPEVVTELKNWGKWYVNTTNVDGFRLDAVKHIKYSFFPDWLASVRSQTGKNLFAVGEFWSYDVNKLHNYITKTNGTMSLFDAPLHNNFYTASKSSGYFDMRYLLNNTLMKDQPVLAVTLVDNHDTQPGQSLQSWVEPWFKPLAYAFILTRQEGYPCVFYGDYYGIPKYNIPGLKSKIDPLLIARRDYAYGTQRDYIDHQDIIGWTREGIDSKPNSGLAALITDGPGGSKWMYVGKKHAGKVFYDLTGNRSDTVTINADGWGEFKVNGGSVSIWVAK

SEQ ID NO: 43641 - protein, 480 aa, Bacillus sp.
NGTMMQYFEWYLPDDGTLWTKLANDANNLSSLGISALWIPPAWKGTSRSDVGYGVYDLYDLGEFNQKGTIRTKYGTKAQYLQAINAAHAAGIQVYADVVFDHKGGADATEWVDAVEVNPSDRNQEISGTYQIQAWTKFDFPGRGNTHSSFKWRWYHFDGVDWDESRKLSNRIYKFRGIGKAWDWEVDTENGNYDYLMYADIDMDHPEVVTELKNWGKWYVNTTNIDGFRIDAVKHIKFSFFPDWISHVRSQTGKPLFTVAEFWSYDINKIHNYITKTNGTMSLFDAPLHNKFYTASKSGGAFDMRTIMTNTLMKDQPTLAVTFVDNHDSEPGQALQSFVDPWFKPLAYAFILTRQEGYPCVFYGDYYGIPQHNIPALKSKIDPILIARRDYAYGTQHDYLDHSDIIGWTREGVTEKPGSGLAAIISDGPGGSKWMFVGKNHAGKVFYDITGNRADTVTINADGWGEFKVNGGSVSIWVPK

SEQ ID NO: 43642 - protein, 480 aa, Synthetic construct
NGTMMQYFEWDLPNDGTLWTKVKNEASSLSALGITALWLPPAYKGTSQADVGYGVYDLYDLGEFNQKGTIRTKYGTKTQYLQAIQAAKSAGMQVYADVVFNHKGGADATEMVRAVEVNPNNRNQEVTGEYTIEAWTRFDFPGRGNTHSSFKWRWYHFDGVDWDQSRRLNNRIYKFRGHGKAWDWEVDTENGNYDYLMYADIDMDHPEVVAELKNWGKWYVNTTNVDGFRLDAVKHIKYSFFPDWLSYVRNQTGKNLFAVGEFWGYDVNKLHNYITKTNGAMSLFDAPLHNNFYIASKSSGYFDMRYLLNNTLMKDQPALAVTLVDNHDTQPGQSLQSWVEPWFKPLAYAFILTRQEGYPCVFYGDYYGIPKYNIPGLKSKIDPLLIARRDYAYGTQRDYIDHQDIIGWTREGIDAKPNSGLAALITDGPGGSKWMYVGKRHAGKVFYDLTGNRSDTVTINADGWGEFKVNGGSVSIWVAK

SEQ ID NO: 43643 - protein, 483 aa, Synthetic construct
NGTLMQYFEWYMPNDGQHWKRLQNDSAYLAEHGITAVWIPPAYKGTSQADVGYGAYDLYDLGEFHQKGTVRTKYGTKGELQSAIKSLHSRDINVYGDVVINHRMGADATETISAVEVNPSNRNQVTSGAYNISAWTDFEFPGRGNTYSSFKWHSYYFDGVDWDQSRQLSGKIYQIQGTGKAWDWEVDSENGNYDYLMGADIDYDHPDVAAEIKRWGTWYANELQLDGFRLDAVKHIKFSFLRDWVNHVREKTGKEMFTVAEYWSYDLGALENYLNKTNFNHSVFDVPLHYQFHAASTQGGGYDMRKLLNGTVVSKHPLKSVTFVDNHDTQPGQSLESTVQTWFKPLAYAFILTRESGYPQVFYGDMYGTKGDSQREIPALKHKIEPILKARKQYAYGAQHDYFDHHDIVGWTREGDSSVANSGLAALITDGPGGAKRMYVGRQNAGETWHDITGNRSEPVVINSAGWGEFHVNGGSVSIYVQR

SEQ ID NO: 43644 - protein, 483 aa, Bacillus sp. SG1-1
TNGTLMQYFEWYLPNDGEHWNRLNNDAAHLNDIGISAVWIPPAYKGTSQNDVGYGAYDLYDLGEFYQKGTTRTKYGTKQQLQNAISSLHQNGLQVYGDVVMNHKGGADYTQSVTAVEVDPNNRNYETSGDYQIEAWTGFDFPGRNNVHSNFKWQWYHFDGTDWDESRKLSRVYKFRGTGKAWDWEVASEKGNYDYLMYADVDFDHPDVQQEYKNWGTWYANELNLDGFRLDAVKHIKHSYLQDWVSTVRSNTGKELFTVAEYWQNDLSAIENYLSKTGWTHSAFDVPLHYNFHYASNSGGNYDMRNILNGTLVASQPTKAVTIVENHDSQPGQALESTVQPWFKPLAYAFILTRSQGYPTLFYGDYYGTKGNTSYEVPALQSELEPILKARKNYAYGTQHDYLDHWDIIGWTREGNTTRSKSGLATLITDGPGGNKWMYVGKRNAGETWVDTTGNNSTQVVINNDGWGNFHVNGGSVSIYTQQ

SEQ ID NO: 43645 - protein, 480 aa, Synthetic construct
NGTMMQYFEWDLPNDGTLWTKVKNEAANLSSLGITALWLPPAYKGTSQSDVGYGVYDLYDLGEFNQKGTIRTKYGTKTQYIQAIQAAKAAGMQVYADVVFNHKGGADATEMVRAVEVNPNNRNQEVTGEYTIEAWTRFDFPGRGNTHSSFKWRWYHFDGVDWDQSRRLNNRIYKFRGHGKAWDWEVDTENGNYDYLMYADIDMDHPEVVAELKNWGKWYVNTTNVDGFRLDAVKHIKYSFFPDWLSYVRNQTGKNLFAVGEFWSYDVNKLHNYITKTNGTMSLFDAPLHNNFYIASKSSGYFDMRYLLNNTLMKDQPALAVTLVDNHDTQPGQSLQSWVEPWFKPLAYAFILTRQEGYPCVFYGDYYGIPKYNIPGLKSKIDPLLIARRDYAYGTQRDYIDHPDIIGWTREGIDAKPNSGLAALITDGPGGSKWMYVGKKHAGKVFYDLTGNRSDTVTINADGWGQFKVNGGSVSIWVAK

SEQ ID NO: 43646 - protein, 483 aa, Synthetic construct
TNGTMMQYFEWYLPNDGNHWTRLQNDAANLSSKGVTAVWIPPAYKGTSQNDVGYGAYDLYDLGEFNQKGTVRTKYGTKAQLKSAIAELHKQNIHVYGDVVMNHKGGADFTETVTAVEVDPNNRNRETSGDYQISAWTGFTFPGRGNTYSPFKWNWYHFDGTDWDESRKINRIYKFRGTGKAWDWEVSSENGNYDYLMYADIDYEHPDVINEMKKWGTWYAKELNLDGFTLDAVKHIKHDYLRDWVTHVRNQTGKELFTVAEYWQNDIGQLNNYLAKTNYNQSVFDAPLHYHFHADSSYLGNYDMRNILKGTVMESNPRLAVTLVENHDSQPGQSLESVVSTWFKPLAYAFILTRAEGYPSVFYGDYYGTKGNSNYEIPSLKTQLDPILTARKNYAYGLQRDYIDHWDIIGWTREGEAARDKSGLATLITDGPGGYKWMEVGKQNAGEVWYDITGNRKETVTINNDGWGQFYVNGGSVSIYVQK

SEQ ID NO: 43647 - protein, 483 aa, Synthetic construct
TNGTMMQYFEWYLPNDGNHWTRLQNDAANLSSKGVTAVWIPPAYKGTSQNDVGYGAYDLYDLGEFNQKGTVRTKYGTKSFGNDYIAELHKQNIHVYGDVVMNHKGGADFTETVTAVEVDPNNRNRETSGDYQISAWTGFTFPGRGNTYSPFKWNWYHFDGTDWDESRKINRIYKFRGTGKAWDWEVSSENGNYDYLMYADIDYEHPDVINEMKKWGTWYAKELNLDGFTLDAVKHIKHDYLRDWVTHVRNQTGKELFTVAEYWQNDIGQLNNYLAKTNYNQSVFDAPLHYHFHYASNSNGNYDMRNILKGTVMESNPRLAVTLVENHDSQPGQSLESVVSTWFKPLAYAFILTRAEGYPSVFYGDYYGTKGNSNYEIPSLKTQLDPILTARKNYAYGLQRDYIDHWDIIGWTREGEAARDKSGLATLITDGPGGYKWMEVGKQNAGEVWYDITGNRKETVTINNDGWGQFYVNGGSVSIYVQK

SEQ ID NO: 43648 - protein, 483 aa, Synthetic construct
NGTLMQYFEWYTPNDGQHWKRLQNDAEHLSDIGITAVWIPPAYKGLSQSDNGYGPYDLYDLGEFQQKGTVRTKYGTKSELQDAIGSLHSRNVQVYGDVVLNHKGGADATEMVRAVEVNPNNRNQEVSGEYTIEAWTKFDFPGRGNTHSNFKWRWYHFDGVDWDQSRKLNNRIYKFRGDGKGWDWEVDTENGNYDYLMYADIDYDHPDVVAETKKWGIWYANELSLDGFRIDAAKHIKFSFLRDWVQAVRQATGKEMFTVAEYWQNNAGKLENYLNKTSFNQSVFDVPLHFNLQAASSQGGGYDMRRLLDGTVVSRHPEKAVTFVENHDTQPGQSLESTVQTWFKPLAYAFILTRESGYPQVFYGDMYGTKGTSPKEIPSLKDNIEPILKARKEYAYGPQHDYIDHPDVIGWTREGDSSAAKSGLAALITDGPGGSKRMYAGLKNAGETWYDITGNRSDTVKIGSDGWGEFHVNDGSVSIYVQK

SEQ ID NO: 43649 - protein, 479 aa, Synthetic construct
NGTMMQYFEWYLPDDGTLWTKVANEANNLSSLGITALWLPPAYKGTSRSDVGYGVYDLYDLGEFNQKGAVRTKYGTKAQYLQAIQAAHAAGMQVYADVVFNHKAGADATEDVTAVEVNPANRNQETSEEYQIKAWTDFRFPGRGNTYSDFKWHWYHFDGADWDESRKISRIFKFRGEGKAWDWEVSSENGNYDYLMYADVDMDHPEVVTELKNWGKWYVNTTNIDGFRLDAVKHIKFSFFPDWLSYVRSQTGKPLFTVGEYWSYDINKLHNYIMKTNGTMSLFDAPLHNKFYTASKSGGTFDMRTLMTNTLMKDQPTLAVTFVDNHDTEPGQALQSWVDPWFKPLAYAFILTRQEGYPCVFYGDYYGIPQYNIPSLKSKIDPLLIARRDYAYGTQHDYLDHSDIIGWTREGVTEKPGSGLAALITDGPGGSKWMYVGKQHAGKVFYDLTGNRSDTVTINSDGWGEFKVNGGSVSVWVPR

SEQ ID NO: 43650 - protein, 483 aa, Synthetic construct
AATNGTMMQYFEWYVPNDGQQWNRLRTDAPYLSSVGITAVWTPPAYKGTSQADVGYGPYDLYDLGEFNQKGTVRTKYGTKGELKSAVNTLHSNGIQVYGDVVMNHKAGADSTEWVDAVEVNPSNRNQETSGTYQIQAWTKFDFPGRGNTYSSFKWRWYHFDGTDWDESRKLNRIYKFRGTGKAWDWEVDTENGNYDYLMFADLDYDHPDVVNEMKKWGVWYANEVGLDGYRLDAVKHIKFSFLKDWVDNARAATGKEMFTVGEYWQNDLGALNNYLAKVNYNQSLFDAPLHYNFYAASTGGGYYDMRNILNNTLVASNPTKAVTLVENHDTQPGQSLESTVQPWFKPLAYAFILTRSGGYPSVFYGDMYGTKGTTTREIPALKSKIEPLLKARKDYAYGTQRDYIDNPDVIGWTREGDSTKAKSGLATVITDGPGGSKRMYVGTSNAGEIWYDLTGNRTDKITIGSDGYATFPVNGGSVSVWV

SEQ ID NO: 43651 - protein, 491 aa, Penicillium wotroi
ALALTAVLLTKAVVGLTPAEWRSQSIYFLLTDRFGRTDNSTTATCNVSDRIYCGGSWQGIINHLDYIQDMGFTAIWITPVTEQLSQDTGDGEAYHGYWQQEIYNVNTNYGTASDLLALSEALHSRGMYLMVDVVANHMGYDGAGNTVDYSVFNPFDSSSYFHSYCEISDYSNQTNVEDCWLGDTTVSLPDLDTTLSSVQTIWYDWVAALVSNYSIDGLRVDTVKHVQKSFWPGYNSAAGVYCVGEVFDGDPAYTCPYQDYMDGVLNYPIYYQLLYAFESTSGSISNLYNMISSVASDCSDTTLLGNFIENHDNPRFASYTSDYSQAKNVLSFIFFSDGIPIVYAGQEQHYSGGSDPANREATWLSGYDTSAELYTWIASTNKIRSLAISKDTAYVTSKNDAFYTDSSTIAMKKGSSGSQVITVLSNLGSSGSSYTLTLSGSGYSSGTKLMEMYTCTAVTVDSSGGIAVPMASGLPRVYMLASSACSICSSA

SEQ ID NO: 43652 - protein, 474 aa, Thermoascus
ATPAEWRSQSIYFLLTDRFARTDNSTTAECDTSAVKYCGGTWQGIINQLDYIQGMGFTATWITPVTANLEDGQHGEAYHGYWQQDIYALNPHFGTQDDLRALSDALHDRGMYLMVDVVANHFGYDAPAASVDYSVFNPFNSADYFHTPCDITDYDNQTQVEDCWLYTDAVSLPDVDTTNEEVKEIWYDWVGDLVSNYSIDGLRIDTARHVQKDFWRDYNDAAGVYCVGEVFQGDPDYTCGYQEVMDGVLNYPIYYPLLRAFSSTSGSLSDLANMIETVKYTCSDATLLGNFIENHDNPRFASYTDDISLAKNVAAFVILSDGIPIIYAGQEQHYSGAGDPANREATWLSGYDTTSELYQFIAKTNQIRNHAIWQNETYLSYKNYAIYNENNVLVMRKGFDGSQIITILTNAGADAGSSTVSVPNTGFTAGAAVTEIYTCEDITVSDSGEVSVPMESGLPRVLYPKAKLEGSGIC

SEQ ID NO: 43653 - protein, 479 aa, Jeotgalibacillus campisalis
NNTMMQYFEWYLPNDGLHWNRLTNDASNLKSLGVTTVWIPPAYKGTSQNDVGYGAYDLYDLGEFNQKGTVRTKYGTRGQLQTAINTLKNQGIGTYGDVVMNHKGGADFTESVQAVEVNPNNRSQETSGEYTISAWTGFNFAGRNNLHSAFKWRWYHFDGTDWDQSRSLKRIYKFRGSGKSWDTEVSNEFGNYDYLMYADVDFDHPEVKAELKNWGKWYVQSLNLDGFRLDAVKHIKHDYIPEWLADVRRTTGKELFTVAEYWQNDLGAINNYLAKTSYSHSVFDVPLHYNFQRAANSGGNFDMRTIFNGSVVQQHPTLAVTIVDNHDSQPGQSLESTVDAWFKPLAYAMIMTREQGYPNLFYGDFYGTKGSSNREIPNLSSKLTPILKARKDMAYGTQHDYLNHQDVIGWTREGVTDRSKSGLATILSDGPGGNKWMYVGKRNAGETWRDKTGNSSNAVTINSDGWGQFFVNGGSVSIY

SEQ ID NO: 43654 - protein, 479 aa, Jeotgalibacillus campisalis
NMTMMQYFEWYLPNDGLHWNRLTNDASNLKALGVTTVWIPPAYKGTSQNDVGYGAYDLYDLGEFNQKGTVRTKYGTRGQLQTAINTLKNQGIGTYGDVVMNHKGGADFTESVQAVEVNPNNRSQETSGEYTISAWTGFNFAGRNNLHSAFKWRWYHFDGTDWDQSRSLKRIYKFRGSGKSWDTEVSNEFGNYDYLMYADVDFDHPEVKAELKNWGKWYVQSLNLDGFRLDAVKHIKHDYIGEWLADVRRTTGKELFTVAEYWQNDLGAINNYLAKTSYSHSVFDVPLHYNFQRAANSGGNFDMRTIFNGSVVQQHPTLAVTIVDNHDSQPGQSLESTVDAWFKPLAYAMIMTREQGYPNLFYGDFYGTKGSSNREIPNLSSKLTPILKARKDMAYGTQHDYLNHQDVIGWTREGVTDRSKSGLATILSDGPGGNKWMYVGKRNAGETWRDKTGNSSNAVTINSDGWGQFFVNGGSVSIY

SEQ ID NO: 43655 - protein, 479 aa, Jeotgalibacillus campisalis
NSTMMQYFEWYLPNDGLHWNRLTNDASNLKALGVTTVWIPPAYKGTSQNDVGYGAYDLYDLGEFNQKGTVRTKYGTRGQLQTAINTLKNQGIGTYGDVVMNHKGGADFTESVQAVEVNPNNRSQETSGEYTISAWTGFNFAGRNNLHSAFKWRWYHFDGTDWDQSRSLSRIYKFRGSGKSWDTEVSNEFGNYDYLMYADVDFDHPEVKAELKNWGKWYVQSLNLDGFRLDAVKHIKHDYIPEWLADVRRTTGKELFTVAEYWQNDLGAINNYLAKTKYSHSVFDVPLHYNFQRAANSGGNFDMRTIFNGSVVQQHPTLAVTIVDNHDSQPGQSLESTVDAWFKPLAYAMIMTREQGYPNLFYGDFYGTKGSSNREIPNLSSKLTPILKARKDMAYGTQHDYLNHQDVIGWTREGVTDRSKSGLATILSDGPGGNKWMYVGKRNAGETWRDKTGNSSNAVTINSDGWGQFFVNGGSVSIY

SEQ ID NO: 43656 - protein, 479 aa, Jeotgalibacillus campisalis
NPTMMQYFEWYLPNDGLHWNRLTNDASNLKALGVTTVWIPPAYKGTSQNDVGYGAYDLYDLGEFNQKGTVRTKYGTRGQLQTAINTLKNQGIGTYGDVVMNHKGGADFTESVQAVEVNPNNRSQETSGEYTISAWTGFNFAGRNNLHSAFKWRWYHFDGTDWDQSRSLKRIYKFRGSGKSWDTEVSNEFGNYDYLMYADVDFDHPEVKAELKNWGKWYVQSLNLDGFRLDAVKHIKHDYIGEWLADVRRTTGKELFTVAEYWQNDLGAINNYLAKTSYSHSVFDVPLHYNFQRAANSGGNFDMRTIFNGSVVQQHPTLAVTIVDNHDSQPGQSLESTVDAWFKPLAYAMIMTREQGYPNLFYGDFYGTKGSSNREIPNLSSKLTPILKARKDMAYGTQHDYLNHQDVIGWTREGVTDRSKSGLATILSDGPGGNKWMYVGKRNAGETWRDKTGNSSNAVTINSDGWGQFFVNGGSVSIY

SEQ ID NO: 43657 - protein, 479 aa, Jeotgalibacillus campisalis
NMTMMQYFEWYLPNDGLHWNRLTNDASNLKSLGVTTVWIPPAYKGTSQNDVGYGAYDLYDLGEFNQKGTVRTKYGTRGQLQTAINTLKNQGIGTYGDVVMNHKGGADFTESVQAVEVNPNNRSQETSGEYTISAWTGFNFAGRNNLHSAFKWRWYHFDGTDWDQSRSLSRIYKFRGSGKSWDTEVSNEFGNYDYLMYADVDFDHPEVKAELKNWGKWYVQSLNLDGFRLDAVKHIKHDYIPEWLADVRRTTGKELFTVAEYWQNDLGAINNYLAKTDYSHSVFDVPLHYNFQRAANSGGNFDMRTIFNGSVVQQHPTLAVTIVDNHDSQPGQSLESTVDAWFKPLAYAMIMTREQGYPNLFYGDFYGTKGSSNREIPNLSSKLTPILKARKDMAYGTQHDYLNHQDVIGWTREGVTDRSKSGLATILSDGPGGNKWMYVGKRNAGETWRDKTGNSSNAVTINSDGWGQFFVNGGSVSIY

SEQ ID NO: 43658 - protein, 477 aa, Bacillus sp. (in: firmicutes)
NGTIMQYFEWNVPNDGQHWNRLHNNAQNLKNAGITAIWIPPAWKGTSQSDTGYGAYDLYDLGEFNQKGTVRTKYGTKAELERAIRSLKANGIQVYGDVVMNHKAGADFTERVQAVEVNPQNRNQEVSGTYQIEAWTGFNFPGRGNQHSSFKWRWHHFDGTDWDESRKLNRIYKFRGKAWDWEVDTEFGNYDYLLYADLDMDHPEVINELNRWGVWYANTLNLDGFRLDAVKHIKFSFMRDWLGHVRGQTGKNLFAVAEYWKNDLGALENYLSKTNWTMSAFDVPLHYNLYQASNSSGNYDMRNLLNGTLVQRHPSHAVTFVDNHDTQPGEALESFVQGWFKPLAYATILTREQGYPQVFYGDYYGIPSDGVPSYRQQIDPLLAARQQYAYGRQHDYFDHWDVIGWTREGNASHPNSGLATIMSDGPGGSKWMYVGRQKAGEVWHDMTGNRSGTVTINQDGWGHFFVNGGSVSVWVKR

SEQ ID NO: 43659 - protein, 477 aa, Bacillus sp. (in: firmicutes)
NGTIMQYFEWNVPNDGQHWNRLHNNAQNLKNAGITAIWIPPAWKGTSQSDTGYGAYDLYDLGEFNQKGTVRTKYGTKAELERAIRSLKANGIQVYGDVVMNHKAGADFTERVQAVEVNPQNRNQEVSGTYQIEAWTGFNFPGRGNQHSSFKWRWYHFDGTDWDESRKLNRIYKFRGKAWDWEVDTEFGNYDYLMYADVDMNHPEVINELNRWGVWYANTLNLDGFRLDAVKHIKFSFMRDWLGHVRGQTGKNLFAVAEYWKNDLGALENYLSKTNWTMSAFDVPLHYNLYQASNSSGNYDMRNLLNGTLVQRHPSHAVTFVDNHDTQPGEALESFVQGWFKPLAYATILTREQGYPQVFYGDYYGIPSDGVPSYRQQIDPLLAARQQYAYGRQHDYFDHWDVIGWTREGNASHPNSGLATIMSDGPGGSKWMYVGRQKAGEVWHDMTGNRSGTVTINQDGWGHFFVNGGSVSVWVKR

SEQ ID NO: 43660 - protein, 477 aa, Bacillus sp. (in: firmicutes)
NGTMMQYFEWYVPNDGQHWNRLHNNAQNLKNAGITAIWIPPAWKGTSQSDTGYGAYDLYDLGEFNQKGTVRTKYGTKAELERAIRSLKANGIQVYGDVVMNHKAGADFTEYVTAVEVNPSNRNQEVSGTYEIEAWTGFNFPGRGNQHSSFKWRWHHFDGTDWDESRKLNRIYKFHGKAWDWEVDTEFGNYDYLLYADLDMDHPEVINELNRWGVWYANTLNLDGFRLDAVKHIKFSFMRDWLGHVRGQTGKNLFAVAEYWKNDLGALENYLSKTNWTMSAFDVPLHYNLYQASNSSGNYDMNNLLNGTLVQQHPSHAVTFVDNHDTQPGEALESFVQGWFKPLAYATILTREQGYPSVFYGDYYGIPSDGVPSYRQQIDPLLAARQQYAYGSQHDYFDHHDVIGWTREGNASHPNSGLATIMSDGPGGSKWMYVGTSKAGEVWHDMTGNRSGTVTINSDGWGHFFVNGGSVSVWVKR

SEQ ID NO: 43661 - protein, 477 aa, Bacillus sp. (in: firmicutes)
NGTIMQYFEWNVPNDGQHWNRLHNNAQNLKNAGITAIWIPPAWKGTSQSDTGYGAYDLYDLGEFNQKGTVRTKYGTKAELERAIRSLKANGIQVYGDVVMNHKAGADFTERVQAVEVNPQNRNQEVSGTYQIEAWTGFNFPGRGNQHSSFKWRWYHFDGTDWDESRKLNRIYKFRGKAWDWEVDTEFGNYDYLMYADLDMDHPEVINELNRWGVWYANTLNLDGFRIDAAKHIKFSFMRDWLGHVRGQTGKNLFAVAEYWKNDLGALENYLSKTNWTMSAFDVPLHYNLYQASNSSGNYDMRNLLNGTLVQRHPSHAVTFVDNHDTQPGEALESFVQGWFKPLAYATILTREQGYPQVFYGDYYGIPSDGVPSYRQQIDPLLAARQQYAYGRQHDYFDHWDVIGWTREGNASHPNSGLATIMSDGPGGSKWMYVGRQKAGEVWHDMTGNRSGTVTINQDGWGHFFVNGGSVSVWVKR

SEQ ID NO: 43662 - protein, 480 aa, Bacillus licheniformis
NGTLMQYFEWYTPNDGQHWKRLQNDAEHLSDIGITAVWIPPAYKAISQADVGYGAYDLYDLGEFWQKGTVRTKYGTKGELQSAIKSLHSRDINVYGDVVINHKAGADATEDVTAVEVDPADRNRVISGEHLIKAWTHFHFPGRGSTYSDFKWYWYHFDGTDWDESRKLNRIYLFQGKTWDWPVSNEFGNYDYLMYADYDYDYPDVVAEITRWGTWYANELQLDGFRLDAVKHIKFSFLRDWVNHVREKTGKEMFTVAEYWSNDLGALENYLNKTNFNHSVFDVPLHYQFHAASTQGGGYDMRKLLNGTVVSKHPLKSVTFVDNHDTQPGQSLESTVQTWFKPLAYAFILTRESGYPSVFYGDMYGTKGDSQREIPALKHKIEPILKARKQYAYGAQHDYFDHHDIVGWTREGVSSVANSGLAALITDGPGGAKWMYVGRQNAGETWHDITGNRSEPVVINSEGWGEFHVNGGSVSIYVQR

SEQ ID NO: 43663 - protein, 480 aa, Bacillus licheniformis
NGTLMQYFEWYTPNDGQHWKRLQNDAEHLSDIGITAVWIPPAYKAISQADVGYGAYDLYDLGEFHQKGTVRTKYGTKGELQSAIKSLHSRDINVYGDVVINHKAGADATEDVTAVEVDPADRNRVISGEHLIKAWTHFHFPGRGSTYSDFKWYWYHFDGTDWDESRKLNRIYLFQGKTWDWEVSNEFGNYDYLMYADYDYDYPDVVAEITRWGTWYANELQLDGFRLDAVKHIKFSFLRDWVNHVREKTGKPMFTVAEYWSNDLGALENYLNKTNFNHSVFDVPLHYQFHAASTQGGGYDMRKLLNGTVVSKHPLKSVTFVDNHDTQPGQSLESTVQTWFKPLAYAFILTRESGYPSVFYGDMYGTKGDSQREIPALKHKIEPILKARVDYAYGAQHDYFDHHDIVGWTREGVSSVANSGLAALITDGPGGAKWMYVGRQNAGETWHDITGNRSEPVVINSEGWGEFHVNGGSVSIYVQR

SEQ ID NO: 43664 - protein, 480 aa, Bacillus amyloliquefaciens
NGTLMQYFEWYTPNDGQHWKRLQNDAEHLSDIGITAVWIPPAYKAISQADVGYGAYDLYDLGEFHQKGTVRTKYGTKGELQSAIKSLHSRDINVYGDVVINHKAGADATEDVTAVEVDPADRNRVISGEHLIKAWTHFHFPGRGSTYSDFKWYWYHFDGTDWDESRKLNRIYLFQGKTWDWPVSNEFGNYDYLMYADFDYDHPDVVAEIKRWGTWYANELQLDGFRLDAVKHIKFSFLRDWVNHVREKTGKEMFTVAEYWSNDLGALENYLNKTNWNHSVFDVPLHYQFHAASTQGGGYDMRKLLNGTVVSKHPLKSVTFVDNHDTQPGQSLESTVQTWFKPLAYAFILTRESGYPQVFYGDMYGTKGDSQREIPALKHKIEPILKARKQYAYGAQHDYFDHHDIVGWTREGDSSVANSGLAALITDGPGGAKRMYVGRQNAGETWHDITGNRSEPVVINSEGWGEFHVNGGSVSIYVQR

SEQ ID NO: 43665 - protein, 480 aa, Bacillus licheniformis
NGTLMQYFEWYTPNDGQHWKRLQNDAEHLSDIGITAVWIPPAYKAISQADVGYGAYDLYDLGEFWQKGTVRTKYGTKGELQSAIKSLHSRDINVYGDVVINHKAGADATEDVQAVEVDPADRNRVISGEHLIKAWTHFHFPGRGSTYSDFKWYWYHFDGTDWDESRKLNRIYLFQGKTWDWPVSNEFGNYDYLMYADYDYDYPDVVAEITRWGTWYANELQLDGFRLDAVKHIKFSFLRDWVNHVREKTGKEMFTVAEYWSNDLGALENYLNKTNFNHSVFDVPLHYQFHAASTQGGGYDMRKLLNGTVVSKHPLKSVTFVDNHDTQPGQSLESTVQTWFKPLAYAFILTRESGYPSVFYGDMYGTKGDSQREIPALKHKIEPILKARKQYAYGAQHDYFDHHDIVGWTREGVSSVANSGLAALITDGPGGAKWMYVGRQNAGETWHDITGNRSEPVVINSEGWGEFHVNGGSVSIYVQR

SEQ ID NO: 43666 - protein, 480 aa, Bacillus amyloliquefaciens
NGTLMQYFEWYTPNDGQHWKRLQNDAEHLSDIGITAVWIPPAYKAISQADVGYGAYDLYDLGEFHQKGTVRTKYGTKGELQSAIKSLHSRDINVYGDVVINHKAGADATEDVTAVEVDPADRNRVISGEHLIKAWTHFHFPGRGSTYSDFKWYWYHFDGTDWDESRKLNRIYLFQGKTWDWPVSNEFGNYDYLMYADYDYDYPDVVAEITRWGTWYANELQLDGFRLDAVKHIKFSFLRDWVNHVREKTGKEMFTVAEYWSNDLGALENYLNKTNFNHSVFDVPLHYQFHAASTQGGGYDMRKLLNGTVVSKHPLKSVTFVDNHDTQPGQSLESTVQTWFKPLAYAFILTRESGYPSVFYGDMYGTKGDSQREIPALKHKIEPILKARKQYAYGAQHDYFDHHDIVGWTREGVSSVANSGLAALITDGPGGAKWMYVGRQNAGETWHDITGNRSEPVVINSEGWGEFHVNGGSVSIYVQR

SEQ ID NO: 43667 - protein, 480 aa, Bacillus amyloliquefaciens
NGTLMQYFEWYTPNDGQHWKRLQNDAEHLSDIGITAVWIPPAYKAISQADVGYGAYDLYDLGEFHQKGTVRTKYGTKGELQSAIKSLHSRDINVYGDVVINHKAGADATEDVTAVEVDPADRNRVISGEHLIKAWTHFHFPGRGSTYSDFKWYWYHFDGTDWDESRKLNRIYLFQGKTWDWEVSNEFGNYDYLMYADYDYDYPDVVAEITRWGTWYANELQLDGFRLDAVKHIKFQFLRDWVNHVREKTGKEMFTVAEYWSNDLGALENYLNKTNFNHSVFDVPLHYQFHAASTQGGGYDMRKLLNGTVVSKHPLKSVTFVDNHDTQPGQSLESTVQTWFKPLAYAFILTRESGYPSVFYGDMYGTKGDSQREIPALKHKIEPILKARKQYAYGAQHDYFDHHDIVGWTREGVSSVANSGLAALITDGPGGAKWMYVGRQNAGETWHDITGNRSEPVVINSEGWGEFHVNGGSVSIYVQR

SEQ ID NO: 43668 - protein, 480 aa, Bacillus licheniformis
NGTLMQYFEWYTPNDGQHWKRLQNDAEHLSDIGITAVWIPPAYKAISQADVGYGAYDLYDLGEFHQKGTVRTKYGTKGELQSAIKSLHSRDINVYGDVVINHKAGADATEDVTAVEVDPADRNRVISGEHLIKAWTHFWFPGRGSTYSDFKWYWYHFDGTDWDESRKLNRIYLFQGKTWDWPVSNEFGNYDYLMYADYDYDYPDVVAEITRWGTWYANELQLDGFRLDAVKHIKFSFLRDWVNHVREKTGKEMFTVAEYWSNDLGALENYLNKTNFNHSVFDVPLHYQFHAASTQGGGYDMRKLLNGTVVSKHPLKSVTFVDNHDTQPGQSLESTVQTWFKPLAYAFILTRESGYPSVFYGDMYGTKGDSQREIPALKHKIEPILKARKQYAYGAQHDYFDHHDIVGWTREGVSSVANSGLAALITDGPGGAKWMYVGRQNAGETWHDITGNRSEPVVINSEGWGEFHVNGGSVSIYVQR

SEQ ID NO: 43669 - protein, 480 aa, Bacillus licheniformis
NGTLMQYFEWYTPNDGQHWKRLQNDAEHLSDIGITAVWIPPAYKAISQADVGYGAYDLYDLGEFHQKGTVRTKYGTKGELQSAIKSLHSRDINVYGDVVINHKAGADATEDVTAVEVDPADRNRVISGEHLIKAWTHFHFPGRGSTYSDFKWYWYHFDGTDWDESRKLNRIYLFQGKTWDWEVSNEFGNYDYLMYADYDYDYPDVVAEITRWGTWYANELQLDGFRLDAVKHIKFSFLRDWVNHVREQTGKPMFTVAEYWSNDLGALENYLNKTNFNHSVFDVPLHYQFHAASTQGGGYDMRKLLNGTVVSKHPLKSVTFVDNHDTQPGQSLESTVQTWFKPLAYAFILTRESGYPSVFYGDMYGTKGDSQREIPALKHKIEPILKARKQYAYGAQHDYFDHHDIVGWTREGVSSVANSGLAALITDGPGGAKWMYVGRQNAGETWHDITGNRSEPVVINSEGWGEFHVNGGSVSIYVQR

SEQ ID NO: 43670 - protein, 480 aa, Bacillus licheniformis
NGTLMQYFEWYTPNDGQHWKRLQNDAEHLSDIGITAVWIPPAYKAISQADVGYGAYDLYDLGEFHQKGTVRTKYGTKGELQSAIKSLHSRDINVYGDVVINHKAGADATEDVTAVEVDPADRNRVISGEHLIKAWTHFHFPGRGSTYSDFKWYWYHFDGTDWDESRSLNRIYLFQGKTWDWEVSNEFGNYDYLMYADYDYDYPDVVAEITRWGTWYANELQLDGFRLDAVKHIKFSFLRDWVNHVREKTGKPMFTVAEYWSNDLGALENYLNKTNFNHSVFDVPLHYQFHAASTQGGGYDMRKLLNGTVVSKHPLKSVTFVDNHDTQPGQSLESTVQTWFKPLAYAFILTRESGYPSVFYGDMYGTKGDSQREIPALKHKIEPILKARKQYAYGAQHDYFDHHDIVGWTREGVSSVANSGLAALITDGPGGAKWMYVGRQNAGETWHDITGNRSEPVVINSEGWGEFHVNGGSVSIYVQR

SEQ ID NO: 43671 - protein, 480 aa, Bacillus licheniformis
NGTLMQYFEWYTPNDGQHWKRLQNDAEHLSDIGITAVWIPPAYKAISQADVGYGAYDLYDLGEFHQKGTVRTKYGTKGELQSAIKSLHSRDINVYGDVVINHKAGADATEDVTAVEVDPADRNRVISGEHLIKAWTHFHFPGRGSTYSDFKWYWWHFDGTDWDESRKLNRIYLFQGKTWDWEVSNEFGNYDYLMYADYDYDYPDVVAEITRWGTWYANELQLDGFRLDAVKHIKFSFLRDWVNHVREKTGKEMFTVAEYWSNDLGALENYLNKTNFNHSVFDVPLHYQFHAASTQGGGYDMRKLLNGTVVSKHPLKSVTFVDNHDTQPGQSLESTVQTWFKPLAYAFILTRESGYPSVFYGDMYGTKGDSQREIPALKHKIEPILKARKQYAYGAQHDYFDHHDIVGWTREGVSSVANSGLAALITDGPGGAKWMYVGRQNAGETWHDITGNRSEPVVINSEGWGEFHVNGGSVSIYVQR

SEQ ID NO: 43672 - protein, 480 aa, Bacillus licheniformis
NGTLMQYFEWYTPNDGQHWKRLQNDAEHLSDIGITAVWIPPAYKAISQADVGYGAYDLYDLGEFHQKGTVRTKYGTKGELQSAIKSLHSRDINVYGDVVINHKAGADATEDVTAVEVDPADRNRVISGEHLIKAWTHFHFPGRGSTYSDFKWYWYHFDGTDWDESRKLNRIYLFQGKTWDWEVSNEFGNYDYLMYADYDYDYPDVVAEITRWGTWYANELQLDGFRLDAVKHIKFSFLRDWVNHVREKTGKPMFTVAEYWSNDLGALENYLNKTNFNHSVFDVPLHYQFHAASTQGGGYDMRKLLNGTVVSKHPLKSVTFVDNHDTQPGQSLESTVQTWFKPLAYAFILTRESGYPSVFYGDMYGTKGDSQREIPALKHKIEPILKARVQYAYGAQHDYFDHHDIVGWTREGVSSVANSGLAALITDGPGGAKWMYVGRQNAGETWHDITGNRSEPVVINSEGWGEFHVNGGSVSIYVQR

SEQ ID NO: 43673 - protein, 480 aa, Bacillus licheniformis
NGTLMQYFEWYTPNDGQHWKRLQNDAEHLSDIGITAVWIPPAYKAISQADVGYGAYDLYDLGEFHQKGTVRTKYGTKGELQSAIKSLHSRDINVYGDVVINHKAGADATEDVTAVEVDPADRNRVISGEYLIKAWTHFHFPGRGSTYSDFKWYWWHFDGTDWDESRKLNRIYLFQGKTWDWPVSNEFGNYDYLMYADYDYDYPDVVAEITRWGTWYANELQLDGFRLDAVKHIKFSFLRDWVNHVREKTGKEMFTVAEYWSNDLGALENYLNKTNFNHSVFDVPLHYQFHAASTQGGGYDMRKLLNGTVVSKHPLKSVTFVDNHDTQPGQSLESTVQTWFKPLAYAFILTRESGYPSVFYGDMYGTKGDSQREIPALKHKIEPILKARKQYAYGAQHDYFDHHDIVGWTREGVSSVANSGLAALITDGPGGAKWMYVGRQNAGETWHDITGNRSEPVVINSEGWGEFHVNGGSVSIYVQR

SEQ ID NO: 43674 - protein, 480 aa, Bacillus amyloliquefaciens
NGTLMQYFEWYTPNDGQHWKRLQNDAEHLSDIGITAVWIPPAYKAISQADVGYGAYDLYDLGEFHQKGTVRTKYGTKGELQSAIKSLHSRDINVYGDVVINHKAGADATEDVTAVEVDPADRNRVISGEHLIKAWTHFHFPGRGSTYSDFKWYWYHFDGTDWDESRKLNRIYLFQGKTWDWEVSNEFGNYDYLMYADYDYDYPDVVAEITRWGTWYANELQLDGFRLDAVKHIKFSFLRDWVNHVREKTGKEMFTVAEYWSNDLGALENYLNKTNFNHSVFDVPLHYQFHAASTQGGGYDMRKLLNGTVVSKWPLKSVTFVDNHDTQPGQSLESTVQTWFKPLAYAFILTRESGYPSVFYGDMYGTKGDSQREIPALKHKIEPILKARKQYAYGAQHDYFDHHDIVGWTREGVSSVANSGLAALITDGPGGAKWMYVGRQNAGETWHDITGNRSEPVVINSEGWGEFHVNGGSVSIYVQR

SEQ ID NO: 43675 - protein, 480 aa, Bacillus licheniformis
NGTLMQYFEWYTPNDGQHWKRLQNDAEHLSDIGITAVWIPPAYKAISQADVGYGAYDLYDLGEFHQKGTVRTKYGTKGELQSAIKSLHSRDINVYGDVVINHKAGADATEDVTAVEVDPADRNRVISGEHLIKAWTHFHFPGRGSTYSDFKWYWYHFDGTDWDESRKLNRIYLFQGKTWDWEVSNEFGNYDYLMYADYDYDYPDVVAEITRWGTWYANELQLDGFRLDAVKHIKFSFLRDWVNHVREKTGKPMFTVAEYWSNDLGALENYLNKTNFNHSVFDVPLHYQFHAASTQGGGYDMRKLLNGTVVSKHPLKSVTFVDNHDTQPGQSLESTVQTWFKPLAYAFILTRESGYPSVFYGDMYGTKGDSQREIPALKHKIEPILKARKQYAYGAQHDYFDHHDIVGWTREGVSSVANSGLAALITDGPGGAKWMYVGRQNAGETWHDITGNRSEPVVINSEGWGEFHVNGGSVSIYVQR

SEQ ID NO: 43676 - protein, 480 aa, Bacillus licheniformis
NGTLMQYFEWYTPNDGQHWKRLQNDAEHLSDIGITAVWIPPAYKAISQADVGYGAYDLYDLGEFHQKGTVRTKYGTKGELQSAIKSLHSRDINVYGDVVINHKAGADATEDVTAVEVDPADRWRVISGEHLIKAWTHFHFPGRGSTYSDFKWYWYHFDGTDWDESRKLNRIYLFQGKTWDWEVSNEFGNYDYLMYADYDYDYPDVVAEITRWGTWYANELQLDGFRLDAVKHIKFSFLRDWVNHVREKTGKEMFTVAEYWSNDLGALENYLNKTNFNHSVFDVPLHYQFHAASTQGGGYDMRKLLNGTVVSKHPLKSVTFVDNHDTQPGQSLESTVQTWFKPLAYAFILTRESGYPSVFYGDMYGTKGDSQREIPALKHKIEPILKARKQYAYGAQHDYFDHHDIVGWTREGVSSVANSGLAALITDGPGGAKWMYVGRQNAGETWHDITGNRSEPVVINSEGWGEFHVNGGSVSIYVQR

SEQ ID NO: 43677 - protein, 480 aa, Bacillus amyloliquefaciens
NGTLMQYFEWYTPNDGQHWKRLQNDAEHLSDIGITAVWIPPAYKATSQADVGYGAYDLYDLGEFHQKGTVRTKYGTKGELQSAIKSLHSRDINVYGDVVINHKAGADATEDVTAVEVDPADRNRVISGEHLIKAWTHFHFPGRGSTYSDFKWYWYHFDGTDWDESRKLNRIYLFQGKTWDWPVSNEFGNYDYLMYADFDYDHPDVVAEIKRWGTWYANELQLDGFRLDAVKHIKFSFLRDWVNHVREKTGKEMFTVAEYWSNDLGALENYLNKTNFNHSVFDVPLHYQFHAASTQGGGYDMRKLLNGTVVSKHPLKSVTFVDNHDTQPGQSLESTVQTWFKPLAYAFILTRESGYPQVFYGDMYGTKGDSQREIPALKHKIEPILKARKQYAYGAQHDYFDHHDIVGWTREGDSSVANSGLAALITDGPGGAKRMYVGRQNAGETWHDITGNRSEPVVINSEGWGEFHVNGGSVSIYVQR

SEQ ID NO: 43678 - protein, 480 aa, Bacillus licheniformis
NGTLMQYFEWYTPNDGQHWKRLQNDAEHLSDIGITAVWIPPAYKAISQADVGYGAYDLYDLGEFHQKGTVRTKYGTKGELQSAIKSLHSRDINVYGDVVINHKAGADATEDVTAVEVDPADRNRVISGEHLIKAWTHFHFPGRGSTYSDFKWYWYHFDGTDWDESRKLNRIYLFQGKTWDWEVSNEFGNYDYLMYADYDYDYPDVVAEITRWGTWYANELQLDGFRLDAVKHIKFSFLRDWVNHVREKTGKEMFTVAEYWSNDLGALENYLNKTNFNHSVFDVPLHYQFHAASTQGGGYDMRKLLNGTVVSKHPLKSVTFVDNHDTQPGQSLESTVQTWFKPLAYAFILTRESGYPQVFYGDMYGTKGDSQREIPALKHKIEPILKARKQYAYGAQHDYFDHHDIVGWTREGVSSVANSGLAALITDGPGGAKWMYVGRQNAGETWHDITGNRSEPVVINSEGWGEFHVNGGSVSIYVQR

SEQ ID NO: 43679 - protein, 480 aa, Bacillus licheniformis
NGTLMQYFEWYTPNDGQHWKRLQNDAEHLSDIGITAVWIPPAYKAISQADVGYGAYDLYDLGEFHQKGTVRTKYGTKGELQSAIKSLHSRDINVYGDVVINHKAGADATEDVTAVEVDPADRNRVISGEHLIKAWTHFHFPGRGSTYSDFKWYWYHFDGTDWDESRKLNRIYKFQGKTWDWEVSNEFGNYDYLMYADFDYDHPDVVAEIKRWGTWYANELQLDGFRLDAVKHIKFAFLRDWVNHVREKTGKEMFTVAEYWSNDLGALENYLNKTNFNHSVFDVPLHYQFHAASTQGGGYDMRKLLNGTVVSKHPLKSVTFVDNHDTQPGQSLESTVQTWFKPLAYAFILTRESGYPQVFYGDMYGTKGDSQREIPALKHKIEPILKARKQYAYGAQHDYFDHHDIVGWTREGDSSVANSGLAALITDGPGGAKRMYVGRQNAGETWHDITGNRSEPVVINSEGWGEFHVNGGSVSIYVQR

SEQ ID NO: 43680 - protein, 480 aa, Bacillus licheniformis
NGTLMQYFEWYTPNDGQHWKRLQNDAEHLSDIGITAVWIPPAYKAISQADVGYGAYDLYDLGEFHQKGTVRTKYGTKGELQSAIKSLHSRDINVYGDVVINHKAGADATEDVTAVEVDPADRNRVISGEHLIKAWTHFHFPGRGSTYSDFKWYWYHFDGTDWDESRKLNRIYKFQGKTWDWPVSNEFGNYDYLMYADFDYDHPDVVAEIKRWGTWYANELQLDGFRLDAVKHIKFSFLRDWVNHVREKTGKEMFTVAEYWSNDLGALENYLNKTNFNHSVFDVPLHYQFHAASTQGGGYDMRKLLNGTVVSKHPLKSVTFVDNHDTQPGQSLESTVQTWFKPLAYAFILTRESGYPQVFYGDMYGTKGDSQREIPALKHKIEPILKARKQYAYGAQHDYFDHHDIVGWTREGDSSVANSGLAALITDGPGGAKRMYVGRQNAGETWHDITGNRSEPVVINSEGWGEFHVNGGSVSIYVQR

SEQ ID NO: 43681 - protein, 480 aa, Bacillus licheniformis
NGTLMQYFEWYTPNDGQHWKRLQNDAEHLSDIGITAVWIPPAYKAISQADVGYGAYDLYDLGEFHQKGTVRTKYGTKGELQSAIKSLHSRDINVYGDVVINHKAGADATEDVTAVEVDPADRNRVISGEHLIRAWTHFHFPGRGSTYSDFKWYWYHFDGTDWDESRKLNRIYLFQGKTWDWEVSNEFGNYDYLMYADYDYDYPDVVAEITRWGTWYANELQLDGFRLDAVKHIKFSFLRDWVNHVREKTGKPMFTVAEYWSNDLGALENYLNKTNFNHSVFDVPLHYQFHAASTQGGGYDMRKLLNGTVVSKHPLKSVTFVDNHDTQPGQSLESTVQTWFKPLAYAFILTRESGYPSVFYGDMYGTKGDSQREIPALKHKIEPILKARKQYAYGAQHDYFDHHDIVGWTREGVSSVANSGLAALITDGPGGAKWMYVGRQNAGETWHDITGNRSEPVVINSEGWGEFHVNGGSVSIYVQR

SEQ ID NO: 43682 - protein, 480 aa, Bacillus licheniformis
NGTLMQYFEWYTPNDGQHWKRLQNDAEHLSDIGITAVWIPPAYKAISQADVGYGAYDLYDLGEFHQKGTVRTKYGTKGELQSAIKSLHSRDINVYGDVVINHKAGADATEDVTAVEVDPADRNRVISGEHLIKAWTHFHFPGRGSTYSDFKWYWYHFDGTDWDESRRLNRIYLFQGKTWDWEVSNEFGNYDYLMYADYDYDYPDVVAEITRWGTWYANELQLDGFRLDAVKHIKFSFLRDWVNHVREKTGKPMFTVAEYWSNDLGALENYLNKTNFNHSVFDVPLHYQFHAASTQGGGYDMRKLLNGTVVSKHPLKSVTFVDNHDTQPGQSLESTVQTWFKPLAYAFILTRESGYPSVFYGDMYGTKGDSQREIPALKHKIEPILKARKQYAYGAQHDYFDHHDIVGWTREGVSSVANSGLAALITDGPGGAKWMYVGRQNAGETWHDITGNRSEPVVINSEGWGEFHVNGGSVSIYVQR

SEQ ID NO: 43683 - protein, 480 aa, Bacillus licheniformis
NGTLMQYFEWYTPNDGQHWKRLQNDAEHLSDIGITAVWIPPAYKAISQADVGYGAYDLYDLGEFHQKGTVRTKYGTKGELQSAIKSLHSRDINVYGDVVINHKAGADATEDVTAVEVDPADRNRVISGEHLIKAWTHFHFPGRGSTYSDFKWYWYHFDGTDWDESRKLNRIYLFQGKTWDWEVSNEFGNYDYLMYADYDYDYPDVVAEITRWGTWYANELQLDGFRLDAVKHIKFSFLRDWVNHVREKTGKPMFTVAEYWSNDLGALENYLNKTNFNHSVFDVPLHYQFHAASTQGGGYDMRKLLNGTVVSKHPLLSVTFVDNHDTQPGQSLESTVQTWFKPLAYAFILTRESGYPSVFYGDMYGTKGDSQREIPALKHKIEPILKARKQYAYGAQHDYFDHHDIVGWTREGVSSVANSGLAALITDGPGGAKWMYVGRQNAGETWHDITGNRSEPVVINSEGWGEFHVNGGSVSIYVQR

SEQ ID NO: 43684 - protein, 480 aa, Bacillus licheniformis
NGTLMQYFEWYTPNDGQHWKRLQNDAEHLSDIGITAVWIPPAYKAISQADVGYGAYDLYDLGEFHQKGTVRTKYGTKGELQSAIKSLHSRDINVYGDVVINHKAGADATEDVTAVEVDPADRNRVISGEHLIKAWTHFHFPGRGSTYSDFKWYWYHFDGTDWDESRKLNRIYLFQGKTWDWEVSNEFGNYDYLMYADYDYDYPDVVAEITRWGTWYANELQLDGFRLDAVKHIKFSFLRDWVNHVREKTGKPMFTVAEYWSNDLGALENYLNKTNFNHSVFDVPLHYQFHAASTQGGGYDMRKLLNGTVVSKHPLQSVTFVDNHDTQPGQSLESTVQTWFKPLAYAFILTRESGYPSVFYGDMYGTKGDSQREIPALKHKIEPILKARKQYAYGAQHDYFDHHDIVGWTREGVSSVANSGLAALITDGPGGAKWMYVGRQNAGETWHDITGNRSEPVVINSEGWGEFHVNGGSVSIYVQR

SEQ ID NO: 43685 - protein, 480 aa, Bacillus amyloliquefaciens
NGTLMQYFEWYTPNDGQHWKRLQNDAEHLSDIGITAVWIPPAYKAISQADVGYGAYDLYDLGEFHQKGTVRTKYGTKGELQSAIKSLHSRDINVYGDVVINHKAGADATEDVTAVEVDPADRNRVISGEHLIKAWTHFHFPGRGSTYSDFKWYWYHFDGTDWDESRKLNRIYLFQGKTWDWEVSNEFGNYDYLMYADFDYDHPDVVAEIKRWGTWYANELQLDGFRLDAVKHIKFSFLRDWVNHVREKTGKEMFTVAEYWSNDLGALENYLNKTNFNHSVFDVPLHYQFHAASTQGGGYDMRKLLNGTVVSKHPLKSVTFVDNHDTQPGQSLESTVQTWFKPLAYAFILTRESGYPQVFYGDMYGTKGDSQREIPALKHKIEPILKARKQYAYGAQHDYFDHHDIVGWTREGDSSVANSGLAALITDGPGGAKRMYVGRQNAGETWHDITGNRSEPVVINSEGWGEFHVNGGSVSIYVQR

SEQ ID NO: 43686 - protein, 478 aa, Bacillus sp.
NGTIMQYFEWNVPNDGQHWNRLHNNAQNLKNAGITAIWIPPAWKGTSQSDTGYGAYDLYDLGEFNQKGTVRTKYGTKAELERAIRSLKANGIQVYGDVVMNHKAGADQTEQVQAVEVNPQNRNQEVSGTYQIEAWTGFNFPGRGNQHSSFKWRWYHFDGTDWDQSRNLSNRIYKFRGKAWDWEVDTEFGNYDYLMYADLDMDHPEVINELNRWGVWYANTLNLDGFRLDAVKHIKFSFMRDWLGHVRGQTGKNLFAVGEYWKNDLGALENYLSKTNWTMSAFDVPLHYNLYQASNSSGNYDMRNLLNGTLVQRHPSHAVTFVDNHDTQPGEALESFVQGWFKPLAYATILTREQGYPQVFYGDYYGIPSDGVPSYRQQIDPLLKARQQYAYGPQHDYLDHPDVIGWTREGDSSHPKSGLATLITDGPGGSKRMYAGLKNAGETWYDITGNRSDTVKIGSDGWGEFHVNDGSVSIYVQK

SEQ ID NO: 43687 - protein, 478 aa, Bacillus sp.
NGTIMQYFEWNVPNDGQHWNRLHNNAQNLKNAGITAIWIPPAWKGTSQSDTGYGVYDLYDLGEFNQKGTVRTKYGTKAELERAIRSLKANGIQVYGDVVMNHKAGADFTEQVQAVEVNPQNRNQEVSGTYQIEAWTGFNFPGRGNQHSSFKWRWYHFDGTDWDQSRQLSNRIYKFRGKAWDWEVDTEFGNYDYLMYADLDMDHPEVINELNRWGVWYANTLNLDGFRLDAVKHIKFSFMRDWLGHVRGQTGKNLFAVAEYWKNDLGALENYLSKTNWTMSAFDVPLHYNLYQASNSSGNYDMRNLLNGTLVQRHPSHAVTFVDNHDTQPGEALESFVQGWFKPLAYATILTREQGYPQVFYGDYYGIPSDGVPSYRQQIDPLLKARQQYAYGPQHDYLDHPDVIGWTREGDSSHPKSGLATLITDGPGGSKRMYAGLKNAGETWYDITGNRSDTVKIGSDGWGEFHVNDGSVSIYVQK

SEQ ID NO: 43688 - protein, 478 aa, Bacillus sp.
NGTIMQYFEWNVPNDGQHWNRLHNNAQNLKNHGITAIWIPPAWKGTSQSDTGYGVYDLYDLGEFNQKGTVRTKYGTKAELERAIRSLKANGIQVYGDVVMNHKAGADFTEQVQAVEVNPQNRNQEVSGTYQIEAWTGFNFPGRGNQHSSFKWRWYHFDGGDWDQSRQLSNRIYKFRGKAWDWEVDTEFGNYDYLMYADLDMDHPEVINELNRWGVWYANTLNLDGFRLDAVKHIKFSFMRDWLGHVRGQTGKNLFAVAEYWKNDLGALENYLSKTNWTMSAFDVPLHYNLYQASNSSGNYDMRNLLNGTLVQRHPSHAVTFVDNHDTQPGEALESFVQGWFKPLAYATILTREQGYPQVFYGDYYGIPSDGVPSYRQQIDPLLKARQQYAYGPQHDYLDHPDVIGWTREGDSSHPKSGLATLITDGPGGSKRMYAGLKNAGETWYDITGNRSDTVKIGSDGWGEFHVNDGSVSIYVQK

SEQ ID NO: 43689 - protein, 478 aa, Bacillus sp. (in: firmicutes)
NGTIMQYFEWNVPNDGQHWNRLHNNAQNLKNAGITAIWIPPAWKGTSQSDTGYGAYDLYDLGEFNQKGTVRTKYGTKAELERAIRSLKANGIQVYGDVVMNHKAGADFTEHVQAVEVNPQNRNQEVSGTYQIEAWTGFNFPGRGNQHSSFKWRWYHFDGTDWDQSRQLSNRIYKFRGKAWDWEVDTEFGNYDYLMYADLDMDHPEVINELNRWGVWYANTLNLDGFRLDAVKHIKFSFMRDWLGHVRGQTGKNLFAVAEYWKNDLGALENYLSKTNWTMSAFDVPLHYNLYQASNSSGNYDMRNLLNGTLVQRHPSHAVTFVDNHDTQPGEALESFVQGWFKPLAYATILTREQGYPQVFYGDYYGIPSDGVPSYRQQIDPLLAARQQYAYGRQHDYFDHWDVIGWTREGNASHPNSGLATIMSDGPGGSKWMYVGRQKAGEVWHDMTGNRSGTVTINQDGWGHFFVNKGSVSVWVKR

SEQ ID NO: 43690 - protein, 478 aa, Bacillus sp.
NGTIMQYFEWNVPNDGQHWNRLHNNAQNLKNAGITAIWIPPAWKGTSQSDTGYGAYDLYDLGEFNQKGTVRTKYGTKAELERAIRSLKANGIQVYGDVVMNHKAGADFTERVQAVEVNPQNRNQEVSGTYQIEAWTGFNFPGRGNQHSSFKWRWYHFDGTDWDQSRQLSNRIYKFRGKAWDWEVDTEFGNYDYLMYADLDMDHPEVINELNRWGVWYANTLNLDGFRLDAVKHIKFSFMRDWLGHVRGQTGKNLFAVAEYWKNDLGALENYLSKTNWTMSAFDVPLHYNLYQASNSSGNYDMRNLLNGTLVQRHPSHAVTFVDNHDTQPGEALESFVQGWFKPLAYATILTREQGYPQVFYGDYYGIPSDGVPSYRQQIDPLLAARQQYAYGPQHDYLDHPDVIGWTREGDSSHPKSGLATLITDGPGGSKRMYAGLKNAGETWYDITGNRSDTVKIGSDGWGEFHVNGGSVSIYVQK

SEQ ID NO: 43691 - protein, 478 aa, Bacillus sp.
NGTIMQYFEWNVPNDGQHWNRLHNNAQNLKNAGITAIWIPPAWKGTSQSDTGYGAYDLYDLGEFNQKGTVRTKYGTKAELERAIRSLKANGIQVYGDVVFNHKAGADFTERVQAVEVNPQNRNQEVSGTYQIEAWTGFNFPGRGNQHSSFKWRWYHFDGTDWDQSRQLSNRIYKFRGKAWDWEVDTEFGNYDYLMYADLDMDHPEVINELNRWGVWYANTINLDGFRLDAVKHIKFSFMRDWLGHVRGQTGKNLFAVAEYWKNDLGALENYLSKTNWTMSAFDVPLHYNLYQASNSSGNYDMRNLLNGTLVQAHPNHAVTFVDNHDTQPGEALESFVQGWFKPLAYATILTREQGYPQVFYGDYYGIPSDGVPSYRQQIDPLLKARQQYAYGPQHDYLDHPDVIGWTREGDSSHPKSGLATLITDGPGGSKRMYAGLKNAGETWYDITGNRSDTVKIGSDGWGEFHVNDGSVSIYVQK

SEQ ID NO: 43692 - protein, 480 aa, Bacillus licheniformis
NGTLMQYFEWYTPNDGQHWKRLQNDAEHLSDIGITAVWIPPAYKAISQADVGYGAYDLYDLGEFHQKGTVRTKYGTKGELQSAIKSLHSRDINVYGDVVINHKAGADATEDVTAVEVDPADRNRVISGEHLIKAWTHFHFPGRGSTYSDFKWYWYHFDGTDWDESRKLNRIYLFQGKTWDWPVSNEFGNYDYLMYADFDYDHPDVVAEIKRWGTWYANELQLDGFRLDAVKHIKFSFLRDWVNHVREKTGKEMFTVAEYWSNDLGALENYLNKTNFNHSVFDVPLHYQFHAASTQGGGYDMRKLLNGTVVSKHPLKSVTFVDNHDTQPGQSLESTVQTWFKPLAYAFILTRESGYPQVFYGDMYGTKGDSQREIPALKHKIEPILKARKQYAYGAQHDYFDHHDIVGWTREGDSSVANSGLAALITDGPGGAKWMYVGRQNAGETWHDITGNRSEPVVINSEGWGEFHVNGGSVSIYVQR

SEQ ID NO: 43693 - protein, 480 aa, Bacillus licheniformis
NGTLMQYFEWYTPNDGQHWKRLQNDAEHLSDIGITAVWIPPAYKAISQADVGYGAYDLYDLGEFHQKGTVRTKYGTKGELQSAIKSLHSRDINVYGDVVINHKAGADATEDVTAVEVDPADRNRVISGEYLIKAWTHFHFPGRGSTYSDFKWYWYHFDGTDWDESRKLNRIYLFQGKTWDWPVSNEFGNYDYLMYADFDYDHPDVVAEIKRWGTWYANELQLDGFRLDAVKHIKFSFLRDWVNHVREKTGKEMFTVAEYWSNDLGALENYLNKTNFNHSVFDVPLHYQFHAASTQGGGYDMRKLLNGTVVSKWPLKSVTFVDNHDTQPGQSLESTVQTWFKPLAYAFILTRESGYPQVFYGDMYGTKGDSQREIPALKHKIEPILKARKQYAYGAQHDYFDHHDIVGWTREGDSSVANSGLAALITDGPGGAKWMYVGRQNAGETWHDITGNRSEPVVINSEGWGEFHVNGGSVSIYVQR

SEQ ID NO: 43694 - protein, 477 aa, Bacillus sp.
NETMMQYFEWDLPNDGTLWNRLHNNAQNLKNAGITALWLPPAYKGTSQSDVGYGVYDLYDLGEFNQKGTIRTKYGTKTQYIQAIQAAKAAGMQVYADVVFNHKAGADQTEFVDAVEVDPSNRNQETSGTYQIQAWTKFDFPGRGNTYSSFKWRWYHFDGTDWDESRKLNRIYKFRGKAWDWEVDTENGNYDYLMFADLDMDHPEVVTELKNWGTWYVNTTNIDGFRLDAVKHIKFSFMRDWLTYVRNQTGKNLFAVGEFWSYDVNKLHNYITKTNGSMSLFDAPLHNNFYTASKSSGYFDMRYLLNNTLMKDQPSLAVTLVDNHDTQPGQSLQSWVEPWFKPLAYAFILTRQEGYPCVFYGDYYGIPKYNIPGLKSKIDPLLIARRDYAYGTQRDYIDHQDIIGWTREGIDTKPNSGLAALITDGPGGSKWMYVGKKHAGKVFYDLTGNRSDTVTINADGWGEFKVNGGSVSIWVAK

SEQ ID NO: 43695 - protein, 480 aa, Bacillus licheniformis
NGTLMQYFEWYTPNDGQHWKRLQNDAEHLSDIGITAVWIPPAYKAISQADVGYGAYDLYDLGEFWQKGTVRTKYGTKGELQSAIKSLHSRDINVYGDVVINHKAGADATEDVTAVEVDPADRNRVISGEYLIKAWTHFHFPGRGSTYSDFKWYWYHFDGTDWDESRKLNRIYLFQGKTWDWPVSNEFGNYDYLMYADFDYDHPDVVAEIKRWGTWYANELQLDGFRLDAVKHIKFSFLRDWVNHVREKTGKEMFTVAEYWSNDLGALENYLNKTNFNHSVFDVPLHYQFHAASTQGGGYDMRKLLNGTVVSKHPLKSVTFVDNHDTQPGQSLESTVQTWFKPLAYAFILTRESGYPQVFYGDMYGTKGDSQREIPALKHKIEPILKARKQYAYGAQHDYFDHHDIVGWTREGDSSVANSGLAALITDGPGGAKRMYVGRQNAGETWHDITGNRSEPVVINSEGWGEFHVNGGSVSIYVQR

SEQ ID NO: 43696 - protein, 477 aa, Bacillus sp.
NETMMQYFEWDLPNDGTLWTKVKNEAANLSSLGITALWLPPAYKGTSQSDVGYGVYDLYDLGEFNQKGTIRTKYGTKTQLERAIRSLKANGIQVYADVVFNHKAGADQTEFVDAVEVDPSNRNQEVSGTYQIEAWTKFDFPGRGNTYSSFKWRWYHFDGTDWDESRKLNRIYKFRGKAWDWEVDTENGNYDYLMFADLDMDHPEVVTELKNWGTWYVNTTNIDGFRLDAVKHIKFSFMRDWLGHVRGQTGKNLFAVGEFWSYDVNKLHNYITKTNGSMSLFDAPLHNNFYTASKSSGYFDMRYLLNNTLMKDQPSLAVTLVDNHDTQPGQSLQSWVEPWFKPLAYAFILTRQEGYPCVFYGDYYGIPSDGVPGLKSKIDPLLIARRDYAYGTQRDYIDHQDIIGWTREGIDTKPNSGLAALITDGPGGSKWMYVGKKHAGKVFYDLTGNRSDTVTINADGWGEFKVNGGSVSIWVAK

SEQ ID NO: 43697 - protein, 477 aa, Bacillus sp.
NETMMQYFEWDLPNDGTLWTKVKNEAANLSSLGITALWLPPAYKGTSQSDVGYGVYDLYDLGEFNQKGTIRTKYGTKTQYIQAIQAAKAAGMQVYADVVFNHKAGADGTEFVDAVEVDPSNRNQEVSGTYQIEAWTKFDFPGRGNTYSSFKWRWYHFDGTDWDESRKLNRIYKFRGKAWDWEVDTENGNYDYLMFADLDMDHPEVVTELKNWGTWYVNTTNIDGFRLDAVKHIKFSFMRDWLTYVRNQTGKNLFAVGEFWSYDVNKLHNYITKTNGSMSLFDAPLHNNFYTASKSSGYFDMRYLLNNTLMKDQPSLAVTLVDNHDTQPGEALESFVQGWFKPLAYAFILTRQEGYPCVFYGDYYGIPKYNIPGLKSKIDPLLIARRDYAYGTQRDYIDHQDIIGWTREGIDTKPNSGLAALITDGPGGSKWMYVGKKHAGKVFYDLTGNRSDTVTINADGWGEFKVNGGSVSIWVAK

SEQ ID NO: 43698 - protein, 477 aa, Bacillus sp.
NETMMQYFEWDLPNDGTLWTKVKNEAANLSSLGITALWLPPAYKGTSQSDVGYGVYDLYDLGEFNQKGTIRTKYGTKTQLERAIRSLKANGIQVYADVVFNHKAGADGTEFVDAVEVDPSNRNQEVSGTYQIEAWTKFDFPGRGNTYSSFKWRWYHFDGTDWDESRKLNRIYKFRGKAWDWEVDTENGNYDYLMFADLDMDHPEVVTELKNWGTWYVNTTNIDGFRLDAVKHIKFSFMRDWLTYVRNQTGKNLFAVGEFWSYDVNKLHNYITKTNGSMSLFDAPLHNNFYTASKSSGYFDMRYLLNNTLMKDQPSLAVTLVDNHDTQPGQSLQSWVEPWFKPLAYAFILTRQEGYPCVFYGDYYGIPKYNIPGLKSKIDPLLIARRDYAYGTQRDYIDHQDIIGWTREGIDTKPNSGLAALITDGPGGSKWMYVGKKHAGKVFYDLTGNRSDTVTINADGWGEFKVNGGSVSIWVAK

SEQ ID NO: 43699 - protein, 480 aa, Bacillus amyloliquefaciens
NGTLMQYFEWYTPNDGQHWKRLQNDAEHLSDIGITAVWIPPAYKAISQADVGYGAYDLYDLGEFHQKGTVRTKYGTKGELQSAIKSLHSRDINVYGDVVINHKAGADATEDVTAVEVDPADRNRVISGEHLIKAWTHFHFPGRGSTYSDFKWYWYHFDGTDWDESRKLNRIYLFQGKTWDWPVSNEFGNYDYLMYADFDYDHPDVVAEIKRWGTWYANELQLDGFRLDAVKHIKFSFLRDWVNHVREKTGKEMFTVAEYWSNDLGALENYLNKTNFNHSVFDVPLHYQFHAASTQGGGYDMRKLLNGTVVSKWPLKSVTFVDNHDTQPGQSLESTVQTWFKPLAYAFILTRESGYPSVFYGDMYGTKGDSQREIPALKHKIEPILKARKQYAYGAQHDYFDHHDIVGWTREGDSSVANSGLAALITDGPGGAKWMYVGRQNAGETWHDITGNRSEPVVINSEGWGEFHVNGGSVSIYVQR

SEQ ID NO: 43700 - protein, 480 aa, Bacillus amyloliquefaciens
NGTLMQYFEWYTPNDGQHWKRLQNDAEHLSDIGITAVWIPPAYKAISQADVGYGAYDLYDLGEFWQKGTVRTKYGTKGELQSAIKSLHSRDINVYGDVVINHKAGADATEDVTAVEVDPADRNRVISGEHLIKAWTHFHFPGRGSTYSDFKWYWYHFDGTDWDESRKLNRIYLFQGKTWDWPVSNEFGNYDYLMYADFDYDHPDVVAEIKRWGTWYANELQLDGFRLDAVKHIKFSFLRDWVNHVREKTGKEMFTVAEYWSNDLGALENYLNKTNWNHSVFDVPLHYQFHAASTQGGGYDMRKLLNGTVVSKHPLKSVTFVDNHDTQPGQSLESTVQTWFKPLAYAFILTRESGYPQVFYGDMYGTKGDSQREIPALKHKIEPILKARKQYAYGAQHDYFDHHDIVGWTREGDSSVANSGLAALITDGPGGAKRMYVGRQNAGETWHDITGNRSEPVVINSEGWGEFHVNGGSVSIYVQR

SEQ ID NO: 43701 - protein, 478 aa, Bacillus sp. (in: firmicutes)
NGTMMQYFEWNVPNDGQHWNRLHNNAQNLKNAGITAIWIPPAWKGTSQNDVGYGAYDLYDLGEFNQKGTVRTKYGTKAELERAIRSLKANGIQVYGDVVMNHKGGTDFTERVQAVEVNPQNRNQEVSGTYQIEAWTGFNFPGRGNQHSSFKWRWYHFDGTDWDQSRQLANRIYKFRGKAWDWEVDTEFGNYDYLMYADVDMDHPEVINELNRWGVWYANTLNLDGFRLDAVKHIKFSFMRDWLGHVRGQTGKNLFAVAEYWKNDLGALENYLSKTNWTMSAFDVPLHYNLYQASNSSGNYDMRNLLNGTLVQRHPSHAVTFVDNHDTQPGEALESFVQGWFKPLAYATILTREQGYPSVFYGDYYGIPSDGVPSYRQQIDPLLKARQQYAYGRQHDYFDHWDVIGWTREGNASHPNSGLATIMSDGPGGSKWMYVGRQKAGEVWHDMTGNRSGTVTINQDGWGHFFVNGGSVSVWVKR

SEQ ID NO: 43702 - protein, 478 aa, Bacillus sp. (in: firmicutes)
NGTMMQYFEWNVPNDGQHWNRLHNNAQNLKNAGITAIWIPPAWKGTSQNDVGYGAYDLYDLGEFNQKGTVRTKYGTKAELERAIRSLKANGIQVYGDVVMNHKGGADFTERVQAVEVNPQNRNQEVSGTYQIEAWTGFNFPGRGNQHSSFKWRWYHFDGTDWDQSHQLANRIYKFRGKAWDWEVDTEFGNYDYLMYADVDMDHPEVINELNRWGVWYANTLNLDGFRLDAVKHIKFSFMRDWLGHVRGQTGKNLFAVAEYWKNDLGALENYLSKTNWTMSAFDVPLHYNLYQASNSSGNYDMRNLLNGTLVQRHPSHAVTFVDNHDTQPGEALESFVQGWFKPLAYATILTREQGYPSVFYGDYYGIPSDGVPSYRQQIDPLLKARQQYAYGRQHDYFDHWDVIGWTREGNASHPNSGLATIMSDGPGGSKWMYVGRQKAGEVWHDMTGNRSGTVTINQDGWGHFFVNGGSVSVWVKR

SEQ ID NO: 43703 - protein, 478 aa, Bacillus sp. (in: firmicutes)
NGTIMQYFEWNVPNDGQHWNRLHNNAQNLKNAGITAIWIPPAWKGTSQNDVGYGAYDLYDLGEFNQKGTVRTKYGTKAELERAIQSLKANGIQVYGDVVMNHKGGADFTERVQAVEVNPQNRNQEVSGTYQIEAWTGFNFPGRGNQHSSFKWRWYHFDGTDWDQSRQLANRIYKFRGKAWDWEVDTENGNYDYLMYADVDMDHPEVINELNRWGVWYANTLNLDGFRLDAVKHIKFSFMRDWLGHVRGQTGKNLFAVAEYWKNDLGALENYLSKTNWTMSAFDVPLHYNLYQASNSSGNYDMRNLLNGTLVQRHPSHAVTFVDNHDTQPGEALESFVQGWFKPLAYATILTREQGYPQVFYGDYYGIPSDGVPSYRQQIDPLLKARQQYAYGRQHDYFDHWDVIGWTREGNASHPNSGLATIMSDGPGGSKWMYVGRQKAGEVWHDMTGNRSGTVTINQDGWGHFFVNGGSVSVWVKR

SEQ ID NO: 43704 - protein, 478 aa, Bacillus sp. (in: firmicutes)
NGTMMQYFEWNVPNDGQHWNRLHNNAQNLKNAGITAIWIPPAWKGTSQNDVGFGAYDLYDLGEFNQKGTVRTKYGTKAELERAIRSLKANGIQVYGDVVMNHKGGADFTERVQAVEVNPQNRNQEVSGTYQIEAWTGFNFPGRGNQHSSFKWRWYHFDGTDWDQSRQLANRIYKFRGKAWDWEVDTEFGNYDYLMYADVDMDHPEVINELNRWGVWYANTLNLDGFRLDAVKHIKFSFMRDWLGHVRGQTGKNLFAVAEYWKNDLGALENYLSKTNWTMSAFDVPLHYNLYQASNSSGNYDMRNLLNGTLVQRHPSHAVTFVDNHDTQPGEALESFVQGWFKPLAYATILTREQGYPSVFYGDYYGIPSDGVPSYRQQIDPLLKARQQYAYGRQHDYFDHWDVIGWTREGNASHPNSGLATIMSDGPGGSKWMYVGRQKAGEVWHDMTGNRSGTVTINQDGWGHFFVNGGSVSVWVKR

SEQ ID NO: 43705 - protein, 478 aa, Bacillus sp. (in: firmicutes)
NGTMMQYFEWNVPNDGQHWNRLHNNAQNLKNAGITAIWIPPAWKGTSQNDVGYGAYDLYDLGEFNQKGTVRTKYGTKAELERAIRSLKANGIQVYGDVVMNHKGGADFTERVQAVEVNPQNNNQEVSGTYQIEAWTGFNFPGRGNQHSSFKWRWYHFDGTDWDQSRQLANRIYKFRGKAWDWEVDTEFGNYDYLMYADVDMDHPEVINELNRWGVWYANTLNLDGFRLDAVKHIKFSFMRDWLGHVRGQTGKNLFAVAEYWKNDLGALENYLSKTNWTMSAFDVPLHYNLYQASNSSGNYDMRNLLNGTLVQRHPSHAVTFVDNHDTQPGEALESFVQGWFKPLAYATILTREQGYPSVFYGDYYGIPSDGVPSYRQQIDPLLKARQQYAYGRQHDYFDHWDVIGWTREGNASHPNSGLATIMSDGPGGSKWMYVGRQKAGEVWHDMTGNRSGTVTINQDGWGHFFVNGGSVSVWVKR

SEQ ID NO: 43706 - protein, 478 aa, Bacillus sp. (in: firmicutes)
NGTIMQYFEWNVPNDGQHWNRLHNNAQNLKNAGITAIWIPPAWKGTSQNDVGYGAYDLYDLGEFNQKGTVRTKYGTKAELERAIRSLKANGIQVYGDVVMNHKGGADFTERVQAVEVNPQNRNQEVSGTYQIEAWTGFNFPGRGNQHSSFKWRWYHFDGTDWDQSRQLANRIYKFRGKAWDWEVDTEFGNYDYLMYADVDMDHPEVINELNRWGVWYANTLNLDGFRLDAVKHIKFSFMRDWLGHVRGQTGKNLFAVAEYWKNDLGALENYLSKTNWTMSAFDVPLHYNLYQASNSSGNYDMRNLLNGTLVQRHPSHAVTFVDNHDTQPGEALESFVQGWFKPLAYATILTREQGYPMVFYGDYYGIPSDGVPSYRQQIDPLLKARQQYAYGRQHDYFDHWDVIGWTREGNASHPNSGLATIMSDGPGGSKWMYVGRQKAGEVWHDMTGNRSGTVTINQDGWGHFFVNGGSVSVWVKR

SEQ ID NO: 43707 - protein, 478 aa, Bacillus sp. (in: firmicutes)
NGTIMQYFEWNVPNDGQHWNRLHNNAQNLKNAGITAIWIPPAWKGTSQNDVGYGAYDLYDLGEFNQKGTVRTKYGTKAELERAIRSLKANGIQVYGDVVMNHKGGADFTERVQAVEVNPQNRNQEVSGTYQIEAWTGFNFPGRGNQHSSFKWRWYHFDGTDWDQSRQLANRIYKFRGKAWDWEVDTEFGNYDYLMYADVDMDHPEVINELNRWGVWYANTLNLDGFRLDAVKHIKFSFMRDWLGHVRGQTGKNLFAVAEYWKNDLGALENYLSKTNWTMSAFDVPLHYNLYQASNSSGNYDMRNLLNGTLVQRHPSHAVTFVDNHDTQPGEALESFVQGWFKPLAYATILTREQGYPSVFYGDYYGIPSDGVPSYRQQIDPLLKARQQYAYGRQHDYFDHWDVIGWTREGNASHPNSGLATIMSDGPGGSKWMYVGRQKAGEVWHDMTGNRSGTVTINQDGWGHFFVNGGSVSVWVKR

SEQ ID NO: 43708 - protein, 478 aa, Bacillus sp. (in: firmicutes)
NGTMMQYFEWNVPNDGQHWNRLHNNAQNLKNAGITAIWIPPAWKGTSQNDVGYGAYDLYDLGEFNQKGTVRTKYGTKAELERAIRSLKANGIQVYGDVVMNHKGGADFTERVQAVEVNPQNRNQEVSGTYQIEAWTGFNFPGRGNQHSSFKWRWYHFDGTDWDQSLQLANRIYKFRGKAWDWEVDTEFGNYDYLMYADVDMDHPEVINELNRWGVWYANTLNLDGFRLDAVKHIKFSFMRDWLGHVRGQTGKNLFAVAEYWKNDLGALENYLSKTNWTMSAFDVPLHYNLYQASNSSGNYDMRNLLNGTLVQRHPSHAVTFVDNHDTQPGEALESFVQGWFKPLAYATILTREQGYPSVFYGDYYGIPSDGVPSYRQQIDPLLKARQQYAYGRQHDYFDHWDVIGWTREGNASHPNSGLATIMSDGPGGSKWMYVGRQKAGEVWHDMTGNRSGTVTINQDGWGHFFVNGGSVSVWVKR

SEQ ID NO: 43709 - protein, 478 aa, Bacillus sp. (in: firmicutes)
NGTMMQYFEWNVPNDGQHWNRLHNNAQNLKNAGITAIWIPPAWKGTSQNDVGYGAYDLYDLGEFNQKGTVRTKYGTKAELERAIRSLKANGIQVYGDVVMNHKGGADFTERVQAVEVNPQNRNQEVSGTYQIEAWTGFNFPGRGNQHSSFKWRWYHFDGTDWDQSRQLANRIYKFRGKEWDWEVDTEFGNYDYLMYADVDMDHPEVINELNRWGVWYANTLNLDGFRLDAVKHIKFSFMRDWLGHVRGQTGKNLFAVAEYWKNDLGALENYLSKTNWTMSAFDVPLHYNLYQASNSSGNYDMRNLLNGTLVQRHPSHAVTFVDNHDTQPGEALESFVQGWFKPLAYATILTREQGYPSVFYGDYYGIPSDGVPSYRQQIDPLLKARQQYAYGRQHDYFDHWDVIGWTREGNASHPNSGLATIMSDGPGGSKWMYVGRQKAGEVWHDMTGNRSGTVTINQDGWGHFFVNGGSVSVWVKR

SEQ ID NO: 43710 - protein, 478 aa, Bacillus sp. (in: firmicutes)
NGTIMQYFEWNVPNDGQHWNRLHNNAQNLKNAGITAIWIPPAYKGTSQNDVGYGAYDLYDLGEFNQKGTVRTKYGTKAELERAIRSLKANGIQVYGDVVMNHKGGADFTERVQAVEVNPQNRNQEVSGTYQIEAWTGFNFPGRGNQHSSFKWRWYHFDGTDWDQSRQLANRIYKFRGKAWDWEVDTENGNYDYLMYADVDMDHPEVINELNRWGVWYANTLNLDGFRLDAVKHIKFSFMRDWLGHVRGQTGKNLFAVAEYWKNDLGALENYLSKTNWTMSAFDVPLHYNLYQASNSSGNYDMRNLLNGTLVQRHPSHAVTFVDNHDTQPGEALESFVQGWFKPLAYATILTREQGYPQVFYGDYYGIPSDGVPSYRQQIDPLLKARQQYAYGRQHDYFDHWDVIGWTREGNASHPNSGLATIMSDGPGGSKWMYVGRQKAGEVWHDMTGNRSGTVTINQDGWGHFFVNGGSVSVWVKR

SEQ ID NO: 43711 - protein, 478 aa, Bacillus sp. (in: firmicutes)
NGTIMQYFEWNVPNDGQHWNRLHNNAQNLKNAGITAIWIPPAWKGTSQNDVGYGAYDLYDLGEFNQKGTVRTKYGTKAELERAIRSLKANGIQVYGDVVMNHKGGADFTERVQAVEVNPQNRNQEVSGTYQIEAWTGFNFPGRGNQHSSFKWRWYHFDGTDWDESRQLANRIYKFRGKAWDWEVDTENGNYDYLMYADVDMDHPEVINELNRWGVWYANTLNLDGFRLDAVKHIKFSFMRDWLGHVRGQTGKNLFAVAEYWKNDLGALENYLSKTNWTMSAFDVPLHYNLYQASNSSGNYDMRNLLNGTLVQRHPSHAVTFVDNHDTQPGEALESFVQGWFKPLAYATILTREQGYPQVFYGDYYGIPSDGVPSYRQQIDPLLKARQQYAYGRQHDYFDHWDVIGWTREGNASHPNSGLATIMSDGPGGSKWMYVGRQKAGEVWHDMTGNRSGTVTINQDGWGHFFVNGGSVSVWVKR

SEQ ID NO: 43712 - protein, 478 aa, Bacillus sp. (in: firmicutes)
NGTMMQYFEWNVPNDGQHWNRLHNNAQNLKNAGITAIWIPPAWKGTSQNDVGYGAYDLYDLGEFNQKGTVRTKYGTKAELERAIRSLKANGIQVYGDVVMNHKGGADFTERVQAVEVNPQNRNQEVSGTYQIEAWTGFNFPGRGNQHSSFKWRWYHFDGTDWDQSRQLANRIYKFRGKHWDWEVDTEFGNYDYLMYADVDMDHPEVINELNRWGVWYANTLNLDGFRLDAVKHIKFSFMRDWLGHVRGQTGKNLFAVAEYWKNDLGALENYLSKTNWTMSAFDVPLHYNLYQASNSSGNYDMRNLLNGTLVQRHPSHAVTFVDNHDTQPGEALESFVQGWFKPLAYATILTREQGYPSVFYGDYYGIPSDGVPSYRQQIDPLLKARQQYAYGRQHDYFDHWDVIGWTREGNASHPNSGLATIMSDGPGGSKWMYVGRQKAGEVWHDMTGNRSGTVTINQDGWGHFFVNGGSVSVWVKR

SEQ ID NO: 43713 - protein, 478 aa, Bacillus sp. (in: firmicutes)
NGTMMQYFEWNVPNDGQHWNRLHNNAQNLKNAGITAIWIPPAWKGTSQNDVGYGAYDLYDLGEFNQKGTVRTKYGTKAELERAIRSLKANGIQVYGDVVMNHKGGADFTERVQAVEVNPQNRNQEVSGTYQIEAWTGFNFPGRGNQHSSFKWRWHHFDGTDWDQSRQLANRIYKFRGKAWDWEVDTEFGNYDYLMYADVDMDHPEVINELNRWGVWYANTLNLDGFRLDAVKHIKFSFMRDWLGHVRGQTGKNLFAVAEYWKNDLGALENYLSKTNWTMSAFDVPLHYNLYQASNSSGNYDMRNLLNGTLVQRHPSHAVTFVDNHDTQPGEALESFVQGWFKPLAYATILTREQGYPSVFYGDYYGIPSDGVPSYRQQIDPLLKARQQYAYGRQHDYFDHWDVIGWTREGNASHPNSGLATIMSDGPGGSKWMYVGRQKAGEVWHDMTGNRSGTVTINQDGWGHFFVNGGSVSVWVKR

SEQ ID NO: 43714 - protein, 478 aa, Bacillus sp. (in: firmicutes)
NGTIMQYFEWNVPNDGQHWNRLHNNAQNLKNAGITAIWIPPAWKGTSQNDVGYGAYDLYDLGEFNQKGTVRTKYGTKAELERAIRSLKANGIQVYGDVVMNHKGGADFTERVQAVEVNPQNRNQEVSGTYQIEAWTGFNFPGRGNQHSSFKWRWYHFDGTDWDQSRQLANRIYKFRGKAWDWEVDTEFGNYDYLMYADVDMDHPEVINELNRWGVWYANTLNLDGFRLDAVKHIKFSFMRDWLGHVRGQTGKNLFAVAEYWKNDLGALENYLSKTNWTMSAFDVPLHYNLYQASNSSGNYDMRNLLNGTLVQRHPSHAVTFVDNHDTQPGEALESFVQGWFKPLAYATILTREQGYPKVFYGDYYGIPSDGVPSYRQQIDPLLKARQQYAYGRQHDYFDHWDVIGWTREGNASHPNSGLATIMSDGPGGSKWMYVGRQKAGEVWHDMTGNRSGTVTINQDGWGHFFVNGGSVSVWVKR

SEQ ID NO: 43715 - protein, 478 aa, Bacillus sp.
NGTIMQYFEWNVPNDGQHWNRLHNNAQNLKNAGITAIWIPPAWKGTSQNDVGYGAYDLYDLGEFNQKGTVRTKYGTKAELERAIRSLKANGIQVYGDVVMNHKGGADFTERVQAVEVNPQNRNQEVSGTYQIEAWTGFNFPGRGNQHSSFKWRWYHFDGTDWDQSRQLANRIYKFRGKAWDWEVDTEFGNYDYLMYADVDMDHPEVINELNRWGVWYANTLNLDGFRLDAVKHIKFSFMRDWLGHVRGQTGKNLFAVAEYWKNDLGALENYLSKTNWTMSAFDVPLHYNLYQASNSSGNYDMRNLLNGTLVQRHPSHAVTFVDNHDTQPGEALESFVQGWFKPLAYATILTREQGYPQVFYGDYYGIPSDGVPSYRQQIDPLLKARQQYAYGRQHDYFDHWDVIGWTREGNASHPNSGLATIMSDGPGGSKWMYVGRQKAGEVWHDMTGNRSGTVTINQDGWGHFFVNGGSVSVWVKR

SEQ ID NO: 43716 - protein, 478 aa, Bacillus sp. (in: firmicutes)
NGTIMQYFEWNVPNDGQHWNRLHNNAQNLKNAGITAIWIPPAWKGTSQNDVGYGAYDLYDLGEFNQKGTVRTKYGTKAELERAIRSLKANGIQVYGDVVMNHKGGADFTERVQAVEVNPQNRNQEVSGTYQIEAWTGFNFPGRGNQHSSFKWRWYHFDGTDWDQSRQLANRIYKFRGKAWDWEVDTENGNYDYLMYADVDMDHPEVINELNRWGVWYANTLNLDGFRLDAVKHIKFSFMRDWLGHVRGQTGKNLFAIGEYWKNDLGALENYLSKTNWTMSAFDVPLHYNLYQASNSSGNYDMRNLLNGTLVQRHPSHAVTFVDNHDTQPGEALESFVQGWFKPLAYATILTREQGYPCVFYGDYYGIPSDGVPSYRQQIDPLLKARQQYAYGRQHDYFDHWDVIGWTREGNASHPNSGLATIMSDGPGGSKWMYVGRQKAGEVWHDMTGNRSGTVTINQDGWGHFFVNGGSVSVWVKR

SEQ ID NO: 43717 - protein, 482 aa, Unidentified
NGTMMQYFEWYVPNDGQHWNRLRNDAAYLKSIGVSAVWTPPAYKGTSQNDVGYGAYDLYDLGEFNQKGTIRTKYGTKAELKSAVSTLKSNGIQVYGDVVMNHKGGADYTENVTAVEVNPSNRNQETSDEYTIQAWTGFNFPGRGTTHSPFKWQWYHFDGTDWDQSRNASRIFKFRGTGKVWDWEVSSENGNYDYLMYADLDFDHPDVGNEMKNWGVWYANEVGLDGFRLDAVKHIKHSYLGDWVNHVRTKTGKEMFTVAEYWQNDVNAINNYLAKVNYNHSVFDAPLHYNFHYASQSGGNYDMRNLLNGTVVAAHPTKAVTLVENHDSQPGQSLESVVQPWFKPLAYAFILTRAEGYPSIFYGDMYGTKGNSSYEIPALKTKIEPLLKARKDYAYGTQHNYMDHWDVIGWTREGDSTKEKSGLATLVTDGAGGSKWMYVGKQNAGEVWYDITGNRTDKITINTDGWGNFQVNGGSVSVYVQQ

SEQ ID NO: 43718 - protein, 479 aa, Synthetic construct
NETMMQYFEWDLPNDGTLWTKVKNEAANLSSLGITALWLPPAYKGTSQSDVGYGVYDLYDLGEFNQKGTIRTKYGTKTQYIQAIQAAKAAGMQVYADVVFNHKAGADATEWVDAVEVNPSNRNQEVSGTYKIQAWTKFDFPGRGNTYSSFKWRWYHFDGTDWDQSRQLNRIYKFRGTGKAWDWEVDTENGNYDYLMFADLDMDHPEVVTELKNWGTWYVNTTNIDGFRLDAVKHIKYSFFPDWLTYVRNQTGKNLFAVGEFWSYDVNKLHNYITKTNGSMSLFDAPLHNNFYTASKSSGYFDMRYLLNNTLMKDQPSLAVTLVDNHDTQPGQSLQSWVEPWFKPLAYAFILTRQEGYPCVFYGDYYGIPKYNIPGLKSKIDPLLIARRDYAYGTQRDYIDHQDIIGWTREGIDTKPNSGLAALITDGPGGSKWMYVGKKHAGKVFYDLTGNRSDTVTINADGWGEFKVNGGSVSIWVAK

SEQ ID NO: 43719 - protein, 482 aa, Bacillus sp. YR288
NGTMMQYFEWYVPNDGQHWNRLRNDAAYLKSIGVSAIWTPPAYKGTSQNDVGYGAYDLYDLGEFNQKGTIRTKYGTKAELKSAVSTLKSNGIQVYGDVVMNHKGGADYTENVTAVEVNPSNRNQETSDEYTIQAWTGFNFPGRGTTHSPFKWQWYHFDGTDWDQSRNASRIFKFRGTGKAWDWPVSSENGNYDYLMYADLDFDHPDVRNEMKNWGVWYANEVGLDGFRLDAVKHIKHSYLGDWVNHVRTKTGKEMFTVAEYWQNDVNAINNYLAFVNYNHSVFDAPLHYNFHYASQSGGNYDMRNLLNGTVVAAHPTKAVTLVENHDSQPGQSLESVVQPWFKPLAYAFILTRAEGYPSIFYGDMYGTKGNSSYEIPALKTKIEPLLKARKDYAYGTQHNYMDHWDVIGWTREGDSTKEKSGLATLVTDGAGGSKWMYVGKQNAGEVWYDITGNRTDKITINTDGWGNFQVNGGSVSVYVQQ

SEQ ID NO: 43720 - protein, 482 aa, Bacillus sp. YR288
NGTMMQYFEWYVPNDGQHWNRLRNDAAYLKSIGVSAIWTPPAYKGTSQNDVGYGAYDLYDLGEFNQKGTIRTKYGTKAELKSAVSTLKSNGIQVYGDVVMNHKGGADYTENVTAVEVNPSNRNQETSDEYTIQAWTGFNFPGRGTTHSPFKWQWYHFDGTDWDQSRNASRIFKFRGTGKAWDWPVSSENGNYDYLMYADLDFDHPDVRNEMKNWGVWYANEVGLDGFRLDAVKHIKFQYLGDWVNHVRTKTGKEMFTVAEYWQNDVNAINNYLAKVNYNHSVFDAPLHYNFHYASQSGGNYDMRNLLNGTVVAAHPTKAVTLVENHDSQPGQSLESVVQPWFKPLAYAFILTRAEGYPSIFYGDMYGTKGNSSYEIPALKTKIEPLLKARKDYAYGTQHNYMDHWDVIGWTREGDSTKEKSGLATLVTDGAGGSKWMYVGKQNAGEVWYDITGNRTDKITINTDGWGNFQVNGGSVSVYVQQ

SEQ ID NO: 43721 - protein, 482 aa, Bacillus sp. YR288
NGTMMQYFEWYVPNDGQHWNRLRNDAAYLKSIGVSAIWTPPAYKGTSQNDVGYGAYDLYDLGEFNQKGTIRTKYGTKAELKSAVSTLKSNGIQVYGDVVMNHKGGADYTENVTAVEVNPSNRNQETSDEYTIQAWTGFNFPGRGTTHSPFKWQWYHFDGTDWDQSRNASRIFKFRGTGKAWDWEVSSENGNYDYLMYADLDFDHPDVRNEMKNWGVWYANEVGLDGFRLDAVKHIKHSYLGDWVNHVRTKTGKTMFTVAEYWQNDVNAINNYLAKVNYNHSVFDAPLHYNFHYASQSGGNYDMRNLLNGTVVAAHPEKAVTLVENHDSQPGQSLESVVQPWFKPLAYAFILTRAEGYPSIFYGDMYGTKGNSSYEIPALKTKIEPLLKARKDYAYGTQHNYMDHPDVIGWTREGDSTKEKSGLATLVTDGVGGSKWMYVGKQNAGEVWYDITGNRTDKITINTDGWGTFQVNGGSVSVYVQQ

SEQ ID NO: 43722 - protein, 482 aa, Bacillus sp. YR288
NGTMMQYFEWYVPNDGQHWNRLRNDAAYLKSIGVSAIWTPPAYKGTSQNDVGYGAYDLYDLGEFNQKGTIRTKYGTKAELKSAVSTLKSNGIKVYGDVVMNHKGGADYTENVTAVEVNPSNRNQETSDEYTIQAWTGFNFPGRGTTHSPFKWQWYHFDGTDWDQSRNASRIFKFRGTGKAWDWEVSSENGNYDYLMYADLDFDHPDVRNEMKNWGVWYANEVGLDGFRLDAVKHIKHSYLGDWVNHVRTKTGKTMFTVAEYWQNDVNAINNYLAKVNYNHSVFDAPLHYNFHYASQSGGNYDMRNLLNGTVVAAHPEKAVTLVENHDSQPGQSLESVVQPWFKPLAYAFILTRAEGYPSIFYGDMYGTKGNSSYEIPALKTKIEPLLKARKDYAYGTQHNYMDHPDVIGWTREGDSTKEKSGLATLVTDGVGGSKWMYVGKQNAGEVWYDITGNRTDKITINTDGWGNFQVNGGSVSVYVQQ

SEQ ID NO: 43723 - protein, 482 aa, Bacillus sp. YR288
NGTMMQYFEWYVPNDGQHWNRLRNDAAYLKSIGVSAIWTPPAYKGTSQNDVGYGAYDLYDLGEFNQKGTIRTKYGTKAELKSAVSTLKSNGIQVYGDVVMNHKGGADYTENVTAVEVNPSNRNQETSDEYTIQAWTGFNFPGRGTTHSPFKWQWYHFDGTDWDQSRNASRIFKFRGTGKAWDWEVSSEFGNYDYLLYADLDYDHPDVINEMKNWGVWYANEVGLDGFRLDAVKHIKFQFLGDWVNHVRTKTGKEMFTVAEYWQNDVNAINNYLAKVNYNHSVFDAPLHYNFHYASQSGGNYDMRNLLNGTVVAAHPTKAVTLVENHDSQPGQSLESVVQPWFKPLAYAFILTRAEGYPSIFYGDMYGTKGNSSYEIPALKTKIEPLLKARKDYAYGTQHNYMDHWDVIGWTREGDSTKEKSGLATLVTDGAGGSKWMYVGKQNAGEVWYDITGNRTDKITINTDGWGNFQVNGGSVSVYVQQ

SEQ ID NO: 43724 - protein, 482 aa, Bacillus sp. YR288
NGTMMQYFEWYVPNDGQHWNRLRNDAAYLKSIGVSAIWTPPAYKGTSQNDVGYGAYDLYDLGEFNQKGTIRTKYGTKAELKSAVSTLKSNGIQVYGDVVMNHKGGADYTENVTAVEVNPSNRNQETSDEYTIQAWTGFNFPGRGTTHSPFKWQWYHFDGTDWDQSRNASRIFKFRGTGKAWDWPVSSENGNYDYLMYADLDFDHPDVRNEMKNWGVWYANEVGLDGFRLDAVKHIKHSYLGDWVNHVRTKTGKEMFTVAEYWQNDVNAINNYLAKVNYNHSVFDAPLHYNFHYASQSGGNYDMRNLLNGTVVAAHPTKAVTLVENHDTQPGQSLESVVQPWFKPLAYAFILTRAEGYPSIFYGDMYGTKGNSSYEIPALKTKIEPLLKARKDYAYGTQHNYMDHWDVIGWTREGDSTKEKSGLATLVTDGAGGSKWMYVGKQNAGEVWYDITGNRTDKITINTDGWGNFQVNGGSVSVYVQQ

SEQ ID NO: 43725 - protein, 482 aa, Bacillus sp. YR288
NGTMMQYFEWYVPNDGQHWNRLRNDAAYLKSIGVSAIWTPPAYKGTSQNDVGYGAYDLYDLGEFNQKGTIRTKYGTKAELKSAVSTLKSNGIQVYGDVVMNHKGGADYTENVTAVEVNPSNRNQETSDEYTIQAWTGFNFPGRGTTHSPFKWQWYHFDGTDWDQSRNASRIFKFRGTGKAWDWEVSSEFGNYDYLMYADLDFDHPDVRNEMKNWGVWYANEVGLDGFRLDAVKHIKHQYLGDWVNHVRTKTGKEMFTVAEYWQNDVNAINNYLAKVNYNHSVFDAPLHYNFHYASQSGGNYDMRNLLNGTVVAAHPTKAVTLVENHDSQPGQSLESVVQPWFKPLAYAFILTRAEGYPSIFYGDMYGTKGNSSYEIPALKTKIEPLLKARKDYAYGTQHNYMDHWDVIGWTREGDSTKEKSGLATLVTDGAGGSKWMYVGKQNAGEVWYDITGNRTDKITINTDGWGNFQVNGGSVSVYVQQ

SEQ ID NO: 43726 - protein, 483 aa, Bacillus sp. YR288
NRTMMQYFEWYVPNDGQHWNRLRNDAAYLKSIGVSAIWTPPAYKGTSQNDVGYGAYDLYDLGEFNQKGTIRTKYGTKAELKSAVSTLKSNGIQVYGDVVMNHKGGADYTENVTAVEVNPSNRNQETSDEYTIQAWTGFNFPGRGTTHSPFKWQWYHFDGTDWDQSRNASRIFKFRGTGKAWDWEVSSENGNYDYLMYADLDFDHPDVRNEMKNWGVWYANEVGLDGFRLDAVKHIKHSYLGDWVNHVRTKTGKTMFTVAEYWQNDVNAINNYLAKVNYNHSVFDAPLHYNFHYASQSGGNYDMRNLLNGTVVAAHPTKAVTLVENHDSQPGQSLESVVQPWFKPLAYAFILTRAEGYPSIFYGDMYGTKGNSSYEIPALKTKIEPLLKARKDYAYGTQHNYMDHWDVIGWTREGDSTKEKSGLATLVTDGSAGGSKWMYVGKQNAGEVWYDITGNRTDKITINTDGWGNFQVNGGSVSVYVQQ

SEQ ID NO: 43727 - protein, 482 aa, Bacillus sp. YR288
NGTMMQYFEWYVPNDGQHWNRLRNDAAYLKSIGVSAIWTPPAYKGTSQNDVGYGAYDLYDLGEFNQKGTIRTKYGTKAELKSAVSTLKSNGIQVYGDVVMNHKGGADYTENVTAVEVNPSNRNQETSDEYTIQAWTGFNFPGRGTTHSPFKWQWYHFDGTDWDQSRNASRIFKFRGTGKAWDWPVSSENGNYDYLMYADLDFDHPDVRNEMKNWGVWYANEVGLDGFRLDAVKHIKHSYLGDWVNHVRTKTGKEMFTVAEYWQNDVNAINNYLATVNYNHSVFDAPLHYNFHYASQSGGNYDMRNLLNGTVVAAHPTKAVTLVENHDSQPGQSLESVVQPWFKPLAYAFILTRAEGYPSIFYGDMYGTKGNSSYEIPALKTKIEPLLKARKDYAYGTQHNYMDHWDVIGWTREGDSTKEKSGLATLVTDGAGGSKWMYVGKQNAGEVWYDITGNRTDKITINTDGWGNFQVNGGSVSVYVQQ

SEQ ID NO: 43728 - protein, 482 aa, Bacillus sp. YR288
NRTMMQYFEWYVPNDGQHWNRLRNDAAYLKSIGVSAIWTPPAYKGTSQNDVGYGAYDLYDLGEFNQKGTIRTKYGTKAELKSAVSTLKSNGIQVYGDVVMNHKGGADYTENVTAVEVNPSNRNQETSDEYTIQAWTGFNFPGRGTTHSPFKWQWYHFDGTDWDQSRNASRIFKFRGTGKAWDWEVSSENGNYDYLMYADLDFDHPDVRNEMKNWGVWYANEVGLDGFRLDAVKHIKHSYLGDWVNHVRTKTGKEMFTVAEYWQNDVNAINNYLAKVNYNHSVFDAPLHYNFHYASQSGGNYDMRNLLNGTVVAAHPTKAVTLVENHDSQPGQSLESVVQPWFKPLAYAFILTRAEGYPSIFYGDMYGTKGNSSYEIPALKTKIEPLLKARKDYAYGTQHNYMDHWDVIGWTREGDSTKEKSGLATLVTDGAGGSKRMYVGKQNAGEVWYDITGNRTDKITINTDGWGNFQVNGGSVSVYVQQ

SEQ ID NO: 43729 - protein, 482 aa, Bacillus sp. YR288
NGTMMQYFEWYVPNDGQHWNRLRNDAAYLKSIGVSAIWTPPAYKGTSQNDVGYGAYDLYDLGEFNQKGTIRTKYGTKAELKSAVSTLKSNGIQVYGDVVMNHKGGADYTENVTAVEVNPSNRNQETSDEYTIQAWTGFNFPGRGTTHSPFKWQWYHFDGTDWDQSRNASRIFKFRGTGKAWDWPVSSENGNYDYLMYADLDFDHPDVRNEMKNWGVWYANEVGLDGFRLDAVKHIKHSYLGDWVNHVRTKTGKEMFTVAEYWQNDVNAINNYLALVNYNHSVFDAPLHYNFHYASQSGGNYDMRNLLNGTVVAAHPTKAVTLVENHDSQPGQSLESVVQPWFKPLAYAFILTRAEGYPSIFYGDMYGTKGNSSYEIPALKTKIEPLLKARKDYAYGTQHNYMDHWDVIGWTREGDSTKEKSGLATLVTDGAGGSKWMYVGKQNAGEVWYDITGNRTDKITINTDGWGNFQVNGGSVSVYVQQ

SEQ ID NO: 43730 - protein, 483 aa, Bacillus sp. YR288
NGTMMQYFEWYVPNDGQHWNRLRNDAAYLKSIGVSAIWTPPAYKGTSQNDVGYGAYDLYDLGEFNQKGTIRTKYGTKAELKSAVSTLKSNGIKVYGDVVMNHKGGADYTENVTAVEVNPSNRNQETSDEYTIQAWTGFNFPGRGTTHSPFKWQWYHFDGTDWDQSRNASRIFKFRGTGKAWDWEVSSENGNYDYLMYADLDFDHPDVRNEMKNWGVWYANEVGLDGFRLDAVKHIKHSYLGDWVNHVRTKTGKEMWTVAEYWQNDVNAINNYLAKVNYNHSVFDAPLHYNFHYASQSGGNYDMRNLLNGTVVAAHPTKAVTLVENHDSQPGQSLESVVQPWFKPLAYAFILTRAEGYPSIFYGDMYGTKGNSSYEIPALKTKIEPLLKARKDYAYGTQHNYMDHWDVIGWTREGDSTKEKSGLATLVTDGSAGGSKWMYVGKQNAGEVWYDITGNRTDKITINTDGWGNFQVNGGSVSVYVQQ

SEQ ID NO: 43731 - protein, 483 aa, Bacillus sp. YR288
NRTMMQYFEWYVPNDGQHWNRLRNDAAYLKSIGVSAIWTPPAYKGTSQNDVGYGAYDLYDLGEFNQKGTIRTKYGTKAELKSAVSTLKSNGIQVYGDVVMNHKGGADYTENVTAVEVNPSNRNQETSDEYTIQAWTGFNFPGRGTTHSPFKWQWYHFDGTDWDQSRNASRIFKFRGTGKAWDWEVSSENGNYDYLMYADLDFDHPDVRNEMKNWGVWYANEVGLDGFRLDAVKHIKHSYLGDWVNHVRTKTGKEMFTVAEYWQNDVNAINNYLAKVNYNHSVFDAPLHYNFHYASQSGGNYDMRNLLNGTVVAAHPTKAVTLVENHDSQPGQSLESVVQPWFKPLAYAFILTRAEGLPSIFYGDMYGTKGNSSYEIPALKTKIEPLLKARKDYAYGTQHNYMDHWDVIGWTREGDSTKEKSGLATLVTDGSAGGSKWMYVGKQNAGEVWYDITGNRTDKITINTDGWGNFQVNGGSVSVYVQQ

SEQ ID NO: 43732 - protein, 482 aa, Bacillus sp. YR288
NRTMMQYFEWYVPNDGQHWNRLRNDAAYLKSIGVSAIWTPPAYKGTSQNDVGYGAYDLYDLGEFNQKGTIRTKYGTKAELKSAVSTLKSNGIQVYGDVVMNHKGGADYTENVTAVEVNPSNRNQETSDEYTIQAWTGFNFPGRGTTHSPFKWQWYHFDGTDWDQSRNASRIFKFRGTGKAWDWEVSSENGNYDYLMYADLDFDHPDVRNEMKNWGVWYANEVGLDGFRLDAVKHIKHSYLGDWVNHVRTKTGKEMFTVAEYWQNDVNAINNYLAKVNYNHSVFDAPLHYNFHYASQSGGNYDMRNLLNGTVVAAHPTKAVTLVENHDSQPGQSLESVVQPWFKPLAYAFILTRAEGLPSIFYGDMYGTKGNSSYEIPALKTKIEPLLKARKDYAYGTQHNYMDHPDVIGWTREGDSTKEKSGLATLVTDGAGGSKWMYVGKQNAGEVWYDITGNRTDKITINTDGWGNFQVNGGSVSVYVQQ

SEQ ID NO: 43733 - protein, 482 aa, Bacillus sp. YR288
NGTMMQYFEWYVPNDGQHWNRLRNDAAYLKSIGVSAIWTPPAYKGTSQNDVGYGAYDLYDLGEFNQKGTIRTKYGTKAELKSAVSTLKSNGIQVYGDVVMNHKGGADYTENVTAVEVNPSNRNQETSDEYTIQAWTGFNFPGRGTTHSPFKWQWYHFDGTDWDQSRNASRIFKFRHTGKAWDWEVSSEFGNYDYLLYADLDYDHPDVINEMKNWGVWYANEVGLDGFRLDAVKHIKFQFLGDWVNHVRTKTGKEMFTVAEYWQNDVNAINNYLAKVNYNHSVFDAPLHYNFHYASQSGGNYDMRNLLNGTVVAAHPTKAVTLVENHDSQPGQSLESVVQPWFKPLAYAFILTRAEGYPSIFYGDMYGTKGNSSYEIPALKTKIEPLLKARKDYAYGTQHNYMDHWDVIGWTREGDSTKEKSGLATLVTDGAGGSKWMYVGKQNAGEVWYDITGNRTDKITINTDGWGNFQVNGGSVSVYVQQ

SEQ ID NO: 43734 - protein, 482 aa, Bacillus sp. YR288
NGTMMQYFEWYVPNDGQHWNRLRNDAAYLKSIGVSAIWTPPAYKGTSQNDVGYGAYDLYDLGEFNQKGTIRTKYGTKAELKSAVSTLKSNGIQVYGDVVMNHKGGADYTENVTAVEVNPSNRNQETSDEYTIQAWTGFNFPGRGTTHSPFKWQWYHFDGTDWDQSRNASRIFKFRGTGKAWDWEVSSENGNYDYLMYADLDYDHPDVRNEMKNWGVWYANEVGLDGFRLDAVKHIKFQFLGDWVNHVRTKTGKTMFTVAEYWQNDVNAINNYLAKVNYNHSVFDAPLHYNFHYASQSGGNYDMRNLLNGTVVAAHPTKAVTLVENHDSQPGQSLESVVQPWFKPLAYAFILTRAEGLPSIFYGDMYGTKGNSSYEIPALKTKIEPLLKARKDYAYGTQHNYMDHWDVIGWTREGDSTKEKSGLATLVTDGAGGSKWMYVGKQNAGEVWYDITGNRTDKITINTDGWGNFQVNGGSVSVYVQQ

SEQ ID NO: 43735 - protein, 482 aa, Bacillus sp. YR288
NGTMMQYFEWYVPNDGQHWNRLRNDAAYLKSIGVSAIWTPPAYKGTSQNDVGYGAYDLYDLGEFNQKGTIRTKYGTKAELKSAVSTLKSNGIQVYGDVVMNHKGGADYTENVTAVEVNPSNRNQETSDEYTIQAWTGFNFPGRGTTHSPFKWQWYHFDGTDWDQSRNASRIFKFRGTGKAWDWPVSSENGNYDYLMYADLDFDHPDVRNEMKNWGVWYANEVGLDGFRLDAVKHIKHSYLGDWVNHVRTKTGKEMFTVAEYWQNDVNAINNYLAIVNYNHSVFDAPLHYNFHYASQSGGNYDMRNLLNGTVVAAHPTKAVTLVENHDSQPGQSLESVVQPWFKPLAYAFILTRAEGYPSIFYGDMYGTKGNSSYEIPALKTKIEPLLKARKDYAYGTQHNYMDHWDVIGWTREGDSTKEKSGLATLVTDGAGGSKWMYVGKQNAGEVWYDITGNRTDKITINTDGWGNFQVNGGSVSVYVQQ

SEQ ID NO: 43736 - protein, 482 aa, Bacillus sp. YR288
NGTMMQYFEWYVPNDGQHWNRLRNDAAYLKSIGVSAIWTPPAYKGTSQNDVGYGAYDLYDLGEFNQKGTIRTKYGTKAELKSAVSTLKSNGIQVYGDVVMNHKGGADYTENVTAVEVNPSNRNQETSDEYTIQAWTGFNFPGRGTTHSPFKWQWYHFDGTDWDQSRNASRIFKFRGTGKAWDWEVSSEFGNYDYLMYADLDYDHPDVRNEMKNWGVWYANEVGLDGFRLDAVKHIKFQYLGDWVNHVRTKTGKEMFTVAEYWQNDVNAINNYLAKVNYNHSVFDAPLHYNFHYASQSGGNYDMRNLLNGTVVAAHPTKAVTLVENHDSQPGQSLESVVQPWFKPLAYAFILTRAEGYPSIFYGDMYGTKGNSSYEIPALKTKIEPLLKARKDYAYGTQHNYMDHWDVIGWTREGDSTKEKSGLATLVTDGAGGSKWMYVGKQNAGEVWYDITGNRTDKITINTDGWGNFQVNGGSVSVYVQQ

SEQ ID NO: 43737 - protein, 482 aa, Bacillus sp. YR288
NGTMMQYFEWYVPNDGQHWNRLRNDAAYLKSIGVSAIWTPPAYKGTSQNDVGYGAYDLYDLGEFNQKGTIRTKYGTKAELKSAVSTLKSNGIQVYGDVVMNHKGGADYTENVTAVEVNPSNRNQETSDEYTIQAWTGFNFPGRGTTHSPFKWQWYHFDGTDWDQSRNASRIFKFRGTGKAWDWEVSSENGNYDYLMYADLDFDHPDVRNEMKNWGVWYANEVGLDGFRLDAVKHIKHSYLGDWVNHVRTKTGKTMFTVAEYWQNDVNAINNYLAKVNYNHSVFDAPLHYNFHYASQSGGNYDMRNLLNGTVVAAHPTKAVTLVENHDSQPGQSLESVVQPWFKPLAYAFILTRAEGMPSIFYGDMYGTKGNSSYEIPALKTKIEPLLKARKDYAYGTQHNYMDHWDVIGWTREGDSTKEKSGLATLVTDGAGGSKWMYVGKQNAGEVWYDITGNRTDKITINTDGWGNFQVNGGSVSVYVQQ

SEQ ID NO: 43738 - protein, 482 aa, Bacillus sp. YR288
NRTMMQYFEWYVPNDGQHWNRLRNDAAYLKSIGVSAIWTPPAYKGTSQNDVGYGAYDLYDLGEFNQKGTIRTKYGTKAELKSAVSTLKSNGIQVYGDVVMNHKGGADYTENVTAVEVNPSNRNQETSDEYTIQAWTGFNFPGRGTTHSPFKWQWYHFDGTDWDQSRNASRIFKFRGTGKAWDWEVSSENGNYDYLMYADLDFDHPDVRNEMKNWGVWYANEVGLDGFRLDAVKHIKHSYLGDWVNHVRTKTGKEMFTVAEYWQNDVNAINNYLAKVNYNHWVFDAPLHYNFHYASQSGGNYDMRNLLNGTVVAAHPEKAVTLVENHDSQPGQSLESVVQPWFKPLAYAFILTRAEGYPSIFYGDMYGTKGNSSYEIPALKTKIEPLLKARKDYAYGTQHNYMDHWDVIGWTREGDSTKEKSGLATLVTDGAGGSKWMYVGKQNAGEVWYDITGNRTDKITINTDGWGNFQVNGGSVSVYVQQ

SEQ ID NO: 43739 - protein, 482 aa, Bacillus sp. YR288
NGTMMQYFEWYVPNDGQHWNRLRNDAAYLKSIGVSAIWTPPAYKGTSQNDVGYGAYDLYDLGEFNQKGTIRTKYGTKAELKSAVSTLKSNGIQVYGDVVMNHKGGADYTENVTAVEVNPSNRNQETSDEYTIQAWTGFNFPGRGTTHSPFKWQWYHFDGTDWDQSRNASRIFKFRGTGKAWDWPVSSENGNYDYLMYADLDFDHPDVRNEMKNWGVWYANEVGLDGFRLDAVKHIKHSYLGDWVNHVRTKTGKEMFTVAEYWQNDVNAINNYLAVVNYNHSVFDAPLHYNFHYASQSGGNYDMRNLLNGTVVAAHPTKAVTLVENHDSQPGQSLESVVQPWFKPLAYAFILTRAEGYPSIFYGDMYGTKGNSSYEIPALKTKIEPLLKARKDYAYGTQHNYMDHWDVIGWTREGDSTKEKSGLATLVTDGAGGSKWMYVGKQNAGEVWYDITGNRTDKITINTDGWGNFQVNGGSVSVYVQQ

SEQ ID NO: 43740 - protein, 482 aa, Bacillus sp. YR288
NGTMMQYFEWYVPNDGQHWNRLRNDAAYLKSIGVSAIWTPPAYKGTSQNDVGYGAYDLYDLGEFNQKGTIRTKYGTKAELKSAVSTLKSNGIKVYGDVVMNHKGGADYTENVTAVEVNPSNRNQETSDEYTIQAWTGFNFPGRGTTHSPFKWQWYHFDGTDWDQSRNASRIFKFRGTGKAWDWEVSSENGNYDYLMYADLDFDHPDVRNEMKNWGVWYANEVGLDGFRLDAVKHIKHSYLGDWVNHVRTKTGKTMFTVAEYWQNDVNAINNYLAKVNYNHSVFDAPLHYNFHYASQSGGNYDMRNLLNGTVVAAHPEKAVTLVENHDSQPGQSLESVVQPWFKPLAYAFILTRAEGYPSIFYGDMYGTKGNSSYEIPALKTKIEPLLKARKDYAYGTQHNYMDHPDVIGWTREGDSTKEKSGLATLVTDGAGGSKWMYVGKQNAGEVWYDITGNRTDKITINTDGWGNFQVNGGSVSVYVQQ

SEQ ID NO: 43741 - protein, 482 aa, Bacillus sp. YR288
NRTMMQYFEWYVPNDGQHWNRLRNDAAYLKSIGVSAIWTPPAYKGTSQNDVGYGAYDLYDLGEFNQKGTIRTKYGTKAELKSAVSTLKSNGIQVYGDVVMNHKGGADYTENVTAVEVNPSNRNQETSDEYTIQAWTGFNFPGRGTTHSPFKWQWYHFDGTDWDQSRNASRIFKFRGTGKAWDWEVSSENGNYDYLMYADLDFDHPDVRNEMKNWGVWYANEVGLDGFRLDAVKHIKHSYLGDWVNHVRTKTGKEMFTVAEYWQNDVNAINNYLAKVNYNHSVFDAPLHYNFHYASQSGGNYDMRNLLNGTVVAAHPTKAVTLVENHDSQPGQSLESVVQPWFKPLAYAFILTRAEGLPSIFYGDMYGTKGNSSYEIPALKTKIEPLLKARKDYAYGTQHNYMDHWDVIGWTREGDSTKEKSGLATLVTDGAGGSKWMYVGKQNAGEVWYDITGNRTDKITINTDGWGNFQVNGGSVSVYVQQ

SEQ ID NO: 43742 - protein, 482 aa, Bacillus sp. YR288
NGTMMQYFEWYVPNDGQHWNRLRNDAAYLKSIGVSAIWTPPAYKGTSQNDVGYGAYDLYDLGEFNQKGTIRTKYGTKAELKSAVSTLKSNGIKVYGDVVMNHKGGADYTENVTAVEVNPSNRNQETSDEYTIQAWTGFNFPGRGTTHSPFKWQWYHFDGTDWDQSRNASRIFKFRGTGKAWDWEVSSENGNYDYLMYADLDFDHPDVRNEMKNWGVWYANEVGLDGFRLDAVKHIKHSYLGDWVNHVRTKTGKTMFTVAEYWQNDVNAINNYLAKVNYNHSVFDAPLHYNFHYASQSGGNYDMRNLLNGTVVAAHPTKAVTLVENHDSQPGQSLESVVQPWFKPLAYAFILTRAEGYPSIFYGDMYGTKGNSSYEIPALKTKIEPLLKARKDYAYGTQHNYMDHPDVIGWTREGDSTKEKSGLATLVTDGAGGSKWMYVGKQNAGEVWYDITGNRTDKITINTDGWGNFQVNGGSVSVYVQQ

SEQ ID NO: 43743 - protein, 482 aa, Bacillus sp. YR288
NGTMMQYFEWYVPNDGQHWNRLRNDAAYLKSIGVSAIWTPPAYKGTSQNDVGYGAYDLYDLGEFNQKGTIRTKYGTKAELKSAVSTLKSNGIQVYGDVVMNHKGGADYTENVTAVEVNPSNRNQETSDEYTIQAWTGFNFPGRGTTHSPFKWQWYHFDGTDWDQSRNASRIFKFRGTGKAWDWEVSSENGNYDYLMYADLDFDHPDVRNEMKNWGVWYANEVGLDGFRLDAVKHIKHSYLGDWVNHVRTKTGKTMFTVAEYWQNDVNAINNYLAKVNYNHSVFDAPLHYNFHYASQSGGNYDMRNLLNGTVVAAHPTKAVTLVENHDSQPGQSLESVVQPWFKPLAYAFILTRAEGCPSIFYGDMYGTKGNSSYEIPALKTKIEPLLKARKDYAYGTQHNYMDHWDVIGWTREGDSTKEKSGLATLVTDGAGGSKWMYVGKQNAGEVWYDITGNRTDKITINTDGWGNFQVNGGSVSVYVQQ

SEQ ID NO: 43744 - protein, 482 aa, Bacillus sp. YR288
NGTMMQYFEWYVPNDGQHWNRLRNDAAYLKSIGVSAIWTPPAYKGTSQNDVGYGAYDLYDLGEFNQKGTIRTKYGTKAELKSAVSTLKSNGIQVYGDVVMNHKGGADYTENVTAVEVNPSNRNQETSDEYTIQAWTGFNFPGRGTTHSPFKWQWYHFDGTDWDQSRNASRIFKFRGTGKAWDWPVSSENGNYDYLMYADLDFDHPDVRNEMKNWGVWYANEVGLDGFRLDAVKHIKHSYLGDWVNHVRTKTGKEMFTVAEYWQNDVNAINNYLAWVNYNHSVFDAPLHYNFHYASQSGGNYDMRNLLNGTVVAAHPTKAVTLVENHDSQPGQSLESVVQPWFKPLAYAFILTRAEGYPSIFYGDMYGTKGNSSYEIPALKTKIEPLLKARKDYAYGTQHNYMDHWDVIGWTREGDSTKEKSGLATLVTDGAGGSKWMYVGKQNAGEVWYDITGNRTDKITINTDGWGNFQVNGGSVSVYVQQ

SEQ ID NO: 43745 - protein, 482 aa, Bacillus sp. YR288
NGTMMQYFEWYVPNDGQHWNRLRNDAAYLKSIGVSAIWTPPAYKGTSQNDVGYGAYDLYDLGEFNQKGTIRTKYGTKAELKSAVSTLKSNGIKVYGDVVMNHKGGADYTENVTAVEVNPSNRNQETSDEYTIQAWTGFNFPGRGTTHSPFKWQWYHFDGTDWDQSRNASRIFKFRGTGKAWDWEVSSENGNYDYLMYADLDFDHPDVRNEMKNWGVWYANEVGLDGFRLDAVKHIKHSYLGDWVNHVRTKTGKEMWTVAEYWQNDVNAINNYLAKVNYNHSVFDAPLHYNFHYASQSGGNYDMRNLLNGTVVAAHPTKAVTLVENHDSQPGQSLESVVQPWFKPLAYAFILTRAEGYPSIFYGDMYGTKGNSSYEIPALKTKIEPLLKARKDYAYGTQHNYMDHPDVIGWTREGDSTKEKSGLATLVTDGAGGSKWMYVGKQNAGEVWYDITGNRTDKITINTDGWGNFQVNGGSVSVYVQQ

SEQ ID NO: 43746 - protein, 482 aa, Bacillus sp. YR288
NRTMMQYFEWYVPNDGQHWNRLRNDAAYLKSIGVSAIWTPPAYKGTSQNDVGYGAYDLYDLGEFNQKGTIRTKYGTKAELKSAVSTLKSNGIQVYGDVVMNHKGGADYTENVTAVEVNPSNRNQETSDEYTIQAWTGFNFPGRGTTHSPFKWQWYHFDGTDWDQSRNASRIFKFRGTGKAWDLEVSSENGNYDYLMYADLDFDHPDVRNEMKNWGVWYANEVGLDGFRLDAVKHIKHSYLGDWVNHVRTKTGKEMFTVAEYWQNDVNAINNYLAKVNYNHSVFDAPLHYNFHYASQSGGNYDMRNLLNGTVVAAHPTKAVTLVENHDSQPGQSLESVVQPWFKPLAYAFILTRAEGYPSIFYGDMYGTKGNSSYEIPALKTKIEPLLKARKDYAYGTQHNYMDHWDVIGWTREGDSTKEKSGLATLVTDGAGGSKWMYVGKQNAGEVWYDITGNRTDKITINTDGWGNFQVNGGSVSVYVQQ

SEQ ID NO: 43747 - protein, 480 aa, Bacillus licheniformis
NGTLMQYFEWYMPNDGQHWRRLQNDSAYLAEHGITAVWIPPAYKGLTQADVGYGAYDLYDLGEFHQKGTVRTKYGTKGELQSAIKSLHSRDINVYGDVVINHKGGADATEDVTAVEVDPADRNRVISGEHLIKAWTHFHFPGRGSTYSDFKWHWYHFDGTDWDESRKLNRIYLFQGKAWDWPVSNENGNYDYLMYADIDYDHPDVAAEIKRWGTWYANELQLDGFRLDAVKHIKFSFLRDWVNHVREKTGKEMFTVAEYWQNDLGALENYLNKTNFNHSVFDVPLHYQFHAASTQGGGYDMRKLLNGTVVSKHPLKSVTFVDNHDTQPGQSLESTVQTWFKPLAYAFILTRESGYPQVFYGDMYGTKGDSQREIPALKHKIEPILKARKQYAYGAQHDYFDHHDIVGWTREGDSSVANSGLAALITDGPGGAKRMYVGRQNAGETWHDITGNRSEPVVINSEGWGEFHVNGGSVSIYVQR

SEQ ID NO: 43748 - protein, 482 aa, Bacillus sp. YR288
NGTMMQYFEWYVPNDGQHWNRLRNDAAYLKSIGVSAIWTPPAYKGTSQNDVGYGAYDLYDLGEFNQKGTIRTKYGTKAELKSAVSTLKSNGIQVYGDVVMNHKGGADYTENVTAVEVNPSNRNQETSDEYTIQAWTGFNFPGRGTTHSPFKWQWYHFDGTDWDQSRNASRIFKFRGTGKAWDWEVSSENGNYDYLMYADLDFDHPDVRNEMKNWGVWYANEVGLDGFRLDAVKHIKHSYLGDWVNHVRTKTGKTMFTVAEYWQNDVNAINNYLAKVNYNHSVFDAPLHYNFHYASQSGGNYDMRNLLNGTVVAAHPTKAVTLVENHDSQPGQSLESVVQPWFKPLAYAFILTRAEGLPSIFYGDMYGTKGNSSYEIPALKTKIEPLLKARKDYAYGTQHNYMDHWDVIGWTREGDSTKEKSGLATLVTDGAGGSKWMYVGKQNAGEVWYDITGNRTDKITINTDGWGNFQVNGGSVSVYVQQ

SEQ ID NO: 43749 - protein, 482 aa, Bacillus sp. YR288
NGTMMQYFEWYVPNDGQHWNRLRNDAAYLKSIGVSAIWTPPAYKGTSQNDVGYGAYDLYDLGEFNQKGTIRTKYGTKAELKSAVSTLKSNGIQVYGDVVMNHKGGADYTENVTAVEVNPSNRNQETSDEYTIQAWTGFNFPGRGTTHSPFKWQWYHFDGTDWDQSRNASRIFKFRGTGKAWDWEVSSENGNYDYLMYADLDFDHPDVRNEMKNWGVWYANEVGLDGFRLDAVKHIKHSYLGDWVNHVRTKTGKEMFTVAEYWQNDVNAINNYLAKVNYNHSVFDAPLHYNFHYASQSGGNYDMRNLLNGTVVAAHPEKAVTLVENHDSQPGQSLESVVQPWFKPLAYAFILTRAEGYPSIFYGDMYGTKGNSSYEIPALKTKIEPLLKARKDYAYGTQHNYMDHWDVIGWTREGDSTKEKSGLATLVTDGAGGSKRMYVGKQNAGEVWYDITGNRTDKITINTDGWGTFQVNGGSVSVYVQQ

SEQ ID NO: 43750 - protein, 482 aa, Bacillus sp. YR288
NGTMMQYFEWYVPNDGQHWNRLRNDAAYLKSIGVSAIWTPPAYKGTSQNDVGYGAYDLYDLGEFNQKGTIRTKYGTKAELKSAVSTLKSNGIQVYGDVVMNHKGGADYTENVTAVEVNPSNRNQETSDEYTIQAWTGFNFPGRGTTHSPFKWQWYHFDGTDWDQSRNASRIFKFRGTGKAWDWPVSSENGNYDYLMYADLDFDHPDVRNEMKNWGVWYANEVGLDGFRLDAVKHIKHSYLGDWVNHVRTKTGKEMFTVAEYWQNDVNAINNYLAKVNYNQSVFDAPLHYNFHYASQSGGNYDMRNLLNGTVVAAHPTKAVTLVENHDSQPGQSLESVVQPWFKPLAYAFILTRAEGYPSIFYGDMYGTKGNSSYEIPALKTKIEPLLKARKDYAYGTQHNYMDHWDVIGWTREGDSTKEKSGLATLVTDGAGGSKWMYVGKQNAGEVWYDITGNRTDKITINTDGWGNFQVNGGSVSVYVQQ

SEQ ID NO: 43751 - protein, 482 aa, Bacillus sp. YR288
NRTMMQYFEWYVPNDGQHWNRLRNDAAYLKSIGVSAIWTPPAYKGTSQNDVGYGAYDLYDLGEFNQKGTIRTKYGTKAELKSAVSTLKSNGIQVYGDVVMNHKGGADYTENVTAVEVNPSNRNQETSDEYTIQAWTGFNFPGRGTTHSPFKWQWYHFDGTDWDQSRNASRIFKFRGTGKAWDWEVSSENGNYDYLMYADLDFDHPDVRNEMKNWGVWYANEVGLDGFRLDAVKHIKHSYLGDWVNHVRTKTGKTMFTVAEYWQNDVNAINNYLAKVNYNHSVFDAPLHYNFHYASQSGGNYDMRNLLNGTVVAAHPTKAVTLVENHDSQPGQSLESVVQPWFKPLAYAFILTRAEGYPSIFYGDMYGTKGNSSYEIPALKTKIEPLLKARKDYAYGTQHNYMDHWDVIGWTREGDSTKEKSGLATLVTDGAGGSKWMYVGKQNAGEVWYDITGNRTDKITINTDGWGNFQVNGGSVSVYVQQ

SEQ ID NO: 43752 - protein, 482 aa, Bacillus sp. YR288
NGTMMQYFEWYVPNDGQHWNRLRNDAAYLKSIGVSAIWTPPAYKGTSQNDVGYGAYDLYDLGEFNQKGTIRTKYGTKAELKSAVSTLKSNGIQVYGDVVMNHKGGADYTENVTAVEVNPSNRNQETSDEYTIQAWTGFNFPGRGTTHSPFKWQWYHFDGTDWDQSRNASRIFKFRGTGKAWDLEVSSENGNYDYLMYADLDFDHPDVRNEMKNWGVWYANEVGLDGFRLDAVKHIKHSYLGDWVNHVRTKTGKEMFTVAEYWQNDVNAINNYLAKVNYNHSVFDAPLHYNFHYASQSGGNYDMRNLLNGTVVAAHPTKAVTLVENHDSQPGQSLESVVQPWFKPLAYAFILTRAEGYPSIFYGDMYGTKGNSSYEIPALKTKIEPLLKARKDYAYGTQHNYMDHPDVIGWTREGDSTKEKSGLATLVTDGAGGSKWMYVGKQNAGEVWYDITGNRTDKITINTDGWGTFQVNGGSVSVYVQQ

SEQ ID NO: 43753 - protein, 482 aa, Bacillus sp. YR288
NGTMMQYFEWYVPNDGQHWNRLRNDAAYLKSIGVSAIWTPPAYKGTSQNDVGYGAYDLYDLGEFNQKGTIRTKYGTKAELKSAVSTLKSNGIKVYGDVVMNHKGGADYTENVTAVEVNPSNRNQETSDEYTIQAWTGFNFPGRGTTHSPFKWQWYHFDGTDWDQSRNASRIFKFRGTGKAWDWEVSSENGNYDYLMYADLDFDHPDVRNEMKNWGVWYANEVGLDGFRLDAVKHIKHSYLGDWVNHVRTKTGKTMFTVAEYWQNDVNAINNYLAKVNYNHSVFDAPLHYNFHYASQSGGNYDMRNLLNGTVVAAHPTKAVTLVENHDSQPGQSLESVVQPWFKPLAYAFILTRAEGYPSIFYGDMYGTKGNSSYEIPALKTKIEPLLKARKDYAYGTQHNYMDHPDVIGWTREGDSTKEKSGLATLVTDGVGGSKWMYVGKQNAGEVWYDITGNRTDKITINTDGWGNFQVNGGSVSVYVQQ

SEQ ID NO: 43754 - protein, 482 aa, Bacillus sp. YR288
NGTMMQYFEWYVPNDGQHWNRLRNDAAYLKSIGVSAIWTPPAYKGTSQNDVGYGAYDLYDLGEFNQKGTIRTKYGTKAELKSAVSTLKSNGIKVYGDVVMNHKGGADYTENVTAVEVNPSNRNQETSDEYTIQAWTGFNFPGRGTTHSPFKWQWYHFDGTDWDQSRNASRIFKFRGTGKAWDWEVSSENGNYDYLMYADLDFDHPDVRNEMKNWGVWYANEVGLDGFRLDAVKHIKHSYLGDWVNHVRTKTGKEMFTVAEYWQNDVNAINNYLAKVNYNHSVFDAPLHYNFHYASQSGGNYDMRNLLNGTVVAAHPEKAVTLVENHDSQPGQSLESVVQPWFKPLAYAFILTRAEGLPSIFYGDMYGTKGNSSYEIPALKTKIEPLLKARKDYAYGTQHNYMDHPDVIGWTREGDSTKEKSGLATLVTDGVGGSKWMYVGKQNAGEVWYDITGNRTDKITINTDGWGNFQVNGGSVSVYVQQ

SEQ ID NO: 43755 - protein, 482 aa, Bacillus sp. YR288
NGTMMQYFEWYVPNDGQHWNRLRNDAAYLKSIGVSAIWTPPAYKGTSQNDVGYGAYDLYDLGEFNQKGTIRTKYGTKAELKSAVSTLKSNGIQVYGDVVMNHKGGADYTENVTAVEVNPSNRNQETSDEYTIQAWTGFNFPGRGTTHSPFKWQWYHFDGTDWDQSRNASRIFKFRGTGKAWDWEVSSENGNYDYLMYADLDFDHPDVRNEMKNWGVWYANEVGLDGFRLDAVKHIKHSYLGDWVNHVRTKTGKTMFTVAEYWQNDVNAINNYLAKVNYNHSVFDAPLHYNFHYASQSGGNYDMRNLLNGTVVAAHPTKAVTLVENHDSQPGQSLESVVQPWFKPLAYAFILTRAEGVPSIFYGDMYGTKGNSSYEIPALKTKIEPLLKARKDYAYGTQHNYMDHWDVIGWTREGDSTKEKSGLATLVTDGAGGSKWMYVGKQNAGEVWYDITGNRTDKITINTDGWGNFQVNGGSVSVYVQQ

SEQ ID NO: 43756 - protein, 482 aa, Bacillus sp. YR288
NGTMMQYFEWYVPNDGQHWNRLRNDAAYLKSIGVSAIWTPPAYKGTSQNDVGYGAYDLYDLGEFNQKGTIRTKYGTKAELKSAVSTLKSNGIQVYGDVVMNHKGGADYTENVTAVEVNPSNRNQETSDEYTIQAWTGFNFPGRGTTHSPFKWQWYHFDGTDWDQSRNASRIFKFRHTGKAWDWPVSSEFGNYDYLMYADLDFDHPDVRNEMKNWGVWYANEVGLDGFRLDAVKHIKHSYLGDWVNHVRTKTGKEMFTVAEYWQNDVNAINNYLAKVNYNHSVFDAPLHYNFHYASQSGGNYDMRNLLNGTVVAAHPTKAVTLVENHDSQPGQSLESVVQPWFKPLAYAFILTRAEGYPSIFYGDMYGTKGNSSYEIPALKTKIEPLLKARKDYAYGTQHNYMDHWDVIGWTREGDSTKEKSGLATLVTDGAGGSKWMYVGKQNAGEVWYDITGNRTDKITINTDGWGNFQVNGGSVSVYVQQ

SEQ ID NO: 43757 - protein, 482 aa, Bacillus sp. YR288
NGTMMQYFEWYVPNDGQHWNRLRNDAAYLKSIGVSAIWTPPAYKGTSQNDVGYGAYDLYDLGEFNQKGTIRTKYGTKAELKSAVSTLKSNGIQVYGDVVMNHKGGADYTENVTAVEVNPSNRNQETSDEYTIQAWTGFNFPGRGTTHSPFKWQWYHFDGTDWDQSRNASRIFKFRGTGKAWDWEVSSENGNYDYLMYADLDFDHPDVRNEMKNWGVWYANEVGLDGFRLDAVKHIKHSYLGDWVNHVRTKTGKEMFTVAEYWQNDVNAINNYLAKVNYNHSVFDAPLHYNFHYASQSGGNYDMRNLLNGTVVAAHPTKAVTLVENHDSQPGQSLESVVQPWFKPLAYAFILTRAEGLPSIFYGDMYGTKGNSSYEIPALKTKIEPLLKARKDYAYGTQHNYMDHWDVIGWTREGDSTKEKSGLATLVTDGVGGSKWMYVGKQNAGEVWYDITGNRTDKITINTDGWGTFQVNGGSVSVYVQQ

SEQ ID NO: 43758 - protein, 482 aa, Bacillus sp. YR288
NGTMMQYFEWYVPNDGQHWNRLRNDAAYLKSIGVSAIWTPPAYKGTSQNDVGYGAYDLYDLGEFNQKGTIRTKYGTKAELKSAVSTLKSNGIQVYGDVVMNHKGGADYTENVTAVEVNPSNRNQETSDEYTIQAWTGFNFPGRGTTHSPFKWQWYHFDGTDWDQSRNASRIFKFRGTGKAWDWEVSSENGNYDYLMYADLDYDHPDVRNEMKNWGVWYANEVGLDGFRLDAVKHIKFQFLGDWVNHVRTKTGKTMFTVAEYWQNDVNAINNYLAKVNYNHSVFDAPLHYNFHYASQSGGNYDMRNLLNGTVVAAHPTKAVTLVENHDSQPGQSLESVVQPWFKPLAYAFILTRAEGLPSIFYGDMYGTKGNSSYEIPALKTKIEPLLKARKDYAYGTQHNYMDHPDVIGWTREGDSTKEKSGLATLVTDGAGGSKWMYVGKQNAGEVWYDITGNRTDKITINTDGWGNFQVNGGSVSVYVQQ

SEQ ID NO: 43759 - protein, 482 aa, Bacillus sp. YR288
NGTMMQYFEWYVPNDGQHWNRLRNDAAYLKSIGVSAIWTPPAYKGTSQNDVGYGAYDLYDLGEFNQKGTIRTKYGTKAELKSAVSTLKSNGIQVYGDVVMNHKGGADYTENVTAVEVNPSNRNQETSDEYTIQAWTGFNFPGRGTTHSPFKWQWYHFDGTDWDQSRNASRIFKFRGTGKAWDWPVSSENGNYDYLMYADLDFDHPDVRNEMKNWGVWYANEVGLDGFRLDAVKHIKHSYLGDWVNHVRTKTGKEMFTVAEYWQNDVNAINNYLAHVNYNHSVFDAPLHYNFHYASQSGGNYDMRNLLNGTVVAAHPTKAVTLVENHDSQPGQSLESVVQPWFKPLAYAFILTRAEGYPSIFYGDMYGTKGNSSYEIPALKTKIEPLLKARKDYAYGTQHNYMDHWDVIGWTREGDSTKEKSGLATLVTDGAGGSKWMYVGKQNAGEVWYDITGNRTDKITINTDGWGNFQVNGGSVSVYVQQ

SEQ ID NO: 43760 - protein, 482 aa, Bacillus sp. YR288
NGTMMQYFEWYVPNDGQHWNRLRNDAAYLKSIGVSAIWTPPAYKGTSQNDVGYGAYDLYDLGEFNQKGTIRTKYGTKAELKSAVSTLKSNGIQVYGDVVMNHKGGADYTENVTAVEVNPSNRNQETSDEYTIQAWTGFNFPGRGTTHSPFKWQWYHFDGTDWDQSRNASRIFKFRGTGKAWDWEVSSEFGNYDYLMYADLDYDHPDVINEMKNWGVWYANEVGLDGFRLDAVKHIKFQYLGDWVNHVRTKTGKEMFTVAEYWQNDVNAINNYLAKVNYNHSVFDAPLHYNFHYASQSGGNYDMRNLLNGTVVAAHPTKAVTLVENHDSQPGQSLESVVQPWFKPLAYAFILTRAEGYPSIFYGDMYGTKGNSSYEIPALKTKIEPLLKARKDYAYGTQHNYMDHWDVIGWTREGDSTKEKSGLATLVTDGAGGSKWMYVGKQNAGEVWYDITGNRTDKITINTDGWGNFQVNGGSVSVYVQQ

SEQ ID NO: 43761 - protein, 482 aa, Bacillus sp. YR288
NGTMMQYFEWYVPNDGQHWNRLRNDAAYLKSIGVSAIWTPPAYKGTSQNDVGYGAYDLYDLGEFNQKGTIRTKYGTKAELKSAVSTLKSNGIQVYGDVVMNHKGGADYTENVTAVEVNPSNRNQETSDEYTIQAWTGFNFPGRGTTHSPFKWQWYHFDGTDWDQSRNASRIFKFRGTGKAWDWPVSSENGNYDYLMYADLDFDHPDVRNEMKNWGVWYANEVGLDGFRLDAVKHIKHSYLGDWVNHVRTKTGKEMFTVAEYWQNDVNAINNYLADVNYNHSVFDAPLHYNFHYASQSGGNYDMRNLLNGTVVAAHPTKAVTLVENHDSQPGQSLESVVQPWFKPLAYAFILTRAEGYPSIFYGDMYGTKGNSSYEIPALKTKIEPLLKARKDYAYGTQHNYMDHWDVIGWTREGDSTKEKSGLATLVTDGAGGSKWMYVGKQNAGEVWYDITGNRTDKITINTDGWGNFQVNGGSVSVYVQQ

SEQ ID NO: 43762 - protein, 480 aa, Bacillus licheniformis
NGTLMQYFEWYMPNDGQHWRRLQNDSAYLAEHGITAVWIPPAYKGTSQADVGYGAYDLYDLGEFHQKGTVRTKYGTKGELQSAIKSLHSRDINVYGDVVINHKGGADATEDVTAVEVDPADRNRVISGEHLIKAWTHFHFPGRGSTYSDFKWHWYHFDGTDWDESRKLNRIYKFQGKTWDWYVSNEFGNYDYLMYADIDYDHPDVAAEIKRWGTWYANELQLDGFRLDAVKHIKFSFLRDWVNHVREKTGKEMFTVAEYWSNDLGALENYLNKTNFNHSVFDVPLHVQFHAASTQGGGYDMRKLLNGTVVSKHPLKSVTFVDNHDTQPGQSLESTVQTWFKPLAYAFILTRESGYPQVFYGDMYGTKGDSQREIPALKHKIEPILKARKQYAYGAQHDYFDHHDIVGWTREGDSSVANSGLAALITDGPGGAKRMYVGRQNAGETWHDITGNRSEPVVINSEGWGEFHVNGGSVSIYVQR

SEQ ID NO: 43763 - protein, 482 aa, Bacillus sonorensis
NGTLMQYFEWNLPNDGQHWKRLQNDAGYLSDIGITAVWIPPAYKGTSQADVGYGPYDLYDLGEFLQKGTVRTKYGMKTELQSRVGSLHSQNIQVYGDVVLNHKAGADLTEDVTAVEVNPGNRNQEISGEYRIKAWTGFNFPGRGSTYSDFKWHWYHFDGTDWDESRKLNRIYKFRGDGKAWDWEVSSENGNYDYLMYADVDYDHPDVVAEMKRWGTWYAKELQLDGFRLDAVKHIKFQFLSDWLSAVRSQTGKEMFTVAEYWQNNLGEIENYLQKTDFQHSVFDVPLHFNLQAASSHGGSYDMRNLLNGTVVSKHPLKAVTFVDNHGTQPGQSLESTVQTWFKPLAYAFILTREAGYPQVFYGDMYGTKGPTSREIPSLKSKCEPILKARKYYAYGTQHDYFDHPDAIGWTREGDQSVAASGLAALITDGPGGSKRMYVGRQHAGETWHDITGNRSDSVVINSDGWGEFYVNGGSVSIYVQR

SEQ ID NO: 43764 - protein, 482 aa, Bacillus sp. YR288
NGTMMQYFEWYVPNDGQHWNRLRNDAAYLKSIGVSAIWTPPAYKGTSQNDVGYGAYDLYDLGEFNQKGTIRTKYGTKAELKSAVSTLKSNGIQVYGDVVMNHKGGADYTENVTAVEVNPSNRNQETSDEYTIQAWTGFNFPGRGTTHSPFKWQWYHFDGTDWDQSRNASRIFKFRGTGKAWDWEVSSENGNYDYLMYADLDFDHPDVRNEMKNWGVWYANEVGLDGFRLDAVKHIKHSYLGDWVNHVRTKTGKEMFTVAEYWQNDVNAINNYLAKVNYNHSVFDAPLHYNFHYASQSGGNYDMRNLLNGTVVAAHPEKAVTLVENHDSQPGQSLESVVQPWFKPLAYAFILTRAEGLPSIFYGDMYGTKGNSSYEIPALKTKIEPLLKARKDYAYGTQHNYMDHWDVIGWTREGDSTKEKSGLATLVTDGAGGSKRMYVGKQNAGEVWYDITGNRTDKITINTDGWGNFQVNGGSVSVYVQQ

SEQ ID NO: 43765 - protein, 482 aa, Bacillus sp. YR288
NGTMMQYFEWYVPNDGQHWNRLRNDAAYLKSIGVSAIWTPPAYKGTSQNDVGYGAYDLYDLGEFNQKGTIRTKYGTKAELKSAVSTLKSNGIQVYGDVVMNHKGGADYTENVTAVEVNPSNRNQETSDEYTIQAWTGFNFPGRGTTHSPFKWQWYHFDGTDWDQSRNASRIFKFRGTGKAWDWEVSSENGNYDYLMYADLDYDHPDVINEMKNWGVWYANEVGLDGFRLDAVKHIKFQFLGDWVNHVRTKTGKTMFTVAEYWQNDVNAINNYLAKVNYNHSVFDAPLHYNFHYASQSGGNYDMRNLLNGTVVAAHPTKAVTLVENHDSQPGQSLESVVQPWFKPLAYAFILTRAEGLPSIFYGDMYGTKGNSSYEIPALKTKIEPLLKARKDYAYGTQHNYMDHWDVIGWTREGDSTKEKSGLATLVTDGAGGSKWMYVGKQNAGEVWYDITGNRTDKITINTDGWGNFQVNGGSVSVYVQQ

SEQ ID NO: 43766 - protein, 482 aa, Bacillus sp. YR288
NGTMMQYFEWYVPNDGQHWNRLRNDAAYLKSIGVSAIWTPPAYKGTSQNDVGYGAYDLYDLGEFNQKGTIRTKYGTKAELKSAVSTLKSNGIQVYGDVVMNHKGGADYTENVTAVEVNPSNRNQETSDEYTIQAWTGFNFPGRGTTHSPFKWQWYHFDGTDWDQSRNASRIFKFRGTGKAWDWPVSSEFGNYDYLMYADLDFDHPDVRNEMKNWGVWYANEVGLDGFRLDAVKHIKHSYLGDWVNHVRTKTGKEMFTVAEYWQNDVNAINNYLAKVNYNHSVFDAPLHYNFHYASQSGGNYDMRNLLNGTVVAAHPTKAVTLVENHDSQPGQSLESVVQPWFKPLAYAFILTRAEGYPSIFYGDMYGTKGNSSYEIPALKTKIEPLLKARKDYAYGTQHNYMDHWDVIGWTREGDSTKEKSGLATLVTDGAGGSKWMYVGKQNAGEVWYDITGNRTDKITINTDGWGNFQVNGGSVSVYVQQ

SEQ ID NO: 43767 - protein, 482 aa, Bacillus sp. YR288
NGTMMQYFEWYVPNDGQHWNRLRNDAAYLKSIGVSAIWTPPAYKGTSQNDVGYGAYDLYDLGEFNQKGTIRTKYGTKAELKSAVSTLKSNGIQVYGDVVMNHKGGADYTENVTAVEVNPSNRNQETSDEYTIQAWTGFNFPGRGTTHSPFKWQWYHFDGTDWDQSRNASRIFKFRGTGKAWDWPVSSEFGNYDYLMYADLDFDHPDVINEMKNWGVWYANEVGLDGFRLDAVKHIKHSYLGDWVNHVRTKTGKEMFTVAEYWQNDVNAINNYLAKVNYNHSVFDAPLHYNFHYASQSGGNYDMRNLLNGTVVAAHPTKAVTLVENHDSQPGQSLESVVQPWFKPLAYAFILTRAEGYPSIFYGDMYGTKGNSSYEIPALKTKIEPLLKARKDYAYGTQHNYMDHWDVIGWTREGDSTKEKSGLATLVTDGAGGSKWMYVGKQNAGEVWYDITGNRTDKITINTDGWGNFQVNGGSVSVYVQQ

SEQ ID NO: 43768 - protein, 482 aa, Bacillus sp. YR288
NGTMMQYFEWYVPNDGQHWNRLRNDAAYLKSIGVSAIWTPPAYKGTSQNDVGYGAYDLYDLGEFNQKGTIRTKYGTKAELKSAVSTLKSNGIQVYGDVVMNHKGGADYTENVTAVEVNPSNRNQETSDEYTIQAWTGFNFPGRGTTHSPFKWQWYHFDGTDWDQSRNASRIFKFRGTGKAWDLEVSSENGNYDYLMYADLDFDHPDVRNEMKNWGVWYANEVGLDGFRLDAVKHIKHSYLGDWVNHVRTKTGKTMFTVAEYWQNDVNAINNYLAKVNYNHSVFDAPLHYNFHYASQSGGNYDMRNLLNGTVVAAHPTKAVTLVENHDSQPGQSLESVVQPWFKPLAYAFILTRAEGYPSIFYGDMYGTKGNSSYEIPALKTKIEPLLKARKDYAYGTQHNYMDHPDVIGWTREGDSTKEKSGLATLVTDGAGGSKWMYVGKQNAGEVWYDITGNRTDKITINTDGWGNFQVNGGSVSVYVQQ

SEQ ID NO: 43769 - protein, 482 aa, Bacillus sp. YR288
NGTMMQYFEWYVPNDGQHWNRLRNDAAYLKSIGVSAIWTPPAYKGTSQNDVGYGAYDLYDLGEFNQKGTIRTKYGTKAELKSAVSTLKSNGIQVYGDVVMNHKGGADYTENVTAVEVNPSNRNQETSDEYTIQAWTGFNFPGRGTTHSPFKWQWYHFDGTDWDQSRNASRIFKFRGTGKAWDWPVSSENGNYDYLMYADLDFDHPDVRNEMKNWGVWYANEVGLDGFRLDAVKHIKHSYLGDWVNHVRTKTGKEMFTVAEYWQNDVNAINNYLAQVNYNHSVFDAPLHYNFHYASQSGGNYDMRNLLNGTVVAAHPTKAVTLVENHDSQPGQSLESVVQPWFKPLAYAFILTRAEGYPSIFYGDMYGTKGNSSYEIPALKTKIEPLLKARKDYAYGTQHNYMDHWDVIGWTREGDSTKEKSGLATLVTDGAGGSKWMYVGKQNAGEVWYDITGNRTDKITINTDGWGNFQVNGGSVSVYVQQ

SEQ ID NO: 43770 - protein, 482 aa, Bacillus sp. YR288
NGTMMQYFEWYVPNDGQHWNRLRNDAAYLKSIGVSAIWTPPAYKGTSQNDVGYGAYDLYDLGEFNQKGTIRTKYGTKAELKSAVSTLKSNGIKVYGDVVMNHKGGADYTENVTAVEVNPSNRNQETSDEYTIQAWTGFNFPGRGTTHSPFKWQWYHFDGTDWDQSRNASRIFKFRGTGKAWDLEVSSENGNYDYLMYADLDFDHPDVRNEMKNWGVWYANEVGLDGFRLDAVKHIKHSYLGDWVNHVRTKTGKEMFTVAEYWQNDVNAINNYLAKVNYNHSVFDAPLHYNFHYASQSGGNYDMRNLLNGTVVAAHPTKAVTLVENHDSQPGQSLESVVQPWFKPLAYAFILTRAEGYPSIFYGDMYGTKGNSSYEIPALKTKIEPLLKARKDYAYGTQHNYMDHWDVIGWTREGDSTKEKSGLATLVTDGAGGSKWMYVGKQNAGEVWYDITGNRTDKITINTDGWGNFQVNGGSVSVYVQQ

SEQ ID NO: 43771 - protein, 482 aa, Bacillus sp. YR288
NGTMMQYFEWYVPNDGQHWNRLRNDAAYLKSIGVSAIWTPPAYKGTSQNDVGYGAYDLYDLGEFNQKGTIRTKYGTKAELKSAVSTLKSNGIQVYGDVVMNHKGGADYTENVTAVEVNPSNRNQETSDEYTIQAWTGFNFPGRGTTHSPFKWQWYHFDGTDWDQSRNASRIFKFRGTGKAWDWEVSSENGNYDYLMYADLDFDHPDVRNEMKNWGVWYANEVGLDGFRLDAVKHIKHSYLGDWVNHVRTKTGKTMFTVAEYWQNDVNAINNYLAKVNYNHSVFDAPLHYNFHYASQSGGNYDMRNLLNGTVVAAHPTKAVTLVENHDSQPGQSLESVVQPWFKPLAYAFILTRAEGLPSIFYGDMYGTKGNSSYEIPALKTKIEPLLKARKDYAYGTQHNYMDHPDVIGWTREGDSTKEKSGLATLVTDGAGGSKWMYVGKQNAGEVWYDITGNRTDKITINTDGWGNFQVNGGSVSVYVQQ

SEQ ID NO: 43772 - protein, 482 aa, Bacillus sp. YR288
NRTMMQYFEWYVPNDGQHWNRLRNDAAYLKSIGVSAIWTPPAYKGTSQNDVGYGAYDLYDLGEFNQKGTIRTKYGTKAELKSAVSTLKSNGIQVYGDVVMNHKGGADYTENVTAVEVNPSNRNQETSDEYTIQAWTGFNFPGRGTTHSPFKWQWYHFDGTDWDQSRNASRIFKFRGTGKAWDWEVSSENGNYDYLMYADLDFDHPDVRNEMKNWGVWYANEVGLDGFRLDAVKHIKHSYLGDWVNHVRTKTGKEMFTVAEYWQNDVNAINNYLAKVNYNHWVFDAPLHYNFHYASQSGGNYDMRNLLNGTVVAAHPTKAVTLVENHDSQPGQSLESVVQPWFKPLAYAFILTRAEGYPSIFYGDMYGTKGNSSYEIPALKTKIEPLLKARKDYAYGTQHNYMDHWDVIGWTREGDSTKEKSGLATLVTDGAGGSKWMYVGKQNAGEVWYDITGNRTDKITINTDGWGNFQVNGGSVSVYVQQ

SEQ ID NO: 43773 - protein, 482 aa, Bacillus sp. YR288
NGTMMQYFEWYVPNDGQHWNRLRNDAAYLKSIGVNAIWTPPAYKGTSQNDVGYGAYDLYDLGEFNQKGTIRTKYGTKAELKSAVSTLKSNGIQVYGDVVMNHKGGADYTENVTAVEVNPSNRNQETSDEYTIQAWTGFNFPGRGTTHSPFKWQWYHFDGTDWDQSRNASRIFKFRGTGKAWDWEVSSENGNYDYLMYADLDFDHPDVRNEMKNWGVWYANEVGLDGFRLDAVKHIKHSYLGDWVNHVRTKTGKEMFTVAEYWQNDVNAINNYLAKVNYNHSVFDAPLHYNFHYASQSGGNYDMRNLLNGTVVAAHPTKAVTLVENHDSQPGQSLESVVQPWFKPLAYAFILTRAEGYPSIFYGDMYGTKGNSSYEIPALKTKIEPLLKARKDYAYGTQHNYMDHWDVIGWTREGDSTKEKSGLATLVTDGAGGSKWMYVGKQNAGEVWYDITGNRTDKITINTDGWGTFQVNKGSVSVYVQQ

SEQ ID NO: 43774 - protein, 482 aa, Bacillus sp. YR288
NGTMMQYFEWYVPNDGQHWNRLRNDAAYLKSIGVSAIWTPPAYKGTSQNDVGYGAYDLYDLGEFNQKGTIRTKYGTKAELKSAVSTLKSNGIKVYGDVVMNHKGGADYTENVTAVEVNPSNRNQETSDEYTIQAWTGFNFPGRGTTHSPFKWQWYHFDGTDWDQSRNASRIFKFRGTGKAWDWEVSSENGNYDYLMYADLDFDHPDVRNEMKNWGVWYANEVGLDGFRLDAVKHIKHSYLGDWVNHVRTKTGKEMFTVAEYWQNDVNAINNYLAKVNYNHSVFDAPLHYNFHYASQSGGNYDMRNLLNGTVVAAHPTKAVTLVENHDSQPGQSLESVVQPWFKPLAYAFILTRAEGLPSIFYGDMYGTKGNSSYEIPALKTKIEPLLKARKDYAYGTQHNYMDHWDVIGWTREGDSTKEKSGLATLVTDGVGGSKWMYVGKQNAGEVWYDITGNRTDKITINTDGWGNFQVNGGSVSVYVQQ

SEQ ID NO: 43775 - protein, 482 aa, Bacillus sp. YR288
NGTMMQYFEWYVPNDGQHWNRLRNDAAYLKSIGVSAIWTPPAYKGTSQNDVGYGAYDLYDLGEFNQKGTIRTKYGTKAELKSAVSTLKSNGIQVYGDVVMNHKGGADYTENVTAVEVNPSNRNQETSDEYTIQAWTGFNFPGRGTTHSPFKWQWYHFDGTDWDQSRNASRIFKFRGTGKAWDWPVSSENGNYDYLMYADLDFDHPDVRNEMKNWGVWYANEVGLDGFRLDAVKHIKHSYLGDWVNHVRTKTGKEMFTVAEYWQNDVNAINNYLAYVNYNHSVFDAPLHYNFHYASQSGGNYDMRNLLNGTVVAAHPTKAVTLVENHDSQPGQSLESVVQPWFKPLAYAFILTRAEGYPSIFYGDMYGTKGNSSYEIPALKTKIEPLLKARKDYAYGTQHNYMDHWDVIGWTREGDSTKEKSGLATLVTDGAGGSKWMYVGKQNAGEVWYDITGNRTDKITINTDGWGNFQVNGGSVSVYVQQ

SEQ ID NO: 43776 - protein, 482 aa, Bacillus sp. YR288
NGTMMQYFEWYVPNDGQHWNRLRNDAAYLKSIGVSAIWTPPAYKGTSQNDVGYGAYDLYDLGEFNQKGTIRTKYGTKAELKSAVSTLKSNGIQVYGDVVMNHKGGADYTENVTAVEVNPSNRNQETSDEYTIQAWTGFNFPGRGTTHSPFKWQWYHFDGTDWDQSRNASRIFKFRGTGKAWDWEVSSEFGNYDYLMYADLDFDHPDVRNEMKNWGVWYANEVGLDGFRLDAVKHIKFQYLGDWVNHVRTKTGKEMFTVAEYWQNDVNAINNYLAKVNYNHSVFDAPLHYNFHYASQSGGNYDMRNLLNGTVVAAHPTKAVTLVENHDSQPGQSLESVVQPWFKPLAYAFILTRAEGYPSIFYGDMYGTKGNSSYEIPALKTKIEPLLKARKDYAYGTQHNYMDHWDVIGWTREGDSTKEKSGLATLVTDGAGGSKWMYVGKQNAGEVWYDITGNRTDKITINTDGWGNFQVNGGSVSVYVQQ

SEQ ID NO: 43777 - protein, 482 aa, Bacillus sp. YR288
NGTMMQYFEWYVPNDGQHWNRLRNDAAYLKSIGVSAIWTPPAYKGTSQNDVGYGAYDLYDLGEFNQKGTIRTKYGTKAELKSAVSTLKSNGIQVYGDVVMNHKGGADYTENVTAVEVNPSNRNQETSDEYTIQAWTGFNFPGRGTTHSPFKWQWYHFDGTDWDQSRNASRIFKFRGTGKAWDWPVSSENGNYDYLLYADLDFDHPDVRNEMKNWGVWYANEVGLDGFRLDAVKHIKHSYLGDWVNHVRTKTGKEMFTVAEYWQNDVNAINNYLAKVNYNHSVFDAPLHYNFHYASQSGGNYDMRNLLNGTVVAAHPTKAVTLVENHDSQPGQSLESVVQPWFKPLAYAFILTRAEGYPSIFYGDMYGTKGNSSYEIPALKTKIEPLLKARKDYAYGTQHNYMDHWDVIGWTREGDSTKEKSGLATLVTDGAGGSKWMYVGKQNAGEVWYDITGNRTDKITINTDGWGNFQVNGGSVSVYVQQ

SEQ ID NO: 43778 - protein, 482 aa, Bacillus sp. YR288
NGTMMQYFEWYVPNDGQHWNRLRNDAAYLKSIGVSAIWTPPAYKGTSQNDVGYGAYDLYDLGEFNQKGTIRTKYGTKAELKSAVSTLKSNGIQVYGDVVMNHKGGADYTENVTAVEVNPSNRYQETSDEYTIQAWTGFNFPGRGTTHSPFKWQWYHFDGTDWDQSRNASRIFKFRGTGKAWDWPVSSENGNYDYLMYADLDFDHPDVRNEMKNWGVWYANEVGLDGFRLDAVKHIKHSYLGDWVNHVRTKTGKEMFTVAEYWQNDVNAINNYLAKVNYNHSVFDAPLHYNFHYASQSGGNYDMRNLLNGTVVAAHPTKAVTLVENHDSQPGQSLESVVQPWFKPLAYAFILTRAEGYPSIFYGDMYGTKGNSSYEIPALKTKIEPLLKARKDYAYGTQHNYMDHWDVIGWTREGDSTKEKSGLATLVTDGAGGSKWMYVGKQNAGEVWYDITGNRTDKITINTDGWGNFQVNGGSVSVYVQQ

SEQ ID NO: 43779 - protein, 482 aa, Bacillus sp. YR288
NGTMMQYFEWYVPNDGQHWNRLRNDAAYLKSIGVSAIWTPPAYKGTSQNDVGYGAYDLYDLGEFNQKGTIRTKYGTKAELKSAVSTLKSNGIQVYGDVVMNHKGGADYTENVTAVEVNPSNRNQETSDEYTIQAWTGFNFPGRGTTHSPFKWQWYHFDGTDWDQSRNASRIFKFRGTGKAWDWEVSSENGNYDYLLYADLDFDHPDVRNEMKNWGVWYANEVGLDGFRLDAVKHIKFQYLGDWVNHVRTKTGKEMFTVAEYWQNDVNAINNYLAKVNYNHSVFDAPLHYNFHYASQSGGNYDMRNLLNGTVVAAHPTKAVTLVENHDSQPGQSLESVVQPWFKPLAYAFILTRAEGYPSIFYGDMYGTKGNSSYEIPALKTKIEPLLKARKDYAYGTQHNYMDHWDVIGWTREGDSTKEKSGLATLVTDGAGGSKWMYVGKQNAGEVWYDITGNRTDKITINTDGWGNFQVNGGSVSVYVQQ

SEQ ID NO: 43780 - protein, 482 aa, Bacillus sp. YR288
NGTMMQYFEWYVPNDGQHWNRLRNDAAYLKSIGVSAIWTPPAYKGTSQNDVGYGAYDLYDLGEFNQKGTIRTKYGTKAELKSAVSTLKSNGIQVYGDVVMNHKGGADYTENVTAVEVNPSNRYQETSDEYTIQAWTGFNFPGRGTTHSPFKWQWYHFDGTDWDQSRNASRIFKFRDTGKAWDWEVSSEFGNYDYLMYADYDFDHPDVRNEMKNWGVWYANEVGLDGFRLDAVKHIKHSYLGDWVNHVRTKTGKEMFTVAEYWQNDVNAINNYLAKVNYNHSVFDAPLHYNFHYASQSGGNYDMRNLLNGTVVAAHPTKAVTLVENHDSQPGQSLESVVQPWFKPLAYAFILTRAEGYPSIFYGDMYGTKGNSSYEIPALKTKIEPLLKARKDYAYGTQHNYMDHWDVIGWTREGDSTKEKSGLATLVTDGAGGSKWMYVGKQNAGEVWYDITGNRTDKITINTDGWGNFQVNGGSVSVYVQQ

SEQ ID NO: 43781 - protein, 482 aa, Bacillus sp. YR288
NGTMMQYFEWYVPNDGQHWNRLRNDAAYLKSIGVSAIWTPPAYKGTSQNDVGYGAYDLYDLGEFNQKGTIRTKYGTKAELKSAVSTLKSNGIKVYGDVVMNHKGGADYTENVTAVEVNPSNRNQETSDEYTIQAWTGFNFPGRGTTHSPFKWQWYHFDGTDWDQSRNASRIFKFRGTGKAWDWEVSSENGNYDYLMYADLDFDHPDVRNEMKNWGVWYANEVGLDGFRLDAVKHIKHSYLGDWVNHVRTKTGKEMWTVAEYWQNDVNAINNYLAKVNYNHSVFDAPLHYNFHYASQSGGNYDMRNLLNGTVVAAHPTKAVTLVENHDSQPGQSLESVVQPWFKPLAYAFILTRAEGYPSIFYGDMYGTKGNSSYEIPALKTKIEPLLKARKDYAYGTQHNYMDHWDVIGWTREGDSTKEKSGLATLVTDGAGGSKWMYVGKQNAGEVWYDITGNRTDKITINTDGWGNFQVNGGSVSVYVQQ

SEQ ID NO: 43782 - protein, 482 aa, Bacillus sp. YR288
NGTMMQYFEWYVPNDGQHWNRLRNDAAYLKSIGVSAIWTPPAYKGTSQNDVGYGAYDLYDLGEFNQKGTIRTKYGTKAELKSAVSTLKSNGIQVYGDVVMNHKGGADYTENVTAVEVNPSNRNQETSDEYTIQAWTGFNFPGRGTTHSPFKWQWYHFDGTDWDQSRNASRIFKFRGTGKAWDWPVSSENGNYDYLMYADLDFDHPDVRNEMKNWGVWYANEVGLDGFRLDAVKHIKHSYLGDWVNHVRTKTGKEMFTVAEYWQNDVNAINNYLAAVNYNHSVFDAPLHYNFHYASQSGGNYDMRNLLNGTVVAAHPTKAVTLVENHDSQPGQSLESVVQPWFKPLAYAFILTRAEGYPSIFYGDMYGTKGNSSYEIPALKTKIEPLLKARKDYAYGTQHNYMDHWDVIGWTREGDSTKEKSGLATLVTDGAGGSKWMYVGKQNAGEVWYDITGNRTDKITINTDGWGNFQVNGGSVSVYVQQ

SEQ ID NO: 43783 - protein, 482 aa, Bacillus sp. YR288
NGTMMQYFEWYVPNDGQHWNRLRNDAAYLKSIGVSAIWTPPAYKGTSQNDVGYGAYDLYDLGEFNQKGTIRTKYGTKAELKSAVSTLKSNGIKVYGDVVMNHKGGADYTENVTAVEVNPSNRNQETSDEYTIQAWTGFNFPGRGTTHSPFKWQWYHFDGTDWDQSRNASRIFKFRGTGKAWDWEVSSENGNYDYLMYADLDFDHPDVRNEMKNWGVWYANEVGLDGFRLDAVKHIKHSYLGDWVNHVRTKTGKEMFTVAEYWQNDVNAINNYLAKVNYNHSVFDAPLHYNFHYASQSGGNYDMRNLLNGTVVAAHPTKAVTLVENHDSQPGQSLESVVQPWFKPLAYAFILTRAEGYPSIFYGDMYGTKGNSSYEIPALKTKIEPLLKARKDYAYGTQHNYMDHPDVIGWTREGDSTKEKSGLATLVTDGAGGSKWMYVGKQNAGEVWYDITGNRTDKITINTDGWGTFQVNGGSVSVYVQQ

SEQ ID NO: 43784 - protein, 482 aa, Bacillus sp. YR288
NGTMMQYFEWYVPNDGQHWNRLRNDAAYLKSIGVSAIWTPPAYKGTSQNDVGYGAYDLYDLGEFNQKGTIRTKYGTKAELKSAVSTLKSNGIQVYGDVVMNHKGGADYTENVTAVEVNPSNRNQETSDEYTIQAWTGFNFPGRGTTHSPFKWQWYHFDGTDWDQSRNASRIFKFRGTGKAWDWPVSSENGNYDYLMYADLDFDHPDVRNEMKNWGVWYANEVGLDGFRLDAVKHIKHQYLGDWVNHVRTKTGKEMFTVAEYWQNDVNAINNYLAKVNYNHSVFDAPLHYNFHYASQSGGNYDMRNLLNGTVVAAHPTKAVTLVENHDSQPGQSLESVVQPWFKPLAYAFILTRAEGYPSIFYGDMYGTKGNSSYEIPALKTKIEPLLKARKDYAYGTQHNYMDHWDVIGWTREGDSTKEKSGLATLVTDGAGGSKWMYVGKQNAGEVWYDITGNRTDKITINTDGWGNFQVNGGSVSVYVQQ

SEQ ID NO: 43785 - protein, 482 aa, Bacillus sp. YR288
NGTMMQYFEWYVPNDGQHWNRLRNDAAYLKSIGVSAIWTPPAYKGTSQNDVGYGAYDLYDLGEFNQKGTIRTKYGTKAELKSAVSTLKSNGIQVYGDVVMNHKGGADYTENVTAVEVNPSNRNQETSDEYTIQAWTGFNFPGRGTTHSPFKWQWYHFDGTDWDQSRNASRIFKFRGTGKAWDWEVSSENGNYDYLMYADLDFDHPDVRNEMKNWGVWYANEVGLDGFRLDAVKHIKHSYLGDWVNHVRTKTGKTMFTVAEYWQNDVNAINNYLAKVNYNHSVFDAPLHYNFHYASQSGGNYDMRNLLNGTVVAAHPTKAVTLVENHDSQPGQSLESVVQPWFKPLAYAFILTRAEGYPSIFYGDMYGTKGNSSYEIPALKTKIEPLLKARKDYAYGTQHNYMDHWDVIGWTREGDSTKEKSGLATLVTDGVGGSKWMYVGKQNAGEVWYDITGNRTDKITINTDGWGTFQVNGGSVSVYVQQ

SEQ ID NO: 43786 - protein, 482 aa, Bacillus sp. YR288
NGTMMQYFEWYVPNDGQHWNRLRNDAAYLKSIGVSAIWTPPAYKGTSQNDVGYGAYDLYDLGEFNQKGTIRTKYGTKAELKSAVSTLKSNGIQVYGDVVMNHKGGADYTENVTAVEVNPSNRNQETSDEYTIQAWTGFNFPGRGTTHSPFKWQWYHFDGTDWDQSRNASRIFKFRGTGKAWDWPVSSENGNYDYLMYADLDFDHPDVRNEMKNWGVWYANEVGLDGFRLDAVKHIKHSYLGDWVNHVRTKTGKEMFTVAEYWQNDVNAINNYLANVNYNHSVFDAPLHYNFHYASQSGGNYDMRNLLNGTVVAAHPTKAVTLVENHDSQPGQSLESVVQPWFKPLAYAFILTRAEGYPSIFYGDMYGTKGNSSYEIPALKTKIEPLLKARKDYAYGTQHNYMDHWDVIGWTREGDSTKEKSGLATLVTDGAGGSKWMYVGKQNAGEVWYDITGNRTDKITINTDGWGNFQVNGGSVSVYVQQ

SEQ ID NO: 43787 - protein, 478 aa, Geobacillus stearothermophilus
LNGTLMQYFEWYTPNDGQHWKRLQNDSAYLAEHGITAVWIPPAYKGTSQADVGYGAYDLYDLGEFHQKGTVRTKYGTKGELQSAIKSLHSRDINVYGDVVINHKGGADATEDVTAVEVDPADRNRVISGEYLIKAWTHFHFPGRGSTYSDFKWHWYHFDGTDWDESRKLNRIYKFQGKAWDWEVSSENGNYDYLMYADIDMDHPEVVTELKNWGKWYVNTTNIDGFRLDAVKHIKFSFFPDWLSYVRSQTGKPLFTVGEYWSYDINKLHNYITKTNGTMSLFDAPLHNKFYTASKSGGAFDMRTLMTNTLMKDQPTLAVTFVDNHDTEPGQALQSWVDPWFKPLAYAFILTRQEGYPCVFYGDYYGIPQYNIPSLKSKIDPLLIARRDYAYGTQHDYLDHSDIIGWTREGVTEKPGSGLAALITDGPGGSKWMYVGKQHAGKVFYDLTGNRSDTVTINSDGWGEFKVNGGSVSVWVPR

SEQ ID NO: 43788 - protein, 478 aa, Geobacillus stearothermophilus
LNGTLMQYFEWYTPNDGQHWKRLQNDSAYLAEHGITAVWIPPAYKGTSQADVGYGAYDLYDLGEFHQKGTVRTKYGTKGELQSAIKSLHSRDINVYGDVVINHKGGADATEDVTAVEVDPADRNRVISGEYLIKAWTHFHFPGRGSTYSDFKWHWYHFDGTDWDESRKLNRIYKFQGKAWDWEVSSENGNYDYLMYADLDMDHPEVVTELKNWGKWYVNTTNIDGFRLDAVKHIKFSFFPDWLSYVRSQTGKPLFTVGEYWSYDINKLHNYITKTNGTMSLFDAPLHNKFYTASKSGGAFDMRTLMTNTLMKDQPTLAVTFVDNHDTEPGQALQSWVDPWFKPLAYAFILTRQEGYPCVFYGDYYGIPQYNIPSLKSKIDPLLIARRDYAYGTQHDYLDHSDIIGWTREGVTEKPGSGLAALITDGPGGSKWMYVGKQHAGKVFYDLTGNRSDTVTINSDGWGEFKVNGGSVSVWVPR

SEQ ID NO: 43789 - protein, 478 aa, Cytophaga sp.
NGTIMQYFEWNVPNDGQHWNRLHNNAQNLKNAGITAIWIPPAWKGTSQNDVGYGAYDLYDLGEFNQKGTVRTKYGTKAELERAIRSLKANGIQVYGDVVMNHKGGADFTERVQAVEVNPQNRNQEVSGTYQIEAWTGFNFPGRGNQHSSFKWRWYHFDGTDWDQSRQLANRIYKFRGKAWDWEVDTENGNYDYLMYADVDMDHPEVINELNRWGVWYANTLNLDGFRLDAVKHIKFSFMRDWLGHVRGQTGKNLFAVAEYWKNDLGALENYLSKTNWTMSAFDVPLHYNLYQASNSSGNYDMRNLLNGTLVQRHPSHAVTFVDNHDTQPGEALESFVQGWFKPLAYATILTREQGYPQVFYGDYYGIPSDGVPSYRQQIDPLLKARQQYAYGTQRDYIDNPDVIGWTREGDSTKAKSGLATVITDGPGGSKRMYVGTSNAGEIWYDLTGNRTDKITIGSDGYATFPVNGGSVSVWVQQ

SEQ ID NO: 43790 - protein, 478 aa, Synthetic construct
NGTIMQYFEWNVPNDGQHWNRLHNNAQNLKNAGITAIWIPPAWKGTSQNDVGYGAYDLYDLGEFNQKGTVRTKYGTKAELERAIRSLKANGIQVYGDVVMNHKAGADGTEFVDAVEVDPSNRNQETSGTYQIQAWTKFDFPGRGNTYSSFKWRWYHFDGTDWDESRKLNRIYKFSTGKAWDWEVDTENGNYDYLMFADLDMDHPEVINELNRWGVWYANTLNLDGFRLDAVKHIKFSFMRDWLGHVRGQTGKNLFAVAEYWKNDLGALENYLSKTNWTMSAFDVPLHYNLYQASNSSGNYDMRNLLNGTLVQRHPSHAVTFVDNHDTQPGEALESFVQGWFKPLAYATILTREQGYPQVFYGDYYGIPSDGVPSYRQQIDPLLKARQQYAYGRQHDYFDHWDVIGWTREGNASHPNSGLATIMSDGPGGSKWMYVGRQKAGEVWHDMTGNRSGTVTINQDGWGHFFVNGGSVSVWVKR

SEQ ID NO: 43791 - protein, 479 aa, Synthetic construct
NGTIMQYFEWNVPNDGQHWNRLHNNAQNLKNAGITAIWIPPAWKGTSQNDVGYGAYDLYDLGEFNQKGTVRTKYGTKAELERAIRSLKANGIQVYGDVVMNHKAGADSTEWVDAVEVNPSNRNQETSGTYQIQAWTKFDFPGRGNTYSSFKWRWYHFDGTDWDESRKLNRIYKFRGTGKAWDWEVDTENGNYDYLMFADLDMDHPEVINELNRWGVWYANTLNLDGFRLDAVKHIKFSFMRDWLGHVRGQTGKNLFAVAEYWKNDLGALENYLSKTNWTMSAFDVPLHYNLYQASNSSGNYDMRNLLNGTLVQRHPSHAVTFVDNHDTQPGEALESFVQGWFKPLAYATILTREQGYPQVFYGDYYGIPSDGVPSYRQQIDPLLKARQQYAYGRQHDYFDHWDVIGWTREGNASHPNSGLATIMSDGPGGSKWMYVGRQKAGEVWHDMTGNRSGTVTINQDGWGHFFVNGGSVSVWVKR

SEQ ID NO: 43792 - protein, 479 aa, Synthetic construct
NGTIMQYFEWNVPNDGQHWNRLHNNAQNLKNAGITAIWIPPAWKGTSQNDVGYGAYDLYDLGEFNQKGTVRTKYGTKAELERAIRSLKANGIQVYGDVVMNHKAGADGTEFVDAVEVNPSNRNQETSGTYQIQAWTKFDFPGRGNTYSSFKWRWYHFDGTDWDESRKLNRIYKFRGTGKAWDWEVDTENGNYDYLMFADLDMDHPEVINELNRWGVWYANTLNLDGFRLDAVKHIKFSFMRDWLGHVRGQTGKNLFAVAEYWKNDLGALENYLSKTNWTMSAFDVPLHYNLYQASNSSGNYDMRNLLNGTLVQRHPSHAVTFVDNHDTQPGEALESFVQGWFKPLAYATILTREQGYPQVFYGDYYGIPSDGVPSYRQQIDPLLKARQQYAYGRQHDYFDHWDVIGWTREGNASHPNSGLATIMSDGPGGSKWMYVGRQKAGEVWHDMTGNRSGTVTINQDGWGHFFVNGGSVSVWVKR

SEQ ID NO: 43793 - protein, 480 aa, Bacillus sp.
NGTIMQYFEWNVPNDGQHWNRLANNAQNLKNAGITAIWIPPAWKGTSQNDVGYGAYDLYDLGEFNQKGTVRTKYGTKAELERAIRSLKANGIQVYGDVVMNHKGGADFTERVQAVEVNPQNRNQEVSGTYQIEAWTGFNFPGRGNQHSSFKWRWYHFDGTDWDQSRQLANRIYKFRGDGKAWDWEVDTENGNYDYLMYADVDMDHPEVINELNRWGVWYANTLNLDGFRLDAVKHIKFSFMRDWLGHVRGQTGKNLFAVAEYWKNDLGALENYLSKTNWTMSAFDVPLHYNLYQASNSSGNYDMRNLLNGTLVQRHPSHAVTFVDNHDTQPGEALESFVQGWFKPLAYATILTREQGYPQVFYGDYYGIPSDGVPSYRQQIDPLLKARQQYAYGRQHDYFDHWDVIGWTREGNASHPNSGLATIMSDGPGGSKWMYVGRQKAGEVWHDMTGNRSGTVTINQDGWGHFFVNGGSVSVWVKR

SEQ ID NO: 43794 - protein, 480 aa, Bacillus sp.
NGTMMQYFEWNVPNDGQHWNRLHNNAQNLKNAGITAIWIPPAWKGTSQNDVGYGAYDLYDLGEFNQKGTVRTKYGTKAELERAIRSLKANGIQVYGDVVMNHKGGADFTERVQAVEVNPQNRNQEVSGTYQIEAWTGFNFPGRGNQHSSFKWRWYHFDGTDWDQSRQLANRIYKFRGDGKAWDWEVDTENGNYDYLMYADVDMDHPEVINELNRWGVWYANTLNLDGFRLDAVKHIKFSFMRDWLGHVRGQTGKNLFAVAEYWKNDLGALENYLSKTNWTMSAFDVPLHYNLYQASNSSGNYDMRNLLNGTLVQRHPSHAVTFVDNHDTQPGEALESFVQGWFKPLAYATILTREQGYPQVFYGDYYGIPSDGVPSYRQQIDPLLKARQQYAYGRQHDYFDHWDVIGWTREGNASHPNSGLATIMSDGPGGSKWMYVGRQKAGEVWHDMTGNRSGTVTINQDGWGHFFVNGGSVSVWVKR

SEQ ID NO: 43795 - protein, 480 aa, Bacillus sp.
NGTIMQYFEWNVPNDGQHWNRLHNNAQNLKNAGITAIWIPPAWKGTSQNDVGYGAYDLYDLGEFNQKGTVRTKYGTKAELERAIRSLKANGIQVYGDVVMNHKGGADFTERVQAVEVNPQNRNQEVSGTYQIEAWTGFNFPGRGNQHSSFKWRWYHFDGTDWDQSRQLANRIYKFRGDGKAWDWEVDTENGNYDYLMYADVDMDHPEVINELNRWGVWYANTLNLDGFRLDAVKHIKFSFMRDWLGHVRGQTGKNLFAVAEYWKNDLGALENYTSKTNGTMSAFDVPLHYNLYQASNSKGNYDMRNLLNGTLVQRHPSNAVTFVDNHDTQPGEALESFVQGWFKPLAYATILTREQGYPQVFYGDYYGIPSDGVPSYRQQIDPLLKARQQYAYGRQHDYFDHWDVIGWTREGNASHPNSGLATIMSDGPGGSKWMYVGRQKAGEVWHDMTGNRSGTVTINQDGWGHFFVNGGSVSVWVKR

SEQ ID NO: 43796 - protein, 480 aa, Bacillus sp.
NGTIMQYFEWNVPNDGQHWNRLHNNAQNLKNAGITAIWIPPAWKGTSQSDVGYGAYDLYDLGEFNQKGTVRTKYGTKAELERAIRSLKANGIQVYGDVVMNHKGGADFTERVQAVEVNPQNRNQEVSGTYQIEAWTGFNFPGRGNQHSSFKWRWYHFDGTDWDQSRQLANRIYKFRGDGKAWDWEVDTENGNYDYLMYADVDMDHPEVINELNRWGVWYANTLNLDGFRLDAVKHIKFSFMRDWLGHVRGQTGKNLFAVAEYWKNDLGALENYLSKTNWTMSAFDVPLHYNLYQASNSSGNYDMRNLLNGTLVQRHPSHAVTFVDNHDTQPGEALESFVQGWFKPLAYATILTREQGYPQVFYGDYYGIPSDGVPSYRQQIDPLLKARQQYAYGRQHDYFDHWDVIGWTREGNASHPNSGLATIMSDGPGGSKWMYVGRQKAGEVWHDMTGNRSGTVTINQDGWGHFFVNGGSVSVWVKR

SEQ ID NO: 43797 - protein, 480 aa, Bacillus sp.
NGTIMQYFEWNVPNDGQHWNRLHNNAQNLKNAGITAIWLPPAWKGTSQNDVGYGAYDLYDLGEFNQKGTVRTKYGTKAELERAIRSLKANGIQVYGDVVMNHKGGADFTERVQAVEVNPQNRNQEVSGTYQIEAWTGFNFPGRGNQHSSFKWRWYHFDGTDWDQSRQLANRIYKFRGDGKAWDWEVDTENGNYDYLMYADVDMDHPEVINELNRWGVWYANTLNLDGFRLDAVKHIKFSFMRDWLGHVRGQTGKNLFAVAEYWKNDLGALENYLSKTNWTMSAFDVPLHYNLYQASNSSGNYDMRNLLNGTLVQRHPSHAVTFVDNHDTQPGEALESFVQGWFKPLAYATILTREQGYPQVFYGDYYGIPSDGVPSYRQQIDPLLKARQQYAYGRQHDYFDHWDVIGWTREGNASHPNSGLATIMSDGPGGSKWMYVGRQKAGEVWHDMTGNRSGTVTINQDGWGHFFVNGGSVSVWVKR

SEQ ID NO: 43798 - protein, 480 aa, Bacillus sp.
NGTIMQYFEWNVPNDGQHWNRLHNNAQNLKNAGITAIWIPPAWKGTSQNDVGYGAYDLYDLGEFNQKGTVRTKYGTKAELERAIRSLKANGIQVYGDVVMNHKGGADFTERVQAVEVNPQNRNQEVSGTYQIEAWTGFNFPGRGNQHSSFKWRWYHFDGTDWDQSRQLANRIYKFRGDGKAWDWEVDTENGNYDYLMYADVDMDHPEVINELNRWGVWYANTLNLDGFRLDAVKHIKFSFMRDWLGHVRGQTGKNLFAVAEYWKNDLGALENYLSKTNWTMSAFDVPLHYNLYQASNSSGNYDMRNLLNGTLVQRHPSHAVTFVDNHDTQPGEALESFVQGWFKPLAYATILTREQGYPQVFYGDYYGIPSDGVPSYRQQIDPLLKARQQYAYGRQHDYFDHWDVIGWTREGGASHPNSGLATIMSDGPGGSKWMYVGRQKAGEVWHDMTGNRSGTVTINQDGWGHFFVNGGSVSVWVKR

SEQ ID NO: 43799 - protein, 480 aa, Bacillus sp.
NGTIMQYFEWNVPNDGQHWNRLHNNAQNLKNAGITAIWIPPAWKGTSQNDVGYGAYDLYDLGEFNQKGTVRTKYGTKAELERAIRSLKANGIQVYGDVVMNHKGGADFTERVQAVEVNPQNRNQEVSGTYQIEAWTGFNFPGRGNQHSSFKWRWYHFDGTDWDQSRQLANRIYKFRGDGKAWDWEVDTENGNYDYLMYADVDMDHPEVINELNRWGVWYANTLNLDGFRLDAVKHIKFSFMRDWLGHVRGQTGKNLFAVAEYWKNDLGALENYLSKTNWTMSAFDVPLHYNLYQASNSSGNYDMRNLLNGTLVQRHPSHAVTFVDNHDTQPGEALESFVQGWFKPLAYATILTREQGYPQVFYGDYYGIPSDGVPSYRQQIDPLLKARQQYAYGRQHDYFDHWDVIGWTREGNASHPNSGLATIMSDGPGGSKWMYVGRQKAGEVWHDMTGNRSDTVTINQDGWGHFFVNGGSVSVWVKR

SEQ ID NO: 43800 - protein, 480 aa, Bacillus sp.
NGTIMQYFEWNVPNDGQHWNRLHNNAQNLKNAGITAIWIPPAWKGTSQNDVGYGAYDLYDLGEFNQKGTVRTKYGTKAELERAIRSLKANGIQVYGDVVMNHKGGADFTERVQAVEVNPQNRNQEISGTYQIEAWTGFNFPGRGNQHSSFKWRWYHFDGTDWDQSRQLANRIYKFRGDGKAWDWEVDTENGNYDYLMYADVDMDHPEVINELNRWGVWYANTLNLDGFRLDAVKHIKFSFMRDWLGHVRGQTGKNLFAVAEYWKNDLGALENYLSKTNWTMSAFDVPLHYNLYQASNSSGNYDMRNLLNGTLVQRHPSHAVTFVDNHDTQPGEALESFVQGWFKPLAYATILTREQGYPQVFYGDYYGIPSDGVPSYRQQIDPLLKARQQYAYGRQHDYFDHWDVIGWTREGNASHPNSGLATIMSDGPGGSKWMYVGRQKAGEVWHDMTGNRSGTVTINQDGWGHFFVNGGSVSVWVKR

SEQ ID NO: 43801 - protein, 480 aa, Bacillus sp.
NGTIMQYFEWNVPNDGQHWNRLHNNAQNLKNAGITAIWIPPAWKGTSQNDVGYGAYDLYDLGEFNQKGTVRTKYGTKAELERAIRSLKANGIQVYGDVVMNHKGGADFTERVQAVEVNPQNRNQEVSGTYQIEAWTGFNFPGRGNQHSSFKWRWYHFDGTDWDQSRQLANRIYKFRGDGKAWDWEVDTENGNYDYLMYADVDMDHPEVINELNRWGVWYANTLNLDGFRLDAVKHIKFSFMRDWLGHVRGQTGKNLFAVAEYWKNDLGALENYLSKTNWTMSAFDVPLHYNLYQASNSSGNYDMRNLLNGTLVQRHPSHAVTFVDNHDTQPGEALESFVQGWFKPLAYATILTREQGYPQVFYGDYYGIPSDGVPSYRQQIDPLLKARQQYAYGRQHDYFDHWDVIGWTREGNASHPNSGLAAIMSDGPGGSKWMYVGRQKAGEVWHDMTGNRSGTVTINQDGWGHFFVNGGSVSVWVKR

SEQ ID NO: 43802 - protein, 480 aa, Bacillus sp.
NGTIMQYFEWNVPNDGQHWNRLHNNAQNLKNAGITAIWIPPAWKGTSQNDVGYGVYDLYDLGEFNQKGTVRTKYGTKAELERAIRSLKANGIQVYGDVVMNHKGGADFTERVQAVEVNPQNRNQEVSGTYQIEAWTGFNFPGRGNQHSSFKWRWYHFDGTDWDQSRQLANRIYKFRGDGKAWDWEVDTENGNYDYLMYADVDMDHPEVINELNRWGVWYANTLNLDGFRLDAVKHIKFSFMRDWLGHVRGQTGKNLFAVAEYWKNDLGALENYLSKTNWTMSAFDVPLHYNLYQASNSSGNYDMRNLLNGTLVQRHPSHAVTFVDNHDTQPGEALESFVQGWFKPLAYATILTREQGYPQVFYGDYYGIPSDGVPSYRQQIDPLLKARQQYAYGRQHDYFDHWDVIGWTREGNASHPNSGLATIMSDGPGGSKWMYVGRQKAGEVWHDMTGNRSGTVTINQDGWGHFFVNGGSVSVWVKR

SEQ ID NO: 43803 - protein, 480 aa, Bacillus sp.
NGTIMQYFEWNVPNDGQHWNRLHNNAQNLKNAGITAIWIPPAWKGTSQNDVGYGAYDLYDLGEFNQKGTVRTKYGTKAELERAIRSLKANGIQVYGDVVMNHKGGADFTERVQAVEVNPQNRNQEVSGTYQIEAWTGFNFPGRGNQHSSFKWRWYHFDGTDWDQSRQLANRIYKFRGDGKAWDWEVDTENGNYDYLMYADVDMDHPEVINELNRWGVWYANTLNLDGFRLDAVKHIKFSFMRDWLGHVRGQTGKNLFAVAEYWKNDLGALENYLSKTNWTMSAFDVPLHYNLYQASNSGGNYDMRNLLNGTLVQRHPSHAVTFVDNHDTQPGEALESFVQGWFKPLAYATILTREQGYPQVFYGDYYGIPSDGVPSYRQQIDPLLKARQQYAYGRQHDYFDHWDVIGWTREGNASHPNSGLATIMSDGPGGSKWMYVGRQKAGEVWHDMTGNRSGTVTINQDGWGHFFVNGGSVSVWVKR

SEQ ID NO: 43804 - protein, 480 aa, Bacillus sp.
NGTIMQYFEWNVPNDGQHWNRLHNNAQNLKNAGITAIWIPPAWKGTSQNDVGYGAYDLYDLGEFNQKGTVRTKYGTKAELERAIRSLKANGIQVYGDVVMNHKGGADFTERVQAVEVNPQNRNQEVSGTYQIEAWTGFNFPGRGNQHSSFKWRWYHFDGTDWDQSRQLANRIYKFRGDGKAWDWEVDTENGNYDYLMYADVDMDHPEVINELNRWGVWYANTLNLDGFRLDAVKHIKFSFMRDWLGHVRGQTGKNLFAVAEYWKNDLGALENYLSKTNGTMSAFDVPLHYNLYQASNSKGNYDMRNLLNGTLVQRHPSHAVTFVDNHDTQPGEALESFVQGWFKPLAYATILTREQGYPQVFYGDYYGIPSDGVPSYRQQIDPLLKARQQYAYGRQHDYFDHWDVIGWTREGNASHPNSGLATIMSDGPGGSKWMYVGRQKAGEVWHDMTGNRSGTVTINQDGWGHFFVNGGSVSVWVKR

SEQ ID NO: 43805 - protein, 480 aa, Bacillus sp.
NGTIMQYFEWNVPNDGQHWNRLHNNAQNLKNAGITAIWIPPAWKGTSQNDVGYGAYDLYDLGEFNQKGTVRTKYGTKAELERAIRSLKANGIQVYGDVVMNHKGGADFTERVQAVEVNPQNRNQEVSGTYQIEAWTGFNFPGRGNQHSSFKWRWYHFDGTDWDQSRQLANRIYKFRGDGKAWDWEVDTENGNYDYLMYADVDMDHPEVINELNRWGVWYANTLNLDGFRLDAVKHIKFSFMRDWLGHVRGQTGKNLFAVAEYWKNDLGALENYLSKTNWTMSAFDVPLHYNLYQASNSSGNYDMRNLLNGTLVQRHPSHAVTFVDNHDTQPGEALESFVQGWFKPLAYATILTREQGYPQVFYGDYYGIPSDGVPSYRQQIDPLLKARQQYAYGRQHDYFDHWDVIGWTREGNAEHPNSGLATIMSDGPGGSKWMYVGRQKAGEVWHDMTGNRSGTVTINQDGWGHFFVNGGSVSVWVKR

SEQ ID NO: 43806 - protein, 480 aa, Bacillus sp.
NGTIMQYFEWNVPNDGQHWNRLHNNAQNLKNAGITAIWIPPAWKGTSQNDVGYGAYDLYDLGEFNQKGTVRTKYGTKAELERAIRSLKANGIQVYGDVVMNHKGGADFTERVQAVEVNPQNRNQEVSGTYQIEAWTGFNFPGRGNQHSSFKWRWYHFDGTDWDQSRQLANRIYKFRGDGKAWDWEVDTENGNYDYLMYADVDMDHPEVINELNRWGVWYANTLNLDGFRLDAVKHIKFSFMRDWLGHVRGQTGKNLFAVAEYWKNDLGALENYLSKTNWTMSAFDVPLHYNLYQASNSSGNYDMRNLLNGTLVQRHPSHAVTFVDNHDTQPGEALESFVQGWFKPLAYATILTREEGYPQVFYGDYYGIPSDGVPSYRQQIDPLLKARQQYAYGRQHDYFDHWDVIGWTREGNASHPNSGLATIMSDGPGGSKWMYVGRQKAGEVWHDMTGNRSGTVTINQDGWGHFFVNGGSVSVWVKR

SEQ ID NO: 43807 - protein, 480 aa, Bacillus sp.
NGTIMQYFEWNVPNDGQHWNRLHNNAQNLKNAGITAIWIPPAWKGTSQNDVGYGAYDLYDLGEFNQKGTVRTKYGTKAELERAIRSLKANGIQVYGDVVMNHKGGADFTERVQAVEVNPQNRNQEVSGTYQIEAWTGFNFPGRGNQHSSFKWRWYHFDGTDWDQSRKLANRIYKFRGDGKAWDWEVDTENGNYDYLMYADVDMDHPEVINELNRWGVWYANTLNLDGFRLDAVKHIKFSFMRDWLGHVRGQTGKNLFAVAEYWKNDLGALENYLSKTNWTMSAFDVPLHYNLYQASNSSGNYDMRNLLNGTLVQRHPSHAVTFVDNHDTQPGEALESFVQGWFKPLAYATILTREQGYPQVFYGDYYGIPSDGVPSYRQQIDPLLKARQQYAYGRQHDYFDHWDVIGWTREGNASHPNSGLATIMSDGPGGSKWMYVGRQKAGEVWHDMTGNRSGTVTINQDGWGHFFVNGGSVSVWVKR

SEQ ID NO: 43808 - protein, 480 aa, Bacillus sp.
NGTIMQYFEWNLPNDGQHWNRLHNNAQNLKNAGITAIWIPPAWKGTSQNDVGYGAYDLYDLGEFNQKGTVRTKYGTKAELERAIRSLKANGIQVYGDVVMNHKGGADFTERVQAVEVNPQNRNQEVSGTYQIEAWTGFNFPGRGNQHSSFKWRWYHFDGTDWDQSRQLANRIYKFRGDGKAWDWEVDTENGNYDYLMYADVDMDHPEVINELNRWGVWYANTLNLDGFRLDAVKHIKFSFMRDWLGHVRGQTGKNLFAVAEYWKNDLGALENYLSKTNWTMSAFDVPLHYNLYQASNSSGNYDMRNLLNGTLVQRHPSHAVTFVDNHDTQPGEALESFVQGWFKPLAYATILTREQGYPQVFYGDYYGIPSDGVPSYRQQIDPLLKARQQYAYGRQHDYFDHWDVIGWTREGNASHPNSGLATIMSDGPGGSKWMYVGRQKAGEVWHDMTGNRSGTVTINQDGWGHFFVNGGSVSVWVKR

SEQ ID NO: 43809 - protein, 480 aa, Synthetic construct
NGTIMQYFEWNVPNDGQHWNRLHNNAQNLKNAGITAIWIPPAWKGTSQNDVGYGAYDLYDLGEFNQKGTVRTKYGTKAELERAIRSLKANGIQVYGDVVMNHKGGADATEMVRAVEVNPNNRNQEVSGEYTIEAWTKFDFPGRGNTHSNFKWRWYHFDGVDWDQSRKLNNRIYKFRGDGKGWDWEVDTENGNYDYLMYADIDMDHPEVINELNRWGVWYANTLNLDGFRLDAVKHIKFSFMRDWLGHVRGQTGKNLFAVAEYWKNDLGALENYLSKTNWTMSAFDVPLHYNLYQASNSSGNYDMRNLLNGTLVQRHPSHAVTFVDNHDTQPGEALESFVQGWFKPLAYATILTREQGYPQVFYGDYYGIPSDGVPSYRQQIDPLLKARQQYAYGRQHDYFDHWDVIGWTREGNASHPNSGLATIMSDGPGGSKWMYVGRQKAGEVWHDMTGNRSGTVTINQDGWGHFFVNGGSVSVWVKR

SEQ ID NO: 43810 - protein, 480 aa, Bacillus sp.
NGTIMQYFEWNVPNDGQHWTRLHNNAQNLKNAGITAIWIPPAWKGTSQNDVGYGAYDLYDLGEFNQKGTVRTKYGTKAELERAIRSLKANGIQVYGDVVMNHKGGADFTERVQAVEVNPQNRNQEVSGTYQIEAWTGFNFPGRGNQHSSFKWRWYHFDGTDWDQSRQLANRIYKFRGDGKAWDWEVDTENGNYDYLMYADVDMDHPEVINELNRWGVWYANTLNLDGFRLDAVKHIKFSFMRDWLGHVRGQTGKNLFAVAEYWKNDLGALENYLSKTNWTMSAFDVPLHYNLYQASNSSGNYDMRNLLNGTLVQRHPSHAVTFVDNHDTQPGEALESFVQGWFKPLAYATILTREQGYPQVFYGDYYGIPSDGVPSYRQQIDPLLKARQQYAYGRQHDYFDHWDVIGWTREGNASHPNSGLATIMSDGPGGSKWMYVGRQKAGEVWHDMTGNRSGTVTINQDGWGHFFVNGGSVSVWVKR

SEQ ID NO: 43811 - protein, 480 aa, Bacillus sp.
NGTIMQYFEWNVPNDGQHWNRLHNNAQNLKNAGITAIWIPPAWKGTSQNDVGYGAYDLYDLGEFNQKGTVRTKYGTKAELERAIRSLKANGIQVYGDVVMNHKGGADFTERVQAVEVNPQNRNQEVSGTYQIEAWTGFNFPGRGNQHSSFKWRWYHFDGTDWDQSRQLANRIYKFRGDGKAWDWEVDTENGNYDYLMYADVDMDHPEVINELNRWGVWYANTLNLDGFRLDAVKHIKFSFMRDWLGHVRGQTGKNLFAVAEYWKNDLGALENYLSKTNWTMSAFDVPLHYNLYQASNSSGNYDMRNLLNGTLVQRHPSHAVTFVDNHDTQPGEALESFVQGWFKPLAYATILTREQGYPQVFYGDYYGIPSDGVPSYRSQIDPLLKARQQYAYGRQHDYFDHWDVIGWTREGNASHPNSGLATIMSDGPGGSKWMYVGRQKAGEVWHDMTGNRSGTVTINQDGWGHFFVNGGSVSVWVKR

SEQ ID NO: 43812 - protein, 480 aa, Bacillus sp.
NGTIMQYFEWNVPNDGQHWNRLHNNAQNLKNAGITAIWIPPAWKGTSQNDVGYGAYDLYDLGEFNQKGTVRTKYGTKAELERAIRSLKANGIQVYGDVVMNHKGGADFTERVQAVEVNPQNRNQEVSGTYQIEAWTGFNFPGRGNQHSSFKWRWYHFDGTDWDQSRQLANRIYKFRGDGKAWDWEVDTENGNYDYLMYADVDMDHPEVINELNRWGVWYANTLNLDGFRLDAVKHIKFSFMRDWLGHVRGQTGKNLFAVAEYWKNDLGALENYLSKTNWTMSLFDVPLHYNLYQASNSSGNYDMRNLLNGTLVQRHPSHAVTFVDNHDTQPGEALESFVQGWFKPLAYATILTREQGYPQVFYGDYYGIPSDGVPSYRQQIDPLLKARQQYAYGRQHDYFDHWDVIGWTREGNASHPNSGLATIMSDGPGGSKWMYVGRQKAGEVWHDMTGNRSGTVTINQDGWGHFFVNGGSVSVWVKR

SEQ ID NO: 43813 - protein, 480 aa, Bacillus sp.
NGTIMQYFEWNVPNDGQHWNRLHNNAQNLKNAGITAIWIPPAWKGTSQNDVGYGAYDLYDLGEFNQKGTVRTKYGTKAELERAIRSLKANGIQVYGDVVMNHKGGADFTERVQAVEVNPQNRNQEVSGTYQIEAWTGFNFPGRGNQHSSFKWRWYHFDGTDWDQSRQLANRIYKFRGDGKAWDWEVDTENGNYDYLMYADVDMDHPEVINELNRWGVWYANTLNLDGFRLDAVKHIKFSFMRDWLGHVRGQTGKNLFAVAEYWKNDLGALENYLSKTNWTMSAFDVPLHYNLYQASNSSGNYDMRNLLNGTLVQRHPSHAVTFVDNHDTQPGEALESFVQGWFKPLAYATILTREQGYPQVFYGDYYGIPSDGVPSYRQQIDPLLKARQQYAYGRQHDYFDHWDVIGWTREGNASHPNSGLATIMSDGPGGSKWMYVGRQKAGEVWHDLTGNRSGTVTINQDGWGHFFVNGGSVSVWVKR

SEQ ID NO: 43814 - protein, 480 aa, Bacillus sp.
NGTIMQYFEWNVPNDGQHWNRLHNNAQNLKNAGITAIWIPPAWKGTSQNDVGYGAYDLYDLGEFNQKGTVRTKYGTKAELERAIRSLKANGIQVYGDVVMNHKGGADFTERVQAVEVNPQNRNQEVSGTYQIEAWTGFNFPGRGNQHSSFKWRWYHFDGTDWDQSRQLANRIYKFRGDGKAWDWEVDTENGNYDYLMYADLDMDHPEVINELNRWGVWYANTLNLDGFRLDAVKHIKFSFMRDWLGHVRGQTGKNLFAVAEYWKNDLGALENYLSKTNWTMSAFDVPLHYNLYQASNSSGNYDMRNLLNGTLVQRHPSHAVTFVDNHDTQPGEALESFVQGWFKPLAYATILTREQGYPQVFYGDYYGIPSDGVPSYRQQIDPLLKARQQYAYGRQHDYFDHWDVIGWTREGNASHPNSGLATIMSDGPGGSKWMYVGRQKAGEVWHDMTGNRSGTVTINQDGWGHFFVNGGSVSVWVKR

SEQ ID NO: 43815 - protein, 480 aa, Bacillus sp.
NGTIMQYFEWNVPNDGQHWNRLHNNAQNLKNAGITAIWIPPAWKGTSQNDVGYGAYDLYDLGEFNQKGTVRTKYGTKAELERAIRSLKANGIQVYGDVVMNHKGGADFTERVQAVEVNPQNRNQEVSGTYQIEAWTGFNFPGRGNQHSSFKWRWYHFDGTDWDQSRQLANRIYKFRGDGKAWDWEVDTENGNYDYLMYADVDMDHPEVINELNRWGVWYANTLNLDGFRLDAVKHIKFSFMRDWLGHVRGQTGKNLFAVAEYWKNDLGALENYLSKTNWTMSAFDVPLHYNLYQASNSSGNYDMRNLLNGTLVQRHPSHAVTFVDNHDTQPGEALESFVQGWFKPLAYATILTREQGYPCVFYGDYYGIPSDGVPSYRQQIDPLLKARQQYAYGRQHDYFDHWDVIGWTREGNASHPNSGLATIMSDGPGGSKWMYVGRQKAGEVWHDMTGNRSGTVTINQDGWGHFFVNGGSVSVWVKR

SEQ ID NO: 43816 - protein, 480 aa, Bacillus sp.
NGTIMQYFEWNVPNDGQHWNRLHNNAQNLKNAGITAIWIPPAWKGTSQNDVGYGAYDLYDLGEFNQKGTVRTKYGTKAELERAIRSLKANGIQVYGDVVMNHKGGADFTERVQAVEVNPQNRNQEVSGTYQIEAWTGFNFPGRGNQHSSFKWRWYHFDGTDWDQSRQLANRIYKFRGDGKAWDWEVDTENGNYDYLMYADVDMDHPEVINELNRWGVWYANTLNLDGFRLDAVKHIKFSFMRDWLGHVRGQTGKPLFAVAEYWKNDLGALENYLSKTNWTMSAFDVPLHYNLYQASNSKGNYDMRNLLNGTLVQRHPSHAVTFVDNHDTQPGEALESFVQGWFKPLAYATILTREQGYPQVFYGDYYGIPSDGVPSYRQQIDPLLKARQQYAYGRQHDYFDHWDVIGWTREGNASHPNSGLATIMSDGPGGSKWMYVGRQKAGEVWHDMTGNRSGTVTINQDGWGHFFVNGGSVSVWVKR

SEQ ID NO: 43817 - protein, 480 aa, Bacillus sp.
NGTIMQYFEWNVPNDGQHWNRLHNNAQNLKNAGITAIWIPPAWKGTSQNDVGYGAYDLYDLGEFNQKGTVRTKYGTKAELERAIRSLKANGMQVYGDVVMNHKGGADFTERVQAVEVNPQNRNQEVSGTYQIEAWTGFNFPGRGNQHSSFKWRWYHFDGTDWDQSRQLANRIYKFRGDGKAWDWEVDTENGNYDYLMYADVDMDHPEVINELNRWGVWYANTLNLDGFRLDAVKHIKFSFMRDWLGHVRGQTGKNLFAVAEYWKNDLGALENYLSKTNWTMSAFDVPLHYNLYQASNSSGNYDMRNLLNGTLVQRHPSHAVTFVDNHDTQPGEALESFVQGWFKPLAYATILTREQGYPQVFYGDYYGIPSDGVPSYRQQIDPLLKARQQYAYGRQHDYFDHWDVIGWTREGNASHPNSGLATIMSDGPGGSKWMYVGRQKAGEVWHDMTGNRSGTVTINQDGWGHFFVNGGSVSVWVKR

SEQ ID NO: 43818 - protein, 480 aa, Bacillus sp.
NGTIMQYFEWNVPNDGQHWNRLHNNAQNLKNAGITAIWIPPAWKGTSQNDVGYGAYDLYDLGEFNQKGTVRTKYGTKAELERAIRALKANGIQVYGDVVMNHKGGADFTERVQAVEVNPQNRNQEVSGTYQIEAWTGFNFPGRGNQHSSFKWRWYHFDGTDWDQSRQLANRIYKFRGDGKAWDWEVDTENGNYDYLMYADVDMDHPEVINELNRWGVWYANTLNLDGFRLDAVKHIKFSFMRDWLGHVRGQTGKNLFAVAEYWKNDLGALENYLSKTNWTMSAFDVPLHYNLYQASNSSGNYDMRNLLNGTLVQRHPSHAVTFVDNHDTQPGEALESFVQGWFKPLAYATILTREQGYPQVFYGDYYGIPSDGVPSYRQQIDPLLKARQQYAYGRQHDYFDHWDVIGWTREGNASHPNSGLATIMSDGPGGSKWMYVGRQKAGEVWHDMTGNRSGTVTINQDGWGHFFVNGGSVSVWVKR

SEQ ID NO: 43819 - protein, 480 aa, Bacillus sp.
NGTIMQYFEWNVPNDGQHWNRLHNNAQNLKNAGITAIWIPPAWKGTSQNDVGYGAYDLYDLGEFNQKGTVRTKYGTKAELERAIRSLKANGIQVYGDVVMNHKGGADFTERVQAVEVNPQNRNQEVSGTYQIEAWTGFNFPGRGNQHSSFKWRWYHFDGTDWDQSRQLANRIYKFRGDGKAWDWEVDTENGNYDYLMYADVDMDHPEVINELNRWGVWYANTLNLDGFRLDAVKHIKFSFMRDWLGHVRGQTGKNLFAVAEYWKNDLGALENYLSKTNWTMSAFDVPLHYKLYQASNSSGNYDMRNLLNGTLVQRHPSHAVTFVDNHDTQPGEALESFVQGWFKPLAYATILTREQGYPQVFYGDYYGIPSDGVPSYRQQIDPLLKARQQYAYGRQHDYFDHWDVIGWTREGNASHPNSGLATIMSDGPGGSKWMYVGRQKAGEVWHDMTGNRSGTVTINQDGWGHFFVNGGSVSVWVKR

SEQ ID NO: 43820 - protein, 480 aa, Synthetic construct
NGTIMQYFEWNVPNDGQHWNRLHNNAQNLKNAGITAIWIPPAWKGTSQNDVGYGAYDLYDLGEFNQKGTVRTKYGTKAELERAIRSLKANGIQVYGDVVMNHKGGADATENVLAVEVNPNNRNQEISGDYTIEAWTKFDFPGRGNTYSDFKWRWYHFDGVDWDQSRQFQNRIYKFRGDGKAWDWEVDSENGNYDYLMYADVDMDHPEVINELNRWGVWYANTLNLDGFRLDAVKHIKFSFMRDWLGHVRGQTGKNLFAVAEYWKNDLGALENYLSKTNWTMSAFDVPLHYNLYQASNSSGNYDMRNLLNGTLVQRHPSHAVTFVDNHDTQPGEALESFVQGWFKPLAYATILTREQGYPQVFYGDYYGIPSDGVPSYRQQIDPLLKARQQYAYGRQHDYFDHWDVIGWTREGNASHPNSGLATIMSDGPGGSKWMYVGRQKAGEVWHDMTGNRSGTVTINQDGWGHFFVNGGSVSVWVKR

SEQ ID NO: 43821 - protein, 480 aa, Bacillus sp.
NGTIMQYFEWNVPNDGQHWNRLHNNAQNLKNAGITAIWIPPAYKGTSQNDVGYGAYDLYDLGEFNQKGTVRTKYGTKAELERAIRSLKANGIQVYGDVVMNHKGGADFTERVQAVEVNPQNRNQEVSGTYQIEAWTGFNFPGRGNQHSSFKWRWYHFDGTDWDQSRQLANRIYKFRGDGKAWDWEVDTENGNYDYLMYADVDMDHPEVINELNRWGVWYANTLNLDGFRLDAVKHIKFSFMRDWLGHVRGQTGKNLFAVAEYWKNDLGALENYLSKTNWTMSAFDVPLHYNLYQASNSSGNYDMRNLLNGTLVQRHPSHAVTFVDNHDTQPGEALESFVQGWFKPLAYATILTREQGYPQVFYGDYYGIPSDGVPSYRQQIDPLLKARQQYAYGRQHDYFDHWDVIGWTREGNASHPNSGLATIMSDGPGGSKWMYVGRQKAGEVWHDMTGNRSGTVTINQDGWGHFFVNGGSVSVWVKR

SEQ ID NO: 43822 - protein, 480 aa, Bacillus sp.
NGTIMQYFEWNVPNDGQHWNRLHNNAQNLKNAGITAIWIPPAWKGTSQNDVGYGAYDLYDLGEFNQKGTVRTKYGTKAELERAIRSLKANGIQVYGDVVMNHKGGADFTERVQAVEVNPQNRNQEVSGTYQIEAWTGFNFPGRGNQHSSFKWRWYHFDGTDWDQSRQLASRIYKFRGDGKAWDWEVDTENGNYDYLMYADVDMDHPEVINELNRWGVWYANTLNLDGFRLDAVKHIKFSFMRDWLGHVRGQTGKNLFAVAEYWKNDLGALENYLSKTNWTMSAFDVPLHYNLYQASNSSGNYDMRNLLNGTLVQRHPSHAVTFVDNHDTQPGEALESFVQGWFKPLAYATILTREQGYPQVFYGDYYGIPSDGVPSYRQQIDPLLKARQQYAYGRQHDYFDHWDVIGWTREGNASHPNSGLATIMSDGPGGSKWMYVGRQKAGEVWHDMTGNRSGTVTINQDGWGHFFVNGGSVSVWVKR

SEQ ID NO: 43823 - protein, 480 aa, Bacillus sp.
NGTIMQYFEWNVPNDGQHWNRLHNNAQNLKNAGITAIWIPPAWKGTSQNDVGYGAYDLYDLGEFNQKGTVRTKYGTKAELERAIRSLKANGIQVYGDVVMNHKGGADFTERVQAVEVNPQNRNQEVSGTYQIEAWTGFNFPGRGNQHSSFKWRWYHFDGTDWDESRQLANRIYKFRGDGKAWDWEVDTENGNYDYLMYADVDMDHPEVINELNRWGVWYANTLNLDGFRLDAVKHIKFSFMRDWLGHVRGQTGKNLFAVAEYWKNDLGALENYLSKTNWTMSAFDVPLHYNLYQASNSSGNYDMRNLLNGTLVQRHPSHAVTFVDNHDTQPGEALESFVQGWFKPLAYATILTREQGYPQVFYGDYYGIPSDGVPSYRQQIDPLLKARQQYAYGRQHDYFDHWDVIGWTREGNASHPNSGLATIMSDGPGGSKWMYVGRQKAGEVWHDMTGNRSGTVTINQDGWGHFFVNGGSVSVWVKR

SEQ ID NO: 43824 - protein, 480 aa, Bacillus sp.
NGTIMQYFEWNVPNDGQHWNRLHNNAQNLKNAGITAIWIPPAWKGTSQNDVGYGAYDLYDLGEFNQKGTVRTKYGTKAELERAIRSLKANGIQVYGDVVMNHKGGADFTERVQAVEVNPQNRNQEVSGTYQIEAWTGFNFPGRGNQHSSFKWRWYHFDGTDWDQSRQLANRIYKFRGDGKAWDWEVDTENGNYDYLMYADVDMDHPEVINELNRWGVWYANTLNLDGFRLDAVKHIKFSFMRDWLGHVRGQTGKNLFAVAEYWKNDLGALENYLSKTNWTMSAFDVPLHYNLYQASNSSGNFDMRNLLNGTLVQRHPSHAVTFVDNHDTQPGEALESFVQGWFKPLAYATILTREQGYPQVFYGDYYGIPSDGVPSYRQQIDPLLKARQQYAYGRQHDYFDHWDVIGWTREGNASHPNSGLATIMSDGPGGSKWMYVGRQKAGEVWHDMTGNRSGTVTINQDGWGHFFVNGGSVSVWVKR

SEQ ID NO: 43825 - protein, 480 aa, Bacillus sp.
NGTIMQYFEWNVPNDGQHWNRLHNNAQNLKNAGITAIWIPPAWKGTSQNDVGYGAYDLYDLGEFNQKGTVRTKYGTKAELERAIRSLKANGIQVYGDVVMNHKGGADFTERVQAVEVNPQNRNQEVSGTYQIEAWTGFNFPGRGNQHSSFKWRWYHFDGTDWDQSRQLANRIYKFRGDGKAWDWEVDTEFGNYDYLMYADVDMDHPEVINELNRWGVWYANTLNLDGFRLDAVKHIKFSFMRDWLGHVRGQTGKNLFAVAEYWKNDLGALENYLSKTNWTMSAFDVPLHYNLYQASNSSGNYDMRNLLNGTLVQRHPSHAVTFVDNHDTQPGEALESFVQGWFKPLAYATILTREQGYPQVFYGDYYGIPSDGVPSYRQQIDPLLKARQQYAYGRQHDYFDHWDVIGWTREGNASHPNSGLATIMSDGPGGSKWMYVGRQKAGEVWHDMTGNRSGTVTINQDGWGHFFVNGGSVSVWVKR

SEQ ID NO: 43826 - protein, 480 aa, Bacillus sp.
NGTIMQYFEWNVPNDGQHWNRLHNNAQNLKNAGITAIWIPPAWKGTSQNDVGYGAYDLYDLGEFNQKGTVRTKYGTKAELERAIRSLKANGIQVYGDVVMNHKGGADFTERVQAVEVNPQNRNQEVSGTYQIEAWTGFNFPGRGNQHSSFKWRWYHFDGTDWDQSRQLANRIYKFRGDGKAWDWEVDTENGNYDYLMYADVDMDHPEVINELNRWGVWYANTLNLDGFRLDAVKHIKFSFMRDWLGHVRGQTGKNLFAVAEYWKNDLGALENYLSKTNWTMSAFDVPLHYNLYQASNSSGNYDMRNLLNGTLVQRHPSHAVTFVDNHDTQPGEALESFVQGWFKPLAYAFILTREQGYPQVFYGDYYGIPSDGVPSYRQQIDPLLKARQQYAYGRQHDYFDHWDVIGWTREGNASHPNSGLATIMSDGPGGSKWMYVGRQKAGEVWHDMTGNRSGTVTINQDGWGHFFVNGGSVSVWVKR

SEQ ID NO: 43827 - protein, 480 aa, Bacillus sp.
NGTIMQYFEWNVPNDGQHWNRLHNNAQNLKNAGITAIWIPPAWKGTSQNDVGYGAYDLYDLGEFNQKGTVRTKYGTKAELERAIRSLKANGIQVYGDVVMNHKGGADFTERVQAVEVNPQNRNQEVSGTYQIEAWTGFNFPGRGNQHSSFKWRWYHFDGTDWDQSRQLANRIYKFRGDGKAWDWEVDTENGNYDYLMYADVDMDHPEVINELNRWGVWYANTLNLDGFRLDAVKHIKFSFMRDWLGHVRGQTGKNLFAVAEYWKNDLGALENYLSKTNWTMSAFDVPLHYNLYQASNSSGNYDMRNLLNGTLVQRHPSHAVTFVDNHDTQPGEALESFVQGWFKPLAYATILTREQGYPQVFYGDYYGIPSDGVPSYRQQIDPLLKARRQYAYGRQHDYFDHWDVIGWTREGNASHPNSGLATIMSDGPGGSKWMYVGRQKAGEVWHDMTGNRSGTVTINQDGWGHFFVNGGSVSVWVKR

SEQ ID NO: 43828 - protein, 480 aa, Bacillus sp.
NGTIMQYFEWNVPNDGQHWNRLHNNAQNLKNAGITAIWIPPAWKGTSQNDVGYGAYDLYDLGEFNQKGTVRTKYGTKAELERAIRSLKANGIQVYGDVVMNHKGGADFTERVQAVEVNPQNRNQEVSGTYQIEAWTGFNFPGRGNQHSSFKWRWYHFDGVDWDQSRQLANRIYKFRGDGKAWDWEVDTENGNYDYLMYADVDMDHPEVINELNRWGVWYANTLNLDGFRLDAVKHIKFSFMRDWLGHVRGQTGKNLFAVAEYWKNDLGALENYLSKTNWTMSAFDVPLHYNLYQASNSSGNYDMRNLLNGTLVQRHPSHAVTFVDNHDTQPGEALESFVQGWFKPLAYATILTREQGYPQVFYGDYYGIPSDGVPSYRQQIDPLLKARQQYAYGRQHDYFDHWDVIGWTREGNASHPNSGLATIMSDGPGGSKWMYVGRQKAGEVWHDMTGNRSGTVTINQDGWGHFFVNGGSVSVWVKR

SEQ ID NO: 43829 - protein, 480 aa, Bacillus sp.
NGTIMQYFEWNVPNDGQHWNRLHNNAQNLKNAGITAIWIPPAWKGTSQNDVGYGAYDLYDLGEFNQKGTVRTKYGTKAELERAIRSLKANGIQVYGDVVMNHKGGADFTERVQAVEVNPQNRNQEVSGTYQIEAWTGFNFPGRGNQHSSFKWRWYHFDGTDWDQSRQLANRIYKFRGDGKAWDWEVDTENGNYDYLMYADVDMDHPEVINELNRWGVWYANTLNLDGFRLDAVKHIKFSFMRDWLGHVRGQTGKNLFAVAEYWKNDLGALENYLSKTNWTMSAFDVPLHYNLYQASNSSGNYDMRNLLNGTLVQRHPSHAVTFVDNHDTQPGEALESFVQGWFKPLAYATILTREQGYPQVFYGDYYGIPQDGVPSYRQQIDPLLKARQQYAYGRQHDYFDHWDVIGWTREGNASHPNSGLATIMSDGPGGSKWMYVGRQKAGEVWHDMTGNRSGTVTINQDGWGHFFVNGGSVSVWVKR

SEQ ID NO: 43830 - protein, 480 aa, Bacillus sp.
NGTIMQYFEWNVPNDGQHWNRLHNNAQNLKNAGITAIWIPPAWKGTSQNDVGYGAYDLYDLGEFNQKGTVRTKYGTKAELERAIRSLKANGIQVYGDVVMNHKGGADFTERVQAVEVNPQNRNQEVSGTYQIEAWTGFNFPGRGNQHSSFKWRWYHFDGTDWDQSRQLANRIYKFRGDGKAWDWEVDTENGNYDYLMYADVDMDHPEVINELNRWGVWYANTLNLDGFRLDAVKHIKFSFMRDWLGHVRGQTGKNLFAVAEYWKNDLGALENYLSKTNWTMSAFDVPLHYNLYQASNSSGNYDMRNLLNGTLVQRHPSHAVTFVDNHDTQPGEALESFVQGWFKPLAYATILTREQGYPQVFYGDYYGIPSDGVPSLRQQIDPLLKARQQYAYGRQHDYFDHWDVIGWTREGNASHPNSGLATIMSDGPGGSKWMYVGRQKAGEVWHDMTGNRSGTVTINQDGWGHFFVNGGSVSVWVKR

SEQ ID NO: 43831 - protein, 480 aa, Bacillus sp.
NGTIMQYFEWNVPNDGQHWNRLHNNAQNLKNAGITAIWIPPAWKGTSQNDVGYGAYDLYDLGEFNQKGTVRTKYGTKAELERAIRSLKANGIQVYGDVVMNHKGGADFTEWVQAVEVNPQNRNQEVSGTYQIEAWTGFNFPGRGNQHSSFKWRWYHFDGTDWDQSRQLANRIYKFRGDGKAWDWEVDTENGNYDYLMYADVDMDHPEVINELNRWGVWYANTLNLDGFRLDAVKHIKFSFMRDWLGHVRGQTGKNLFAVAEYWKNDLGALENYLSKTNWTMSAFDVPLHYNLYQASNSSGNYDMRNLLNGTLVQRHPSHAVTFVDNHDTQPGEALESFVQGWFKPLAYATILTREQGYPQVFYGDYYGIPSDGVPSYRQQIDPLLKARQQYAYGRQHDYFDHWDVIGWTREGNASHPNSGLATIMSDGPGGSKWMYVGRQKAGEVWHDMTGNRSGTVTINQDGWGHFFVNGGSVSVWVKR

SEQ ID NO: 43832 - protein, 480 aa, Bacillus sp.
NGTIMQYFEWNVPNDGQHWNRLHNNAQNLKNAGITAIWIPPAWKGTSQNDVGYGAYDLYDLGEFNQKGTVRTKYGTKAELERAIRSLKANGIQVYGDVVMNHKGGADFTERVQAVEVNPQNRNQEVSGTYQIEAWTGFNFPGRGNQHSSFKWRWYHFDGTDWDQSRQLANRIYKFRGDGKAWDWEVDTENGNYDYLMYADVDMDHPEVINELNRWGVWYANTLNLDGFRLDAVKHIKFSFMRDWLGHVRGQTGKNLFAVAEYWKNDLGALENYLSKTNWTMSAFDVPLHYNLYQASNSSGNYDMRNLLNGTLVQRHPSHAVTFVDNHDTQPGEALESFVQGWFKPLAYATILTREQGYPQVFYGDYYGIPSDGVPSYRQQIDPLLKARQQYAYGRQHDYFDHWDIIGWTREGNASHPNSGLATIMSDGPGGSKWMYVGRQKAGEVWHDMTGNRSGTVTINQDGWGHFFVNGGSVSVWVKR

SEQ ID NO: 43833 - protein, 480 aa, Bacillus sp.
NGTIMQYFEWNVPNDGTHWNRLHNNAQNLKNAGITAIWIPPAWKGTSQNDVGYGAYDLYDLGEFNQKGTVRTKYGTKAELERAIRSLKANGIQVYGDVVMNHKGGADFTERVQAVEVNPQNRNQEVSGTYQIEAWTGFNFPGRGNQHSSFKWRWYHFDGTDWDQSRQLANRIYKFRGDGKAWDWEVDTENGNYDYLMYADVDMDHPEVINELNRWGVWYANTLNLDGFRLDAVKHIKFSFMRDWLGHVRGQTGKNLFAVAEYWKNDLGALENYLSKTNWTMSAFDVPLHYNLYQASNSSGNYDMRNLLNGTLVQRHPSHAVTFVDNHDTQPGEALESFVQGWFKPLAYATILTREQGYPQVFYGDYYGIPSDGVPSYRQQIDPLLKARQQYAYGRQHDYFDHWDVIGWTREGNASHPNSGLATIMSDGPGGSKWMYVGRQKAGEVWHDMTGNRSGTVTINQDGWGHFFVNGGSVSVWVKR

SEQ ID NO: 43834 - protein, 480 aa, Bacillus sp.
NGTIMQYFEWNVPNDGQHWNRLHNNAQNLKNAGITAIWIPPAWKGTSQNDVGYGAYDLYDLGEFNQKGTVRTKYGTKAELERAIRSLKANGIQVYGDVVMNHKGGADFTERVQAVEVNPQNRNQEVSGTYQIEAWTGFNFPGRGNQHSSFKWRWYHFDGTDWDQSRQLSNRIYKFRGDGKAWDWEVDTENGNYDYLMYADVDMDHPEVINELNRWGVWYANTLNLDGFRLDAVKHIKFSFMRDWLGHVRGQTGKNLFAVAEYWKNDLGALENYLSKTNWTMSAFDVPLHYNLYQASNSSGNYDMRNLLNGTLVQRHPSHAVTFVDNHDTQPGEALESFVQGWFKPLAYATILTREQGYPQVFYGDYYGIPSDGVPSYRQQIDPLLKARQQYAYGRQHDYFDHWDVIGWTREGNASHPNSGLATIMSDGPGGSKWMYVGRQKAGEVWHDMTGNRSGTVTINQDGWGHFFVNGGSVSVWVKR

SEQ ID NO: 43835 - protein, 480 aa, Bacillus sp.
NGTIMQYFEWNVPNDGQHWNRLHNEAQNLKNAGITAIWIPPAWKGTSQNDVGYGAYDLYDLGEFNQKGTVRTKYGTKAELERAIRSLKANGIQVYGDVVMNHKGGADFTERVQAVEVNPQNRNQEVSGTYQIEAWTGFNFPGRGNQHSSFKWRWYHFDGTDWDQSRQLANRIYKFRGDGKAWDWEVDTENGNYDYLMYADVDMDHPEVINELNRWGVWYANTLNLDGFRLDAVKHIKFSFMRDWLGHVRGQTGKNLFAVAEYWKNDLGALENYLSKTNWTMSAFDVPLHYNLYQASNSSGNYDMRNLLNGTLVQRHPSHAVTFVDNHDTQPGEALESFVQGWFKPLAYATILTREQGYPQVFYGDYYGIPSDGVPSYRQQIDPLLKARQQYAYGRQHDYFDHWDVIGWTREGNASHPNSGLATIMSDGPGGSKWMYVGRQKAGEVWHDMTGNRSGTVTINQDGWGHFFVNGGSVSVWVKR

SEQ ID NO: 43836 - protein, 480 aa, Bacillus sp.
NGTIMQYFEWNVPNDGQHWNRLHNNAQNLKNAGITALWIPPAWKGTSQNDVGYGAYDLYDLGEFNQKGTVRTKYGTKAELERAIRSLKANGIQVYGDVVMNHKGGADFTERVQAVEVNPQNRNQEVSGTYQIEAWTGFNFPGRGNQHSSFKWRWYHFDGTDWDQSRQLANRIYKFRGDGKAWDWEVDTENGNYDYLMYADVDMDHPEVINELNRWGVWYANTLNLDGFRLDAVKHIKFSFMRDWLGHVRGQTGKNLFAVAEYWKNDLGALENYLSKTNWTMSAFDVPLHYNLYQASNSSGNYDMRNLLNGTLVQRHPSHAVTFVDNHDTQPGEALESFVQGWFKPLAYATILTREQGYPQVFYGDYYGIPSDGVPSYRQQIDPLLKARQQYAYGRQHDYFDHWDVIGWTREGNASHPNSGLATIMSDGPGGSKWMYVGRQKAGEVWHDMTGNRSGTVTINQDGWGHFFVNGGSVSVWVKR

SEQ ID NO: 43837 - protein, 480 aa, Bacillus sp.
NGTIMQYFEWNVPNDGQHWNRLHNNAQNLKNAGITAIWIPPAWKGTSQNDVGYGAYDLYDLGEFNQKGTVRTKYGTKAELLRAIRSLKANGIQVYGDVVMNHKGGADFTERVQAVEVNPQNRNQEVSGTYQIEAWTGFNFPGRGNQHSSFKWRWYHFDGTDWDQSRQLANRIYKFRGDGKAWDWEVDTENGNYDYLMYADVDMDHPEVINELNRWGVWYANTLNLDGFRLDAVKHIKFSFMRDWLGHVRGQTGKNLFAVAEYWKNDLGALENYLSKTNWTMSAFDVPLHYNLYQASNSSGNYDMRNLLNGTLVQRHPSHAVTFVDNHDTQPGEALESFVQGWFKPLAYATILTREQGYPQVFYGDYYGIPSDGVPSYRQQIDPLLKARQQYAYGRQHDYFDHWDVIGWTREGNASHPNSGLATIMSDGPGGSKWMYVGRQKAGEVWHDMTGNRSGTVTINQDGWGHFFVNGGSVSVWVKR

SEQ ID NO: 43838 - protein, 480 aa, Bacillus sp.
NGTIMQYFEWNVPNDGQHWNRLHNNAQNLKNAGITAIWIPPAWKGTSQNDVGYGAYDLYDLGEFNQKGTVRTKYGTKAELERAIRSLKANGIQVYGDVVMNHKGGADFTERVQAVEVNPQNRNQEVSGTYQIEAWTGFNFPGRGNQHSSFKWRWYHFDGTDWDQSRQLANRIYKFRGDGKAWDWEVDTENGNYDYLMYADVDMDHPEVVNELNRWGVWYANTLNLDGFRLDAVKHIKFSFMRDWLGHVRGQTGKNLFAVAEYWKNDLGALENYLSKTNWTMSAFDVPLHYNLYQASNSSGNYDMRNLLNGTLVQRHPSHAVTFVDNHDTQPGEALESFVQGWFKPLAYATILTREQGYPQVFYGDYYGIPSDGVPSYRQQIDPLLKARQQYAYGRQHDYFDHWDVIGWTREGNASHPNSGLATIMSDGPGGSKWMYVGRQKAGEVWHDMTGNRSGTVTINQDGWGHFFVNGGSVSVWVKR

SEQ ID NO: 43839 - protein, 480 aa, Bacillus sp.
NGTIMQYFEWNVPNDGQHWNRLHNNAQNLKNAGITAIWIPPAWKGTSQNDVGYGAYDLYDLGEFNQKGTVRTKYGTKAELERAIRSLKANGIQVYGDVVMNHKGGADFTERVQAVEVNPQNRNQEVSGTYQIEAWTGFNFPGRGNQHSSFKWRWYHFDGTDWDQSRQLANRIYKFRGDGKAWDWEVDTENGNYDYLMYADVDMDHPEVINELNRWGVWYANTLNLDGFRLDAVKHIKFSFMRDWLGHVRGQTGKNLFAVAEYWKNDLGALENYLSKTNWTMSAFDVPLHYNLYQASNSSGNYDMRNLMNGTLVQRHPSHAVTFVDNHDTQPGEALESFVQGWFKPLAYATILTREQGYPQVFYGDYYGIPSDGVPSYRQQIDPLLKARQQYAYGRQHDYFDHWDVIGWTREGNASHPNSGLATIMSDGPGGSKWMYVGRQKAGEVWHDMTGNRSGTVTINQDGWGHFFVNGGSVSVWVKR

SEQ ID NO: 43840 - protein, 480 aa, Bacillus sp.
NGTIMQYFEWNVPNDGQHWNRLHNNAQNLKNAGITAIWIPPAWKGTSQNDVGYGAYDLYDLGEFNQKGTVRTKYGTKAELERAIRSLKANGIQVYGDVVMNHKGGADFTERVQAVEVNPQNRNQEVSGTYQIEAWTGFNFPGRGNQHSSFKWRWYHFDGTDWDQSRQLANRIYKFRGDGKAWDWEVDTENGNYDYLMYADVDMDHPEVINELNRWGVWYANTLNLDGFRLDAVKHIKFSFMRDWLGHVRGQTGKNLFAVAEYWKNDLGALENYLSKTNWTMSAFDVPLHYNLYQASNSSGNYDMRNLLNGTLVQRHPSHAVTFVDNHDTQPGEALESFVQGWFKPLAYATILTREQGYPQVFYGDYYGIPSDGVPSYRQQIDPLLKARQQYAYGRQHDYFDHWDVIGWTREGNASHPNSGLATIMTDGPGGSKWMYVGRQKAGEVWHDMTGNRSGTVTINQDGWGHFFVNGGSVSVWVKR

SEQ ID NO: 43841 - protein, 480 aa, Bacillus sp.
NGTIMQYFEWNVPNDGQHWNRLHNNAQNLKNAGITAIWIPPAWKGTSQNDVGYGAYDLYDLGEFNQKGTVRTKYGTKAELERAIRSLKANGIQVYGDVVMNHKGGADFTERVQAVEVNPQNRNQEVSGTYQIEAWTGFNFPGRGNQHSSFKWRWYHFDGTDWDQSRQLANRIYKFRGDGKAWDWEVDTENGNYDYLMYADVDMDHPEVINELNRWGVWYANTLNLDGFRLDAVKHIKFSFFRDWLGHVRGQTGKNLFAVAEYWKNDLGALENYLSKTNWTMSAFDVPLHYNLYQASNSSGNYDMRNLLNGTLVQRHPSHAVTFVDNHDTQPGEALESFVQGWFKPLAYATILTREQGYPQVFYGDYYGIPSDGVPSYRQQIDPLLKARQQYAYGRQHDYFDHWDVIGWTREGNASHPNSGLATIMSDGPGGSKWMYVGRQKAGEVWHDMTGNRSGTVTINQDGWGHFFVNGGSVSVWVKR

SEQ ID NO: 43842 - protein, 480 aa, Bacillus sp.
NGTIMQYFEWNVPNDGQHWNRLHNNAQNLKNAGITAIWIPPAWKGTSQNDVGYGAYDLYDLGEFNQKGTVRTKYGTKAELERAIRSLKANGIQVYGDVVMNHKGGADFTERVQAVEVNPQNRNQEVSGTYQIEAWTGFNFPGRGNQHSSFKWRWYHFDGTDWDQSRQLANRIYKFRGDGKAWDWEVDTENGNYDYLMYADVDMDHPEVITELNRWGVWYANTLNLDGFRLDAVKHIKFSFMRDWLGHVRGQTGKNLFAVAEYWKNDLGALENYLSKTNWTMSAFDVPLHYNLYQASNSSGNYDMRNLLNGTLVQRHPSHAVTFVDNHDTQPGEALESFVQGWFKPLAYATILTREQGYPQVFYGDYYGIPSDGVPSYRQQIDPLLKARQQYAYGRQHDYFDHWDVIGWTREGNASHPNSGLATIMSDGPGGSKWMYVGRQKAGEVWHDMTGNRSGTVTINQDGWGHFFVNGGSVSVWVKR

SEQ ID NO: 43843 - protein, 480 aa, Bacillus sp.
NGTIMQYFEWNVPNDGQHWNRLHNNAQNLKNAGITAIWIPPAWKGTSQNDVGYGAYDLYDLGEFNQKGTVRTKYGTKAELERAIRSLKANGIQVYGDVVMNHKGGADFTERVQAVEVNPQNRNQEVSGTYQIEAWTGFNFPGRGNQHSSFKWRWYHFDGTDWDQSRQLANRIYKFRGDGKAWDWEVDTENGNYDYLMYADVDMDHPEVINELNRWGVWYANTLNLDGFRLDAVKHIKFSFMRDWLGHVRGQTGKNLFAVAEYWKNDLGALENYLSKTNWTMSAFDVPLHYNLYQASNSSGNYDMRNLLNGTLVQRHPSHAVTFVDNHDTQPGEALESFVQGWFKPLAYATILTREQGYPQVFYGDYYGIPSDGVPSYRQQIDPLLKARQQYAYGRQHDYFDHWDVIGWTREGNASHPNSGLATIMSDGPGGSKWMYVGRQKAGEVWYDMTGNRSGTVTINQDGWGHFFVNGGSVSVWVKR

SEQ ID NO: 43844 - protein, 480 aa, Bacillus sp.
NGTIMQYFEWNVPNDGQHWNRLHNNAQNLKNAGITAIWIPPAWKGTSQNDVGYGAYDLYDLGEFNQKGTVRTKYGTKAELERAIRSLKANGIQVYGDVVMNHKGGADFTERVQAVEVNPQNRNQEVSGTYQIEAWTGFNFPGRGNTHSSFKWRWYHFDGTDWDQSRQLANRIYKFRGDGKAWDWEVDTENGNYDYLMYADVDMDHPEVINELNRWGVWYANTLNLDGFRLDAVKHIKFSFMRDWLGHVRGQTGKNLFAVAEYWKNDLGALENYLSKTNWTMSAFDVPLHYNLYQASNSSGNYDMRNLLNGTLVQRHPSHAVTFVDNHDTQPGEALESFVQGWFKPLAYATILTREQGYPQVFYGDYYGIPSDGVPSYRQQIDPLLKARQQYAYGRQHDYFDHWDVIGWTREGNASHPNSGLATIMSDGPGGSKWMYVGRQKAGEVWHDMTGNRSGTVTINQDGWGHFFVNGGSVSVWVKR

SEQ ID NO: 43845 - protein, 485 aa, Synthetic construct
ANLNGTLMQYFEWYMPNDGQHWKRLQNDSAYLAEHGITAVWIPPAYKGTSQADVGYGAYDLYDLGEFHQKGTVRTKYGTKGELQSAIKSLHSRDINVYGDVVIDHKGGADGTEWVDAVEVNPSDRNQEISGTYQIQAWTKFDFPGRGNTYSSFKWRWYHFDGVDWDESRKLSRIYKFRGIGKAWDWEVDTENGNYDYLMYADLDYDHPDVAAEIKRWGTWYANELQLDGFRLDAVKHIKFSFLRDWVNHVREKTGKEMFTVAEYWSYDLGALENYLNKTNFNHSVFDVPLHYQFHAASTQGGGYDMRKLLNGTVVSKHPLKSVTFVDNHDTQPGQSLESTVQTWFKPLAYAFILTRESGYPQVFYGDMYGTKGDSQREIPALKHKIEPILKARKQYAYGAQHDYFDHHDIVGWTREGDSSVANSGLAALITDGPGGAKRMYVGRQNAGETWHDITGNRSEPVVINSAGWGEFHVNGGSVSIYVQR

SEQ ID NO: 43846 - protein, 478 aa, unidentified
MQYFEWYVPNDGEHWNRLRNDAENLAHKGITSVWIPPVYKGTSQNDVGYGVYDVYDLGEFNQKGTIRTKYGTKAQLKSAIEALHNQNIDVYGDVVMNHKGGADYTEVVTAVEVDRNNRNIETSSDYQIDAWTGFDFPGRRDSYSNFKWRWFHFDGTDWDEGRKLNRIYKFKGVGKAWDWEVSSENGNYDYLMYADLDFDHPEVANEMKNWGTWYADELNLDGFRLDAVKHIDHEYLRDWVNHVRKQTGKEMFTVAEYWQNDIRTLNNYLGKVNYNQSVFDAPLHYNFHYASTGNGNYDMRNILKGTVVESHPTLAVTLVENHDSQPGQSLESVVSPWFKPLAYAFILTRAEGYPSVFYGDYYGTNGNSSYEIPTLKDKIDPILTARKNFAYGTQHDYLDHPDVIGWTREGDSIHANSGLATLISDGPGGSKWMNVGKNNAGEIWYDITGNQTNTVTINKDGWGQFHVNGGSVSIYVQK

SEQ ID NO: 43847 - protein, 471 aa, Unidentified
EWYAPNDGNHWNRLRTDAENLAQKGITSVWIPPAYKGTTQNDVGYGAYDLYDLGEFNQKGTVRTKYGTKAGLKSAIDALHKKNLDVYGDVVMNHKGGADYTETVTAVEVDPSNRNVEVSGDYEISAWTGFNFPGRGDSYSNFKWKWYHFDGTDWDEGRKLNRIFKFRGIGKAWDHEVSSENGNYDYLMYADLDFDHPDVANENKKWGTWYANELNLDGFRLDAVKHIDMEYLRDFVNHVRQQTGKEMFAVAEYWQNDIQTLNNYLAKVNYNQSVFDAPLHYNFHYASKGNGNYDMRNILKGTVVANHPTLAVTLVENHDSQPGQSLESVVSPWFKPLAYAFILTRAEGYPSVFYGDYYGTKGNSNYEIPALKDKIDPILTARKNYAYGTQWDYFDHPDVIGWTREGDSVHANSGLATLISDGPGGAKWMDVGKNNAGETWYDTTGNQTNTVTINKDGWGQFQVSGGSVSTY

SEQ ID NO: 43848 - protein, 477 aa, Bacillus sp. (in: firmicutes)
NGTIMQYFEWNVPNDGQHWNRLHNNAQNLKNAGITAIWIPPAWKGTSQNDVGYGAYDLYDLGEFNQKGTVRTKYGTKAELERAIRSLKANGIQVYGDVVMNHKGGADFTERVQAVEVNPQNRNQEVSGTYQIEAWTGFNFPGRGNQHSSFKWRWYHFDGTDWDQSRQLANRIYKFRGKAWDWEVDTENGNYDYLMYADVDMDHPEVINELNRWGVWYANTLNLDGFRLDAVKHIKFSFMRDWLGHVRGQTGKNLFAGEFWKNDLGALENYLSKTNWTMSAFDAPLHYNLYQASNSSGNYDMRNLLNGTLVQRHPSHAVTLVDNHDTQPGEALESFVQGWFKPLAYATILTREQGYPCVFYGDYYGIPSDGVPSYRQQIDPLLKARQQYAYGRQHDYFDHWDVIGWTREGNASHPNSGLATIMSDGPGGSKWMYVGRQKAGEVWHDMTGNRSGTVTINQDGWGHFFVNGGSVSVWVKR

SEQ ID NO: 43849 - protein, 477 aa, Bacillus sp. (in: firmicutes)
NGTIMQYFEWYVPNDGQHWNRLHNNAQNLKNAGITAIWIPPAWKGTSQNDVGYGAYDLYDLGEFNQKGTVRTKYGTKAELERAIRSLKANGIQVYGDVVMNHKGGADFTERVQAVEVNPQNRNQEVSGTYQIEAWTGFNFPGRGNQHSSFKWRWHHFDGTDWDQSRQLANRIYKFRGKAWDWEVDTEFGNYDYLMYADVDMDHPEVINELNRWGVWYANTLNLDGFRLDAVKHIKFSFMRDWLGHVRGQTGKNLFAVAEYWKNDLGAENYLSKTNWTMSAFDVPLHYNLYQASNSGGNYDMRNLLNGTLVQRHPSHAVTFVDNHDTQPEEALESFVQGWFKPLAYATILTREQGYPSVFYGDYYGIPSDGVPSYRQQIDPLLKARQQYAYGRQHDYFDHWDVIGWTREGNASHPNSGLATIMSDGPGGSKWMYVGRQKAGEVWHDMTGNRSGTVTINQDGWGHFFVNGGSVSVWVKR

SEQ ID NO: 43850 - protein, 484 aa, Synthetic construct
TNGTMMQYFEWYVPNDGQQWNRLRTDAPYLSSVGITAVWTPPAYKGTSQADVGYGPYDLYDLGEFNQKGTVRTKYGTKGELKSAVNTLHSNGIQVYGDVVMNHKGGADATEMVRAVEVNPNNRNQEVSGEYTIEAWTKFDFPGRGNTHSNFKWRWYHFDGVDWDQSRKLNNRIYKFRGDGKGWDWEVDTENGNYDYLMYADIDYDHPDVVNEMKKWGVWYANEVGLDGYRLDAVKHIKFSFLKDWVDNARAATGKEMFTVGEYWQNDLGALNNYLAKVNYNQSLFDAPLHYNFYAASTGGGYYDMRNILNNTLVASNPTKAVTLVENHDTQPGQSLESTVQPWFKPLAYAFILTRSGGYPSVFYGDMYGTKGTTTREIPALKSKIEPLLKARKDYAYGTQRDYIDNPDVIGWTREGDSTKAKSGLATVITDGPGGSKRMYVGTSNAGEIWYDLTGNRTDKITIGSDGYATFPVNGGSVSVWVQQ

SEQ ID NO: 43851 - protein, 480 aa, Synthetic construct
INETMMQYFEWDLPNDGTLWTKVKNEAANLSSLGITALWLPPAYKGTSQSDVGYGVYDLYDLGEFNQKGTIRTKYGTKTQYIQAIQAAKAAGMQVYADVVFNHKAGADATEDVTAVEVNPANRNQETSEEYQIKAWTDFRFPGRGNTYSDFKWHWYHFDGADWDESRKISRIFKFRGEGKAWDWEVSSENGNYDYLMYADVDMDHPEVVTELKNWGTWYVNTTNIDGFRLDAVKHIKYSFFPDWLTYVRNQTGKNLFAVGEFWSYDVNKLHNYITKTNGSMSLFDAPLHNNFYTASKSSGYFDMRYLLNNTLMKDQPSLAVTLVDNHDTQPGQSLQSWVEPWFKPLAYAFILTRQEGYPCVFYGDYYGIPKYNIPGLKSKIDPLLIARRDYAYGTQRDYIDHQDIIGWTREGIDTKPNSGLAALITDGPGGSKWMYVGKKHAGKVFYDLTGNRSDTVTINADGWGEFKVNGGSVSIWVAK

SEQ ID NO: 43852 - protein, 480 aa, Synthetic construct
VNGTMMQYFEWYLPDDGTLWTKVANNAQSLANLGITALWLPPAYKGTSSSDVGYGVYDLYDLGEFNQKGTVRTKYGTKTQYIQAIQAAHTAGMQVYADVVFNHKAGADATEDVTAVEVNPANRNQETSEEYQIKAWTDFRFPGRGNTYSDFKWHWYHFDGADWDESRKISRIFKFRGEGKAWDWEVSSENGNYDYLMYADVDMDHPEVVSELKNWGKWYVTTTNIDGFRLDAVKHIKYSFFPDWLSYVRTQTQKPLFAVGEFWSYDISKLHNYITKTNGSMSLFDAPLHNNFYIASKSGGYFDMRTLLNNTLMKDQPTLAVTLVDNHDTEPGQSLQSWVEPWFKPLAYAFILTRQEGYPCVFYGDYYGIPKYNIPALKSKLDPLLIARRDYAYGTQHDYIDSADIIGWTREGVAEKANSGLAALITDGPGGSKWMYVGKQHAGKTFYDLTGNRSDTVTINADGWGEFKVNGGSVSIWVPK

SEQ ID NO: 43853 - protein, 348 aa, Bacillus sp.
WRWYHFDGTDWDQSRQLANRIYKFRGDGKAWDWEVDTENGNYDYFLSYCWPHQRIMTNKVADEGMYADVDMDHPEVINELNRWGVWYANTLNLDGFRLDAVKHIKFSFMRDWLGHVRGQTGKNLFAVAEYWKNDLGALENYLSKTNWTMSAFDVPLHYNLYQASNSSGNYDMRNLLNGTLVQRHPSHAVTFVDNHDTQPGEALESFVQGWFKPLAYATILTREQGYPQVFYGDYYGIPSDGVPSYRQQIDPLLKARQQYAYGRQHDYFDHWDVIGWTREGNASHPNSGLATIMSDGPGGSKWMYVGRQKAGEVWHDMTGNRSGTVTINQDGWGHFFVNGGSVSVWVKR

SEQ ID NO: 43854 - protein, 475 aa, Bacillus sp.
NATMMQYFEWHLPNDGNHWNRLRDDASNLRNRGITAIWIPPAWKGTSQNDVGYGAYDLYDLGEFNQKGTVRTKYGTRSQLESAIHALKNNGVQVYGDVVMDHKGGADGTEWVDAVEVNPSDRNQESGTYQIQAWTKFDFPGRGNTYSSFKWRWYHFDGVDWDESRKLSRIYKFGKAWDWEVDTENGNYDYLMYADLDMDHPEVVNELRRWGEWYTNTLNLDGFRIDAVKHIKFSFTRDWLTHVRNATGKGMFAVAEFWKNDLGALENYLSKTNWNHSVFDVPLHYNLYNASNSRGNYDMAKLLNGTVVQKHPMHAVTFVDNHDSQPGESLESFVQEWFKPLAYALILTREQGYPSVFYGDYYGIPTHSVPAMKAKIDPILAARQNFAYGTQHDYFDHHNIIGWTREGNTTHPNSGLATIMSDGPGGEKWMYVGQNKAGQVWHDITGNKPGTVTINADGWANFSVNKGSVSIWVKR

SEQ ID NO: 43855 - protein, 475 aa, Bacillus sp. (in: firmicutes)
NGTIMQYFEWNVPNDGQHWNRLHNNAQNLKNAGITAIWIPPAWKGTSQNDVGYGAYDLYDLGEFNQKGTVRTKYGTKAELERAIRSLKANGIQVYGDVVMNHKGGADFTERVQAVEVNPQNRNQEVSGTYQIEAWTGFNFPGRGNQHSSFKWRWYHFDGTDWDRQLNRIYKFRGKAWDWEVDTENGNYDYLMYADVDMDHPEVINELNRWGVWYANTLNLDGFRLDAVKHIKFSFMRDWLGHVRGQTGKNLFAVAEYWKNDLGALENYLSKTNWTMSAFDVPLHYNLYQASNSSGNYDMRNLLNGTLVQRHPSHAVTFVDNHDTQPGEALESFVQGWFKPLAYATILTREQGYPQVFYGDYYGIPSDGVPSYRQQIDPLLKARQQYAYGRQHDYFDHWDVIGWTREGNASHPNSGLATIMSDGPGGSKWMYVGRQKAGEVWHDMTGNRSGTVTINQDGWGHFFVNGGSVSVWVKR

SEQ ID NO: 43856 - protein, 478 aa, Bacillus sp.
NGTMMQYFEWYLPNDGNHWNRLNSDASNLKSKGITAVWIPPAWKGASQNDVGYGAYDLYDLGEFNQKGTVRTKYGTRSQLQAAVTSLKNNGIQVYGDVVMNHKGGADATEMVRAVEVNPNNRNQEVTGEYTIEAWTRFDFPGRGNTHSSFKWRWYHFDGVDWDQSRRLNNRIYKFRGKAWDWEVDTENGNYDYLMYADIDMDHPEVVNELRNWGVWYTNTLGLDGFRIDAVKHIKYSFTRDWINHVRSATGKNMFAVAEFWKNDLGAIENYLQKTNWNHSVFDVPLHYNLYNASKSGGNYDMRNIFNGTVVQRHPSHAVTFVDNHDSQPEEALESFVEEWFKPLAYALTLTREQGYPSVFYGDYYGIPTHGVPAMRSKIDPILEARQKYAYGTQRDYIDNPDVIGWTREGDSTKAKSGLATVITDGPGGSKRMYVGTSNAGEIWYDLTGNRTDKITIGSDGYATFPVNGGSVSVWVQQ

SEQ ID NO: 43857 - protein, 478 aa, Bacillus subtilis
NGTMMQYFEWYLPNDGNHWNRLRSDASNLKDKGITAVWIPPAWKGASQNDVGYGAYDLYDLGEFNQKGTVRTKYGTRNQLQAAVTALKSNGIQVYGDVVMNHKGGADATEWVRAVEVNPSNRNQEVSGDYTIEAWTKFDFPGRGNTHSNFKWRWYHFDGVDWDQSRQLQNRIYKFRGKGWDWEVDTENGNYDYLMYADIDMDHPEVVNELRNWGVWYTNTLGLDGFRIDAVKHIKYSFTRDWLTHVRNTTGKNMFAVAEFWKNDIGAIENYLSKTNWNHSVFDVPLHYNLYNASRSGGNYDMRQIFNGTVVQRHPTHAVTFVDNHDSQPEEALESFVEEWFKPLAYALTLTRDQGYPSVFYGDYYGIPTHGVPAMKSKIDPILEARQKYAYGTQHDYLDHPDVIGWTREGDSIHANSGLATLMSDGPGGSKWMNVGKNNAGEIWYDITGNQTNTVTINKDGWGQFHVNGGSVSIYVQK

SEQ ID NO: 43858 - protein, 478 aa, Cytophaga sp.
NGTMMQYFEWYLPNDGNHWNRLNSDASNLKSKGITAVWIPPAWKGASQNDVGYGAYDLYDLGEFNQKGTVRTKYGTRSQLQAAVTSLKNNGIQVYGDVVMNHKGGADATEMVRAVEVNPNNRNQEVTGEYTIEAWTRFDFPGRGNTHSSFKWRWYHFDGVDWDQSRRLNNRIYKFRGKAWDWEVDTENGNYDYLMYADIDMDHPEVVNELRNWGVWYTNTLGLDGFRIDAVKHIKYSFTRDWINHVRSATGKNMFAVAEFWKNDLGAIENYLQKTNWNHSVFDVPLHYNLYNASKSGGNYDMRNIFNGTVVQRHPSHAVTFVDNHDSQPEEALESFVEEWFKPLAYALTLTREQGYPSVFYGDYYGIPTHGVPAMRSKIDPILEARQKYAYGTQRDYIDNPDVIGWTREGNTSHPKSGLATVITDGPGGSKTMYVGTSNAGEIWYDLTGNRTDKITIGSDGYAEFHVNGGSVSIWVQQ

SEQ ID NO: 43859 - protein, 477 aa, Synthetic construct
NGTMMQYFEWYLPNDGNHWNRLRSDASNLKDKGISAVWIPPAWKGASQNDVGYGAYDLYDLGEFNQKGTIRTKYGTRNQLQAAVNALKSNGIQVYGDVVMDHKGGADGTEWVDAVEVNPSDRNQEISGTYQIQAWTKFDFPGRGNTYSSFKWRWYHFDGVDWDESRKLSRIYKFRGIGKAWDWEVDTENGNYDYLMYADLDMDHPEVVNELRNWGVWYTNTLGLDGFRIDAVKHIKYSFTRDWINHVRSATGKNMFAVAEFWKNDLGAIENYLNKTNWNHSVFDVPLHYNLYNASKSGGNYDMRQIFNGTVVQRHPMHAVTFVDNHDSQPEEALESFVEEWFKPLAYALTLTREQGYPSVFYGDYYGIPTHGVPAMKSKIDPILEARQKYAYGRQNDYLDHHNIIGWTREGNTAHPNSGLATIMSDGAGGNKWMFVGRNKAGQVWTDITGNRAGTVTINADGWGNFSVNGGSVSIWV

SEQ ID NO: 43860 - protein, 483 aa, Synthetic construct
TNGTMMQYFEWYLPNDGNHWTRLQNDAANLSSKGVTAVWIPPAYKGTSQNDVGYGAYDLYDLGEFNQKGTVRTKYGTKAQLKSAIAELHKQNIHVYGDVVMNHKGGADFTETVTAVEVDPNNRNVMTNQEYQISAWTGFTFPGRGNTYSPFKWNWYHFDGTDWDESRKINRIYKFRGTGKAWDWEVSSENGNYDYLMYADIDYEHPDVINEMKKWGTWYAKELNLDGFTLDAVKHIKHDYLRDWVTHVRNQTGKELFTVAEYWQNDIGQLNNYLAKTNYNQSVFDAPLHYHFHYASNSNGNYDMRNILKGTVMESNPRLAVTLVENHDSQPGQSLESVVSTWFKPLAYAFILTRAEGYPSVFYGDYYGTKGNSNYEIPSLKTQLDPILTARKNYAYGLQRDYIDHWDIIGWTREGEAARDKSGLATLITDGPGGYKWMEVGKQNAGEVWYDITGNRKETVTINNDGWGQFYVNGGSVSIYVQK

SEQ ID NO: 43861 - protein, 483 aa, Synthetic construct
NGTLMQYFEWYTPNDGQHWKRLQNDAEHLSDIGITAVWIPPAYKGLSQSDNGYGPYDLYDLGEFQQKGTVRTKYGTKSELQDAIGSLHSRNVQVYGDVVLNHKGGADATEMVRAVEVNPNNRNQEVTGEYTIEAWTRFDFPGRGNTHSSFKWRWYHFDGVDWDQSRRLNNRIYKFRGHGKAWDWEVDTENGNYDYLMYADIDYDHPDVVAETKKWGIWYANELSLDGFRIDAAKHIKFSFLRDWVQAVRQATGKEMFTVAEYWQNNAGKLENYLNKTSFNQSVFDVPLHFNLQAASSQGGGYDMRRLLDGTVVSRHPEKAVTFVENHDTQPGQSLESTVQTWFKPLAYAFILTRESGYPQVFYGDMYGTKGTSPKEIPSLKDNIEPILKARKEYAYGPQHDYIDHPDVIGWTREGDSSAAKSGLAALITDGPGGSKRMYAGLKNAGETWYDITGNRSDTVKIGSDGWGEFHVNDGSVSIYVQK

SEQ ID NO: 43862 - protein, 483 aa, Synthetic construct
TNGTMMQYFEWYLPNDGNHWTRLQNDAANLSSKGVTAVWIPPAYKGTSQNDVGYGAYDLYDLGEFNQKGTVRTKYGTKAQLKSAIAELHKQNIHVYGDVVMNHKGGADFTETVTAVEVDPNNRNRETSGDYQISAWTGFTFPGRGNTYSPFKWNWYHFDGTDWDESRKINRIYKFRGTGKAWDWEVSSENGNYDYLMYADIDYEHPDVINEMKKWGTWYAKELNLDGFTLDAVKHIKHDYLRDWVTHVRNQTGKELFTVAEYWQNDIGQLNNYLAKTNYNQSVFDAPLHYHFHRYNLAIGNYDMRNILKGTVMESNPRLAVTLVENHDSQPGQSLESVVSTWFKPLAYAFILTRAEGYPSVFYGDYYGTKGNSNYEIPSLKTQLDPILTARKNYAYGLQRDYIDHWDIIGWTREGEAARDKSGLATLITDGPGGYKWMEVGKQNAGEVWYDITGNRKETVTINNDGWGQFYVNGGSVSIYVQK

SEQ ID NO: 43863 - protein, 480 aa, Synthetic construct
NGTMMQYFEWDLPNDGTLWTKVKNEATNLFSLGITALWLPPAYKGTSQSDVGYGVYDLYDLGEFNQKGTIRTKYGTKTQYIQAIQAAKAAGMQVYADVVFNHKGGADFTERVQAVEVNPQNRNQEVSGTYQIEAWTGFNFPGRGNQHSSFKWRWYHFDGTDWDQSRQLANRIYKFRGDGKAWDWEVDTENGNYDYLMYADVDMDHPEVVTELKNWGTWYVNTTNIDGFRLDAVKHIKYSFFPDWLTYVRNQTGKNLFAVGEFWSYDVNKLHNYITKTNGSMSLFDAPLHNNFYTASKSSGYFDMRYLLNNTLMKDQPSLAVTLVDNHDTQPGQSLQSWVEPWFKPLAYAFILTRQEGYPCVFYGDYYGIPKYNIPGLKSKIDPLLIARRDYAYGTQRDYIDHQDIIGWTREGIDTKPNSGLAALITDGPGGSKWMYVGKKHAGKVFYDLTGNRSDTVTINADGWGEFKVNGGSVSIWVAK

SEQ ID NO: 43864 - protein, 481 aa, Bacillus sp.
FNGTIMQYFEWNVPNDGQHWNRLHNNAQNLKNAGITAIWIPPAWKGTSQNDVGYGAYDLYDLGEFNQKGTVRTKYGTKAELERAIRSLKANGIQVYGDVVMNHKGGADFTERVQAVEVNPQNRNQEVSGTYQIEAWTGFNFPGRGNQHSSFKWRWYHFDGTDWDQSRQLANRIYKFRGDGKAWDWEVDTENGNYDYLMYADVDMDHPEVINELNRWGVWYANTLNLDGFRLDAVKHIKFSFMRDWLGHVRGQTGKNLFAVAEYWKNDLGALENYLSKTNWTMSAFDVPLHYNLYQASNSSGNYDMRNLLNGTLVQRHPSHAVTFVDNHDTQPGEALESFVQGWFKPLAYATILTREQGYPQVFYGDYYGIPSDGVPSYRQQIDPLLKARQQYAYGRQHDYFDHWDVIGWTREGNASHPNSGLATIMSDGPGGSKWMYVGRQKAGEVWHDMTGNRSGTVTINQDGWGHFFVNGGSVSVWVKR

SEQ ID NO: 43865 - protein, 474 aa, Bacillus sp. (in: firmicutes)
NGTIMQYFEWNVPNDGQHWNRLHNNAQNLKNAGITAIWIPPAWKGTSQNDVGYGAYDLYDLGEFNQKGTVRTKYGTKAELERAIRSLKANGIQVYGDVVMNHKGGADFTERVQAVEVNPQNRNQEVSGTYQIEAWTGFNFPGRGNQHSSFKWRWYHFDGTDWDQLNRIYKFRGKAWDWEVDTENGNYDYLMYADVDMDHPEVINELNRWGVWYANTLNLDGFRLDAVKHIKFSFMRDWLGHVRGQTGKNLFAVAEYWKNDLGALENYLSKTNWTMSAFDVPLHYNLYQASNSSGNYDMRNLLNGTLVQRHPSHAVTFVDNHDTQPGEALESFVQGWFKPLAYATILTREQGYPQVFYGDYYGIPSDGVPSYRQQIDPLLKARQQYAYGRQHDYFDHWDVIGWTREGNASHPNSGLATIMSDGPGGSKWMYVGRQKAGEVWHDMTGNRSGTVTINQDGWGHFFVNGGSVSVWVKR

SEQ ID NO: 43866 - protein, 477 aa, Bacillus sp. (in: firmicutes)
NGTIMQYFEWNVPNDGQHWNRLHNNAQNLKNAGITAIWIPPAWKGTSQSDTGYGAYDLYDLGEFNQKGTVRTKYGTKAELERAIRSLKANGIQVYGDVVMNHKAGADFTERVQAVEVNPQNRNQEVSGTYQIEAWTGFNFPGRGNQHSSFKWRWYHFDGTDFDQSRKLNRIYKFRGKAWDWEVDTEFGNYDYLMYADLDMDHPEVINELNRWGVWYANTLNLDGFRLDAVKHIKFSFMRDWLGHVRGQTGKNLFAVAEYWKNDLGALENYLSKTNWTMSAFDVPLHYNLYQASNSSGNYDMRNLLNGTLVQRHPSHAVTFVDNHDTQPGEALESFVQGWFKPLAYATILTREQGYPQVFYGDYYGIPSDGVPSYRQQIDPLLAARQQYAYGRQHDYFDHWDVIGWTREGNASHPNSGLATIMSDGPGGSKWMYVGRQKAGEVWHDMTGNRSGTVTINQDGWGHFFVNKGSVSVWVKR

SEQ ID NO: 43867 - protein, 477 aa, Bacillus sp. (in: firmicutes)
NGTIMQYFEWNVPNDGQHWNRLHNNAQNLKNAGITAIWIPPAWKGTSQSDTGYGAYDLYDLGEFNQKGTVRTKYGTKAELERAIRSLKANGIQVYGDVVMNHKAGADFTERVQAVEVNPQNRNQEVSGTYQIEAWTGFNFPGRGNQHSSFKWRWYHFDGTDWDQSRSKSAIYKFRGKAWDWEVDTEFGNYDYLMYADLDMDHPEVINELNRWGVWYANTLNLDGFRLDAVKHIKFSFMRDWLGHVRGQTGKNLFAVAEYWKNDLGALENYLSKTNWTMSAFDVPLHYNLYQASNSSGNYDMRNLLNGTLVQRHPSHAVTFVDNHDTQPGEALESFVQGWFKPLAYATILTREQGYPQVFYGDYYGIPSDGVPSYRQQIDPLLAARQQYAYGRQHDYFDHWDVIGWTREGNASHPNSGLATIMSDGPGGSKWMYVGRQKAGEVWHDMTGNRSGTVTINQDGWGHFFVNGGSVSVWVKR

SEQ ID NO: 43868 - protein, 477 aa, Bacillus sp. (in: firmicutes)
NGTMMQYFEWNVPNDGQHWNRLHNNAQNLKNAGITAIWIPPAWKGTSQSDTGYGAYDLYDLGEFNQKGTVRTKYGTKAELERAIRSLKANGIQVYGDVVMNHKAGADFTERVQAVEVNPQNRNQEVSGTYQIEAWTGFNFPGRANQHSSFKWRWYHFDGTDWDESRKLNRIYKFRTKAWDWEVDTEFGNYDYLLYADLDMDHPEVINELNRWGVWYANTLNLDGFRLDAVKHIKFSFMRDWLGHVRGQTGKNLFAVAEYWKNDLGALENYLSKTNWTMSAFDVPLHFNLYYASNSSGNYDMRNLLNGTLVQKHPTHAVTFVDNHDTQPGESLESFVRGWFKPLAYATILTREQGYPSVFYGDYYGIPSDGVPSYRQQIDPLLAARQQYAYGRQHDYFDHWDVIGWTREGNASHPNSGLATIMSDGPGGSKWMYVGRQKAGEVWHDMTGNKSGTVTINQDGWGHFFVNGGSVSVWVKR

SEQ ID NO: 43869 - protein, 480 aa, Bacillus licheniformis
NGTLMQYFEWYTPNDGQHWKRLQNDAEHLSDIGITAVWIPPAYKAISQADVGYGAYDLYDLGEFWQKGTVRTKYGTKGELQSAIKSLHSRDINVYGDVVINHKAGADATEDVQAVEVDPADRNRVISGEHLIKAWTHFHFPGRGSTYSDFKWYWYHFDGTDWDESRKLNRIYLFQGKTWDWPVSNEFGNYDYLMYADYDYDYPDVVAEITRWGTWYANELQLDGFRLDAVKHIKFSFLRDWVNHVREKTGKEMFTVAEYWSNDLGALENYLNHTNFNHSVFDVPLHYQFHAASTQGGGYDMRKLLNGTVVSKHPLKSVTFVDNHDTQPGQSLESTVQTWFKPLAYAFILTRESGYPSVFYGDMYGTKGDSQREIPALKHKIEPILKARKQYAYGAQHDYFDHHDIVGWTREGVSSVANSGLAALITDGPGGAKWMYVGRQNAGETWHDITGNRSEPVVINSEGWGEFHVNGGSVSIYVQR

SEQ ID NO: 43870 - protein, 480 aa, Bacillus licheniformis
NGTLMQYFEWYTPNDGQHWKRLQNDAEHLSDIGITAVWIPPAYKAISQADVGYGAYDLYDLGEFWQKGTVRTKYGTKGELQSAIKSLHSRDINVYGDVVINHKAGADATEDVQAVEVDPADRNRVISGEHLIKAWTHFHFPGRGSTYSDFKWYWYHFDGTDWDESRKLNRIYLFQGKTWDWPVSNEFGNYDYLMYADYDYDYPDVVAEITRWGTWYANELQLDGFRLDAVKHIKFSFLRDWVNHVREKTGKEMFTVAEYWSNDLGALENYLNDTNFNHSVFDVPLHYQFHAASTQGGGYDMRKLLNGTVVSKHPLKSVTFVDNHDTQPGQSLESTVQTWFKPLAYAFILTRESGYPSVFYGDMYGTKGDSQREIPALKHKIEPILKARKQYAYGAQHDYFDHHDIVGWTREGVSSVANSGLAALITDGPGGAKWMYVGRQNAGETWHDITGNRSEPVVINSEGWGEFHVNGGSVSIYVQR

SEQ ID NO: 43871 - protein, 480 aa, Bacillus licheniformis
NGTLMQYFEWYTPNDGQHWKRLQNDAEHLSDIGITAVWIPPAYKAISQADVGYGAYDLYDLGEFHQKGTVRTKYGTKGELQSAIKSLHSRDINVYGDVVINHKAGADATEDVTAVEVDPADRNRVISGEHLIKAWTHFHFPGRGSTYSDFKWYWYHFDGTDWDESRKLNRIYLFQGKTWDWEVSNEFGNYDYLMYADYDYDYPDVVAEITRWGTWYANELQLDGFRLDAVKHIKFSFLRDWVNHVREKTGKPMFTVAEYWSNDLGALENYLNKTNFNHSVFDVPLHYQFHAASTQGGGYDMRKLLNGTVVSFHPLKSVTFVDNHDTQPGQSLESTVQTWFKPLAYAFILTRESGYPSVFYGDMYGTKGDSQREIPALKHKIEPILKARKQYAYGAQHDYFDHHDIVGWTREGVSSVANSGLAALITDGPGGAKWMYVGRQNAGETWHDITGNRSEPVVINSEGWGEFHVNGGSVSIYVQR

SEQ ID NO: 43872 - protein, 480 aa, Bacillus licheniformis
NGTLMQYFEWYTPNDGQHWKRLQNDAEHLSDIGITAVWIPPAYKAISQADVGYGAYDLYDLGEFHQKGTVRTKYGTKGELQSAIKSLHSRDINVYGDVVINHKAGADATEDVTAVEVDPADRNRVISGEHLIKAWTHFHFPGRGSTYSDFKWYWYHFDGTDWDESRKLNRIYLFQGKTWDWEVSNEFGNYDYLMYADYDYDYPDVVAEITRWGTWYANELQLDGFRLDAVKHIKFSFLRDWVNHVREKTGKPMFTVAEYWSNDLGALENYLNKTNFNHSVFDVPLHYQFHAASTQGGGYDMRKLLNGTVVSWHPLKSVTFVDNHDTQPGQSLESTVQTWFKPLAYAFILTRESGYPSVFYGDMYGTKGDSQREIPALKHKIEPILKARKQYAYGAQHDYFDHHDIVGWTREGVSSVANSGLAALITDGPGGAKWMYVGRQNAGETWHDITGNRSEPVVINSEGWGEFHVNGGSVSIYVQR

SEQ ID NO: 43873 - protein, 480 aa, Bacillus licheniformis
NGTLMQYFEWYTPNDGQHWKRLQNDAEHLSDIGITAVWIPPAYKAISQADVGYGAYDLYDLGEFWQKGTVRTKYGTKGELQSAIKSLHSRDINVYGDVVINHKAGADATEDVQAVEVDPADRNRVISGEHLIKAWTHFHFPGRGSTYSDFKWYWYHFDGTDWDESRKLNRIYLFQGKTWDWPVSNEFGNYDYLMYADYDYDYPDVVAEITRWGTWYANELQLDGFRLDAVKHIKFSFLRDWVNHVREKTGKEMFTVAEYWSNDLGALENYLNITNFNHSVFDVPLHYQFHAASTQGGGYDMRKLLNGTVVSKHPLKSVTFVDNHDTQPGQSLESTVQTWFKPLAYAFILTRESGYPSVFYGDMYGTKGDSQREIPALKHKIEPILKARKQYAYGAQHDYFDHHDIVGWTREGVSSVANSGLAALITDGPGGAKWMYVGRQNAGETWHDITGNRSEPVVINSEGWGEFHVNGGSVSIYVQR

SEQ ID NO: 43874 - protein, 480 aa, Bacillus licheniformis
NGTLMQYFEWYTPNDGQHWKRLQNDAEHLSDIGITAVWIPPAYKAISQADVGYGAYDLYDLGEFWQKGTVRTKYGTKGELQSAIKSLHSRDINVYGDVVINHKAGADATEDVQAVEVDPADRNRVISGEHLIKAWTHFHFPGRGSTYSDFKWYWYHFDGTDWDESRKLNRIYLFQGKTWDWPVSNEFGNYDYLMYADYDYDYPDVVAEITRWGTWYANELQLDGFRLDAVKHIKFSFLRDWVNHVREKTGKEMFTVAEYWSNDLGALENYLNSTNFNHSVFDVPLHYQFHAASTQGGGYDMRKLLNGTVVSKHPLKSVTFVDNHDTQPGQSLESTVQTWFKPLAYAFILTRESGYPSVFYGDMYGTKGDSQREIPALKHKIEPILKARKQYAYGAQHDYFDHHDIVGWTREGVSSVANSGLAALITDGPGGAKWMYVGRQNAGETWHDITGNRSEPVVINSEGWGEFHVNGGSVSIYVQR

SEQ ID NO: 43875 - protein, 480 aa, Bacillus licheniformis
NGTLMQYFEWYTPNDGQHWKRLQNDAEHLSDIGITAVWIPPAYKAISQADVGYGAYDLYDLGEFWQKGTVRTKYGTKGELQSAIKSLHSRDINVYGDVVINHKAGADATEDVQAVEVDPADRNRVISGEHLIKAWTHFHFPGRGSTYSDFKWYWYHFDGTDWDESRKLNRIYLFQGKTWDWPVSNEFGNYDYLMYADYDYDYPDVVAEITRWGTWYANELQLDGFRLDAVKHIKFSFLRDWVNHVREKTGKEMFTVAEYWSNDLGALENYLNATNFNHSVFDVPLHYQFHAASTQGGGYDMRKLLNGTVVSKHPLKSVTFVDNHDTQPGQSLESTVQTWFKPLAYAFILTRESGYPSVFYGDMYGTKGDSQREIPALKHKIEPILKARKQYAYGAQHDYFDHHDIVGWTREGVSSVANSGLAALITDGPGGAKWMYVGRQNAGETWHDITGNRSEPVVINSEGWGEFHVNGGSVSIYVQR

SEQ ID NO: 43876 - protein, 480 aa, Bacillus licheniformis
NGTLMQYFEWYTPNDGQHWKRLQNDAEHLSDIGITAVWIPPAYKAISQADVGYGAYDLYDLGEFWQKGTVRTKYGTKGELQSAIKSLHSRDINVYGDVVINHKAGADATEDVQAVEVDPADRNRVISGEHLIKAWTHFHFPGRGSTYSDFKWYWYHFDGTDWDESRKLNRIYLFQGKTWDWPVSNEFGNYDYLMYADYDYDYPDVVAEITRWGTWYANELQLDGFRLDAVKHIKFFFLRDWVNHVREKTGKEMFTVAEYWSNDLGALENYLNKTNFNHSVFDVPLHYQFHAASTQGGGYDMRKLLNGTVVSKHPLKSVTFVDNHDTQPGQSLESTVQTWFKPLAYAFILTRESGYPSVFYGDMYGTKGDSQREIPALKHKIEPILKARKQYAYGAQHDYFDHHDIVGWTREGVSSVANSGLAALITDGPGGAKWMYVGRQNAGETWHDITGNRSEPVVINSEGWGEFHVNGGSVSIYVQR

SEQ ID NO: 43877 - protein, 480 aa, Bacillus licheniformis
NGTLMQYFEWYTPNDGQHWKRLQNDAEHLSDIGITAVWIPPAYKAISQADVGYGAYDLYDLGEFHQKGTVRTKYGTKGELQSAIKSLHSRDINVYGDVVINHKAGADATEDVTAVEVDPADRNRVISGEHLIKAWTHFHFPGRGSTYSDFKWYWYHFDGTDWDESRKLNRIYLFQGKTWDWEVSNEFGNYDYLMYADYDYDYPDVVAEITRWGTWYANELQLDGFRLDAVKHIKFSFLRDWVNHVREKTGKPMFTVAEYWSNDLGALENYLNKTNFNHSVFDVPLHYQFHAASTQGGGYDMRKLLNGTVVSGHPLKSVTFVDNHDTQPGQSLESTVQTWFKPLAYAFILTRESGYPSVFYGDMYGTKGDSQREIPALKHKIEPILKARKQYAYGAQHDYFDHHDIVGWTREGVSSVANSGLAALITDGPGGAKWMYVGRQNAGETWHDITGNRSEPVVINSEGWGEFHVNGGSVSIYVQR

SEQ ID NO: 43878 - protein, 480 aa, Bacillus licheniformis
NGTLMQYFEWYTPNDGQHWKRLQNDAEHLSDIGITAVWIPPAYKAISQADVGYGAYDLYDLGEFHQKGTVRTKYGTKGELQSAIKSLHSRDINVYGDVVINHKAGADATEDVTAVEVDPADRNRVISGEHLIKAWTHFHFPGRGSTYSDFSWYWYHFDGTDWDESRKLNRIYLFQGKTWDWEVSNEFGNYDYLMYADYDYDYPDVVAEITRWGTWYANELQLDGFRLDAVKHIKFSFLRDWVNHVREKTGKPMFTVAEYWSNDLGALENYLNKTNFNHSVFDVPLHYQFHAASTQGGGYDMRKLLNGTVVSKHPLKSVTFVDNHDTQPGQSLESTVQTWFKPLAYAFILTRESGYPSVFYGDMYGTKGDSQREIPALKHKIEPILKARKQYAYGAQHDYFDHHDIVGWTREGVSSVANSGLAALITDGPGGAKWMYVGRQNAGETWHDITGNRSEPVVINSEGWGEFHVNGGSVSIYVQR

SEQ ID NO: 43879 - protein, 480 aa, Bacillus licheniformis
NGTLMQYFEWYTPNDGQHWKRLQNDAEHLSDIGITAVWIPPAYKAISQADVGYGAYDLYDLGEFWQKGTVRTKYGTKGELQSAIKSLHSRDINVYGDVVINHKAGADATEDVQAVEVDPADRNRVISGEHLIKAWTHFHFPGRGSTYSDFKWYWYHFDGTDWDESRKLNRIYLFQGKTWDWPVSNEFGNYDYLMYADYDYDYPDVVAEITRWGTWYANELQLDGFRLDAVKHIKFDFLRDWVNHVREKTGKEMFTVAEYWSNDLGALENYLNKTNFNHSVFDVPLHYQFHAASTQGGGYDMRKLLNGTVVSKHPLKSVTFVDNHDTQPGQSLESTVQTWFKPLAYAFILTRESGYPSVFYGDMYGTKGDSQREIPALKHKIEPILKARKQYAYGAQHDYFDHHDIVGWTREGVSSVANSGLAALITDGPGGAKWMYVGRQNAGETWHDITGNRSEPVVINSEGWGEFHVNGGSVSIYVQR

SEQ ID NO: 43880 - protein, 480 aa, Bacillus licheniformis
NGTLMQYFEWYTPNDGQHWKRLQNDAEHLSDIGITAVWIPPAYKAISQADVGYGAYDLYDLGEFHQKGTVRTKYGTKGELQSAIKSLHSRDINVYGDVVINHKAGADATEDVTAVEVDPADRNRVISGEHLIKAWTHFHFPGRGSTYSDFKWYWYHFDGTDWDESRKLNRIYLFQGKTWDWPVSNEFGNYDYLMYADFDYDHPDVVAEIKRWGTWYANELQLDGFRLDAVKHIKFSFLRDWVNHVREKTGKEMFTVAEYWSNDLGALENYLNKTNFNHSVFDVPLHYQFHAASTQGGGYDMRKLLNGTVVSKHPWKSVTFVDNHDTQPGQSLESTVQTWFKPLAYAFILTRESGYPQVFYGDMYGTKGDSQREIPALKHKIEPILKARKQYAYGAQHDYFDHHDIVGWTREGDSSVANSGLAALITDGPGGAKRMYVGRQNAGETWHDITGNRSEPVVINSEGWGEFHVNGGSVSIYVQR

SEQ ID NO: 43881 - protein, 480 aa, Bacillus licheniformis
NGTLMQYFEWYTPNDGQHWKRLQNDAEHLSDIGITAVWIPPAYKAISQADVGYGAYDLYDLGEFHQKGTVRTKYGTKGELQSAIKSLHSRDINVYGDVVINHKAGADATEDVTAVEVDPADRNRVISGEHLIKAWTHFHFPGRGSTYSDFKWYWYHFDGTDWDESRKLNRIYLFQGKTWDWEVSNEFGNYDYLMYADYDYDYPDVVAEITRWGTWYANELQLDGFRLDAVKHIKFSFLRDWVNHVREKTGKPMFTVAEYWSNDLGALENYLNKTNFNHSVFDVPLHYQFHAASTQGGGYDMRKLLNGTVVSEHPLKSVTFVDNHDTQPGQSLESTVQTWFKPLAYAFILTRESGYPSVFYGDMYGTKGDSQREIPALKHKIEPILKARKQYAYGAQHDYFDHHDIVGWTREGVSSVANSGLAALITDGPGGAKWMYVGRQNAGETWHDITGNRSEPVVINSEGWGEFHVNGGSVSIYVQR

SEQ ID NO: 43882 - protein, 480 aa, Bacillus licheniformis
NGTLMQYFEWYTPNDGQHWKRLQNDAEHLSDIGITAVWIPPAYKAISQADVGYGAYDLYDLGEFHQKGTVRTKYGTKGELQSAIKSLHSRDINVYGDVVINHKAGADATEDVTAVEVDPADRNRVISGEHLIKAWTHFHFPGRGSTYSDFKWYWYHFDGTDWDESRKLNRIYLFQGKTWDWEVSNEFGNYDYLMYADYDYDYPDVVAEITRWGTWYANELQLDGFRLDAVKHIKFSFLRDWVNHVREKTGKPMFTVAEYWSNDLGALENYLNKTNFNHSVFDVPLHYQFHAASTQGGGYDMRKLLNGTVVSCHPLKSVTFVDNHDTQPGQSLESTVQTWFKPLAYAFILTRESGYPSVFYGDMYGTKGDSQREIPALKHKIEPILKARKQYAYGAQHDYFDHHDIVGWTREGVSSVANSGLAALITDGPGGAKWMYVGRQNAGETWHDITGNRSEPVVINSEGWGEFHVNGGSVSIYVQR

SEQ ID NO: 43883 - protein, 480 aa, Bacillus licheniformis
NGTLMQYFEWYTPNDGQHWKRLQNDAEHLSDIGITAVWIPPAYKAISQADVGYGAYDLYDLGEFHQKGTVRTKYGTKGELQSAIKSLHSRDINVYGDVVINHKAGADATEDVTAVEVDPADRNRVISGEHLIKAWTHFHFPGRGSTYSDFKWYWYHFDGTDWDESRKLNRIYLFQGKTWDWEVSNEFGNYDYLMYADYDYDYPDVVAEITRWGTWYANELQLDGFRLDAVKHIKFSFLRDWVNHVREKTGKPMFTVAEYWSNDLGALENYLNKTNFNHSVFDVPLHYQFHAASTQGGGYDMRKLLNGTVVSVHPLKSVTFVDNHDTQPGQSLESTVQTWFKPLAYAFILTRESGYPSVFYGDMYGTKGDSQREIPALKHKIEPILKARKQYAYGAQHDYFDHHDIVGWTREGVSSVANSGLAALITDGPGGAKWMYVGRQNAGETWHDITGNRSEPVVINSEGWGEFHVNGGSVSIYVQR

SEQ ID NO: 43884 - protein, 480 aa, Bacillus licheniformis
NGTLMQYFEWYTPNDGQHWKRLQNDAEHLSDIGITAVWIPPAYKAISQADVGYGAYDLYDLGEFWQKGTVRTKYGTKGELQSAIKSLHSRDINVYGDVVINHKAGADATEDVQAVEVDPADRNRVISGEHLIKAWTHFHFPGRGSTYSDFKWYWYHFDGTDWDESRKLNRIYLFQGKTWDWPVSNEFGNYDYLMYADYDYDYPDVVAEITRWGTWYANELQLDGFRLDAVKHIKFSFLRDWVNHVREKTGKEMFTVAEYWSNDLGALENYLNTTNFNHSVFDVPLHYQFHAASTQGGGYDMRKLLNGTVVSKHPLKSVTFVDNHDTQPGQSLESTVQTWFKPLAYAFILTRESGYPSVFYGDMYGTKGDSQREIPALKHKIEPILKARKQYAYGAQHDYFDHHDIVGWTREGVSSVANSGLAALITDGPGGAKWMYVGRQNAGETWHDITGNRSEPVVINSEGWGEFHVNGGSVSIYVQR

SEQ ID NO: 43885 - protein, 480 aa, Bacillus licheniformis
NGTLMQYFEWYTPNDGQHWKRLQNDAEHLSDIGITAVWIPPAYKAISQADVGYGAYDLYDLGEFHQKGTVRTKYGTKGELQSAIKSLHSRDINVYGDVVINHKAGADATEDVTAVEVDPADRNRVISGEHLIKAWTHFHFPGRGSTYSDFKWYWYHFDGTDWDESRKLNRIYLFQGKTWDWEVSNEFGNYDYLMYADYDYDYPDVVAEITRWGTWYANELQLDGFRLDAVKHIKFSFLRDWVNHVREKTGKPMFTVAEYWSNDLGALENYLNKTNFNHSVFDVPLHYQFHAASTQGGGYDMRKLLNGTVVSPHPLKSVTFVDNHDTQPGQSLESTVQTWFKPLAYAFILTRESGYPSVFYGDMYGTKGDSQREIPALKHKIEPILKARKQYAYGAQHDYFDHHDIVGWTREGVSSVANSGLAALITDGPGGAKWMYVGRQNAGETWHDITGNRSEPVVINSEGWGEFHVNGGSVSIYVQR

SEQ ID NO: 43886 - protein, 480 aa, Bacillus amyloliquefaciens
NGTLMQYFEWYTPNDGQHWKRLQNDAEHLSDIGITAVWIPPAYKAISQADVGYGAYDLYDLGEFHQKGTVRTKYGTKGELQSAIKSLHSRDINVYGDVVINHKAGADATEDVTAVEVDPADRNRVISGEHLIKAWTHFHFPGRGSTYSDFKWYWWHFDGTDWDESRKLNRIYLFQGKTWDWPVSNEFGNYDYLMYADYDYDYPDVVAEITRWGTWYANELQLDGFRLDAVKHIKFSFLRDWVNHVREKTGKEMFTVAEYWSNDLGALENYLNKTNFNHSVFDVPLHYQFHAASTQGGGYDMRKLLNGTVVSKHPLKSVTFVDNHDTQPGQSLESTVQTWFKPLAYAFILTRESGYPSVFYGDMYGTKGDSQREIPALKHKIEPILKARKQYAYGAQHDYFDHHDIVGWTREGVSSVANSGLAALITDGPGGAKWMYVGRQNAGETWHDITGNRSEPVVINSEGWGEFHVNGGSVSIYVQR

SEQ ID NO: 43887 - protein, 480 aa, Bacillus licheniformis
NGTLMQYFEWYTPNDGQHWKRLQNDAEHLSDIGITAVWIPPAYKAISQADVGYGAYDLYDLGEFHQKGTVRTKYGTKGELQSAIKSLHSRDINVYGDVVINHKAGADATEDVTAVEVDPADRNRVISGEHLIKAWTHFHFPGRGSTYSDFKWYWYHFDGTDWDESRKLNRIYLFQGKTWDWEVSNEFGNYDYLMYADYDYDYPDVVAEITRWGTWYANELQLDGFRLDAVKHIKFSFLRDWVNHVREKTGKPMFTVAEYWSNDLGALENYLNKTNFNHSVFDVPLHYQFHAASTQGGGYDMRKLLNGTVVSQHPLKSVTFVDNHDTQPGQSLESTVQTWFKPLAYAFILTRESGYPSVFYGDMYGTKGDSQREIPALKHKIEPILKARKQYAYGAQHDYFDHHDIVGWTREGVSSVANSGLAALITDGPGGAKWMYVGRQNAGETWHDITGNRSEPVVINSEGWGEFHVNGGSVSIYVQR

SEQ ID NO: 43888 - protein, 480 aa, Bacillus licheniformis
NGTLMQYFEWYTPNDGQHWKRLQNDAEHLSDIGITAVWIPPAYKAISQADVGYGAYDLYDLGEFHQKGTVRTKYGTKGELQSAIKSLHSRDINVYGDVVINHKAGADATEDVTAVEVDPADRNRVISGEHLIKAWTHFHFPGRGSTYSDFKWYWYHFDGTDWDESRKLNRIYLFQGKTWDWEVSNEFGNYDYLMYADYDYDYPDVVAEITRWGTWYANELQLDGFRLDAVKHIRFSFLRDWVNHVREKTGKPMFTVAEYWSNDLGALENYLNKTNFNHSVFDVPLHYQFHAASTQGGGYDMRKLLNGTVVSKHPLKSVTFVDNHDTQPGQSLESTVQTWFKPLAYAFILTRESGYPSVFYGDMYGTKGDSQREIPALKHKIEPILKARKQYAYGAQHDYFDHHDIVGWTREGVSSVANSGLAALITDGPGGAKWMYVGRQNAGETWHDITGNRSEPVVINSEGWGEFHVNGGSVSIYVQR

SEQ ID NO: 43889 - protein, 480 aa, Bacillus licheniformis
NGTLMQYFEWYTPNDGQHWKRLQNDAEHLSDIGITAVWIPPAYKAISQADVGYGAYDLYDLGEFHQKGTVRTKYGTKGELQSAIKSLHSRDINVYGDVVINHKAGADATEDVTAVEVDPADRNRVISGEHLIKAWTHFHFPGRGSTYSDFKWYWYHFDGTDWDESRKLNRIYLFQGKTWDWEVSNEFGNYDYLMYADYDYDYPDVVAEITRWGTWYANELQLDGFRLDAVTHIKFSFLRDWVNHVREKTGKPMFTVAEYWSNDLGALENYLNKTNFNHSVFDVPLHYQFHAASTQGGGYDMRKLLNGTVVSKHPLKSVTFVDNHDTQPGQSLESTVQTWFKPLAYAFILTRESGYPSVFYGDMYGTKGDSQREIPALKHKIEPILKARKQYAYGAQHDYFDHHDIVGWTREGVSSVANSGLAALITDGPGGAKWMYVGRQNAGETWHDITGNRSEPVVINSEGWGEFHVNGGSVSIYVQR

SEQ ID NO: 43890 - protein, 480 aa, Bacillus licheniformis
NGTLMQYFEWYTPNDGQHWKRLQNDAEHLSDIGITAVWIPPAYKAISQADVGYGAYDLYDLGEFWQKGTVRTKYGTKGELQSAIKSLHSRDINVYGDVVINHKAGADATEDVQAVEVDPADRNRVISGEHLIKAWTHFHFPGRGSTYSDFKWYWYHFDGTDWDESRKLNRIYLFQGKTWDWPVSNEFGNYDYLMYADYDYDYPDVVAEITRWGTWYANELQLDGFRLDAVKHIKFSFLRDWVNHVREKTGKEMFTVAEYWSNDLGALENYLNWTNFNHSVFDVPLHYQFHAASTQGGGYDMRKLLNGTVVSKHPLKSVTFVDNHDTQPGQSLESTVQTWFKPLAYAFILTRESGYPSVFYGDMYGTKGDSQREIPALKHKIEPILKARKQYAYGAQHDYFDHHDIVGWTREGVSSVANSGLAALITDGPGGAKWMYVGRQNAGETWHDITGNRSEPVVINSEGWGEFHVNGGSVSIYVQR

SEQ ID NO: 43891 - protein, 480 aa, Bacillus amyloliquefaciens
NGTLMQYFEWYTPNDGQHWKRLQNDAEHLSDIGITAVWIPPAYKAISQADVGYGAYDLYDLGEFHQKGTVRTKYGTKGELQSAIKSLHSRDINVYGDVVINHKAGADATEDVTAVEVDPADRNRVISGEHLIKAWTHFHFPGRGSTYSDFKWYWYHFDGTDWDESRKLNRIYLFQGKTWDWPVSNEFGNYDYLMYADYDYDYPDVVAEIKRWGTWYANELQLDGFRLDAVKHIKFSFLRDWVNHVREKTGKEMFTVAEYWSNDLGALENYLNKTNFNHSVFDVPLHYQFHAASTQGGGYDMRKLLNGTVVSKHPLKSVTFVDNHDTQPGQSLESTVQTWFKPLAYAFILTRESGYPQVFYGDMYGTKGDSQREIPALKHKIEPILKARKQYAYGAQHDYFDHHDIVGWTREGDSSVANSGLAALITDGPGGAKWMYVGRQNAGETWHDITGNRSEPVVINSEGWGEFHVNGGSVSIYVQR

SEQ ID NO: 43892 - protein, 480 aa, Bacillus licheniformis
NGTLMQYFEWYTPNDGQHWKRLQNDAEHLSDIGITAVWIPPAYKAISQADVGYGAYDLYDLGEFHQKGTVRTKYGTKGELQSAIKSLHSRDINVYGDVVINHKAGADATEDVTAVEVDPADRNRVISGEHLIKAWTHFHFPGRGSTYSDFKWYWYHFDGTDWDESRKLNRIYLFQGKTWDWEVSNEFGNYDYLMYADYDYDYPDVVAEITRWGTWYANELQLDGFRLDAVKHIKFSFLRDWVNHVREKTGKPMFTVAEYWSNDLGALENYLNKTNFNHSVFDVPLHYQFHAASTQGGGYDMRMLLNGTVVSKHPLKSVTFVDNHDTQPGQSLESTVQTWFKPLAYAFILTRESGYPSVFYGDMYGTKGDSQREIPALKHKIEPILKARKQYAYGAQHDYFDHHDIVGWTREGVSSVANSGLAALITDGPGGAKWMYVGRQNAGETWHDITGNRSEPVVINSEGWGEFHVNGGSVSIYVQR

SEQ ID NO: 43893 - protein, 480 aa, Bacillus licheniformis
NGTLMQYFEWYTPNDGQHWKRLQNDAEHLSDIGITAVWIPPAYKAISQADVGYGAYDLYDLGEFHQKGTVRTKYGTKGELQSAIKSLHSRDINVYGDVVINHKAGADATEDVTAVEVDPADRNRVISGEHLIKAWTHFHFPGRGSTYSDFKWYWYHFDGTDWDESRKLNRIYLFQGKTWDWPVSNEFGNYDYLMYADFDYDHPDVVAEIKRWGTWYANELQLDGFRLDAVKHIKFSFDRDWVNHVREKTGKEMFTVAEYWSNDLGALENYLNKTNFNHSVFDVPLHYQFHAASTQGGGYDMRKLLNGTVVSKHPLKSVTFVDNHDTQPGQSLESTVQTWFKPLAYAFILTRESGYPQVFYGDMYGTKGDSQREIPALKHKIEPILKARKQYAYGAQHDYFDHHDIVGWTREGDSSVANSGLAALITDGPGGAKRMYVGRQNAGETWHDITGNRSEPVVINSEGWGEFHVNGGSVSIYVQR

SEQ ID NO: 43894 - protein, 480 aa, Bacillus licheniformis
NGTLMQYFEWYTPNDGQHWKRLQNDAEHLSDIGITAVWIPPAYKAISQADVGYGAYDLYDLGEFHQKGTVRTKYGTKGELQSAIKSLHSRDINVYGDVVINHKAGADATEDVTAVEVDPADRNRVISGEHLIKAWTHFHFPGRGSTYSDFKWYWYHFDGTDWDESRKLNRIYLFQGKTWDWEVSNEFGNYDYLMYADYDYDYPDVVAEITRWGTWYANELQLDGFRLDAVKHIKFSFLRDWVNHVREKTGKPMFTVAEYWSNDLGALENYLNKTNFNHSVFDVPLHYQFHAASTQGGGYDMRKLLNGTVVSTHPLKSVTFVDNHDTQPGQSLESTVQTWFKPLAYAFILTRESGYPSVFYGDMYGTKGDSQREIPALKHKIEPILKARKQYAYGAQHDYFDHHDIVGWTREGVSSVANSGLAALITDGPGGAKWMYVGRQNAGETWHDITGNRSEPVVINSEGWGEFHVNGGSVSIYVQR

SEQ ID NO: 43895 - protein, 480 aa, Bacillus licheniformis
NGTLMQYFEWYTPNDGQHWKRLQNDAEHLSDIGITAVWIPPAYKAISQADVGYGAYDLYDLGEFWQKGTVRTKYGTKGELQSAIKSLHSRDINVYGDVVINHKAGADATEDVQAVEVDPADRNRVISGEHLIKAWTHFHFPGRGSTYSDFKWYWYHFDGTDWDESRKLNRIYLFQGKTWDWPVSNEFGNYDYLMYADYDYDYPDVVAEITRWGTWYANELQLDGFRLDAVKHIKFSFLRDWVNHVREKTGKEMFTVAEYWSNDLGALENYLNYTNFNHSVFDVPLHYQFHAASTQGGGYDMRKLLNGTVVSKHPLKSVTFVDNHDTQPGQSLESTVQTWFKPLAYAFILTRESGYPSVFYGDMYGTKGDSQREIPALKHKIEPILKARKQYAYGAQHDYFDHHDIVGWTREGVSSVANSGLAALITDGPGGAKWMYVGRQNAGETWHDITGNRSEPVVINSEGWGEFHVNGGSVSIYVQR

SEQ ID NO: 43896 - protein, 480 aa, Bacillus licheniformis
NGTLMQYFEWYTPNDGQHWKRLQNDAEHLSDIGITAVWIPPAYKAISQADVGYGAYDLYDLGEFWQKGTVRTKYGTKGELQSAIKSLHSRDINVYGDVVINHKAGADATEDVQAVEVDPADRNRVISGEHLIKAWTHFHFPGRGSTYSDFKWYWYHFDGTDWDESRKLNRIYLFQGKTWDWPVSNEFGNYDYLMYADYDYDYPDVVAEITRWGTWYANELQLDGFRLDAVKHIKFLFLRDWVNHVREKTGKEMFTVAEYWSNDLGALENYLNKTNFNHSVFDVPLHYQFHAASTQGGGYDMRKLLNGTVVSKHPLKSVTFVDNHDTQPGQSLESTVQTWFKPLAYAFILTRESGYPSVFYGDMYGTKGDSQREIPALKHKIEPILKARKQYAYGAQHDYFDHHDIVGWTREGVSSVANSGLAALITDGPGGAKWMYVGRQNAGETWHDITGNRSEPVVINSEGWGEFHVNGGSVSIYVQR

SEQ ID NO: 43897 - protein, 480 aa, Bacillus licheniformis
NGTLMQYFEWYTPNDGQHWKRLQNDAEHLSDIGITAVWIPPAYKAISQADVGYGAYDLYDLGEFHQKGTVRTKYGTKGELQSAIKSLHSRDINVYGDVVINHKAGADATEDVTAVEVDPADRNRVISGEHLIKAWTHFHFPGRGSTYSDFKWYWYHFDGTDWDESRKLNRIYLFQGKTWDWEVSNEFGNYDYLMYADYDYDYPDVVAEITRWGTWYANELQLDGFRLDAVKHIKFSFLRDWVNHVREKTGKPMFTVAEYWSNDLGALENYLNKTNFNHSVFDVPLHYQFHAASTQGGGYDMRKLLNGTVVSIHPLKSVTFVDNHDTQPGQSLESTVQTWFKPLAYAFILTRESGYPSVFYGDMYGTKGDSQREIPALKHKIEPILKARKQYAYGAQHDYFDHHDIVGWTREGVSSVANSGLAALITDGPGGAKWMYVGRQNAGETWHDITGNRSEPVVINSEGWGEFHVNGGSVSIYVQR

SEQ ID NO: 43898 - protein, 480 aa, Bacillus licheniformis
NGTLMQYFEWYTPNDGQHWKRLQNDAEHLSDIGITAVWIPPAYKAISQADVGYGAYDLYDLGEFWQKGTVRTKYGTKGELQSAIKSLHSRDINVYGDVVINHKAGADATEDVQAVEVDPADRNRVISGEHLIKAWTHFHFPGRGSTYSDFKWYWYHFDGTDWDESRKLNRIYLFQGKTWDWPVSNEFGNYDYLMYADYDYDYPDVVAEITRWGTWYANELQLDGFRLDAVKHIKFSFLRDWVNHVREKTGKEMFTVAEYWSNDLGALENYLNNTNFNHSVFDVPLHYQFHAASTQGGGYDMRKLLNGTVVSKHPLKSVTFVDNHDTQPGQSLESTVQTWFKPLAYAFILTRESGYPSVFYGDMYGTKGDSQREIPALKHKIEPILKARKQYAYGAQHDYFDHHDIVGWTREGVSSVANSGLAALITDGPGGAKWMYVGRQNAGETWHDITGNRSEPVVINSEGWGEFHVNGGSVSIYVQR

SEQ ID NO: 43899 - protein, 480 aa, Bacillus licheniformis
NGTLMQYFEWYTPNDGQHWKRLQNDAEHLSDIGITAVWIPPAYKAISQADVGYGAYDLYDLGEFWQKGTVRTKYGTKGELQSAIKSLHSRDINVYGDVVINHKAGADATEDVQAVEVDPADRNRVISGEHLIKAWTHFHFPGRGSTYSDFKWYWYHFDGTDWDESRKLNRIYLFQGKTWDWPVSNEFGNYDYLMYADYDYDYPDVVAEITRWGTWYANELQLDGFRLDAVKHIKFPFLRDWVNHVREKTGKEMFTVAEYWSNDLGALENYLNKTNFNHSVFDVPLHYQFHAASTQGGGYDMRKLLNGTVVSKHPLKSVTFVDNHDTQPGQSLESTVQTWFKPLAYAFILTRESGYPSVFYGDMYGTKGDSQREIPALKHKIEPILKARKQYAYGAQHDYFDHHDIVGWTREGVSSVANSGLAALITDGPGGAKWMYVGRQNAGETWHDITGNRSEPVVINSEGWGEFHVNGGSVSIYVQR

SEQ ID NO: 43900 - protein, 480 aa, Bacillus amyloliquefaciens
NGTLMQYFEWYTPNDGQHWKRLQNDAEHLSDIGITAVWIPPAYKAISQADVGYGAYDLYDLGEFHQKGTVRTKYGTKGELQSAIKSLHSRDINVYGDVVINHKAGADATEDVTAVEVDPADRNRVISGEHLIKAWTHFHFPGRGSTYSDFKWYWYHFDGTDWDESRKLNRIYLFQGKTWDWPVSNEFGNYDYLMYADFDYDHPDVVAEIKRWGTWYANELQLDGFRLDAVKHIKFSFLRDWVNHVREKTGKEMFTVAEYWSNDLGALENYLNKTNFNHSVFDVPLHYQFHAASTQGGGYDMRKLLNGTVVSKHPLKSVTFVDNHDTQPGQSLESTVQTWFKPLAYAFILTRESGYPQVFYGDMYGTKGDSQGEIPALKHKIEPILKARKQYAYGAQHDYFDHHDIVGWTREGDSSVANSGLAALITDGPGGAKRMYVGRQNAGETWHDITGNRSEPVVINSEGWGEFHVNGGSVSIYVQR

SEQ ID NO: 43901 - protein, 480 aa, Bacillus licheniformis
NGTLMQYFEWYTPNDGQHWKRLQNDAEHLSDIGITAVWIPPAYKAISQADVGYGAYDLYDLGEFWQKGTVRTKYGTKGELQSAIKSLHSRDINVYGDVVINHKAGADATEDVQAVEVDPADRNRVISGEHLIKAWTHFHFPGRGSTYSDFKWYWYHFDGTDWDESRKLNRIYLFQGKTWDWPVSNEFGNYDYLMYADYDYDYPDVVAEITRWGTWYANELQLDGFRLDAVKHIKFIFLRDWVNHVREKTGKEMFTVAEYWSNDLGALENYLNKTNFNHSVFDVPLHYQFHAASTQGGGYDMRKLLNGTVVSKHPLKSVTFVDNHDTQPGQSLESTVQTWFKPLAYAFILTRESGYPSVFYGDMYGTKGDSQREIPALKHKIEPILKARKQYAYGAQHDYFDHHDIVGWTREGVSSVANSGLAALITDGPGGAKWMYVGRQNAGETWHDITGNRSEPVVINSEGWGEFHVNGGSVSIYVQR

SEQ ID NO: 43902 - protein, 480 aa, Bacillus licheniformis
NGTLMQYFEWYTPNDGQHWKRLQNDAEHLSDIGITAVWIPPAYKAISQADVGYGAYDLYDLGEFHQKGTVRTKYGTKGELQSAIKSLHSRDINVYGDVVINHKAGADATEDVTAVEVDPADRNRVISGEHLIKAWTHFHFPGRGSTYSDFKWYWYHFDGTDWDESRKLNRIYLFQGKTWDWEVSNEFGNYDYLMYADYDYDYPDVVAEITRWGTWYANELQLDGFRLDAVKHIKFSFLRDWVNHVREKTGKPMFTVAEYWSNDLGALENYLNKTNFNHSVFDVPLHYQFHAASTQGGGYDMRKLLNGTVVSLHPLKSVTFVDNHDTQPGQSLESTVQTWFKPLAYAFILTRESGYPSVFYGDMYGTKGDSQREIPALKHKIEPILKARKQYAYGAQHDYFDHHDIVGWTREGVSSVANSGLAALITDGPGGAKWMYVGRQNAGETWHDITGNRSEPVVINSEGWGEFHVNGGSVSIYVQR

SEQ ID NO: 43903 - protein, 480 aa, Bacillus licheniformis
NGTLMQYFEWYTPNDGQHWKRLQNDAEHLSDIGITAVWIPPAYKAISQADVGYGAYDLYDLGEFWQKGTVRTKYGTKGELQSAIKSLHSRDINVYGDVVINHKAGADATEDVQAVEVDPADRNRVISGEHLIKAWTHFHFPGRGSTYSDFKWYWYHFDGTDWDESRKLNRIYLFQGKTWDWPVSNEFGNYDYLMYADYDYDYPDVVAEITRWGTWYANELQLDGFRLDAVKHIKFSFLRDWVNHVREKTGKEMFTVAEYWSNDLGALENYLNQTNFNHSVFDVPLHYQFHAASTQGGGYDMRKLLNGTVVSKHPLKSVTFVDNHDTQPGQSLESTVQTWFKPLAYAFILTRESGYPSVFYGDMYGTKGDSQREIPALKHKIEPILKARKQYAYGAQHDYFDHHDIVGWTREGVSSVANSGLAALITDGPGGAKWMYVGRQNAGETWHDITGNRSEPVVINSEGWGEFHVNGGSVSIYVQR

SEQ ID NO: 43904 - protein, 480 aa, Bacillus licheniformis
NGTLMQYFEWYTPNDGQHWKRLQNDAEHLSDIGITAVWIPPAYKAISQADVGYGAYDLYDLGEFWQKGTVRTKYGTKGELQSAIKSLHSRDINVYGDVVINHKAGADATEDVQAVEVDPADRNRVISGEHLIKAWTHFHFPGRGSTYSDFKWYWYHFDGTDWDESRKLNRIYLFQGKTWDWPVSNEFGNYDYLMYADYDYDYPDVVAEITRWGTWYANELQLDGFRLDAVKHIKFTFLRDWVNHVREKTGKEMFTVAEYWSNDLGALENYLNKTNFNHSVFDVPLHYQFHAASTQGGGYDMRKLLNGTVVSKHPLKSVTFVDNHDTQPGQSLESTVQTWFKPLAYAFILTRESGYPSVFYGDMYGTKGDSQREIPALKHKIEPILKARKQYAYGAQHDYFDHHDIVGWTREGVSSVANSGLAALITDGPGGAKWMYVGRQNAGETWHDITGNRSEPVVINSEGWGEFHVNGGSVSIYVQR

SEQ ID NO: 43905 - protein, 480 aa, Bacillus licheniformis
NGTLMQYFEWYTPNDGQHWKRLQNDAEHLSDIGITAVWIPPAYKAISQADVGYGAYDLYDLGEFHQKGTVRTKYGTKGELQSAIKSLHSRDINVYGDVVINHKAGADATEDVTAVEVDPADRNRVISGEHLIKAWTHFHFPGRGSTYSDFKWYWYHFDGTDWDESRKLNRIYLFQGKTWDWEVSNEFGNYDYLMYADYDYDYPDVVAEITRWGTWYANELQLDGFRLDAVKHIKFSFLRDWVNHVREKTGKPMFTVAEYWSNDLGALENYLNKTNFNHSVFDVPLHYQFHAASTQGGGYDMRKLLNGTVVSYHPLKSVTFVDNHDTQPGQSLESTVQTWFKPLAYAFILTRESGYPSVFYGDMYGTKGDSQREIPALKHKIEPILKARKQYAYGAQHDYFDHHDIVGWTREGVSSVANSGLAALITDGPGGAKWMYVGRQNAGETWHDITGNRSEPVVINSEGWGEFHVNGGSVSIYVQR

SEQ ID NO: 43906 - protein, 480 aa, Bacillus licheniformis
NGTLMQYFEWYTPNDGQHWKRLQNDAEHLSDIGITAVWIPPAYKAISQADVGYGAYDLYDLGEFHQKGTVRTKYGTKGELQSAIKSLHSRDINVYGDVVINHKAGADATEDVTAVEVDPADRNRVISGEHLIKAWTHFHFPGRGSTYSDFAWYWYHFDGTDWDESRKLNRIYLFQGKTWDWEVSNEFGNYDYLMYADYDYDYPDVVAEITRWGTWYANELQLDGFRLDAVKHIKFSFLRDWVNHVREKTGKPMFTVAEYWSNDLGALENYLNKTNFNHSVFDVPLHYQFHAASTQGGGYDMRKLLNGTVVSKHPLKSVTFVDNHDTQPGQSLESTVQTWFKPLAYAFILTRESGYPSVFYGDMYGTKGDSQREIPALKHKIEPILKARKQYAYGAQHDYFDHHDIVGWTREGVSSVANSGLAALITDGPGGAKWMYVGRQNAGETWHDITGNRSEPVVINSEGWGEFHVNGGSVSIYVQR

SEQ ID NO: 43907 - protein, 480 aa, Bacillus licheniformis
NGTLMQYFEWYTPNDGQHWKRLQNDAEHLSDIGITAVWIPPAYKAISQADVGYGAYDLYDLGEFWQKGTVRTKYGTKGELQSAIKSLHSRDINVYGDVVINHKAGADATEDVQAVEVDPADRNRVISGEHLIKAWTHFHFPGRGSTYSDFKWYWYHFDGTDWDESRKLNRIYLFQGKTWDWPVSNEFGNYDYLMYADYDYDYPDVVAEITRWGTWYANELQLDGFRLDAVKHIKFSFLRDWVNHVREKTGKEMFTVAEYWSNDLGALENYLNFTNFNHSVFDVPLHYQFHAASTQGGGYDMRKLLNGTVVSKHPLKSVTFVDNHDTQPGQSLESTVQTWFKPLAYAFILTRESGYPSVFYGDMYGTKGDSQREIPALKHKIEPILKARKQYAYGAQHDYFDHHDIVGWTREGVSSVANSGLAALITDGPGGAKWMYVGRQNAGETWHDITGNRSEPVVINSEGWGEFHVNGGSVSIYVQR

SEQ ID NO: 43908 - protein, 480 aa, Bacillus licheniformis
NGTLMQYFEWYTPNDGQHWKRLQNDAEHLSDIGITAVWIPPAYKAISQADVGYGAYDLYDLGEFHQKGTVRTKYGTKGELQSAIKSLHSRDINVYGDVVINHKAGADATEDVTAVEVDPADRNRVISGEHLIKAWTHFWFPGRGSTYSDFKWYWYHFDGTDWDESRKLNRIYLFQGKTWDWPVSNEFGNYDYLMYADFDYDHPDVVAEIKRWGTWYANELQLDGFRLDAVKHIKFSFLRDWVNHVREKTGKEMFTVAEYWSNDLGALENYLNKTNFNHSVFDVPLHYQFHAASTQGGGYDMRKLLNGTVVSKHPLKSVTFVDNHDTQPGQSLESTVQTWFKPLAYAFILTRESGYPQVFYGDMYGTKGDSQREIPALKHKIEPILKARKQYAYGAQHDYFDHHDIVGWTREGDSSVANSGLAALITDGPGGAKRMYVGRQNAGETWHDITGNRSEPVVINSEGWGEFHVNGGSVSIYVQR

SEQ ID NO: 43909 - protein, 480 aa, Bacillus licheniformis
NGTLMQYFEWYTPNDGQHWKRLQNDAEHLSDIGITAVWIPPAYKAISQADVGYGAYDLYDLGEFHQKGTVRTKYGTKGELQSAIKSLHSRDINVYGDVVINHKAGADATEDVTAVEVDPADRNRVISGEHLIKAWTHFHFPGRGSTYSDFKWYWYHFDGTDWDESRKLNRIYLFQGKTWDWEVSNEFGNYDYLMYADYDYDYPDVVAEITRWGTWYANELQLDGFRLDAVKHIKFSFLRDWVNHVREKTGKPMFTVAEYWSNDLGALENYLNKTNFNHSVFDVPLHYQFHAASTQGGGYDMRKLLNGTVVSNHPLKSVTFVDNHDTQPGQSLESTVQTWFKPLAYAFILTRESGYPSVFYGDMYGTKGDSQREIPALKHKIEPILKARKQYAYGAQHDYFDHHDIVGWTREGVSSVANSGLAALITDGPGGAKWMYVGRQNAGETWHDITGNRSEPVVINSEGWGEFHVNGGSVSIYVQR

SEQ ID NO: 43910 - protein, 480 aa, Bacillus licheniformis
NGTLMQYFEWYTPNDGQHWKRLQNDAEHLSDIGITAVWIPPAYKAISQADVGYGAYDLYDLGEFHQKGTVRTKYGTKGELQSAIKSLHSRDINVYGDVVINHKAGADATEDVTAVEVDPADRNRVISGEHLIKAWTHFHFPGRGSTYSDFHWYWYHFDGTDWDESRKLNRIYLFQGKTWDWEVSNEFGNYDYLMYADYDYDYPDVVAEITRWGTWYANELQLDGFRLDAVKHIKFSFLRDWVNHVREKTGKPMFTVAEYWSNDLGALENYLNKTNFNHSVFDVPLHYQFHAASTQGGGYDMRKLLNGTVVSKHPLKSVTFVDNHDTQPGQSLESTVQTWFKPLAYAFILTRESGYPSVFYGDMYGTKGDSQREIPALKHKIEPILKARKQYAYGAQHDYFDHHDIVGWTREGVSSVANSGLAALITDGPGGAKWMYVGRQNAGETWHDITGNRSEPVVINSEGWGEFHVNGGSVSIYVQR

SEQ ID NO: 43911 - protein, 480 aa, Bacillus amyloliquefaciens
NGTLMQYFEWYTPNDGQHWKRLQNDAEHLSDIGITAVWIPPAYKAISQADVGYGAYDLYDLGEFHQKGTVRTKYGTKGELQSAIKSLHSRDINVYGDVVINHKAGADATEDVGAVEVDPADRNRVISGEHLIKAWTHFHFPGRGSTYSDFKWYWYHFDGTDWDESRKLNRIYLFQGKTWDWPVSNEFGNYDYLMYADFDYDHPDVVAEIKRWGTWYANELQLDGFRLDAVKHIKFSFLRDWVNHVREKTGKEMFTVAEYWSNDLGALENYLNKTNFNHSVFDVPLHYQFHAASTQGGGYDMRKLLNGTVVSKHPLKSVTFVDNHDTQPGQSLESTVQTWFKPLAYAFILTRESGYPQVFYGDMYGTKGDSQREIPALKHKIEPILKARKQYAYGAQHDYFDHHDIVGWTREGDSSVANSGLAALITDGPGGAKRMYVGRQNAGETWHDITGNRSEPVVINSEGWGEFHVNGGSVSIYVQR

SEQ ID NO: 43912 - protein, 480 aa, Bacillus licheniformis
NGTLMQYFEWYTPNDGQHWKRLQNDAEHLSDIGITAVWIPPAYKAISQADVGYGAYDLYDLGEFWQKGTVRTKYGTKGELQSAIKSLHSRDINVYGDVVINHKAGADATEDVQAVEVDPADRNRVISGEHLIKAWTHFHFPGRGSTYSDFKWYWYHFDGTDWDESRKLNRIYLFQGKTWDWPVSNEFGNYDYLMYADYDYDYPDVVAEITRWGTWYANELQLDGFRLDAVKHIKFSFLRDWVNHVREKTGKEMFTVAEYWSNDLGALENYLNMTNFNHSVFDVPLHYQFHAASTQGGGYDMRKLLNGTVVSKHPLKSVTFVDNHDTQPGQSLESTVQTWFKPLAYAFILTRESGYPSVFYGDMYGTKGDSQREIPALKHKIEPILKARKQYAYGAQHDYFDHHDIVGWTREGVSSVANSGLAALITDGPGGAKWMYVGRQNAGETWHDITGNRSEPVVINSEGWGEFHVNGGSVSIYVQR

SEQ ID NO: 43913 - protein, 480 aa, Bacillus amyloliquefaciens
NGTLMQYFEWYTPNDGQHWKRLQNDAEHLSDIGITAVWIPPAYKAISQADVGYGAYDLYDLGEFHQKGTVRTKYGTKGELQSAIKSLHSRDINVYGDVVINHKAGADATEDVTAVEVDPADRNRVISGEHLIKAWTHFHFPGRGSTYSDFKWWWWHFDGTDWDESRKLNRIYLFQGKTWDWPVSNEFGNYDYLMYADYDYDYPDVVAEITRWGTWYANELQLDGFRLDAVKHIKFSFLRDWVNHVREKTGKEMFTVAEYWSNDLGALENYLNKTNFNHSVFDVPLHYQFHAASTQGGGYDMRKLLNGTVVSKHPLKSVTFVDNHDTQPGQSLESTVQTWFKPLAYAFILTRESGYPSVFYGDMYGTKGDSQREIPALKHKIEPILKARKQYAYGAQHDYFDHHDIVGWTREGVSSVANSGLAALITDGPGGAKWMYVGRQNAGETWHDITGNRSEPVVINSEGWGEFHVNGGSVSIYVQR

SEQ ID NO: 43914 - protein, 480 aa, Bacillus licheniformis
NGTLMQYFEWYTPNDGQHWKRLQNDAEHLSDIGITAVWIPPAYKAISQADVGYGAYDLYDLGEFWQKGTVRTKYGTKGELQSAIKSLHSRDINVYGDVVINHKAGADATEDVQAVEVDPADRNRVISGEHLIKAWTHFHFPGRGSTYSDFKWYWYHFDGTDWDESRKLNRIYLFQGKTWDWPVSNEFGNYDYLMYADYDYDYPDVVAEITRWGTWYANELQLDGFRLDAVKHIKFYFLRDWVNHVREKTGKEMFTVAEYWSNDLGALENYLNKTNFNHSVFDVPLHYQFHAASTQGGGYDMRKLLNGTVVSKHPLKSVTFVDNHDTQPGQSLESTVQTWFKPLAYAFILTRESGYPSVFYGDMYGTKGDSQREIPALKHKIEPILKARKQYAYGAQHDYFDHHDIVGWTREGVSSVANSGLAALITDGPGGAKWMYVGRQNAGETWHDITGNRSEPVVINSEGWGEFHVNGGSVSIYVQR

SEQ ID NO: 43915 - protein, 480 aa, Bacillus licheniformis
NGTLMQYFEWYTPNDGQHWKRLQNDAEHLSDIGITAVWIPPAYKAISQADVGYGAYDLYDLGEFHQKGTVRTKYGTKGELQSAIKSLHSRDINVYGDVVINHKAGADATEDVTAVEVDPADRNRVISGEHLIKAWTHFHFPGRGSTYSDFKWYWYHFDGTDWDESRKLNRIYLFQGKTWDWEVSNEFGNYDYLMYADYDYDYPDVVAEITRWGTWYANELQLDGFRLDAVKHIKFSFLRDWVNHVREKTGKPMFTVAEYWSNDLGALENYLNKTNFNHSVFDVPLHYQFHAASTQGGGYDMRKLLNGTVVSSHPLKSVTFVDNHDTQPGQSLESTVQTWFKPLAYAFILTRESGYPSVFYGDMYGTKGDSQREIPALKHKIEPILKARKQYAYGAQHDYFDHHDIVGWTREGVSSVANSGLAALITDGPGGAKWMYVGRQNAGETWHDITGNRSEPVVINSEGWGEFHVNGGSVSIYVQR

SEQ ID NO: 43916 - protein, 480 aa, Bacillus licheniformis
NGTLMQYFEWYTPNDGQHWKRLQNDAEHLSDIGITAVWIPPAYKAISQADVGYGAYDLYDLGEFHQKGTVRTKYGTKGELQSAIKSLHSRDINVYGDVVINHKAGADATEDVTAVEVDPADRNRVISGEHLIKAWTHFHFPGRGSTYSDFKWYWYHFDGTDWDESRKLNRIYLFQGKTWDWEVSNEFGNYDYLMYADYDYDYPDVVAEITRWGTWYANELQLDGFRLDAVKHIKFSFLRDWVNHVREKTGKPMFTVAEYWSNDLGALENYLNKTNFNHSVFDVPLHYQFHAASTQGGGYDMRKLLNGTVVSMHPLKSVTFVDNHDTQPGQSLESTVQTWFKPLAYAFILTRESGYPSVFYGDMYGTKGDSQREIPALKHKIEPILKARKQYAYGAQHDYFDHHDIVGWTREGVSSVANSGLAALITDGPGGAKWMYVGRQNAGETWHDITGNRSEPVVINSEGWGEFHVNGGSVSIYVQR

SEQ ID NO: 43917 - protein, 480 aa, Bacillus licheniformis
NGTLMQYFEWYTPNDGQHWKRLQNDAEHLSDIGITAVWIPPAYKAISQADVGYGAYDLYDLGEFHQKGTVRTKYGTKGELQSAIKSLHSRDINVYGDVVINHKAGADATEDVTAVEVDPADRNRVISGEHLIKAWTHFHFPGRGSTYSDFKWYWYHFDGTDWDESRKLNRIYLFQGKTWDWPVSNEFGNYDYLMYADFDYDHPDVVAEIKRWGTWYANELQLDGFRLDAVKHIKFSFLRDWVNHVREKTGKEMFTVAEYWSNDLGALENYLNKTNFNHSVFDVPLHYQFHAASTQGGGYDMRKLLNGTVVSKHPLKSVTFVDNHDTQPGQSLESTVQTWFKPLAYAFILTRESGYPQVFYGDMYGTKGDSQVEIPALKHKIEPILKARKQYAYGAQHDYFDHHDIVGWTREGDSSVANSGLAALITDGPGGAKRMYVGRQNAGETWHDITGNRSEPVVINSEGWGEFHVNGGSVSIYVQR

SEQ ID NO: 43918 - protein, 480 aa, Bacillus licheniformis
NGTLMQYFEWYTPNDGQHWKRLQNDAEHLSDIGITAVWIPPAYKAISQADVGYGAYDLYDLGEFWQKGTVRTKYGTKGELQSAIKSLHSRDINVYGDVVINHKAGADATEDVQAVEVDPADRNRVISGEHLIKAWTHFHFPGRGSTYSDFKWYWYHFDGTDWDESRKLNRIYLFQGKTWDWPVSNEFGNYDYLMYADYDYDYPDVVAEITRWGTWYANELQLDGFRLDAVKHIKFSFLRDWVNHVREKTGKEMFTVAEYWSNDLGALENYLNLTNFNHSVFDVPLHYQFHAASTQGGGYDMRKLLNGTVVSKHPLKSVTFVDNHDTQPGQSLESTVQTWFKPLAYAFILTRESGYPSVFYGDMYGTKGDSQREIPALKHKIEPILKARKQYAYGAQHDYFDHHDIVGWTREGVSSVANSGLAALITDGPGGAKWMYVGRQNAGETWHDITGNRSEPVVINSEGWGEFHVNGGSVSIYVQR

SEQ ID NO: 43919 - protein, 480 aa, Bacillus amyloliquefaciens
NGTLMQYFEWYTPNDGQHWKRLQNDAEHLSDIGITAVWIPPAYKAISQADVGYGAYDLYDLGEFHQKGTVRTKYGTKGELQSAIKSLHSRDINVYGDVVINHKAGADATEDVTAVEVDPADRNRVISGEHLIKAWTHFWFPGRGSTYSDFKWYWWHFDGTDWDESRKLNRIYLFQGKTWDWPVSNEFGNYDYLMYADYDYDYPDVVAEITRWGTWYANELQLDGFRLDAVKHIKFSFLRDWVNHVREKTGKEMFTVAEYWSNDLGALENYLNKTNFNHSVFDVPLHYQFHAASTQGGGYDMRKLLNGTVVSKHPLKSVTFVDNHDTQPGQSLESTVQTWFKPLAYAFILTRESGYPSVFYGDMYGTKGDSQREIPALKHKIEPILKARKQYAYGAQHDYFDHHDIVGWTREGVSSVANSGLAALITDGPGGAKWMYVGRQNAGETWHDITGNRSEPVVINSEGWGEFHVNGGSVSIYVQR

SEQ ID NO: 43920 - protein, 480 aa, Bacillus licheniformis
NGTLMQYFEWYTPNDGQHWKRLQNDAEHLSDIGITAVWIPPAYKAISQADVGYGAYDLYDLGEFHQKGTVRTKYGTKGELQSAIKSLHSRDINVYGDVVINHKAGADATEDVTAVEVDPADRNRVISGEHLIKAWTHFHFPGRGSTYSDFKWYWYHFDGTDWDESRKLNRIYLFQGKTWDWEVSNEFGNYDYLMYADYDYDYPDVVAEITRWGTWYANELQLDGFRLDAVKHIKFSFLRDWVNHVREKTGKPMFTVAEYWSNDLGALENYLNKTNFNHSVFDVPLHYQFHAASTQGGGYDMRKLLNGTVVSAHPLKSVTFVDNHDTQPGQSLESTVQTWFKPLAYAFILTRESGYPSVFYGDMYGTKGDSQREIPALKHKIEPILKARKQYAYGAQHDYFDHHDIVGWTREGVSSVANSGLAALITDGPGGAKWMYVGRQNAGETWHDITGNRSEPVVINSEGWGEFHVNGGSVSIYVQR

SEQ ID NO: 43921 - protein, 480 aa, Bacillus licheniformis
NGTLMQYFEWYTPNDGQHWKRLQNDAEHLSDIGITAVWIPPAYKAISQADVGYGAYDLYDLGEFWQKGTVRTKYGTKGELQSAIKSLHSRDINVYGDVVINHKAGADATEDVQAVEVDPADRNRVISGEHLIKAWTHFHFPGRGSTYSDFKWYWYHFDGTDWDESRKLNRIYLFQGKTWDWPVSNEFGNYDYLMYADYDYDYPDVVAEITRWGTWYANELQLDGFRLDAVKHIKFSFLRDWVNHVREKTGKEMFTVAEYWSNDLGALENYLNVTNFNHSVFDVPLHYQFHAASTQGGGYDMRKLLNGTVVSKHPLKSVTFVDNHDTQPGQSLESTVQTWFKPLAYAFILTRESGYPSVFYGDMYGTKGDSQREIPALKHKIEPILKARKQYAYGAQHDYFDHHDIVGWTREGVSSVANSGLAALITDGPGGAKWMYVGRQNAGETWHDITGNRSEPVVINSEGWGEFHVNGGSVSIYVQR

SEQ ID NO: 43922 - protein, 480 aa, Bacillus licheniformis
NGTLMQYFEWYTPNDGQHWKRLQNDAEHLSDIGITAVWIPPAYKAHSQADVGYGAYDLYDLGEFHQKGTVRTKYGTKGELQSAIKSLHSRDINVYGDVVINHKAGADATEDVTAVEVDPADRNRVISGEHLIKAWTHFHFPGRGSTYSDFKWYWYHFDGTDWDESRKLNRIYLFQGKTWDWPVSNEFGNYDYLMYADFDYDHPDVVAEIKRWGTWYANELQLDGFRLDAVKHIKFSFLRDWVNHVREKTGKEMFTVAEYWSNDLGALENYLNKTNFNHSVFDVPLHYQFHAASTQGGGYDMRKLLNGTVVSKHPLKSVTFVDNHDTQPGQSLESTVQTWFKPLAYAFILTRESGYPQVFYGDMYGTKGDSQREIPALKHKIEPILKARKQYAYGAQHDYFDHHDIVGWTREGDSSVANSGLAALITDGPGGAKRMYVGRQNAGETWHDITGNRSEPVVINSEGWGEFHVNGGSVSIYVQR

SEQ ID NO: 43923 - protein, 480 aa, Bacillus amyloliquefaciens
NGTLMQYFEWYTPNDGQHWKRLQNDAEHLSDIGITAVWIPPAYKAISQADVGYGAYDLYDLGEFHQKGTVRTKYGTKGELQSAIKSLHSRDINVYGDVVINHKAGADATEDVTAVEVDPADRNRVISGEHLIKAWTHFHFPGRGSTYSDFKWYWYHFDGTDWDESRKLNRIYLFQGKTWDWPVSNEFGNYDYLMYADFDYDHPDVVAEIKRWGTWYANELQLDGFRLDAVKHIKFSFLRDWVNHVREKTGKEMFTVAEYWSNDLGALENYLNKTNFNHSVFDVPLHYQFHAASTQGGGYDMRKLLNGTVVSKHPLKSVTFVDNHDTQPGQSLESTVQTWFKPLAYAFILTRESGYPQVFYGDMYGTKGDSQREIPALKHKIEPILKARKQYAYGAQHDYFDHHDIVGWTREGDSSVANSGLAALITDGPGGAKRMYVGRQNAGETWHDITGNRSEPVVINSEGWGEFHVNGGSVSIYVQR

SEQ ID NO: 43924 - protein, 480 aa, Bacillus licheniformis
NGTLMQYFEWYTPNDGQHWKRLQNDAEHLSDIGITAVWIPPAYKAISQADVGYGAYDLYDLGEFHQKGTVRTKYGTKGELQSAIKSLHSRDINVYGDVVINHKAGADATEDVTAVEVDPADRNRVISGEHLIKAWTHFHFPGRGSTYSDFKWYWYHFDGTDWDESRKLNRIYLFQGKTWDWEVSNEFGNYDYLMYADYDYDYPDVVAEITRWGTWYANELQLDGFRLDAVKHIKFSFLRDWVNHVREKTGKPMFTVAEYWSNDLGALENYLNKTNFNHSVFDVPLHYQFHAASTQGGGYDMRKLLNGTVVSHHPLKSVTFVDNHDTQPGQSLESTVQTWFKPLAYAFILTRESGYPSVFYGDMYGTKGDSQREIPALKHKIEPILKARKQYAYGAQHDYFDHHDIVGWTREGVSSVANSGLAALITDGPGGAKWMYVGRQNAGETWHDITGNRSEPVVINSEGWGEFHVNGGSVSIYVQR

SEQ ID NO: 43925 - protein, 480 aa, Bacillus licheniformis
NGTLMQYFEWYTPNDGQHWKRLQNDAEHLSDIGITAVWIPPAYKAGSQADVGYGAYDLYDLGEFHQKGTVRTKYGTKGELQSAIKSLHSRDINVYGDVVINHKAGADATEDVTAVEVDPADRNRVISGEHLIKAWTHFHFPGRGSTYSDFKWYWYHFDGTDWDESRKLNRIYLFQGKTWDWPVSNEFGNYDYLMYADFDYDHPDVVAEIKRWGTWYANELQLDGFRLDAVKHIKFSFLRDWVNHVREKTGKEMFTVAEYWSNDLGALENYLNKTNFNHSVFDVPLHYQFHAASTQGGGYDMRKLLNGTVVSKHPLKSVTFVDNHDTQPGQSLESTVQTWFKPLAYAFILTRESGYPQVFYGDMYGTKGDSQREIPALKHKIEPILKARKQYAYGAQHDYFDHHDIVGWTREGDSSVANSGLAALITDGPGGAKRMYVGRQNAGETWHDITGNRSEPVVINSEGWGEFHVNGGSVSIYVQR

SEQ ID NO: 43926 - protein, 478 aa, Bacillus sp.
NGTIMQYFEWNVPNDGQHWNRLHNNAQNLKNAGITAIWIPPAWKGTSQSDTGYGAYDLYDLGEFNQKGTVRTKYGTKAELERAIRSLKANGIQVYGDVVMNHKAGADFTERVQAVEVNPQNRNQEVSGTYQIEAWTGFNFPGRGNQHSSFKWRWYHFDGTDWDQSRQLSNRIYKFRGKAWDWEVDTEFGNYDYLMYADLDMDHPEVINELNRWGVWYANTLNLDGFRLDAVKHIKFSFMRDWLGHVRGQTGKNLFAVAEYWKNDLGALENYLSKTNWTMSAFDVPLHYNLYQASNSSGNYDMRNLLNGTLVQRHPSHAVTFVDNHDTQPGEALESFVQGWFKPLAYATILTREQGYPQVFYGDYYGIPSDGVPSYRQQIDPLLKARQQYAYGPQHDYLDHPDVIGWTREGDSSHPKSGLATLITDGPGGSKRMYAGLKNAGETWYDITGNRSDTVKIGSDGWGEFHVNDGSVSIYVQK

SEQ ID NO: 43927 - protein, 478 aa, Bacillus sp.
NGTIMQYFEWNVPNDGQHWNRLHNNAQNLKNAGITAIWIPPAWKGTSQSDTGYGAYDLYDLGEFNQKGTVRTKYGTKAELERAIRSLKANGIQVYGDVVMNHKAGADFTERVQAVEVNPQNRNQEVSGTYQIEAWTGFNFPGRGNQHSSFKWRWYHFDGTDWDQSRQLSNRIYKFRGKAWDWEVDTEFGNYDYLMYADLDMDHPEVINELNRWGVWYANTLNLDGFRLDAVKHIKFSFMRDWLGHVRGQTGKNLFAVAEYWKNDLGALENYLSKTNWTMSAFDVPLHYNLYQASNSSGNYDMRNLLNGTLVQRHPSHAVTFVDNHDTQPGEALESFVQGWFKPLAYATILTREQGYPQVFYGDYYGIPSDGVPSYRQQIDPLLAARQQYAYGPQHDYLDHPDVIGWTREGDSSHPKSGLATLITDGPGGSKRMYAGLKNAGETWYDITGNRSDTVKIGSDGWGEFHVNGTSVSIYVQK

SEQ ID NO: 43928 - protein, 477 aa, Bacillus sp. (in: firmicutes)
NGTIMQYFEWNVPNDGQHWNRLHNNAQNLKNAGITAIWIPPAWKGTSQNDVGYGAYDLYDLGEFNQKGTVRTKYGTKAELERAIRSLKANGIQVYGDVVMNHKGGADFTERVQAVEVNPQNRNQEVSGTYQIEAWTGFNFPGRGNQHSSFKWRWYHFDGTDWDQSRQLNRIYKFRGKAWDWEVDTENGNYDYLMYADVDMDHPEVINELNRWGVWYANTLNLDGFRLDAVKHIKFSFMRDWLGHVRGQTGKNLFAVAEYWKNDLGALENYLSKTNWTMSAFDVPLHYNLYQASNSSGNYDMRNLLNGTLVQRHPSHAVTFVDNHDTQPGEALESFVQGWFKPLAYATILTREQGYPQVFYGDYYGIPSDGVPSYRQQIDPLLKARQQYAYGRQHDYFDHWDVIGWTREGNASHPNSGLATIMSDGPGGSKWMYVGRQKAGEVWHDMTGNRSGTVTINQDGWGHFFVNGGSVSVWVKR

SEQ ID NO: 43929 - protein, 478 aa, Bacillus sp.
NGTIMQYFEWNVPNDGQHWNRLHNNAQNLKNAGITAIWIPPAWKGTSQSDTGYGAYDLYDLGEFNQKGTVRTKYGTKAELERAIRSLKANGIQVYGDVVMNHKAGADFTEQVQAVEVNPQNRNQEVSGTYQIEAWTGFNFPGRGNQHSSFKWRWYHFDGTDWDQSRQLSNRIYKFRGKAWDWEVDTEFGNYDYLMYADLDMDHPEVINELNRWGVWYANTLNLDGFRLDAVKHIKFSFMRDWLGHVRGQTGKNLFAVAEYWKNDLGALENYLSKTNWTMSAFDVPLHYNLYQASNSSGNYDMRNLLNGTLVQRHPSHAVTFVDNHDTQPGEALESFVQGWFKPLAYATILTREQGYPQVFYGDYYGIPSDGVPSYRQQIDPLLKARQQYAYGPQHDYLDHPDVIGWTREGDSSHPKSGLATLITDGPGGSKRMYAGLKNAGETWYDITGNRSDTVKIGSDGWGEFHVNDGSVSIYVQK

SEQ ID NO: 43930 - protein, 478 aa, Bacillus sp.
NGTIMQYFEWNVPNDGQHWNRLHNNAQNLKNAGITAIWIPPAWKGTSQSDTGYGAYDLYDLGEFNQKGTVRTKYGTKAELERAIRSLKANGIQVYGDVVMNHKAGADQTEQVQAVEVNPQNRNQEVSGTYQIEAWTGFNFPGRGNQHSSFKWRWYHFDGTDWDQSRQLSNRIYKFRGKAWDWEVDTEFGNYDYLMYADLDMDHPEVINELNRWGVWYANTLNLDGFRLDAVKHIKFSFMRDWLGHVRGQTGKNLFAVAEYWKNDLGALENYLSKTNWTMSAFDVPLHYNLYQASNSSGNYDMRNLLNGTLVQRHPSHAVTFVDNHDTQPGEALESFVQGWFKPLAYATILTREQGYPQVFYGDYYGIPSDGVPSYRQQIDPLLKARQQYAYGPQHDYLDHPDVIGWTREGDSSHPKSGLATLITDGPGGSKRMYAGLKNAGETWYDITGNRSDTVKIGSDGWGEFHVNDGSVSIYVQK

SEQ ID NO: 43931 - protein, 478 aa, Bacillus sp.
NGTIMQYFEWNVPNDGQHWNRLHNNAQNLKNAGITAIWIPPAWKGTSQSDTGYGAYDLYDLGEFNQKGTVRTKYGTKAELERAIRSLKANGIQVYGDVVMNHKAGADQTEQVQAVEVNPQNRNQEVSGTYQIEAWTGFNFPGRGNQHSSFKWRWYHFDGTDWDQSRNLSNRIYKFRGKAWDWEVDTEFGNYDYLMYADLDMDHPEVINELNRWGVWYANTLNLDGFRLDAVKHIKFSFMRDWLGHVRGQTGKNLFAVAEYWKNDLGALENYLSKTNWTMSAFDVPLHYNLYQASNSSGNYDMRNLLNGTLVQRHPSHAVTFVDNHDTQPGEALESFVQGWFKPLAYATILTREQGYPQVFYGDYYGIPSDGVPSYRQQIDPLLKARQQYAYGPQHDYLDHPDVIGWTREGDSSHPKSGLATLITDGPGGSKRMYAGLKNAGETWYDITGNRSDTVKIGSDGWGEFHVNDGSVSIYVQK

SEQ ID NO: 43932 - protein, 478 aa, Bacillus sp.
NGTIMQYFEWNVPNDGQHWNRLHNNAQNLKNAGITAIWIPPAWKGTSQSDTGYGAYDLYDLGEFNQKGTVRTKYGTKAELERAIRSLKANGIQVYGDVVMNHKAGADQTEHVQAVEVNPQNRNQEVSGTYQIEAWTGFNFPGRGNQHSSFKWRWYHFDGTDWDQSRNLSNRIYKFRGKAWDWEVDTEFGNYDYLMYADLDMDHPEVINELNRWGVWYANTLNLDGFRLDAVKHIKFSFMRDWLGHVRGQTGKNLFAVAEYWKNDLGALENYLSKTNWTMSAFDVPLHYNLYQASNSSGNYDMRNLLNGTLVQRHPSHAVTFVDNHDTQPGEALESFVQGWFKPLAYATILTREQGYPQVFYGDYYGIPSDGVPSYRQQIDPLLKARQQYAYGPQHDYLDHPDVIGWTREGDSSHPKSGLATLITDGPGGSKRMYAGLKNAGETWYDITGNRSDTVKIGSDGWGEFHVNDGSVSIYVQK

SEQ ID NO: 43933 - protein, 478 aa, Bacillus sp.
NGTIMQYFEWNVPNDGQHWNRLHNNAQNLKNAGITAIWIPPAWKGTSQSDTGYGAYDLYDLGEFNQKGTVRTKYGTKAELERAIRSLKANGIQVYGDVVMNHKAGADQTERVQAVEVNPQNRNQEVSGTYQIEAWTGFNFPGRGNQHSSFKWRWYHFDGTDWDQSRNLSNRIYKFRGKAWDWEVDTEFGNYDYLMYADLDMDHPEVINELNRWGVWYANTLNLDGFRLDAVKHIKFSFMRDWLGHVRGQTGKNLFAVAEYWKNDLGALENYLSKTNWTMSAFDVPLHYNLYQASNSSGNYDMRNLLNGTLVQRHPSHAVTFVDNHDTQPGEALESFVQGWFKPLAYATILTREQGYPQVFYGDYYGIPSDGVPSYRQQIDPLLKARQQYAYGPQHDYLDHPDVIGWTREGDSSHPKSGLATLITDGPGGSKRMYAGLKNAGETWYDITGNRSDTVKIGSDGWGEFHVNDGSVSIYVQK

SEQ ID NO: 43934 - protein, 478 aa, Bacillus sp.
NGTIMQYFEWNVPNDGQHWNRLHNNAQNLKNAGITAIWIPPAWKGTSQSDTGYGAYDLYDLGEFNQKGTVRTKYGTKAELERAIRSLKANGIQVYGDVVMNHKAGADFTEVVQAVEVNPQNRNQEVSGTYQIEAWTGFNFPGRGNQHSSFKWRWYHFDGTDWDQSRQLSNRIYKFRGKAWDWEVDTEFGNYDYLMYADLDMDHPEVINELNRWGVWYANTLNLDGFRLDAVKHIKFSFMRDWLGHVRGQTGKNLFAVAEYWKNDLGALENYLSKTNWTMSAFDVPLHYNLYQASNSSGNYDMRNLLNGTLVQRHPSHAVTFVDNHDTQPGEALESFVQGWFKPLAYATILTREQGYPQVFYGDYYGIPSDGVPSYRQQIDPLLKARQQYAYGPQHDYLDHPDVIGWTREGDSSHPKSGLATLITDGPGGSKRMYAGLKNAGETWYDITGNRSDTVKIGSDGWGEFHVNDGSVSIYVQK

SEQ ID NO: 43935 - protein, 478 aa, Bacillus sp.
NGTIMQYFEWNVPNDGQHWNRLHNNAQNLKNAGITAIWIPPAWKGTSQSDTGYGAYDLYDLGEFNQKGTVRTKYGTKAELERAIRSLKANGIQVYGDVVMNHKAGADFTERVQAVEVNPQNRNQEVSGTYQIEAWTGFNFPGRGNQHSSFKWRWYHFDGTDWDQSRQLSNRIYKFRGKAWDWEVDTEFGNYDYLMYADLDMDHPEVINELNRWGVWYANTLNLDGFRLDAVKHIKFSFMRDWLGHVRGQTGKNLFAVAEYWKNDLGALENYLSKTNWTMSAFDVPLHYNLYQASNSSGNYDMRNLLNGTLVQRHPSHAVTFVDNHDTQPGEALESFVQGWFKPLAYATILTREQGYPQVFYGDYYGIPSDGVPSYRQQIDPLLAARQQYAYGPQHDYLDHPDVIGWTREGDSSHPKSGLATLITDGPGGSKRMYAGLKNAGETWYDITGNRSDTVKIGSDGWGEFHVNNGSVSIYVQK

SEQ ID NO: 43936 - protein, 478 aa, Bacillus sp. (in: firmicutes)
NGTIMQYFEWNVPNDGQHWNRLHNNAQNLKNAGITAIWIPPAWKGTSQSDTGYGAYDLYDLGEFNQKGTVRTKYGTKAELERAIRSLKANGIQVYGDVVMNHKAGADFTERVQAVEVNPQNRNQEVSGTYQIEAWTGFNFPGRGNQHSSFKWRWYHFDGTDWDQSHQLANRIYKFRGKAWDWEVDTEFGNYDYLMYADLDMDHPEVINELNRWGVWYANTLNLDGFRLDAVKHIKFSFMRDWLGHVRGQTGKNLFAVAEYWKNDLGALENYLSKTNWTMSAFDVPLHYNLYQASNSSGNYDMRNLLNGTLVQRHPSHAVTFVDNHDTQPGEALESFVQGWFKPLAYATILTREQGYPQVFYGDYYGIPSDGVPSYRQQIDPLLAARQQYAYGRQHDYFDHWDVIGWTREGNASHPNSGLATIMSDGPGGSKWMYVGRQKAGEVWHDMTGNRSGTVTINQDGWGHFFVNGGSVSVWVKR

SEQ ID NO: 43937 - protein, 478 aa, Bacillus sp. (in: firmicutes)
NGTMMQYFEWNVPNDGQHWNRLHNNAQNLKNAGITAIWIPPAWKGTSQSDTGYGAYDLYDLGEFNQKGTVRTKYGTKAELERAIRSLKANGIQVYGDVVMNHKAGADGTEHVQAVEVNPQNRNQEVSGTYQIEAWTGFNFPGRGNQHSSFKWRWYHFHGTDWDESHKLSNRIYKFRTKAWDWEVDTEFGNYDYLLYADLDMDHPEVINELNRWGVWYANTLNLDGFRLDAVKHIKFSFLRDWLGHVRGQTGKNLFAVAEYWKNDLGAVENYLSKTNWTMSVFDVPLHYNLYQASNSSGNYDMRNLLNGTVVHRHPSKAVTFVDNHDTQPGEALESFVQGWFKPLAYATILTREQGYPSVFYGDYYGIPSDGVPSYRQQIDPLLAARQQYAYGRQHDYFDHWDVIGWTREGNASHPNSGLATIMSDGPGGSKWMYVGRQKAGEVWHDMTGNRSGTVTINQDGWGHFFVNGGSVSVWVKR

SEQ ID NO: 43938 - protein, 478 aa, Bacillus sp.
NGTIMQYFEWNVPNDGQHWNRLHNNAQNLKNAGITAIWIPPAWKGTSQSDTGYGAYDLYDLGEFNQKGTVRTKYGTKAELERAIRSLKANGIQVYGDVVMNHKAGADQTERVQAVEVNPDNRNQEVSGTYQIEAWTGFNFPGRGNQHSSFKWRWYHFDGTDWDQSRQLSNRIYKFRGKAWDWEVDTEFGNYDYLMYADLDMDHPEVINELNRWGVWYANTLNLDGFRLDAVKHIKFSFMRDWLGHVRGQTGKNLFAVAEYWKNDLGALENYLSKTNWTMSAFDVPLHYNLYQASNSSGNYDMRNLLNGTLVQRHPSHAVTFVDNHDTQPGEALESFVQGWFKPLAYATILTREQGYPQVFYGDYYGIPSDGVPSYRQQIDPLLKARQQYAYGPQHDYLDHPDVIGWTREGDSSHPKSGLATLITDGPGGSKRMYAGLKNAGETWYDITGNRSDTVKIGSDGWGEFHVNDGSVSIYVQK

SEQ ID NO: 43939 - protein, 478 aa, Bacillus sp. (in: firmicutes)
NGTIMQYFEWNVPNDGQHWNRLHNNAQNLKNAGITAIWIPPAWKGTSQSDTGYGAYDLYDLGEFNQKGTVRTKYGTKAELERAIRSLKANGIQVYGDVVMNHKAGADFTERVQAVEVNPQNRNQEVSGEYQIEAWTGFNFPGRGNQHSSFKWRWYHFDGTDWDQSRQLSNRIYKFRGKAWDWEVDTEFGNYDYLMYADLDMDHPEVINELNRWGVWYANTLNLDGFRLDAVKHIKFSFMRDWLGHVRGQTGKNLFAVAEYWKNDLGALENYLSKTNWTMSAFDVPLHYNLYQASNSSGNYDMRNLLNGTLVQRHPSHAVTFVDNHDTQPGEALESFVQGWFKPLAYATILTREQGYPQVFYGDYYGIPSDGVPSYRQQIDPLLAARQQYAYGRQHDYFDHWDVIGWTREGNASHPNSGLATIMSDGPGGSKWMYVGRQKAGEVWHDMTGNRSGTVTINQDGWGHFFVNKGSVSVWVKR

SEQ ID NO: 43940 - protein, 478 aa, Bacillus sp.
NGTIMQYFEWNVPNDGQHWNRLHNNAQNLKNAGITAIWIPPAWKGTSQSDTGYGAYDLYDLGEFNQKGTVRTKYGTKAELERAIRSLKANGIQVYGDVVMNHKAGADFTERVQAVEVNPQNRNQEVSGTYQIEAWTGFNFPGRGNQHSSFKWRWYHFDGTDWDQSRQLSNRIYKFRGKAWDWEVDTEFGNYDYLMYADLDMDHPEVINELNRWGVWYANTLNLDGFRLDAVKHIKFSFMRDWLGHVRGQTGKNLFAVAEYWKNDLGALENYLSKTNWTMSAFDVPLHYNLYQASNSSGNYDMRNLLNGTLVQRHPSHAVTFVDNHDTQPGEALESFVQGWFKPLAYATILTREQGYPQVFYGDYYGIPSDGVPSYRQQIDPLLAARQQYAYGPQHDYLDHPDVIGWTREGDSSHPKSGLATLITDGPGGSKRMYAGLKNAGETWYDITGNRSDTVKIGSDGWGEFHVNKGSVSIYVQK

SEQ ID NO: 43941 - protein, 478 aa, Bacillus sp.
NGTIMQYFEWNVPNDGQHWNRLHNNAQNLKNAGITAIWIPPAWKGTSQSDTGYGAYDLYDLGEFNQKGTVRTKYGTKAELERAIRSLKANGIQVYGDVVMNHKAGADFTERVQAVEVNPQNRNQEVSGTYQIEAWTGFNFPGRGNQHSSFKWRWYHFDGTDWDQSRQLSNRIYKFRGKAWDWEVDTEFGNYDYLMYADLDMDHPEVINELNRWGVWYANTLNLDGFRLDAVKHIKFSFMRDWLGHVRGQTGKNLFAVAEYWKNDLGALENYLSKTNWTMSAFDVPLHYNLYQASNSSGNYDMRNLLNGTLVQRHPSHAVTFVDNHDTQPGEALESFVQGWFKPLAYATILTREQGYPQVFYGDYYGIPSDGVPSYRQQIDPLLAARQQYAYGPQHDYLDHPDVIGWTREGDSSHPKSGLATLITDGPGGSKRMYAGLKNAGETWYDITGNRSDTVKIGSDGWGEFHVNYGSVSIYVQK

SEQ ID NO: 43942 - protein, 477 aa, Bacillus sp.
NGTIMQYFEWNVPNDGQHWNRLHNNAQNLKNAGITAIWIPPAWKGTSQNDVGYGAYDLYDLGEFNQKGTVRTKYGTKAELERAIRSLKANGIQVYGDVVMNHKGGADFTERVQAVEVNPQNRNQEVSGTYQIEAWTGFNFPGRGNQHSSFKWRWYHFDGTDWDQSRQLARIYKFRGKAWDWEVDTENGNYDYLMYADVDMDHPEVINELNRWGVWYANTLNLDGFRLDAVKHIKFSFMRDWLGHVRGQTGKNLFAVAEYWKNDLGALENYLSKTNWTMSAFDVPLHYNLYQASNSSGNYDMRNLLNGTLVQRHPSHAVTFVDNHDTQPGEALESFVQGWFKPLAYATILTREQGYPQVFYGDYYGIPSDGVPSYRQQIDPLLKARQQYAYGRQHDYFDHWDVIGWTREGNASHPNSGLATIMSDGPGGSKWMYVGRQKAGEVWHDMTGNRSGTVTINQDGWGHFFVNGGSVSVWVKR

SEQ ID NO: 43943 - protein, 477 aa, Bacillus sp.
NETMMQYFEWDLPNDGTLWTKVKNEAANLSSLGITALWLPPAYKGTSQSDVGYGVYDLYDLGEFNQKGTIRTKYGTKTQLERAIRSLKANGIQVYADVVFNHKAGADGTEFVDAVEVDPSNRNQEVSGTYQIEAWTKFDFPGRGNTYSSFKWRWYHFDGTDWDESRKLNRIYKFRGKAWDWEVDTENGNYDYLMFADLDMDHPEVVTELKNWGTWYVNTTNIDGFRLDAVKHIKFSFMRDWLGHVRGQTGKNLFAVGEFWSYDVNKLHNYITKTNGSMSLFDAPLHNNFYTASKSSGYFDMRYLLNNTLMKDQPSLAVTLVDNHDTQPGQSLQSWVEPWFKPLAYAFILTRQEGYPCVFYGDYYGIPKYNIPGLKSKIDPLLIARRDYAYGTQRDYIDHQDIIGWTREGIDTKPNSGLAALITDGPGGSKWMYVGKKHAGKVFYDLTGNRSDTVTINADGWGEFKVNGGSVSIWVAK

SEQ ID NO: 43944 - protein, 477 aa, Bacillus sp.
NETMMQYFEWDLPNDGTLWTKVKNEAANLSSLGITALWLPPAYKGTSQSDVGYGVYDLYDLGEFNQKGTIRTKYGTKTQYIQAIQAAKAAGMQVYADVVFNHKAGADQTEFVDAVEVDPSNRNQEVSGTYQIEAWTKFDFPGRGNTYSSFKWRWYHFDGTDWDESRKLNRIYKFRGKAWDWEVDTENGNYDYLMFADLDMDHPEVVTELKNWGTWYVNTTNIDGFRLDAVKHIKFSFMRDWLGHVRGQTGKNLFAVGEFWSYDVNKLHNYITKTNGSMSLFDAPLHNNFYTASKSSGYFDMRYLLNNTLMKDQPSLAVTLVDNHDTQPGEALESFVQGWFKPLAYAFILTRQEGYPCVFYGDYYGIPKYNIPGLKSKIDPLLIARRDYAYGTQRDYIDHQDIIGWTREGIDTKPNSGLAALITDGPGGSKWMYVGKKHAGKVFYDLTGNRSDTVTINADGWGEFKVNGGSVSIWVAK

SEQ ID NO: 43945 - protein, 477 aa, Bacillus sp.
NETMMQYFEWDLPNDGTLWTKVKNEAANLSSLGITALWLPPAYKGTSQSDVGYGVYDLYDLGEFNQKGTIRTKYGTKTQYIQAIQAAKAAGMQVYADVVFNHKAGADGTEFVDAVEVDPSNRNQETSGTYQIQAWTKFDFPGRGNTYSSFKWRWYHFDGTDWDESRKLNRIYKFRGKAWDWEVDTENGNYDYLMFADLDMDHPEVVTELKNWGTWYVNTTNIDGFRLDAVKHIKYSFFRDWLTYVRNQTGKNLFAVGEFWKYDVNALHNYITKTNGSMSLFDAPLHNNFYTASKSSGYFDMRYLLNNTLMKDQPSLAVTLVDNHDTQPGQSLQSWVEPWFKPLAYAFILTRQEGYPCVFYGDYYGIPKYNIPGLKSKIDPLLIARRDYAYGTQRDYIDHQDIIGWTREGIDTKPNSGLAALITDGPGGSKWMYVGKKHAGKVFYDLTGNRSDTVTINADGWGEFKVNGGSVSIWVAK

SEQ ID NO: 43946 - protein, 480 aa, Bacillus amyloliquefaciens
NGTLMQYFEWYTPNDGQHWKRLQNDAEHLSDIGITAVWIPPAYKAISQADVGYGAYDLYDLGEFWQKGTVRTKYGTKGELQSAIKSLHSRDINVYGDVVINHKAGADATEDVTAVEVDPADRNRVISGEHLIKAWTHFHFPGRGSTYSDFKWWWYHFDGTDWDESRKLNRIYLFQGKTWDWPVSNEFGNYDYLMYADFDYDHPDVVAEIKRWGTWYANELQLDGFRLDAVKHIKFSFLRDWVNHVREKTGKEMFTVAEYWSNDLGALENYLNKTNFNHSVFDVPLHYQFHAASTQGGGYDMRKLLNGTVVSKHPLKSVTFVDNHDTQPGQSLESTVQTWFKPLAYAFILTRESGYPQVFYGDMYGTKGDSQREIPALKHKIEPILKARKQYAYGAQHDYFDHHDIVGWTREGDSSVANSGLAALITDGPGGAKRMYVGRQNAGETWHDITGNRSEPVVINSEGWGEFHVNGGSVSIYVQR

SEQ ID NO: 43947 - protein, 480 aa, Bacillus licheniformis
NGTLMQYFEWYTPNDGQHWKRLQNDAEHLSDIGITAVWIPPAYKAISQADVGYGAYDLYDLGEFHQKGTVRTKYGTKGELQSAIKSLHSRDINVYGDVVINHKAGADATEDVTAVEVDPADRNRVISGEHLIKAWTHFWFPGRGSTYSDFKWYWYHFDGTDWDESRKLNRIYLFQGKTWDWPVSNEFGNYDYLMYADFDYDHPDVVAEIKRWGTWYANELQLDGFRLDAVKHIKFSFLRDWVNHVREKTGKEMFTVAEYWSNDLGALENYLNKTNFNHSVFDVPLHYQFHAASTQGGGYDMRKLLNGTVVSKWPLKSVTFVDNHDTQPGQSLESTVQTWFKPLAYAFILTRESGYPQVFYGDMYGTKGDSQREIPALKHKIEPILKARKQYAYGAQHDYFDHHDIVGWTREGDSSVANSGLAALITDGPGGAKWMYVGRQNAGETWHDITGNRSEPVVINSEGWGEFHVNGGSVSIYVQR

SEQ ID NO: 43948 - protein, 480 aa, Bacillus licheniformis
NGTLMQYFEWYTPNDGQHWKRLQNDAEHLSDIGITAVWIPPAYKAISQADVGYGAYDLYDLGEFHQKGTVRTKYGTKGELQSAIKSLHSRDINVYGDVVINHKAGADATEDVTAVEVDPADRNRVISGEHLIKAWTHFHFPGRGSTYSDFKWYWYHFDGTDWDESRKLNRIYLFQGKTWDWPVSNEFGNYDYLMYADFDYDHPDVVAEIKRWGTWYANELQLDGFRLDAVKHIKFSFLRDWVNHVREKTGKEMFTVAEYWSNDLGALENYLNKTNFNHSVFDVPLHYQFHAASTQGGGYDMRKLLNGTVVSKWPLKSVTFVDNHDTQPGQSLESTVQTWFKPLAYAFILTRESGYPQVFYGDMYGTKGDSQREIPALKHKIEPILKARKQYAYGAQHDYFDHHDIVGWTREGDSSVANSGLAALITDGPGGAKWMYVGRQNAGETWHDITGNRSEPVVINSEGWGEFHVNGGSVSIYVQR

SEQ ID NO: 43949 - protein, 477 aa, Bacillus sp.
NETMMQYFEWDLPNDGTLWTKVKNEAANLSSLGITALWLPPAYKGTSQSDVGYGVYDLYDLGEFNQKGTIRTKYGTKTQYIQAIQAAKAAGMQVYADVVFNHKAGADQTEFVDAVEVDPSNRNQETSGTYQIQAWTKFDFPGRGNTYSSFKWRWYHFDGTDWDESRKLNRIYKFRGKAWDWEVDTENGNYDYLMFADLDMDHPEVVTELKNWGTWYVNTTNIDGFRLDAVKHIKFSFMRDWLTYVRNQTGKNLFAVGEFWSYDVNKLHNYITKTNGSMSLFDAPLHNNFYTASKSSGYFDMRYLLNNTLMKDQPSLAVTLVDNHDTQPGEALESFVQGWFKPLAYAFILTRQEGYPCVFYGDYYGIPKYNIPGLKSKIDPLLIARRDYAYGTQRDYIDHQDIIGWTREGIDTKPNSGLAALITDGPGGSKWMYVGKKHAGKVFYDLTGNRSDTVTINADGWGEFKVNGGSVSIWVAK

SEQ ID NO: 43950 - protein, 477 aa, Bacillus sp.
NETMMQYFEWDLPNDGTLWTKVKNEAANLSSLGITALWLPPAYKGTSQSDVGYGVYDLYDLGEFNQKGTIRTKYGTKTQLERAIRSLKANGIQVYADVVFNHKAGADGTEFVDAVEVDPSNRNQETSGTYQIQAWTKFDFPGRGNTYSSFKWRWYHFDGTDWDESRKLNRIYKFRGKAWDWEVDTENGNYDYLMFADLDMDHPEVVTELKNWGTWYVNTTNIDGFRLDAVKHIKFSFMRDWLTYVRNQTGKNLFAVGEFWSYDVNKLHNYITKTNGSMSLFDAPLHNNFYTASKSSGYFDMRYLLNNTLMKDQPSLAVTLVDNHDTQPGQSLQSWVEPWFKPLAYAFILTRQEGYPCVFYGDYYGIPKYNIPGLKSKIDPLLIARRDYAYGTQRDYIDHQDIIGWTREGIDTKPNSGLAALITDGPGGSKWMYVGKKHAGKVFYDLTGNRSDTVTINADGWGEFKVNGGSVSIWVAK

SEQ ID NO: 43951 - protein, 480 aa, Bacillus licheniformis
NGTLMQYFEWYTPNDGQHWKRLQNDAEHLSDIGITAVWIPPAYKAISQADVGYGAYDLYDLGEFWQKGTVRTKYGTKGELQSAIKSLHSRDINVYGDVVINHKAGADATEDVTAVEVDPADRNRVISGEHLIKAWTHFHFPGRGSTYSDFKWYWYHFDGTDWDESRKLNRIYLFQGKTWDWPVSNEFGNYDYLMYADFDYDHPDVVAEIKRWGTWYANELQLDGFRLDAVKHIKFSFLRDWVNHVREKTGKEMFTVAEYWSNDLGALENYLNKTNFNHSVFDVPLHYQFHAASTQGGGYDMRKLLNGTVVSKHPLKSVTFVDNHDTQPGQSLESTVQTWFKPLAYAFILTRESGYPQVFYGDMYGTKGDSQREIPALKHKIEPILKARKQYAYGAQHDYFDHHDIVGWTREGDSSVANSGLAALITDGPGGAKRMYVGRQNAGETWHDITGNRSEPVVINSEGWGEFHVNGGSVSIYVQR

SEQ ID NO: 43952 - protein, 478 aa, Bacillus sp. (in: firmicutes)
NGTIMQYFEWNVPNDGQHWNRLHNNAQNLKNAGITAIWIPPAWKGTSQNDVGYGAYDLYDLGEFNQKGTVRTKYGTKAELERAIRSLKANGIQVYGDVAMNHKGGADFTERVQAVEVNPQNRNQEVSGTYQIEAWTGFNFPGRGNQHSSFKWRWYHFDGTDWDQSRQLANRIYKFRGKAWDWEVDTEFGNYDYLMYADVDMDHPEVINELNRWGVWYANTLNLDGFRLDAVKHIKFSFMRDWLGHVRGQTGKNLFAVAEYWKNDLGALENYLSKTNWTMSAFDVPLHYNLYQASNSSGNYDMRNLLNGTLVQRHPSHAVTFVDNHDTQPGEALESFVQGWFKPLAYATILTREQGYPSVFYGDYYGIPSDGVPSYRQQIDPLLKARQQYAYGRQHDYFDHWDVIGWTREGNASHPNSGLATIMSDGPGGSKWMYVGRQKAGEVWHDMTGNRSGTVTINQDGWGHFFVNGGSVSVWVKR

SEQ ID NO: 43953 - protein, 478 aa, Bacillus sp. (in: firmicutes)
NGTIMQYFEWNVPNDGQHWNRLHNNAQNLKNAGITAIWIPPAWKGTSQNDVGYGAYDLYDLGEFNQKGTVRTKYGTKAELERAIRSLKANGIQVYGDVVMNHKGGADFTERVQAVEVNPQNRNQEVSGTYQIEAWTGFNFPGRGNQHSSFKWRWYHFDGTDWDQSRQLANRIYKFRGKAWDWEVDTEFGNYDYLMYADVDMDHPEVINELNRWGVWYANTLNLDGFRLDAVKHIKFSFMRDWLGHVRGQTGKNLFAVAEYWKNDLGALENYLSKTNWTMSAFDVPLHYNLYQASNSSGNYDMRNLLNGTLVQRHPSHAVTFVDNHDTQPDEALESFVQGWFKPLAYATILTREQGYPSVFYGDYYGIKSYGVPSYRQQIDPLLKARQQYAYGRQHDYFDHWDVIGWTREGNASHPNSGLATIMSDGPGGSKWMYVGRQKAGEVWHDMTGNRSGTVTINQDGWGHFFVNGGSVSVWVKR

SEQ ID NO: 43954 - protein, 478 aa, Bacillus sp.
NGTIMQYFEWNVPNDGQHWNRLHNNAQNLKNAGITAIWIPPAWKGTSQNDVGYGAYDLYDLGEFNQKGTVRTKYGTKAELERAIRSLKANGIQVYGDVVMNHKGGADFTERVQAVEVNPQNRNQEVSGTYQIEAWTGFNFPGRGNQHSSFKWRWYHFDGTDWDQSRQLANRIYKFDGKAWDWEVDTEFGNYDYLMYADVDMDHPEVINELNRWGVWYANTLNLDGFRLDAVKHIKFSFMRDWLGHVRGQTGKNLFAVAEYWKNDLGALENYLSKTNWTMSAFDVPLHYNLYQASNSSGNYDMRNLLNGTLVQRHPSHAVTFVDNHDTQPGEALESFVQGWFKPLAYATILTREQGYPQVFYGDYYGIPSDGVPSYRQQIDPLLKARQQYAYGRQHDYFDHWDVIGWTREGNASHPNSGLATIMSDGPGGSKWMYVGRQKAGEVWHDMTGNRSGTVTINQDGWGHFFVNGGSVSVWVKR

SEQ ID NO: 43955 - protein, 478 aa, Bacillus sp. (in: firmicutes)
NGTIMQYFEWNVPNDGQHWNRLHNNAQNLKNAGITAIWIPPAWKGTSQNDVGYGAYDLYDLGEFNQKGTVRTKYGTKAELERAIRSLKANGIQVYGDVVMNHKGGADFTERVQAVEVNPQNRNQEVSGTYQIEAWTGFNFPGRGNQHSSFKWRWYHFDGTDWDQSRQLANRIYKFRGKAWDWEVDTENGNYDYLMYADVDMDHPEVINELNRWGVWYANTLNLDGFRLDAVKHIKFSFMRDWLGHVRGQTGKNLFAVAEFWKNDLGALENYLSKTNWTMSAFDAPLHYNLYQASNSSGNYDMRNLLNGTLVQRHPSHAVTLVDNHDTQPGEALESFVQGWFKPLAYATILTREQGYPCVFYGDYYGIPSDGVPSYRQQIDPLLKARQQYAYGRQHDYFDHWDVIGWTREGNASHPNSGLATIMSDGPGGSKWMYVGRQKAGEVWHDMTGNRSGTVTINQDGWGHFFVNGGSVSVWVKR

SEQ ID NO: 43956 - protein, 478 aa, Bacillus sp. (in: firmicutes)
NGTIMQYFEWNVPNDGQHWNRLHNNAQNLKNAGITAIWIPPAWKGTSQNDVGYGAYDLYDLGEFNQKGTVRTKYGTKAELERAIRSLKANGIQVYGDVVMNHKGGADFTERVQAVEVNPQNRNQEVSGTYQIEAWTGFNFPGRGNQHSSFKWRWYHFDGTDWDQSRQLANRIYKFRGKAWDWEVDTENGNYDYLMYADVDMDHPEVINELNRWGVWYANTLNLDGFRLDAVKHIKFSFMRDWLGHVRGQTGKNLFAIAEYWKNDLGALENYLSKTNWTMSAFDVPLHYNLYQASNSSGNYDMRNLLNGTLVQRHPSHAVTFVDNHDTQPGEALESFVQGWFKPLAYATILTREQGYPCVFYGDYYGIPSDGVPSYRQQIDPLLKARQQYAYGRQHDYFDHWDVIGWTREGNASHPNSGLATIMSDGPGGSKWMYVGRQKAGEVWHDMTGNRSGTVTINQDGWGHFFVNGGSVSVWVKR

SEQ ID NO: 43957 - protein, 478 aa, Bacillus sp. (in: firmicutes)
NGTIMQYFEWNVPNDGQHWNRLHNNAQNLKNAGITAIWIPPAWKGTSQNDVGYGAYDLYDLGEFNQKGTVRTKYGTKAELERAIRSLKANGIQVYGDVVMNHKGGADFTERVQAVEVNPQNRNQEVSGTYQIEAWTGFNFPGRGNQHSSFKWRWYHFDGTDWDQSHQLANRIYKFRGKAWDWEVDTENGNYDYLMYADVDMDHPEVINELNRWGVWYANTLNLDGFRLDAVKHIKFSFMRDWLGHVRGQTGKNLFAVAEYWKNDLGALENYLSKTNWTMSAFDVPLHYNLYQASNSSGNYDMRNLLNGTLVQRHPSHAVTFVDNHDTQPGEALESFVQGWFKPLAYATILTREQGYPCVFYGDYYGIPSDGVPSYRQQIDPLLKARQQYAYGRQHDYFDHWDVIGWTREGNASHPNSGLATIMSDGPGGSKWMYVGRQKAGEVWHDMTGNRSGTVTINQDGWGHFFVNGGSVSVWVKR

SEQ ID NO: 43958 - protein, 478 aa, Bacillus sp. (in: firmicutes)
NGTIMQYFEWNVPNDGQHWNRLHNNAQNLKNAGITAIWIPPAWKGTSQNDVGYGAYDLYDLGEFNQKGTVRTKYGTKAELERAIRSLKANGIQVYGDVVMNHKGGADFTERVQAVEVNPQNRNQEVSGPYQIEAWTGFNFPGRGNQHSSFKWRWYHFDGTDWDQSRQLANRIYKFRGKAWDWEVDTEFGNYDYLMYADVDMDHPEVINELNRWGVWYANTLNLDGFRLDAVKHIKFSFMRDWLGHVRGQTGKNLFAVAEYWKNDLGALENYLSKTNWTMSAFDVPLHYNLYQASNSSGNYDMRNLLNGTLVQRHPSHAVTFVDNHDTQPGEALESFVQGWFKPLAYATILTREQGYPQVFYGDYYGIPSDGVPSYRQQIDPLLKARQQYAYGRQHDYFDHWDVIGWTREGNASHPNSGLATIMSDGPGGSKWMYVGRQKAGEVWHDMTGNRSGTVTINQDGWGHFFVNGGSVSVWVKR

SEQ ID NO: 43959 - protein, 478 aa, Bacillus sp. (in: firmicutes)
NGTIMQYFEWNVPNDGQHWNRLHNNAQNLKNAGITAIWIPPAWKGTSQNDVGYGAYDLYDLGEFNQKGTVRTKYGTKAELERAIRSLKANGIQVYGDVVMNHKGGADFTERVQAVEVNPQNRNQEVSGTYQIEAWTGFNFPGRGNQHSSFKWRWYHFDGTDWDQSRQLANRIYKFRGKAWDWEVDTENGNYDYLMYADVDMDHPEVINELNRWGVWYANTLNLDGFRLDAVKHIKFSFMRDWLGHVRGQTGKNLFATGEFWKNDLGALENYLSKTNWTMSAFDAPLHYNLYQASNSSGNYDMRNLLNGTLVQRHPSHAVTLVDNHDTQPGEALESFVQGWFKPLAYATILTREQGYPCVFYGDYYGIPSDGVPSYRQQIDPLLKARQQYAYGRQHDYFDHWDVIGWTREGNASHPNSGLATIMSDGPGGSKWMYVGRQKAGEVWHDMTGNRSGTVTINQDGWGHFFVNGGSVSVWVKR

SEQ ID NO: 43960 - protein, 478 aa, Bacillus sp. (in: firmicutes)
NGTMMQYFEWNVPNDGQHWNRLHNNAQNLKNAGITAIWIPPAWKGTSQNDVGYGAYDLYDLGEFNQKGTVRTKYGTKAELERAIRSLKANGIQVYGDVVMNHKGGADFTERVQAVEVNPQNRNQEVSGTYQIEAWTGFNFPGRGNQHSSFKWRWYHFDGTDWDQSLQLANRIYKFRGKAWDWEVDTEFGNYDYLMYADVDMDHPEVINELNRWGVWYANTLNLDGFRLDAVKHIKFSFLRDWLGHVRGQTGKNLFAVAEYWMNDLGALENYLSKTNRTMSAFDVPLHYNLNQASNSSGNYDMRNLLNGTLVQRHPSHAVTFVDNHDTQPGEALESFVQGWFKPLAYATILTREQGYPSVFYGDYYGIPSDGVPSYRQQIDPLLKARQQYAYGRQHDYFDHWDVIGWTREGNASHPNSGLATIMSDGPGGSKWMYVGRQKAGEVWHDMTGNRSGTVTINQDGWGHFFVNGGSVSVWVKR

SEQ ID NO: 43961 - protein, 478 aa, Bacillus sp.
NGTIMQYFEWNVPNDGQHWNRLHNNAQNLKNAGITAIWIPPAWKGTSQNDVGYGAYDLYDLGEFNQKGTVRTKYGTKAELERAIRSLKANGIQVYGDVVMNHKGGADFTERVQAVEVNPQNRNQEVSGTYQIEAWTGFNFPGRGNQHSSFKWRWYHFDGTDWDQSRQLANRIYKFRGKAWDWEVDTEFGNYDYLLYADLDMDHPEVINELNRWGVWYANTLNLDGFRLDAVKHIKFSFMRDWLGHVRGQTGKNLFAVAEYWKNDLGALENYLSKTNWTMSAFDVPLHYNLYQASNSSGNYDMRNLLNGTLVQKHPSHAVTFVDNHDTQPGEALESFVQGWFKPLAYATILTREQGYPQVFYGDYYGIPSDGVPSYRQQIDPLLKARQQYAYGRQHDYFDHWDVIGWTREGNASHPNSGLATIMSDGPGGSKWMYVGRQKAGEVWHDMTGNKSGTVTINQDGWGHFFVNGGSVSVWVKR

SEQ ID NO: 43962 - protein, 478 aa, Bacillus sp. (in: firmicutes)
NGTIMQYFEWNVPNDGQHWNRLHNNAQNLKNAGITAIWIPPAWKGTSQNDVGYGAYDLYDLGEFNQKGTVRTKYGTKAELERAIRSLKANGIQVYGDVVMNHKGGADFTERVQAVEVNPQNRNQEVSGTYQIEAWTGFNFPGRGNQHSSFKWRWYHFDGTDWDQSRQLANRIYKFRGKDWDWEVDTEFGNYDYLMYADVDMDHPEVINELNRWGVWYANTLNLDGFRLDAVKHIKFSFMRDWLGHVRGQTGKNLFAVAEYWKNDLGALENYLSKTNWTMSAFDVPLHYNLYQASNSSGNYDMRNLLNGTLVQRHPSHAVTFVDNHDTQPGEALESFVQGWFKPLAYATILTREQGYPQVFYGDYYGIPSDGVPSYRQQIDPLLKARQQYAYGRQHDYFDHWDVIGWTREGNASHPNSGLATIMSDGPGGSKWMYVGRQKAGEVWHDMTGNRSGTVTINQDGWGHFFVNGGSVSVWVKR

SEQ ID NO: 43963 - protein, 478 aa, Bacillus sp.
NGTIMQYFEWNVPNDGQHWNRLHNNAQNLKNAGITAIWIPPAWKGTSQNDVGYGAYDLYDLGEFNQKGTVRTKYGTKAELERAIRSLKANGIQVYGDVVMNHKGGADFTERVQAVEVNPQNRNQEVSGTYQIEAWTGFNFPGRGNQHSSFKWRWYHFDGTDWDQSRQLANRIYKFRGKAWDWEVDTEFGNYDYLMYADYDMDHPEVINELNRWGVWYANTLNLDGFRLDAVKHIKFSFMRDWLGHVRGQTGKNLFAVAEYWKNDLGALENYLSKTNWTMSAFDVPLHYNLYQASNSSGNYDMRNLLNGTLVQKHPSHAVTFVDNHDTQPGEALESFVQGWFKPLAYATILTREQGYPQVFYGDYYGIPSDGVPSYRQQIDPLLKARQQYAYGRQHDYFDHWDVIGWTREGNASHPNSGLATIMSDGPGGSKWMYVGRQKAGEVWHDMTGNKSGTVTINQDGWGHFFVNGGSVSVWVKR

SEQ ID NO: 43964 - protein, 478 aa, Bacillus sp. (in: firmicutes)
NGTIMQYFEWNVPNDGQHWNRLHNNAQNLKNAGITAIWIPPAWKGTSQNDVGYGAYDLYDLGEFNQKGTVRTKYGTKAELERAIRSLKANGIQVYGDVVMNHKGGADFTERVQAVEVNPQNRNQEVSGTYQIEAWTGFNFPGRGNQHSSFKWRWYHFDGTDWDQSLQLANRIYKFRGKAWDWEVDTENGNYDYLMYADVDMDHPEVINELNRWGVWYANTLNLDGFRLDAVKHIKFSFMRDWLGHVRGQTGKNLFAVAEYWKNDLGALENYLSKTNWTMSAFDVPLHYNLYQASHSSGNYDMRNLLNGTLVQRHPSHAVTFVDNHDTQPGEALESFVQGWFKPLAYATILTREQGYPCVFYGDYYGIPSDGVPSYRQQIDPLLKARQQYAYGRQHDYFDHWDVIGWTREGNASHPNSGLATIMSDGPGGSKWMYVGRQKAGEVWHDMTGNRSGTVTINQDGWGHFFVNGGSVSVWVKR

SEQ ID NO: 43965 - protein, 478 aa, Bacillus sp. (in: firmicutes)
NGTIMQYFEWNVPNDGQHWNRLHNNAQNLKNAGITAIWIPPAWKGTSQNDVGYGAYDLYDLGEFNQKGTVRTKYGTKAELERAIRSLKANGIQVYGDVVMNHKGGADFTERVQAVEVNPQNRNQEVSGTYQIEAWTGFNFPGRGNQHSSFKWRWYHFDGTDWDQSRQLANRIYKFRGKAWDWEVDTENGNYDYLMYADVDMDHPEVINELNRWGVWYANTLNLDGFRLDAVKHIKFSFMRDWLGHVRGQTGKNLFAIGEFWKNDLGALENYLSKTNWTMSAFDVPLHYNLYQASNSSGNYDMRNLLNGTLVQRHPSHAVTFVDNHDTQPGEALESFVQGWFKPLAYATILTREQGYPCVFYGDYYGIPSDGVPSYRQQIDPLLKARQQYAYGRQHDYFDHWDVIGWTREGNASHPNSGLATIMSDGPGGSKWMYVGRQKAGEVWHDMTGNRSGTVTINQDGWGHFFVNGGSVSVWVKR

SEQ ID NO: 43966 - protein, 478 aa, Bacillus sp.
NGTIMQYFEWNVPNDGQHWNRLHNNAQNLKNAGITAIWIPPAWKGTSQNDVGYGAYDLYDLGEFNQKGTVRTKYGTKAELERAIRSLKANGIQVYGDVVMNHKGGADFTERVQAVEVNPQNRNQEVSGTYQIEAWTGFNFPGRGNQHSSFKWRWYHFDGTDWDQSRQLANRIYKFRGKAWDWEVDTENGNYDYLMYADVDMDHPEVINELNRWGVWYANTLNLDGFRLDAVKHIKFSFMRDWLGHVRGQTGKNLFAVAEYWXNDLGALENYLSKTNWTMSAFDVPLHYNLYQASNSSGNYDMRNLLNGTLVQRHPSHAVTFVDNHDTQPGEALESFVQGWFKPLAYATILTREQGYPQVFYGDYYGIPSDGVPSYRQQIDPLLKARQQYAYGRQHDYFDHWDVIGWTREGNASHPNSGLATIMSDGPGGSKWMYVGRQKAGEVWHDMTGNRSGTVTINQDGWGHFFVNGGSVSVWVKR

SEQ ID NO: 43967 - protein, 478 aa, Bacillus sp. (in: firmicutes)
NGTIMQYFEWNVPNDGQHWNRLHNNAQNLKNAGITAIWIPPAWKGTSQNDVGYGAYDLYDLGEFNQKGTVRTKYGTKAELLRAIRSLKANGIQVYGDVVMNHKGGADFTERVQAVEVNPQNRNQEVSGTYQIEAWTGFNFPGRGNQHSSFKWRWYHFDGTDWDQSLQLANRIYKFRGKAWDWEVDTENGNYDYLMYADVDMDHPEVINELNRWGVWYANTLNLDGFRLDAVKHIKFSFMRDWLGHVRGQTGKNLFAVAEYWKNDLGALENYLSKTNWTMSAFDVPLHYNLYQASNSSGRYDMRNLLNGTLVQRHPSHAVTFVDNHDTQPGEALESFVQGWFKPLAYATILTREQGYPSVFYGDYYGIPSDGVPSYRQQIDPLLKARQQYAYGRQHDYFDHWDVIGWTREGNASHPNSGLATIMSDGPGGSKWMYVGRQKAGEVWHDMTGNRSGTVTINQDGWGHFFVNGGSVSVWVKR

SEQ ID NO: 43968 - protein, 478 aa, Bacillus sp. (in: firmicutes)
NGTIMQYFEWNVPNDGQHWNRLHNNAQNLKNAGITAIWIPPAWKGTSQNDVGYGAYDLYDLGEFNQKGTVRTKYGTKAELERAIRSLKANGIQVYGDVVMNHKGGADFTERVQAVEVNPQNRNQEVSGTYQIEAWTGFNFPGRGNQHSSFKWRWYHFDGTDWDQSRQLANRIYKFRGKAWDWEVDTENGNYDYLMLADLDMDHPEVINELNRWGVWYANTLNLDGFRLDAVKHIKFSFMRDWLGHVRGQTGKNLFAVAEYWKNDLGALENYLSKTNWTMSAFDVPLHYNLYQASNSSGNYDMRNLLNGTLVQRHPSHAVTFVDNHDTQPGEALESFVQGWFKPLAYATILTREQGYPQVFYGDYYGIPSDGVPSYRQQIDPLLKARQQYAYGRQHDYFDHWDVIGWTREGNASHPNSGLATIMSDGPGGSKWMYVGRQKAGEVWHDMTGNRSGTVTINQDGWGHFFVNGGSVSVWVKR

SEQ ID NO: 43969 - protein, 478 aa, Bacillus sp. (in: firmicutes)
NGTIMQYFEWNVPNDGQHWNRLHNNAQNLKNAGITAIWIPPAWKGTSQNDVGYGAYDLYDLGEFNQKGTVRTKYGTKAELERAIRSLKANGIQVYGDVVMNHKGGADFTERVQAVEVNPQNLNQEVSGTYQIEAWTGFNFPGRGNQHSSFKWRWYHFDGTDWDQSRQLANRIYKFRGKAWDWEVDTENGNYDYLMYADVDMDHPEVINELNRWGVWYANTLNLDGFRLDAVKHIKFSFMRDWLGHVRGQTGKNLFAVAEYWKNDLGALENYLSKTNWTMSAFDVPLHYNLYQASNSSGNYDMRNLLNGTLVQRHPSHAVTFVDNHDTQPGEALESFVQGWFKPLAYATILTREQGYPCVFYGDYYGIPSDGVPSYRQQIDPLLKARQQYAYGRQHDYFDHWDVIGWTREGNASHPNSGLATIMSDGPGGSKWMYVGRQKAGEVWHDMTGNRSGTVTINQDGWGHFFVNGGSVSVWVKR

SEQ ID NO: 43970 - protein, 478 aa, Bacillus sp. (in: firmicutes)
NGTIMQYFEWNVPNDGQHWNRLHNNAQNLKNAGITAIWIPPAWKGTSQNDVGYGTYDLYDLGEFNQKGTVRTKYGTKAELERAIRSLKANGIQVYGDVVMNHKGGADFTERVQAVEVNPQNRNQEVSGTYQIEAWTGFNFPGRGNQHSSFKWRWYHFDGTDWDQSRQLANRIYKFRGKAWDWEVDTENGNYDYLMYADVDMDHPEVINELNRWGVWYANTLNLDGFRLDAVKHIKFSFMRDWLGHVRGQTGKNLFAVAEYWKNDLGALENYLSKTNWTMSAFDVPLHYNLYQASNSSGNYDMRNLLNGTLVQRHPSHAVTFVDNHDTQPGEALESFVQGWFKPLAYATILTREQGYPQVFYGDYYGIPSDGVPSYRQQIDPLLKARQQYAYGRQHDYFDHWDVIGWTREGNASHPNSGLATIMSDGPGGSKWMYVGRQKAGEVWHDMTGNRSGTVTINQDGWGHFFVNGGSVSVWVKR

SEQ ID NO: 43971 - protein, 478 aa, Bacillus sp. (in: firmicutes)
NGTIMQYFEWNVPNDGQHWNRLHNNAQNLKNAGITAIWIPPAWKGTSQNDVGYGAYDLYDLGEFNQKGTVRTKYGTKAELERAIRSLKANGIQVYGDVVMNHKGGADFTERVQAVEVNPQNRNQEVSGTYQIEAWTGFNFPGRGNQHSSFKWRWYHFDGTDWDQSRQLANRIYKFRGKAWDWEVDTENGNYDYLMYADVDMDHPEVINELNRWGVWYANTLNLDGFRLDAVKHIKFSFLRDWLGHVRGQTGKNLFAVAEYWKNDLGALENYLSKTNWTMSAFDVPLHYNLYQASNSSGNYDMRNLLNGTLVQRHPSHAVTFVDNHDTQPGEALESFVQGWFKPLAYATILTREQGYPQVFYGDYYGIPSDGVPSYRQQIDPLLKARQQYAYGRQHDYFDHWDVIGWTREGNASHPNSGLATIMSDGPGGSKWMYVGRQKAGEVWHDMTGNRSGTVTINQDGWGHFFVNGGSVSVWVKR

SEQ ID NO: 43972 - protein, 478 aa, Bacillus sp. (in: firmicutes)
NGTIMQYFEWNVPNDGQHWNRLHNNAQNLKNAGITAIWIPPAWKGTSQQDVGYGAYDLYDLGEFNQKGTVRTKYGTKAELERAIRSLKANGIQVYGDVVMNHKGGADTTERVQAVEVNPQNRNQEVSGTYQIEAWTGFNFPGRGNQHSSFKWRWYHFDGTDWDQSHQLANRIYKFRGKAWDWEVDTENGNYDYLMYADVDMDHPEVINELNRWGVWYANTLNLDGFRLDAVKHIKFSFMRDWLGHVRGQTGKNLFAVAEYWKNDLGALENYLSKTNWTMSAFDVPLHYNLYQASASSGNYDMRNLLNGTLVQRHPSHAVTFVDNHDTQPGEALESFVQGWFKPLAYATILTREQGYPCVFYGDYYGIPSDGVPSYRQQIDPLLKARQQYAYGRQHDYFDHWDVIGWTREGNASHPNSGLATIMSDGPGGSKWMYVGRQKAGEVWHDMTGNRSGTVTINQDGWGHFFVNGGSVSVWVKR

SEQ ID NO: 43973 - protein, 478 aa, Bacillus sp.
NGTIMQYFEWNVPNDGQHWNRLHNNAQNLKNAGITAIWIPPAWKGTSQNDVGYGAYDLYDLGEFNQKGTVRTKYGTKAELERAIRSLKANGIQVYGDVVMNHKGGADFTERVQAVEVNPQNRNQEVSGTYQIEAWTGFNFPGRGNQHSSFKWRWYHFDGTDWDQSRQLANRIYKFRGKAWDWEVDTENGNYDYLMYADXDMDHPEVINELNRWGVWYANTLNLDGFRLDAVKHIKFSFMRDWLGHVRGQTGKNLFAVAEYWKNDLGALENYLSKTNWTMSAFDVPLHYNLYQASNSSGNYDMRNLLNGTLVQRHPSHAVTFVDNHDTQPGEALESFVQGWFKPLAYATILTREQGYPQVFYGDYYGIPSDGVPSYRQQIDPLLKARQQYAYGRQHDYFDHWDVIGWTREGNASHPNSGLATIMSDGPGGSKWMYVGRQKAGEVWHDMTGNRSGTVTINQDGWGHFFVNGGSVSVWVKR

SEQ ID NO: 43974 - protein, 478 aa, Bacillus sp.
NGTIMQYFEWNVPNDGQHWNRLHNNAQNLKNAGITAIWIPPAWKGTSQNDVGYGAYDLYDLGEFNQKGTVRTKYGTKAELERAIRSLKANGIQVYGDVVMNHKGGADFTERVQAVEVNPQNRNQEVSGTYQIEAWTGFNFPGRGNQHSSFKWRWYHFDGTDWDQSRQLANRIYKFRGKAWDWEVDTEXGNYDYLMYADVDMDHPEVINELNRWGVWYANTLNLDGFRLDAVKHIKFSFMRDWLGHVRGQTGKNLFAVAEYWKNDLGALENYLSKTNWTMSAFDVPLHYNLYQASNSSGNYDMRNLLNGTLVQRHPSHAVTFVDNHDTQPGEALESFVQGWFKPLAYATILTREQGYPQVFYGDYYGIPSDGVPSYRQQIDPLLKARQQYAYGRQHDYFDHWDVIGWTREGNASHPNSGLATIMSDGPGGSKWMYVGRQKAGEVWHDMTGNRSGTVTINQDGWGHFFVNGGSVSVWVKR

SEQ ID NO: 43975 - protein, 478 aa, Bacillus sp. (in: firmicutes)
NGTIMQYFEWNVPNDGQHWNRLHNNAQNLKNAGITAIWIPPAWKGTSQNDVGYGAYDLYDLGEFNQKGTVRTKYGTKAELERAIRSLKANGIQVYGDVVMNHKGGADFTERVQAVEVNPQNRNQEVSGTYQIEAWTGFNFPGRGNQHSSFKWRWYHFDGTDWDQSLQLANRIYKFRGKAWDWEVDTENGNYDYLMYADVDMDHPEVINELNRWGVWYANTLNLDGFRLDAVKHIKFSFVRDWLGHVRGQTGKNLFAVAEYWKNDLGALENYLSKTNWTMSAFDVPLHYNLYQASNSSGNYDMRNLLNGTLVQRHPSHAVTFVDNHDTQPGEALESFVQGWFKPLAYATILTREQGYPCVFYGDYYGIPSDGVPSYRQQIDPLLKARQQYAYGRQHDYFDHWDVIGWTREGNASHPNSGLATIMSDGPGGSKWMYVGRQKAGEVWHDMTGNRSGTVTINQDGWGHFFVNGGSVSVWVKR

SEQ ID NO: 43976 - protein, 478 aa, Bacillus sp. (in: firmicutes)
NGTIMQYFEWYVPNDGQHWNRLHNNAQNLKNAGITAIWIPPAWKGTSQNDVGYGAYDLYDLGEFNQKGTVRTKYGTKAELERAIRSLKANGIQVYGDVVMNHKGGADFTERVQAVEVNPQNRNQEVSGTYQIEAWTGFNFPGRGNQHSSFKWRWHHFDGTDWDQSRQLANRIYKFRGKAWDWEVDTEFGNYDYLMYADVDMDHPEVINELNRWGVWYANTLNLDGFRLDAVKHIKFSFMRDWLGHVRGQTGKNLFAVAEYWKNDLGAIENYLSKTNWTMSAFDVPLHYNLYQASNSGGNYDMRNLLNGTLVQRHPSHAVTFVDNHDTQPEEALESFVQGWFKPLAYATILTREQGYPSVFYGDYYGIPSDGVPSYRQQIDPLLKARQQYAYGRQHDYFDHWDVIGWTREGNASHPNSGLATIMSDGPGGSKWMYVGRQKAGEVWHDMTGNRSGTVTINQDGWGHFFVNGGSVSVWVKR

SEQ ID NO: 43977 - protein, 478 aa, Bacillus sp. (in: firmicutes)
NGTIMQYFEWNVPNDGQHWNRLHNNAQNLKNAGITAIWIPPAWKGTSQNDVGYGAYDLYDLGEFNQKGTVRTKYGTKAELERAIRSLKANGIQVYGDVVMNHKGGADFTERVQAVEVNPQNRNQEVSGTYQIEAWTGFNFPGRGNQHSSFKWRWYHFDGTDWDQSRQLANRIYKFRGKAWDWEVDTENGNYDYLMYADVDMDHPEVINELNRWGVWYANTLNLDGFRLDAVKHIKFSFMRDWLGHVRGQTGKNLFAIGEYWKNDLGALENYLSKTNWTMSAFDAPLHYNLYQASNSSGNYDMRNLLNGTLVQRHPSHAVTLVDNHDTQPGEALESFVQGWFKPLAYATILTREQGYPSVFYGDYYGIPSDGVPSYRQQIDPLLKARQQYAYGRQHDYFDHWDVIGWTREGNASHPNSGLATIMSDGPGGSKWMYVGRQKAGEVWHDMTGNRSGTVTINQDGWGHFFVNGGSVSVWVKR

SEQ ID NO: 43978 - protein, 478 aa, Bacillus sp. (in: firmicutes)
NGTIMQYFEWNVPNDGQHWNRLHNNAQNLKNAGITAIWIPPAWKGTSQNDVGYGAYDLYDLGEFNQKGTVRTKYGTKAELERAIRSLKANGIQVYGDVVMNHKGGADFTERVQAVEVNPQNRNQEVSGTYQIEAWTGFNFPGRGNQHSSFKWRWYHFDGTDWDQSRQLANRIYKFRGKAWDWEVDTENGNYDYLMYADVDMDHPEVINELNRWGVWYANTLNLDGFRLDAVKHIKFSFMRDWLGHVRGQTGKNLFAVAEYWKNDLGALENYLSKTNWTMSAFDVPLHFNLYQASNSSGNYDMRNLLNGTLVQRHPSHAVTFVDNHDTQPGEALESFVQGWFKPLAYATILTREQGYPQVFYGDYYGIPSDGVPSYRQQIDPLLKARQQYAYGRQHDYFDHWDVIGWTREGNASHPNSGLATIMSDGPGGSKWMYVGRQKAGEVWHDMTGNRSGTVTINQDGWGHFFVNGGSVSVWVKR

SEQ ID NO: 43979 - protein, 478 aa, Bacillus sp. (in: firmicutes)
NGTIMQYFEWNVPNDGQHWNRLHNNAQNLKNAGITAIWIPPAWKGTSQNDVGYGAYDLYDLGEFNQKGTVRTKYGTKAELERAIRSLKANGIQVYGDVVMNHKGGADFTERVQAVEVNPQNRNQEVSGTYQIEAWTGFNFPGRGNQHSSFKWRWYHFDGTDWDQSRQLANRIYKFRGKAWDWEVDTENGNYDYLMYADVDMDHPEVINELNRWGVWYANTLNLDGFRLDAVKHIKFSFMRDWLGHVRGQTGKNLFAIGEFWKNDLGALENYLSKTNWTMSAFDAPLHYNLYQASNSSGNYDMRNLLNGTLVQRHPSHAVTLVDNHDTQPGEALESFVQGWFKPLAYATILTREQGYPCVFYGDYYGIPSDGVPSYRQQIDPLLKARQQYAYGRQHDYFDHWDVIGWTREGNASHPNSGLATIMSDGPGGSKWMYVGRQKAGEVWHDMTGNRSGTVTINQDGWGHFFVNGGSVSVWVKR

SEQ ID NO: 43980 - protein, 478 aa, Bacillus sp. (in: firmicutes)
NGTIMQYFEWNVPNDGQHWNRLHNNAQNLKNAGITAIWIPPAWKGTSQNDVGYGAYDLYDLGEFNQKGTVRTKYGTKAELERAIRSLKANGIQVYGDVVMNHKGGADQTEHVQAVEVNPQNRNQEVSGTYQIEAWTGFNFPGRGNQHSSFKWRWYHFDGTDWDQSRQLANRIYKFRGKAWDWEVDTENGNYDYLMYADVDMDHPEVINELNRWGVWYANTLNLDGFRLDAVKHIKFSFMRDWLGHVRGQTGKNLFAVAEYWKNDLGALENYLSKTNWTMSAFDVPLHYNLYQASNSSGNYDMRNLLNGTLVQRHPSHAVTFVDNHDTQPGEALESFVQGWFKPLAYATILTREQGYPQVFYGDYYGIPSDGVPSYRQQIDPLLKARQQYAYGRQHDYFDHWDVIGWTREGNASHPNSGLATIMSDGPGGSKWMYVGRQKAGEVWHDMTGNRSGTVTINQDGWGHFFVNGGSVSVWVKR

SEQ ID NO: 43981 - protein, 478 aa, Bacillus sp. (in: firmicutes)
NGTIMHYFEWNVPNDGQHWNRLHNNAQNLKNAGITAIWIPPAWKGTSQNDVGYGAYDLYDLGEFNQKGTVRTKYGTKAELERAIRSLKANGIQVYGDVVMNHKGGADFTERVQAVEVNPQNRNQEVSGTYQIEAWTGFNFPGRGNQHSSFKWRWYHFDGTDWDQSRQLANRIYKFRGKAWDWEVDTENGNYDYLMYADVDMDHPEVINELNRWGVWYANTLNLDGFRLDAVKHIKFSFMRDWLGHVRGQTGKNLFAIGEYWKNDLGALENYLSKTNWTMSAFDVPLHYNLYQASNSSGNYDMRNLLNGTLVQRHPSHAVTFVDNHDTQPGEALESFVQGWFKPLAYATILTREQGYPCVFYGDYYGIPSDGVPSYRQQIDPLLKARQQYAYGRQHDYFDHWDVIGWTREGNASHPNSGLATIMSDGPGGSKWMYVGRQKAGEVWHDMTGNRSGTVTINQDGWGHFFVNGGSVSVWVKR

SEQ ID NO: 43982 - protein, 478 aa, Bacillus sp. (in: firmicutes)
NGTIMQYFEWNVPNDGQHWNRLHNNAQNLKNAGITAIWIPPAWKGTSQNDVGYGAYDLYDLGEFNQKGTVRTKYGTKAELERAIRSLKANGIQVYGDVVMNHKGGADFTERVQAVEVNPQNRNQEVSGTYQIEAWTGFNFPGRGNQHSSFKWRWYHFDGTDWDQSRQLANRIYKFRGKAWDWEVDTEFGNYDYLMYADVDMDHPEVINELNRWGVWYANTLNLDGFRLDAVKHIKFSFMRDWLGHVRGQTGKNLFAVAEYWKNDLGALENYLSKTNWTLSAFDVPLHYNLYQASNSSGNYDMRNLLNGTLVQRHPSHAVTFVDNHDTQPGEALESFVQGWFKPLAYATILTREQGYPQVFYGDYYGIPSDGVPSYRQQIDPLLKARQQYAYGRQHDYFDHWDVIGWTREGNASHPNSGLATIMSDGPGGSKWMYVGRQKAGEVWHDMTGNRSGTVTINQDGWGHFFVNGGSVSVWVKR

SEQ ID NO: 43983 - protein, 478 aa, Bacillus sp. (in: firmicutes)
NGTIMQYFEWNVPNDGQHWNRLHNNAQNLKNAGITAIWIPPAWKGTSQNDVGYGAYDLYDLGEFNQKGTVRTKYGTKAELERAIRSLKANGIQVYGDVVMNHKGGADFTERVQAVEVNPQNRNQEVSGTYQIEAWTGFNFPGRGNQHSSFKWRWYHFDGTDWDQSRQLANRIYKFRGKAWDWEVDTENGNYDYLMYADVDMDHPEVINELNRWGVWYANTLNLDGFRLDAVKHIKFSFMRDWLGHVRGQTGKNLFAVAEYWKNDLGALENYLSKTNWTMSAFDVPLHYNLYQASNSSGNYDMRNLLNGTLVQRHPSHAVTFVDNHDTQPGEALESFVQGWFKPLAYATILTREQGYPQVFYGDYYGIPSDGVPSYRQQIDPLLKARQQYAYGRQHDYFDHWDVIGWTREGNASHPNSGLATIMSDGPGGSKWMYVGRQKAGEVWHDMTGNRSGTVTINQDGWGHFFVNGGSVSVWVKR

SEQ ID NO: 43984 - protein, 482 aa, Bacillus sp. YR288
NGTMMQYFEWYVPNDGQHWNRLRNDAAYLKSIGVSAIWTPPAYKGTSQNDVGYGAYDLYDLGEFNQKGTIRTKYGTKAELKSAVSTLKSNGIQVYGDVVMNHKGGADYTENVTAVEVNPSNRNQETSDEYTIQAWTGFNFPGRGTTHSPFKWQWYHFDGTDWDQSRNASRIFKFRGTGKAWDWPVSSENGNYDYLMYADLDFDHPDVRNEMKNWGVWYANEVGLDGFRLDAVKHIKHLYLGDWVNHVRTKTGKEMFTVAEYWQNDVNAINNYLAIVNYNHSVFDAPLHYNFHYASQSGGNYDMRNLLNGTVVAAHPTKAVTLVENHDSQPGQSLESVVQPWFKPLAYAFILTRAEGYPSIFYGDMYGTKGNSSYEIPALKTKIEPLLKARKDYAYGTQHNYMDHWDVIGWTREGDSTKEKSGLATLVTDGAGGSKWMYVGKQNAGEVWYDITGNRTDKITINTDGWGNFQVNGGSVSVYVQQ

SEQ ID NO: 43985 - protein, 482 aa, Bacillus sp. YR288
NGTMMQYFEWYVPNDGQHWNRLRNDAAYLKSIGVSAIWTPPAYKGTSQNDVGYGAYDLYDLGEFNQKGTIRTKYGTKAELKSAVSTLKSNGIQVYGDVVMNHKGGADYTENVTAVEVNPSNRNQETSDEYTIQAWTGFNFPGRGTTHSPFKWQWYHFDGTDWDQSRNASRIFKFRGTGKAWDWPVSSENGNYDYLMYADLDFDHPDVRNEMKNWGVWYANEVGLDGFRLDAVKHIKHHYLGDWVNHVRTKTGKEMFTVAEYWQNDVNAINNYLAWVNYNHSVFDAPLHYNFHYASQSGGNYDMRNLLNGTVVAAHPTKAVTLVENHDSQPGQSLESVVQPWFKPLAYAFILTRAEGYPSIFYGDMYGTKGNSSYEIPALKTKIEPLLKARKDYAYGTQHNYMDHWDVIGWTREGDSTKEKSGLATLVTDGAGGSKWMYVGKQNAGEVWYDITGNRTDKITINTDGWGNFQVNGGSVSVYVQQ

SEQ ID NO: 43986 - protein, 482 aa, Bacillus sp. YR288
NGTMMQYFEWYVPNDGQHWNRLRNDAAYLKSIGVSAIWTPPAYKGTSQNDVGYGAYDLYDLGEFNQKGTIRTKYGTKAELKSAVSTLKSNGIKVYGDVVMNHKGGADYTENVTAVEVNPSNRNQETSDEYTIQAWTGFNFPGRGTTHSPFKWQWYHFDGTDWDQSRNASRIFKFRGTGKAWDLEVSSENGNYDYLMYADLDFDHPDVRNEMKNWGVWYANEVGLDGFRLDAVKHIKHSYLGDWVNHVRTKTGKTMFTVAEYWQNDVNAINNYLAKVNYNHSVFDAPLHYNFHYASQSGGNYDMRNLLNGTVVAAHPTKAVTLVENHDSQPGQSLESVVQPWFKPLAYAFILTRAEGYPSIFYGDMYGTKGNSSYEIPALKTKIEPLLKARKDYAYGTQHNYMDHWDVIGWTREGDSTKEKSGLATLVTDGAGGSKWMYVGKQNAGEVWYDITGNRTDKITINTDGWGNFQVNGGSVSVYVQQ

SEQ ID NO: 43987 - protein, 482 aa, Bacillus sp. YR288
NGTMMQYFEWYVPNDGQHWNRLRNDAAYLKSIGVSAIWTPPAYKGTSQNDVGYGAYDLYDLGEFNQKGTIRTKYGTKAELKSAVSTLKSNGIQVYGDVVMNHKGGADYTENVTAVEVNPSNRNQETSDEYTIQAWTGFNFPGRGTTHSPFKWQWYHFDGTDWDQSRNASRIFKFRGTGKAWDWEVSSENGNYDYLMYADLDFDHPDVRNEMKNWGVWYANEVGLDGFRLDAVKHIKHSYLGDWVNHVRTKTGKEMWTVAEYWQNDVNAINNYLAKVNYNHWVFDAPLHYNFHYASQSGGNYDMRNLLNGTVVAAHPTKAVTLVENHDSQPGQSLESVVQPWFKPLAYAFILTRAEGYPSIFYGDMYGTKGNSSYEIPALKTKIEPLLKARKDYAYGTQHNYMDHWDVIGWTREGDSTKEKSGLATLVTDGAGGSKRMYVGKQNAGEVWYDITGNRTDKITINTDGWGNFQVNGGSVSVYVQQ

SEQ ID NO: 43988 - protein, 479 aa, Synthetic construct
NGTMMQYFEWDLPNDGTLWTKVKNEAANLSSLGITALWLPPAYKGTSQSDVGYGVYDLYDLGEFNQKGTVRTKYGTKDQYIQAIQAAKAAGMQVYADVVFNHKAGADATEWVDAVEVNPSNRNQEVSGTYKIQAWTKFDFPGRGNTYSSFKWRWYHFDGTDWDQSRQLNRIYKFRGTGKAWDWEVDTENGNYDYLMFADLDMDHPEVVTELKNWGKWYVNTTNVDGFRLDAVKHIKYSFFPDWLASVRSQTGKNLFAVGEFWSYDVNKLHNYITKTNGTMSLFDAPLHNNFYTASKSSGYFDMRYLLNNTLMKDQPVLAVTLVDNHDTQPGQSLQSWVEPWFKPLAYAFILTRQEGYPCVFYGDYYGIPKYNIPGLKSKIDPLLIARRDYAYGTQRDYIDHQDIIGWTREGIDSKPNSGLAALITDGPGGSKWMYVGKKHAGKVFYDLTGNRSDTVTINADGWGEFKVNGGSVSIWVAK

SEQ ID NO: 43989 - protein, 482 aa, Bacillus sp. YR288
NGTMMQYFEWYVPNDGQHWNRLRNDAAYLKSIGVSAIWTPPAYKGTSQNDVGYGAYDLYDLGEFNQKGTIRTKYGTKAELKSAVSTLKSNGIQVYGDVVMNHKGGADYTENVTAVEVNPSNRNQETSDEYTIQAWTGFNFPGRGTTHSPFKWQWYHFDGTDWDQSRNASRIFKFRGTGKAWDWPVSSENGNYDYLMYADLDFDHPDVRNEMKNWGVWYANEVGLDGFRLDAVKHIKHYYLGDWVNHVRTKTGKEMFTVAEYWQNDVNAINNYLAIVNYNHSVFDAPLHYNFHYASQSGGNYDMRNLLNGTVVAAHPTKAVTLVENHDSQPGQSLESVVQPWFKPLAYAFILTRAEGYPSIFYGDMYGTKGNSSYEIPALKTKIEPLLKARKDYAYGTQHNYMDHWDVIGWTREGDSTKEKSGLATLVTDGAGGSKWMYVGKQNAGEVWYDITGNRTDKITINTDGWGNFQVNGGSVSVYVQQ

SEQ ID NO: 43990 - protein, 482 aa, Bacillus sp. YR288
NGTMMQYFEWYVPNDGQHWNRLRNDAAYLKSIGVSAIWTPPAYKGTSQNDVGYGAYDLYDLGEFNQKGTIRTKYGTKAELKSAVSTLKSNGIQVYGDVVMNHKGGADYTENVTAVEVNPSNRNQETSDEYTIQAWTGFNFPGRGTTHSPFKWQWYHFDGTDWDQSRNASRIFKFRGTGKAWDWPVSSENGNYDYLMYADLDFDHPDVRNEMKNWGVWYANEVGLDGFRLDAVKHIKHYYLGDWVNHVRTKTGKEMFTVAEYWQNDVNAINNYLALVNYNHSVFDAPLHYNFHYASQSGGNYDMRNLLNGTVVAAHPTKAVTLVENHDSQPGQSLESVVQPWFKPLAYAFILTRAEGYPSIFYGDMYGTKGNSSYEIPALKTKIEPLLKARKDYAYGTQHNYMDHWDVIGWTREGDSTKEKSGLATLVTDGAGGSKWMYVGKQNAGEVWYDITGNRTDKITINTDGWGNFQVNGGSVSVYVQQ

SEQ ID NO: 43991 - protein, 480 aa, Bacillus licheniformis
NGTLMQYFEWYMPNDGQHWRRLQNDSAYLAEHGITAVWIPPAYKGTSQADVGYGAYDLYDLGEFHQKGTVRTKYGTKGELQSAIKSLHSRDINVYGDVVINHKGGADATEDVTAVEVDPADRNRVISGEHLIKAWTHFHFPGRGSTYSDFKWHWYHFNGTDWDESRKLNRIYKFQGKNWNWEVSNENGNYDYLMYANIDYSHPDVAAEIKRWGTWYANELQLDGFRLDAVKHIKFSFLRDWVNHVREKTGKEMFTVAEYWQNDLGALENYLNKTNFNHSVFDVPLHYQFHAASTQGGGYDMRKLLNGTVVSKHPLKSVTFVDNHDTQPGQSLESTVQTWFKPLAYAFILTRESGYPQVFYGDMYGTKGDSQREIPALKHKIEPILKARKQYAYGAQHDYFDHHDIVGWTREGDSSVANSGLAALITDGPGGAKRMYVGRQNAGETWHDITGNRSEPVVINSEGWGEFHVNGGSVSIYVQR

SEQ ID NO: 43992 - protein, 482 aa, Bacillus sp. YR288
NGTMMQYFEWYVPNDGQHWNRLRNDAAYLKSIGVSAIWTPPAYKGTSQNDVGYGAYDLYDLGEFNQKGTIRTKYGTKAELKSAVSTLKSNGIQVYGDVVMNHKGGADYTENVTAVEVNPSNRNQETSDEYTIQAWTGFNFPGRGTTHSPFKWQWYHFDGTDWDQSRNASRIFKFRGTGKAWDWPVSSEFGNYDYLLYADLDFDHPDVRNEMKNWGVWYANEVGLDGFRLDAVKHIKHSYLGDWVNHVRTKTGKEMFTVAEYWQNDVNAINNYLAKVNYNHSVFDAPLHYNFHYASQSGGNYDMRNLLNGTVVAAHPTKAVTLVENHDSQPGQSLESVVQPWFKPLAYAFILTRAEGYPSIFYGDMYGTKGNSSYEIPALKTKIEPLLKARKDYAYGTQHNYMDHWDVIGWTREGDSTKEKSGLATLVTDGAGGSKWMYVGKQNAGEVWYDITGNRTDKITINTDGWGNFQVNGGSVSVYVQQ

SEQ ID NO: 43993 - protein, 482 aa, Bacillus sp. YR288
NGTMMQYFEWYVPNDGQHWNRLRNDAAYLKSIGVSAIWTPPAYKGTSQNDVGYGAYDLYDLGEFNQKGTIRTKYGTKAELKSAVSTLKSNGIQVYGDVVMNHKGGADYTENVTAVEVNPSNRNQETSDEYTIQAWTGFNFPGRGTTHSPFKWQWYHFDGTDWDQSRNASRIFKFRGTGKAWDWEVSSENGNYDYLMYADLDFDHPDVRNEMKNWGVWYANEVGLDGFRLDAVKHIKHSYLGDWVNHVRTKTGKTMFTVAEYWQNDVNAINNYLAKVNYNHSVFDAPLHYNFHYASQSGGNYDMRNLLNGTVVAAHPTKAVTLVENHDSQPGQSLESVVQPWFKPLAYAFILTRAEGCPSIFYGDMYGTKGNSSYEIPALKTKIEPLLKARKDYAYGTQHNYMDHWDVIGWTREGDSTKEKSGLATLVTDGAGGSKWMYVGKQNAGEVWYDITGNRTDKITINTDGWGNFQVNKGSVSVYVQQ

SEQ ID NO: 43994 - protein, 482 aa, Bacillus sp. YR288
NGTMMQYFEWYVPNDGQHWNRLRNDAAYLKSIGVSAIWTPPAYKGTSQNDVGYGAYDLYDLGEFNQKGTIRTKYGTKAELKSAVSTLKSNGIQVYGDVVMNHKGGADYTENVTAVEVNPSNRNQETSDEYTIQAWTGFNFPGRGTTHSPFKWQWYHFDGTDWDQSRNASRIFKFRGTGKAWDWEVSSENGNYDYLMYADLDFDHPDVRNEMKNWGVWYANEVGLDGFRLDAVKHIKHSYLGDWVNHVRTKTGKEMWTVAEYWQNDVNAINNYLAKVNYNHWVFDAPLHYNFHYASQSGGNYDMRNLLNGTVVAAHPTKAVTLVENHDSQPGQSLESVVQPWFKPLAYAFILTRAEGLPSIFYGDMYGTKGNSSYEIPALKTKIEPLLKARKDYAYGTQHNYMDHWDVIGWTREGDSTKEKSGLATLVTDGAGGSKWMYVGKQNAGEVWYDITGNRTDKITINTDGWGNFQVNGGSVSVYVQQ

SEQ ID NO: 43995 - protein, 482 aa, Bacillus sp. YR288
NGTMMQYFEWYVPNDGQHWNRLRNDAAYLKSIGVSAIWTPPAYKGTSQNDVGYGAYDLYDLGEFNQKGTIRTKYGTKAELKSAVSTLKSNGIQVYGDVVMNHKGGADYTENVTAVEVNPSNRNQETSDEYTIQAWTGFNFPGRGTTHSPFKWQWYHFDGTDWDQSRNASRIFKFRGTGKAWDWEVSSENGNYDYLMYADLDYDHPDVRNEMKNWGVWYANEVGLDGFRLDAVKHIKFQFLGDWVNHVRTKTGKTMFTVAEYWQNDVNAINNYLAKVNYNHSVFDAPLHYNFHYASQSGGNYDMRNLLNGTVVAAHPTKAVTLVENHDSQPGQSLESVVQPWFKPLAYAFILTRAEGLPSIFYGDMYGTKGNSSYEIPALKTKIEPLLKARKDYAYGTQHNYMDHPDVIGWTREGDSTKEKSGLATLVTDGAGGSKWMYVGKQNAGEVWYDITGNRTDKITINTDGWGNFQVNKGSVSVYVQQ

SEQ ID NO: 43996 - protein, 482 aa, Bacillus sp. YR288
NGTMMQYFEWYVPNDGQHWNRLRNDAAYLKSIGVSAIWTPPAYKGTSQNDVGYGAYDLYDLGEFNQKGTIRTKYGTKAELKSAVSTLKSNGIQVYGDVVMNHKGGADYTENVTAVEVNPSNRNQETSDEYTIQAWTGFNFPGRGTTHSPFKWQWYHFDGTDWDQSRNASRIFKFRGTGKAWDWEVSSENGNYDYLMYADLDFDHPDVRNEMKNWGVWYANEVGLDGFRLDAVKHIKHSYLGDWVNHVRTKTGKTMFTVAEYWQNDVNAINNYLAKVNYNHSVFDAPLHYNFHYASQSGGNYDMRNLLNGTVVAAHPTKAVTLVENHDSQPGQSLESVVQPWFKPLAYAFILTRAEGLPSIFYGDMYGTKGNSSYEIPALKTKIEPLLKARKDYAYGTQHNYMDHPDVIGWTREGDSTKEKSGLATLVTDGAGGSKWMYVGKQNAGEVWYDITGNRTDKITINTDGWGNFQVNKGSVSVYVQQ

SEQ ID NO: 43997 - protein, 482 aa, Bacillus sp. YR288
NGTMMQYFEWYVPNDGQHWNRLRNDAAYLKSIGVSAIWTPPAYKGTSQNDVGYGAYDLYDLGEFNQKGTIRTKYGTKAELKSAVSTLKSNGIQVYGDVVMNHKGGADYTENVTAVEVNPSNRNQETSDEYTIQAWTGFNFPGRGTTHSPFKWQWYHFDGTDWDQSRNASRIFKFRGTGKAWDWEVSSENGNYDYLMYADLDYDHPDVRNEMKNWGVWYANEVGLDGFRLDAVKHIKFQFLGDWVNHVRTKTGKTMFTVAEYWQNDVNAINNYLAKVNYNHSVFDAPLHYNFHYASQSGGNYDMRNLLNGTVVAAHPTKAVTLVENHDSQPGQSLESVVQPWFKPLAYAFILTRAEGLPSIFYGDMYGTKGNSSYEIPALKTKIEPLLKARKDYAYGTQHNYMDHWDVIGWTREGDSTKEKSGLATLVTDGAGGSKWMYVGKQNAGEVWYDITGNRTDKITINTDGWGNFQVNKGSVSVYVQQ

SEQ ID NO: 43998 - protein, 482 aa, Bacillus sp. YR288
NGTMMQYFEWYVPNDGQHWNRLRNDAAYLKSIGVSAIWTPPAYKGTSQNDVGYGAYDLYDLGEFNQKGTIRTKYGTKAELKSAVSTLKSNGIQVYGDVVMNHKGGADYTENVTAVEVNPSNRNQETSDEYTIQAWTGFNFPGRGTTHSPFKWQWYHFDGTDWDQSRNASRIFKFRGTGKAWDWPVSSENGNYDYLMYADLDFDHPDVRNEMKNWGVWYANEVGLDGFRLDAVKHIKHLYLGDWVNHVRTKTGKEMFTVAEYWQNDVNAINNYLAWVNYNHSVFDAPLHYNFHYASQSGGNYDMRNLLNGTVVAAHPTKAVTLVENHDSQPGQSLESVVQPWFKPLAYAFILTRAEGYPSIFYGDMYGTKGNSSYEIPALKTKIEPLLKARKDYAYGTQHNYMDHWDVIGWTREGDSTKEKSGLATLVTDGAGGSKWMYVGKQNAGEVWYDITGNRTDKITINTDGWGNFQVNGGSVSVYVQQ

SEQ ID NO: 43999 - protein, 482 aa, Bacillus sp. YR288
NRTMMQYFEWYVPNDGQHWNRLRNDAAYLKSIGVSAIWTPPAYKGTSQNDVGYGAYDLYDLGEFNQKGTIRTKYGTKAELKSAVSTLKSNGIQVYGDVVMNHKGGADYTENVTAVEVNPSNRNQETSDEYTIQAWTGFNFPGRGTTHSPFKWQWYHFDGTDWDQSRNASRIFKFRGTGKAWDLEVSSENGNYDYLMYADLDFDHPDVRNEMKNWGVWYANEVGLDGFRLDAVKHIKHSYLGDWVNHVRTKTGKEMWTVAEYWQNDVNAINNYLAKVNYNHSVFDAPLHYNFHYASQSGGNYDMRNLLNGTVVAAHPTKAVTLVENHDSQPGQSLESVVQPWFKPLAYAFILTRAEGYPSIFYGDMYGTKGNSSYEIPALKTKIEPLLKARKDYAYGTQHNYMDHWDVIGWTREGDSTKEKSGLATLVTDGAGGSKWMYVGKQNAGEVWYDITGNRTDKITINTDGWGNFQVNGGSVSVYVQQ

SEQ ID NO: 44000 - protein, 482 aa, Bacillus sp. YR288
NGTMMQYFEWYVPNDGQHWNRLRNDAAYLKSIGVSAIWTPPAYKGTSQNDVGYGAYDLYDLGEFNQKGTIRTKYGTKAELKSAVSTLKSNGIQVYGDVVMNHKGGADYTENVTAVEVNPSNRNQETSDEYTIQAWTGFNFPGRGTTHSPFKWQWYHFDGTDWDQSRNASRIFKFRGTGKAWDWEVSSENGNYDYLMYADLDFDHPDVRNEMKNWGVWYANEVGLDGFRLDAVKHIKHQYLGDWVNHVRTKTGKEMFTVAEYWQNDVNAINNYLAKVNYNQSVFDFPLHYNFHYASQSGGNYDMRNLLNGTVVAAHPTKAVTLVENHDTQPGQSLESVVQPWFKPLAYAFILTRAEGYPSIFYGDMYGTKGNSSYEIPALKTKIEPLLKARKDYAYGTQHNYMDHWDVIGWTREGDSTKEKSGLATLVTDGAGGSKWMYVGKQNAGEVWYDITGNRTDKITINTDGWGNFQVNGGSVSVYVQQ

SEQ ID NO: 44001 - protein, 482 aa, Bacillus sp. YR288
NGTMMQYFEWYVPNDGQHWNRLRNDAAYLKSIGVSAIWTPPAYKGTSQNDVGYGAYDLYDLGEFNQKGTIRTKYGTKAELKSAVSTLKSNGIKVYGDVVMNHKGGADYTENVTAVEVNPSNRNQETSDEYTIQAWTGFNFPGRGTTHSPFKWQWYHFDGTDWDQSRNASRIFKFRGTGKAWDWEVSSENGNYDYLMYADLDFDHPDVRNEMKNWGVWYANEVGLDGFRLDAVKHIKHSYLGDWVNHVRTKTGKTMFTVAEYWQNDVNAINNYLAKVNYNHSVFDAPLHYNFHYASQSGGNYDMRNLLNGTVVAAHPEKAVTLVENHDSQPGQSLESVVQPWFKPLAYAFILTRAEGYPSIFYGDMYGTKGNSSYEIPALKTKIEPLLKARKDYAYGTQHNYMDHPDVIGWTREGDSTKEKSGLATLVTDGAGGSKWMYVGKQNAGEVWYDITGNRTDKITINTDGWGTFQVNGGSVSVYVQQ

SEQ ID NO: 44002 - protein, 482 aa, Bacillus sp. YR288
NGTMMQYFEWYVPNDGQHWNRLRNDAAYLKSIGVSAIWTPPAYKGTSQNDVGYGAYDLYDLGEFNQKGTIRTKYGTKAELKSAVSTLKSNGIQVYGDVVMNHKGGADYTENVTAVEVNPSNRNQETSDEYTIQAWTGFNFPGRGTTHSPFKWQWYHFDGTDWDQSRNASRIFKFRGTGKAWDWEVSSENGNYDYLMYADLDFDHPDVRNEMKNWGVWYANEVGLDGFRLDAVKHIKHSYLGDWVNHVRTKTGKTMFTVAEYWQNDVNAINNYLAKVNYNHSVFDAPLHYNFHYASQSGGNYDMRNLLNGTVVAAHPTKAVTLVENHDSQPGQSLESVVQPWFKPLAYAFILTRAEGLPSIFYGDMYGTKGNSSYEIPALKTKIEPLLKARKDYAYGTQHNYMDHWDVIGWTREGDSTKEKSGLATLVTDGAGGSKWMYVGKQNAGEVWYDITGNRTDKITINTDGWGNFQVNKGSVSVYVQQ

SEQ ID NO: 44003 - protein, 482 aa, Bacillus sp. YR288
NRTMMQYFEWYVPNDGQHWNRLRNDAAYLKSIGVSAIWTPPAYKGTSQNDVGYGAYDLYDLGEFNQKGTIRTKYGTKAELKSAVSTLKSNGIKVYGDVVMNHKGGADYTENVTAVEVNPSNRNQETSDEYTIQAWTGFNFPGRGTTHSPFKWQWYHFDGTDWDQSRNASRIFKFRGTGKAWDWEVSSENGNYDYLMYADLDFDHPDVRNEMKNWGVWYANEVGLDGFRLDAVKHIKHSYLGDWVNHVRTKTGKTMFTVAEYWQNDVNAINNYLAKVNYNHSVFDAPLHYNFHYASQSGGNYDMRNLLNGTVVAAHPTKAVTLVENHDSQPGQSLESVVQPWFKPLAYAFILTRAEGYPSIFYGDMYGTKGNSSYEIPALKTKIEPLLKARKDYAYGTQHNYMDHWDVIGWTREGDSTKEKSGLATLVTDGAGGSKWMYVGKQNAGEVWYDITGNRTDKITINTDGWGNFQVNGGSVSVYVQQ

SEQ ID NO: 44004 - protein, 482 aa, Bacillus sp. YR288
NGTMMQYFEWYVPNDGQHWNRLRNDAAYLKSIGVSAIWTPPAYKGTSQNDVGYGAYDLYDLGEFNQKGTIRTKYGTKAELKSAVSTLKSNGIQVYGDVVMNHKGGADYTENVTAVEVNPSNRNQETSDEYTIQAWTGFNFPGRGTTHSPFKWQWYHFDGTDWDQSRNASRIFKFRGTGKAWDWEVSSENGNYDYLMYADLDFDHPDVRNEMKNWGVWYANEVGLDGFRLDAVKHIKHSYLGDWVNHVRTKTGKTMFTVAEYWQNDVNAINNYLAKVNYNHSVFDAPLHYNFHYASQSGGNYDMRNLLNGTVVAAHPTKAVTLVENHDSQPGQSLESVVQPWFKPLAYAFILTRAEGMPSIFYGDMYGTKGNSSYEIPALKTKIEPLLKARKDYAYGTQHNYMDHWDVIGWTREGDSTKEKSGLATLVTDGAGGSKWMYVGKQNAGEVWYDITGNRTDKITINTDGWGNFQVNKGSVSVYVQQ

SEQ ID NO: 44005 - protein, 482 aa, Bacillus sp. YR288
NGTMMQYFEWYVPNDGQHWNRLRNDAAYLKSIGVSAIWTPPAYKGTSQNDVGYGAYDLYDLGEFNQKGTIRTKYGTKAELKSAVSTLKSNGIKVYGDVVMNHKGGADYTENVTAVEVNPSNRNQETSDEYTIQAWTGFNFPGRGTTHSPFKWQWYHFDGTDWDQSRNASRIFKFRGTGKAWDWEVSSENGNYDYLMYADLDFDHPDVRNEMKNWGVWYANEVGLDGFRLDAVKHIKHSYLGDWVNHVRTKTGKTMFTVAEYWQNDVNAINNYLAKVNYNHSVFDAPLHYNFHYASQSGGNYDMRNLLNGTVVAAHPTKAVTLVENHDSQPGQSLESVVQPWFKPLAYAFILTRAEGYPSIFYGDMYGTKGNSSYEIPALKTKIEPLLKARKDYAYGTQHNYMDHPDVIGWTREGDSTKEKSGLATLVTDGAGGSKWMYVGKQNAGEVWYDITGNRTDKITINTDGWGTFQVNGGSVSVYVQQ

SEQ ID NO: 44006 - protein, 482 aa, Bacillus sp. YR288
NGTMMQYFEWYVPNDGQHWNRLRNDAAYLKSIGVSAIWTPPAYKGTSQNDVGYGAYDLYDLGEFNQKGTIRTKYGTKAELKSAVSTLKSNGIQVYGDVVMNHKGGADYTENVTAVEVNPSNRNQETSDEYTIQAWTGFNFPGRGTTHSPFKWQWYHFDGTDWDQSRNASRIFKFRGTGKAWDWPVSSENGNYDYLMYADLDFDHPDVRNEMKNWGVWYANEVGLDGFRLDAVKHIKHPYLGDWVNHVRTKTGKEMFTVAEYWQNDVNAINNYLAIVNYNHSVFDAPLHYNFHYASQSGGNYDMRNLLNGTVVAAHPTKAVTLVENHDSQPGQSLESVVQPWFKPLAYAFILTRAEGYPSIFYGDMYGTKGNSSYEIPALKTKIEPLLKARKDYAYGTQHNYMDHWDVIGWTREGDSTKEKSGLATLVTDGAGGSKWMYVGKQNAGEVWYDITGNRTDKITINTDGWGNFQVNGGSVSVYVQQ

SEQ ID NO: 44007 - protein, 482 aa, Bacillus sp. YR288
NRTMMQYFEWYVPNDGQHWNRLRNDAAYLKSIGVSAIWTPPAYKGTSQNDVGYGAYDLYDLGEFNQKGTIRTKYGTKAELKSAVSTLKSNGIQVYGDVVMNHKGGADYTENVTAVEVNPSNRNQETSDEYTIQAWTGFNFPGRGTTHSPFKWQWYHFDGTDWDQSRNASRIFKFRGTGKAWDLEVSSENGNYDYLMYADLDFDHPDVRNEMKNWGVWYANEVGLDGFRLDAVKHIKHSYLGDWVNHVRTKTGKTMFTVAEYWQNDVNAINNYLAKVNYNHSVFDAPLHYNFHYASQSGGNYDMRNLLNGTVVAAHPTKAVTLVENHDSQPGQSLESVVQPWFKPLAYAFILTRAEGYPSIFYGDMYGTKGNSSYEIPALKTKIEPLLKARKDYAYGTQHNYMDHWDVIGWTREGDSTKEKSGLATLVTDGAGGSKWMYVGKQNAGEVWYDITGNRTDKITINTDGWGNFQVNGGSVSVYVQQ

SEQ ID NO: 44008 - protein, 482 aa, Bacillus sp. YR288
NGTMMQYFEWYVPNDGQHWNRLRNDAAYLKSIGVSAIWTPPAYKGTSQNDVGYGAYDLYDLGEFNQKGTIRTKYGTKAELKSAVSTLKSNGIQVYGDVVMNHKGGADYTENVTAVEVNPSNRNQETSDEYTIQAWTGFNFPGRGTTHSPFKWQWYHFDGTDWDQSRNASRIFKFRGTGKAWDWPVSSENGNYDYLMYADLDFDHPDVRNEMKNWGVWYANEVGLDGFRLDAVKHIKHFYLGDWVNHVRTKTGKEMFTVAEYWQNDVNAINNYLAWVNYNHSVFDAPLHYNFHYASQSGGNYDMRNLLNGTVVAAHPTKAVTLVENHDSQPGQSLESVVQPWFKPLAYAFILTRAEGYPSIFYGDMYGTKGNSSYEIPALKTKIEPLLKARKDYAYGTQHNYMDHWDVIGWTREGDSTKEKSGLATLVTDGAGGSKWMYVGKQNAGEVWYDITGNRTDKITINTDGWGNFQVNGGSVSVYVQQ

SEQ ID NO: 44009 - protein, 477 aa, Bacillus sp. TS-23
NETMMQYFEWDLPNDGTLWTKVKNEAANLSSLGITALWLPPAWKGTSQSDVGYGAYDLYDLGEFNQKGTIRTKYGTKTQYIQAIQAAKAAGMQVYADVVFNHKAGADGTEFVDAVEVDPSNRNQETSGTYQIQAWTKFDFPGRGNTYSSFKWRWYHFDGTDWDESRKLNRIYKFRGKAWDWEVDTENGNYDYLMFADYDMDHPEVVTELKNWGTWYVNTTNIDGFRLDAVKHIKYSFFPDWLTYVRNQTGKNLFAVGEFWSYDVNKLHNYITKTNGSMSLFDAPLHNNFYTASKSSGYFDMRYLLNNTLMKDQPSLAVTLVDNHDTQPGQSLQSWVEPWFKPLAYAFILTRQEGYPCVFYGDYYGIPKYNIPGLKSKIDPLLEARRDYAYGTQRDYIDHQDIIGWTREGIDTKPNSGLAALITDGPGGSKWMYVGKKHAGKVFYDLTGNRSDTVTINADGWGEFKVNGGSVSIWVAK

SEQ ID NO: 44010 - protein, 482 aa, Bacillus sp. YR288
NRTMMQYFEWYVPNDGQHWNRLRNDAAYLKSIGVSAIWTPPAYKGTSQNDVGYGAYDLYDLGEFNQKGTIRTKYGTKAELKSAVSTLKSNGIQVYGDVVMNHKGGADYTENVTAVEVNPSNRNQETSDEYTIQAWTGFNFPGRGTTHSPFKWQWYHFDGTDWDQSRNASRIFKFRGTGKAWDWEVSSENGNYDYLMYADLDFDHPDVRNEMKNWGVWYANEVGLDGFRLDAVKHIKHSYLGDWVNHVRTKTGKEMWTVAEYWQNDVNAINNYLAKVNYNHWVFDAPLHYNFHYASQSGGNYDMRNLLNGTVVAAHPTKAVTLVENHDSQPGQSLESVVQPWFKPLAYAFILTRAEGYPSIFYGDMYGTKGNSSYEIPALKTKIEPLLKARKDYAYGTQHNYMDHWDVIGWTREGDSTKEKSGLATLVTDGAGGSKWMYVGKQNAGEVWYDITGNRTDKITINTDGWGNFQVNGGSVSVYVQQ

SEQ ID NO: 44011 - protein, 482 aa, Bacillus sp. YR288
NGTMMQYFEWYVPNDGQHWNRLRNDAAYLKSIGVSAIWTPPAYKGTSQNDVGYGAYDLYDLGEFNQKGTIRTKYGTKAELKSAVSTLKSNGIQVYGDVVMNHKGGADYTENVTAVEVNPSNRNQETSDEYTIQAWTGFNFPGRGTTHSPFKWQWYHFDGTDWDQSRNASRIFKFRGTGKAWDWPVSSENGNYDYLMYADLDFDHPDVRNEMKNWGVWYANEVGLDGFRLDAVKHIKHYYLGDWVNHVRTKTGKEMFTVAEYWQNDVNAINNYLAFVNYNHSVFDAPLHYNFHYASQSGGNYDMRNLLNGTVVAAHPTKAVTLVENHDSQPGQSLESVVQPWFKPLAYAFILTRAEGYPSIFYGDMYGTKGNSSYEIPALKTKIEPLLKARKDYAYGTQHNYMDHWDVIGWTREGDSTKEKSGLATLVTDGAGGSKWMYVGKQNAGEVWYDITGNRTDKITINTDGWGNFQVNGGSVSVYVQQ

SEQ ID NO: 44012 - protein, 479 aa, Synthetic construct
NGTMMQYFEWDLPNDGTLWTKVKNEASSLSALGITALWLPPAYKGTSQADVGYGVYDLYDLGEFNQKGTIRTKYGTKTQYLQAIQAAKSAGMQVYADVVFNHKAGADATEWVDAVEVNPSNRNQEVSGTYKIQAWTKFDFPGRGNTYSSFKWRWYHFDGTDWDQSRQLNRIYKFRGTGKAWDWEVDTENGNYDYLMFADLDMDHPEVVAELKNWGKWYVNTTNVDGFRLDAVKHIKYSFFPDWLSYVRNQTGKNLFAVGEFWGYDVNKLHNYITKTNGAMSLFDAPLHNNFYIASKSSGYFDMRYLLNNTLMKDQPALAVTLVDNHDTQPGQSLQSWVEPWFKPLAYAFILTRQEGYPCVFYGDYYGIPKYNIPGLKSKIDPLLIARRDYAYGTQRDYIDHQDIIGWTREGIDAKPNSGLAALITDGPGGSKWMYVGKRHAGKVFYDLTGNRSDTVTINADGWGEFKVNGGSVSIWVAK

SEQ ID NO: 44013 - protein, 482 aa, Bacillus sp. YR288
NGTMMQYFEWYVPNDGQHWNRLRNDAAYLKSIGVSAIWTPPAYKGTSQNDVGYGAYDLYDLGEFNQKGTIRTKYGTKAELKSAVSTLKSNGIQVYGDVVMNHKGGADYTENVTAVEVNPSNRNQETSDEYTIQAWTGFNFPGRGTTHSPFKWQWYHFDGTDWDQSRNASRIFKFRGTGKAWDWPVSSENGNYDYLMYADLDFDHPDVRNEMKNWGVWYANEVGLDGFRLDAVKHIKHYYLGDWVNHVRTKTGKEMFTVAEYWQNDVNAINNYLAWVNYNHSVFDAPLHYNFHYASQSGGNYDMRNLLNGTVVAAHPTKAVTLVENHDSQPGQSLESVVQPWFKPLAYAFILTRAEGYPSIFYGDMYGTKGNSSYEIPALKTKIEPLLKARKDYAYGTQHNYMDHWDVIGWTREGDSTKEKSGLATLVTDGAGGSKWMYVGKQNAGEVWYDITGNRTDKITINTDGWGNFQVNGGSVSVYVQQ

SEQ ID NO: 44014 - protein, 482 aa, Bacillus sp. YR288
NGTMMQYFEWYVPNDGQHWNRLRNDAAYLKSIGVSAIWTPPAYKGTSQNDVGYGAYDLYDLGEFNQKGTIRTKYGTKAELKSAVSTLKSNGIQVYGDVVMNHKGGADYTENVTAVEVNPSNRNQETSDEYTIQAWTGFNFPGRGTTHSPFKWQWYHFDGTDWDQSRNASRIFKFRGTGKAWDWPVSSENGNYDYLMYADLDFDHPDVRNEMKNWGVWYANEVGLDGFRLDAVKHIKHYYLGDWVNHVRTKTGKEMFTVAEYWQNDVNAINNYLAYVNYNHSVFDAPLHYNFHYASQSGGNYDMRNLLNGTVVAAHPTKAVTLVENHDSQPGQSLESVVQPWFKPLAYAFILTRAEGYPSIFYGDMYGTKGNSSYEIPALKTKIEPLLKARKDYAYGTQHNYMDHWDVIGWTREGDSTKEKSGLATLVTDGAGGSKWMYVGKQNAGEVWYDITGNRTDKITINTDGWGNFQVNGGSVSVYVQQ

SEQ ID NO: 44015 - protein, 482 aa, Bacillus sp. YR288
NGTMMQYFEWYVPNDGQHWNRLRNDAAYLKSIGVSAIWTPPAYKGTSQNDVGYGAYDLYDLGEFNQKGTIRTKYGTKAELKSAVSTLKSNGIQVYGDVVMNHKGGADYTENVTAVEVNPSNRNQETSDEYTIQAWTGFNFPGRGTTHSPFKWQWYHFDGTDWDQSRNASRIFKFRGTGKAWDLEVSSENGNYDYLMYADLDFDHPDVRNEMKNWGVWYANEVGLDGFRLDAVKHIKHSYLGDWVNHVRTKTGKTMFTVAEYWQNDVNAINNYLAKVNYNHSVFDAPLHYNFHYASQSGGNYDMRNLLNGTVVAAHPTKAVTLVENHDSQPGQSLESVVQPWFKPLAYAFILTRAEGLPSIFYGDMYGTKGNSSYEIPALKTKIEPLLKARKDYAYGTQHNYMDHWDVIGWTREGDSTKEKSGLATLVTDGAGGSKWMYVGKQNAGEVWYDITGNRTDKITINTDGWGNFQVNGGSVSVYVQQ

SEQ ID NO: 44016 - protein, 482 aa, Bacillus sp. YR288
NGTMMQYFEWYVPNDGQHWNRLRNDAAYLKSIGVSAIWTPPAYKGTSQNDVGYGAYDLYDLGEFNQKGTIRTKYGTKAELKSAVSTLKSNGIKVYGDVVMNHKGGADYTENVTAVEVNPSNRNQETSDEYTIQAWTGFNFPGRGTTHSPFKWQWYHFDGTDWDQSRNASRIFKFRGTGKAWDWEVSSENGNYDYLMYADLDFDHPDVRNEMKNWGVWYANEVGLDGFRLDAVKHIKHSYLGDWVNHVRTKTGKEMFTVAEYWQNDVNAINNYLAKVNYNHSVFDAPLHYNFHYASQSGGNYDMRNLLNGTVVAAHPEKAVTLVENHDSQPGQSLESVVQPWFKPLAYAFILTRAEGLPSIFYGDMYGTKGNSSYEIPALKTKIEPLLKARKDYAYGTQHNYMDHWDVIGWTREGDSTKEKSGLATLVTDGVGGSKWMYVGKQNAGEVWYDITGNRTDKITINTDGWGTFQVNGGSVSVYVQQ

SEQ ID NO: 44017 - protein, 479 aa, Synthetic construct
NGTMMQYFEWDLPNDGTLWTKVKNEATNLFSLGITALWLPPAYKGTSQSDVGYGVYDLYDLGEFNQKGTIRTKYGTKTQYIQAIQAAKAAGMQVYADVVFNHKAGADGTELVDAVEVNPSDRNQEISGTYQIQAWTKFDFPGRGNTYSSFKWRWYHFDGTDWDESRKLNRIYKFRGTGKAWDWEVDTENGNYDYLMYADLDMDHPEVVTELKNWGTWYVNTTNIDGFRLDAVKHIKYSFFPDWLTYVRNQTGKNLFAVGEFWSYDVNKLHNYITKTNGSMSLFDAPLHNNFYTASKSSGYFDMRYLLNNTLMKDQPSLAVTLVDNHDTQPGQSLQSWVEPWFKPLAYAFILTRQEGYPCVFYGDYYGIPKYNIPGLKSKIDPLLIARRDYAYGTQRDYIDHQDIIGWTREGIDTKPNSGLAALITDGPGGSKWMYVGKKHAGKVFYDLTGNRSDTVTINADGWGEFKVNGGSVSIWVAK

SEQ ID NO: 44018 - protein, 482 aa, Bacillus sp. YR288
NGTMMQYFEWYVPNDGQHWNRLRNDAAYLKSIGVSAIWTPPAYKGTSQNDVGYGAYDLYDLGEFNQKGTIRTKYGTKAELKSAVSTLKSNGIQVYGDVVMNHKGGADYTENVTAVEVNPSNRNQETSDEYTIQAWTGFNFPGRGTTHSPFKWQWYHFDGTDWDQSRNASRIFKFRGTGKAWDLEVSSENGNYDYLMYADLDFDHPDVRNEMKNWGVWYANEVGLDGFRLDAVKHIKHSYLGDWVNHVRTKTGKTMFTVAEYWQNDVNAINNYLAKVNYNHSVFDAPLHYNFHYASQSGGNYDMRNLLNGTVVAAHPTKAVTLVENHDSQPGQSLESVVQPWFKPLAYAFILTRAEGYPSIFYGDMYGTKGNSSYEIPALKTKIEPLLKARKDYAYGTQHNYMDHWDVIGWTREGDSTKEKSGLATLVTDGAGGSKWMYVGKQNAGEVWYDITGNRTDKITINTDGWGTFQVNGGSVSVYVQQ

SEQ ID NO: 44019 - protein, 480 aa, unidentified
NGTLMQYFEWYTPNDGQHWKRLQNDAEHLSDIGITAVWIPPAYKAISQADVGYGAYDLYDLGEWHQKGTVRTKYGTKGELQSAIKSLHSRDINVYGDVVINHKAGADATEDVTAVEVDPADRNRVISGEHLIKAWTHFHFPGRGSTYSDFKWYWYHFDGTDWDESRKLNRIYLFQGKTWDWPVSNEFGNYDYLMYADYDYDYPDVVAEITRWGTWYANELQLDGFRLDAVKHIKFSFLRDWVNHVREKTGKEMFTVAEYWSNDLGALENYLNKTNFNHSVFDVPLHYQFHAASTQGGGYDMRKLLNGTVVSKHPLKSVTFVDNHDTQPGQSLESTVQTWFKPLAYAFILTRESGYPSVFYGDMYGTKGDSQREIPALKHKIEPILKARKQYAYGAQHDYFDHHDIVGWTREGVSSVANSGLAALITDGPGGAKWMYVGRQNAGETWHDITGNRSEPVVINSEGWGEFHVNGGSVSIYVQR

SEQ ID NO: 44020 - protein, 482 aa, Bacillus sp. YR288
NGTMMQYFEWYVPNDGQHWNRLRNDAAYLKSIGVSAIWTPPAYKGTSQNDVGYGAYDLYDLGEFNQKGTIRTKYGTKAELKSAVSTLKSNGIQVYGDVVMNHKGGADYTENVTAVEVNPSNRNQETSDEYTIQAWTGFNFPGRGTTHSPFKWQWYHFDGTDWDQSRNASRIFKFRGTGKAWDWPVSSEFGNYDYLLYADLDFDHPDVINEMKNWGVWYANEVGLDGFRLDAVKHIKHSYLGDWVNHVRTKTGKEMFTVAEYWQNDVNAINNYLAKVNYNHSVFDAPLHYNFHYASQSGGNYDMRNLLNGTVVAAHPTKAVTLVENHDSQPGQSLESVVQPWFKPLAYAFILTRAEGYPSIFYGDMYGTKGNSSYEIPALKTKIEPLLKARKDYAYGTQHNYMDHWDVIGWTREGDSTKEKSGLATLVTDGAGGSKWMYVGKQNAGEVWYDITGNRTDKITINTDGWGNFQVNGGSVSVYVQQ

SEQ ID NO: 44021 - protein, 482 aa, Bacillus sp. YR288
NGTMMQYFEWYVPNDGQHWNRLRNDAAYLKSIGVSAIWTPPAYKGTSQNDVGYGAYDLYDLGEFNQKGTIRTKYGTKAELKSAVSTLKSNGIKVYGDVVMNHKGGADYTENVTAVEVNPSNRNQETSDEYTIQAWTGFNFPGRGTTHSPFKWQWYHFDGTDWDQSRNASRIFKFRGTGKAWDWEVSSENGNYDYLMYADLDFDHPDVRNEMKNWGVWYANEVGLDGFRLDAVKHIKHSYLGDWVNHVRTKTGKTMFTVAEYWQNDVNAINNYLAKVNYNHSVFDAPLHYNFHYASQSGGNYDMRNLLNGTVVAAHPTKAVTLVENHDSQPGQSLESVVQPWFKPLAYAFILTRAEGYPSIFYGDMYGTKGNSSYEIPALKTKIEPLLKARKDYAYGTQHNYMDHPDVIGWTREGDSTKEKSGLATLVTDGVGGSKWMYVGKQNAGEVWYDITGNRTDKITINTDGWGTFQVNGGSVSVYVQQ

SEQ ID NO: 44022 - protein, 482 aa, Bacillus sp. YR288
NGTMMQYFEWYVPNDGQHWNRLRNDAAYLKSIGVSAIWTPPAYKGTSQNDVGYGAYDLYDLGEFNQKGTIRTKYGTKAELKSAVSTLKSNGIQVYGDVVMNHKGGADYTENVTAVEVNPSNRNQETSDEYTIQAWTGFNFPGRGTTHSPFKWQWYHFDGTDWDQSRNASRIFKFRGTGKAWDWPVSSENGNYDYLMYADLDFDHPDVRNEMKNWGVWYANEVGLDGFRLDAVKHIKHPYLGDWVNHVRTKTGKEMFTVAEYWQNDVNAINNYLAWVNYNHSVFDAPLHYNFHYASQSGGNYDMRNLLNGTVVAAHPTKAVTLVENHDSQPGQSLESVVQPWFKPLAYAFILTRAEGYPSIFYGDMYGTKGNSSYEIPALKTKIEPLLKARKDYAYGTQHNYMDHWDVIGWTREGDSTKEKSGLATLVTDGAGGSKWMYVGKQNAGEVWYDITGNRTDKITINTDGWGNFQVNGGSVSVYVQQ

SEQ ID NO: 44023 - protein, 482 aa, Bacillus sp. YR288
NGTMMQYFEWYVPNDGQHWNRLRNDAAYLKSIGVNAIWTPPAYKGTSQNDVGYGAYDLYDLGEFNQKGTIRTKYGTKAELKSAVSTLKSNGIQVYGDVVMNHKGGADYTENVTAVEVNPSNRNQETSDEYTIQAWTGFNFPGRGTTHSPFKWQWYHFDGTDWDQSRNASRIFKFRGTGKAWDWEVSSENGNYDYLMYADLDFDHPDVRNEMKNWGVWYANEVGLDGFRLDAVKHIKHSYLGDWVNHVRTKTGKEMFTVAEYWQNDVNAINNYLAKVNYNHSVFDAPLHYNFHYASQSGGNYDMRNLLNGTVVAAHPTKAVTLVENHDSQPGQSLESVVQPWFKPLAYAFILTRAEGYPSIFYGDMYGTKGNSSYEIPALKTKIEPLLKARKDYAYGTQHNYMDHWDVIGWTREGDSTKEKSGLATLVTDGAGGSKWMYVGKQNAGEVWYDITGNRTDKITINTDGWGTFQVNKESVSVYVQQ

SEQ ID NO: 44024 - protein, 482 aa, Bacillus sp. YR288
NGTMMQYFEWYVPNDGQHWNRLRNDAAYLKSIGVSAIWTPPAYKGTSQNDVGYGAYDLYDLGEFNQKGTIRTKYGTKAELKSAVSTLKSNGIQVYGDVVMNHKGGADYTENVTAVEVNPSNRNQETSDEYTIQAWTGFNFPGRGTTHSPFKWQWYHFDGTDWDQSRNASRIFKFRGTGKAWDWEVSSENGNYDYLMYADLDFDHPDVRNEMKNWGVWYANEVGLDGFRLDAVKHIKHSYLGDWVNHVRTKTGKTMFTVAEYWQNDVNAINNYLAKVNYNHSVFDAPLHYNFHYASQSGGNYDMRNLLNGTVVAAHPTKAVTLVENHDSQPGQSLESVVQPWFKPLAYAFILTRAEGVPSIFYGDMYGTKGNSSYEIPALKTKIEPLLKARKDYAYGTQHNYMDHWDVIGWTREGDSTKEKSGLATLVTDGAGGSKWMYVGKQNAGEVWYDITGNRTDKITINTDGWGNFQVNKGSVSVYVQQ

SEQ ID NO: 44025 - protein, 482 aa, Bacillus sp. YR288
NGTMMQYFEWYVPNDGQHWNRLRNDAAYLKSIGVSAIWTPPAYKGTSQNDVGYGAYDLYDLGEFNQKGTIRTKYGTKAELKSAVSTLKSNGIQVYGDVVMNHKGGADYTENVTAVEVNPSNRNQETSDEYTIQAWTGFNFPGRGTTHSPFKWQWYHFDGTDWDQSRNASRIFKFRGTGKAWDWPVSSENGNYDYLMYADLDFDHPDVRNEMKNWGVWYANEVGLDGFRLDAVKHIKHYYLGDWVNHVRTKTGKEMFTVAEYWQNDVNAINNYLAHVNYNHSVFDAPLHYNFHYASQSGGNYDMRNLLNGTVVAAHPTKAVTLVENHDSQPGQSLESVVQPWFKPLAYAFILTRAEGYPSIFYGDMYGTKGNSSYEIPALKTKIEPLLKARKDYAYGTQHNYMDHWDVIGWTREGDSTKEKSGLATLVTDGAGGSKWMYVGKQNAGEVWYDITGNRTDKITINTDGWGNFQVNGGSVSVYVQQ

SEQ ID NO: 44026 - protein, 482 aa, Bacillus sp. YR288
NGTMMQYFEWYVPNDGQHWNRLRNDAAYLKSIGVSAIWTPPAYKGTSQNDVGYGAYDLYDLGEFNQKGTIRTKYGTKAELKSAVSTLKSNGIKVYGDVVMNHKGGADYTENVTAVEVNPSNRNQETSDEYTIQAWTGFNFPGRGTTHSPFKWQWYHFDGTDWDQSRNASRIFKFRGTGKAWDWEVSSENGNYDYLMYADLDFDHPDVRNEMKNWGVWYANEVGLDGFRLDAVKHIKHSYLGDWVNHVRTKTGKEMWTVAEYWQNDVNAINNYLAKVNYNHSVFDAPLHYNFHYASQSGGNYDMRNLLNGTVVAAHPTKAVTLVENHDSQPGQSLESVVQPWFKPLAYAFILTRAEGYPSIFYGDMYGTKGNSSYEIPALKTKIEPLLKARKDYAYGTQHNYMDHWDVIGWTREGDSTKEKSGLATLVTDGAGGSKWMYVGKQNAGEVWYDITGNRTDKITINTDGWGTFQVNGGSVSVYVQQ

SEQ ID NO: 44027 - protein, 479 aa, Synthetic construct
NGTMMQYFEWDLPNDGTLWTKVKNEATNLFSLGITALWLPPAYKGTSQSDVGYGVYDLYDLGEFNQKGTIRTKYGTKTQYIQAIQAAKAAGMQVYADVVFDHKGGADGTEWVDAVEVNPSDRNQEISGTYQIQAWTKFDFPGRGNTYSSFKWRWYHFDGVDWDESRKLSRIYKFRGIGKAWDWEVDTENGNYDYLMYADLDMDHPEVVTELKNWGTWYVNTTNIDGFRLDAVKHIKYSFFPDWLTYVRNQTGKNLFAVGEFWSYDVNKLHNYITKTNGSMSLFDAPLHNNFYTASKSSGYFDMRYLLNNTLMKDQPSLAVTLVDNHDTQPGQSLQSWVEPWFKPLAYAFILTRQEGYPCVFYGDYYGIPKYNIPGLKSKIDPLLIARRDYAYGTQRDYIDHQDIIGWTREGIDTKPNSGLAALITDGPGGSKWMYVGKKHAGKVFYDLTGNRSDTVTINADGWGEFKVNGGSVSIWVAK

SEQ ID NO: 44028 - protein, 480 aa, Bacillus licheniformis
NGTLMQYFEWYTPNDGQHWKRLQNDAEHLSDIGITAVWIPPAYKAISQADVGYGAYDLYDLGEFHQKGTVRTKYGTKGELQSAIKSLHSRDINVYGDVVINHKAGADATEDVTAVEVDPADRNRVISGEHLIKAWTHFHFPGRGSTYSDFKWYWYHFDGTDWDESRKLNRIYLFQGKTWDWPVSNEFGNYDYLMYADFDYDHPDVVAEIKRWGTWYANELQLDGFRLDAVKHIKFSFLRDWVNHVREKTGKEMFTVAEYWSNDLGALENYLNKTNFNHSVFDVPLHYQFHAASTQGGGYDMRKLLNGTVVSKWPWKSVTFVDNHDTQPGQSLESTVQTWFKPLAYAFILTRESGYPQVFYGDMYGTKGDSQREIPALKHKIEPILKARKQYAYGAQHDYFDHHDIVGWTREGDSSVANSGLAALITDGPGGAKWMYVGRQNAGETWHDITGNRSEPVVINSEGWGEFHVNGGSVSIYVQR

SEQ ID NO: 44029 - protein, 483 aa, Bacillus sp. YR288
NRTMMQYFEWYVPNDGQHWNRLRNDAAYLKSIGVSAIWTPPAYKGTSQNDVGYGAYDLYDLGEFNQKGTIRTKYGTKAELKSAVSTLKSNGIKVYGDVVMNHKGGADYTENVTAVEVNPSNRNQETSDEYTIQAWTGFNFPGRGTTHSPFKWQWYHFDGTDWDQSRNASRIFKFRGTGKAWDWEVSSENGNYDYLMYADLDFDHPDVRNEMKNWGVWYANEVGLDGFRLDAVKHIKHSYLGDWVNHVRTKTGKEMFTVAEYWQNDVNAINNYLAKVNYNHSVFDAPLHYNFHYASQSGGNYDMRNLLNGTVVAAHPTKAVTLVENHDSQPGQSLESVVQPWFKPLAYAFILTRAEGLPSIFYGDMYGTKGNSSYEIPALKTKIEPLLKARKDYAYGTQHNYMDHPDVIGWTREGDSTKEKSGLATLVTDGSAGGSKWMYVGKQNAGEVWYDITGNRTDKITINTDGWGNFQVNGGSVSVYVQQ

SEQ ID NO: 44030 - protein, 483 aa, Bacillus sp. YR288
NGTMMQYFEWYVPNDGQHWNRLRNDAAYLKSIGVSAIWTPPAYKGTSQNDVGYGAYDLYDLGEFNQKGTIRTKYGTKAELKSAVSTLKSNGIKVYGDVVMNHKGGADYTENVTAVEVNPSNRNQETSDEYTIQAWTGFNFPGRGTTHSPFKWQWYHFDGTDWDQSRNASRIFKFRGTGKAWDWEVSSENGNYDYLLYADLDYDHPDVINEMKNWGVWYANEVGLDGFRLDAVKHIKFQFLGDWVNHVRTKTGKEMWTVAEYWQNDVNAINNYLAKVNYNHSVFDAPLHYNFHYASQSGGNYDMRNLLNGTVVAAHPTKAVTLVENHDSQPGQSLESVVQPWFKPLAYAFILTRAEGYPSIFYGDMYGTKGNSSYEIPALKTKIEPLLKARKDYAYGTQHNYMDHWDVIGWTREGDSTKEKSGLATLVTDGSAGGSKWMYVGKQNAGEVWYDITGNRTDKITINTDGWGNFQVNGGSVSVYVQQ

SEQ ID NO: 44031 - protein, 482 aa, Bacillus sp. YR288
NGTMMQYFEWYVPNDGQHWNRLRNDAAYLKSIGVSAIWTPPAYKGTSQNDVGYGAYDLYDLGEFNQKGTIRTKYGTKAELKSAVSTLKSNGIKVYGDVVMNHKGGADYTENVTAVEVNPSNRNQETSDEYTIQAWTGFNFPGRGTTHSPFKWQWYHFDGTDWDQSRNASRIFKFRGTGKAWDLEVSSENGNYDYLMYADLDFDHPDVRNEMKNWGVWYANEVGLDGFRLDAVKHIKHSYLGDWVNHVRTKTGKEMFTVAEYWQNDVNAINNYLAKVNYNHSVFDAPLHYNFHYASQSGGNYDMRNLLNGTVVAAHPTKAVTLVENHDSQPGQSLESVVQPWFKPLAYAFILTRAEGYPSIFYGDMYGTKGNSSYEIPALKTKIEPLLKARKDYAYGTQHNYMDHWDVIGWTREGDSTKEKSGLATLVTDGAGGSKRMYVGKQNAGEVWYDITGNRTDKITINTDGWGNFQVNGGSVSVYVQQ

SEQ ID NO: 44032 - protein, 482 aa, Bacillus sp. YR288
NRTMMQYFEWYVPNDGQHWNRLRNDAAYLKSIGVSAIWTPPAYKGTSQNDVGYGAYDLYDLGEFNQKGTIRTKYGTKAELKSAVSTLKSNGIQVYGDVVMNHKGGADYTENVTAVEVNPSNRNQETSDEYTIQAWTGFNFPGRGTTHSPFKWQWYHFDGTDWDQSRNASRIFKFRGTGKAWDWEVSSENGNYDYLMYADLDFDHPDVRNEMKNWGVWYANEVGLDGFRLDAVKHIKHSYLGDWVNHVRTKTGKEMFTVAEYWQNDVNAINNYLAKVNYNHWVFDAPLHYNFHYASQSGGNYDMRNLLNGTVVAAHPTKAVTLVENHDSQPGQSLESVVQPWFKPLAYAFILTRAEGYPSIFYGDMYGTKGNSSYEIPALKTKIEPLLKARKDYAYGTQHNYMDHWDVIGWTREGDSTKEKSGLATLVTDGAGGSKRMYVGKQNAGEVWYDITGNRTDKITINTDGWGNFQVNGGSVSVYVQQ

SEQ ID NO: 44033 - protein, 478 aa, Geobacillus stearothermophilus
LNGTLMQYFEWYTPNDGQHWKRLQNDSAYLAEHGITAVWIPPAYKGTSQADVGYGAYDLYDLGEFHQKGTVRTKYGTKGELQSAIKSLHSRDINVYGDVVINHKGGADATEDVTAVEVDPADRNRVISGEYLIKAWTHFHFPGRGSTYSDFKWHWYHFDGTDWDESRKLNRIYKFQGKAWDWEVSTENGNYDYLMYADLDMDHPEVVTELKNWGKWYVNTTNIDGFRLDAVKHIKFSFFPDWLSYVRSQTGKPLFTVGEYWSYDINKLHNYITKTNGTMSLFDAPLHNKFYTASKSGGAFDMRTLMTNTLMKDQPTLAVTFVDNHDTEPGQALQSWVDPWFKPLAYAFILTRQEGYPCVFYGDYYGIPQYNIPSLKSKIDPLLIARRDYAYGTQHDYLDHSDIIGWTREGVTEKPGSGLAALITDGPGGSKWMYVGKQHAGKVFYDLTGNRSDTVTINSDGWGEFKVNGGSVSVWVPR

SEQ ID NO: 44034 - protein, 479 aa, Synthetic construct
NGTIMQYFEWNVPNDGQHWNRLHNNAQNLKNAGITAIWIPPAWKGTSQNDVGYGAYDLYDLGEFNQKGTVRTKYGTKAELERAIRSLKANGIQVYGDVVMNHKAGADGTEFVDAVEVNPSNRNQETSGTYQIQAWTKFDFPGRGNTYSSFKWRWYHFDGTDWDESRKLNRVYKFRGTGKAWDWEVDTENGNYDYLMFADLDMDHPEVINELNRWGVWYANTLNLDGFRLDAVKHIKFSFMRDWLGHVRGQTGKNLFAVAEYWKNDLGALENYLSKTNWTMSAFDVPLHYNLYQASNSSGNYDMRNLLNGTLVQRHPSHAVTFVDNHDTQPGEALESFVQGWFKPLAYATILTREQGYPQVFYGDYYGIPSDGVPSYRQQIDPLLKARQQYAYGRQHDYFDHWDVIGWTREGNASHPNSGLATIMSDGPGGSKWMYVGRQKAGEVWHDMTGNRSGTVTINQDGWGHFFVNGGSVSVWVKR

SEQ ID NO: 44035 - protein, 480 aa, Bacillus sp.
NGTIMQYFEWNVPNDGQHWNRLHNNAQNLKNAGITAIWIPPAWKGTSQNDVGYGAYDLYDLGEFNQKGTVRTKYGTKAELERAIRSLKANGIQVYGDVVMNHKGGADFTERVQAVEVNPQNRNQEVSGTYQIEAWTGFNFPGRGNQHSSFKWRWYHFDGTDWDQSRQLANRIYKFRGDGKAWDWEVDTENGNYDYLMYADVDMDHPEVINELNRWGVWYANTLNLDGFRLDAVKHIKFSFMRDWLGHVRGQTGKNLFAVAEYWKNDLGALENYLSKTNWTMSAFDVPLHYNLYQASNSSGNYDMRLLLNGTLVQRHPSHAVTFVDNHDTQPGEALESFVQGWFKPLAYATILTREQGYPQVFYGDYYGIPSDGVPSYRQQIDPLLKARQQYAYGRQHDYFDHWDVIGWTREGNASHPNSGLATIMSDGPGGSKWMYVGRQKAGEVWHDMTGNRSGTVTINQDGWGHFFVNGGSVSVWVKR

SEQ ID NO: 44036 - protein, 480 aa, Bacillus sp.
NGTIMQYFEWNVPNDGQHWNRLHNNAQNLKNAGITAIWIPPAWKGTSQNDVGYGAYDLYDLGEFNQKGTVRTKYGTKAELERAIRSLKANGIQVYGDVVMNHKGGADFTERVQAVEVNPQNRNQEVSGTYQIEAWTGFNFPGRGNQHSSFKWRWYHFDGTDWDQSRQLANRIYKFRGDGKAWDWEVDTENGNYDYLMYADVDMDHPEVINELNRWGVWYANTLNLDGFRLDAVKHIKFSFMRDWLGHVRGQTGKNLFAVAEYWKNDLGALENYLSKTNWTMSAFDVPLHYNLYQASNSSGNYDMRNLLNGTLVQRHPSHAVTFVDNHDTQPGEALESFVQGWFKPLAYATILTREQGYPQVFYGDYYGIPSDGVPSYRQQIDPLLKARQQYAYGRQHDYFDHWDVIGWTREGNASVPNSGLATIMSDGPGGSKWMYVGRQKAGEVWHDMTGNRSGTVTINQDGWGHFFVNGGSVSVWVKR

SEQ ID NO: 44037 - protein, 480 aa, Bacillus sp.
NGTIMQYFEWNVPNDGQHWNRLHNNAQNLKNAGITAIWIPPAWKGTSQNDVGYGAYDLYDLGEFNQKGTVRTKYGTKAELERAIRSLKANGIQVYGDVVMNHKGGADFTERVQAVEVNPQNRNQEVSGTYQIEAWTGFNFPGRGNQHSSFKWRWYHFDGTDWDQSRQLANRIYKFRGDGKAWDWEVDTENGNYDYLMYADVDMDHPEVINELNIWGVWYANTLNLDGFRLDAVKHIKFSFMRDWLGHVRGQTGKNLFAVAEYWKNDLGALENYLSKTNWTMSAFDVPLHYNLYQASNSSGNYDMRNLLNGTLVQRHPSHAVTFVDNHDTQPGEALESFVQGWFKPLAYATILTREQGYPQVFYGDYYGIPSDGVPSYRQQIDPLLKARQQYAYGRQHDYFDHWDVIGWTREGNASHPNSGLATIMSDGPGGSKWMYVGRQKAGEVWHDMTGNRSGTVTINQDGWGHFFVNGGSVSVWVKR

SEQ ID NO: 44038 - protein, 480 aa, Bacillus sp.
NGTIMQYFEWNVPNDGQHWNRLHNNAQNLKNAGITAIWIPPAWKGTSQNDVGYGAYDLYDLGEFNQKGTVRTKYGTKAELERAIRSLKANGIQVYGDVVMNHKGGADFTERVQAVEVNPQNRNQEVSGTYQIEAWTGFNFPGRGNQHSSFKWRWYHFDGTDWDQSRQLANRIYKFRGDGKAWDWEVDTENGNYDYLMYADVDMDHPEVINELNRWGVWYANTLNLDGFRLDAVKHIKFSFMRDWLGHVRGQTGKGLFAVAEYWKNDLGALENYLSKTNWTMSAFDVPLHYNLYQASNSSGNYDMRNLLNGTLVQRHPSHAVTFVDNHDTQPGEALESFVQGWFKPLAYATILTREQGYPQVFYGDYYGIPSDGVPSYRQQIDPLLKARQQYAYGRQHDYFDHWDVIGWTREGNASHPNSGLATIMSDGPGGSKWMYVGRQKAGEVWHDMTGNRSGTVTINQDGWGHFFVNGGSVSVWVKR

SEQ ID NO: 44039 - protein, 480 aa, Bacillus sp.
NGTIMQYFEWNVPNDGQHWNRLHNNAQNLKNAGITAIWIPPAWKGTSQNDVGYGAYDLYDLGEFNQKGTVRTKYGTKADLERAIRSLKANGIQVYGDVVMNHKGGADFTERVQAVEVNPQNRNQEVSGTYQIEAWTGFNFPGRGNQHSSFKWRWYHFDGTDWDQSRQLANRIYKFRGDGKAWDWEVDTENGNYDYLMYADVDMDHPEVINELNRWGVWYANTLNLDGFRLDAVKHIKFSFMRDWLGHVRGQTGKNLFAVAEYWKNDLGALENYLSKTNWTMSAFDVPLHYNLYQASNSSGNYDMRNLLNGTLVQRHPSHAVTFVDNHDTQPGEALESFVQGWFKPLAYATILTREQGYPQVFYGDYYGIPSDGVPSYRQQIDPLLKARQQYAYGRQHDYFDHWDVIGWTREGNASHPNSGLATIMSDGPGGSKWMYVGRQKAGEVWHDMTGNRSGTVTINQDGWGHFFVNGGSVSVWVKR

SEQ ID NO: 44040 - protein, 480 aa, Bacillus sp.
NGTIMQYFEWNVPNDGQHWNRLHNNAQNLKNAGITAIWIPPAWKGTSQNDVGYGAYDLYDLGEFNQKGTVRTKYGTKAELERAIRSLKANGIQVYGDVVMNHKGGADFTERVQAVEVNPQNRNQEVSGTYQIEAWTGFNFPGRGNQHSSFKWRWYHFDGTDWDQSRQLANRIYKFRGDGKAWDWEVDTENGNYDYLMYADVDMDHPEVINELNRWGVWYANTLNLDGFRLDAVKHIKFSFMRDWLGHVRGQTGKNLFAVAEYWKNDLEALENYLSKTNWTMSAFDVPLHYNLYQASNSSGNYDMRNLLNGTLVQRHPSHAVTFVDNHDTQPGEALESFVQGWFKPLAYATILTREQGYPQVFYGDYYGIPSDGVPSYRQQIDPLLKARQQYAYGRQHDYFDHWDVIGWTREGNASHPNSGLATIMSDGPGGSKWMYVGRQKAGEVWHDMTGNRSGTVTINQDGWGHFFVNGGSVSVWVKR

SEQ ID NO: 44041 - protein, 480 aa, Bacillus sp.
NGTIMQYFEWNVPNDGQHWNRLHNNAQNLKNAGITAIWIPPAWKGTSQNDVGYGAYDLYDLGEFNQKGTVRTKYGTKAELERAIRSLKANGIQVYGDVVMNHKGGADFTERVQAVEVNPQNRNQEVSGTYQIEAWTGFNFPGRGNQHSSFKWRWYHFDGTDWDQSRQLANRIYKFRGDGKAWDWEVDTENGNYDYLMYADVDMDHPEVINELNRWGVWYANTLNLDGFRLDAVKHIKFSFMRDWLGHVRGQTGKNLFAVAEYWKNDLGALENYLSKTNWTMSAFDVPLHYNLYQASNSSGDYDMRNLLNGTLVQRHPSHAVTFVDNHDTQPGEALESFVQGWFKPLAYATILTREQGYPQVFYGDYYGIPSDGVPSYRQQIDPLLKARQQYAYGRQHDYFDHWDVIGWTREGNASHPNSGLATIMSDGPGGSKWMYVGRQKAGEVWHDMTGNRSGTVTINQDGWGHFFVNGGSVSVWVKR

SEQ ID NO: 44042 - protein, 480 aa, Bacillus sp.
NGTIMQYFEWNVPNDGQHWNRLHNNAQNLKNAGITAIWIPPAWKGTSQNDVGYGAYDLYDLGEFNQKGTVRTKYGTKAELERAIRSLKANGIQVYGDVVMNHKGGADFTERVQAVEVNPQNRNQEVSGTYQIEAWTGFNFPGRGNQHSSFKWRWYHFDGTDWDQSRQLANRIYKFRGDGKAWDWEVDTENGNYDYLMYADVDMDHPEVINELNRWGVWYANTLNLDGFRLDAVKHIKFSFMRDWLGHVRGQTGKNLFAVAEYWKNDLGALENYLSKTNWTMSAFDVPLHYNLYQASNSLGNYDMRNLLNGTLVQRHPSHAVTFVDNHDTQPGEALESFVQGWFKPLAYATILTREQGYPQVFYGDYYGIPSDGVPSYRQQIDPLLKARQQYAYGRQHDYFDHWDVIGWTREGNASHPNSGLATIMSDGPGGSKWMYVGRQKAGEVWHDMTGNRSGTVTINQDGWGHFFVNGGSVSVWVKR

SEQ ID NO: 44043 - protein, 480 aa, Bacillus sp.
NGTIMQYFEWNVPNDGQHWNRLHNNAQNLKNAGITAIWIPPAWKGTSQNDVGYGAYDLYDLGEFNQKGTVRTKYGTKAELERAIRSLKANGIQVYGDVVMNHKGGADFTERVQAVEVNPQNRNQEVSGTYQIEAWTGFNFPGRGNQHSSFKWRWYHFDGTDWDLSRQLANRIYKFRGDGKAWDWEVDTENGNYDYLMYADVDMDHPEVINELNRWGVWYANTLNLDGFRLDAVKHIKFSFMRDWLGHVRGQTGKNLFAVAEYWKNDLGALENYLSKTNWTMSAFDVPLHYNLYQASNSSGNYDMRNLLNGTLVQRHPSHAVTFVDNHDTQPGEALESFVQGWFKPLAYATILTREQGYPQVFYGDYYGIPSDGVPSYRQQIDPLLKARQQYAYGRQHDYFDHWDVIGWTREGNASHPNSGLATIMSDGPGGSKWMYVGRQKAGEVWHDMTGNRSGTVTINQDGWGHFFVNGGSVSVWVKR

SEQ ID NO: 44044 - protein, 480 aa, Bacillus sp.
NGTIMQYFEWNDPNDGQHWNRLHNNAQNLKNAGITAIWIPPAWKGTSQNDVGYGAYDLYDLGEFNQKGTVRTKYGTKAELERAIRSLKANGIQVYGDVVMNHKGGADFTERVQAVEVNPQNRNQEVSGTYQIEAWTGFNFPGRGNQHSSFKWRWYHFDGTDWDQSRQLANRIYKFRGDGKAWDWEVDTENGNYDYLMYADVDMDHPEVINELNRWGVWYANTLNLDGFRLDAVKHIKFSFMRDWLGHVRGQTGKNLFAVAEYWKNDLGALENYLSKTNWTMSAFDVPLHYNLYQASNSSGNYDMRNLLNGTLVQRHPSHAVTFVDNHDTQPGEALESFVQGWFKPLAYATILTREQGYPQVFYGDYYGIPSDGVPSYRQQIDPLLKARQQYAYGRQHDYFDHWDVIGWTREGNASHPNSGLATIMSDGPGGSKWMYVGRQKAGEVWHDMTGNRSGTVTINQDGWGHFFVNGGSVSVWVKR

SEQ ID NO: 44045 - protein, 480 aa, Bacillus sp.
NGTIMQYFEWNVPNDGQHWNRLHNNAQNLKNAGITAIWIPPAWKGTSQNDVGYGAYDLYDLGEFNQKGTVRTKYGTKAELERAIRSLKANGIQVYGDVVMNHKGGADFTERVQAVEVNPQNRNQEVSGTYQIEAWTGFNFPGRGNQHSSFKWRWYHFDGTDWDQSRQLANRIYKFRGDGKAWDWEVDTENGNYDYLMYADVDMDHPEVINELNRWGVWYANTLNLDGFRLDAVKHIKFSFMRDWLGHVRGQTGKNLFAVAEYWKNDLGALENYLSKTNWTMSAFDVPLHYNLYQASNSSGNWDMRNLLNGTLVQRHPSHAVTFVDNHDTQPGEALESFVQGWFKPLAYATILTREQGYPQVFYGDYYGIPSDGVPSYRQQIDPLLKARQQYAYGRQHDYFDHWDVIGWTREGNASHPNSGLATIMSDGPGGSKWMYVGRQKAGEVWHDMTGNRSGTVTINQDGWGHFFVNGGSVSVWVKR

SEQ ID NO: 44046 - protein, 480 aa, Bacillus sp.
NGTIMQYFEWNVPNDGQHWNRLHNNAQNLKNAGITAIWIPPAWKGTSQNDVGYGAYDLYDLGEFNQKGTVRTKYGTKAELERAIRSLKANGIQVYGDVVMNHKGGADFTERVQAVEVNPQNRNQEVSGTYQIEAWTGFNFPGRGNQHSSFKWRWYHFDGTDWDSSRQLANRIYKFRGDGKAWDWEVDTENGNYDYLMYADVDMDHPEVINELNRWGVWYANTLNLDGFRLDAVKHIKFSFMRDWLGHVRGQTGKNLFAVAEYWKNDLGALENYLSKTNWTMSAFDVPLHYNLYQASNSSGNYDMRNLLNGTLVQRHPSHAVTFVDNHDTQPGEALESFVQGWFKPLAYATILTREQGYPQVFYGDYYGIPSDGVPSYRQQIDPLLKARQQYAYGRQHDYFDHWDVIGWTREGNASHPNSGLATIMSDGPGGSKWMYVGRQKAGEVWHDMTGNRSGTVTINQDGWGHFFVNGGSVSVWVKR

SEQ ID NO: 44047 - protein, 480 aa, Bacillus sp.
NGTIMQYFEWNVPNDGQHWNRLHNNAQNLKNAGITAIWIPPAWKGTSQNDVGYGAYDLYDLGEFNQKGTVRTKYGTKAELERAIRSLKANGIQVYGDVVMNHKGGADFTERVQAVEVNPQNRNQEVSGTYQIEAWTGFNFPGRGNQHSSFKWRWYHFDGTDWDQSRQLANRIYKFRGDGKAWDWEVDTENGNYDYLMYADVDMDHPEVINELNRWGVWYANTLNLDGFRLDAVKHIKFSFMRDWLGHVRGQTGKNLFAVAEYWKNDLGALENYLSKTNWTMSAFDVPLHYNLYQASNSSGNYDMRNLLNGTLVQRHPSHAVTFVDNHDTQPGEALESFVQGWFKPLAYATILTREAGYPQVFYGDYYGIPSDGVPSYRQQIDPLLKARQQYAYGRQHDYFDHWDVIGWTREGNASHPNSGLATIMSDGPGGSKWMYVGRQKAGEVWHDMTGNRSGTVTINQDGWGHFFVNGGSVSVWVKR

SEQ ID NO: 44048 - protein, 480 aa, Bacillus sp.
NGTIMQYFEWNVPNDGQHWNRLHNNAQNLKNAGITAIWIPPAWKGTSQNDVGYGAYDLYDLGEFNQKGTVRTKYGTKAELERAIRSLKANGIQVYGDVVMNHKGGADFTERVQAVEVNPQNRNQEVSGTYQIEAWTGFNFPGRGNQHSSFKWRWYHFDGTDWDQSRQLANRIYKFRGDGKAWDWEVDTENGNYDYLMYADVDMDHPEVINELNRWGVWYANTLNLDGFRLDAVKHIKFSFMRDWLGHVRGQTGKNLFAVAEYWKNDLGALENYLSKTNWTMSAFDVPLHANLYQASNSSGNYDMRNLLNGTLVQRHPSHAVTFVDNHDTQPGEALESFVQGWFKPLAYATILTREQGYPQVFYGDYYGIPSDGVPSYRQQIDPLLKARQQYAYGRQHDYFDHWDVIGWTREGNASHPNSGLATIMSDGPGGSKWMYVGRQKAGEVWHDMTGNRSGTVTINQDGWGHFFVNGGSVSVWVKR

SEQ ID NO: 44049 - protein, 480 aa, Bacillus sp.
NGTIMQYFEWNVPNDGQHWNRLHNNAQNLENAGITAIWIPPAWKGTSQNDVGYGAYDLYDLGEFNQKGTVRTKYGTKAELERAIRSLKANGIQVYGDVVMNHKGGADFTERVQAVEVNPQNRNQEVSGTYQIEAWTGFNFPGRGNQHSSFKWRWYHFDGTDWDQSRQLANRIYKFRGDGKAWDWEVDTENGNYDYLMYADVDMDHPEVINELNRWGVWYANTLNLDGFRLDAVKHIKFSFMRDWLGHVRGQTGKNLFAVAEYWKNDLGALENYLSKTNWTMSAFDVPLHYNLYQASNSSGNYDMRNLLNGTLVQRHPSHAVTFVDNHDTQPGEALESFVQGWFKPLAYATILTREQGYPQVFYGDYYGIPSDGVPSYRQQIDPLLKARQQYAYGRQHDYFDHWDVIGWTREGNASHPNSGLATIMSDGPGGSKWMYVGRQKAGEVWHDMTGNRSGTVTINQDGWGHFFVNGGSVSVWVKR

SEQ ID NO: 44050 - protein, 480 aa, Bacillus sp.
NGTIMQYFEWNVPNDGQHWNRLHNNAQNLKNAGITAIWIPPAPKGTSQNDVGYGAYDLYDLGEFNQKGTVRTKYGTKAELERAIRSLKANGIQVYGDVVMNHKGGADFTERVQAVEVNPQNRNQEVSGTYQIEAWTGFNFPGRGNQHSSFKWRWYHFDGTDWDQSRQLANRIYKFRGDGKAWDWEVDTENGNYDYLMYADVDMDHPEVINELNRWGVWYANTLNLDGFRLDAVKHIKFSFMRDWLGHVRGQTGKNLFAVAEYWKNDLGALENYLSKTNWTMSAFDVPLHYNLYQASNSSGNYDMRNLLNGTLVQRHPSHAVTFVDNHDTQPGEALESFVQGWFKPLAYATILTREQGYPQVFYGDYYGIPSDGVPSYRQQIDPLLKARQQYAYGRQHDYFDHWDVIGWTREGNASHPNSGLATIMSDGPGGSKWMYVGRQKAGEVWHDMTGNRSGTVTINQDGWGHFFVNGGSVSVWVKR

SEQ ID NO: 44051 - protein, 480 aa, Bacillus sp.
NGTIMQYFEWNVPNDGQHWNRLHNNAQNLKNAGITAIWIPPAWKGTSQNDVGYGAYDLYDLGEFNQKGTVRTKYGTKAELERAIRSLKANGIQVYGDVVMNHKGGADFTERVQAVEVNPQNRNQEVSGTYQIEAWTGFNFPGRGNQHSSFKWRWYHFDGTDWDQSRQLANRIYKFRGDGKAWDWEVDTENGNYDYLMYADVDMDHPEVINELNRWGVWYANTLNLDGFRLDAVKHIKFSFMRDWLGHVRGQTGKNLFAVAEYWKNDLGALENYLSKTNWTMSAFDVPLHYNLYQASNSSGNYDMRNLLYGTLVQRHPSHAVTFVDNHDTQPGEALESFVQGWFKPLAYATILTREQGYPQVFYGDYYGIPSDGVPSYRQQIDPLLKARQQYAYGRQHDYFDHWDVIGWTREGNASHPNSGLATIMSDGPGGSKWMYVGRQKAGEVWHDMTGNRSGTVTINQDGWGHFFVNGGSVSVWVKR

SEQ ID NO: 44052 - protein, 480 aa, Bacillus sp.
NGTIMQYFEWNVPNDGQHWNRLHNNAQNLKNAGITAIWIPPALKGTSQNDVGYGAYDLYDLGEFNQKGTVRTKYGTKAELERAIRSLKANGIQVYGDVVMNHKGGADFTERVQAVEVNPQNRNQEVSGTYQIEAWTGFNFPGRGNQHSSFKWRWYHFDGTDWDQSRQLANRIYKFRGDGKAWDWEVDTENGNYDYLMYADVDMDHPEVINELNRWGVWYANTLNLDGFRLDAVKHIKFSFMRDWLGHVRGQTGKNLFAVAEYWKNDLGALENYLSKTNWTMSAFDVPLHYNLYQASNSSGNYDMRNLLNGTLVQRHPSHAVTFVDNHDTQPGEALESFVQGWFKPLAYATILTREQGYPQVFYGDYYGIPSDGVPSYRQQIDPLLKARQQYAYGRQHDYFDHWDVIGWTREGNASHPNSGLATIMSDGPGGSKWMYVGRQKAGEVWHDMTGNRSGTVTINQDGWGHFFVNGGSVSVWVKR

SEQ ID NO: 44053 - protein, 480 aa, Bacillus sp.
NGTIMQYFEWNVPNDGQHWNRLHNNAQNLKNAGITAIWIPPAWKGTSQNDVGYGAYDLYDLGEFNQKGTVRTKYGTKAELERAIRVLKANGIQVYGDVVMNHKGGADFTERVQAVEVNPQNRNQEVSGTYQIEAWTGFNFPGRGNQHSSFKWRWYHFDGTDWDQSRQLANRIYKFRGDGKAWDWEVDTENGNYDYLMYADVDMDHPEVINELNRWGVWYANTLNLDGFRLDAVKHIKFSFMRDWLGHVRGQTGKNLFAVAEYWKNDLGALENYLSKTNWTMSAFDVPLHYNLYQASNSSGNYDMRNLLNGTLVQRHPSHAVTFVDNHDTQPGEALESFVQGWFKPLAYATILTREQGYPQVFYGDYYGIPSDGVPSYRQQIDPLLKARQQYAYGRQHDYFDHWDVIGWTREGNASHPNSGLATIMSDGPGGSKWMYVGRQKAGEVWHDMTGNRSGTVTINQDGWGHFFVNGGSVSVWVKR

SEQ ID NO: 44054 - protein, 480 aa, Bacillus sp.
NGTIMQYFEWNVPNDGQHWNRLHNNAQNLKNAGITAIWIPPAWKGTSQNDVGYGAYDLYDLGEFNQKGTVRTKYGTKAELERAIRSLKANGIQVYGDVVMNHKGGADFTERVQAVEVNPQNRNQEVSGTYQIEAWTGFNFPGRGNQHSSFKWRWYHFDGTDWDQSRQLANRIYKFRGDGKAWDWEVDTENGNYDYLMYADVDMDHPEVINELNRWGVWYANTLNLDGFRLDAVKHIKFSFMRDWLGHVRGQTGKNLFAVAEYWKNDLGALENYLSKTNWTMSAFDVPLHYNLYQASNSSGNYDMRNLLNGTLVQRHPSHAVTFVDNHDTQPGEALESFVQGWFKPLAYATILTRERGYPQVFYGDYYGIPSDGVPSYRQQIDPLLKARQQYAYGRQHDYFDHWDVIGWTREGNASHPNSGLATIMSDGPGGSKWMYVGRQKAGEVWHDMTGNRSGTVTINQDGWGHFFVNGGSVSVWVKR

SEQ ID NO: 44055 - protein, 480 aa, Bacillus sp.
NGTIMQYFEWNVPNDGQHWNRLHNNAQNLKNAGITAIWIPPAWKGTSQNDVGYGAYDLYDLGEFNQKGTVRTKYGTKAELERAIRSLKANGLQVYGDVVMNHKGGADFTERVQAVEVNPQNRNQEVSGTYQIEAWTGFNFPGRGNQHSSFKWRWYHFDGTDWDQSRQLANRIYKFRGDGKAWDWEVDTENGNYDYLMYADVDMDHPEVINELNRWGVWYANTLNLDGFRLDAVKHIKFSFMRDWLGHVRGQTGKNLFAVAEYWKNDLGALENYLSKTNWTMSAFDVPLHYNLYQASNSSGNYDMRNLLNGTLVQRHPSHAVTFVDNHDTQPGEALESFVQGWFKPLAYATILTREQGYPQVFYGDYYGIPSDGVPSYRQQIDPLLKARQQYAYGRQHDYFDHWDVIGWTREGNASHPNSGLATIMSDGPGGSKWMYVGRQKAGEVWHDMTGNRSGTVTINQDGWGHFFVNGGSVSVWVKR

SEQ ID NO: 44056 - protein, 480 aa, Bacillus sp.
NGTIMQYFEWNVPNDGQHWNRLHNNAQNLKNAGITAIWIPPAWKGTSQNDVGYGAYDLYDLGEFNQKGTVRTKYGTKAELERAIRSLKANGIQVYGDVVMNHKGGADFTERVQAVEVNPQNRNQEVSGTYQIEAWTGFNFPGRGNQHSSFKWRWYHFDGTDWDQSRQLANRIYKFRGDGKAWDWEVDTENGNYDYLMYADVDMDHPEVINELNRWGVWYANTLNLDGFRLDAVKHIKFSFMRDWLGHVRGQTGKNLFAVAEYWKNDLGALENYLSKTNWTMSAFDVPLHYNLYQASNSSGNYDMRNLLNGTLVQRHPSHAVTFVDNHDTQPGEALESFVQQWFKPLAYATILTREQGYPQVFYGDYYGIPSDGVPSYRQQIDPLLKARQQYAYGRQHDYFDHWDVIGWTREGNASHPNSGLATIMSDGPGGSKWMYVGRQKAGEVWHDMTGNRSGTVTINQDGWGHFFVNGGSVSVWVKR

SEQ ID NO: 44057 - protein, 480 aa, Bacillus sp.
NGTIMQYFEWNVPNDGQHWERLHNNAQNLKNAGITAIWIPPAWKGTSQNDVGYGAYDLYDLGEFNQKGTVRTKYGTKAELERAIRSLKANGIQVYGDVVMNHKGGADFTERVQAVEVNPQNRNQEVSGTYQIEAWTGFNFPGRGNQHSSFKWRWYHFDGTDWDQSRQLANRIYKFRGDGKAWDWEVDTENGNYDYLMYADVDMDHPEVINELNRWGVWYANTLNLDGFRLDAVKHIKFSFMRDWLGHVRGQTGKNLFAVAEYWKNDLGALENYLSKTNWTMSAFDVPLHYNLYQASNSSGNYDMRNLLNGTLVQRHPSHAVTFVDNHDTQPGEALESFVQGWFKPLAYATILTREQGYPQVFYGDYYGIPSDGVPSYRQQIDPLLKARQQYAYGRQHDYFDHWDVIGWTREGNASHPNSGLATIMSDGPGGSKWMYVGRQKAGEVWHDMTGNRSGTVTINQDGWGHFFVNGGSVSVWVKR

SEQ ID NO: 44058 - protein, 480 aa, Bacillus sp.
NGTIMQYFEWNVPNDGQHWNRLHNNAQNLKNAGITAIWIPPAWKGTSQNDVGYGAYDLYDLGEFNQKGTVRTKYGTKAELERAIRSLKANGIQVYGDVVMNHKGGADFTERVQAVEVNPQNRNQEVSGTYQIEAWTGFNFPGRGNQHSSFKWRWYHFDGTDWDQSRQLANRIYKFRGDGKAWDWEVDTENGNYDYLMYADVDMDHPEVINELNRWGVWYANTLNLDGFRLDAVKHIKFSFMRDWLGHVRGQTGKNLFAVAEYWKNDLGALENYLSKTNWTMSAFDVPLHYNLYQASNSSGNYDMRNLLNGTLVQRHPSHAVTFVDNHDTQPGEALESFVQGWFKPLAYATILTREQGYPQVFYGDYYGIPSDGVPSYRQQIDPLLKARQNYAYGRQHDYFDHWDVIGWTREGNASHPNSGLATIMSDGPGGSKWMYVGRQKAGEVWHDMTGNRSGTVTINQDGWGHFFVNGGSVSVWVKR

SEQ ID NO: 44059 - protein, 480 aa, Bacillus sp.
NGTIMQYFEWNVPNDGQHWNRLHNNAQNLKNAGITAIWIPPAWKGTSQNDVGYGAYDLYDLGEFNQKGTVRTKYGTKAELERAIRSLKANGVQVYGDVVMNHKGGADFTERVQAVEVNPQNRNQEVSGTYQIEAWTGFNFPGRGNQHSSFKWRWYHFDGTDWDQSRQLANRIYKFRGDGKAWDWEVDTENGNYDYLMYADVDMDHPEVINELNRWGVWYANTLNLDGFRLDAVKHIKFSFMRDWLGHVRGQTGKNLFAVAEYWKNDLGALENYLSKTNWTMSAFDVPLHYNLYQASNSSGNYDMRNLLNGTLVQRHPSHAVTFVDNHDTQPGEALESFVQGWFKPLAYATILTREQGYPQVFYGDYYGIPSDGVPSYRQQIDPLLKARQQYAYGRQHDYFDHWDVIGWTREGNASHPNSGLATIMSDGPGGSKWMYVGRQKAGEVWHDMTGNRSGTVTINQDGWGHFFVNGGSVSVWVKR

SEQ ID NO: 44060 - protein, 480 aa, Bacillus sp.
NGTIMQYFEWNVPNDGQHWNRLHNNAQNLKNAGITAIWIPPAWKGTSQNDVGYGAYDLYDLGEFNQKGTVRTKYGTKAELERAIRSLKANGIQVYGDVVMNHKGGADFTERVQAVEVNPQNRNQEVSGTYQIEAWTGFNFPGRGNQHSSFKWRWYHFDGTDWDQSRQLANRIYKFRGDGKAWDWEVDTENGNYDYLMYADVDMDHPEVINELNRWGVWYANTLNLDGFRLDAVKHIKFSFMRDWLGHVRGQTGKNLFAVAEYWKNDLGALENYLSKTNWTMSAFDVPLHYNLYQASNSSGNYDMRNLLNGTLVQRHPSHAVTFVDNHDTQPGEALESFVQGWFKPLAYATILTREQGYPQVFYGDYYGIPSTGVPSYRQQIDPLLKARQQYAYGRQHDYFDHWDVIGWTREGNASHPNSGLATIMSDGPGGSKWMYVGRQKAGEVWHDMTGNRSGTVTINQDGWGHFFVNGGSVSVWVKR

SEQ ID NO: 44061 - protein, 480 aa, Bacillus sp.
NGTIMQYFEWNVPNDGQHWNRLHNNAQNLKNAGITAIWIPPAWKGTSQNDVGYGAYDLYDLGEFNQKGTVRTKYGTKAELERAIRSLKANGIQVYGDVVMNHKGGADFTERVQAVEVNPQNRNQEVSGTYQIEAWTGFNFPGRGNQHSSFKWRWYHFDGTDWDQSRQLANRIYKFRGDGKAWDWEVDTENGNYDYLMYADVDMDHPEVINELNRWGVWYANTLNLDGFRLDAVKHIKFSFMRDWLGHVRGQTGKNLFAVAEYWKNDLGALENYLSKTNWTMSAFDVPLHYNLYQASNSSGNYDMRNLINGTLVQRHPSHAVTFVDNHDTQPGEALESFVQGWFKPLAYATILTREQGYPQVFYGDYYGIPSDGVPSYRQQIDPLLKARQQYAYGRQHDYFDHWDVIGWTREGNASHPNSGLATIMSDGPGGSKWMYVGRQKAGEVWHDMTGNRSGTVTINQDGWGHFFVNGGSVSVWVKR

SEQ ID NO: 44062 - protein, 480 aa, Bacillus sp.
NGTIMQYFEWNVPNDGQHWNRLHNNAQNLKNAGITAIWIPPAWKGTSQNDVGYGAYDLYDLGEFNQKGTVRTKYGTKAELERAIRSLKANGIQVYGDVVMNHKGGADFTERVQAVEVNPQNRNQEVSGTYQIEAWTGFNFPGRGNQHSSFKWRWYHFDGTDWDQSRQLANRIYKFRGDGKAWDWEVDTENGNYDYLMYADVDMDHPEVINELNRWGVWYANTLNLDGFRLDAVKHIKFSFMRDWLGHVRGQTGKNLFAVAEYWKNDLGALENYLSKTNWTMSAFDVPLHYNLYQASNSSGNYDMRNLLNGTLVQRHPSHAVTFVDNHDTQPGEALESFVQGWFKPLAYATILTREQGYPQVFYGDYYGIPSDGVPSYRQQIDPLLKARQQYAYGRQHDYFDHWDVIGWTREGNQSHPNSGLATIMSDGPGGSKWMYVGRQKAGEVWHDMTGNRSGTVTINQDGWGHFFVNGGSVSVWVKR

SEQ ID NO: 44063 - protein, 480 aa, Bacillus sp.
NGTIMQYFEWNVPNDGQHWNRLHNNAQNLKNAGITAIWIPPAWKGTSQNDVGYGAYDLYDLGEFNQKGTVRTKYGTKAELERAIRSLKANGIQVYGDVVMNHKGGADFTERVQAVEVNPQNRNQEVSGTYQIEAWTGFNFPGRGNQHSSFKWRWYHFDGTDWDQSRQLANRIYKFRGDGKAWDWEVDTENGNYDYLMYADVDMDHPEVINELNRWGVWYANTLNLDGFRLDAVKHIKFSFMRDWLGHVRGQTGKNLFAVAEYWKNDLGALENYLSKTNWTMSAFDVPLHYNLYQASNSSGNYDMRNLLNGTLVQRHPSHAVTFVDNHDTQPGEALESFVQGWFKPLAYATILTREQGYPQVFYGDYYGIPTDGVPSYRQQIDPLLKARQQYAYGRQHDYFDHWDVIGWTREGNASHPNSGLATIMSDGPGGSKWMYVGRQKAGEVWHDMTGNRSGTVTINQDGWGHFFVNGGSVSVWVKR

SEQ ID NO: 44064 - protein, 480 aa, Bacillus sp.
NGTIMQYFEWNVPNDGQHWNRLHNNAQNLKNAGITAIWIPPAWKGTSQNDVGYGAYDLYDLGEFNQKGTVRTKYGTKAELERAIRSLKANGIQVYGDVVMNHKGGADFTERVQAVEVNPQNRNQEVSGTYQIEAWTEFNFPGRGNQHSSFKWRWYHFDGTDWDQSRQLANRIYKFRGDGKAWDWEVDTENGNYDYLMYADVDMDHPEVINELNRWGVWYANTLNLDGFRLDAVKHIKFSFMRDWLGHVRGQTGKNLFAVAEYWKNDLGALENYLSKTNWTMSAFDVPLHYNLYQASNSSGNYDMRNLLNGTLVQRHPSHAVTFVDNHDTQPGEALESFVQGWFKPLAYATILTREQGYPQVFYGDYYGIPSDGVPSYRQQIDPLLKARQQYAYGRQHDYFDHWDVIGWTREGNASHPNSGLATIMSDGPGGSKWMYVGRQKAGEVWHDMTGNRSGTVTINQDGWGHFFVNGGSVSVWVKR

SEQ ID NO: 44065 - protein, 480 aa, Bacillus sp.
NGTIMQYFEWNQPNDGQHWNRLHNNAQNLKNAGITAIWIPPAWKGTSQNDVGYGAYDLYDLGEFNQKGTVRTKYGTKAELERAIRSLKANGIQVYGDVVMNHKGGADFTERVQAVEVNPQNRNQEVSGTYQIEAWTGFNFPGRGNQHSSFKWRWYHFDGTDWDQSRQLANRIYKFRGDGKAWDWEVDTENGNYDYLMYADVDMDHPEVINELNRWGVWYANTLNLDGFRLDAVKHIKFSFMRDWLGHVRGQTGKNLFAVAEYWKNDLGALENYLSKTNWTMSAFDVPLHYNLYQASNSSGNYDMRNLLNGTLVQRHPSHAVTFVDNHDTQPGEALESFVQGWFKPLAYATILTREQGYPQVFYGDYYGIPSDGVPSYRQQIDPLLKARQQYAYGRQHDYFDHWDVIGWTREGNASHPNSGLATIMSDGPGGSKWMYVGRQKAGEVWHDMTGNRSGTVTINQDGWGHFFVNGGSVSVWVKR

SEQ ID NO: 44066 - protein, 480 aa, Bacillus sp.
NGTIMQYFEWNVPNDGQHWNRLHNNAQNLKNAGITAIWIPPAWKGTSQNDVGYGAYDLYDLGEFNQKGTVRTKYGTKAELERAIRSLKANGIQVYGDVVMNHKGGADFTERVQAVEVNPQNRNQEVSGTYQIEAWTGFNFPGRGNQHSSFKWRWYHFDGTDWDQSRQLANRIYKFRGDGKAWDWEVDTENGNYDYLMYADVDMDHPEVINELNRWGVWYANTLNLDGFRLDAVKHIKFSFMRDWLGHVRGQTGKNLFAVAEYWKNDLGALENYLSKTNWTMSAFDVPLHYNLYQASNSSGNYDMRNLLNGTLVQRHPSHAVTFVDNHDTQPGAALESFVQGWFKPLAYATILTREQGYPQVFYGDYYGIPSDGVPSYRQQIDPLLKARQQYAYGRQHDYFDHWDVIGWTREGNASHPNSGLATIMSDGPGGSKWMYVGRQKAGEVWHDMTGNRSGTVTINQDGWGHFFVNGGSVSVWVKR

SEQ ID NO: 44067 - protein, 480 aa, Bacillus sp.
NGTIMQYFEWNVPNDGQHWNRLHNNAQNLKNAGITAIWIPPAWKGTSQNDVGYGAYDLYDLGEFNQKGTVRTKYGTKAELERAIRSLKANGIQVYGDVVMNHKGGADFTERVQAVEVNPQNRNQEVSGTYQIEAWTGFNFPGRGNQHSSFKWRWYHFDGTDWDQSRQLANRIYKFRGDGKAWDWEVDTENGNYDYLMYADVDMDHPEVINELNRWGVWYANTLNLDGFRLDAVKHIKFSFMRDWLGHVRGQTGKNLFAVAEYWKNDLGALENYLSKTNWTMSAFDVPLHYNLYQASNSSGNYDMRNLLNVTLVQRHPSHAVTFVDNHDTQPGEALESFVQGWFKPLAYATILTREQGYPQVFYGDYYGIPSDGVPSYRQQIDPLLKARQQYAYGRQHDYFDHWDVIGWTREGNASHPNSGLATIMSDGPGGSKWMYVGRQKAGEVWHDMTGNRSGTVTINQDGWGHFFVNGGSVSVWVKR

SEQ ID NO: 44068 - protein, 480 aa, Bacillus sp.
NGTIMQYFEWNVPNDGQHWNRLHNNAQNLKNAGITAIWIPPAWKGTSQNDVGYGAYDLYDLGEFNQKGTVRTKYGTKAELERAIRSLKANGIQVYGDVVMNHKGGADFTERVQAVEVNPQNRNQEVSGTYQIEAWTGFNFPGRGNQHSSFKWRWYHFDGTDWDQSRQLANRIYKFRGDGKAWDWEVDTENGNYDYLMYADVDMDHPEVINELNRWGVWYANTLNLDGFRLDAVKHIKFSFMRDWLGHVRGQTGKNLFAVAEYWKNDLGALENYLSKTNWTMSAFDVPLHYNLYQASNSSGNYDMRNLLNGTLVQRHPSHAVTFVDNHDTQPGEALESFVQHWFKPLAYATILTREQGYPQVFYGDYYGIPSDGVPSYRQQIDPLLKARQQYAYGRQHDYFDHWDVIGWTREGNASHPNSGLATIMSDGPGGSKWMYVGRQKAGEVWHDMTGNRSGTVTINQDGWGHFFVNGGSVSVWVKR

SEQ ID NO: 44069 - protein, 480 aa, Bacillus sp.
NGTIMQYFEWNVPNDGQHWNMLHNNAQNLKNAGITAIWIPPAWKGTSQNDVGYGAYDLYDLGEFNQKGTVRTKYGTKAELERAIRSLKANGIQVYGDVVMNHKGGADFTERVQAVEVNPQNRNQEVSGTYQIEAWTGFNFPGRGNQHSSFKWRWYHFDGTDWDQSRQLANRIYKFRGDGKAWDWEVDTENGNYDYLMYADVDMDHPEVINELNRWGVWYANTLNLDGFRLDAVKHIKFSFMRDWLGHVRGQTGKNLFAVAEYWKNDLGALENYLSKTNWTMSAFDVPLHYNLYQASNSSGNYDMRNLLNGTLVQRHPSHAVTFVDNHDTQPGEALESFVQGWFKPLAYATILTREQGYPQVFYGDYYGIPSDGVPSYRQQIDPLLKARQQYAYGRQHDYFDHWDVIGWTREGNASHPNSGLATIMSDGPGGSKWMYVGRQKAGEVWHDMTGNRSGTVTINQDGWGHFFVNGGSVSVWVKR

SEQ ID NO: 44070 - protein, 480 aa, Bacillus sp.
NGTLMQYFEWNVPNDGQHWNRLHNNAQNLKNAGITAIWIPPAWKGTSQNDVGYGAYDLYDLGEFNQKGTVRTKYGTKAELERAIRSLKANGIQVYGDVVMNHKGGADFTERVQAVEVNPQNRNQEVSGTYQIEAWTGFNFPGRGNQHSSFKWRWYHFDGTDWDQSRQLANRIYKFRGDGKAWDWEVDTENGNYDYLMYADVDMDHPEVINELNRWGVWYANTLNLDGFRLDAVKHIKFSFMRDWLGHVRGQTGKNLFAVAEYWKNDLGALENYLSKTNWTMSAFDVPLHYNLYQASNSSGNYDMRNLLNGTLVQRHPSHAVTFVDNHDTQPGEALESFVQGWFKPLAYATILTREQGYPQVFYGDYYGIPSDGVPSYRQQIDPLLKARQQYAYGRQHDYFDHWDVIGWTREGNASHPNSGLATIMSDGPGGSKWMYVGRQKAGEVWHDMTGNRSGTVTINQDGWGHFFVNGGSVSVWVKR

SEQ ID NO: 44071 - protein, 480 aa, Bacillus sp.
NGTIMQYFEWNVPNDGQHWNRLHNNAQNLKNAGITAIWIPPAWKGTSQNDVGYGAYDLYDLGEFNQKGTVRTKYGTKAELERAIRSLKANGIQVYGDVVMNHKGGADFTERVQAVEVNPQNRNQEVSGTYQIEAWTGFNFPGRGNQHSSFKWRWYHFDGTDWDQSRQLANRIYKFRGDGKAWDWEVDTENGNYDYLMYADVDMDHPEVINELNRWGVWYANTLNLDGFRLDAVKHIKFSFMRDWLGHVRGQTGKNLFAVAEYWKNDLGALENYLSKTNWTMSAFDVPLHYNLYQASNSSGNYDMRNLLNGTLVLRHPSHAVTFVDNHDTQPGEALESFVQGWFKPLAYATILTREQGYPQVFYGDYYGIPSDGVPSYRQQIDPLLKARQQYAYGRQHDYFDHWDVIGWTREGNASHPNSGLATIMSDGPGGSKWMYVGRQKAGEVWHDMTGNRSGTVTINQDGWGHFFVNGGSVSVWVKR

SEQ ID NO: 44072 - protein, 480 aa, Bacillus sp.
NGTIMQYFEWNVPNDGQHWNRLHNNAQNLKNAGITAIWIPPAWKGTSQNDVGYGAYDLYDLGEFNQKGTVRTKYGTKAELERAIRSLKANGIQVYGDVVMNHKGGADFTERVQAVEVNPQNRNQEVSGTYQIEAWTGFNFPGRGNQHSSFKWRWYHFDGTDWDQSRQLANRIYKFRGDGKAWDWEVDTENGNYDYLMYADVDMDHPEVINELNRWGVWYANTLNLDGFRLDAVKHIKFSFMRDWLGHVRGQTGKNLFAVAEYWKNDLGALENYLSKTNWTMSAFDTPLHYNLYQASNSSGNYDMRNLLNGTLVQRHPSHAVTFVDNHDTQPGEALESFVQGWFKPLAYATILTREQGYPQVFYGDYYGIPSDGVPSYRQQIDPLLKARQQYAYGRQHDYFDHWDVIGWTREGNASHPNSGLATIMSDGPGGSKWMYVGRQKAGEVWHDMTGNRSGTVTINQDGWGHFFVNGGSVSVWVKR

SEQ ID NO: 44073 - protein, 480 aa, Bacillus sp.
NGTIMQYFEWNVPNDGQHWNRLHNNAQNLKNAGITAIWIPPAWKGTSQNDVGYGAYDLYDLGEFNQKGTVRTKYGTKAELERAIRSLKANGIQVYGDVVMNHKGGADFTERVQAVEVNPQNRNQEVSGTYQIEAWTGFNFPGRGNQHSSFKWRWYHFDGTDWDQSRQLANRIYKFRGDGKAWDWEVDTENGNYDYLMYADVDMDHPEVINELNRWGVWYANTLNLDGFRLDAVKHIKFSFMRDWLGHVRGQTGKNLFAVAEYWKNDLGALENYLSKTNWTMSAFDVPLHYNLYQASNSSGNYDMRNLLNGTLVQRHPSHAVTFVDNHDTQPGTALESFVQGWFKPLAYATILTREQGYPQVFYGDYYGIPSDGVPSYRQQIDPLLKARQQYAYGRQHDYFDHWDVIGWTREGNASHPNSGLATIMSDGPGGSKWMYVGRQKAGEVWHDMTGNRSGTVTINQDGWGHFFVNGGSVSVWVKR

SEQ ID NO: 44074 - protein, 480 aa, Bacillus sp.
NGTIMQYFEWNVPNDGQHWNRLHNNAQNLKNAGITAIWIPPAWKGTSQNDVGYGAYDLYDLGEFNQKGTVRTKYGTKAELERAIRSLKANGIQVYGDVVMNHKGGADFTERVQAVEVNPENRNQEVSGTYQIEAWTGFNFPGRGNQHSSFKWRWYHFDGTDWDQSRQLANRIYKFRGDGKAWDWEVDTENGNYDYLMYADVDMDHPEVINELNRWGVWYANTLNLDGFRLDAVKHIKFSFMRDWLGHVRGQTGKNLFAVAEYWKNDLGALENYLSKTNWTMSAFDVPLHYNLYQASNSSGNYDMRNLLNGTLVQRHPSHAVTFVDNHDTQPGEALESFVQGWFKPLAYATILTREQGYPQVFYGDYYGIPSDGVPSYRQQIDPLLKARQQYAYGRQHDYFDHWDVIGWTREGNASHPNSGLATIMSDGPGGSKWMYVGRQKAGEVWHDMTGNRSGTVTINQDGWGHFFVNGGSVSVWVKR

SEQ ID NO: 44075 - protein, 480 aa, Bacillus sp.
NGTIMQYFEWNVPNDGQHWNRLHNNAQNLKNAGITAIWIPPAWKGTSQNDVGYGAYDLYDLGEFNQKGTVRTKYGTKAELERAIRSLKANGIQVYGDVVMNHKGGADFTERVQAVEVNPQNRNQEVSGTYQIEAWTGFNFPGRGNQHSSFKWRWYHFDGTDWDQSRQLANRIYKFRGDGKAWDWEVDTENGNYDYLMYADVDMDHPEVINELNRWGVWYANTLNLDGFRLDAVKHIKFSFVRDWLGHVRGQTGKNLFAVAEYWKNDLGALENYLSKTNWTMSAFDVPLHYNLYQASNSSGNYDMRNLLNGTLVQRHPSHAVTFVDNHDTQPGEALESFVQGWFKPLAYATILTREQGYPQVFYGDYYGIPSDGVPSYRQQIDPLLKARQQYAYGRQHDYFDHWDVIGWTREGNASHPNSGLATIMSDGPGGSKWMYVGRQKAGEVWHDMTGNRSGTVTINQDGWGHFFVNGGSVSVWVKR

SEQ ID NO: 44076 - protein, 480 aa, Bacillus sp.
NGTIMQYFEWNVPNDGQHWNRLHNNAQNLKNAGITAVWIPPAWKGTSQNDVGYGAYDLYDLGEFNQKGTVRTKYGTKAELERAIRSLKANGIQVYGDVVMNHKGGADFTERVQAVEVNPQNRNQEVSGTYQIEAWTGFNFPGRGNQHSSFKWRWYHFDGTDWDQSRQLANRIYKFRGDGKAWDWEVDTENGNYDYLMYADVDMDHPEVINELNRWGVWYANTLNLDGFRLDAVKHIKFSFMRDWLGHVRGQTGKNLFAVAEYWKNDLGALENYLSKTNWTMSAFDVPLHYNLYQASNSSGNYDMRNLLNGTLVQRHPSHAVTFVDNHDTQPGEALESFVQGWFKPLAYATILTREQGYPQVFYGDYYGIPSDGVPSYRQQIDPLLKARQQYAYGRQHDYFDHWDVIGWTREGNASHPNSGLATIMSDGPGGSKWMYVGRQKAGEVWHDMTGNRSGTVTINQDGWGHFFVNGGSVSVWVKR

SEQ ID NO: 44077 - protein, 480 aa, Bacillus sp.
NGTIMQYFEWNVPNDGQHWNRLHNNAQNLKNAGITAIWIPPAWKGTSQNDVGYGAYDLYDLGEFNQKGTVRTKYGTKAELERAIRSLKANGIQVYGDVVMNHKGGADFTERVQAVEVNPQNRNQEVSGTYQIEAWTGFNFPGRGNQHSSFKWRWYHFDGTDWDQSRQLANRIYKFRGDGKAWDWEVDTENGNYDYLMYADVDMDHPEVINELNRWGVWYANTLNLDGFRLDAVKHIKFSFMRDWLGHVRGQTGKNLFAVAEYWKNDLGALENYLSKTNWTMSAFDVPLHYNLYQASNSSGNYDMRNLLNGTLVQRHPSHAVTFVDNHDTQPGEALESFVQGWFKPLAYATILTREQGYPQVFYGDYYGIPSDGVPSYGQQIDPLLKARQQYAYGRQHDYFDHWDVIGWTREGNASHPNSGLATIMSDGPGGSKWMYVGRQKAGEVWHDMTGNRSGTVTINQDGWGHFFVNGGSVSVWVKR

SEQ ID NO: 44078 - protein, 480 aa, Bacillus sp.
NGTIMQYFEWNVPNDGQHWNRLHNNAQNLKNAGITAIWIPPAWKGTSQNDVGYGAYDLYDLGEFNQKGTVRTKYGTKAELERAIRSLKANGIQVYGDVVMNHKGGADFTERVQAVEVNPQNRNQEVSGTYQIEAWTGFNFPGRGNQHSSFKWRWYHFDGTDWDQSRQLANRIYKFRGDGKAWDWEVDTENGNYDYLMYADVDMDHPEVINELNRWGVWYANTLNLDGFRLDAVKHIKFSFMRDWLGHVRGQTGKNLFAVAEYWKNDLGALENYLSKTNWTMSAFDVPLHYNLYQASNSSGNYDMRNLLNGTLVQRHPSHAVTFVDNHDTQPGEALESFVQGWFKPLAYATILTREQGYPQVFYGDYYGIPSDGVPSYRQQIDPLLKARQQYAYGRQHDYFDHWDVIGWTREGNASHPNSGLATIMSDGPGGSKWMYVGRQQAGEVWHDMTGNRSGTVTINQDGWGHFFVNGGSVSVWVKR

SEQ ID NO: 44079 - protein, 480 aa, Bacillus sp.
NGTIMQYFEWNVPNDGQHWNRLHNNAQNLKNAGITAIWIPPAWKGTSQVDVGYGAYDLYDLGEFNQKGTVRTKYGTKAELERAIRSLKANGIQVYGDVVMNHKGGADFTERVQAVEVNPQNRNQEVSGTYQIEAWTGFNFPGRGNQHSSFKWRWYHFDGTDWDQSRQLANRIYKFRGDGKAWDWEVDTENGNYDYLMYADVDMDHPEVINELNRWGVWYANTLNLDGFRLDAVKHIKFSFMRDWLGHVRGQTGKNLFAVAEYWKNDLGALENYLSKTNWTMSAFDVPLHYNLYQASNSSGNYDMRNLLNGTLVQRHPSHAVTFVDNHDTQPGEALESFVQGWFKPLAYATILTREQGYPQVFYGDYYGIPSDGVPSYRQQIDPLLKARQQYAYGRQHDYFDHWDVIGWTREGNASHPNSGLATIMSDGPGGSKWMYVGRQKAGEVWHDMTGNRSGTVTINQDGWGHFFVNGGSVSVWVKR

SEQ ID NO: 44080 - protein, 480 aa, Bacillus sp.
NGTIMQYFEWNVPNDGQHWNRLHNNAQNLKNAGITAIWIPPAWKGTSQNDVGYGAYDLYDLGEFNQKGTVRTKYGTKAELERAIRSLKANGIQVYGDVVMNHKGGADFTERVQAVEVNPQNRNQEVSGTYQIEAWTGFNFPGRGNQHSSFKWRWYHFDGTDWDQSRQLANRIYKFRGDGKAWDWEVDTENGNYDYLMYADVDMDHPEVINELNRWGVWYANTMNLDGFRLDAVKHIKFSFMRDWLGHVRGQTGKNLFAVAEYWKNDLGALENYLSKTNWTMSAFDVPLHYNLYQASNSSGNYDMRNLLNGTLVQRHPSHAVTFVDNHDTQPGEALESFVQGWFKPLAYATILTREQGYPQVFYGDYYGIPSDGVPSYRQQIDPLLKARQQYAYGRQHDYFDHWDVIGWTREGNASHPNSGLATIMSDGPGGSKWMYVGRQKAGEVWHDMTGNRSGTVTINQDGWGHFFVNGGSVSVWVKR

SEQ ID NO: 44081 - protein, 480 aa, Bacillus sp.
NGTIMQYFEWNVPNDGQHWNRLHNNAQNLKNAGITAIWIPPAWKGTSQNDVGYGAYDLYDLGEFNQKGTVRTKYGTKAELERAIRSLKANGIQVYGDVVMNHKGGADFTERVQAVEVNPQNRNQEVSGTYQIEAWTGFNFPGRGNQHSSFKWRWYHFDGTDWDQSRQLANRIYKFRGDGKAWDWEVDTENGNYDYLMYADVDMDHPEVINELMRWGVWYANTLNLDGFRLDAVKHIKFSFMRDWLGHVRGQTGKNLFAVAEYWKNDLGALENYLSKTNWTMSAFDVPLHYNLYQASNSSGNYDMRNLLNGTLVQRHPSHAVTFVDNHDTQPGEALESFVQGWFKPLAYATILTREQGYPQVFYGDYYGIPSDGVPSYRQQIDPLLKARQQYAYGRQHDYFDHWDVIGWTREGNASHPNSGLATIMSDGPGGSKWMYVGRQKAGEVWHDMTGNRSGTVTINQDGWGHFFVNGGSVSVWVKR

SEQ ID NO: 44082 - protein, 480 aa, Bacillus sp.
NGTIMQYFEWNVPNDGQHWNRLHNNAQNLKNAGITAIWIPPAWKGTSQNDVGYGAYDLYDLGEFNQKGTVRTKYGTKAELERAIRSLKANGIQVYGDVVMNHKGGADFTERVQAVEVNPQNRNQEVSGTYQIEAWTGFNFPGRGNQHSSFKWRWYHFDGTDWDQSRQLANRIYKFRGDGKAWDWEVDTENGNYDYLMYADVDMDHPEVINELNRWGVWYANTLNLDGFRLDAVKHIKFSFMRDWLGHVRGQTGKNLFAVAEYWKNDLGALENYLSKTNWTMSAFDVPLHYNLYQASNSSGNYDMRNLLNGTLVQRHPSHAVTFVDNHDTQPGEALESFVQGWFKPLAYATILTREQGYPQVFYGDYYGIPSDGVPSYRQQIDPLLKARQQYAYGRQHDYFDHWDVIGWTREGNASHPNSGLATIMSDGPGGSKWMYVGRQKAGEVWHDMTGNRSGTVTINQDGWGQFFVNGGSVSVWVKR

SEQ ID NO: 44083 - protein, 480 aa, Bacillus sp.
NGTIMQYFEWNVPNDGQHWNRLHNNAQNLKNAGITAIWIPPAWKGTSQNDVGYGAYDLYDLGEFNQKGTVRTKYGTKAELERAIRSLKANGIQVYGDVVMNHKGGADFTERVQAVEVNPQNRNQEVSGTYQIEAWTGFNFPGRGNQHSSFKWRWYHFDGTDWDQSRQLANRIYKFRGDGKAWDWEVDTENGNYDYLMYADVDMDHPEVINELNRWGVWYANTLNLDGFRLDAVKHIKFSFMRDWLGHVRGQTGKNLFAVAEYWKNDLGALENYLSKTNWTMSAFDVPLHYNLYQASNSSGNYDMRNLLNGTLVQRHPSHAVTFVDNHDTQPGEALESFVQGWFKPLAYATILTREQGYPQVFYGDYYGIPSDGVPSYRQQIDPLLKARQQYAYGRQHDYFDHDDVIGWTREGNASHPNSGLATIMSDGPGGSKWMYVGRQKAGEVWHDMTGNRSGTVTINQDGWGHFFVNGGSVSVWVKR

SEQ ID NO: 44084 - protein, 480 aa, Bacillus sp.
NGTIMQYFEWNVPNDGQHWNRLHNNAQNLKNAGITAIWIPPAWKGTSQNDVGYGAYDLYDLGEFNQKGTVRTKYGTKAELERAIRSLKANGIQVYGDVVMNHKGGADFTERVQAVEVNPQNRNQEVSGTYQIEAWTGFNFPGRGNQHSSFKWRWYHFDGTDWDQSRQLANRIYKFRGDGKAWDWEVDTENGNYDYLMYADVDMDHPEVINELNRWGVWYANTLNLDGFRLDAVKHIKFSFMRDWLGHVRGQTGKNLFCVAEYWKNDLGALENYLSKTNWTMSAFDVPLHYNLYQASNSSGNYDMRNLLNGTLVQRHPSHAVTFVDNHDTQPGEALESFVQGWFKPLAYATILTREQGYPQVFYGDYYGIPSDGVPSYRQQIDPLLKARQQYAYGRQHDYFDHWDVIGWTREGNASHPNSGLATIMSDGPGGSKWMYVGRQKAGEVWHDMTGNRSGTVTINQDGWGHFFVNGGSVSVWVKR

SEQ ID NO: 44085 - protein, 480 aa, Bacillus sp.
NGTIMQYFEWNVPNDGQHWNRLHNNAQNLKNAGITAIWIPPAWKGTSQNDVGYGAYDLYDLGEFNQKGTVRTKYGTKAELERAIRSLKANGIQVYGDVVMNHKGGADFTERVQAVEVNPQNRNQEVSGTYQIEAWTGFNFPGRGNQHSSFKWRWYHFDGTDWDQSRQLANRIYKFRGDGKAWDWEVDTENGNYDYLMYADVDMDHPEVINELNRWGVWYANTLNLDGFRLDAVKHIKFSFMRDWLGHVRGQTGKNLFAVAEYWKNDLGALENYLSKTNWTMSAFDVPLHYNLYQASNSSGNYDMRNLLNGTLVQRHPSHAVTFVDNHDTQPGEALESFVQGWFKPLAYATILTREDGYPQVFYGDYYGIPSDGVPSYRQQIDPLLKARQQYAYGRQHDYFDHWDVIGWTREGNASHPNSGLATIMSDGPGGSKWMYVGRQKAGEVWHDMTGNRSGTVTINQDGWGHFFVNGGSVSVWVKR

SEQ ID NO: 44086 - protein, 480 aa, Bacillus sp.
NGTIMQYFEWNVPNDGQHWNRLHNNAQNLKNAGITAIWIPPAWKGTSQNDVGYGAYDLYDLGEFNQKGTVRTKYGTKAELERAIRSLKANGIQVYGDVVMNHKGGADFTERVQAVEVNPQNRNQEVSGTYQIEAWTGFNFPGRGNQHSSFKWRWYHFDGTDWDQSRQLANRIYKFRGDGKAWDWEVDTENGNYDYLMYADVDMDHPEVINELNRWGVWYANTLNLDGFRLDAVKHIKFSFMRDWLGHVRGQTGKNLFAVAEYWKNDLGALENYLSKTNWTMSAFDVPLHYNLYQASNSSGNYDMRNLLNGTLVQRHPSHAVTFVDNHDTQPGEALESFVQGWFKPLAYATILTREQGYPQVFYGDYYGIPSDGVPSYRQQIDPLLKARQQYAYGSQHDYFDHWDVIGWTREGNASHPNSGLATIMSDGPGGSKWMYVGRQKAGEVWHDMTGNRSGTVTINQDGWGHFFVNGGSVSVWVKR

SEQ ID NO: 44087 - protein, 480 aa, Bacillus sp.
NGTIMQYFEWNVPNDGQHWNRLHNNAQNLKNAGITAIWIPPAWKGTSQNDVGYGAYDLYDLGEFNQKGTVRTKYGTKAELERAIRSLKANGIQVYGDVVMNHKGGADFTERVQAVEVNPQNRNQEVSGTYQIEAWTGFNFPGRGNQHSSFKWRWYHFDGTDWDQSRQLANRIYKFRGDGKAWDWEVDTENGNYDYLMYADVDMDHPEVINELNRWGVWYANTLNLDGFRLDAVKHIKFSFMRDWLGHVRGQTGKNLFAVAEYWKNDLGALENYLSKTNWTMSAFDVPLHYNLYRASNSSGNYDMRNLLNGTLVQRHPSHAVTFVDNHDTQPGEALESFVQGWFKPLAYATILTREQGYPQVFYGDYYGIPSDGVPSYRQQIDPLLKARQQYAYGRQHDYFDHWDVIGWTREGNASHPNSGLATIMSDGPGGSKWMYVGRQKAGEVWHDMTGNRSGTVTINQDGWGHFFVNGGSVSVWVKR

SEQ ID NO: 44088 - protein, 480 aa, Bacillus sp.
NGTIMQYFEWNVPNDGQHWNRLHNNAQNLKNAGITAIWIPPAWKGTSGNDVGYGAYDLYDLGEFNQKGTVRTKYGTKAELERAIRSLKANGIQVYGDVVMNHKGGADFTERVQAVEVNPQNRNQEVSGTYQIEAWTGFNFPGRGNQHSSFKWRWYHFDGTDWDQSRQLANRIYKFRGDGKAWDWEVDTENGNYDYLMYADVDMDHPEVINELNRWGVWYANTLNLDGFRLDAVKHIKFSFMRDWLGHVRGQTGKNLFAVAEYWKNDLGALENYLSKTNWTMSAFDVPLHYNLYQASNSSGNYDMRNLLNGTLVQRHPSHAVTFVDNHDTQPGEALESFVQGWFKPLAYATILTREQGYPQVFYGDYYGIPSDGVPSYRQQIDPLLKARQQYAYGRQHDYFDHWDVIGWTREGNASHPNSGLATIMSDGPGGSKWMYVGRQKAGEVWHDMTGNRSGTVTINQDGWGHFFVNGGSVSVWVKR

SEQ ID NO: 44089 - protein, 480 aa, Bacillus sp.
NGTIMQYFEWNVPNDGQHWNRLHNNAQNLKNAGITAIWIPPAWKGTSQNDVGYGAYDLYDLGEFNQKGTVRTKYGTKAELERAIRSLKANGIQVYGDVVMNHKGGADFTERVQAVEVNPQNRNQEVSGTYQIEAWTGFNFPGRGNQHSSFKWRWYHFDGTDWDQSRSLANRIYKFRGDGKAWDWEVDTENGNYDYLMYADVDMDHPEVINELNRWGVWYANTLNLDGFRLDAVKHIKFSFMRDWLGHVRGQTGKNLFAVAEYWKNDLGALENYLSKTNWTMSAFDVPLHYNLYQASNSSGNYDMRNLLNGTLVQRHPSHAVTFVDNHDTQPGEALESFVQGWFKPLAYATILTREQGYPQVFYGDYYGIPSDGVPSYRQQIDPLLKARQQYAYGRQHDYFDHWDVIGWTREGNASHPNSGLATIMSDGPGGSKWMYVGRQKAGEVWHDMTGNRSGTVTINQDGWGHFFVNGGSVSVWVKR

SEQ ID NO: 44090 - protein, 480 aa, Bacillus sp.
NGTIMQYFEWNVPNDGQHWNRLHNNAQNLKNAGITAIWIPPAWKGTSQNDVGYGAYDLYDLGEFNQKGTVRTKYGTKAELERAIRSLKANGIQVYGDVVMNHKGGADFTERVQAVEVNPQNRNQEVSGTYQIEAWTGFNFPGRGNLHSSFKWRWYHFDGTDWDQSRQLANRIYKFRGDGKAWDWEVDTENGNYDYLMYADVDMDHPEVINELNRWGVWYANTLNLDGFRLDAVKHIKFSFMRDWLGHVRGQTGKNLFAVAEYWKNDLGALENYLSKTNWTMSAFDVPLHYNLYQASNSSGNYDMRNLLNGTLVQRHPSHAVTFVDNHDTQPGEALESFVQGWFKPLAYATILTREQGYPQVFYGDYYGIPSDGVPSYRQQIDPLLKARQQYAYGRQHDYFDHWDVIGWTREGNASHPNSGLATIMSDGPGGSKWMYVGRQKAGEVWHDMTGNRSGTVTINQDGWGHFFVNGGSVSVWVKR

SEQ ID NO: 44091 - protein, 480 aa, Bacillus sp.
NGTIMQYFEWNVPNDGQHWNRLHNNAQNLKNAGITAIWIPPAWKGTSQNDVGYGAYDLYDLGEFNQKGTVRTKYGTKAELERAIRSLKANGIQVYGDVVMNHKGGADFTERVQAVEVNPQNRNQEVSGTYQIEAWTGFNFPGRGNQHSSFKWRWYHFDGTDWDQSRQLANRIYKFRGDGKAWDWEVDTENGNYDYLMYADVDMDHPEVINELNRWGVWYANTLNLDGFRLDAVKHIKFSFMRDWLGHVRGQTGKNLFAVAEYWKNDLGALENYLSKTAWTMSAFDVPLHYNLYQASNSSGNYDMRNLLNGTLVQRHPSHAVTFVDNHDTQPGEALESFVQGWFKPLAYATILTREQGYPQVFYGDYYGIPSDGVPSYRQQIDPLLKARQQYAYGRQHDYFDHWDVIGWTREGNASHPNSGLATIMSDGPGGSKWMYVGRQKAGEVWHDMTGNRSGTVTINQDGWGHFFVNGGSVSVWVKR

SEQ ID NO: 44092 - protein, 480 aa, Bacillus sp.
NGTIMQYFEWNVPNDGQHWNRLHNNAQNLKNAGITAIWIPPAWKGTSQNDVGYGAYDLYDLGEFNQKGTVRTKYGTKAELERAIRSLKANGIQVYGDVVMNHKGGADFTERVQAVEVNPQNRNQEVSGTYQIEAWTGFNFPGRGNQHSSFKWRWYHFDGTDWDQSRQLANRIYKFRGDGKAWDWEVDTENGNYDYLMYADVDMDHPEVINELNRWGVWYKNTLNLDGFRLDAVKHIKFSFMRDWLGHVRGQTGKNLFAVAEYWKNDLGALENYLSKTNWTMSAFDVPLHYNLYQASNSSGNYDMRNLLNGTLVQRHPSHAVTFVDNHDTQPGEALESFVQGWFKPLAYATILTREQGYPQVFYGDYYGIPSDGVPSYRQQIDPLLKARQQYAYGRQHDYFDHWDVIGWTREGNASHPNSGLATIMSDGPGGSKWMYVGRQKAGEVWHDMTGNRSGTVTINQDGWGHFFVNGGSVSVWVKR

SEQ ID NO: 44093 - protein, 480 aa, Bacillus sp.
NGTIMQYFEWNVPNDGQHWNRLHNNAQNLKNAGITAIWIPPAWKGTSQNDVGYGAYDLYDLGEFNQKGTVRTKYGTKAELERAIRSLKANGIQVYGDVVMNHKGGADFTERVQAVEVNPQNRNQEVSGTYQIEAWTGFNFPGRGNQHSSFKWRWYHFDGTDWDQSRQLANRIYKFRGDGKAWDWEVDTENGNYDYLMYADVDMDHPEVINELNRWGVWYANTLNLDGFRLDAVKHIKFSFMRDWLGHVRGQTGKNLFAVAEYWKNDLGALENYLSKTNVTMSAFDVPLHYNLYQASNSSGNYDMRNLLNGTLVQRHPSHAVTFVDNHDTQPGEALESFVQGWFKPLAYATILTREQGYPQVFYGDYYGIPSDGVPSYRQQIDPLLKARQQYAYGRQHDYFDHWDVIGWTREGNASHPNSGLATIMSDGPGGSKWMYVGRQKAGEVWHDMTGNRSGTVTINQDGWGHFFVNGGSVSVWVKR

SEQ ID NO: 44094 - protein, 480 aa, Bacillus sp.
NGTCMQYFEWNVPNDGQHWNRLHNNAQNLKNAGITAIWIPPAWKGTSQNDVGYGAYDLYDLGEFNQKGTVRTKYGTKAELERAIRSLKANGIQVYGDVVMNHKGGADFTERVQAVEVNPQNRNQEVSGTYQIEAWTGFNFPGRGNQHSSFKWRWYHFDGTDWDQSRQLANRIYKFRGDGKAWDWEVDTENGNYDYLMYADVDMDHPEVINELNRWGVWYANTLNLDGFRLDAVKHIKFSFMRDWLGHVRGQTGKNLFAVAEYWKNDLGALENYLSKTNWTMSAFDVPLHYNLYQASNSSGNYDMRNLLNGTLVQRHPSHAVTFVDNHDTQPGEALESFVQGWFKPLAYATILTREQGYPQVFYGDYYGIPSDGVPSYRQQIDPLLKARQQYAYGRQHDYFDHWDVIGWTREGNASHPNSGLATIMSDGPGGSKWMYVGRQKAGEVWHDMTGNRSGTVTINQDGWGHFFVNGGSVSVWVKR

SEQ ID NO: 44095 - protein, 480 aa, Bacillus sp.
NGTIMQYFEWNVPNDGQHWNRLHNNAQNLKNAGITAIWIPPAWKGTSQNDVGYGAYDLYDLGEFNQKGTVRTKYGTKAELERAIRSLKANGIQVYGDVVMNHKGGADFTERVQAVEVNPQNRNQEVSGTYQIEAWTGFNFPGRGNQHSSFKWRWYHFDGTDWDQSRQLANRIYKFRGDGKAWDWEVDTENGNYDYLMYADVDMDHPEVINELNRWGVWYANTLNLDGFRLDAVKHIKFSFMRDWLGHVRGQTGKNLFAVAEYWKGDLGALENYLSKTNWTMSAFDVPLHYNLYQASNSSGNYDMRNLLNGTLVQRHPSHAVTFVDNHDTQPGEALESFVQGWFKPLAYATILTREQGYPQVFYGDYYGIPSDGVPSYRQQIDPLLKARQQYAYGRQHDYFDHWDVIGWTREGNASHPNSGLATIMSDGPGGSKWMYVGRQKAGEVWHDMTGNRSGTVTINQDGWGHFFVNGGSVSVWVKR

SEQ ID NO: 44096 - protein, 480 aa, Bacillus sp.
NGTIMQYFEWNVPNDGQHWNRLHNNAQNLKNAGITAIWIPPAWKGTSQNDVGYGAYDLYDLGEFNQKGTVRTKYGTKAELERAIRSLKANGIQVYGDVVMNHKGGADFTERVQAVEVNPQNRNQEVSGTYQIEAWTGFNFPGRGNQHSSFKWRWYHFDGTDWDQSRQLANRIYKFRGDGKAWDWEVDTENGNYDYLMYADVDMDHPEVINELNRWGVWYANTLNLDGFRLDAVKHIKFSFMRDWLGHVRGQTGKNLFAVAEYWKNDLGALENYLSKTNWTMSAFDVPLHYNLYQASNSSGNYDMRNLLNGTLVQRHPSHAVTFVDNHDTQPGEALESFVQGWFKPLAYATILTREQGYPQVFYGDYYGIPSDGVPSYRQQIDPLLYARQQYAYGRQHDYFDHWDVIGWTREGNASHPNSGLATIMSDGPGGSKWMYVGRQKAGEVWHDMTGNRSGTVTINQDGWGHFFVNGGSVSVWVKR

SEQ ID NO: 44097 - protein, 480 aa, Bacillus sp.
NGTIMQYFEWNVPNDGQHWNRLHNNAQNLKNAGITAIWIPPAGKGTSQNDVGYGAYDLYDLGEFNQKGTVRTKYGTKAELERAIRSLKANGIQVYGDVVMNHKGGADFTERVQAVEVNPQNRNQEVSGTYQIEAWTGFNFPGRGNQHSSFKWRWYHFDGTDWDQSRQLANRIYKFRGDGKAWDWEVDTENGNYDYLMYADVDMDHPEVINELNRWGVWYANTLNLDGFRLDAVKHIKFSFMRDWLGHVRGQTGKNLFAVAEYWKNDLGALENYLSKTNWTMSAFDVPLHYNLYQASNSSGNYDMRNLLNGTLVQRHPSHAVTFVDNHDTQPGEALESFVQGWFKPLAYATILTREQGYPQVFYGDYYGIPSDGVPSYRQQIDPLLKARQQYAYGRQHDYFDHWDVIGWTREGNASHPNSGLATIMSDGPGGSKWMYVGRQKAGEVWHDMTGNRSGTVTINQDGWGHFFVNGGSVSVWVKR

SEQ ID NO: 44098 - protein, 480 aa, Bacillus sp.
NGTIMQYFEWNVPNDGQHWNRLHNNAQNLKNAGITAIWIPPAWKGTSQNDVGYGAYDLYDLGEFNQKGTVRTKYGTKAELERAIRSLKANGIQVYGDVVMNHKGGADFTERVQAVEVNPQNRNQEVSGTYQIEAWTGFNFPGRGNQHSSFKWRWYHFDGTDWDQSRQLANRIYKFRGDGKAWDWEVDTENGNYDYLMYADVDMDHPEVINELNRWGVWYANTLNLDGFRLDAVKHIKFSFMRDWLGHVRGQTGKNLFAVAEYWKNDLGALENYLSKTNWTMSAFDVPLHYNLYQASNSSGNYDMRNLLNGTLVQRHPSHAVTFVDNHDTQPGEALSSFVQGWFKPLAYATILTREQGYPQVFYGDYYGIPSDGVPSYRQQIDPLLKARQQYAYGRQHDYFDHWDVIGWTREGNASHPNSGLATIMSDGPGGSKWMYVGRQKAGEVWHDMTGNRSGTVTINQDGWGHFFVNGGSVSVWVKR

SEQ ID NO: 44099 - protein, 480 aa, Bacillus sp.
NGTIMQYFEWNVPNDGQHWNRLHNNAQNLKNAGITAIWIPPAWKGTSQNDVGYGAYDLYDLGEFNQKGTVRTKYGTKAELERAIRSLKANGIQVYGDVVMNHKGGADFTERVQAVEVNPQNRNQEVSGTYQIEAWTGFNFPGRGNQHSSFKWRWYHFDGTDWDQSRQLANRIYKFRGDGKAWDWEVDTENGNYDYLMYADVDMDHPEVINELNRWGVWYANTLNLDGFRLDAVKHIKFSFMRDWLGHVRGQTGKNLFAVAEYWKNDLGALENYLSKTNWTMSAFDVPLHYNLYQASNSSGNYDMRNLLNGTLVDRHPSHAVTFVDNHDTQPGEALESFVQGWFKPLAYATILTREQGYPQVFYGDYYGIPSDGVPSYRQQIDPLLKARQQYAYGRQHDYFDHWDVIGWTREGNASHPNSGLATIMSDGPGGSKWMYVGRQKAGEVWHDMTGNRSGTVTINQDGWGHFFVNGGSVSVWVKR

SEQ ID NO: 44100 - protein, 480 aa, Bacillus sp.
NGTIMQYFEWNVPNDGQHWNRLHNNAQNLKNAGITAIWIPPAWKGTSQNDVGYGAYDLYDLGEFNQKGTVRTKYGTKAELERAIRSLKANGIQVYGDVVMNHKGGADFTERVQAVEVNPQNRNQEVSGTYQIEAWTGFNFPGRGNQHSSFKWRWYHFDGTDWDQSRQLANRIYKFRGDGKAWDWEVDTENGNYDYLMYADVDMDHPEVINELNRWGVWYANTLNLDGFRLDAVKHIKFSFMRDWLGHVRGQTGKNLFAVAEYWKNDLGALENYLSKTNWTMSAFDVPLHYNLYQASNSSGNYDMRNLLNGTLVARHPSHAVTFVDNHDTQPGEALESFVQGWFKPLAYATILTREQGYPQVFYGDYYGIPSDGVPSYRQQIDPLLKARQQYAYGRQHDYFDHWDVIGWTREGNASHPNSGLATIMSDGPGGSKWMYVGRQKAGEVWHDMTGNRSGTVTINQDGWGHFFVNGGSVSVWVKR

SEQ ID NO: 44101 - protein, 480 aa, Bacillus sp.
NGTIMQYFEWNVPNDGQHWNRLHNNAQNLKNAGITAIWIPPAWKGTSQNDVGYGAYDLYDLGEFNQKGTVRTKYGTKAELERAIRSLKANGIQVYGDVVMNHKGGADFTERVQAVEVNPQNRNQEVSGTYQIEAWTGFNFPGRGNQHSSFKWRWYHFDGTDWDQSRQLANRIYKFRGDGKAWDWEVDTENGNYDYLMYADVDMDHPEVINELNRWGVWYANTLNLDGFRLDAVKHIKFSFMRDWLGHVRGQTGKNLFAVAEYWKNDLGALENYLSKTNWTMSAFDVPLHYNLYQASNSSGNYDMRNLLNGTLVQRHPSHAVTFVDNHDTQPGEALESFVQGWFKPLAYATILTREQGYPQVFYGDYYGIPSDGVPSYRQQIDPLLKARQQYAYGRQHDYFDHWDVIGWTREGNMSHPNSGLATIMSDGPGGSKWMYVGRQKAGEVWHDMTGNRSGTVTINQDGWGHFFVNGGSVSVWVKR

SEQ ID NO: 44102 - protein, 480 aa, Bacillus sp.
NGTIMQYFEWNVPNDGQHWNRLHNNAQNLKNAGITAIWIPPAWKGTSQNDVGYGAYDLYDLGEFNQKGTVRTKYGTKAELERAIRSLKANGIQVYGDVVMNHKGGADFTERVVAVEVNPQNRNQEVSGTYQIEAWTGFNFPGRGNQHSSFKWRWYHFDGTDWDQSRQLANRIYKFRGDGKAWDWEVDTENGNYDYLMYADVDMDHPEVINELNRWGVWYANTLNLDGFRLDAVKHIKFSFMRDWLGHVRGQTGKNLFAVAEYWKNDLGALENYLSKTNWTMSAFDVPLHYNLYQASNSSGNYDMRNLLNGTLVQRHPSHAVTFVDNHDTQPGEALESFVQGWFKPLAYATILTREQGYPQVFYGDYYGIPSDGVPSYRQQIDPLLKARQQYAYGRQHDYFDHWDVIGWTREGNASHPNSGLATIMSDGPGGSKWMYVGRQKAGEVWHDMTGNRSGTVTINQDGWGHFFVNGGSVSVWVKR

SEQ ID NO: 44103 - protein, 480 aa, Bacillus sp.
NGTIMQYFEWNVPNDGQHWNRLHNNAQNLKNAGITAIWIPPAWKGTSQNDVGYGAYDLYDLGEFNQKGTVRTKYGTKAELERAIRSLKANGIQVYGDVVMNHKGGADFTERVQAVEVNPQNRNQEVSGTYQIEAWTGFNFPGRGNQHSSFKWRWYHFDGTDWDQSRQLANRIYKFRGDGKAWDWEVDTENGNYDYLMYADVDMDHPEVINELNRWGVWYANTLNLDGFRLDAVKHIKFSFMRDWLGHVRGQTGKNLFAVAEYWKNDLGALENYLSKTNWTMSAFDVPLHYNLYQASNSSGNYDMRNLLNGTLVQRHPSHAVTFVDNHDTQPGEALESFVQGWFKPLAYATILTREQGYPQVFYGDYYGIPSDGVPSYRQQIDPLLKARQQYAYGRQHDYFDHWDVIGWTREGNASHPNSGLATIMSDGPGGSKWMYVGRQKAGEVWADMTGNRSGTVTINQDGWGHFFVNGGSVSVWVKR

SEQ ID NO: 44104 - protein, 480 aa, Bacillus sp.
NGTIMQYFEWNVPNDGQHWNGLHNNAQNLKNAGITAIWIPPAWKGTSQNDVGYGAYDLYDLGEFNQKGTVRTKYGTKAELERAIRSLKANGIQVYGDVVMNHKGGADFTERVQAVEVNPQNRNQEVSGTYQIEAWTGFNFPGRGNQHSSFKWRWYHFDGTDWDQSRQLANRIYKFRGDGKAWDWEVDTENGNYDYLMYADVDMDHPEVINELNRWGVWYANTLNLDGFRLDAVKHIKFSFMRDWLGHVRGQTGKNLFAVAEYWKNDLGALENYLSKTNWTMSAFDVPLHYNLYQASNSSGNYDMRNLLNGTLVQRHPSHAVTFVDNHDTQPGEALESFVQGWFKPLAYATILTREQGYPQVFYGDYYGIPSDGVPSYRQQIDPLLKARQQYAYGRQHDYFDHWDVIGWTREGNASHPNSGLATIMSDGPGGSKWMYVGRQKAGEVWHDMTGNRSGTVTINQDGWGHFFVNGGSVSVWVKR

SEQ ID NO: 44105 - protein, 480 aa, Bacillus sp.
NGTIMQYFEWNVPNDGQHWNRLHNNAQNLKNAGITAIWIPPAWKGTSQNDVGYGAYDLYDLGEFNQKGTVRTKYGTKAELERAIRSLKANGIQVYGDVVMNHKGGADFTERVQAVEVNPQNRNQEVSGTYQIEAWTGFNFPGRGNQHSSFKWRWYHFDGTDWDQSRQLANRIYKFRGDGKAWDWEVDTENGNYDYLMYADVDMDHPEVINELNRWGVWYANTLNLDGFRLDAVKHIKFSFMRDWLGHVRGQTGKNLFAVAEYWKNDLGALENYLSKTNWTMSAFDVPLHYNLYQASNSSGNYDMRNLLNGTLVQRHPSHAVTFVDNHDTQPGEALESFVQGWFKPLAYATILTREQGYPQVFYGDYYGIPADGVPSYRQQIDPLLKARQQYAYGRQHDYFDHWDVIGWTREGNASHPNSGLATIMSDGPGGSKWMYVGRQKAGEVWHDMTGNRSGTVTINQDGWGHFFVNGGSVSVWVKR

SEQ ID NO: 44106 - protein, 480 aa, Bacillus sp.
NGTIMQYFEWNVPNDGQHWNRLHNNAQNLKNAGITAIWIPPAWKGTSQNDVGYGAYDLYDLGEFNQKGTVRTKYGTKAELERAIRSLKANGIQVYGDVVMNHKGGADFTERVQAVEVNPQNRNQEVSGTYQIEAWTGFNFPGRGNQHSSFKWRWYHFDGTDWDQSRQLANRIYKFRGDGKAWDWEVDTENGNYDYLMYADVDMDHPEVINELNRWGVWYANTLNLDGFRLDAVKHIKFSFMRDWLGHVRGQTGKNLFAVAEYWKNDLGALENYLSKTNWTMSAFDVPLHYNLYQASNSSGNYDMRNLLNGTLVQRHPSHAVTFVDNHDTQPGEALESFVQGWFKPLAYATILTREQGYPQVFYGDYYGIPSDGVPSYRQQIDPLLKARQQYAYGRQHDYFDHWDVIGWTREGNASHPNSGLATIMSDGPGGSKWMYVGRQKAGEVWHDMTGNRSGTVTINQDGWGHFGVNGGSVSVWVKR

SEQ ID NO: 44107 - protein, 480 aa, Bacillus sp.
NGTIMQYFEWNVPNDGQHWNRLHNNAQNLKNAGITAIWIPPAWKGTSQNDVGYGAYDLYDLGEFNQKGTVRTKYGTKAELERAIRSLKANGIQVYGDVVMNHKGGADFTERVQAVEVNPQNRNQEVSGTYQIEAWTGFNFPGRGNQHSSFKWRWYHFDGTDWDQSRQLANRIYKFRGDGKAWDWEVDTENGNYDYLMYADVDMDHPEVINELNRWGVWYANTLNLDGFRLDAVKHIKFSFMRDWLGHVRGQTGKNLFAVAEYWKNDLGALENYTSKTNGTMSAFDVPLHYNLYQASNSSRNYDMRNLLNGTLVQRHPSNAVTFVDNHDTQPGEALESFVQGWFKPLAYATILTREQGYPQVFYGDYYGIPSDGVPSYRQQIDPLLKARQQYAYGRQHDYFDHWDVIGWTREGNASHPNSGLATIMSDGPGGSKWMYVGRQKAGEVWHDMTGNRSGTVTINQDGWGHFFVNGGSVSVWVKR

SEQ ID NO: 44108 - protein, 480 aa, Bacillus sp.
NGTIMQYFEWNVPNDGQHWNRLHNNAQNLKNAGITAIWIPPAWKGTSQNDVGYGAYDLYDLGEFNQKGTVRTKYGTKAELERAIRSLGANGIQVYGDVVMNHKGGADFTERVQAVEVNPQNRNQEVSGTYQIEAWTGFNFPGRGNQHSSFKWRWYHFDGTDWDQSRQLANRIYKFRGDGKAWDWEVDTENGNYDYLMYADVDMDHPEVINELNRWGVWYANTLNLDGFRLDAVKHIKFSFMRDWLGHVRGQTGKNLFAVAEYWKNDLGALENYLSKTNWTMSAFDVPLHYNLYQASNSSGNYDMRNLLNGTLVQRHPSHAVTFVDNHDTQPGEALESFVQGWFKPLAYATILTREQGYPQVFYGDYYGIPSDGVPSYRQQIDPLLKARQQYAYGRQHDYFDHWDVIGWTREGNASHPNSGLATIMSDGPGGSKWMYVGRQKAGEVWHDMTGNRSGTVTINQDGWGHFFVNGGSVSVWVKR

SEQ ID NO: 44109 - protein, 480 aa, Bacillus sp.
NGTIMQYFEWNVPNDGQHWNRLHNNAQNLKNAGITAIWIPPAWKGTSQNDVGYGAYDLYDLGEFNQKGTVRTKYGTKAELERAIRSLKANGIQVYGDVVMNHKGGADFTERVQAVEVNPQNRNQEVSGTYQIEAWTGFNFPGRGNQHSSFKWRWYHFDGTDWDQSRQLANRIYKFRGDGKAWDWEVDTENGNYDYLMYADVDMDHPEVINELNRWGVWYANTLNVDGFRLDAVKHIKFSFMRDWLGHVRGQTGKNLFAVAEYWKNDLGALENYLSKTNWTMSAFDVPLHYNLYQASNSSGNYDMRNLLNGTLVQRHPSHAVTFVDNHDTQPGEALESFVQGWFKPLAYATILTREQGYPQVFYGDYYGIPSDGVPSYRQQIDPLLKARQQYAYGRQHDYFDHWDVIGWTREGNASHPNSGLATIMSDGPGGSKWMYVGRQKAGEVWHDMTGNRSGTVTINQDGWGHFFVNGGSVSVWVKR

SEQ ID NO: 44110 - protein, 480 aa, Bacillus sp.
NGTIMQYFEWNVPNDGQHWNRLHNNAQNLKNAGITAIWIPPAWKGTSQNDVGYGAYDLYDLGEFNQKGTVRTKYGTKAELERAIRSLKANGIQVYGDVVMNHKGGADFTERVQAVEVNPQNRNQEVSGTYQIEAWTGFNFPGRGNQHSSFKWRWYHFDGTDWDQSRQLANRIYKFRGDGKAWDWEVDTENGNYDYLMYADVDMDHPEVINELLRWGVWYANTLNLDGFRLDAVKHIKFSFMRDWLGHVRGQTGKNLFAVAEYWKNDLGALENYLSKTNWTMSAFDVPLHYNLYQASNSSGNYDMRNLLNGTLVQRHPSHAVTFVDNHDTQPGEALESFVQGWFKPLAYATILTREQGYPQVFYGDYYGIPSDGVPSYRQQIDPLLKARQQYAYGRQHDYFDHWDVIGWTREGNASHPNSGLATIMSDGPGGSKWMYVGRQKAGEVWHDMTGNRSGTVTINQDGWGHFFVNGGSVSVWVKR

SEQ ID NO: 44111 - protein, 480 aa, Bacillus sp.
NGTIMQYFEWNVPNDGQHWNRLHNNAQNLKNAGITAIWIPPAWKGTSQNDVGYGAYDLYDLGEFNQKGTVRTKYGTKAELERAIRSLKANGIQVYGDVVMNHKGGADFTERVQAVEVNPQNRNQEVSGTYQIEAWTGFNFPGRGNQHSSFKWRWYHFDGTDWDQSRQLANRIYKFRGDGKAWDWEVDTENGNYDYLMYADVDMDHPEVINELNRWGVWYANTLNLDGFRLDAVKHIKFSFMRDWLGHVRGQTGKNLFAVAEYWKNDLGALENYLSKTNWTMSAFDVPLHYNLYQASNSSGNYDMRNLLNGTLVQRHPSHAVTFVDNHDTQPGEALESFVQGWFKPLAYAVILTREQGYPQVFYGDYYGIPSDGVPSYRQQIDPLLKARQQYAYGRQHDYFDHWDVIGWTREGNASHPNSGLATIMSDGPGGSKWMYVGRQKAGEVWHDMTGNRSGTVTINQDGWGHFFVNGGSVSVWVKR

SEQ ID NO: 44112 - protein, 480 aa, Bacillus sp.
NGTIMQYFEWNVPNDGQHWNRLHNNAQNLKNAGITAIWIPPAWKGTSQNDVGYGAYDLYDLGEFNQKGTVRTKYGTKAELERAIRSLKANGIQVYGDVVMNHKGGADFTERVQAVEVNPQNRNQEVSGTYQIEAWTGFNFPGRGNQHSSFKWRWYHFDGTDWDQSRQLANRIYKFRGDGKAWDWEVDTENGNYDYLMYADVDMDHPEVINELNRWGVWYANTLNLDGFRLDAVKHIKFSFMRDWLGHVRGQTGKNLFAVAEYWKNDLGALENYLSKTNWTMSAFDVPLHYNLYQASNSSGNYDMRNLLNGTLVQRHPSHAVTFVDNHDTQPGEALESFVQGWFKPLAYATILTREQGYPQVFYGDYYGIPSDGVPSYRQQIDPLLKARQQYAYGRQHDYFDHWDVIGWTREGAASHPNSGLATIMSDGPGGSKWMYVGRQKAGEVWHDMTGNRSGTVTINQDGWGHFFVNGGSVSVWVKR

SEQ ID NO: 44113 - protein, 480 aa, Bacillus sp.
NGTIMQYFEWNVPNDGQHWNRLHNNAQNLKNAGITAIWIPPAWKGTSQNDVGYGAYDLYDLGEFNQKGTVRTKYGTKAELERAIRSLKANGIQVYGDVVMNHKGGADFTERVQAVEVNPQNRNQEVSGTYQIEAWTGFNFPGRGNQHSSFKWRWYHFDGTDWDQSRQLANRIYKFRGDGKAWDWEVDTENGNYDYLMYADVDMDHPEVINELNRWGVWYANTLNLDGFRLDAVKHIKFSFMRDWLGHVRGQTGKNLFAVAEYWKNDLGALENYLSKTNWTMSAFDVPLHYNLYQASNSSGNYDMRNLLNGTLVQRHPSHAVTFVDNHDTQPGEALESFVQGWFKPLAYATILTREQGYPQVFYGDYYGIPSDGVPSYRQQIDPLLKARQQYAYGRQHDYFDHWDVIGWTREGNAVHPNSGLATIMSDGPGGSKWMYVGRQKAGEVWHDMTGNRSGTVTINQDGWGHFFVNGGSVSVWVKR

SEQ ID NO: 44114 - protein, 480 aa, Bacillus sp.
NGTIMQYFEWNVPNDGQHWNRLHNNAQNLKNAGITAIWIPPAWKGTSQNDVGYGAYDLYDLGEFNQKGTVRTKYGTKAELERAIRSLKANGIQVYGDVVMNHKGGADFTERVQAVEVNPQNRNQEVSGTYQIEAWTGFNFPGRGNQHSSFKWRWYHFDGTDWDQSRQLANRIYKFRGDGKAWDWEVDTENGNYDYLMYADVDMDHPEVINELNRWGVWYANTLNLDGFRLDAVKHIKFSFMRDWLGHVRGQTGKNLFAVAEYWKNDLGALENYLSKTNWTMSAFDVPLHYNLYQASNSSGNYDMRNLLNGTLVQRHPSHAVTFVDNHDTQPGEALESFVQGWFKPLAYATILTREQGYPQVFYGDYYGIPSDGVPSYRQQIDPLLKARMQYAYGRQHDYFDHWDVIGWTREGNASHPNSGLATIMSDGPGGSKWMYVGRQKAGEVWHDMTGNRSGTVTINQDGWGHFFVNGGSVSVWVKR

SEQ ID NO: 44115 - protein, 480 aa, Bacillus sp.
NGTIMQYFEWNVPNDGQHWNRLHNNAQNLWNAGITAIWIPPAWKGTSQNDVGYGAYDLYDLGEFNQKGTVRTKYGTKAELERAIRSLKANGIQVYGDVVMNHKGGADFTERVQAVEVNPQNRNQEVSGTYQIEAWTGFNFPGRGNQHSSFKWRWYHFDGTDWDQSRQLANRIYKFRGDGKAWDWEVDTENGNYDYLMYADVDMDHPEVINELNRWGVWYANTLNLDGFRLDAVKHIKFSFMRDWLGHVRGQTGKNLFAVAEYWKNDLGALENYLSKTNWTMSAFDVPLHYNLYQASNSSGNYDMRNLLNGTLVQRHPSHAVTFVDNHDTQPGEALESFVQGWFKPLAYATILTREQGYPQVFYGDYYGIPSDGVPSYRQQIDPLLKARQQYAYGRQHDYFDHWDVIGWTREGNASHPNSGLATIMSDGPGGSKWMYVGRQKAGEVWHDMTGNRSGTVTINQDGWGHFFVNGGSVSVWVKR

SEQ ID NO: 44116 - protein, 480 aa, Bacillus sp.
NGTIMQYFEWNVPNDGQHWNRLHNNAQNLKNAGITAIWIPPAWKGTSQNDVGYGAYDLYDLGEFNQKGTVRTKYGTKAELERAIRSLKANGIQVYGDVVMNHKGGADFTERVQAVEVNPQNRNQEVSGTYQIEAWTGFNFPGRGNQHSSFKWRWYHFDGTDWDQSRQLANRIYKFRGDGKAWDWEVDTENGNYDYLMYADVDMDHPEVINELNRWGVWYANTLNLDGFRLDAVKHIKFSFMRDWLGHVRGQTGKNLFAVAEYWKNDLGALENYLSKTNWTMSAFDVPLHYNLYQASNSSGNYDMRNLLNGTLVQRHPSHAVTFVDNHDTQPGEALESFVQGWFKPLAYATILTREQGYPQVFYGDYYGIPSDGVPSYRQQIDPLLKARQMYAYGRQHDYFDHWDVIGWTREGNASHPNSGLATIMSDGPGGSKWMYVGRQKAGEVWHDMTGNRSGTVTINQDGWGHFFVNGGSVSVWVKR

SEQ ID NO: 44117 - protein, 480 aa, Bacillus sp.
NGTIMQYFEWNVPNDGQHWNRLHNNAQNLKNAGITAIWIPPAWKGTSQNDVGYGAYDLYDLGEFNQKGTVRTKYGTKAELERAIRSLKANGIQVYGDVVMNHKGGADFTERVQAVEVNPTNRNQEVSGTYQIEAWTGFNFPGRGNQHSSFKWRWYHFDGTDWDQSRQLANRIYKFRGDGKAWDWEVDTENGNYDYLMYADVDMDHPEVINELNRWGVWYANTLNLDGFRLDAVKHIKFSFMRDWLGHVRGQTGKNLFAVAEYWKNDLGALENYLSKTNWTMSAFDVPLHYNLYQASNSSGNYDMRNLLNGTLVQRHPSHAVTFVDNHDTQPGEALESFVQGWFKPLAYATILTREQGYPQVFYGDYYGIPSDGVPSYRQQIDPLLKARQQYAYGRQHDYFDHWDVIGWTREGNASHPNSGLATIMSDGPGGSKWMYVGRQKAGEVWHDMTGNRSGTVTINQDGWGHFFVNGGSVSVWVKR

SEQ ID NO: 44118 - protein, 480 aa, Bacillus sp.
NGTIMQYFEWNVPNDGQHWNRLHNRAQNLKNAGITAIWIPPAWKGTSQNDVGYGAYDLYDLGEFNQKGTVRTKYGTKAELERAIRSLKANGIQVYGDVVMNHKGGADFTERVQAVEVNPQNRNQEVSGTYQIEAWTGFNFPGRGNQHSSFKWRWYHFDGTDWDQSRQLANRIYKFRGDGKAWDWEVDTENGNYDYLMYADVDMDHPEVINELNRWGVWYANTLNLDGFRLDAVKHIKFSFMRDWLGHVRGQTGKNLFAVAEYWKNDLGALENYLSKTNWTMSAFDVPLHYNLYQASNSSGNYDMRNLLNGTLVQRHPSHAVTFVDNHDTQPGEALESFVQGWFKPLAYATILTREQGYPQVFYGDYYGIPSDGVPSYRQQIDPLLKARQQYAYGRQHDYFDHWDVIGWTREGNASHPNSGLATIMSDGPGGSKWMYVGRQKAGEVWHDMTGNRSGTVTINQDGWGHFFVNGGSVSVWVKR

SEQ ID NO: 44119 - protein, 480 aa, Bacillus sp.
NGTIMQYFEWNVPNDGQHWNRLHNNAQNLKNAGITAIWIPPAWKGTSQNDVGYGAYDLYDLGEFNQKGTVRTKYGTKAELERAIRSLKANGIQVYGDVVMNHKGGADFTERVQAVEVNPQNRNQEVSGTYQIEAWTGFNFPGRGNQHSSFKWRWYHFDGTDWDQSRQLANRIYKFRGDGKAWDWEVDTENGNYDYLMYADVDMDHPEVINELNRWGVWYANTLNLDGFRLDAVKHIKFSFMRDWLGHVRGQTGKNLFAVAEYWKNDLGALENYLSKTNWTMSAFDVPLHYNLYQASNSSGNYDMRNLLDGTLVQRHPSHAVTFVDNHDTQPGEALESFVQGWFKPLAYATILTREQGYPQVFYGDYYGIPSDGVPSYRQQIDPLLKARQQYAYGRQHDYFDHWDVIGWTREGNASHPNSGLATIMSDGPGGSKWMYVGRQKAGEVWHDMTGNRSGTVTINQDGWGHFFVNGGSVSVWVKR

SEQ ID NO: 44120 - protein, 480 aa, Bacillus sp.
NGTIMQYFEWNVPNDGQHWNRLHNNAQNLKNAGITAIWIPPAWKGTSQNDVGYGAYDLYDLGEFNQKGTVRTKYGTKAELERAIRSLKANGIQVYGDVVMNHKGGADFTERVQAVEVNPQNRNQEVSGTYQIEAWTGFNFPGRGNQHSSFKWRWYHFDGTDWDQSRQLANRIYKFRGDGKAWDWEVDTENGNYDYLMYADVDMDHPEVINELNRWGVWYANTLNLDGFRLDAVKHIKFSFMRDWLGHVRGQTGKNLFAVAEYWKNDMGALENYLSKTNWTMSAFDVPLHYNLYQASNSSGNYDMRNLLNGTLVQRHPSHAVTFVDNHDTQPGEALESFVQGWFKPLAYATILTREQGYPQVFYGDYYGIPSDGVPSYRQQIDPLLKARQQYAYGRQHDYFDHWDVIGWTREGNASHPNSGLATIMSDGPGGSKWMYVGRQKAGEVWHDMTGNRSGTVTINQDGWGHFFVNGGSVSVWVKR

SEQ ID NO: 44121 - protein, 480 aa, Bacillus sp.
NGTIMQYFEWNVPNDGQHWNRLHNNAQNLKNAGITAIWIPPAWKGTSQNDVGYGAYDLYDLGEFNQKGTVRTKYGTKAELERAIRSLKANGIQVYGDVVMNHKGGADFTERVQAVEVNPQNRNQEVSGTYQIEAWTGFNFPGRGNQHSSFKWRWYHFDGTDWDVSRQLANRIYKFRGDGKAWDWEVDTENGNYDYLMYADVDMDHPEVINELNRWGVWYANTLNLDGFRLDAVKHIKFSFMRDWLGHVRGQTGKNLFAVAEYWKNDLGALENYLSKTNWTMSAFDVPLHYNLYQASNSSGNYDMRNLLNGTLVQRHPSHAVTFVDNHDTQPGEALESFVQGWFKPLAYATILTREQGYPQVFYGDYYGIPSDGVPSYRQQIDPLLKARQQYAYGRQHDYFDHWDVIGWTREGNASHPNSGLATIMSDGPGGSKWMYVGRQKAGEVWHDMTGNRSGTVTINQDGWGHFFVNGGSVSVWVKR

SEQ ID NO: 44122 - protein, 480 aa, Bacillus sp.
NGTIMQYFEWNVPNDGQHWNRLHNNAQNLKNAGITAAWIPPAWKGTSQNDVGYGAYDLYDLGEFNQKGTVRTKYGTKAELERAIRSLKANGIQVYGDVVMNHKGGADFTERVQAVEVNPQNRNQEVSGTYQIEAWTGFNFPGRGNQHSSFKWRWYHFDGTDWDQSRQLANRIYKFRGDGKAWDWEVDTENGNYDYLMYADVDMDHPEVINELNRWGVWYANTLNLDGFRLDAVKHIKFSFMRDWLGHVRGQTGKNLFAVAEYWKNDLGALENYLSKTNWTMSAFDVPLHYNLYQASNSSGNYDMRNLLNGTLVQRHPSHAVTFVDNHDTQPGEALESFVQGWFKPLAYATILTREQGYPQVFYGDYYGIPSDGVPSYRQQIDPLLKARQQYAYGRQHDYFDHWDVIGWTREGNASHPNSGLATIMSDGPGGSKWMYVGRQKAGEVWHDMTGNRSGTVTINQDGWGHFFVNGGSVSVWVKR

SEQ ID NO: 44123 - protein, 480 aa, Bacillus sp.
NGTIMQYFEWNVPNDGQHWNRLHNNAQNLKNAGITAIWIPPAWKGTSQNDVGYGAYDLYDLGEFNQKGTVRTKYGTKAELERAIRSLKANGIQVYGDVVMNHKGGADFTERVQAVEVNPQNRNQEVSGTYQIEAWTGFNFPGRGNQHSSFKWRWYHFDGTDWDQSRQLANRIYKFRGDGKAWDWEVDTENGNYDYLMYADVDMDHPEVINELNRWGVWYANTLNLDGFRLDAVKHIKFSFMRDWLGHVRGQTGKNLFAVAEYWKNDLGALENYLSKTNWTMSAFDVPLHYNLYQASNSSGNYDMRNLLNGTLVQRHPSHAVTFVDNHDTQPGEALESFVQGWFKPLAYATILTREVGYPQVFYGDYYGIPSDGVPSYRQQIDPLLKARQQYAYGRQHDYFDHWDVIGWTREGNASHPNSGLATIMSDGPGGSKWMYVGRQKAGEVWHDMTGNRSGTVTINQDGWGHFFVNGGSVSVWVKR

SEQ ID NO: 44124 - protein, 480 aa, Bacillus sp.
NGTIMQYFEWNVPNDGQHWNRLHNNAQNLKNAGITAIWIPPAWKGTSQNDVGYGAYDLYDLGEFNQKGTVRTKYGTKAELERAIRSLKANGIQVYGDVVMNHKGGADFTERVQAVEVNPQNRNQEVSGTYQIEAWTGFNFPGRGNQHSSFKWRWYHFDGTDWDQSRQLANRIYKFRGDVKAWDWEVDTENGNYDYLMYADVDMDHPEVINELNRWGVWYANTLNLDGFRLDAVKHIKFSFMRDWLGHVRGQTGKNLFAVAEYWKNDLGALENYLSKTNWTMSAFDVPLHYNLYQASNSSGNYDMRNLLNGTLVQRHPSHAVTFVDNHDTQPGEALESFVQGWFKPLAYATILTREQGYPQVFYGDYYGIPSDGVPSYRQQIDPLLKARQQYAYGRQHDYFDHWDVIGWTREGNASHPNSGLATIMSDGPGGSKWMYVGRQKAGEVWHDMTGNRSGTVTINQDGWGHFFVNGGSVSVWVKR

SEQ ID NO: 44125 - protein, 480 aa, Bacillus sp.
NGTIMQYFEWNVPNDGQHWNRLHNNAQNLKNAGITAIWIPPAWKGTSQNDVGYGAYDLYDLGEFNQKGTVRTKYGTKAELERAIRSLKANGIQVYGDVVMNHKGGADFTERVQAVEVNPQNRNQEVSGTYQIEAWTGFNFPGRGNQHSSFKWRWYHFDGTDWDQSRQLANRIYKFRGDGKAWDWEVDTENGNYDYLMYADVDMDHPEVINELNRWGVWYANTLNLDGFRLDAVKHIKFSFMRDWLGHVRGQTGKNLFAVAEYWKNDLGALENYLSKTNWTMSAFDVPLHYNLYQASNSSGNYDMRNLLNGTLVQRHPSHAVTFVDNHDTQPGEALESFVQGWFKPLAYATILTREQGYPQVFYGDYYGIPSDGVPSYRQQIDPLLKARQEYAYGRQHDYFDHWDVIGWTREGNASHPNSGLATIMSDGPGGSKWMYVGRQKAGEVWHDMTGNRSGTVTINQDGWGHFFVNGGSVSVWVKR

SEQ ID NO: 44126 - protein, 480 aa, Bacillus sp.
NGTIMQYFEWNVPNDGQHWNRLHNNAQNLKNAGITAIWIPPAWKGTSQNDVGYGAYDLYDLGEFNQKGTVRTKYGTKAELERAIRSLKANGIQVYGDVVMNHKGGADFTERVQAVEVNPQNRNQEVSGTYQIEAWTGFNFPGRGNQHSSFKWRWYHFDGTDWDQSRQLANRIYKFRGDGKAWDWEVDTENGNYDYLMYADVDMDHPEVINELSRWGVWYANTLNLDGFRLDAVKHIKFSFMRDWLGHVRGQTGKNLFAVAEYWKNDLGALENYLSKTNWTMSAFDVPLHYNLYQASNSSGNYDMRNLLNGTLVQRHPSHAVTFVDNHDTQPGEALESFVQGWFKPLAYATILTREQGYPQVFYGDYYGIPSDGVPSYRQQIDPLLKARQQYAYGRQHDYFDHWDVIGWTREGNASHPNSGLATIMSDGPGGSKWMYVGRQKAGEVWHDMTGNRSGTVTINQDGWGHFFVNGGSVSVWVKR

SEQ ID NO: 44127 - protein, 480 aa, Bacillus sp.
NGTIMQYFEWNVPNDGQHWNRLHNNAQNLKNAGITAIWIPPAWKGTSQNDVGYGAYDLYDLGEFNQKGTVRTKYGTKAELERAIRSLKANGIQVYGDVVMNHKGGADFTERVQAVEVNPQNRNQEVSGTYQIEAWTGFNFPGRGNQHSSFKWRWYHFDGTDWDQSRQLANRIYKFRGDGKAWDWEVDTENGNYDYLMYADVDMDHPEVINELNRWGVWYANTLNLDGFRLDAVKHIKFSFMRDWLGHVRGQTGKNLFAVAEYWKNDLGALENYLSKTNWTMSAFDVPLHYNLYQASNSSGNYDMRNLLNGTLVQRHPSHAVTFVDNHDTQPGEALESFVQGWFKPLAYATILTRMQGYPQVFYGDYYGIPSDGVPSYRQQIDPLLKARQQYAYGRQHDYFDHWDVIGWTREGNASHPNSGLATIMSDGPGGSKWMYVGRQKAGEVWHDMTGNRSGTVTINQDGWGHFFVNGGSVSVWVKR

SEQ ID NO: 44128 - protein, 480 aa, Bacillus sp.
NGTIMQYFEWNVPNDGQHWNRLHNNAQNLKNAGITAIWIPPAWKGTSQNDVGYGAYDLYDLGEFNQKGTVRTKYGTKAELERAIRSLKANGIQVYGDVVMNHKGGADFTERVQAVEVNPQNRNQEVSGTYQIEAWTGFNFPGRGNQHSSFKWRWYHFDGTDWDQSRQLANRIYKFRGDGKAWDWEVDTENGNYDYLMYADVDMDHPEVINELNRWGVWYANTLNLDGFRLDAVKHIKFSFMRDWLGHVRGQTGKNLFAVAEYWKNDLGALENYLSKTNWTMSAFDVPLHYNLYQASNSSGNYDMRNLLNGTLVQRHPSHAVTFVDNHDTQPGEALESFVQGWFKPLAYATILTREQGYPDVFYGDYYGIPSDGVPSYRQQIDPLLKARQQYAYGRQHDYFDHWDVIGWTREGNASHPNSGLATIMSDGPGGSKWMYVGRQKAGEVWHDMTGNRSGTVTINQDGWGHFFVNGGSVSVWVKR

SEQ ID NO: 44129 - protein, 480 aa, Bacillus sp.
NGTIMQYFEWNVPNDGQHWNRLHNNAQNLKNAGITAIWIPPAWKGTSQNDVGYGAYDLYDLGEFNQKGTVRTKYGTKAELERAIRSLKANGIQVYGDVVMNHKGGADFTERVQAVEVNPQNRNQEVSGTYQIEAWTGFNFPGRGNQHSSFKWRWYHFDGTDWDQSRQLANRIYKFRGDGKAWDWEVDTENGNYDYLMYADVDMDHPEVINELNRWGVWYANTLNLDGFRLDAVKHIKFSFMRDWLGHVRGQTGKNLFAVAEYWKNDLGALENYLSKTNWTMSAFDVPLHYNLYQASNSSGNYDMRNLLNGTLVQRHPSHAVTFVDNHDTQPGEALESFVQGWFKPLAYALILTREQGYPQVFYGDYYGIPSDGVPSYRQQIDPLLKARQQYAYGRQHDYFDHWDVIGWTREGNASHPNSGLATIMSDGPGGSKWMYVGRQKAGEVWHDMTGNRSGTVTINQDGWGHFFVNGGSVSVWVKR

SEQ ID NO: 44130 - protein, 480 aa, Bacillus sp.
NGTIMQYFEWNVPNDGQHWNRLHNNAQNLKNAGITAIWIPPAWKGTSQNDVGYGAYDLYDLGEFNQKGTVRTKYGTKAELERAIRSLKANGIQVYGDVVMNHKGGADFTERVQAVEVNPQNRNQEVSGTYQIEAWTGFNFPGRGNQHSSFKWRWYHFDGTDWDQSRQLANRIYKFRGDGKAWDWEVDTENGNYDYLMYADVDMDHPEVINELNRWGVWYANTLNLDGFRLDAVKHIKFSFMRDWLGHVRGQTGKNLFAVAEYWKNDLGALENYLSKTNWTMSAFDVPLHYNLYQASNSSGNYDMRNLLNGTLVQRHPSHAVTFVDNHDTQPGEALESFVQGWFKPLAYATILTREQGYPQVFYGDYYGIPSGGVPSYRQQIDPLLKARQQYAYGRQHDYFDHWDVIGWTREGNASHPNSGLATIMSDGPGGSKWMYVGRQKAGEVWHDMTGNRSGTVTINQDGWGHFFVNGGSVSVWVKR

SEQ ID NO: 44131 - protein, 480 aa, Bacillus sp.
NGTIMQYFEWNVPNDGQHWNRLHNNAQNLKQAGITAIWIPPAWKGTSQNDVGYGAYDLYDLGEFNQKGTVRTKYGTKAELERAIRSLKANGIQVYGDVVMNHKGGADFTERVQAVEVNPQNRNQEVSGTYQIEAWTGFNFPGRGNQHSSFKWRWYHFDGTDWDQSRQLANRIYKFRGDGKAWDWEVDTENGNYDYLMYADVDMDHPEVINELNRWGVWYANTLNLDGFRLDAVKHIKFSFMRDWLGHVRGQTGKNLFAVAEYWKNDLGALENYLSKTNWTMSAFDVPLHYNLYQASNSSGNYDMRNLLNGTLVQRHPSHAVTFVDNHDTQPGEALESFVQGWFKPLAYATILTREQGYPQVFYGDYYGIPSDGVPSYRQQIDPLLKARQQYAYGRQHDYFDHWDVIGWTREGNASHPNSGLATIMSDGPGGSKWMYVGRQKAGEVWHDMTGNRSGTVTINQDGWGHFFVNGGSVSVWVKR

SEQ ID NO: 44132 - protein, 480 aa, Bacillus sp.
NGTIMQYFEWNVPNDGQHWNRLHNNAQNLKNAGITAIWIPPAWKGTSQNDVGYGAYDLYDLGEFNQKGTVRTKYGTKAELERAIRSLKANGIQVYGDVVMNHKGGADFTERVQAVEVNPQNRNQELSGTYQIEAWTGFNFPGRGNQHSSFKWRWYHFDGTDWDQSRQLANRIYKFRGDGKAWDWEVDTENGNYDYLMYADVDMDHPEVINELNRWGVWYANTLNLDGFRLDAVKHIKFSFMRDWLGHVRGQTGKNLFAVAEYWKNDLGALENYLSKTNWTMSAFDVPLHYNLYQASNSSGNYDMRNLLNGTLVQRHPSHAVTFVDNHDTQPGEALESFVQGWFKPLAYATILTREQGYPQVFYGDYYGIPSDGVPSYRQQIDPLLKARQQYAYGRQHDYFDHWDVIGWTREGNASHPNSGLATIMSDGPGGSKWMYVGRQKAGEVWHDMTGNRSGTVTINQDGWGHFFVNGGSVSVWVKR

SEQ ID NO: 44133 - protein, 480 aa, Bacillus sp.
NGTIMQYFEWNVPNDGQHWNRLHNNAQNLKNAGITAIWIPPAWKGTSQNDVGYGAYDLYDLGEFNQKGTVRTKYGTKAELERAIRSLKANGIQVYGDVVMNHKGGADFTERVQAVEVNPQNRNQEVSGTYQIEAWTGFNFPGRGNQHSSFKWRWYHFDGTDWDQSRQLANRIYKFRGDGKAWDWEVDTENGNYDYLMYADVDMDHPEVINELNRWGVWYANTLNLDGFRLDAVKHIKFSFMRDWLGHVRGQTGKNLFAVAEYWKNDLGALENYLSKTNWTMSAFDVPLHYNLYQASMSSGNYDMRNLLNGTLVQRHPSHAVTFVDNHDTQPGEALESFVQGWFKPLAYATILTREQGYPQVFYGDYYGIPSDGVPSYRQQIDPLLKARQQYAYGRQHDYFDHWDVIGWTREGNASHPNSGLATIMSDGPGGSKWMYVGRQKAGEVWHDMTGNRSGTVTINQDGWGHFFVNGGSVSVWVKR

SEQ ID NO: 44134 - protein, 480 aa, Bacillus sp.
NGTIMQYFEWNVPNDGQHWNRLHNNAQNLKNAGITAIWIPPAWKGTSQNDVGYGAYDLYDLGEFNQKGTVRTKYGTKAELERAIRSLKANGIQVYGDVVMNHKGGADFTERVQAVEVNPQNRNQEVSGTYQIEAWTGFNFPGRGNQHSSFKWRWYHFDGTDWDQSRQLANRIYKFRGDGKAWDWEVDTENGNYDYLMYADVDMDHPEVINELNRWGVWYANTLNLDGFRLDAVKHIKFSFMRDWLGHVRGQTGKNLFAVAEYWKNDLGALENYLSKTNATMSAFDVPLHYNLYQASNSSGNYDMRNLLNGTLVQRHPSHAVTFVDNHDTQPGEALESFVQGWFKPLAYATILTREQGYPQVFYGDYYGIPSDGVPSYRQQIDPLLKARQQYAYGRQHDYFDHWDVIGWTREGNASHPNSGLATIMSDGPGGSKWMYVGRQKAGEVWHDMTGNRSGTVTINQDGWGHFFVNGGSVSVWVKR

SEQ ID NO: 44135 - protein, 480 aa, Bacillus sp.
NGTIMQYFEWNVPNDGQHWNRLHNNAQNLKNAGITAIWIPPAWKGTSVNDVGYGAYDLYDLGEFNQKGTVRTKYGTKAELERAIRSLKANGIQVYGDVVMNHKGGADFTERVQAVEVNPQNRNQEVSGTYQIEAWTGFNFPGRGNQHSSFKWRWYHFDGTDWDQSRQLANRIYKFRGDGKAWDWEVDTENGNYDYLMYADVDMDHPEVINELNRWGVWYANTLNLDGFRLDAVKHIKFSFMRDWLGHVRGQTGKNLFAVAEYWKNDLGALENYLSKTNWTMSAFDVPLHYNLYQASNSSGNYDMRNLLNGTLVQRHPSHAVTFVDNHDTQPGEALESFVQGWFKPLAYATILTREQGYPQVFYGDYYGIPSDGVPSYRQQIDPLLKARQQYAYGRQHDYFDHWDVIGWTREGNASHPNSGLATIMSDGPGGSKWMYVGRQKAGEVWHDMTGNRSGTVTINQDGWGHFFVNGGSVSVWVKR

SEQ ID NO: 44136 - protein, 480 aa, Bacillus sp.
NGTIMQYFEWNVPNDGSHWNRLHNNAQNLKNAGITAIWIPPAWKGTSQNDVGYGAYDLYDLGEFNQKGTVRTKYGTKAELERAIRSLKANGIQVYGDVVMNHKGGADFTERVQAVEVNPQNRNQEVSGTYQIEAWTGFNFPGRGNQHSSFKWRWYHFDGTDWDQSRQLANRIYKFRGDGKAWDWEVDTENGNYDYLMYADVDMDHPEVINELNRWGVWYANTLNLDGFRLDAVKHIKFSFMRDWLGHVRGQTGKNLFAVAEYWKNDLGALENYLSKTNWTMSAFDVPLHYNLYQASNSSGNYDMRNLLNGTLVQRHPSHAVTFVDNHDTQPGEALESFVQGWFKPLAYATILTREQGYPQVFYGDYYGIPSDGVPSYRQQIDPLLKARQQYAYGRQHDYFDHWDVIGWTREGNASHPNSGLATIMSDGPGGSKWMYVGRQKAGEVWHDMTGNRSGTVTINQDGWGHFFVNGGSVSVWVKR

SEQ ID NO: 44137 - protein, 480 aa, Bacillus sp.
NGTIMQYFEWNVPNDGQHWNRLHNNAQNLKNAGITAIWIPPAWKGTSQNDVGYGAYDLYDLGEFNQKGTVRTKYGTKAELERAIRSLKANGIQVYGDVVMNHKGGADKTERVQAVEVNPQNRNQEVSGTYQIEAWTGFNFPGRGNQHSSFKWRWYHFDGTDWDQSRQLANRIYKFRGDGKAWDWEVDTENGNYDYLMYADVDMDHPEVINELNRWGVWYANTLNLDGFRLDAVKHIKFSFMRDWLGHVRGQTGKNLFAVAEYWKNDLGALENYLSKTNWTMSAFDVPLHYNLYQASNSSGNYDMRNLLNGTLVQRHPSHAVTFVDNHDTQPGEALESFVQGWFKPLAYATILTREQGYPQVFYGDYYGIPSDGVPSYRQQIDPLLKARQQYAYGRQHDYFDHWDVIGWTREGNASHPNSGLATIMSDGPGGSKWMYVGRQKAGEVWHDMTGNRSGTVTINQDGWGHFFVNGGSVSVWVKR

SEQ ID NO: 44138 - protein, 480 aa, Bacillus sp.
NGTIMQYFEWNVPNDGQHWNRLHNNAQNLKNAGITAIWIPPAWKGTSQNDVGYGAYDLYDLGEFNQKGTVRTKYGTKAELERAIRSLKANGIQVYGDVVMNHKGGADFTERVQAVEVNPQNRNQEVSGTYQIEAWTGFNFPGRGNQHSSFKWRWYHFDGTDWDQSRQLANRIYKFRGDGKAWDWEVDTENGNYDYLMYADVDMDHPEVINELNRWGVWYANTLNLDGFRLDAVKHIKFSFMRDWLGHVRGQTGKNLFAVAEYWKNDLGALENYLSKTNWTMSAFDVPLHYNLYQASNSSGNYDMRNLLNGTLVQRHPSHAVTFVDNHDTQPGEALESFVQGWFKPLAYATILTREQGYPQVFYGDYYGIPSDGVPSYRQQIDPLLKARQQYAYGRQHDYFDHWDVIGWTREGNASHPNSGLATIMSDGPGGSKWMYVGRQKAGEVWHDMTGNRSGTVTINQDGWGHFRVNGGSVSVWVKR

SEQ ID NO: 44139 - protein, 480 aa, Bacillus sp.
NGTIMQYFEWNVPNDGQHWNRLHNNAQNLKNAGITAIWIPPAWKGTSQNDVGYGAYDLYDLGEFNQKGTVRTKYGTKAELERAIRSLKANGIQVYGDVVMNHKGGADFTERVQAVEVNPQNRNQEVSGTYQIEAWTGFNFPGRGNQHSSFKWRWYHFDGTDWDQSRQLANRIYKFRGDGKAWDWEVDTENGNYDYLMYADVDMDHPEVINELNRWGVWYANTLNLDGFRLDAVKHIKFSFMRDWLGHVRGQTGKNLFAVAEYWKNDLGELENYLSKTNWTMSAFDVPLHYNLYQASNSSGNYDMRNLLNGTLVQRHPSHAVTFVDNHDTQPGEALESFVQGWFKPLAYATILTREQGYPQVFYGDYYGIPSDGVPSYRQQIDPLLKARQQYAYGRQHDYFDHWDVIGWTREGNASHPNSGLATIMSDGPGGSKWMYVGRQKAGEVWHDMTGNRSGTVTINQDGWGHFFVNGGSVSVWVKR

SEQ ID NO: 44140 - protein, 480 aa, Bacillus sp.
NGTIMQYFEWNVPNDGQHWNRLHNNAQNLKNAGITAIWIPPAWKGTSQNDVGYGAYDLYDLGEFNQKGTVRTKYGTKAELERAIRSLKANGIQVYGDVVMNHKGGADFTERVQAVEVNPQNRNQEVSGTYQIEAWTGFNFPGRGNQHSSFKWRWYHFDGTDWDQSRQLANRIYKFRGDGKAWDWEVDTENGNYDYLMYADVDMDHPEVINELNRWGVWYANTLNLDGFRLDAVKHIKFSFMRDWLGFVRGQTGKNLFAVAEYWKNDLGALENYLSKTNWTMSAFDVPLHYNLYQASNSSGNYDMRNLLNGTLVQRHPSHAVTFVDNHDTQPGEALESFVQGWFKPLAYATILTREQGYPQVFYGDYYGIPSDGVPSYRQQIDPLLKARQQYAYGRQHDYFDHWDVIGWTREGNASHPNSGLATIMSDGPGGSKWMYVGRQKAGEVWHDMTGNRSGTVTINQDGWGHFFVNGGSVSVWVKR

SEQ ID NO: 44141 - protein, 480 aa, Bacillus sp.
NGTIMQYFEWNVPNDGQHWNRLHNNAQNLKNAGITAIWIPPAWKGTSQNDVGYGAYDLYDLGEFNQKGTVRTKYGTKAELERAIRSLKANGIQVYGDVVMNHKGGADFTERVQAVEVNPQNRNQEVSGTYQIEAWTGFNFPGRGNQHSSFKWRWYHFDGTDWDQSRQLGNRIYKFRGDGKAWDWEVDTENGNYDYLMYADVDMDHPEVINELNRWGVWYANTLNLDGFRLDAVKHIKFSFMRDWLGHVRGQTGKNLFAVAEYWKNDLGALENYLSKTNWTMSAFDVPLHYNLYQASNSSGNYDMRNLLNGTLVQRHPSHAVTFVDNHDTQPGEALESFVQGWFKPLAYATILTREQGYPQVFYGDYYGIPSDGVPSYRQQIDPLLKARQQYAYGRQHDYFDHWDVIGWTREGNASHPNSGLATIMSDGPGGSKWMYVGRQKAGEVWHDMTGNRSGTVTINQDGWGHFFVNGGSVSVWVKR

SEQ ID NO: 44142 - protein, 480 aa, Bacillus sp.
NGTIMQYFEWNVPNDGQHWNRLHNNAQNLKNAGITAIWIPPAWKGTSQNDVGYGAYDLYDLGEFNQKGTVRTKYGTKAELWRAIRSLKANGIQVYGDVVMNHKGGADFTERVQAVEVNPQNRNQEVSGTYQIEAWTGFNFPGRGNQHSSFKWRWYHFDGTDWDQSRQLANRIYKFRGDGKAWDWEVDTENGNYDYLMYADVDMDHPEVINELNRWGVWYANTLNLDGFRLDAVKHIKFSFMRDWLGHVRGQTGKNLFAVAEYWKNDLGALENYLSKTNWTMSAFDVPLHYNLYQASNSSGNYDMRNLLNGTLVQRHPSHAVTFVDNHDTQPGEALESFVQGWFKPLAYATILTREQGYPQVFYGDYYGIPSDGVPSYRQQIDPLLKARQQYAYGRQHDYFDHWDVIGWTREGNASHPNSGLATIMSDGPGGSKWMYVGRQKAGEVWHDMTGNRSGTVTINQDGWGHFFVNGGSVSVWVKR

SEQ ID NO: 44143 - protein, 480 aa, Bacillus sp.
NGTIMQYFEWNVPNDGQHWNRLHNNAQNLKNAGITAIWIPPAWKGTSQNDVGYGAYDLYDLGEFNQKGTVRTKYGTKAELERAIRSLKANGIQVYGDVVMNHKGGADFTERVQAVEVNPQNRNQEVSGTYQIEAWTGFNFPGRGNQHSSFKWRWYHFDGTDWDQSRQLANRIYKFRGDGKAWDWEVDTENGNYDYLMYADVDMDHPEVINELNRWGVWYANTLNLDGFRLDAVKHIKFSFMRDWLGHVRGQTGKNLFAVAEYWKNDLGALENYLSKTNWTMSAFDVPLHYNLYQASNSSGNYDMRNLLNGTLVQRHPSHAVTFVDNHDTQPGEALESFVQGWFKPLAYATILTREQGYPQVFYGDYYGIPSDGVPSYRQQIDPLLKARQQYAYGRQHDYFDHWDVIGWTREGNASHPNSGLATIMSDGPGGSKWMYVGRQKAGEVWHDSTGNRSGTVTINQDGWGHFFVNGGSVSVWVKR

SEQ ID NO: 44144 - protein, 480 aa, Bacillus sp.
NGTIMQYFEWNVPNDGQHWNRLHNNAQNLKNAGITAIWIPPAWKGTSQNDVGYGAYDLYDLGEFNQKGTVRTKYGTKAELERAIRSLKANGIQVYGDVVMNHKGGADFTERVQAVEVNPQNRNQEVSGTYQIEAWTGFMFPGRGNQHSSFKWRWYHFDGTDWDQSRQLANRIYKFRGDGKAWDWEVDTENGNYDYLMYADVDMDHPEVINELNRWGVWYANTLNLDGFRLDAVKHIKFSFMRDWLGHVRGQTGKNLFAVAEYWKNDLGALENYLSKTNWTMSAFDVPLHYNLYQASNSSGNYDMRNLLNGTLVQRHPSHAVTFVDNHDTQPGEALESFVQGWFKPLAYATILTREQGYPQVFYGDYYGIPSDGVPSYRQQIDPLLKARQQYAYGRQHDYFDHWDVIGWTREGNASHPNSGLATIMSDGPGGSKWMYVGRQKAGEVWHDMTGNRSGTVTINQDGWGHFFVNGGSVSVWVKR

SEQ ID NO: 44145 - protein, 480 aa, Bacillus sp.
NGTIMQYFEWNVPNDGQHWNRLHNNAQNLKNAGITAIWIPPAWKGTSQNDVGYGAYDLYDLGEFNQKGTVRTKYGTKAELERAIRSLKANGIQVYGDVVMNHKGGADFTERVQAVEVNPQNRNQEVSGTYQIEAWTGFNFPGRGNQHSSFKWRWYHFDGTDWDQSRQLANRIYKFRGDGKAWDWEVDTENGNYDYLMYADVDMDHPEVINELNRWGVWYANTLNLDGFRLDAVKHIKFSFMRDWLGHVRGQTGKNLFAVAEYWKNDLGALENYLSKTNWTMSAFDVPLHYNLYQASNSSGNYDMRNLLNGTLVQRHPSHAVTFVDNHDTQPGEALESFVQGWFKPLAYATILTREQGYPQVFYGDYYGIPSDGVPSYRQQIDPLLKARQQYAYGRQHDYFDHWDVIGWTREGNASHPNSGLATAMSDGPGGSKWMYVGRQKAGEVWHDMTGNRSGTVTINQDGWGHFFVNGGSVSVWVKR

SEQ ID NO: 44146 - protein, 480 aa, Bacillus sp.
NGTIMQYFEWNVPNDGQHWNRLHNNAQNLKNAGITAIWIPPAWKGTSQNDVGYGAYDLYDLGEFNQKGTVRTKYGTKAELERAIRSLKANGIQVYGDVVMNHKGGADFTERVQAVEVNPQNRNQEVSGTYQIEAWTGFNFPGRGNQHSSFKWRWYHFDGTDWDQSRQLANRIYKFRGDGKAWDWEVDTENGNYDYLMYADVDMDHPEVINELNRWGVWYANTLNLDGFRLDAVKHIKFSFMRDWLGHVRGQTGKNLFAVAEYWKNDLGALENYLSKTNWTMSAFDVPLHYNLYQASNSSGNYDMRNLLNGTLVQRTPSHAVTFVDNHDTQPGEALESFVQGWFKPLAYATILTREQGYPQVFYGDYYGIPSDGVPSYRQQIDPLLKARQQYAYGRQHDYFDHWDVIGWTREGNASHPNSGLATIMSDGPGGSKWMYVGRQKAGEVWHDMTGNRSGTVTINQDGWGHFFVNGGSVSVWVKR

SEQ ID NO: 44147 - protein, 480 aa, Bacillus sp.
NGTIMQYFEWNVPNDGQHWNRLHNNAQNLKNAGITAIWIPPAWKGTSQNDVGYGAYDLYDLGEFNQKGTVRTKYGTKAELERAIRSLKANGIQVYGDVVMNHKGGADFTERVQAVEVNPQNRNQEVSGTYQIEAWTGFNFPGRGNQHSSFKWRWYHFDGTDWDQSRQLANRIYKFRGDLKAWDWEVDTENGNYDYLMYADVDMDHPEVINELNRWGVWYANTLNLDGFRLDAVKHIKFSFMRDWLGHVRGQTGKNLFAVAEYWKNDLGALENYLSKTNWTMSAFDVPLHYNLYQASNSSGNYDMRNLLNGTLVQRHPSHAVTFVDNHDTQPGEALESFVQGWFKPLAYATILTREQGYPQVFYGDYYGIPSDGVPSYRQQIDPLLKARQQYAYGRQHDYFDHWDVIGWTREGNASHPNSGLATIMSDGPGGSKWMYVGRQKAGEVWHDMTGNRSGTVTINQDGWGHFFVNGGSVSVWVKR

SEQ ID NO: 44148 - protein, 480 aa, Bacillus sp.
NGTIMQYFEWNVPNDGQHWNRLHNNAQNLKNAGITAIWIPPAWKGTSQNDVGYGAYDLYDLGEFNQKGTVRTKYGTKAELERAIRSLKANGIQVYGDVVMNHKGGADFTERVQAVEVNPQNRNQEVSGTYQIEAWTGFNFPGRGNQHSSFKWRWYHFDGTDWDQSRQLANRIYKFRGDGKAWDWEVDTENGNYDYLMYADVDMDHPEVINELNRWGVWYANTLNLDGFRLDAVKHIKFSFMRDWLGHVRGQTGKNLFAVAEYWKNDLGALENYLSKTNWTMSAFDVPLHYNLYQASNSSGNYDMRNLLNGTLVQRHPSHAVTFVDNHDTQPGEALDSFVQGWFKPLAYATILTREQGYPQVFYGDYYGIPSDGVPSYRQQIDPLLKARQQYAYGRQHDYFDHWDVIGWTREGNASHPNSGLATIMSDGPGGSKWMYVGRQKAGEVWHDMTGNRSGTVTINQDGWGHFFVNGGSVSVWVKR

SEQ ID NO: 44149 - protein, 480 aa, Bacillus sp.
NGTIMQYFEWNVPNDGQHWNRLHNNAQNLKNAGITAIWIPPAWKGTSQNDVGYGAYDLYDLGEFNQKGTVRTKYGTKAELERAIRSLKANGIQVYGDVVMNHKGGADFTERVQAVEVNPQNRNQEVSGTYQIEAWTGFNFPGRGNQHSSFKWRWYHFDGTDWDASRQLANRIYKFRGDGKAWDWEVDTENGNYDYLMYADVDMDHPEVINELNRWGVWYANTLNLDGFRLDAVKHIKFSFMRDWLGHVRGQTGKNLFAVAEYWKNDLGALENYLSKTNWTMSAFDVPLHYNLYQASNSSGNYDMRNLLNGTLVQRHPSHAVTFVDNHDTQPGEALESFVQGWFKPLAYATILTREQGYPQVFYGDYYGIPSDGVPSYRQQIDPLLKARQQYAYGRQHDYFDHWDVIGWTREGNASHPNSGLATIMSDGPGGSKWMYVGRQKAGEVWHDMTGNRSGTVTINQDGWGHFFVNGGSVSVWVKR

SEQ ID NO: 44150 - protein, 480 aa, Bacillus sp.
NGTIMQYFEWNVPNDGQHWNRLHNNAQNLKNAGITAIWIPPAWKGTSQNDVGYGAYDLYDLGEFNQKGTVRTKYGTKAELERAIRSLKANGIQVYGDVVMNHKGGADFTERVQAVEVNPQNRNQEVSGTYQIEAWTGFNFPGRGNQHSSFKWRWYHFDGTDWDQSRQLANRIYKFRGDGKAWDWEVDTENGNYDYLMYADVDMDHPEVINELDRWGVWYANTLNLDGFRLDAVKHIKFSFMRDWLGHVRGQTGKNLFAVAEYWKNDLGALENYLSKTNWTMSAFDVPLHYNLYQASNSSGNYDMRNLLNGTLVQRHPSHAVTFVDNHDTQPGEALESFVQGWFKPLAYATILTREQGYPQVFYGDYYGIPSDGVPSYRQQIDPLLKARQQYAYGRQHDYFDHWDVIGWTREGNASHPNSGLATIMSDGPGGSKWMYVGRQKAGEVWHDMTGNRSGTVTINQDGWGHFFVNGGSVSVWVKR

SEQ ID NO: 44151 - protein, 480 aa, Bacillus sp.
NGTIMQYFEWNVPNDGQHWNRLHNNAQNLKNAGITAIWIPPAWKGTSQNDVGYGAYDLYDLGEFNQKGTVRTKYGTKAELERAIRSLKANGIQVYGDVVMNHKGGADFTERVQAVEVNPQNRNQEVSGTYQIEAWTGFNFPGRGNQHSSFKWRWYHFDGTDWDQSRQLANRIYKFRGDGKAWDWEVDTENGNYDYLMYADVDMDHPEVINELNRWGVWYANTLNLDGFRLDAVKHIKFSFMRDWLGHVRGQTGKNLFAVAEYWKNDLGALENYLSKTNWTMSAFDVPLHSNLYQASNSSGNYDMRNLLNGTLVQRHPSHAVTFVDNHDTQPGEALESFVQGWFKPLAYATILTREQGYPQVFYGDYYGIPSDGVPSYRQQIDPLLKARQQYAYGRQHDYFDHWDVIGWTREGNASHPNSGLATIMSDGPGGSKWMYVGRQKAGEVWHDMTGNRSGTVTINQDGWGHFFVNGGSVSVWVKR

SEQ ID NO: 44152 - protein, 480 aa, Bacillus sp.
NGTIMQYFEWNVPNDGQHWNRLHNNAQNLKNSGITAIWIPPAWKGTSQNDVGYGAYDLYDLGEFNQKGTVRTKYGTKAELERAIRSLKANGIQVYGDVVMNHKGGADFTERVQAVEVNPQNRNQEVSGTYQIEAWTGFNFPGRGNQHSSFKWRWYHFDGTDWDQSRQLANRIYKFRGDGKAWDWEVDTENGNYDYLMYADVDMDHPEVINELNRWGVWYANTLNLDGFRLDAVKHIKFSFMRDWLGHVRGQTGKNLFAVAEYWKNDLGALENYLSKTNWTMSAFDVPLHYNLYQASNSSGNYDMRNLLNGTLVQRHPSHAVTFVDNHDTQPGEALESFVQGWFKPLAYATILTREQGYPQVFYGDYYGIPSDGVPSYRQQIDPLLKARQQYAYGRQHDYFDHWDVIGWTREGNASHPNSGLATIMSDGPGGSKWMYVGRQKAGEVWHDMTGNRSGTVTINQDGWGHFFVNGGSVSVWVKR

SEQ ID NO: 44153 - protein, 480 aa, Bacillus sp.
NGTIMQYFEWNVPNDGQHWNRLHNNAQNLKNAGITAIWIPPAWKGTSQNDVGYGAYDLYDLGEFNQKGTVRTKYGTKAELERAIRSLKANGIQVYGDVVMNHKGGADFTERVQAVEVNPQNRNQEVSGTYQIEAWTGFNFPGRGNQHSSFKWRWYHFDGTDWDQSRQLANRIYKFRGDGKAWDWEVDTENGNYDYLMYADMDMDHPEVINELNRWGVWYANTLNLDGFRLDAVKHIKFSFMRDWLGHVRGQTGKNLFAVAEYWKNDLGALENYLSKTNWTMSAFDVPLHYNLYQASNSSGNYDMRNLLNGTLVQRHPSHAVTFVDNHDTQPGEALESFVQGWFKPLAYATILTREQGYPQVFYGDYYGIPSDGVPSYRQQIDPLLKARQQYAYGRQHDYFDHWDVIGWTREGNASHPNSGLATIMSDGPGGSKWMYVGRQKAGEVWHDMTGNRSGTVTINQDGWGHFFVNGGSVSVWVKR

SEQ ID NO: 44154 - protein, 480 aa, Bacillus sp.
NGTIMQYFEWNVPNDGQHWNRLHNNAQNLKNAGITAIWIPPAWKGTSQNDVGYGAYDLYDLGEFNQKGTVRTKYGTKAELERAIRSLKANGIQVYGDVVMNHKGGADFTERVQAVEVNPQNRNQEVSGTYQIAAWTGFNFPGRGNQHSSFKWRWYHFDGTDWDQSRQLANRIYKFRGDGKAWDWEVDTENGNYDYLMYADVDMDHPEVINELNRWGVWYANTLNLDGFRLDAVKHIKFSFMRDWLGHVRGQTGKNLFAVAEYWKNDLGALENYLSKTNWTMSAFDVPLHYNLYQASNSSGNYDMRNLLNGTLVQRHPSHAVTFVDNHDTQPGEALESFVQGWFKPLAYATILTREQGYPQVFYGDYYGIPSDGVPSYRQQIDPLLKARQQYAYGRQHDYFDHWDVIGWTREGNASHPNSGLATIMSDGPGGSKWMYVGRQKAGEVWHDMTGNRSGTVTINQDGWGHFFVNGGSVSVWVKR

SEQ ID NO: 44155 - protein, 480 aa, Bacillus sp.
NGTIMQYFEWNVPNDGQHWNRLHNNAQNLKNAGITAIWIPPAWKGTSQNDVGYGAYDLYDLGEFNQKGTVRTKYGTKAELERAIRSLKANGIQVYGDVVMNHKGGADFTERVQAVEVNPQNRNQEVSGTYQIEAWTGFNFPGRGNQHSSFKWRWYHFDGTDWDQSRQLANRIYKFRGDGKAWDWEVDTENGNYDYLMYADVDMDHPEVINELNRWGVWYANTLNLDGFRLDAVKHIKFSFMRDWLGHVRGQTGKNLFAVAEYWKNDLGALENYLSKTNWTMSAFDVPLHYNLYQASNSSGNYDMRNLLNGTLVQRHPSHAVTFVDNHDTQPGEALESFVQGWFKPLAYATILTREQGYPQVFYGDYYGIPSDGVPSYRQQIDPLLKARQQYAYGRQHDYFDHWDVIGWTREGNASHPNSGLATIMSDGPGGSKWMYVGRQGAGEVWHDMTGNRSGTVTINQDGWGHFFVNGGSVSVWVKR

SEQ ID NO: 44156 - protein, 480 aa, Bacillus sp.
NGTIMQYFEWNVPNDGQHWNRLHNNAQNLKNAGITAIWIPPAWKGTSQNDVGYGAYDLYDLGEFNQKGTVRTKYGTKAELERAIRSLKANGIQVYGDVVMNHKGGADFTERVQAVEVNPQNRNQEVSGTYQIEAWTGFNFPGRGNQHSSFKWRWYHFDGTDWDQSRQLANRIYKFRGDGKAWDWEVDTENGNYDYLMYADVDMDHPEVINELNRWGVWYANTLNLDGFRLDAVKHIKFSFMRDWLGHVRGQTGKNLFAVAEYWKNDLGALENYLSKTNWTMSAFDVPLHYNLYQASNSSGNYDMRNLLNGTLVQRHPSHAVTFVDNHDTQPGEALESFVQGWFKPLAYATILTREQGYPQVFYGDYYGIPSLGVPSYRQQIDPLLKARQQYAYGRQHDYFDHWDVIGWTREGNASHPNSGLATIMSDGPGGSKWMYVGRQKAGEVWHDMTGNRSGTVTINQDGWGHFFVNGGSVSVWVKR

SEQ ID NO: 44157 - protein, 480 aa, Bacillus sp.
NGTIMQYFEWNVPNDGQHWNRLHNNAQNLKNAGITAIWIPPAWKGTSQNDVGYGAYDLYDLGEFNQKGTVRTKYGTKAFLERAIRSLKANGIQVYGDVVMNHKGGADFTERVQAVEVNPQNRNQEVSGTYQIEAWTGFNFPGRGNQHSSFKWRWYHFDGTDWDQSRQLANRIYKFRGDGKAWDWEVDTENGNYDYLMYADVDMDHPEVINELNRWGVWYANTLNLDGFRLDAVKHIKFSFMRDWLGHVRGQTGKNLFAVAEYWKNDLGALENYLSKTNWTMSAFDVPLHYNLYQASNSSGNYDMRNLLNGTLVQRHPSHAVTFVDNHDTQPGEALESFVQGWFKPLAYATILTREQGYPQVFYGDYYGIPSDGVPSYRQQIDPLLKARQQYAYGRQHDYFDHWDVIGWTREGNASHPNSGLATIMSDGPGGSKWMYVGRQKAGEVWHDMTGNRSGTVTINQDGWGHFFVNGGSVSVWVKR

SEQ ID NO: 44158 - protein, 480 aa, Bacillus sp.
NGTIMQYFEWNVPNDGQHWNRLHNNAQNLKNAGITAIWIPPAWKGTSQNDVGYGAYDLYDLGEFNQKGTVRTKYGTKAELERAIRSLKANGIQVYGDVVMNHKGGADFTERVQAVEVNPQNRNQEVSGTYQIEAWTGFNFPGRGNQHSSFKWRWYHFDGTDWDQSRQLANRIYKFRGDGKAWDWEVDTENGNYDYLMYADVDMDHPEVINELNRWGVWYANTLNLDGFRLDAVKHIKFSFMRDWLGHVRGQTGKNLFAVAEYWKNDLGALENYLSKTNWTMSAFDVPLHYNLYQASNSSGNYDMRNLLNGTLVQRHPSHAVTFVDNHDTQPGEALESFVQGWFKPLAYATILTRAQGYPQVFYGDYYGIPSDGVPSYRQQIDPLLKARQQYAYGRQHDYFDHWDVIGWTREGNASHPNSGLATIMSDGPGGSKWMYVGRQKAGEVWHDMTGNRSGTVTINQDGWGHFFVNGGSVSVWVKR

SEQ ID NO: 44159 - protein, 480 aa, Bacillus sp.
NGTIMQYFEWNVPNDGQHWNRLHNNAQNLKNAGITAIWIPPAWKGTSQNDVGYGAYDLYDLGEFNQKGTVRTKYGTKAELERAIRSLKANGIQVYGDVVMNHKGGADFTERVQAVEVNPQNRNQEVSGTYQIEAWTGFNFPGRGNQHSSFKWRWYHFDGTDWDQSRQLANRIYKFRGDGKAWDWEVDTENGNYDYLMYADVDMDHPEVINELNRWGVWYANTLNLDGFRLDAVKHIKFSFMRDWLGHVRGQTGKNLFAVAEYWKNDLGALENYLSKTNWTMSAFDVPLHYNLYQASNSSGNYDMRNLLNGTLVQRHPSHAVTFVDNHDTQPGEALESFVQGWFKPLAYATILTREQGYPSVFYGDYYGIPSDGVPSYRQQIDPLLKARQQYAYGRQHDYFDHWDVIGWTREGNASHPNSGLATIMSDGPGGSKWMYVGRQKAGEVWHDMTGNRSGTVTINQDGWGHFFVNGGSVSVWVKR

SEQ ID NO: 44160 - protein, 480 aa, Bacillus sp.
NGTIMQYFEWNVPNDGQHWNRLHNNAQNLKNAGITAIWIPPAWKGTSQNDVGYGAYDLYDLGEFNQKGTVRTKYGTKAELERAIRSLKAWGIQVYGDVVMNHKGGADFTERVQAVEVNPQNRNQEVSGTYQIEAWTGFNFPGRGNQHSSFKWRWYHFDGTDWDQSRQLANRIYKFRGDGKAWDWEVDTENGNYDYLMYADVDMDHPEVINELNRWGVWYANTLNLDGFRLDAVKHIKFSFMRDWLGHVRGQTGKNLFAVAEYWKNDLGALENYLSKTNWTMSAFDVPLHYNLYQASNSSGNYDMRNLLNGTLVQRHPSHAVTFVDNHDTQPGEALESFVQGWFKPLAYATILTREQGYPQVFYGDYYGIPSDGVPSYRQQIDPLLKARQQYAYGRQHDYFDHWDVIGWTREGNASHPNSGLATIMSDGPGGSKWMYVGRQKAGEVWHDMTGNRSGTVTINQDGWGHFFVNGGSVSVWVKR

SEQ ID NO: 44161 - protein, 480 aa, Bacillus sp.
NGTIMQYFEWNVPNDGQHWNRLWNNAQNLKNAGITAIWIPPAWKGTSQNDVGYGAYDLYDLGEFNQKGTVRTKYGTKAELERAIRSLKANGIQVYGDVVMNHKGGADFTERVQAVEVNPQNRNQEVSGTYQIEAWTGFNFPGRGNQHSSFKWRWYHFDGTDWDQSRQLANRIYKFRGDGKAWDWEVDTENGNYDYLMYADVDMDHPEVINELNRWGVWYANTLNLDGFRLDAVKHIKFSFMRDWLGHVRGQTGKNLFAVAEYWKNDLGALENYLSKTNWTMSAFDVPLHYNLYQASNSSGNYDMRNLLNGTLVQRHPSHAVTFVDNHDTQPGEALESFVQGWFKPLAYATILTREQGYPQVFYGDYYGIPSDGVPSYRQQIDPLLKARQQYAYGRQHDYFDHWDVIGWTREGNASHPNSGLATIMSDGPGGSKWMYVGRQKAGEVWHDMTGNRSGTVTINQDGWGHFFVNGGSVSVWVKR

SEQ ID NO: 44162 - protein, 480 aa, Bacillus sp.
NGTIMQYFEWNVPNDGQHWNRLHNNAQNLKNAGITAIWIPPAWKGTSQNDVGYGAYDLYDLGEFNQKGTVRTKYGTKAELERAIRSLKANGIQVYGDVVMNHKGGADFTECVQAVEVNPQNRNQEVSGTYQIEAWTGFNFPGRGNQHSSFKWRWYHFDGTDWDQSRQLANRIYKFRGDGKAWDWEVDTENGNYDYLMYADVDMDHPEVINELNRWGVWYANTLNLDGFRLDAVKHIKFSFMRDWLGHVRGQTGKNLFAVAEYWKNDLGALENYLSKTNWTMSAFDVPLHYNLYQASNSSGNYDMRNLLNGTLVQRHPSHAVTFVDNHDTQPGEALESFVQGWFKPLAYATILTREQGYPQVFYGDYYGIPSDGVPSYRQQIDPLLKARQQYAYGRQHDYFDHWDVIGWTREGNASHPNSGLATIMSDGPGGSKWMYVGRQKAGEVWHDMTGNRSGTVTINQDGWGHFFVNGGSVSVWVKR

SEQ ID NO: 44163 - protein, 480 aa, Bacillus sp.
NGTIMQYFEWNVPNDGQHWNRLHNNAQNLKNAGITAIWIPPAWKGTSQNDVGYGAYDLYDLGEFNQKGTVRTKYGTKAELERAIRSLKANGIQVYGDVVMNHKGGADFTERVQAVEVNPQNRNQEVSGTYQIEAWTGFNFPGRGNQHSSFKWRWYHFDGTDWDQSRQLLNRIYKFRGDGKAWDWEVDTENGNYDYLMYADVDMDHPEVINELNRWGVWYANTLNLDGFRLDAVKHIKFSFMRDWLGHVRGQTGKNLFAVAEYWKNDLGALENYLSKTNWTMSAFDVPLHYNLYQASNSSGNYDMRNLLNGTLVQRHPSHAVTFVDNHDTQPGEALESFVQGWFKPLAYATILTREQGYPQVFYGDYYGIPSDGVPSYRQQIDPLLKARQQYAYGRQHDYFDHWDVIGWTREGNASHPNSGLATIMSDGPGGSKWMYVGRQKAGEVWHDMTGNRSGTVTINQDGWGHFFVNGGSVSVWVKR

SEQ ID NO: 44164 - protein, 480 aa, Bacillus sp.
NGTIMQYFEWNVPNDGQHWNRLHNNAQNLKNAGITAIWIPPACKGTSQNDVGYGAYDLYDLGEFNQKGTVRTKYGTKAELERAIRSLKANGIQVYGDVVMNHKGGADFTERVQAVEVNPQNRNQEVSGTYQIEAWTGFNFPGRGNQHSSFKWRWYHFDGTDWDQSRQLANRIYKFRGDGKAWDWEVDTENGNYDYLMYADVDMDHPEVINELNRWGVWYANTLNLDGFRLDAVKHIKFSFMRDWLGHVRGQTGKNLFAVAEYWKNDLGALENYLSKTNWTMSAFDVPLHYNLYQASNSSGNYDMRNLLNGTLVQRHPSHAVTFVDNHDTQPGEALESFVQGWFKPLAYATILTREQGYPQVFYGDYYGIPSDGVPSYRQQIDPLLKARQQYAYGRQHDYFDHWDVIGWTREGNASHPNSGLATIMSDGPGGSKWMYVGRQKAGEVWHDMTGNRSGTVTINQDGWGHFFVNGGSVSVWVKR

SEQ ID NO: 44165 - protein, 480 aa, Bacillus sp.
NGTIMQYFEWNVPNDGQHWNRLHNNAQNLKNAGITAIWIPPAWKGTSQNDVGYGAYDLYDLGEFNQKGTVRTKYGTKAELERAIRSLKANGIQVYGDVVMNHKGGADFTERVQAVEVNPQNRNQEVSGTYQIEAWTGFNFPGRGNQHSSFKWRWYHFDGTDWDQSRQLANRIYKFRGDGKAWDWEVDTENGNYDYLMYADVDMDHPEVINELNRWGVWYANTLNLDGFRLDAVKHIKFSFMRDWLGHVRGQTGKNLFAVAEYWKNDLGALENYLSKTNWTMSAFDVPLHYNLYQASNSSGNYDMRNLLNGTLVQRHPSHAVTFVDNHDTQPGEALESFVKGWFKPLAYATILTREQGYPQVFYGDYYGIPSDGVPSYRQQIDPLLKARQQYAYGRQHDYFDHWDVIGWTREGNASHPNSGLATIMSDGPGGSKWMYVGRQKAGEVWHDMTGNRSGTVTINQDGWGHFFVNGGSVSVWVKR

SEQ ID NO: 44166 - protein, 480 aa, Bacillus sp.
NGTIMQYFEWNVPNDGQHWNRLHNNAQNLKNAGITAIWIPPAWKGTSQNDVGYGAYDLYDLGEFNQKGTVRTKYGTKAELERAIRSLKANGIQVYGDVVMNHKGGADFTERVQAVEVNPQNRNQEVSGTYQIEAWTGFNFPGRGNQHSSFKWRWYHFDGTDWDQSRQLANRIYKFRGDGKAWDWEVDTENGNYDYLMYADVDMDHPEVINELNRWGVWYANTLNLDGFRLDAVKHIKFSFMRDWLGHVRGQTGKNLFAVAEYWKNDLGALENYLSKTNWTMSAFDVPLHYNLYQASNSSGNYDMRNLLNGTLVQRHPSHAVTFVDNHDTQPGEALESFVQGWFKPLAYATILTREQGYPQVFYGDYYGIPSDGVPSYRQQIDPLLKARQQYAYGRQHDYFDHWDVIGWTREGRASHPNSGLATIMSDGPGGSKWMYVGRQKAGEVWHDMTGNRSGTVTINQDGWGHFFVNGGSVSVWVKR

SEQ ID NO: 44167 - protein, 480 aa, Bacillus sp.
NGTIMQYFEWNVPNDGQHWNRLHNNAQNLKNAGITAIWIPPAWKGTSQNDVGYGAYDLYDLGEFNQKGTVRTKYGTKAELERAIRSLKANGIQVYGDVVMNHKGGADFTERVQAVEVNPQNRNQEVSGTYQIEAWTGFNFPGRGNQHSSFKWRWYHFDGTDWDQSRQLANRIYKFRGDGKAWDWEVDTENGNYDYLMYADVDMDHPEVINELNRWGVWYANTLNLDGFRLDAVKHIKFSFMRDWLGHVRGQTGKNLFAVAEYWKNDLGALENYLSKTNWTMSAFDVPLHYNLYQASNSSGNYDMRNLLNGTLVQRHPSHAVTFVDNHDTQPGEALESFVQGWFKPLAYATILTREQGYPQVFYGDYYGIPSDGVPSYRQQIDPLLKARQQYAYGRQHDYFDHWDVIGWTREGNASHPNSGLATIMSDGPGGSKWMYVGRQKAGEVWHDMTGNRSGTVTINQDGWGHFVVNGGSVSVWVKR

SEQ ID NO: 44168 - protein, 480 aa, Bacillus sp.
NGTIMQYFEWNVPNDGQHWNRLHNNAQNLKNAGITAIWIPPAWKGTSQNDVGYGAYDLYDLGEFNQKGTVRTKYGTKAELERAIRSLKANGIQVYGDVVMNHKGGADFTERVQAVEVNPQNRNQEVSGTYQIEAWTGFNFPGRGNQHSSFKWRWYHFDGTDWDQSRQLANRIYKFRGDGKAWDWEVDTENGNYDYLMYADVDMDHPEVINELNRWGVWYANTLNLDGFRLDAVKHIKFSFMRDWLGHVRGQTGKNLFAVAEYWKNDLGALENYLSKTNWTMSAFDVPLHYNLYQASNSSGNYDMRNLLNGTLVQRHPSHAVTFVDNHDTQPGEALESFVQGWFKPLAYATILTREQGYPQVFYGDYYGIPIDGVPSYRQQIDPLLKARQQYAYGRQHDYFDHWDVIGWTREGNASHPNSGLATIMSDGPGGSKWMYVGRQKAGEVWHDMTGNRSGTVTINQDGWGHFFVNGGSVSVWVKR

SEQ ID NO: 44169 - protein, 480 aa, Bacillus sp.
NGTIMQYFEWNVPNDGQHWNRLHNNAQNLKNAGITAIWIPPAWKGTSQNDVGYGAYDLYDLGEFNQKGTVRTKYGTKAELERAIRSLKAGGIQVYGDVVMNHKGGADFTERVQAVEVNPQNRNQEVSGTYQIEAWTGFNFPGRGNQHSSFKWRWYHFDGTDWDQSRQLANRIYKFRGDGKAWDWEVDTENGNYDYLMYADVDMDHPEVINELNRWGVWYANTLNLDGFRLDAVKHIKFSFMRDWLGHVRGQTGKNLFAVAEYWKNDLGALENYLSKTNWTMSAFDVPLHYNLYQASNSSGNYDMRNLLNGTLVQRHPSHAVTFVDNHDTQPGEALESFVQGWFKPLAYATILTREQGYPQVFYGDYYGIPSDGVPSYRQQIDPLLKARQQYAYGRQHDYFDHWDVIGWTREGNASHPNSGLATIMSDGPGGSKWMYVGRQKAGEVWHDMTGNRSGTVTINQDGWGHFFVNGGSVSVWVKR

SEQ ID NO: 44170 - protein, 480 aa, Bacillus sp.
NGTIMQYFEWNVPNDGQHWNRLHNNAQNLKNAGITAIWIPPAWKGTSQNDVGYGAYDLYDLGEFNQKGTVRTKYGTKAELERAIRSLKANGIQVYGDVVMNHKGGADFTERVQAVEVNPQNRNQEVSGTYQIEAWTGFNFPGRGNQHSSFKWRWYHFDGTDWDQSRQLANRIYKFRGDGKAWDWEVDTENGNYDYLMYADVDMDHPEVINELNRWGVWYANTLNLDGFRLDAVKHIKFSFMRDWLGHVRGQTGKNLFAVAEYWKNDLGALENYLSKTNWTMSAFDVPLHYNLYQASNSSGNYDMRCLLNGTLVQRHPSHAVTFVDNHDTQPGEALESFVQGWFKPLAYATILTREQGYPQVFYGDYYGIPSDGVPSYRQQIDPLLKARQQYAYGRQHDYFDHWDVIGWTREGNASHPNSGLATIMSDGPGGSKWMYVGRQKAGEVWHDMTGNRSGTVTINQDGWGHFFVNGGSVSVWVKR

SEQ ID NO: 44171 - protein, 480 aa, Bacillus sp.
NGTIMQYFEWNVPNDGQHWNRLHNNAQNLKNAGITAIWIPPAWKGTSQNDVGYGAYDLYDLGEFNQKGTVRTKYGTKAELERAIRSLKANGIQVYGDVVMNHKGGADFTERVQAVEVNPQNRNQEVSGTYQIEAWTGFNFPGRGNQHSSFKWRWYHFDGTDWDQSRQLALRIYKFRGDGKAWDWEVDTENGNYDYLMYADVDMDHPEVINELNRWGVWYANTLNLDGFRLDAVKHIKFSFMRDWLGHVRGQTGKNLFAVAEYWKNDLGALENYLSKTNWTMSAFDVPLHYNLYQASNSSGNYDMRNLLNGTLVQRHPSHAVTFVDNHDTQPGEALESFVQGWFKPLAYATILTREQGYPQVFYGDYYGIPSDGVPSYRQQIDPLLKARQQYAYGRQHDYFDHWDVIGWTREGNASHPNSGLATIMSDGPGGSKWMYVGRQKAGEVWHDMTGNRSGTVTINQDGWGHFFVNGGSVSVWVKR

SEQ ID NO: 44172 - protein, 480 aa, Bacillus sp.
NGTIMQYFEWNVPNDGQHWNRLHNNAANLKNAGITAIWIPPAWKGTSQNDVGYGAYDLYDLGEFNQKGTVRTKYGTKAELERAIRSLKANGIQVYGDVVMNHKGGADFTERVQAVEVNPQNRNQEVSGTYQIEAWTGFNFPGRGNQHSSFKWRWYHFDGTDWDQSRQLANRIYKFRGDGKAWDWEVDTENGNYDYLMYADVDMDHPEVINELNRWGVWYANTLNLDGFRLDAVKHIKFSFMRDWLGHVRGQTGKNLFAVAEYWKNDLGALENYLSKTNWTMSAFDVPLHYNLYQASNSSGNYDMRNLLNGTLVQRHPSHAVTFVDNHDTQPGEALESFVQGWFKPLAYATILTREQGYPQVFYGDYYGIPSDGVPSYRQQIDPLLKARQQYAYGRQHDYFDHWDVIGWTREGNASHPNSGLATIMSDGPGGSKWMYVGRQKAGEVWHDMTGNRSGTVTINQDGWGHFFVNGGSVSVWVKR

SEQ ID NO: 44173 - protein, 480 aa, Bacillus sp.
NGTIMQYFEWNVPNDGQHWNRLHNNAQNLKNAGITAIWIPPAWKGTSQNDVGYGAYDLYDLGEFNQKGTVRTKYGTKAELERAIRSLKANGIQVYGDVVMNHKGGADFTERVQAVEVNPQNRNQEVSGTYQIEAWTGFNFPGRGNQHSSFKWRWYHFDGTDWDQSRQLANRIYKFRGDGKAWDWEVDTENGNYDYLMYADVDMDHPEVINELNRWGVWYANTLNLDGFRLDAVKHIKFSFMRDWLGHVRGQTGKNLFAVAEYWKNDLGALENYLSKTNWTMSAFDVPLHYNLYQASNSSGNYDMRNLLNGTLVHRHPSHAVTFVDNHDTQPGEALESFVQGWFKPLAYATILTREQGYPQVFYGDYYGIPSDGVPSYRQQIDPLLKARQQYAYGRQHDYFDHWDVIGWTREGNASHPNSGLATIMSDGPGGSKWMYVGRQKAGEVWHDMTGNRSGTVTINQDGWGHFFVNGGSVSVWVKR

SEQ ID NO: 44174 - protein, 480 aa, Bacillus sp.
NGTIMQYFEWNVPNDGQHWNRLHNNAQNLKNAGITAIWIPPAWKGTSQNDVGYGAYDLYDLGEFNQKGTVRTKYGTKAELERAIRSLKANGIQVYGDVVMNHKGGADFTERVQAVEVNPQNRNQEVSGTYQIEAWTGFNFPGRGNQHSSFKWRWYHFDGTDWDQSRQLANRIYKFRGDGKAWDWEVDTENGNYDYLMYADVDMDHPEVINELNRWGVWYANTLNLDGFRLDAVKHIKFSFMRDWLGHVRGQTGKNLFAVAEYWKNDLGALENYQSKTNWTMSAFDVPLHYNLYQASNSSGNYDMRNLLNGTLVQRHPSHAVTFVDNHDTQPGEALESFVQGWFKPLAYATILTREQGYPQVFYGDYYGIPSDGVPSYRQQIDPLLKARQQYAYGRQHDYFDHWDVIGWTREGNASHPNSGLATIMSDGPGGSKWMYVGRQKAGEVWHDMTGNRSGTVTINQDGWGHFFVNGGSVSVWVKR

SEQ ID NO: 44175 - protein, 480 aa, Bacillus sp.
NGTIMQYFEWNVPNDGQHWNRLHNNAQNLKNAGITAIWIPPAWKGTSQGDVGYGAYDLYDLGEFNQKGTVRTKYGTKAELERAIRSLKANGIQVYGDVVMNHKGGADFTERVQAVEVNPQNRNQEVSGTYQIEAWTGFNFPGRGNQHSSFKWRWYHFDGTDWDQSRQLANRIYKFRGDGKAWDWEVDTENGNYDYLMYADVDMDHPEVINELNRWGVWYANTLNLDGFRLDAVKHIKFSFMRDWLGHVRGQTGKNLFAVAEYWKNDLGALENYLSKTNWTMSAFDVPLHYNLYQASNSSGNYDMRNLLNGTLVQRHPSHAVTFVDNHDTQPGEALESFVQGWFKPLAYATILTREQGYPQVFYGDYYGIPSDGVPSYRQQIDPLLKARQQYAYGRQHDYFDHWDVIGWTREGNASHPNSGLATIMSDGPGGSKWMYVGRQKAGEVWHDMTGNRSGTVTINQDGWGHFFVNGGSVSVWVKR

SEQ ID NO: 44176 - protein, 480 aa, Bacillus sp.
NGTIMQYFEWNVPNDGQHWNRLHNNAQNLKNAGITAIWIPPAWKGTSQNDVGYGAYDLYDLGEFNQKGTVRTKYGTKAELERAIRSLKANGIQVYGDVVMNHKGGADFTERVQAVEVNPQNRNQEVSGTYQIEAWTGFNFPGRGNQHSSFKWRWYHFDGTDWDQSRQLANRIYKFRGDGKAWDWEVDTENGNYDYLMYADVDMDHPEVINELNRWGVWYANTLNTDGFRLDAVKHIKFSFMRDWLGHVRGQTGKNLFAVAEYWKNDLGALENYLSKTNWTMSAFDVPLHYNLYQASNSSGNYDMRNLLNGTLVQRHPSHAVTFVDNHDTQPGEALESFVQGWFKPLAYATILTREQGYPQVFYGDYYGIPSDGVPSYRQQIDPLLKARQQYAYGRQHDYFDHWDVIGWTREGNASHPNSGLATIMSDGPGGSKWMYVGRQKAGEVWHDMTGNRSGTVTINQDGWGHFFVNGGSVSVWVKR

SEQ ID NO: 44177 - protein, 480 aa, Bacillus sp.
NGTIMQYFEWNVPNDGQHWNRLHNNAQNLKNAGITAIWIPPAWKGTSQNDVGYGAYDLYDLGEFNQKGTVRTKYGTKAELERAIRSLKANGIQVYGDVVMNHKGGADFTERVGAVEVNPQNRNQEVSGTYQIEAWTGFNFPGRGNQHSSFKWRWYHFDGTDWDQSRQLANRIYKFRGDGKAWDWEVDTENGNYDYLMYADVDMDHPEVINELNRWGVWYANTLNLDGFRLDAVKHIKFSFMRDWLGHVRGQTGKNLFAVAEYWKNDLGALENYLSKTNWTMSAFDVPLHYNLYQASNSSGNYDMRNLLNGTLVQRHPSHAVTFVDNHDTQPGEALESFVQGWFKPLAYATILTREQGYPQVFYGDYYGIPSDGVPSYRQQIDPLLKARQQYAYGRQHDYFDHWDVIGWTREGNASHPNSGLATIMSDGPGGSKWMYVGRQKAGEVWHDMTGNRSGTVTINQDGWGHFFVNGGSVSVWVKR

SEQ ID NO: 44178 - protein, 480 aa, Bacillus sp.
NGTIMQYFEWNVPNDGQHWNRLHNNAQNLKNAGITAIWIPPAWKGTSQNDVGYGAYDLYDLGEFNQKGTVRTKYGTKAELERAIRSLKANGIQVYGDVVMNHKGGADFTERVQAVEVNPQNRNQEVSGTYQIEAWTGFNFPGRGNQHSSFKWRWYHFDGTDWDQSRQLANRIYKFRGDGKAWDWEVDTENGNYDYLMYADVDMDHPEVINELNRWGVWYANTLNLDGFRLDAVKHIKFSFMRDWLGHVRGQTGKNLFAVAEYWKNDLGALENYLSKTNWTMSAFDVPLHYNLYQASNSSGNYDMRNLLNGTLVQRHPSHAVTFVDNHDTQPGEALKSFVQGWFKPLAYATILTREQGYPQVFYGDYYGIPSDGVPSYRQQIDPLLKARQQYAYGRQHDYFDHWDVIGWTREGNASHPNSGLATIMSDGPGGSKWMYVGRQKAGEVWHDMTGNRSGTVTINQDGWGHFFVNGGSVSVWVKR

SEQ ID NO: 44179 - protein, 480 aa, Bacillus sp.
NGTIMQYFEWNVPNDGQHWNRLHNNAQNLKNAGITAIWIPPAWKGTSQNDVGYGAYDLYDLGEFNQKGTVRTKYGTKAELERAIRSLKANGIQVYGDVVMNHKGGADFTERVQAVEVNPQNRNQEVSGTYQIEAWTGFNFPGRGNQHSSFKWRWYHFDGTDWDQSRQLANRIYKFRGDGKAWDWEVDTENGNYDYLMYADVDMDHPEVINELNRWGVWYANTLNLDGFRLDAVKHIKFSFMRDWLGHVRGQTGKNLFAVAEYWKNDLGALENYLSKTNWTMSAFDVPLHYNLYQASNSSGNYDMRNLLNTTLVQRHPSHAVTFVDNHDTQPGEALESFVQGWFKPLAYATILTREQGYPQVFYGDYYGIPSDGVPSYRQQIDPLLKARQQYAYGRQHDYFDHWDVIGWTREGNASHPNSGLATIMSDGPGGSKWMYVGRQKAGEVWHDMTGNRSGTVTINQDGWGHFFVNGGSVSVWVKR

SEQ ID NO: 44180 - protein, 480 aa, Bacillus sp.
NGTIMQYFEWNVPNDGQHWNRLHNNAQNLKNAGITAIWIPPAWKGTSQNDVGYGAYDLYDLGEFNQKGTVRTKYGTKAELERAIRSLKANGIQVYGDVVMNHKGGADFTERVQAVEVNPQNRNQEVSGTYQIEAWTGFNFPGRGNQHSSFKWRWYHFDGTDWDQSRQLANRIYKFRGDGKAWDWEVDTENGNYDYLMYADVDMDHPEVINELNRWGVWYANTLNLDGFRLDAVKHIKFSFMRDWLGHVRGQTGKNLFAVAEYWKNDLGALENYLSKTNWTMSAFDVPLHYNLYQASNSSGNYDMRNLLNGTLVQRHPSHAVTFVDNHDTQPGEALESFVQGWFKPLAYATILTREQGYPQVFYGDYYGIPSDGVPSYRYQIDPLLKARQQYAYGRQHDYFDHWDVIGWTREGNASHPNSGLATIMSDGPGGSKWMYVGRQKAGEVWHDMTGNRSGTVTINQDGWGHFFVNGGSVSVWVKR

SEQ ID NO: 44181 - protein, 480 aa, Bacillus sp.
NGTIMQYFEWNVPNDGQHWNRLHNNAQNLKNAGITAIWIPPAWKGTSQNDVGYGAYDLYDLGEFNQKGTVRTKYGTKAELERAIRSLKANGIQVYGDVVMNHKGGADFTERVQAVEVNPQNRNQEVSGTYQIEAWTGFNFPGRGNQHSSFKWRWYHFDGTDWDQSRQLANRIYKFRGDGKAWDWEVDTENGNYDYLMYADQDMDHPEVINELNRWGVWYANTLNLDGFRLDAVKHIKFSFMRDWLGHVRGQTGKNLFAVAEYWKNDLGALENYLSKTNWTMSAFDVPLHYNLYQASNSSGNYDMRNLLNGTLVQRHPSHAVTFVDNHDTQPGEALESFVQGWFKPLAYATILTREQGYPQVFYGDYYGIPSDGVPSYRQQIDPLLKARQQYAYGRQHDYFDHWDVIGWTREGNASHPNSGLATIMSDGPGGSKWMYVGRQKAGEVWHDMTGNRSGTVTINQDGWGHFFVNGGSVSVWVKR

SEQ ID NO: 44182 - protein, 480 aa, Bacillus sp.
NGTIMQYFEWNVPNDGQHWNRLHNNAQNLKNAGITAIWIPPAWKGTSQNDVGYGAYDLYDLGEFNQKGTVRTKYGTKAELERAIRSLKANGIQVYGDVVMNHKGGADFTERVQAVEVNPQNRNQEVSGTYQIEAWTGFNFPGRGNQHSSFKWRWYHFDGGDWDQSRQLANRIYKFRGDGKAWDWEVDTENGNYDYLMYADVDMDHPEVINELNRWGVWYANTLNLDGFRLDAVKHIKFSFMRDWLGHVRGQTGKNLFAVAEYWKNDLGALENYLSKTNWTMSAFDVPLHYNLYQASNSSGNYDMRNLLNGTLVQRHPSHAVTFVDNHDTQPGEALESFVQGWFKPLAYATILTREQGYPQVFYGDYYGIPSDGVPSYRQQIDPLLKARQQYAYGRQHDYFDHWDVIGWTREGNASHPNSGLATIMSDGPGGSKWMYVGRQKAGEVWHDMTGNRSGTVTINQDGWGHFFVNGGSVSVWVKR

SEQ ID NO: 44183 - protein, 480 aa, Bacillus sp.
NGTIMQYFEWNVPYDGQHWNRLHNNAQNLKNAGITAIWIPPAWKGTSQNDVGYGAYDLYDLGEFNQKGTVRTKYGTKAELERAIRSLKANGIQVYGDVVMNHKGGADFTERVQAVEVNPQNRNQEVSGTYQIEAWTGFNFPGRGNQHSSFKWRWYHFDGTDWDQSRQLANRIYKFRGDGKAWDWEVDTENGNYDYLMYADVDMDHPEVINELNRWGVWYANTLNLDGFRLDAVKHIKFSFMRDWLGHVRGQTGKNLFAVAEYWKNDLGALENYLSKTNWTMSAFDVPLHYNLYQASNSSGNYDMRNLLNGTLVQRHPSHAVTFVDNHDTQPGEALESFVQGWFKPLAYATILTREQGYPQVFYGDYYGIPSDGVPSYRQQIDPLLKARQQYAYGRQHDYFDHWDVIGWTREGNASHPNSGLATIMSDGPGGSKWMYVGRQKAGEVWHDMTGNRSGTVTINQDGWGHFFVNGGSVSVWVKR

SEQ ID NO: 44184 - protein, 480 aa, Bacillus sp.
NGTIMQYFEWNVPNDGQHWNRLHNNAQNLKNAGITAIWIPPAWKGTSQNDVGYGAYDLYDLGEFNQKGTVRTKYGTKAELERAIRSLKANGIQVYGDVVMNHKGGADFTERVQAVEVNPQNRNQEVSGTYQIEAWTGFNFPGRGNQHSSFKWRWYHFDGTDWDQSRQLANRIYKFRGDGKAWDWEVDTENGNYDYLMYADVDMDHPEVINELNRWGVWYANTLNLDGFRLDAVKHIKFSFMRDWLGHVRGQTGKNLFAVAEYWKNDLGALENYLSKTNWTMSAFDVPLHYNLYQASNSSGNYDMRNLLNGTLVQRHPSHAVTFVDNHDTQPGEALESFVQGWFKPLAYATILTREQGYPQVFYGDYYGIPSDGVPSYRQQIDPLLKARQQYAYGRQHDYFDHWDVIGWTREGNVSHPNSGLATIMSDGPGGSKWMYVGRQKAGEVWHDMTGNRSGTVTINQDGWGHFFVNGGSVSVWVKR

SEQ ID NO: 44185 - protein, 480 aa, Bacillus sp.
NGTIMQYFEWNVPNDGQHWNRLHNNAQNLKNAGITAIWVPPAWKGTSQNDVGYGAYDLYDLGEFNQKGTVRTKYGTKAELERAIRSLKANGIQVYGDVVMNHKGGADFTERVQAVEVNPQNRNQEVSGTYQIEAWTGFNFPGRGNQHSSFKWRWYHFDGTDWDQSRQLANRIYKFRGDGKAWDWEVDTENGNYDYLMYADVDMDHPEVINELNRWGVWYANTLNLDGFRLDAVKHIKFSFMRDWLGHVRGQTGKNLFAVAEYWKNDLGALENYLSKTNWTMSAFDVPLHYNLYQASNSSGNYDMRNLLNGTLVQRHPSHAVTFVDNHDTQPGEALESFVQGWFKPLAYATILTREQGYPQVFYGDYYGIPSDGVPSYRQQIDPLLKARQQYAYGRQHDYFDHWDVIGWTREGNASHPNSGLATIMSDGPGGSKWMYVGRQKAGEVWHDMTGNRSGTVTINQDGWGHFFVNGGSVSVWVKR

SEQ ID NO: 44186 - protein, 480 aa, Bacillus sp.
NGTIMQYFEWNVPNDGQWWNRLHNNAQNLKNAGITAIWIPPAWKGTSQNDVGYGAYDLYDLGEFNQKGTVRTKYGTKAELERAIRSLKANGIQVYGDVVMNHKGGADFTERVQAVEVNPQNRNQEVSGTYQIEAWTGFNFPGRGNQHSSFKWRWYHFDGTDWDQSRQLANRIYKFRGDGKAWDWEVDTENGNYDYLMYADVDMDHPEVINELNRWGVWYANTLNLDGFRLDAVKHIKFSFMRDWLGHVRGQTGKNLFAVAEYWKNDLGALENYLSKTNWTMSAFDVPLHYNLYQASNSSGNYDMRNLLNGTLVQRHPSHAVTFVDNHDTQPGEALESFVQGWFKPLAYATILTREQGYPQVFYGDYYGIPSDGVPSYRQQIDPLLKARQQYAYGRQHDYFDHWDVIGWTREGNASHPNSGLATIMSDGPGGSKWMYVGRQKAGEVWHDMTGNRSGTVTINQDGWGHFFVNGGSVSVWVKR

SEQ ID NO: 44187 - protein, 480 aa, Bacillus sp.
NGTIMQYFEWNVPNDGQHWNRLHNNAQNLKNAGITAIWIPPAWKGTSQNDVGYGAYDLYDLGEFNQKGTVRTKYGTKAELEAAIRSLKANGIQVYGDVVMNHKGGADFTERVQAVEVNPQNRNQEVSGTYQIEAWTGFNFPGRGNQHSSFKWRWYHFDGTDWDQSRQLANRIYKFRGDGKAWDWEVDTENGNYDYLMYADVDMDHPEVINELNRWGVWYANTLNLDGFRLDAVKHIKFSFMRDWLGHVRGQTGKNLFAVAEYWKNDLGALENYLSKTNWTMSAFDVPLHYNLYQASNSSGNYDMRNLLNGTLVQRHPSHAVTFVDNHDTQPGEALESFVQGWFKPLAYATILTREQGYPQVFYGDYYGIPSDGVPSYRQQIDPLLKARQQYAYGRQHDYFDHWDVIGWTREGNASHPNSGLATIMSDGPGGSKWMYVGRQKAGEVWHDMTGNRSGTVTINQDGWGHFFVNGGSVSVWVKR

SEQ ID NO: 44188 - protein, 480 aa, Bacillus sp.
NGTIMQYFEWNVPNDGQHWNRAHNNAQNLKNAGITAIWIPPAWKGTSQNDVGYGAYDLYDLGEFNQKGTVRTKYGTKAELERAIRSLKANGIQVYGDVVMNHKGGADFTERVQAVEVNPQNRNQEVSGTYQIEAWTGFNFPGRGNQHSSFKWRWYHFDGTDWDQSRQLANRIYKFRGDGKAWDWEVDTENGNYDYLMYADVDMDHPEVINELNRWGVWYANTLNLDGFRLDAVKHIKFSFMRDWLGHVRGQTGKNLFAVAEYWKNDLGALENYLSKTNWTMSAFDVPLHYNLYQASNSSGNYDMRNLLNGTLVQRHPSHAVTFVDNHDTQPGEALESFVQGWFKPLAYATILTREQGYPQVFYGDYYGIPSDGVPSYRQQIDPLLKARQQYAYGRQHDYFDHWDVIGWTREGNASHPNSGLATIMSDGPGGSKWMYVGRQKAGEVWHDMTGNRSGTVTINQDGWGHFFVNGGSVSVWVKR

SEQ ID NO: 44189 - protein, 480 aa, Bacillus sp.
NGTIMQYFEWNVPNDGQHWNRLHNNAQNLKNAGITAIWIPPAWKGTSQNDVGYGAYDLYDLGEFNQKGTVRTKYGTKAELERAIRSLKANGIQVYGDVVMNHKGGADFTERVQAVEVNPQNRNQEVSGTYQIEAWTGFNFPGRGNQHSSFKWRWYHFDGTDWDQSRQLANRIYKFRGDGKAWDWEVDTENGNYDYLMYADVDMDHPEVINELNRWGVWYANTLNLDGFRLDAVKHIKFSFMRDWLGHVRGQTGKNLFAVAEYWKNDLGALENYLSKTNWTMSAFDVPLHYNLYQASNSSGNYDMRNLLNGTLVQRHPSHAVTFVDNHDTQPGEALESFVQSWFKPLAYATILTREQGYPQVFYGDYYGIPSDGVPSYRQQIDPLLKARQQYAYGRQHDYFDHWDVIGWTREGNASHPNSGLATIMSDGPGGSKWMYVGRQKAGEVWHDMTGNRSGTVTINQDGWGHFFVNGGSVSVWVKR

SEQ ID NO: 44190 - protein, 480 aa, Bacillus sp.
NGTIMQYFEWNVPNDGQHWNRLHNNAQNLLNAGITAIWIPPAWKGTSQNDVGYGAYDLYDLGEFNQKGTVRTKYGTKAELERAIRSLKANGIQVYGDVVMNHKGGADFTERVQAVEVNPQNRNQEVSGTYQIEAWTGFNFPGRGNQHSSFKWRWYHFDGTDWDQSRQLANRIYKFRGDGKAWDWEVDTENGNYDYLMYADVDMDHPEVINELNRWGVWYANTLNLDGFRLDAVKHIKFSFMRDWLGHVRGQTGKNLFAVAEYWKNDLGALENYLSKTNWTMSAFDVPLHYNLYQASNSSGNYDMRNLLNGTLVQRHPSHAVTFVDNHDTQPGEALESFVQGWFKPLAYATILTREQGYPQVFYGDYYGIPSDGVPSYRQQIDPLLKARQQYAYGRQHDYFDHWDVIGWTREGNASHPNSGLATIMSDGPGGSKWMYVGRQKAGEVWHDMTGNRSGTVTINQDGWGHFFVNGGSVSVWVKR

SEQ ID NO: 44191 - protein, 480 aa, Bacillus sp.
NGTIMQYFEWNVPNDGQHWNRLHNNAQNLKNAGITAIWIPPAWKGTSQNDVGYGAYDLYDLGEFNQKGTVRTKYGTKAELERAIRSLKANGIQVYGDVVMNHKGGADFTERVQAVEVNPQNRNQEVSGTYQIEAWTGFNFPGRGNQHSSFKWRWYHFDGTDWDQSRQLANRIYKFRGDGKAWDWEVDTENGNYDYLMYADVDMDHPEVINELNRWGVWYANTLNLDGFRLDAVKHIKFSFMRDWLGHVRGQTGKNLFAVAEYWKNDLGALENYLSKTNWTMSAFDVPLHYNLYQASNSSGNYDMRNLLNGTLVQRHPSHAVTFVDNHDTQPGEALESFVQGWFKPLAYATILTREQGYPQVFYGDYYGIPSDGVPSYRQQIDPLLKARQWYAYGRQHDYFDHWDVIGWTREGNASHPNSGLATIMSDGPGGSKWMYVGRQKAGEVWHDMTGNRSGTVTINQDGWGHFFVNGGSVSVWVKR

SEQ ID NO: 44192 - protein, 480 aa, Bacillus sp.
NGTIMQYFEWNVPNDGQHWNRLHNNAQNLKNAGITAIWTPPAWKGTSQNDVGYGAYDLYDLGEFNQKGTVRTKYGTKAELERAIRSLKANGIQVYGDVVMNHKGGADFTERVQAVEVNPQNRNQEVSGTYQIEAWTGFNFPGRGNQHSSFKWRWYHFDGTDWDQSRQLANRIYKFRGDGKAWDWEVDTENGNYDYLMYADVDMDHPEVINELNRWGVWYANTLNLDGFRLDAVKHIKFSFMRDWLGHVRGQTGKNLFAVAEYWKNDLGALENYLSKTNWTMSAFDVPLHYNLYQASNSSGNYDMRNLLNGTLVQRHPSHAVTFVDNHDTQPGEALESFVQGWFKPLAYATILTREQGYPQVFYGDYYGIPSDGVPSYRQQIDPLLKARQQYAYGRQHDYFDHWDVIGWTREGNASHPNSGLATIMSDGPGGSKWMYVGRQKAGEVWHDMTGNRSGTVTINQDGWGHFFVNGGSVSVWVKR

SEQ ID NO: 44193 - protein, 480 aa, Bacillus sp.
NGTIMQYFEWNVPNDGQHWNRLHNNAQNLKNAGITAIWIPPAWKGTSQNDVGYGAYDLYDLGEFNQKGTVRTKYGTKAELERAIRSLKANGIQVYGDVVMNHKGGADFTERVQAVEVNPQNRNQEVSGTYQIEAWTGFNFPGRGNQHSSFKWRWYHFDGTDWDQSRQLANRIYKFRGDGKAWDWEVDTENGNYDYLMYADVDMDHPEVINELNRWGVWYANTLNLDGFRLDAVKHIKFSFMRDWLGHVRGQTGKNLFAVAEYWKNDLGALENYLSKTNWTMSAFDVPLHYNLYQASNSSGNYDMRNLLNGTLVQRHPSHAVTFVDNHDTQPGEALESFVQGWFKPLAYATILTREQGYPQVFYGDYYGIPSDGVPSRRQQIDPLLKARQQYAYGRQHDYFDHWDVIGWTREGNASHPNSGLATIMSDGPGGSKWMYVGRQKAGEVWHDMTGNRSGTVTINQDGWGHFFVNGGSVSVWVKR

SEQ ID NO: 44194 - protein, 480 aa, Bacillus sp.
NGTIMQYFEWNVPNDGQHWNRLHNNAQNLKNAGITAIWIPPAWKGTSQNDVGYGAYDLYDLGEFNQKGTVRTKYGTKAELERAIRSLKANGIQVYGDVVMNHKGGADFTERVQAVEVNPQNRNQEVSGTYQIEAWTGFNFPGRGNQHSSFKWRWYHFDGTDWDQSRQLANRIYKFRGDGKAWDWEVDTENGNYDYLMYADVDMDHPEVINELNRWGVWYANTFNLDGFRLDAVKHIKFSFMRDWLGHVRGQTGKNLFAVAEYWKNDLGALENYLSKTNWTMSAFDVPLHYNLYQASNSSGNYDMRNLLNGTLVQRHPSHAVTFVDNHDTQPGEALESFVQGWFKPLAYATILTREQGYPQVFYGDYYGIPSDGVPSYRQQIDPLLKARQQYAYGRQHDYFDHWDVIGWTREGNASHPNSGLATIMSDGPGGSKWMYVGRQKAGEVWHDMTGNRSGTVTINQDGWGHFFVNGGSVSVWVKR

SEQ ID NO: 44195 - protein, 480 aa, Bacillus sp.
NGTIMQYFEWNVPNDGQHWNRLHNNAQNLKNAGITAIWIPPAWKGTSQNDVGYGAYDLYDLGEFNQKGTVRTKYGTKAELERAILSLKANGIQVYGDVVMNHKGGADFTERVQAVEVNPQNRNQEVSGTYQIEAWTGFNFPGRGNQHSSFKWRWYHFDGTDWDQSRQLANRIYKFRGDGKAWDWEVDTENGNYDYLMYADVDMDHPEVINELNRWGVWYANTLNLDGFRLDAVKHIKFSFMRDWLGHVRGQTGKNLFAVAEYWKNDLGALENYLSKTNWTMSAFDVPLHYNLYQASNSSGNYDMRNLLNGTLVQRHPSHAVTFVDNHDTQPGEALESFVQGWFKPLAYATILTREQGYPQVFYGDYYGIPSDGVPSYRQQIDPLLKARQQYAYGRQHDYFDHWDVIGWTREGNASHPNSGLATIMSDGPGGSKWMYVGRQKAGEVWHDMTGNRSGTVTINQDGWGHFFVNGGSVSVWVKR

SEQ ID NO: 44196 - protein, 480 aa, Bacillus sp.
NGTIMQYFEWNVPNDGQHWNRLHNNAQNLKNAGITAIWIPPAWKGTSQNDVGYGAYDLYDLGEFNQKGTVRTKYGTKAELERAIRSCKANGIQVYGDVVMNHKGGADFTERVQAVEVNPQNRNQEVSGTYQIEAWTGFNFPGRGNQHSSFKWRWYHFDGTDWDQSRQLANRIYKFRGDGKAWDWEVDTENGNYDYLMYADVDMDHPEVINELNRWGVWYANTLNLDGFRLDAVKHIKFSFMRDWLGHVRGQTGKNLFAVAEYWKNDLGALENYLSKTNWTMSAFDVPLHYNLYQASNSSGNYDMRNLLNGTLVQRHPSHAVTFVDNHDTQPGEALESFVQGWFKPLAYATILTREQGYPQVFYGDYYGIPSDGVPSYRQQIDPLLKARQQYAYGRQHDYFDHWDVIGWTREGNASHPNSGLATIMSDGPGGSKWMYVGRQKAGEVWHDMTGNRSGTVTINQDGWGHFFVNGGSVSVWVKR

SEQ ID NO: 44197 - protein, 480 aa, Bacillus sp.
NGTIMQYFEWNVPNDGQHWNRLHNNAQNLKNAGITAIWIPPAWKGTSQNDVGYGAYDLYDLGEFNQKGTVRTKYGTKAELERAIRSLKANGIQVYGDVVMNHKGGADFTERVQAVEVNPQNRNQEVSGTYQIEAWTGFNFPGRGNQHSSFKWRWYHFDGTDWDQSRQLANRIYKFRGDGKAWDWEVDTENGNYDYLMYADVDMDHPEVINELNRWGVWYANTLNLDGFRLDAVKHIKFSFMRDWLGHVRGQTGKNLFAVAEYWKNDLGALENYLSKTNWTMSAFDVPLHYNLYQASNSSGNYDMRNLLNGTLVQRHPSHAVTFVDNHDTQPGEALESFVQGWFKPLAYATILTREQGYPQVFYGDYYGIPSDGVPSYRQQIDPLLKARQQYAYGRQHDYFDHWDVIGWTREGNASHPNSGLATILSDGPGGSKWMYVGRQKAGEVWHDMTGNRSGTVTINQDGWGHFFVNGGSVSVWVKR

SEQ ID NO: 44198 - protein, 480 aa, Bacillus sp.
NGTIMQYFEWNVPNDGQHWNRLHNNAQNLKNAGITAIWIPPAWKGTSQNDVGYGAYDLYDLGEFNQKGTVRTKYGTKAELERAIRSLKANGIQVYGDVVMNHKGGADFTERVQAVEVNPQNRNQEVSGTYQIEAWTGFNFPGRGNQHSSFKWRWYHFDGTDWDQSRQLANRIYKFRGDGKAWDWEVDTENGNYDYLMYADVDMDHPEVINELNRWGVWYANTLNLDGFRLDAVKHIKFSFMRDWLGHVRGQTGKNLFAVAEYWRNDLGALENYLSKTNWTMSAFDVPLHYNLYQASNSSGNYDMRNLLNGTLVQRHPSHAVTFVDNHDTQPGEALESFVQGWFKPLAYATILTREQGYPQVFYGDYYGIPSDGVPSYRQQIDPLLKARQQYAYGRQHDYFDHWDVIGWTREGNASHPNSGLATIMSDGPGGSKWMYVGRQKAGEVWHDMTGNRSGTVTINQDGWGHFFVNGGSVSVWVKR

SEQ ID NO: 44199 - protein, 480 aa, Bacillus sp.
NGTIMQYFEWNVPNDGQHWNRLHNNAQNLKNAGITAIWIPPAWKGTSQNDVGYGAYDLYDLGEFNQKGTVRTKYGTKAELERAIRSLKANGIQVYGDVVMNHKGGADFTERVQAVEVNPQNRNQEVSGTYQIEAWTGFNFPGRGNQHSSFKWRWYHFDGTDWDQSRQLANRIYKFRGDGKAWDWEVDTENGNYDYLMYADVDMDHPEVINELNRWGVWYANTLNLDGFRLDAVKHIKFSFMRDWLGHVRGQTGKNLFAVAEYWKNDLGALENYLSKTNWTMSAFDVPLHYNLYQASNSSGNYDMRNLLNGTLVQRHPSHAVTFVDNHDTQPGEALESFVQGWFKPLAYATILTREQGYPQVFYGDYYGIPSDGVPSYRQQIDPLLKARQQYAYGRQHDYFDHWDVIGWTREGNASHPNSGLATIMSDGPGGSKWMYVGRQKAGEVWHDRTGNRSGTVTINQDGWGHFFVNGGSVSVWVKR

SEQ ID NO: 44200 - protein, 480 aa, Bacillus sp.
NGTIMQYFEWNVPNDGQHWNRLHNNAQNLKVAGITAIWIPPAWKGTSQNDVGYGAYDLYDLGEFNQKGTVRTKYGTKAELERAIRSLKANGIQVYGDVVMNHKGGADFTERVQAVEVNPQNRNQEVSGTYQIEAWTGFNFPGRGNQHSSFKWRWYHFDGTDWDQSRQLANRIYKFRGDGKAWDWEVDTENGNYDYLMYADVDMDHPEVINELNRWGVWYANTLNLDGFRLDAVKHIKFSFMRDWLGHVRGQTGKNLFAVAEYWKNDLGALENYLSKTNWTMSAFDVPLHYNLYQASNSSGNYDMRNLLNGTLVQRHPSHAVTFVDNHDTQPGEALESFVQGWFKPLAYATILTREQGYPQVFYGDYYGIPSDGVPSYRQQIDPLLKARQQYAYGRQHDYFDHWDVIGWTREGNASHPNSGLATIMSDGPGGSKWMYVGRQKAGEVWHDMTGNRSGTVTINQDGWGHFFVNGGSVSVWVKR

SEQ ID NO: 44201 - protein, 480 aa, Bacillus sp.
NGTIMQYFEWNVPNDGQHWNRLHNNAQNLKNAGITAIWIPPAWKGTSQNDVGYGAYDLYDLGEFNQKGTVRTKYGTKAELERAIRSLKANGIQVYGDVVMNHKGGADFTERVQAVEVNPQNRNQEVSGTYQIEAWTGFNFPGRGNQHSSFKWRWYHFDGTDWDQSRQLANRIYKFRGDGKAWDWEVDTENGNYDYLMYADVDMDHPEVINELNRWGVWYANTLNLDGFRLDAVKHIKFSFMRDWLGHVRGQTGKNLFAVAEYWKNDLGALENYLSKTNWTMSAFDVPLHYNLYQASNSSGNYDMRNLLNGTLVQRHPSHAVTFVDNHDTQPGEALESFVQGWFKPLAYATILTREQGYPQVFYGDYYGIPSDGVPSYRQQIDPLLKARQQYAYGRQHDYFDHWDVIGWTREGNASHPNSGLATITSDGPGGSKWMYVGRQKAGEVWHDMTGNRSGTVTINQDGWGHFFVNGGSVSVWVKR

SEQ ID NO: 44202 - protein, 480 aa, Bacillus sp.
NGTIMQYFEWNVPNDGQHWNRLHNNAQNLKNAGITAIWIPPAWKGTSQNDVGYGAYDLYDLGEFNQKGTVRTKYGTKAELERAIRSLKANGIQVYGDVVMNHKGGADFTERVQAVEVNPQNRNQEVSGTYQIEAWTGFNFPGRGNQHSSFKWRWYHFDGTDWDQSRQLANRIYKFRGDGKAWDWEVDTENGNYDYLMYADVDMDHPEVINELNRWGVWYANTLNLDGFRLDAVKHIKFSFMRDWLGHVRGQTGKNLFAVAEYWKNDLGALENYLSKTNWTMSAFDVPLHYNLYQASNSSGNYDMRNLLNGTLVQRSPSHAVTFVDNHDTQPGEALESFVQGWFKPLAYATILTREQGYPQVFYGDYYGIPSDGVPSYRQQIDPLLKARQQYAYGRQHDYFDHWDVIGWTREGNASHPNSGLATIMSDGPGGSKWMYVGRQKAGEVWHDMTGNRSGTVTINQDGWGHFFVNGGSVSVWVKR

SEQ ID NO: 44203 - protein, 480 aa, Bacillus sp.
NGTIMQYFEWNVPNDGQHWNRLHNNAQNLKNAGITAIWIPPAWKGTSQNDVGYGAYDLYDLGEFNQKGTVRTKYGTKAELERAIRSLKANGIQVYGDVVMNHKGGADFTERVQAVEVNPQNRNQEVSGTYQIEAWTGFNFPGRGNQHSSFKWRWYHFDGTDWDQSRQLAIRIYKFRGDGKAWDWEVDTENGNYDYLMYADVDMDHPEVINELNRWGVWYANTLNLDGFRLDAVKHIKFSFMRDWLGHVRGQTGKNLFAVAEYWKNDLGALENYLSKTNWTMSAFDVPLHYNLYQASNSSGNYDMRNLLNGTLVQRHPSHAVTFVDNHDTQPGEALESFVQGWFKPLAYATILTREQGYPQVFYGDYYGIPSDGVPSYRQQIDPLLKARQQYAYGRQHDYFDHWDVIGWTREGNASHPNSGLATIMSDGPGGSKWMYVGRQKAGEVWHDMTGNRSGTVTINQDGWGHFFVNGGSVSVWVKR

SEQ ID NO: 44204 - protein, 480 aa, Bacillus sp.
NGTIMQYFEWNVPNDGQHWNRLHNNAQNLKNAGITAIWIPPAWKGTSQNDVGYGAYDLYDLGEFNQKGTVRTKYGTKAELERAIRSLKANGIQVYGDVVMNHKGGADFTELVQAVEVNPQNRNQEVSGTYQIEAWTGFNFPGRGNQHSSFKWRWYHFDGTDWDQSRQLANRIYKFRGDGKAWDWEVDTENGNYDYLMYADVDMDHPEVINELNRWGVWYANTLNLDGFRLDAVKHIKFSFMRDWLGHVRGQTGKNLFAVAEYWKNDLGALENYLSKTNWTMSAFDVPLHYNLYQASNSSGNYDMRNLLNGTLVQRHPSHAVTFVDNHDTQPGEALESFVQGWFKPLAYATILTREQGYPQVFYGDYYGIPSDGVPSYRQQIDPLLKARQQYAYGRQHDYFDHWDVIGWTREGNASHPNSGLATIMSDGPGGSKWMYVGRQKAGEVWHDMTGNRSGTVTINQDGWGHFFVNGGSVSVWVKR

SEQ ID NO: 44205 - protein, 480 aa, Bacillus sp.
NGTIMQYFEWNVPNDGQHWNRLHNNAQNLKNAGITAIWIPPAWKGTSQNDVGYGAYDLYDLGEFNQKGTVRTKYGTKAELERAIRSLKANGIQVYGDVVMNHKGGADFTERVQAVEVNPQNRNQEVSGTYQIEAWTGFNFPGRGNQHSSFKWRWYHFDGTDWDQSRQLANRIYKFRGDGKAWDWEVDTENGNYDYLMYADVDMDHPEVINELNRWGVWYANTLNLDGFRLDAVKHIKFSFMRDWLGHVRGQTGKNLFAVAEYWKNDLGALENYLSKTNWTMSAFDVPLHYFLYQASNSSGNYDMRNLLNGTLVQRHPSHAVTFVDNHDTQPGEALESFVQGWFKPLAYATILTREQGYPQVFYGDYYGIPSDGVPSYRQQIDPLLKARQQYAYGRQHDYFDHWDVIGWTREGNASHPNSGLATIMSDGPGGSKWMYVGRQKAGEVWHDMTGNRSGTVTINQDGWGHFFVNGGSVSVWVKR

SEQ ID NO: 44206 - protein, 480 aa, Bacillus sp.
NGTIMQYFEWNVPNDGQHWNRLHNNAQNLKNAGITAIWIPPAWKGTSQNDVGYGAYDLYDLGEFNQKGTVRTKYGTKAELERAIRSLKANGIQVYGDVVMNHKGGADFTERVQAVEVNPQNRNQEVSGTYQIEAWTGFNFPGRGNQHSSFKWRWYHFDGTDWDQSRQLANRIYKFRGDGKAWDWEVDTENGNYDYLMYADVDMDHPEVINELNRWGVWYANTLNLDGFRLDAVKHIKFSFMRDWLGHVRGQTGKNLFAVAEYWKNDLGALENYLSKTNWTMSAFDVPLHYNLYQASNSSGNYDMRNLLNGTLVQRHPSHAVTFVDNHDTQPGEALESFVQGWFKPLAYATILTREQGYPQVFYGDYYGIPSDGVPSYRQQIDPLLKARQQYAYGRQHDYFDHWDVIGWTREGNESHPNSGLATIMSDGPGGSKWMYVGRQKAGEVWHDMTGNRSGTVTINQDGWGHFFVNGGSVSVWVKR

SEQ ID NO: 44207 - protein, 480 aa, Bacillus sp.
NGTIMQYFEWNVPNDGQHWNRLHNNAQNLKNAGITAIWIPPAWKGTSQNDVGYGAYDLYDLGEFNQKGTVRTKYGTKAELERAIRSLKANGIQVYGDVVMNHKGGADFTERVQAVEVNPQNRNQEVSGTYQIEAWTGFNFPGRGNQHSSFKWRWYHFDGTDWDQSRQLANRIYKFRGDGKAWDWEVDTENGNYDYLMYADVDMDHPEVINELNRWGVWYANTLNLDGFRLDAVKHIKFSFMRDWLGHVRGQTGKNLFAVAEYWKNDLGALENYLSKTNWTMSAFDVPLHYNLYQASNSSGNYDMRNLLNGTLVQRHPSHAVTFVDNHDTQPGEALESFVQGWFKPLAYATILTREQGYPQVFYGDYYGIPSDGVPSYRQQIDPLLKARQQYAYGRQHDYFDHWDVIGWTREGLASHPNSGLATIMSDGPGGSKWMYVGRQKAGEVWHDMTGNRSGTVTINQDGWGHFFVNGGSVSVWVKR

SEQ ID NO: 44208 - protein, 480 aa, Bacillus sp.
NGTIMQYFEWNVPNDGQHWNRLHNNAQNLKNAGITAIWIPPAWKGTSQNDVGYGAYDLYDLGEFNQKGTVRTKYGTKAELERAIRSLKANGIQVYGDVVMNHKGGADFTERVQAVEVNPQNRNQEVSGTYQIEAWTGFNFPGRGNQHSSFKWRWYHFDGTDWDQSRQLANRIYKFRGDGKAWDWEVDTENGNYDYLMYADVDMDHPEVINELNRWGVWYANTLNLDGFRLDAVKHIKFSFMRDWLGHVRGQTGKNLFAVAEYWKNDLGALENYLSKTNWTMSAFDVPLHYNLYQASNSSGNYDMRYLLNGTLVQRHPSHAVTFVDNHDTQPGEALESFVQGWFKPLAYATILTREQGYPQVFYGDYYGIPSDGVPSYRQQIDPLLKARQQYAYGRQHDYFDHWDVIGWTREGNASHPNSGLATIMSDGPGGSKWMYVGRQKAGEVWHDMTGNRSGTVTINQDGWGHFFVNGGSVSVWVKR

SEQ ID NO: 44209 - protein, 480 aa, Bacillus sp.
NGTIMQYFEWNVPNDGQHWNRLHNNAQNLKNAGITAIWIPPAWKGTSQNDVGYGAYDLYDLGEFNQKGTVRTKYGTKAELERAIRSLKANGIQVYGDVVMNHKGGADFTERVQAVEVNPQNRNQEVSGTYQIEAWTGFNFPGRGNQHSSFKWRWYHFDGTDWDQSRQLANRIYKFRGDGKAWDWEVDTENGNYDYLMYADVDMDHPEVINELNRWGVWYANTLNLDGFRLDAVKHIKFSFMRDWLGHVRGQTGKNLFAVAEYWKNDLGALENYLSKTNWTMSAFDVPLHYNLYQASNSSGNYDMRNLLNGTLVQRHPSHAVTFVDNHDTQPGEALESFVVGWFKPLAYATILTREQGYPQVFYGDYYGIPSDGVPSYRQQIDPLLKARQQYAYGRQHDYFDHWDVIGWTREGNASHPNSGLATIMSDGPGGSKWMYVGRQKAGEVWHDMTGNRSGTVTINQDGWGHFFVNGGSVSVWVKR

SEQ ID NO: 44210 - protein, 480 aa, Bacillus sp.
NGTIMQYFEWNVPNDGQHWNRLHNNAQNLKNAGITAIWIPPAWKGTSQNDVGYGAYDLYDLGEFNQKGTVRTKYGTKAELERAIRSLKANGIQVYGDVVMNHKGGADFTERVQAVEVNPQNRNQEVSGTYQIEAWTGFNFPGRGNQHSSFKWRWYHFDGTDWDQSRQLANRIYKFRGDGKAWDWEVDTENGNYDYLMYADVDMDHPEVINELNRWGVWYANTLNLDGFRLDAVKHIKFSFMRDWLGHVRGQTGKNLFAVAEYWKNDLGALENYLSKTNWTMSAFDVPLHYNLYQASNSSGNYDMRNLLNGTLVQRHPSHAVTFVDNHDTQPGEALESFVQGWFKPLAYATILTREQGYPQVFYGDYYGIPSDGVPSYRQQIDPLLKARQQYAYGRQHDYFDHWDVIGWTREGNASHPNSGLALIMSDGPGGSKWMYVGRQKAGEVWHDMTGNRSGTVTINQDGWGHFFVNGGSVSVWVKR

SEQ ID NO: 44211 - protein, 480 aa, Bacillus sp.
NGTIMQYFEWNVPNDGQHWNRLHNNAQNLKNAGITAIWIPPAWKGTSQNDVGYGAYDLYDLGEFNQKGTVRTKYGTKAELERAIRSLKANGIQVYGDVVMNHKGGADFTERVQAVEVNPQNRNQEVSGTYQIEAWTGFNFPGRGNQHSSFKWRWYHFDGTDWDQSRQLANRIYKFRGDGKAWDWEVDTENGNYDYLMYADVDMDHPEVINELNRWGVWYANTLNLDGFRLDAVKHIKFSFMRDWLGHVRGQTGKNLFAVAEYWKNDLGALENYLSKTNWTMSAFDVPLHYNLYQASNSSGNYDMRNLLNGTLVQRHPSHAVTFVDNHDTQPGEALESFVQGWFKPLAYATILTREQGYPQVFYGDYYGIPSDGVPSYRQQIDPLLKARQQYAYGRQHDYGDHWDVIGWTREGNASHPNSGLATIMSDGPGGSKWMYVGRQKAGEVWHDMTGNRSGTVTINQDGWGHFFVNGGSVSVWVKR

SEQ ID NO: 44212 - protein, 480 aa, Bacillus sp.
NGTIMQYFEWNVPGDGQHWNRLHNNAQNLKNAGITAIWIPPAWKGTSQNDVGYGAYDLYDLGEFNQKGTVRTKYGTKAELERAIRSLKANGIQVYGDVVMNHKGGADFTERVQAVEVNPQNRNQEVSGTYQIEAWTGFNFPGRGNQHSSFKWRWYHFDGTDWDQSRQLANRIYKFRGDGKAWDWEVDTENGNYDYLMYADVDMDHPEVINELNRWGVWYANTLNLDGFRLDAVKHIKFSFMRDWLGHVRGQTGKNLFAVAEYWKNDLGALENYLSKTNWTMSAFDVPLHYNLYQASNSSGNYDMRNLLNGTLVQRHPSHAVTFVDNHDTQPGEALESFVQGWFKPLAYATILTREQGYPQVFYGDYYGIPSDGVPSYRQQIDPLLKARQQYAYGRQHDYFDHWDVIGWTREGNASHPNSGLATIMSDGPGGSKWMYVGRQKAGEVWHDMTGNRSGTVTINQDGWGHFFVNGGSVSVWVKR

SEQ ID NO: 44213 - protein, 480 aa, Bacillus sp.
NGTIMQYFEWNVPNDGQHWNRLHNNAQNLKNAGITAIWIPPAWKGTSQNDVGYGAYDLYDLGEFNQKGTVRTKYGTKAELERAIRSLKANGIQVYGDVVMNHKGGADFTERVQAVEVNPQNRNQEVSGTYQIEAWTGFNFPGRGNQHSSFKWRWYHFDGTDWDQSRQLANRIYKFRGDGKAWDWEVDTENGNYDYLMYADVDMDHPEVINELNRWGVWYANTLNLDGFRLDAVKHIKFSFMRDWLGHVRGQTGKNLFAVAEYWKNDLGALENYLSKTNWTMSAFDVPLHYNLYIASNSSGNYDMRNLLNGTLVQRHPSHAVTFVDNHDTQPGEALESFVQGWFKPLAYATILTREQGYPQVFYGDYYGIPSDGVPSYRQQIDPLLKARQQYAYGRQHDYFDHWDVIGWTREGNASHPNSGLATIMSDGPGGSKWMYVGRQKAGEVWHDMTGNRSGTVTINQDGWGHFFVNGGSVSVWVKR

SEQ ID NO: 44214 - protein, 480 aa, Bacillus sp.
NGTIMQYFEWNVPNDGQHWNDLHNNAQNLKNAGITAIWIPPAWKGTSQNDVGYGAYDLYDLGEFNQKGTVRTKYGTKAELERAIRSLKANGIQVYGDVVMNHKGGADFTERVQAVEVNPQNRNQEVSGTYQIEAWTGFNFPGRGNQHSSFKWRWYHFDGTDWDQSRQLANRIYKFRGDGKAWDWEVDTENGNYDYLMYADVDMDHPEVINELNRWGVWYANTLNLDGFRLDAVKHIKFSFMRDWLGHVRGQTGKNLFAVAEYWKNDLGALENYLSKTNWTMSAFDVPLHYNLYQASNSSGNYDMRNLLNGTLVQRHPSHAVTFVDNHDTQPGEALESFVQGWFKPLAYATILTREQGYPQVFYGDYYGIPSDGVPSYRQQIDPLLKARQQYAYGRQHDYFDHWDVIGWTREGNASHPNSGLATIMSDGPGGSKWMYVGRQKAGEVWHDMTGNRSGTVTINQDGWGHFFVNGGSVSVWVKR

SEQ ID NO: 44215 - protein, 480 aa, Bacillus sp.
NGTIMQYFEWNVPNDGQHWNRLHNNAQNLKNAGITAIWIPPAWKGTSQNDVGYGAYDLYDLGEFNQKGTVRTKYGTKAELERAIRSLKANGIQVYGDVVMNHKGGADFTERVQAVEVNPQNRNQEVSGTYQIEAWTGFNFPGRGNQHSSFKWRWYHFDGTDWDQSRQLANRIYKFRGDGKAWDWEVDTENGNYDYLMYADVDMDHPEVINELNRWGVWYANTLNLDGFRLDAVKHIKFSFLRDWLGHVRGQTGKNLFAVAEYWKNDLGALENYLSKTNWTMSAFDVPLHYNLYQASNSSGNYDMRNLLNGTLVQRHPSHAVTFVDNHDTQPGEALESFVQGWFKPLAYATILTREQGYPQVFYGDYYGIPSDGVPSYRQQIDPLLKARQQYAYGRQHDYFDHWDVIGWTREGNASHPNSGLATIMSDGPGGSKWMYVGRQKAGEVWHDMTGNRSGTVTINQDGWGHFFVNGGSVSVWVKR

SEQ ID NO: 44216 - protein, 480 aa, Bacillus sp.
NGTIMQYFEWNVPNDGQHWNRLHNNAQNLKNAGITAIWIPPAWKGTSQNDVGYGLYDLYDLGEFNQKGTVRTKYGTKAELERAIRSLKANGIQVYGDVVMNHKGGADFTERVQAVEVNPQNRNQEVSGTYQIEAWTGFNFPGRGNQHSSFKWRWYHFDGTDWDQSRQLANRIYKFRGDGKAWDWEVDTENGNYDYLMYADVDMDHPEVINELNRWGVWYANTLNLDGFRLDAVKHIKFSFMRDWLGHVRGQTGKNLFAVAEYWKNDLGALENYLSKTNWTMSAFDVPLHYNLYQASNSSGNYDMRNLLNGTLVQRHPSHAVTFVDNHDTQPGEALESFVQGWFKPLAYATILTREQGYPQVFYGDYYGIPSDGVPSYRQQIDPLLKARQQYAYGRQHDYFDHWDVIGWTREGNASHPNSGLATIMSDGPGGSKWMYVGRQKAGEVWHDMTGNRSGTVTINQDGWGHFFVNGGSVSVWVKR

SEQ ID NO: 44217 - protein, 480 aa, Bacillus sp.
NGTIMQYFEWNVPNDGQHWNRLHNNAQNLKNAGITAIWIPPAWKGTSQNDVGYGAYDLYDLGEFNQKGTVRTKYGTKAELERAIRSLKANGIQVYGDVVMNHKGGADFTERVQAVEVNPQNRNQEVSGTYQIEAWTGFNFPGRGNQHSSFKWRWYHFDGTDWDQSRQLANRIYKFRGDGKAWDWEVDTENGNYDYLMYADVDMDHPEVINELNRWGVWYANTLNLDGFRLDAVKHIKFSFMRDWLGHVRGQTGKNLFAVAEYWKNDLGALENYLSKTNWTMSAFDVPLHYNLYQASNSSGNYDMRNLLNGTLVQRHPSHAVTFVDNHDTQPGEALCSFVQGWFKPLAYATILTREQGYPQVFYGDYYGIPSDGVPSYRQQIDPLLKARQQYAYGRQHDYFDHWDVIGWTREGNASHPNSGLATIMSDGPGGSKWMYVGRQKAGEVWHDMTGNRSGTVTINQDGWGHFFVNGGSVSVWVKR

SEQ ID NO: 44218 - protein, 480 aa, Bacillus sp.
NGTIMQYFEWNVPNDGQHWNRLHNNAQNLKNAGITAIWIPPAWKGTSQNDVGYGAYDLYDLGEFNQKGTVRTKYGTKAELERAIRSLKANGIQVYGDVVMNHKGGADFTERVQAVEVNPQNRNQEVSGTYQIEAWTGFNFPGRGNQHSSFKWRWYHFDGTDWDQSRQLANRIYKFRGDGKAWDWEVDTENGNYDYLMYADVDMDHPEVINELNRWGVWYANTLNLDGFRLDAVKHIKFSFMRDWLGHVRGQTGKNLFAVAEYWKNDLGALENYLSKTNWTMSAFDVPLHYNLYHASNSSGNYDMRNLLNGTLVQRHPSHAVTFVDNHDTQPGEALESFVQGWFKPLAYATILTREQGYPQVFYGDYYGIPSDGVPSYRQQIDPLLKARQQYAYGRQHDYFDHWDVIGWTREGNASHPNSGLATIMSDGPGGSKWMYVGRQKAGEVWHDMTGNRSGTVTINQDGWGHFFVNGGSVSVWVKR

SEQ ID NO: 44219 - protein, 480 aa, Bacillus sp.
NGTIMQYFEWNVPNDGQHWNRLHNNAQNLKNAGITAIWIPPAWKGTSQNDVGYGAYDLYDLGEFNQKGTVRTKYGTKAELERAIRSLKANGIQVYGDVVMNHKGGADFTERVQAVEVNPQNRNQEVSGTYQIEAWTGFNFPGRGNQHSSFKWRWYHFDGTDWDQSRQLANRIYKFRGDGKAWDWEVDTENGNYDYLMYADVDMDHPEVINELNRWGVWYANTLNLDGFRLDAVKHIKFSFMRDWLGHVRGQTGKSLFAVAEYWKNDLGALENYLSKTNWTMSAFDVPLHYNLYQASNSSGNYDMRNLLNGTLVQRHPSHAVTFVDNHDTQPGEALESFVQGWFKPLAYATILTREQGYPQVFYGDYYGIPSDGVPSYRQQIDPLLKARQQYAYGRQHDYFDHWDVIGWTREGNASHPNSGLATIMSDGPGGSKWMYVGRQKAGEVWHDMTGNRSGTVTINQDGWGHFFVNGGSVSVWVKR

SEQ ID NO: 44220 - protein, 480 aa, Bacillus sp.
NGTIMQYFEWNVPNDGQHWNRLHNNAQNLKNAGITAIWIPPAWKGTSQNDVGYGAYDLYDLGEFNQKGTVRTKYGTKAELERAIRSLKANGIQVYGDVVMNHKGGADFTEVVQAVEVNPQNRNQEVSGTYQIEAWTGFNFPGRGNQHSSFKWRWYHFDGTDWDQSRQLANRIYKFRGDGKAWDWEVDTENGNYDYLMYADVDMDHPEVINELNRWGVWYANTLNLDGFRLDAVKHIKFSFMRDWLGHVRGQTGKNLFAVAEYWKNDLGALENYLSKTNWTMSAFDVPLHYNLYQASNSSGNYDMRNLLNGTLVQRHPSHAVTFVDNHDTQPGEALESFVQGWFKPLAYATILTREQGYPQVFYGDYYGIPSDGVPSYRQQIDPLLKARQQYAYGRQHDYFDHWDVIGWTREGNASHPNSGLATIMSDGPGGSKWMYVGRQKAGEVWHDMTGNRSGTVTINQDGWGHFFVNGGSVSVWVKR

SEQ ID NO: 44221 - protein, 480 aa, Bacillus sp.
NGTIMQYFEWNVPNDGQHWNRLHNNAQNLKNAGITAIWIPPAWKGTSQNDVGYGAYDLYDLGEFNQKGTVRTKYGTKAELERAIRSLKANGIQVYGDVVMNHKGGADFTERVRAVEVNPQNRNQEVSGTYQIEAWTGFNFPGRGNQHSSFKWRWYHFDGTDWDQSRQLANRIYKFRGDGKAWDWEVDTENGNYDYLMYADVDMDHPEVINELNRWGVWYANTLNLDGFRLDAVKHIKFSFMRDWLGHVRGQTGKNLFAVAEYWKNDLGALENYLSKTNWTMSAFDVPLHYNLYQASNSSGNYDMRNLLNGTLVQRHPSHAVTFVDNHDTQPGEALESFVQGWFKPLAYATILTREQGYPQVFYGDYYGIPSDGVPSYRQQIDPLLKARQQYAYGRQHDYFDHWDVIGWTREGNASHPNSGLATIMSDGPGGSKWMYVGRQKAGEVWHDMTGNRSGTVTINQDGWGHFFVNGGSVSVWVKR

SEQ ID NO: 44222 - protein, 480 aa, Bacillus sp.
NGTIMQYFEWNVPNDGQHWNRLHNNAQNLKNAGITAIWIPPAWKGTSQNDVGYGAYDLYDLGEFNQKGTVRTKYGTKAELERAIRSLKANGIQVYGDVVMNHKGGADFTERVQAVEVNPQNRNQEVSGTYQIEAWTGFCFPGRGNQHSSFKWRWYHFDGTDWDQSRQLANRIYKFRGDGKAWDWEVDTENGNYDYLMYADVDMDHPEVINELNRWGVWYANTLNLDGFRLDAVKHIKFSFMRDWLGHVRGQTGKNLFAVAEYWKNDLGALENYLSKTNWTMSAFDVPLHYNLYQASNSSGNYDMRNLLNGTLVQRHPSHAVTFVDNHDTQPGEALESFVQGWFKPLAYATILTREQGYPQVFYGDYYGIPSDGVPSYRQQIDPLLKARQQYAYGRQHDYFDHWDVIGWTREGNASHPNSGLATIMSDGPGGSKWMYVGRQKAGEVWHDMTGNRSGTVTINQDGWGHFFVNGGSVSVWVKR

SEQ ID NO: 44223 - protein, 480 aa, Bacillus sp.
NGTIMQYFEWNVPNDGQHWNRLHNNAQNLKNAGITAIWIPPAWKGTSQNDVGYGAYDLYDLGEFNQKGTVRTKYGTKAELERAIRSLKANGIQVYGDVVMNHKGGADFTERVQAVEVNPQNRNQEVSGTYQIEAWTGFNFPGRGNQHSSFKWRWYHFDGTDWDQSRQLANRIYKFRGDGKAWDWEVDTENGNYDYLMYADVDMDHPEVINELNRWGVWYANTLNLDGFRLDAVKHIKFSFMRDWLGHVRGQTGKNLFAVAEYWKNDLGALENYLSKTNWTMSAFDVPLHYNLYQASNSSGNYDMRNLLNGTLVQRHPSHAVTFVDNHDTQPGEALESFVQGWFKPLAYATILTREQGYPQVFYGDYYGIPSDGVPSYRQQIDPLLKARQQYAYGRQHDYFDHWDVIGWTREGNASHPNSGLATIMSDGPGGSKWMYVGAQKAGEVWHDMTGNRSGTVTINQDGWGHFFVNGGSVSVWVKR

SEQ ID NO: 44224 - protein, 480 aa, Bacillus sp.
NGTIMQYFEWNVPNDGQHWNRLHNNAQNLKNAGITAIWIPPAWKGTSQNDVGYGAYDLYDLGEFNQKGTVRTKYGTKAELERAIRSLKANGIQVYGDVVMNHKGGADFTERVQAVEVNPQNRNQEVSGTYQIEAWTGFNFPGRGNQHSSFKWRWYHFDGTDWDQSRQLANRIYKFRGDGKAWDWEVDTENGNYDYLMYADVDMDHPEVINELNRWGVWYANTLNLDGFRLDAVKHIKFSFMRDWLGHVRGQTGKNLFAVAEYWKNDLGALENYLSKTNWTMSAFDVPLHYYLYQASNSSGNYDMRNLLNGTLVQRHPSHAVTFVDNHDTQPGEALESFVQGWFKPLAYATILTREQGYPQVFYGDYYGIPSDGVPSYRQQIDPLLKARQQYAYGRQHDYFDHWDVIGWTREGNASHPNSGLATIMSDGPGGSKWMYVGRQKAGEVWHDMTGNRSGTVTINQDGWGHFFVNGGSVSVWVKR

SEQ ID NO: 44225 - protein, 480 aa, Bacillus sp.
NGTIMQYFEWNVPNDGQHWNRLHNNAQNLKNAGITAIWIPPAWKGTSQNDVGYGAYDLYDLGEFNQKGTVRTKYGTKAELERAIRSLKANGIQVYGDVVMNHKGGADFTERVQAVEVNPQNRNQEVSGTYQIEAWTGFNFPGRGNQHSSFKWRWYHFDGTDWDQSRQLANRIYKFRGDGKAWDWEVDTENGNYDYLMYADVDMDHPEVINELNRWGVWYANTLNLDGFRLDAVKHIKFSFMRDWLGHVRGQTGKNLFAVAEYWKNDLGALENYLSKTNETMSAFDVPLHYNLYQASNSSGNYDMRNLLNGTLVQRHPSHAVTFVDNHDTQPGEALESFVQGWFKPLAYATILTREQGYPQVFYGDYYGIPSDGVPSYRQQIDPLLKARQQYAYGRQHDYFDHWDVIGWTREGNASHPNSGLATIMSDGPGGSKWMYVGRQKAGEVWHDMTGNRSGTVTINQDGWGHFFVNGGSVSVWVKR

SEQ ID NO: 44226 - protein, 480 aa, Bacillus sp.
NGTIMQYFEWNVPNDGQHWNRLHNNAQNLKNAGITAIWIPPAWKGTSQNDVGYGAYDLYDLGEFNQKGTVRTKYGTKAELERAIRSLKANGIQVYGDVVMNHKGGADFTERVQAVEVNPQNRNQEVSGTYQIEAWTGFNFPGRGNQHSSFKWRWYHFDGTDWDQSRQLANRIYKFRGDGKAWDWEVDTENGNYDYLMYADVDMDHPEVINELNRWGVWYANTLNLDGFRLDAVKHIKFSFMRDWLGHVRGQTGKNLFAVAEYWKNDLGALENYLSKTNWTMSAFDVPLHYNLYQASNSSGNYDMRNLLNGTLVQRHPSHAVTFVDNHDTQPGEALESFVQGWFKPLAYATILTRDQGYPQVFYGDYYGIPSDGVPSYRQQIDPLLKARQQYAYGRQHDYFDHWDVIGWTREGNASHPNSGLATIMSDGPGGSKWMYVGRQKAGEVWHDMTGNRSGTVTINQDGWGHFFVNGGSVSVWVKR

SEQ ID NO: 44227 - protein, 480 aa, Bacillus sp.
NGTIMQYFEWNVPNDGQHWNRLHNNAQNLKNAGITAIWIPPAWKGTSQNDVGYGAYDLYDLGEFNQKGTVRTKYGTKAELERAIRSLKANGIQVYGDVVMNHKGGADFTERVQAVEVNPQNRNQEVSGTYQIEAWTGFNFPGRGNQHSSFKWRWYHFDGTDWDQSRQLANRIYKFRGDGKAWDWEVDTENGNYDYLMYADVDMDHPEVINELNRWGVWYANTLNLDGFRLDAVKHIKFSFMRDWLGHVRGQTGKNLFAVAEYWKNDLGALENYLSKTNWTMSAFDVPLHYNLYQASNSSGNYDMRNLLNGTLVQRHPSHAVTFVDNHDTQPGEALESFVQGWFKPLAYATILTREQGYPQVFYGDYYGIPPDGVPSYRQQIDPLLKARQQYAYGRQHDYFDHWDVIGWTREGNASHPNSGLATIMSDGPGGSKWMYVGRQKAGEVWHDMTGNRSGTVTINQDGWGHFFVNGGSVSVWVKR

SEQ ID NO: 44228 - protein, 480 aa, Bacillus sp.
NGTIMQYFEWNVPNDGQHWNRLHNNAQNLKNAGITAIWIPPAHKGTSQNDVGYGAYDLYDLGEFNQKGTVRTKYGTKAELERAIRSLKANGIQVYGDVVMNHKGGADFTERVQAVEVNPQNRNQEVSGTYQIEAWTGFNFPGRGNQHSSFKWRWYHFDGTDWDQSRQLANRIYKFRGDGKAWDWEVDTENGNYDYLMYADVDMDHPEVINELNRWGVWYANTLNLDGFRLDAVKHIKFSFMRDWLGHVRGQTGKNLFAVAEYWKNDLGALENYLSKTNWTMSAFDVPLHYNLYQASNSSGNYDMRNLLNGTLVQRHPSHAVTFVDNHDTQPGEALESFVQGWFKPLAYATILTREQGYPQVFYGDYYGIPSDGVPSYRQQIDPLLKARQQYAYGRQHDYFDHWDVIGWTREGNASHPNSGLATIMSDGPGGSKWMYVGRQKAGEVWHDMTGNRSGTVTINQDGWGHFFVNGGSVSVWVKR

SEQ ID NO: 44229 - protein, 480 aa, Bacillus sp.
NGTIMQYFEWNVPNDGQHWNRLHNNAQNLKNAGITAIWIPPAWKGTSQNDVGYGAYDLYDLGEFNQKGTVRTKYGTKAELERAIRSLKANGIQVYGDVVMNHKGGADFTERVQAVEVNPQNRNQEVSGTYQIEAWTGFNFPGRGNQHSSFKWRWYHFDGTDWDQSRQLANRIYKFRGDGKAWDWEVDTENGNYDYLMYADVDMDHPEVINELNRWGVWYANTLNLDGFRLDAVKHIKFSFMRDWLQHVRGQTGKNLFAVAEYWKNDLGALENYLSKTNWTMSAFDVPLHYNLYQASNSSGNYDMRNLLNGTLVQRHPSHAVTFVDNHDTQPGEALESFVQGWFKPLAYATILTREQGYPQVFYGDYYGIPSDGVPSYRQQIDPLLKARQQYAYGRQHDYFDHWDVIGWTREGNASHPNSGLATIMSDGPGGSKWMYVGRQKAGEVWHDMTGNRSGTVTINQDGWGHFFVNGGSVSVWVKR

SEQ ID NO: 44230 - protein, 480 aa, Bacillus sp.
NGTIMQYFEWNVPNDGQHWNRLHNNAQNLKNAGITAIWIPPAWKGTSQNDVGYGAYDLYDLGEFNQKGTVRTKYGTKAELERAIRSLKANGIQVYGDVVMNHKGGADFTERVQAVEVNPQNRNQEVSGTYQIEAWTGFNFPGRGNQHSSFKWRWYHFDGTDWDQSRQLMNRIYKFRGDGKAWDWEVDTENGNYDYLMYADVDMDHPEVINELNRWGVWYANTLNLDGFRLDAVKHIKFSFMRDWLGHVRGQTGKNLFAVAEYWKNDLGALENYLSKTNWTMSAFDVPLHYNLYQASNSSGNYDMRNLLNGTLVQRHPSHAVTFVDNHDTQPGEALESFVQGWFKPLAYATILTREQGYPQVFYGDYYGIPSDGVPSYRQQIDPLLKARQQYAYGRQHDYFDHWDVIGWTREGNASHPNSGLATIMSDGPGGSKWMYVGRQKAGEVWHDMTGNRSGTVTINQDGWGHFFVNGGSVSVWVKR

SEQ ID NO: 44231 - protein, 480 aa, Bacillus sp.
NGTIMQYFEWNVPNDGQHWNRLHNNAQNLKNAGITAIWIPPAWKGTSQNDVGYGAYDLYDLGEFNQKGTVRTKYGTKAELERAIRSLKANGIQVYGDVVMNHKGGADFTERVQAVEVNPQNRNQEVSGTYQIEAWTGFNFPGRGNQHSSFKWRWYHFDGTDWDQSRQLANRIYKFRGDGKAWDWEVDTENGNYDYLMYADVDMDHPEVINELNRWGVWYANTLNLDGFRLDAVKHIKFSFMRDWLGHVRGQTGKNLFAVAEYWKNDLGALENYLSKTNWTMSAFDVPLHYNLYQASNSSGNYDMRNLLNGTLVQRHPSHAVTFVDNHDTQPGEALESFVQGWFKPLAYATILTREQGYPQVFYGDYYGIPSDGVPSYRQQIDPLLKARQQYAYGRQHDYFDHWDVIGWTREGNASHPNSGLATIMSDGPGGSKWMYVGRQKAGEVWHDMTGNRSGTVTINCDGWGHFFVNGGSVSVWVKR

SEQ ID NO: 44232 - protein, 480 aa, Bacillus sp.
NGTIMQYFEWNVPNDGQHWNRLHNNAQNLKNAGITAIWIPPAWKGTSQNDVGYGAYDLYDLGEFNQKGTVRTKYGTKAELERAIRSLKANGIQVYGDVVMNHKGGADFTERVQAVEVNPQNRNQEVSGTYQIEAWTGFNFPGRGNQHSSFKWRWYHFDGTDWDQSRQLANRIYKFRGDGKAWDWEVDTENGNYDYLMYADVDMDHPEVINELNRWGVWYANTLNLDGFRLDAVKHIKFSFMRDWLGHVRGQTGKNLFAVAEYWKNDLGALENYLSKTNWTMSAFDVPLHYNLYQASNSSGNYDMRNLLNGTLVQRHPSHAVTFVDNHDTQPGEALESFVQGWFKPLAYATILTREQGYPQVFYGDYYGIPSDGVPSYRQQIDPLLKARQQYAYGRQHDYWDHWDVIGWTREGNASHPNSGLATIMSDGPGGSKWMYVGRQKAGEVWHDMTGNRSGTVTINQDGWGHFFVNGGSVSVWVKR

SEQ ID NO: 44233 - protein, 480 aa, Bacillus sp.
NGTIMQYFEWNVPNDGQHWNRLHNNAQNLKNAGITAIWIPPAWKGTSQNDVGYGAYDLYDLGEFNQKGTVRTKYGTKAELERAIRSLKANGIQVYGDVVMNHKGGADFTERVQAVEVNPQNRNQEVSGTYQIEAWTGFNFPGRGNQHSSFKWRWYHFDGTDWDQSRQLANRIYKFRGDGKAWDWEVDTENGNYDYLMYADVDMDHPEVINELNRWGVWYANTLNLDGFRLDAVKHIKFSFMRDWLGHVRGQTGKNLFAVAEYWKNDLGALENYLSKTNWTMSAFDVPLHYNLYQASNSSGNYDMRNLLNGTLVQRHPSHAVTFVDNHDTQPGEALESFVQGWFKPLAYATILTREQGYPQVFYGDYYGIPSDGVPSYRQQIDPLLKARTQYAYGRQHDYFDHWDVIGWTREGNASHPNSGLATIMSDGPGGSKWMYVGRQKAGEVWHDMTGNRSGTVTINQDGWGHFFVNGGSVSVWVKR

SEQ ID NO: 44234 - protein, 480 aa, Bacillus sp.
NGTIMQYFEWNVPNDGQHWNRLHNNAQNLKNAGITAIWIPPAWKGTSQNDVGYGAYDLYDLGEFNQKGTVRTKYGTKAELERAIRSLKALGIQVYGDVVMNHKGGADFTERVQAVEVNPQNRNQEVSGTYQIEAWTGFNFPGRGNQHSSFKWRWYHFDGTDWDQSRQLANRIYKFRGDGKAWDWEVDTENGNYDYLMYADVDMDHPEVINELNRWGVWYANTLNLDGFRLDAVKHIKFSFMRDWLGHVRGQTGKNLFAVAEYWKNDLGALENYLSKTNWTMSAFDVPLHYNLYQASNSSGNYDMRNLLNGTLVQRHPSHAVTFVDNHDTQPGEALESFVQGWFKPLAYATILTREQGYPQVFYGDYYGIPSDGVPSYRQQIDPLLKARQQYAYGRQHDYFDHWDVIGWTREGNASHPNSGLATIMSDGPGGSKWMYVGRQKAGEVWHDMTGNRSGTVTINQDGWGHFFVNGGSVSVWVKR

SEQ ID NO: 44235 - protein, 480 aa, Bacillus sp.
NGTIMQYFEWNVPNDGQHWNRLHNNAQNLKNAGITAIWIPPAWKGTSQNDVGYGAYDLYDLGEFNQKGTVRTKYGTKAELERAIRSLKANGIQVYGDVVMNHKGGADFTERVQAVEVNPQNRNQEVSGTYQIEAWTDFNFPGRGNQHSSFKWRWYHFDGTDWDQSRQLANRIYKFRGDGKAWDWEVDTENGNYDYLMYADVDMDHPEVINELNRWGVWYANTLNLDGFRLDAVKHIKFSFMRDWLGHVRGQTGKNLFAVAEYWKNDLGALENYLSKTNWTMSAFDVPLHYNLYQASNSSGNYDMRNLLNGTLVQRHPSHAVTFVDNHDTQPGEALESFVQGWFKPLAYATILTREQGYPQVFYGDYYGIPSDGVPSYRQQIDPLLKARQQYAYGRQHDYFDHWDVIGWTREGNASHPNSGLATIMSDGPGGSKWMYVGRQKAGEVWHDMTGNRSGTVTINQDGWGHFFVNGGSVSVWVKR

SEQ ID NO: 44236 - protein, 480 aa, Bacillus sp.
NGTIMQYFEWNVPNDGQHWNWLHNNAQNLKNAGITAIWIPPAWKGTSQNDVGYGAYDLYDLGEFNQKGTVRTKYGTKAELERAIRSLKANGIQVYGDVVMNHKGGADFTERVQAVEVNPQNRNQEVSGTYQIEAWTGFNFPGRGNQHSSFKWRWYHFDGTDWDQSRQLANRIYKFRGDGKAWDWEVDTENGNYDYLMYADVDMDHPEVINELNRWGVWYANTLNLDGFRLDAVKHIKFSFMRDWLGHVRGQTGKNLFAVAEYWKNDLGALENYLSKTNWTMSAFDVPLHYNLYQASNSSGNYDMRNLLNGTLVQRHPSHAVTFVDNHDTQPGEALESFVQGWFKPLAYATILTREQGYPQVFYGDYYGIPSDGVPSYRQQIDPLLKARQQYAYGRQHDYFDHWDVIGWTREGNASHPNSGLATIMSDGPGGSKWMYVGRQKAGEVWHDMTGNRSGTVTINQDGWGHFFVNGGSVSVWVKR

SEQ ID NO: 44237 - protein, 480 aa, Bacillus sp.
NGTIMQYFEWNVPNDGQHWNRLHNNAQNLKNAGITAIWIPPAWKGTSQNDVGYGAYDLYDLGEFNQKGTVRTKYGTKAELERAIRSLKANGIQVYGDVVMNHKGGADFTERVQAVEVNPQNRNQEVSGTYQIEAWTGFNFPGRGNQHSSFKWRWYHFDGTDWDQSRQLANRIYKFRGDGKAWDWEVDTENGNYDYLMYADVDMDHPEVINELNRWGVWYANTLNLDGFRLDAVKHIKFSFMRDWLGHVRGQTGKNLFAVAEYWKNDLVALENYLSKTNWTMSAFDVPLHYNLYQASNSSGNYDMRNLLNGTLVQRHPSHAVTFVDNHDTQPGEALESFVQGWFKPLAYATILTREQGYPQVFYGDYYGIPSDGVPSYRQQIDPLLKARQQYAYGRQHDYFDHWDVIGWTREGNASHPNSGLATIMSDGPGGSKWMYVGRQKAGEVWHDMTGNRSGTVTINQDGWGHFFVNGGSVSVWVKR

SEQ ID NO: 44238 - protein, 480 aa, Bacillus sp.
NGTIMQYFEWNVPNDGQHWNRLHNNAQNLKNAGITAIWIPPAWKGTSQNDVGYGAYDLYDLGEFNQKGTVRTKYGTKAELERAIRSLKANGIQVYGDVVMNHKGGADFTERVQAVEVNPQNRNQEVSGTYQIEAWTGFNFPGRGNQHSSFKWRWYHFDGTDWDQSRQLANRIYKFRGDGKAWDWEVDTENGNYDYLMYADVDMDHPEVINELNRWGVWYANTLNLDGFRLDAVKHIKFSFMRDWLGHVRGQTGKNLFAVAEYWKNDLGALENYLSKTNWTMSAFDVPLHYNLYQASNSSGNYDMRNLLNGTLVQRHPSHAVTFVDNHDTQPGEALESFVQGWFKPLAYATILTREQGYPQVFYGDYYGIPSDGVPSYRQQIDPLLKARQQYAYGRQHDYFDHWDVIGWTREGNASHPNSGLATIMSDGPGGSKWMYVGRQKAGEVWVDMTGNRSGTVTINQDGWGHFFVNGGSVSVWVKR

SEQ ID NO: 44239 - protein, 480 aa, Bacillus sp.
NGTIMQYFEWNVPNDGAHWNRLHNNAQNLKNAGITAIWIPPAWKGTSQNDVGYGAYDLYDLGEFNQKGTVRTKYGTKAELERAIRSLKANGIQVYGDVVMNHKGGADFTERVQAVEVNPQNRNQEVSGTYQIEAWTGFNFPGRGNQHSSFKWRWYHFDGTDWDQSRQLANRIYKFRGDGKAWDWEVDTENGNYDYLMYADVDMDHPEVINELNRWGVWYANTLNLDGFRLDAVKHIKFSFMRDWLGHVRGQTGKNLFAVAEYWKNDLGALENYLSKTNWTMSAFDVPLHYNLYQASNSSGNYDMRNLLNGTLVQRHPSHAVTFVDNHDTQPGEALESFVQGWFKPLAYATILTREQGYPQVFYGDYYGIPSDGVPSYRQQIDPLLKARQQYAYGRQHDYFDHWDVIGWTREGNASHPNSGLATIMSDGPGGSKWMYVGRQKAGEVWHDMTGNRSGTVTINQDGWGHFFVNGGSVSVWVKR

SEQ ID NO: 44240 - protein, 480 aa, Bacillus sp.
NGTIMQYFEWNVPNDGQHWNRLHNNAQNLKNAGITAIWIPPAWKGTSQNDVGYGAYDLYDLGEFNQKGTVRTKYGTKAELERAIRSLKANGIQVYGDVVMNHKGGADFTERVQAVEVNPQNRNQEVSGTYQIEAWTGFNFPGRGNQHSSFKWRWYHFDGTDWDQSRQLANRIYKFRGDGKAWDWEVDTENGNYDYLMYADVDMDHPEVINELNRWGVWYANTLNLDGFRLDAVKHIKFSFMRDWLGHVRGQTGKNLFAVAEYWKNDLGALENYLSKTNWTMSAFDVPLHYNLYQASNSSGNYDMRNLLNGTLVQRHPSHAVTFVDNHDTQPGEALESFVQGWFKPLAYATILTREQGYPQVFYGDYYGIPSDGVPSYRQQIDPLLKARQQYAYGRQHDYFDHRDVIGWTREGNASHPNSGLATIMSDGPGGSKWMYVGRQKAGEVWHDMTGNRSGTVTINQDGWGHFFVNGGSVSVWVKR

SEQ ID NO: 44241 - protein, 480 aa, Bacillus sp.
NGTIMQYFEWNVPNDGQHWNRMHNNAQNLKNAGITAIWIPPAWKGTSQNDVGYGAYDLYDLGEFNQKGTVRTKYGTKAELERAIRSLKANGIQVYGDVVMNHKGGADFTERVQAVEVNPQNRNQEVSGTYQIEAWTGFNFPGRGNQHSSFKWRWYHFDGTDWDQSRQLANRIYKFRGDGKAWDWEVDTENGNYDYLMYADVDMDHPEVINELNRWGVWYANTLNLDGFRLDAVKHIKFSFMRDWLGHVRGQTGKNLFAVAEYWKNDLGALENYLSKTNWTMSAFDVPLHYNLYQASNSSGNYDMRNLLNGTLVQRHPSHAVTFVDNHDTQPGEALESFVQGWFKPLAYATILTREQGYPQVFYGDYYGIPSDGVPSYRQQIDPLLKARQQYAYGRQHDYFDHWDVIGWTREGNASHPNSGLATIMSDGPGGSKWMYVGRQKAGEVWHDMTGNRSGTVTINQDGWGHFFVNGGSVSVWVKR

SEQ ID NO: 44242 - protein, 480 aa, Bacillus sp.
NGTIMQYFEWNVPNDGQHWNRLHNNAQNLKNAGITAIWIPPAWKGTSQNDVGYGAYDLYDLGEFNQKGTVRTKYGTKAELERAIRSLKANGIQVYGDVVMNHKGGADFTERVQAVEVNPQNRNQEVSGTYQIEAWTGFNFPGRGNQHSSFKWRWYHFDGTDWDQSRQLANRIYKFRGDGKAWDWEVDTENGNYDYLMYADVDMDHPEVINELNDWGVWYANTLNLDGFRLDAVKHIKFSFMRDWLGHVRGQTGKNLFAVAEYWKNDLGALENYLSKTNWTMSAFDVPLHYNLYQASNSSGNYDMRNLLNGTLVQRHPSHAVTFVDNHDTQPGEALESFVQGWFKPLAYATILTREQGYPQVFYGDYYGIPSDGVPSYRQQIDPLLKARQQYAYGRQHDYFDHWDVIGWTREGNASHPNSGLATIMSDGPGGSKWMYVGRQKAGEVWHDMTGNRSGTVTINQDGWGHFFVNGGSVSVWVKR

SEQ ID NO: 44243 - protein, 480 aa, Bacillus sp.
NGTIMQYFEWNVPNDGQHWNRLHNNAQNLKNAGITAIWIPPAWKGTSQNDVGYGAYDLYDLGEFNQKGTVRTKYGTKAELEEAIRSLKANGIQVYGDVVMNHKGGADFTERVQAVEVNPQNRNQEVSGTYQIEAWTGFNFPGRGNQHSSFKWRWYHFDGTDWDQSRQLANRIYKFRGDGKAWDWEVDTENGNYDYLMYADVDMDHPEVINELNRWGVWYANTLNLDGFRLDAVKHIKFSFMRDWLGHVRGQTGKNLFAVAEYWKNDLGALENYLSKTNWTMSAFDVPLHYNLYQASNSSGNYDMRNLLNGTLVQRHPSHAVTFVDNHDTQPGEALESFVQGWFKPLAYATILTREQGYPQVFYGDYYGIPSDGVPSYRQQIDPLLKARQQYAYGRQHDYFDHWDVIGWTREGNASHPNSGLATIMSDGPGGSKWMYVGRQKAGEVWHDMTGNRSGTVTINQDGWGHFFVNGGSVSVWVKR

SEQ ID NO: 44244 - protein, 480 aa, Bacillus sp.
NGTIMQYFEWRVPNDGQHWNRLHNNAQNLKNAGITAIWIPPAWKGTSQNDVGYGAYDLYDLGEFNQKGTVRTKYGTKAELERAIRSLKANGIQVYGDVVMNHKGGADFTERVQAVEVNPQNRNQEVSGTYQIEAWTGFNFPGRGNQHSSFKWRWYHFDGTDWDQSRQLANRIYKFRGDGKAWDWEVDTENGNYDYLMYADVDMDHPEVINELNRWGVWYANTLNLDGFRLDAVKHIKFSFMRDWLGHVRGQTGKNLFAVAEYWKNDLGALENYLSKTNWTMSAFDVPLHYNLYQASNSSGNYDMRNLLNGTLVQRHPSHAVTFVDNHDTQPGEALESFVQGWFKPLAYATILTREQGYPQVFYGDYYGIPSDGVPSYRQQIDPLLKARQQYAYGRQHDYFDHWDVIGWTREGNASHPNSGLATIMSDGPGGSKWMYVGRQKAGEVWHDMTGNRSGTVTINQDGWGHFFVNGGSVSVWVKR

SEQ ID NO: 44245 - protein, 480 aa, Bacillus sp.
NGTIMQYFEWNVPNDGQHWNRLHNNAQNLKNAGITAIWIPPAWKGTSQNDVGYGFYDLYDLGEFNQKGTVRTKYGTKAELERAIRSLKANGIQVYGDVVMNHKGGADFTERVQAVEVNPQNRNQEVSGTYQIEAWTGFNFPGRGNQHSSFKWRWYHFDGTDWDQSRQLANRIYKFRGDGKAWDWEVDTENGNYDYLMYADVDMDHPEVINELNRWGVWYANTLNLDGFRLDAVKHIKFSFMRDWLGHVRGQTGKNLFAVAEYWKNDLGALENYLSKTNWTMSAFDVPLHYNLYQASNSSGNYDMRNLLNGTLVQRHPSHAVTFVDNHDTQPGEALESFVQGWFKPLAYATILTREQGYPQVFYGDYYGIPSDGVPSYRQQIDPLLKARQQYAYGRQHDYFDHWDVIGWTREGNASHPNSGLATIMSDGPGGSKWMYVGRQKAGEVWHDMTGNRSGTVTINQDGWGHFFVNGGSVSVWVKR

SEQ ID NO: 44246 - protein, 480 aa, Bacillus sp.
NGTIMQYFEWNVPNDGQHWNRLHNNAQNLKNAGITAIWIPPAIKGTSQNDVGYGAYDLYDLGEFNQKGTVRTKYGTKAELERAIRSLKANGIQVYGDVVMNHKGGADFTERVQAVEVNPQNRNQEVSGTYQIEAWTGFNFPGRGNQHSSFKWRWYHFDGTDWDQSRQLANRIYKFRGDGKAWDWEVDTENGNYDYLMYADVDMDHPEVINELNRWGVWYANTLNLDGFRLDAVKHIKFSFMRDWLGHVRGQTGKNLFAVAEYWKNDLGALENYLSKTNWTMSAFDVPLHYNLYQASNSSGNYDMRNLLNGTLVQRHPSHAVTFVDNHDTQPGEALESFVQGWFKPLAYATILTREQGYPQVFYGDYYGIPSDGVPSYRQQIDPLLKARQQYAYGRQHDYFDHWDVIGWTREGNASHPNSGLATIMSDGPGGSKWMYVGRQKAGEVWHDMTGNRSGTVTINQDGWGHFFVNGGSVSVWVKR

SEQ ID NO: 44247 - protein, 480 aa, Bacillus sp.
NGTIMQYFEWNVPNDGQHWNRLHNNAQNLKNAGITAIWIPPAWKGTSQNDVGYGAYDLYDLGEFNQKGTVRTKYGTKAELERAIRSLKANGIQVYGDVVMNHKGGADFTERVQAVEVNPQNRNQEVSGTYQIEAWTGFNFPGRGNQHSSFKWRWYHFDGTDWDQSRQLANRIYKFRGDGKAWDWEVDTENGNYDYLMYADVDMDHPEVINELNRWGVWYANTLNLDGFRLDAVKHIKFSFMRDWLGHVRGQTGKNLFAVAEYWKNDLGALENYLSKTEWTMSAFDVPLHYNLYQASNSSGNYDMRNLLNGTLVQRHPSHAVTFVDNHDTQPGEALESFVQGWFKPLAYATILTREQGYPQVFYGDYYGIPSDGVPSYRQQIDPLLKARQQYAYGRQHDYFDHWDVIGWTREGNASHPNSGLATIMSDGPGGSKWMYVGRQKAGEVWHDMTGNRSGTVTINQDGWGHFFVNGGSVSVWVKR

SEQ ID NO: 44248 - protein, 480 aa, Bacillus sp.
NGTIMQYFEWNVPNDGQHWNRLHNNAQNLKNAGITAIWIPPAWKGTSQNDVGYGAYDLYDLGEFNQKGTVRTKYGTKAELERAIRSLKANGIQVYGDVVMNHKGGADFTERVQAVEVNPQNRNQEVSGTYQIEAWTGFNFPGRGNQHSSFKWRWYHFDGTDWDQSRQLANRIYKFRGDGKAWDWEVDTENGNYDYLMYADVDMDHPEVINELNRWGVWYANTLNLDGFRLDAVKHIKFSFMRDWLGHVRGQTGKNLFAVAEYWKNDLGALENYLSKTNWTMSAFDVPLHYNLYQASNSSGNYDMRNLLNGTLVQRHPSHAVTFVDNHDTQPGEALESFVQGWFKPLAYATILTREQGYPQVFYGDYYGIPSDGVPSYRQQIDPLLKARQQYAYGRQHDYFDHCDVIGWTREGNASHPNSGLATIMSDGPGGSKWMYVGRQKAGEVWHDMTGNRSGTVTINQDGWGHFFVNGGSVSVWVKR

SEQ ID NO: 44249 - protein, 480 aa, Bacillus sp.
NGTIMQYFEWNVPNDGQHWNRLHNNAQNLKNAGITAIWIPPAWKGTSQNDVGYGAYDLYDLGEFNQKGTVRTKYGTKAELERAIRSLKANGIQVYGDVVMNHKGGADFTERVQAVEVNPQNRNQEVSGTYQIEAWTGFNFPGRGNQHSSFKWRWYHFDGTDWDQSRQLANRIYKFRGDGKAWDWEVDTENGNYDYLMYADVDMDHPEVINELNRWGVWYANTLNLDGFRLDAVKHIKFSFMRDWLGHVRGQTGKNLFAVAEYWKNDLGALENYLSKTNGTMSAFDVPLHYNLYQASNSSRNYDMRNLLNGTLVQRHPSHAVTFVDNHDTQPGEALESFVQGWFKPLAYATILTREQGYPQVFYGDYYGIPSDGVPSYRQQIDPLLKARQQYAYGRQHDYFDHWDVIGWTREGNASHPNSGLATIMSDGPGGSKWMYVGRQKAGEVWHDMTGNRSGTVTINQDGWGHFFVNGGSVSVWVKR

SEQ ID NO: 44250 - protein, 480 aa, Bacillus sp.
NGTIMQYFEWNVPNDGQHWNRLHNNAQNLKNAGITAIWIPPAWKGTSQNDVGYGAYDLYDLGEFNQKGTVRTKYGTKAELERAIRSLKANGIQVYGDVVMNHKGGADFTERVQAVEVNPQNRNQEVSGTYQIEAWTGFNFPGRGNQHSSFKWRWYHFDGTDWDQSRQLANRIYKFRGDGKAWDWEVDTENGNYDYLMYADVDMDHPEVINELNRWGVWYANTLNLDGFRLDAVKHIKFSFMRDWLGHVRGQTGKPLFAVAEYWKNDLGALENYLSKTNWTMSAFDVPLHYNLYQASNSSGNYDMRNLLNGTLVQRHPSHAVTFVDNHDTQPGEALESFVQGWFKPLAYATILTREQGYPQVFYGDYYGIPSDGVPSYRQQIDPLLKARQQYAYGRQHDYFDHWDVIGWTREGNASHPNSGLATIMSDGPGGSKKMYVGRQKAGEVWHDMTGNRSGTVTINQDGWGHFFVNGGSVSVWVKR

SEQ ID NO: 44251 - protein, 480 aa, Bacillus sp.
NGTIMQYFEWNVPNDGQHWNRLHNNAQNLKNAGITAIWIPPAWKGTSQNDVGYGAYDLYDLGEFNQKGTVRTKYGTKAELERAIRSLKANGIQVYGDVVMNHKGGADFTERVQAVEVNPQNRNQEVSGTYQIEAWTGFNFPGRGNQHSSFKWRWYHFDGTDWDQSRQLANRIYKFRGDGKAWDWEVDTENGNYDYLMYADVDMDHPEVINELNRWGVWYANTLNLDGFRLDAVKHIKFSFMRDWLGHVRGQTGKNLFAVAEYWKNDLGALENYLSKTNWTMSAFDVPLHYNLYQASNSSGNYDMRNLLNGTLVQRGPSHAVTFVDNHDTQPGEALESFVQGWFKPLAYATILTREQGYPQVFYGDYYGIPSDGVPSYRQQIDPLLKARQQYAYGRQHDYFDHWDVIGWTREGNASHPNSGLATIMSDGPGGSKWMYVGRQKAGEVWHDMTGNRSGTVTINQDGWGHFFVNGGSVSVWVKR

SEQ ID NO: 44252 - protein, 480 aa, Bacillus sp.
NGTIMQYFEWNVPNDGQHWNRLHNNAQNLKNAGITAIWIPPAWKGTSQNDVGYGAYDLYDLGEFNQKGTVRTKYGTKAELERAIRSLKANGIQVYGDVVMNHKGGADFTERVEAVEVNPQNRNQEVSGTYQIEAWTGFNFPGRGNQHSSFKWRWYHFDGTDWDQSRQLANRIYKFRGDGKAWDWEVDTENGNYDYLMYADVDMDHPEVINELNRWGVWYANTLNLDGFRLDAVKHIKFSFMRDWLGHVRGQTGKNLFAVAEYWKNDLGALENYLSKTNWTMSAFDVPLHYNLYQASNSSGNYDMRNLLNGTLVQRHPSHAVTFVDNHDTQPGEALESFVQGWFKPLAYATILTREQGYPQVFYGDYYGIPSDGVPSYRQQIDPLLKARQQYAYGRQHDYFDHWDVIGWTREGNASHPNSGLATIMSDGPGGSKWMYVGRQKAGEVWHDMTGNRSGTVTINQDGWGHFFVNGGSVSVWVKR

SEQ ID NO: 44253 - protein, 480 aa, Bacillus sp.
NGTIMQYFEWNVPNDGQHWNRLHNNAQNLKNAGITAIWIPPAWKGTSQNDVGYGAYDLYDLGEFNQKGTVRTKYGTKAELERAIRSLKANGIQVYGDVVMNHKGGADFTERVQAVEVNPQNRNQEVSGTYQIEAWTGFNFPGRGNQHSSFKWRWYHFDGTDWDQSRQLANRIYKFRGDGKAWDWEVDTENGNYDYLMYADVDMDHPEVINELNRWGVWYANTLNLDGFRLDAVKHIKFSFMRDWLGHVRGQTGKNLFAVAEYWKNDLGALENYLSKTNWTMSAFDVPLHYNLYQASNSSGNYDMRNLLNGTLVQRHPSHAVTFVDNHDTQPGEALESFVQGWFKPLAYATILTREQGYPQVFYGDYYGIPSDGVPSYRAQIDPLLKARQQYAYGRQHDYFDHWDVIGWTREGNASHPNSGLATIMSDGPGGSKWMYVGRQKAGEVWHDMTGNRSGTVTINQDGWGHFFVNGGSVSVWVKR

SEQ ID NO: 44254 - protein, 480 aa, Bacillus sp.
NGTIMQYFEWNVPNDGQHWNRLHNNAQNLKNAGITAIWIPPAWKGTSQNDVGYGAYDLYDLGEFNQKGTVRTKYGTKAELERAIRSLKANGIQVYGDVVMNHKGGADFTERVQAVEVNPQNRNQEVSGTYQIEAWTGFNFPGRGNQHSSFKWRWYHFDGTDWDQSRQLANRIYKFRGDGKAWDWEVDTENGNYDYLMYADVDMDHPEVINELNRWGVWYANTLNLDGFRLDAVKHIKFSFMRDWLGHVRGQTGKNLFAVAEYWKNDLGALENYLSKTNWTMSAFDVPLHYNHYQASNSSGNYDMRNLLNGTLVQRHPSHAVTFVDNHDTQPGEALESFVQGWFKPLAYATILTREQGYPQVFYGDYYGIPSDGVPSYRQQIDPLLKARQQYAYGRQHDYFDHWDVIGWTREGNASHPNSGLATIMSDGPGGSKWMYVGRQKAGEVWHDMTGNRSGTVTINQDGWGHFFVNGGSVSVWVKR

SEQ ID NO: 44255 - protein, 480 aa, Bacillus sp.
NGTIMQYFEWNVPNDGQHWNRLHNNAQNLKNAGITAIWIPPAWKGTSQNDVGYGAYDLYDLGEFNQKGTVRTKYGTKAELERAIRSLKANGIQVYGDVVMNHKGGADFTERVQAVEVNPQNRNQEVSGTYQIEAWTGFNFPGRGNQHSSFKWRWYHFDGTDWDQSRQLANRIYKFRGDGKAWDWEVDTENGNYDYLMYADVDMDHPEVINELNMWGVWYANTLNLDGFRLDAVKHIKFSFMRDWLGHVRGQTGKNLFAVAEYWKNDLGALENYLSKTNWTMSAFDVPLHYNLYQASNSSGNYDMRNLLNGTLVQRHPSHAVTFVDNHDTQPGEALESFVQGWFKPLAYATILTREQGYPQVFYGDYYGIPSDGVPSYRQQIDPLLKARQQYAYGRQHDYFDHWDVIGWTREGNASHPNSGLATIMSDGPGGSKWMYVGRQKAGEVWHDMTGNRSGTVTINQDGWGHFFVNGGSVSVWVKR

SEQ ID NO: 44256 - protein, 480 aa, Bacillus sp.
NGTIMQYFEWNVPNDGQHWNRLHNNAQNLKNAGITAIWIPPAWKGTSQNDVGYGAYDLYDLGEFNQKGTVRTKYGTKAELERAIRSLKANGIQVYGDVVMNHKGGADFTERVQAVEVNPQNRNQEVSGTYQIEAWTGFNFPGRGNQHSSFKWRWYHFDGTDWDQSRQLANRIYKFRGDGKAWDWEVDTENGNYDYLMYADVDMDHPEVINELNRWGVWYANTLNLDGFRLDAVKHIKFSFMRDWLGHVRGQTGKNLFAVAEYWKNDLGALENYLSKTNWTMSAFDVPLHYNLYQASNSSGNYDMRNLLNGTLVQRHPSHAVTFVDNHDTQPGEALESFVQGWFKPLAYATILTREQGYPQVFYGDYYGIPSDGVPSYRQQIDPLLKARQQYAYGRQHDYFDHWDVIGWTREGNASHPNSGLATIMSDGPGGSKWMYVGPQKAGEVWHDMTGNRSGTVTINQDGWGHFFVNGGSVSVWVKR

SEQ ID NO: 44257 - protein, 480 aa, Bacillus sp.
NGTIMQYFEWNVPNDGQHWNRLHNNAQNLKRAGITAIWIPPAWKGTSQNDVGYGAYDLYDLGEFNQKGTVRTKYGTKAELERAIRSLKANGIQVYGDVVMNHKGGADFTERVQAVEVNPQNRNQEVSGTYQIEAWTGFNFPGRGNQHSSFKWRWYHFDGTDWDQSRQLANRIYKFRGDGKAWDWEVDTENGNYDYLMYADVDMDHPEVINELNRWGVWYANTLNLDGFRLDAVKHIKFSFMRDWLGHVRGQTGKNLFAVAEYWKNDLGALENYLSKTNWTMSAFDVPLHYNLYQASNSSGNYDMRNLLNGTLVQRHPSHAVTFVDNHDTQPGEALESFVQGWFKPLAYATILTREQGYPQVFYGDYYGIPSDGVPSYRQQIDPLLKARQQYAYGRQHDYFDHWDVIGWTREGNASHPNSGLATIMSDGPGGSKWMYVGRQKAGEVWHDMTGNRSGTVTINQDGWGHFFVNGGSVSVWVKR

SEQ ID NO: 44258 - protein, 480 aa, Bacillus sp.
NGTIMQYFEWNVPNDGQHWNRLHNNAQNLKNAGITAIWIPPAWKGTSQNDVGYGAYDLYDLGEFNQKGTVRTKYGTKAELERAIRSLKANGIQVYGDVVMNHKGGADFTERVQAVEVNPQNRNQEVSGTYQIEAWTGFNFPGRGNQHSSFKWRWYHFDGTDWDQSRQLANRIYKFRGDGKAWDWEVDTENGNYDYLMYADVDMDHPEVINELNRWGVWYANTLNLDGFRLDAVKHIKFSFMRDWLGHVRGQTGKNLFAVAEYWKNDLGALENYLSKTNWTMSAFDVPLHYNLYQASNSSGNYDMRNLLNGTLVQRHPSHAVTFVDNHDTQPGEALESFVQGWFKPLAYATILTREQGYPQVFYGDYYGIPSDGVPSYRQQIDPLLKARQQYAYGRQHDYFDHWDVIGWTREGNASHPNSGLATIMSDGPGGSKWMYVGRQKAGEVWHDMTGNRSGTVTINEDGWGHFFVNGGSVSVWVKR

SEQ ID NO: 44259 - protein, 480 aa, Bacillus sp.
NGTIMQYFEWNVPNDGQHWNRLHNNAQNLKNAGITAIWIPPAWKGTSQNDVGYGAYDLYDLGEFNQKGTVRTKYGTKAELERAIRSLKANGIQVYGDVVMNHKGGADFTERVQAVEVNPQNRNQEVSGTYQIEAWTGFNFPGRGNQHSSFKWRWYHFDGTDWDQSRQLANRIYKFRGDGKAWDWEVDTENGNYDYLMYADVDMDHPEVINELNRWGVWYANTLNLDGFRLDAVKHIKFSFMRDWLGHVRGQTGKNLFAVAEYWKNDLGALENYLSKTNWTMSAFDVPLHYNLYQASNSSGNYDMRNLLNGTLEQRHPSHAVTFVDNHDTQPGEALESFVQGWFKPLAYATILTREQGYPQVFYGDYYGIPSDGVPSYRQQIDPLLKARQQYAYGRQHDYFDHWDVIGWTREGNASHPNSGLATIMSDGPGGSKWMYVGRQKAGEVWHDMTGNRSGTVTINQDGWGHFFVNGGSVSVWVKR

SEQ ID NO: 44260 - protein, 480 aa, Bacillus sp.
NGTIMQYFEWNVPNDGQHWNRLHNNAQNLKNAGITAIWIPPAWKGTSQNDVGYGAYDLYDLGEFNQKGTVRTKYGTKAELERAIRSLKANGIQVYGDVVMNHKGGADFTERVQAVEVNPQNRNQEVSGTYQIEAWTGFNFPGRGNQHSSFKWRWYHFDGTDWDQSRQLANRIYKFRGDGKAWDWEVDTENGNYDYLMYADVDMDHPEVINELNRWGVWYANTLNLDGFRLDAVKHIKFSFMMDWLGHVRGQTGKNLFAVAEYWKNDLGALENYLSKTNWTMSAFDVPLHYNLYQASNSSGNYDMRNLLNGTLVQRHPSHAVTFVDNHDTQPGEALESFVQGWFKPLAYATILTREQGYPQVFYGDYYGIPSDGVPSYRQQIDPLLKARQQYAYGRQHDYFDHWDVIGWTREGNASHPNSGLATIMSDGPGGSKWMYVGRQKAGEVWHDMTGNRSGTVTINQDGWGHFFVNGGSVSVWVKR

SEQ ID NO: 44261 - protein, 480 aa, Bacillus sp.
NGTIMQYFEWNVPNDGQHWNRLHNNAQNLKNAGITAIWIPPAWKGTSQNDVGYGAYDLYDLGEFNQKGTVRTKYGTKAELERAIRSLKANGIQVYGDVVMNHKGGADLTERVQAVEVNPQNRNQEVSGTYQIEAWTGFNFPGRGNQHSSFKWRWYHFDGTDWDQSRQLANRIYKFRGDGKAWDWEVDTENGNYDYLMYADVDMDHPEVINELNRWGVWYANTLNLDGFRLDAVKHIKFSFMRDWLGHVRGQTGKNLFAVAEYWKNDLGALENYLSKTNWTMSAFDVPLHYNLYQASNSSGNYDMRNLLNGTLVQRHPSHAVTFVDNHDTQPGEALESFVQGWFKPLAYATILTREQGYPQVFYGDYYGIPSDGVPSYRQQIDPLLKARQQYAYGRQHDYFDHWDVIGWTREGNASHPNSGLATIMSDGPGGSKWMYVGRQKAGEVWHDMTGNRSGTVTINQDGWGHFFVNGGSVSVWVKR

SEQ ID NO: 44262 - protein, 480 aa, Bacillus sp.
NGTIMQYFEWNVPNDGQHWNRLHNNAQNLKNAGITAIWIPPAWKGTSQNDVGYGAYDLYDLGEFNQKGTVRTKYGTKAELERAIRSLKANGIQVYGDVVMNHKGGADFTERVQAVEVNPQNRNQEVSGTYQIEAWTGFNFPGRGNQHSSFKWRWYHFDGTDWDQSRQLANRIYKFRGDGKAWDWEVDTENGNYDYLMYADVDMDHPEVINELNRWGVWYANTANLDGFRLDAVKHIKFSFMRDWLGHVRGQTGKNLFAVAEYWKNDLGALENYLSKTNWTMSAFDVPLHYNLYQASNSSGNYDMRNLLNGTLVQRHPSHAVTFVDNHDTQPGEALESFVQGWFKPLAYATILTREQGYPQVFYGDYYGIPSDGVPSYRQQIDPLLKARQQYAYGRQHDYFDHWDVIGWTREGNASHPNSGLATIMSDGPGGSKWMYVGRQKAGEVWHDMTGNRSGTVTINQDGWGHFFVNGGSVSVWVKR

SEQ ID NO: 44263 - protein, 480 aa, Bacillus sp.
NGTIMQYFEWNVPNDGQHWNRLHNNAQNLKNAGITAIWIPPAWKGTSQNDVGYGAYDLYDLGEFNQKGTVRTKYGTKAELERAIRSLKANGIQVYGDVVMNHKGGADFTERVQAVEVNPQNRNQEVSGTYQIEAWTRFNFPGRGNQHSSFKWRWYHFDGTDWDQSRQLANRIYKFRGDGKAWDWEVDTENGNYDYLMYADVDMDHPEVINELNRWGVWYANTLNLDGFRLDAVKHIKFSFMRDWLGHVRGQTGKNLFAVAEYWKNDLGALENYLSKTNWTMSAFDVPLHYNLYQASNSSGNYDMRNLLNGTLVQRHPSHAVTFVDNHDTQPGEALESFVQGWFKPLAYATILTREQGYPQVFYGDYYGIPSDGVPSYRQQIDPLLKARQQYAYGRQHDYFDHWDVIGWTREGNASHPNSGLATIMSDGPGGSKWMYVGRQKAGEVWHDMTGNRSGTVTINQDGWGHFFVNGGSVSVWVKR

SEQ ID NO: 44264 - protein, 480 aa, Bacillus sp.
NGTIMQYFEWNVPNDGCHWNRLHNNAQNLKNAGITAIWIPPAWKGTSQNDVGYGAYDLYDLGEFNQKGTVRTKYGTKAELERAIRSLKANGIQVYGDVVMNHKGGADFTERVQAVEVNPQNRNQEVSGTYQIEAWTGFNFPGRGNQHSSFKWRWYHFDGTDWDQSRQLANRIYKFRGDGKAWDWEVDTENGNYDYLMYADVDMDHPEVINELNRWGVWYANTLNLDGFRLDAVKHIKFSFMRDWLGHVRGQTGKNLFAVAEYWKNDLGALENYLSKTNWTMSAFDVPLHYNLYQASNSSGNYDMRNLLNGTLVQRHPSHAVTFVDNHDTQPGEALESFVQGWFKPLAYATILTREQGYPQVFYGDYYGIPSDGVPSYRQQIDPLLKARQQYAYGRQHDYFDHWDVIGWTREGNASHPNSGLATIMSDGPGGSKWMYVGRQKAGEVWHDMTGNRSGTVTINQDGWGHFFVNGGSVSVWVKR

SEQ ID NO: 44265 - protein, 480 aa, Bacillus sp.
NGTIMQYFEWNVPNDGQHWNRLHNNAQNLKNAGITAIWIPPAWKGTSQNDVGYGAYDLYDLGEFNQKGTVRTKYGTKAELERAIRSLKANGIQVYGDVVMNHKGGADFTERVQAVEVNPQNRNQEVSGTYQIEAWTGFNFPGRGNQHSSFKWRWYHFDGTDWDQSRQLANRIYKFRGDGKAWDWEVDTENGNYDYLMYADVDMDHPEVINELNRWGVWYANTLNLDGFRLDAVKHIKFSFMRDWLGHVRGQTGKNLFAVAEYWKNDLGALENYLSKTNWTMSVFDVPLHYNLYQASNSSGNYDMRNLLNGTLVQRHPSHAVTFVDNHDTQPGEALESFVQGWFKPLAYATILTREQGYPQVFYGDYYGIPSDGVPSYRQQIDPLLKARQQYAYGRQHDYFDHWDVIGWTREGNASHPNSGLATIMSDGPGGSKWMYVGRQKAGEVWHDMTGNRSGTVTINQDGWGHFFVNGGSVSVWVKR

SEQ ID NO: 44266 - protein, 480 aa, Bacillus sp.
NGTIMQYFEWNVPNDGQHWNRLHNNAQNLKNAGITAIWIPPAWKGTSQNDVGYGAYDLYDLGEFNQKGTVRTKYGTKAELERAIRSLKANGIQVYGDVVMNHKGGADFTERVQAVEVNPQNRNQEVSGTYQIYAWTGFNFPGRGNQHSSFKWRWYHFDGTDWDQSRQLANRIYKFRGDGKAWDWEVDTENGNYDYLMYADVDMDHPEVINELNRWGVWYANTLNLDGFRLDAVKHIKFSFMRDWLGHVRGQTGKNLFAVAEYWKNDLGALENYLSKTNWTMSAFDVPLHYNLYQASNSSGNYDMRNLLNGTLVQRHPSHAVTFVDNHDTQPGEALESFVQGWFKPLAYATILTREQGYPQVFYGDYYGIPSDGVPSYRQQIDPLLKARQQYAYGRQHDYFDHWDVIGWTREGNASHPNSGLATIMSDGPGGSKWMYVGRQKAGEVWHDMTGNRSGTVTINQDGWGHFFVNGGSVSVWVKR

SEQ ID NO: 44267 - protein, 480 aa, Bacillus sp.
NGTIMQYFEWNVPNDGQHWNRLHNNAQNLKNAGITAIWIPPAWKGTSQNDVGYGAYDLYDLGEFNQKGTVRTKYGTKAELERAIRSLKANGIQVYGDVVMNHKGGADFTERVQAVEVNPQNRNQEVSGTYQIEAWTGFNFPGRGNQHSSFKWRWYHFDGTDWDQSRQLANRIYKFRGDGKAWDWEVDTENGNYDYLMYADVDMDHPEVINELNEWGVWYANTLNLDGFRLDAVKHIKFSFMRDWLGHVRGQTGKNLFAVAEYWKNDLGALENYLSKTNWTMSAFDVPLHYNLYQASNSSGNYDMRNLLNGTLVQRHPSHAVTFVDNHDTQPGEALESFVQGWFKPLAYATILTREQGYPQVFYGDYYGIPSDGVPSYRQQIDPLLKARQQYAYGRQHDYFDHWDVIGWTREGNASHPNSGLATIMSDGPGGSKWMYVGRQKAGEVWHDMTGNRSGTVTINQDGWGHFFVNGGSVSVWVKR

SEQ ID NO: 44268 - protein, 480 aa, Bacillus sp.
NGTIMQYFEWNVPNDGQHWNRLHNNAQNLKNAGITAIWIPPAWKGTSQNDVGYGAYDLYDLGEFNQKGTVRTKYGTKAELERAIRSLKANGIQVYGDVVMNHKGGADFTERVQAVEVNPQNRNQEVSGTYQILAWTGFNFPGRGNQHSSFKWRWYHFDGTDWDQSRQLANRIYKFRGDGKAWDWEVDTENGNYDYLMYADVDMDHPEVINELNRWGVWYANTLNLDGFRLDAVKHIKFSFMRDWLGHVRGQTGKNLFAVAEYWKNDLGALENYLSKTNWTMSAFDVPLHYNLYQASNSSGNYDMRNLLNGTLVQRHPSHAVTFVDNHDTQPGEALESFVQGWFKPLAYATILTREQGYPQVFYGDYYGIPSDGVPSYRQQIDPLLKARQQYAYGRQHDYFDHWDVIGWTREGNASHPNSGLATIMSDGPGGSKWMYVGRQKAGEVWHDMTGNRSGTVTINQDGWGHFFVNGGSVSVWVKR

SEQ ID NO: 44269 - protein, 480 aa, Bacillus sp.
NGTIMQYFEWNVPNDGQHWNALHNNAQNLKNAGITAIWIPPAWKGTSQNDVGYGAYDLYDLGEFNQKGTVRTKYGTKAELERAIRSLKANGIQVYGDVVMNHKGGADFTERVQAVEVNPQNRNQEVSGTYQIEAWTGFNFPGRGNQHSSFKWRWYHFDGTDWDQSRQLANRIYKFRGDGKAWDWEVDTENGNYDYLMYADVDMDHPEVINELNRWGVWYANTLNLDGFRLDAVKHIKFSFMRDWLGHVRGQTGKNLFAVAEYWKNDLGALENYLSKTNWTMSAFDVPLHYNLYQASNSSGNYDMRNLLNGTLVQRHPSHAVTFVDNHDTQPGEALESFVQGWFKPLAYATILTREQGYPQVFYGDYYGIPSDGVPSYRQQIDPLLKARQQYAYGRQHDYFDHWDVIGWTREGNASHPNSGLATIMSDGPGGSKWMYVGRQKAGEVWHDMTGNRSGTVTINQDGWGHFFVNGGSVSVWVKR

SEQ ID NO: 44270 - protein, 480 aa, Bacillus sp.
NGTIMQYFEWNVPNDGQHWNRLHNNAQNLKNAGITAIWIPPAWKGTSQNDVGYGAYDLYDLGEFNQKGTVRTKYGTKAELERAIRSLKANGIQVYGDVVMNHKGGADFTERVQAVEVNPQNRNQEVSGTYQIEAWTGFNFPGRGNQHSSFKWRWYHFDGTDWDQSRQLANRIYKFRGDGKAWDWEVDTENGNYDYLMYADVDMDHPEVINELNRWGVWYANTLNLDGFRLDAVKHIKFSFMRDWLGHVRGQTGKNLFAVAEYWKNDLGALENYLSKTNWTMSAFDVPLHYNLYQASNSSGNYDMRNLLNGTLVQRHPSHAVTFVDNHDTQPGEALESFVQGWFKPLAYATILTREQGYPQVFYGDYYGIPSDGVPSERQQIDPLLKARQQYAYGRQHDYFDHWDVIGWTREGNASHPNSGLATIMSDGPGGSKWMYVGRQKAGEVWHDMTGNRSGTVTINQDGWGHFFVNGGSVSVWVKR

SEQ ID NO: 44271 - protein, 480 aa, Bacillus sp.
NGTIMQYFEWNVPNDGQHWNRLHNNAQNLKNAGITAIWIPPAWKGTSQNDVGYGAYDLYDLGEFNQKGTVRTKYGTKAELERAIRSLKANGIQVYGDVVMNHKGGADFTERVQAVEVNPQNRNQEVSGTYQIEAWTGFNFPGRGNQHSSFKWRWYHFDGTDWDQSRQLANRIYKFRGDGKAWDWEVDTENGNYDYLMYADVDMDHPEVINELNRWGVWYANTLNLDGFRLDAVKHIKFSFMRDWLGHVRGQTGKNLFAVAEYWKNDLGALENYLSKTNWTMSAFDVPLHYNLYQASNSSGNYDMRNLLNGTLVQRHPSHAVTFVDNHDTQPGEALESFVQGWFKPLAYATILTREQGYPQVFYGDYYGIPSDGVPSYRQQIDPLLKARQQYAYGRQHDYVDHWDVIGWTREGNASHPNSGLATIMSDGPGGSKWMYVGRQKAGEVWHDMTGNRSGTVTINQDGWGHFFVNGGSVSVWVKR

SEQ ID NO: 44272 - protein, 480 aa, Bacillus sp.
NGTIMQYFEWNVPNDGQHWNRLHNNAQNLKNAGITAIWIPPAWKGTSQNDVGYGAYDLYDLGEFNQKGTVRTKYGTKAELERAIRSLKANGIQVYGDVVMNHKGGADFTERVQAVEVNPQNRNQEVSGTYQIEAWTGFNFPGRGNQHSSFKWRWYHFDGTDWDQSRQLKNRIYKFRGDGKAWDWEVDTENGNYDYLMYADVDMDHPEVINELNRWGVWYANTLNLDGFRLDAVKHIKFSFMRDWLGHVRGQTGKNLFAVAEYWKNDLGALENYLSKTNWTMSAFDVPLHYNLYQASNSSGNYDMRNLLNGTLVQRHPSHAVTFVDNHDTQPGEALESFVQGWFKPLAYATILTREQGYPQVFYGDYYGIPSDGVPSYRQQIDPLLKARQQYAYGRQHDYFDHWDVIGWTREGNASHPNSGLATIMSDGPGGSKWMYVGRQKAGEVWHDMTGNRSGTVTINQDGWGHFFVNGGSVSVWVKR

SEQ ID NO: 44273 - protein, 480 aa, Bacillus sp.
NGTIMQYFEWNVPNDGQHWNRLHNNAQNLKNAGITAIWIPPAWKGTSQNDVGYGAYDLYDLGEFNQKGTVRTKYGTKAELERAIRSLKANGIQVYGDVVMNHKGGADFTERVQAVEVNPQNRNQEVSGTYQIEAWTGFNFPGRGNQHSSFKWRWYHFDGTDWDQSRQLANRIYKFRGDGKAWDWEVDTENGNYDYLMYADVDMDHPEVINELNRWGVWYANTLNLDGFRLDAVKHIKFSFMRDWLGHVRGQTGKNLFAVAEYWKNDLGALENYLSKTNSTMSAFDVPLHYNLYQASNSSGNYDMRNLLNGTLVQRHPSHAVTFVDNHDTQPGEALESFVQGWFKPLAYATILTREQGYPQVFYGDYYGIPSDGVPSYRQQIDPLLKARQQYAYGRQHDYFDHWDVIGWTREGNASHPNSGLATIMSDGPGGSKWMYVGRQKAGEVWHDMTGNRSGTVTINQDGWGHFFVNGGSVSVWVKR

SEQ ID NO: 44274 - protein, 480 aa, Bacillus sp.
NGTIMQYFEWNVPNDGQHWNRLHNNAQNLKNAGITAIWIPPAWKGTSQNDVGYGAYDLYDLGEFNQKGTVRTKYGTKAELERAIRSLKANGIQVYGDVVMNHKGGADFTERVQAVEVNPQNRNQEVSGTYQIEAWTGFNFPGRGNQHSSFKWRWYHFDGTDWDQSRQLANRIYKFRGDGKAWDWEVDTENGNYDYLMYADVDMDHPEVINELNRWGVWYANTLNLDGFRLDAVKHIKFSFMRDWLGHVRGQTGKNLFAVAEYWKNDLGALENYLSKTNWTMSAFDVPLHYNLYQASSSSGNYDMRNLLNGTLVQRHPSHAVTFVDNHDTQPGEALESFVQGWFKPLAYATILTREQGYPQVFYGDYYGIPSDGVPSYRQQIDPLLKARQQYAYGRQHDYFDHWDVIGWTREGNASHPNSGLATIMSDGPGGSKWMYVGRQKAGEVWHDMTGNRSGTVTINQDGWGHFFVNGGSVSVWVKR

SEQ ID NO: 44275 - protein, 480 aa, Bacillus sp.
NGTIMQYFEWNVPNDGNHWNRLHNNAQNLKNAGITAIWIPPAWKGTSQNDVGYGAYDLYDLGEFNQKGTVRTKYGTKAELERAIRSLKANGIQVYGDVVMNHKGGADFTERVQAVEVNPQNRNQEVSGTYQIEAWTGFNFPGRGNQHSSFKWRWYHFDGTDWDQSRQLANRIYKFRGDGKAWDWEVDTENGNYDYLMYADVDMDHPEVINELNRWGVWYANTLNLDGFRLDAVKHIKFSFMRDWLGHVRGQTGKNLFAVAEYWKNDLGALENYLSKTNWTMSAFDVPLHYNLYQASNSSGNYDMRNLLNGTLVQRHPSHAVTFVDNHDTQPGEALESFVQGWFKPLAYATILTREQGYPQVFYGDYYGIPSDGVPSYRQQIDPLLKARQQYAYGRQHDYFDHWDVIGWTREGNASHPNSGLATIMSDGPGGSKWMYVGRQKAGEVWHDMTGNRSGTVTINQDGWGHFFVNGGSVSVWVKR

SEQ ID NO: 44276 - protein, 480 aa, Bacillus sp.
NGTIMQYFEWNVPNDGQHWNRLHNNAQNLKNAGITAIWIPPAWKGTSQNDVGYGAYDLYDLGEFNQKGTVRTKYGTKAELERAIRSLKANGIQVYGDVVMNHKGGADFTERVQAVEVNPQNRNQEVSGTYQIEAWTGFNFPGRGNQHSSFKWRWYHFDGTDWDQSRQLANRIYKFRGDGKAWDWEVDTENGNYDYLMYADVDMDHPEVINELNRWGVWYANTLNADGFRLDAVKHIKFSFMRDWLGHVRGQTGKNLFAVAEYWKNDLGALENYLSKTNWTMSAFDVPLHYNLYQASNSSGNYDMRNLLNGTLVQRHPSHAVTFVDNHDTQPGEALESFVQGWFKPLAYATILTREQGYPQVFYGDYYGIPSDGVPSYRQQIDPLLKARQQYAYGRQHDYFDHWDVIGWTREGNASHPNSGLATIMSDGPGGSKWMYVGRQKAGEVWHDMTGNRSGTVTINQDGWGHFFVNGGSVSVWVKR

SEQ ID NO: 44277 - protein, 480 aa, Bacillus sp.
NGTIMQYFEWNVPNDGQHWNRLHNNAQNLKNAGITAIWIPPAWKGTSQNDVGYGAYDLYDLGEFNQKGTVRTKYGTKAELERAIRSLKANGIQVYGDVVMNHKGGADFTERVQAVEVNPQNRNQEVSGTYQIEAWTGFNFPGRGNQHSSFKWRWYHFDGTDWDQSRQLANRIYKFRGDGKAWDWEVDTENGNYDYLMYADVDMDHPEVINELNRWGVWYANTLNLDGFRLDAVKHIKFSFMRDWLGHVRGQTGKNLFAVAEYWKNDLGALENYLSKTNGTMSAFDVPLHYNLYQASNSSGNYDMRNLLNGTLVQRHPSHAVTFVDNHDTQPGEALESFVQGWFKPLAYATILTREQGYPQVFYGDYYGIPSDGVPSYRQQIDPLLKARQQYAYGRQHDYFDHWDVIGWTREGNASHPNSGLATIMSDGPGGSKWMYVGRQKAGEVWHDMTGNRSGTVTINQDGWGHFFVNKGSVSVWVKR

SEQ ID NO: 44278 - protein, 480 aa, Bacillus sp.
NGTIMQYFEWNVPNDGQHWNRLHNNAQNLKNAGITAIWIPPAWKGTSQNDVGYGAYDLYDLGEFNQKGTVRTKYGTKAELERAIRSLKANGIQVYGDVVMNHKGGADFTERVQAVEVNPQNRNQEVSGTYQIEAWTGFNFPGRGNQHSSFKWRWYHFDGTDWDQSRQLANRIYKFRGDGKAWDWEVDTENGNYDYLMYADVDMDHPEVINELNRWGVWYANTLNLDGFRLDAVKHIKFSFMRDWLGHVRGQTGKNLFAVAEYWXNDLGALENYLSKTNWTMSAFDVPLHYNLYQASNSSGNYDMRNLLNGTLVQRHPSHAVTFVDNHDTQPGEALESFVQGWFKPLAYATILTREQGYPQVFYGDYYGIPSDGVPSYRQQIDPLLKARQQYAYGRQHDYFDHWDVIGWTREGNASHPNSGLATIMSDGPGGSKWMYVGRQKAGEVWHDMTGNRSGTVTINQDGWGHFFVNGGSVSVWVKR

SEQ ID NO: 44279 - protein, 480 aa, Bacillus sp.
NGTIMQYFEWNVPNDGQHWNRLHNNAQNLKNAGITAIWIPPAWKGTSQNDVGYGAYDLYDLGEFNQKGTVRTKYGTKAELERAIRSLKANGIQVYGDVVMNHKGGADFTERVQAVEVNPQNRNQEVSGTYQIEAWTGFNFPGRGNQHSSFKWRWYHFDGTDWDQSRRLANRIYKFRGDGKAWDWEVDTENGNYDYLMYADVDMDHPEVINELNRWGVWYANTLNLDGFRLDAVKHIKFSFMRDWLGHVRGQTGKNLFAVAEYWKNDLGALENYLSKTNWTMSAFDVPLHYNLYQASNSSGNYDMRNLLNGTLVQRHPSHAVTFVDNHDTQPGEALESFVQGWFKPLAYATILTREQGYPQVFYGDYYGIPSDGVPSYRQQIDPLLKARQQYAYGRQHDYFDHWDVIGWTREGNASHPNSGLATIMSDGPGGSKWMYVGRQKAGEVWHDMTGNRSGTVTINQDGWGHFFVNGGSVSVWVKR

SEQ ID NO: 44280 - protein, 480 aa, Bacillus sp.
NGTIMQYFEWNVPNDGQHWNRLHNNAQNLKNAGITAIWIPPAWKGTSQNDVGYGAYDLYDLGEFNQKGTVRTKYGTKAELERAIRSLKANGIQVYGDVVMNHKGGADFTERVQAVEVNPQGRNQEVSGTYQIEAWTGFNFPGRGNQHSSFKWRWYHFDGTDWDQSRQLANRIYKFRGDGKAWDWEVDTENGNYDYLMYADVDMDHPEVINELNRWGVWYANTLNLDGFRLDAVKHIKFSFMRDWLGHVRGQTGKNLFAVAEYWKNDLGALENYLSKTNWTMSAFDVPLHYNLYQASNSSGNYDMRNLLNGTLVQRHPSHAVTFVDNHDTQPGEALESFVQGWFKPLAYATILTREQGYPQVFYGDYYGIPSDGVPSYRQQIDPLLKARQQYAYGRQHDYFDHWDVIGWTREGNASHPNSGLATIMSDGPGGSKWMYVGRQKAGEVWHDMTGNRSGTVTINQDGWGHFFVNGGSVSVWVKR

SEQ ID NO: 44281 - protein, 480 aa, Bacillus sp.
NGTIMQYFEWNVPNDGQHWNSLHNNAQNLKNAGITAIWIPPAWKGTSQNDVGYGAYDLYDLGEFNQKGTVRTKYGTKAELERAIRSLKANGIQVYGDVVMNHKGGADFTERVQAVEVNPQNRNQEVSGTYQIEAWTGFNFPGRGNQHSSFKWRWYHFDGTDWDQSRQLANRIYKFRGDGKAWDWEVDTENGNYDYLMYADVDMDHPEVINELNRWGVWYANTLNLDGFRLDAVKHIKFSFMRDWLGHVRGQTGKNLFAVAEYWKNDLGALENYLSKTNWTMSAFDVPLHYNLYQASNSSGNYDMRNLLNGTLVQRHPSHAVTFVDNHDTQPGEALESFVQGWFKPLAYATILTREQGYPQVFYGDYYGIPSDGVPSYRQQIDPLLKARQQYAYGRQHDYFDHWDVIGWTREGNASHPNSGLATIMSDGPGGSKWMYVGRQKAGEVWHDMTGNRSGTVTINQDGWGHFFVNGGSVSVWVKR

SEQ ID NO: 44282 - protein, 480 aa, Bacillus sp.
NGTIMQYFEWNVPNDGQHWNRLHNNAQNLKNAGITAIWIPPAWKGTSQNDVGYGAYDLYDLGEFNQKGTVRTKYGTKAELERAIRSLKANGIQVYGDVVMNHKGGADFTERVQAVEVNPQNRNQEVSGTYQIEAWTGFNFPGRGNQHSSFKWRWYHFDGTDWDQSRQLANRIYKFRGDGKAWDWEVDTENGNYDYLMYADVDMDHPEVINELNRWGVWYANTLNLDGFRLDAVKHIKFSFMRDWLGHVRGQTGKNLFAVAEYWKNDLGDLENYLSKTNWTMSAFDVPLHYNLYQASNSSGNYDMRNLLNGTLVQRHPSHAVTFVDNHDTQPGEALESFVQGWFKPLAYATILTREQGYPQVFYGDYYGIPSDGVPSYRQQIDPLLKARQQYAYGRQHDYFDHWDVIGWTREGNASHPNSGLATIMSDGPGGSKWMYVGRQKAGEVWHDMTGNRSGTVTINQDGWGHFFVNGGSVSVWVKR

SEQ ID NO: 44283 - protein, 480 aa, Bacillus sp.
NGTIMQYFEWNVPNDGQHWNRLHNNAQNLKNAGITAIWIPPAWKGTSQNDVGYGAYDLYDLGEFNQKGTVRTKYGTKAELERAIRSLKANGIQVYGDVVMNHKGGADFTERVQAVEVNPQNRNQEVSGTYQIEAWTGFNFPGRGNQHSSFKWRWYHFDGTDWDQSRQLANRIYKFRGDGKAWDWEVDTENGNYDYLMYADVDMDHPEVINELNRWGVWYANTLNLDGFRLDAVKHIKFSFMRDWLGHVRGQTGKNLFAVAEYWKNDLGALENYLSKTNWTMSAFDVPLHYNLYQASNSSGNYDMRNLLNGTLVQRVPSHAVTFVDNHDTQPGEALESFVQGWFKPLAYATILTREQGYPQVFYGDYYGIPSDGVPSYRQQIDPLLKARQQYAYGRQHDYFDHWDVIGWTREGNASHPNSGLATIMSDGPGGSKWMYVGRQKAGEVWHDMTGNRSGTVTINQDGWGHFFVNGGSVSVWVKR

SEQ ID NO: 44284 - protein, 480 aa, Bacillus sp.
NGTIMQYFEWNVPNDGQHWNRLHNNAQNLKNAGITAIWIPPAWKGTSQNDVGYGAYDLYDLGEFNQKGTVRTKYGTKAELERAIRSLKANGIQVYGDVVMNHKGGADQTERVQAVEVNPQNRNQEVSGTYQIEAWTGFNFPGRGNQHSSFKWRWYHFDGTDWDQSRQLANRIYKFRGDGKAWDWEVDTENGNYDYLMYADVDMDHPEVINELNRWGVWYANTLNLDGFRLDAVKHIKFSFMRDWLGHVRGQTGKNLFAVAEYWKNDLGALENYLSKTNWTMSAFDVPLHYNLYQASNSSGNYDMRNLLNGTLVQRHPSHAVTFVDNHDTQPGEALESFVQGWFKPLAYATILTREQGYPQVFYGDYYGIPSDGVPSYRQQIDPLLKARQQYAYGRQHDYFDHWDVIGWTREGNASHPNSGLATIMSDGPGGSKWMYVGRQKAGEVWHDMTGNRSGTVTINQDGWGHFFVNGGSVSVWVKR

SEQ ID NO: 44285 - protein, 480 aa, Bacillus sp.
NGTIMQYFEWNVPNDGQHWNRLHNNAQNLKNAGITAIWIPPAWKGTSQNDVGYGAYDLYDLGEFNQKGTVRTKYGTKAELERAIRSLKANGIQVYGDVVMNHKGGADFTERVQAVEVNPQNRNQEVSGTYQIEAWTGFNFPGRGNQHSSFKWRWYHFDGTDWDQSRQLANRIYKFRGDGKAWDWEVDTENGNYDYLMYADVDMDHPEVINELNRWGVWYANTLNLDGFRLDAVKHIKFSFMRDWLGHVRGQTGKNLFAVAEYWKNDLGALENYLSKTNWTMSAFDVPLHYNLYQASNSSGNYDMRNLLNGTLVQRHPSHAVTFVDNHDTQPGEALESFVQGWFKPLAYATILTREQGYPQVFYGDYYGIPSDGVPSYRQQIDPLLKARQQYAYGRQHDYFDHWDVIGWTREGNASHPNSGLAGIMSDGPGGSKWMYVGRQKAGEVWHDMTGNRSGTVTINQDGWGHFFVNGGSVSVWVKR

SEQ ID NO: 44286 - protein, 480 aa, Bacillus sp.
NGTIMQYFEWGVPNDGQHWNRLHNNAQNLKNAGITAIWIPPAWKGTSQNDVGYGAYDLYDLGEFNQKGTVRTKYGTKAELERAIRSLKANGIQVYGDVVMNHKGGADFTERVQAVEVNPQNRNQEVSGTYQIEAWTGFNFPGRGNQHSSFKWRWYHFDGTDWDQSRQLANRIYKFRGDGKAWDWEVDTENGNYDYLMYADVDMDHPEVINELNRWGVWYANTLNLDGFRLDAVKHIKFSFMRDWLGHVRGQTGKNLFAVAEYWKNDLGALENYLSKTNWTMSAFDVPLHYNLYQASNSSGNYDMRNLLNGTLVQRHPSHAVTFVDNHDTQPGEALESFVQGWFKPLAYATILTREQGYPQVFYGDYYGIPSDGVPSYRQQIDPLLKARQQYAYGRQHDYFDHWDVIGWTREGNASHPNSGLATIMSDGPGGSKWMYVGRQKAGEVWHDMTGNRSGTVTINQDGWGHFFVNGGSVSVWVKR

SEQ ID NO: 44287 - protein, 480 aa, Bacillus sp.
NGTIMQYFEWNVPNDGQHWNRLHNNAQNLKNAGITAIWIPPAWKGTSQNDVGYGAYDLYDLGEFNQKGTVRTKYGTKAELERAIRSLKANGIQVYGDVVMNHKGGADFTERVQAVEVNPQNRNQEVSGTYQIEAWTGFNFPGRGNQHSSFKWRWYHFDGTDWDQSRQLANRIYKFRGDGKAWDWEVDTENGNYDYLMYADVDMDHPEVINELNRWGVWYANTLNLDGFRLDAVKHIKFSFMRDWLGHVRGQTGKNLFAVAEYWKNDLGALENYLSKTNWTMSAFDVPLHYALYQASNSSGNYDMRNLLNGTLVQRHPSHAVTFVDNHDTQPGEALESFVQGWFKPLAYATILTREQGYPQVFYGDYYGIPSDGVPSYRQQIDPLLKARQQYAYGRQHDYFDHWDVIGWTREGNASHPNSGLATIMSDGPGGSKWMYVGRQKAGEVWHDMTGNRSGTVTINQDGWGHFFVNGGSVSVWVKR

SEQ ID NO: 44288 - protein, 480 aa, Bacillus sp.
NGTIMQYFEWNVPNDGQHWNRLHNNAQNLKNAGITAIWIPPAWKGTSQNDVGYGAYDLYDLGEFNQKGTVRTKYGTKAELERAIRSLKANGIQVYGDVVMNHKGGADFTERVQAVEVNPQARNQEVSGTYQIEAWTGFNFPGRGNQHSSFKWRWYHFDGTDWDQSRQLANRIYKFRGDGKAWDWEVDTENGNYDYLMYADVDMDHPEVINELNRWGVWYANTLNLDGFRLDAVKHIKFSFMRDWLGHVRGQTGKNLFAVAEYWKNDLGALENYLSKTNWTMSAFDVPLHYNLYQASNSSGNYDMRNLLNGTLVQRHPSHAVTFVDNHDTQPGEALESFVQGWFKPLAYATILTREQGYPQVFYGDYYGIPSDGVPSYRQQIDPLLKARQQYAYGRQHDYFDHWDVIGWTREGNASHPNSGLATIMSDGPGGSKWMYVGRQKAGEVWHDMTGNRSGTVTINQDGWGHFFVNGGSVSVWVKR

SEQ ID NO: 44289 - protein, 480 aa, Bacillus sp.
NGTIMQYFEWNVPNDGQHWNRLHNNAQNLKNAGITAIWIPPAWKGTSQNDVGYGAYDLYDLGEFNQKGTVRTKYGTKAELERAIRSLKANGIQVYGDVVMNHKGGADFTERVQAVEVNPQNRNQEVSGTYQIEAWTGFNFPGRGNQHSSFKWRWYHFDGTDWDQSRQLANRIYKFRGDGKAWDWEVDTENGNYDYLMYADVDMDHPEVINELNRWGVWYANTLNLDGFRLDAVKHIKFSFMRDWLGHVRGQTGKNLFAVAEYWKNDLGALENYLSKTNWTMSAFDVPLHYNLYQASNSSGNYDMRNLLNGTLVQRHPSHAVTFVDNHDTQPGEALESFVQGWFKPLAYATILTREQGYPQVFYGDYYGIPSDGVPSYRQQIDPLLKARLQYAYGRQHDYFDHWDVIGWTREGNASHPNSGLATIMSDGPGGSKWMYVGRQKAGEVWHDMTGNRSGTVTINQDGWGHFFVNGGSVSVWVKR

SEQ ID NO: 44290 - protein, 480 aa, Bacillus sp.
NGTIMQYFEWNVPNDGQHWNRLHNNAQNLKNAGITAIWIPPAWKGTSQNDVGYGAYDLYDLGEFNQKGTVRTKYGTKAELERAIRSLKANGIQVYGDVVMNHKGGADFTERVQAVEVNPQNRNQEVSGTYQIEAWTGFNFPGRGNQHSSFKWRWYHFDGTDWDQSRQLANRIYKFRGDGKAWDWEVDTENGNYDYLMYADVDMDHPEVINELNRWGVWYANTLNLDGFRLDAVKHIKFSFMRDWLGHVRCQTGKNLFAVAEYWKNDLGALENYLSKTNWTMSAFDVPLHYNLYQASNSSGNYDMRNLLNGTLVQRHPSHAVTFVDNHDTQPGEALESFVQGWFKPLAYATILTREQGYPQVFYGDYYGIPSDGVPSYRQQIDPLLKARQQYAYGRQHDYFDHWDVIGWTREGNASHPNSGLATIMSDGPGGSKWMYVGRQKAGEVWHDMTGNRSGTVTINQDGWGHFFVNGGSVSVWVKR

SEQ ID NO: 44291 - protein, 480 aa, Bacillus sp.
NGTIMQYFEWNVPNDGQHWNRLHNNAQNLKNAGITAIWIPPAWKGTSQNDVGYGAYDLYDLGEFNQKGTVRTKYGTKAELERAIRSLKANGIQVYGDVVMNHKGGADFTERVQAVEVNPQNRNQEVSGTYQIEAWTGFNFPGRGNQHSSFKWRWYHFDGTDWDQSRLLANRIYKFRGDGKAWDWEVDTENGNYDYLMYADVDMDHPEVINELNRWGVWYANTLNLDGFRLDAVKHIKFSFMRDWLGHVRGQTGKNLFAVAEYWKNDLGALENYLSKTNWTMSAFDVPLHYNLYQASNSSGNYDMRNLLNGTLVQRHPSHAVTFVDNHDTQPGEALESFVQGWFKPLAYATILTREQGYPQVFYGDYYGIPSDGVPSYRQQIDPLLKARQQYAYGRQHDYFDHWDVIGWTREGNASHPNSGLATIMSDGPGGSKWMYVGRQKAGEVWHDMTGNRSGTVTINQDGWGHFFVNGGSVSVWVKR

SEQ ID NO: 44292 - protein, 480 aa, Bacillus sp.
NGTIMQYFEWNVPNDGQHWNRLHNNAQNLKNAGITAIWIPPAWKGTSQNDVGYGAYDLYDLGEFNQKGTVRTKYGTKAELERAIRSLKANGIQVYGDVVMNHKGGADFTERVQAVEVNPQNRNQEVSGTYQIEAWTGFNFPGRGNQHSSFKWRWYHFDGTDWDQSRQLANRIYKFRGDGKAWDWEVDTENGNYDYLMYADVDMDHPEVINELNRWGVWYANTLNLDGFRLDAVKHIKFSFMRDWLGHVRGQTGKNLFAVAEYWKNDLRALENYLSKTNWTMSAFDVPLHYNLYQASNSSGNYDMRNLLNGTLVQRHPSHAVTFVDNHDTQPGEALESFVQGWFKPLAYATILTREQGYPQVFYGDYYGIPSDGVPSYRQQIDPLLKARQQYAYGRQHDYFDHWDVIGWTREGNASHPNSGLATIMSDGPGGSKWMYVGRQKAGEVWHDMTGNRSGTVTINQDGWGHFFVNGGSVSVWVKR

SEQ ID NO: 44293 - protein, 480 aa, Bacillus sp.
NGTIMQYFEWNVPNDGQHWNRLHNNAQNLKNAGITAIWIPPAWKGTSQLDVGYGAYDLYDLGEFNQKGTVRTKYGTKAELERAIRSLKANGIQVYGDVVMNHKGGADFTERVQAVEVNPQNRNQEVSGTYQIEAWTGFNFPGRGNQHSSFKWRWYHFDGTDWDQSRQLANRIYKFRGDGKAWDWEVDTENGNYDYLMYADVDMDHPEVINELNRWGVWYANTLNLDGFRLDAVKHIKFSFMRDWLGHVRGQTGKNLFAVAEYWKNDLGALENYLSKTNWTMSAFDVPLHYNLYQASNSSGNYDMRNLLNGTLVQRHPSHAVTFVDNHDTQPGEALESFVQGWFKPLAYATILTREQGYPQVFYGDYYGIPSDGVPSYRQQIDPLLKARQQYAYGRQHDYFDHWDVIGWTREGNASHPNSGLATIMSDGPGGSKWMYVGRQKAGEVWHDMTGNRSGTVTINQDGWGHFFVNGGSVSVWVKR

SEQ ID NO: 44294 - protein, 480 aa, Bacillus sp.
NGTIMQYFEWNVPNDGQHWNRLHNNAQNLKNAGITAIWIPPAWKGTSQNDVGYGAYDLYDLGEFNQKGTVRTKYGTKAELERAIRSLKANGIQVYGDVVMNHKGGADFTERVQAVEVNPQNRNQEVSGTYQIEAWTGFNFPGRGNQHSSFKWRWYHFDGTDWDQSRQLANRIYKFRGDGKAWDWEVDTENGNYDYLMYADVDMDHPEVINELNRWGVWYANTLNLDGFRLDAVKHIKFSFMRDWLGHVRGQTGKNLFAVAEYWKNDLGALENYLSKTNWTMSAFDVPLHYNLYQASNSSGNYDMRNLLNGTLVQRHPSHAVTFVDNHDTQPGEALESFVQGWFKPLAYATILTREQGYPQVFYGDYYGIPSDGVPSYRQQIDPLLKARQQYAYGRQHDYFDHWDVIGWTREGNASHPNSGLATIMSDGPGGSKWMYVGRQKAGEVWHDMTGNRSGTVTINLDGWGHFFVNGGSVSVWVKR

SEQ ID NO: 44295 - protein, 480 aa, Bacillus sp.
NGTIMQYFEWNVPNDGQHWNRLHNNAQNLKNRGITAIWIPPAWKGTSQNDVGYGAYDLYDLGEFNQKGTVRTKYGTKAELERAIRSLKANGIQVYGDVVMNHKGGADFTERVQAVEVNPQNRNQEVSGTYQIEAWTGFNFPGRGNQHSSFKWRWYHFDGTDWDQSRQLANRIYKFRGDGKAWDWEVDTENGNYDYLMYADVDMDHPEVINELNRWGVWYANTLNLDGFRLDAVKHIKFSFMRDWLGHVRGQTGKNLFAVAEYWKNDLGALENYLSKTNWTMSAFDVPLHYNLYQASNSSGNYDMRNLLNGTLVQRHPSHAVTFVDNHDTQPGEALESFVQGWFKPLAYATILTREQGYPQVFYGDYYGIPSDGVPSYRQQIDPLLKARQQYAYGRQHDYFDHWDVIGWTREGNASHPNSGLATIMSDGPGGSKWMYVGRQKAGEVWHDMTGNRSGTVTINQDGWGHFFVNGGSVSVWVKR

SEQ ID NO: 44296 - protein, 480 aa, Bacillus sp.
NGTIMQYFEWNVPNDGQHWNRLHNNAQNLKNAGITAIWIPPAWKGTSQNDVGYGAYDLYDLGEFNQKGTVRTKYGTKAELERAIRSLKANGIQVYGDVVMNHKGGADFTERVQAVEVNPQNRNQEVSGTYQIEAWTGFNFPGRGNQHSSFKWRWYHFDGTDWDQSRQLANRIYKFRGDGKAWDWEVDTENGNYDYLMYADVDMDHPEVINELNRWGVWYANTLNLDGFRLDAVKHIKFSFMRDWLGHVRGQTGKPLFAVAEYWKNDLGALENYLSKTNWTMSAFDVPLHYNLYQASNSSRNYDMRNLLNGTLVQRHPSHAVTFVDNHDTQPGEALESFVQGWFKPLAYATILTREQGYPQVFYGDYYGIPSDGVPSYRQQIDPLLKARQQYAYGRQHDYFDHWDVIGWTREGNASHPNSGLATIMSDGPGGSKWMYVGRQKAGEVWHDMTGNRSGTVTINQDGWGHFFVNGGSVSVWVKR

SEQ ID NO: 44297 - protein, 480 aa, Bacillus sp.
NGTIMQYFEWNVPNDGQHWNRLHNNAQNLKNAGITAIWIPPAWKGTSQNDVGYGAYDLYDLGEFNQKGTVRTKYGTKAELERAIRSLKANGIQVYGDVVMNHKGGADFTERVQAVEVNPQNRNQEVSGTYQIEAWTGFNFPGRGNQHSSFKWRWYHFDGTDWDQSRQLANRIYKFRGDGKAWDWEVDTENGNYDYLMYADVDMDHPEVINELNRWGVWYANTLNLDGFRLDAVKHIKFSFMRDWLGHVRGQTGKNLFAVAEYWKNDLGALENYLSKTNWTMSAFDVPLHHNLYQASNSSGNYDMRNLLNGTLVQRHPSHAVTFVDNHDTQPGEALESFVQGWFKPLAYATILTREQGYPQVFYGDYYGIPSDGVPSYRQQIDPLLKARQQYAYGRQHDYFDHWDVIGWTREGNASHPNSGLATIMSDGPGGSKWMYVGRQKAGEVWHDMTGNRSGTVTINQDGWGHFFVNGGSVSVWVKR

SEQ ID NO: 44298 - protein, 480 aa, Bacillus sp.
NGTIMQYFEWNVPNDGQHWNRLHNNAQNLKNAGITAIWIPPAWKGTSQNDVGYGAYDLYDLGEFNQKGTVRTKYGTKAELERAIRSLKANGIQVYGDVVMNHKGGADFTERVQAVEVNPQNRNQEVSGTYQIEAWTGFNFPGRGNQHSSFKWRWYHFDGTDWDQSRQLANRIYKFRGDGKAWDWEVDTENGNYDYLMYADVDMDHPEVINELNRWGVWYANTLNLDGFRLDAVKHIKFSFMRDWLGHVRGQTGKNLFAVAEYWKNDLGALENYLSKTNWTMSAFDVPLHYNLYQASNSSGNYDMRNLLNGTLVQRHPSHAVTFVDNHDTQPGEALESFVQGWFKPLAYATILTREQGYPQVFYGDYYGIPSDGVPSYRQQIDPLLKARQQYAYGRQHDYIDHWDVIGWTREGNASHPNSGLATIMSDGPGGSKWMYVGRQKAGEVWHDMTGNRSGTVTINQDGWGHFFVNGGSVSVWVKR

SEQ ID NO: 44299 - protein, 480 aa, Bacillus sp.
NGTIMQYFEWNVPNDGQHWNRLHNNAQNLKNAGITAIWIPPAWKGTSQNDVGYGAYDLYDLGEFNQKGTVRTKYGTKAELERAIRSLKANGIQVYGDVVMNHKGGADFTERVQAVEVNPQNRNQEVSGTYQIEAWTGFNFPGRGNQHSSFKWRWYHFDGTDWDQSRQLANRIYKFRGDGKAWDWEVDTENGNYDYLMYADVDMDHPEVINELNRWGVWYANTLNLDGFRLDAVKHIKFSFMRDWLGHVRGQTGKNLFAVAEYWKNDLGALENYLSKTNWTMSAFDVPLHYNLYQASNSSGNYDMRNLLNGTLVQRHPSHAVTFVDNHDTQPGEALESFVQGWFKPLAYATILTREQGYPQVFYGDYYGIPSDGVPSYRQQIDPLLKARQQYAYGRQHDYFDHWDVIGWTREGNATHPNSGLATIMSDGPGGSKWMYVGRQKAGEVWHDMTGNRSGTVTINQDGWGHFFVNGGSVSVWVKR

SEQ ID NO: 44300 - protein, 480 aa, Bacillus sp.
NGTIMQYFEWNVPNDGQHWGRLHNNAQNLKNAGITAIWIPPAWKGTSQNDVGYGAYDLYDLGEFNQKGTVRTKYGTKAELERAIRSLKANGIQVYGDVVMNHKGGADFTERVQAVEVNPQNRNQEVSGTYQIEAWTGFNFPGRGNQHSSFKWRWYHFDGTDWDQSRQLANRIYKFRGDGKAWDWEVDTENGNYDYLMYADVDMDHPEVINELNRWGVWYANTLNLDGFRLDAVKHIKFSFMRDWLGHVRGQTGKNLFAVAEYWKNDLGALENYLSKTNWTMSAFDVPLHYNLYQASNSSGNYDMRNLLNGTLVQRHPSHAVTFVDNHDTQPGEALESFVQGWFKPLAYATILTREQGYPQVFYGDYYGIPSDGVPSYRQQIDPLLKARQQYAYGRQHDYFDHWDVIGWTREGNASHPNSGLATIMSDGPGGSKWMYVGRQKAGEVWHDMTGNRSGTVTINQDGWGHFFVNGGSVSVWVKR

SEQ ID NO: 44301 - protein, 480 aa, Bacillus sp.
NGTIMQYFEWNVPNDGQHWNRLHNNALNLKNAGITAIWIPPAWKGTSQNDVGYGAYDLYDLGEFNQKGTVRTKYGTKAELERAIRSLKANGIQVYGDVVMNHKGGADFTERVQAVEVNPQNRNQEVSGTYQIEAWTGFNFPGRGNQHSSFKWRWYHFDGTDWDQSRQLANRIYKFRGDGKAWDWEVDTENGNYDYLMYADVDMDHPEVINELNRWGVWYANTLNLDGFRLDAVKHIKFSFMRDWLGHVRGQTGKNLFAVAEYWKNDLGALENYLSKTNWTMSAFDVPLHYNLYQASNSSGNYDMRNLLNGTLVQRHPSHAVTFVDNHDTQPGEALESFVQGWFKPLAYATILTREQGYPQVFYGDYYGIPSDGVPSYRQQIDPLLKARQQYAYGRQHDYFDHWDVIGWTREGNASHPNSGLATIMSDGPGGSKWMYVGRQKAGEVWHDMTGNRSGTVTINQDGWGHFFVNGGSVSVWVKR

SEQ ID NO: 44302 - protein, 480 aa, Bacillus sp.
NGTIMQYFEWNVPNDGQHWNRLHNNAQNLKNAGITAIWIPPAWKGTSQNDVGYGAYDLYDLGEFNQKGTVRTKYGTKAELERAIRSLKANGIQVYGDVVMNHKGGADFTERVQAVEVNPQNRNQEVSGTYQIEAWTGFNFPGRGNQHSSFKWRWYHFDGTDWDQSRQLANRIYKFRGDGKAWDWEVDTENGNYDYLMYADVDMDHPEVINELNRWGVWYANTLNLDGFRLDAVKHIKFSFMRDWLGHVRGQTGKNLFAVAEYWKNDLGALENYLSKTNWTMSAFDVPLHYNLYQASNSSGNYDMRNLLNGTLVQRHPSHAVTFVDNHDTQPGEALESFVQGWFKPLAYATILTREQGYPQVFYGDYYGIPSVGVPSYRQQIDPLLKARQQYAYGRQHDYFDHWDVIGWTREGNASHPNSGLATIMSDGPGGSKWMYVGRQKAGEVWHDMTGNRSGTVTINQDGWGHFFVNGGSVSVWVKR

SEQ ID NO: 44303 - protein, 480 aa, Bacillus sp.
NGTIMQYFEWNVPNDGQHWNRLHNNAQNLKNAGITAIWIPPAWKGTSQNDVGYGAYDLYDLGEFNQKGTVRTKYGTKAELERAIRSLKANGIQVYGDVVMNHKGGADFTERVQAVEVNPQNRNQEVSGTYQIEAWTGFNFPGRGNQHSSFKWRWYHFDGTDWDQSRQLANRIYKFRGDGKAWDWEVDTENGNYDYLMYADVDMDHPEVINELNRWGVWYANTLNLDGFRLDAVKHIKFSFMRDWLGHVRGQTGKNLFAVAEYWKNDLGALENYLSKTNWTMSAFDVPLHYNLYQASNSSGNYDMRNLLNGTLVQRHPSHAVTFVDNHDTQPGEALESFVQGWFKPLAYATILTREQGYPQVFYGDYYGIPSDGVPSYRQQIDPLLKARQQYAYGRQHDYFDHWDVIGWTREGNASCPNSGLATIMSDGPGGSKWMYVGRQKAGEVWHDMTGNRSGTVTINQDGWGHFFVNGGSVSVWVKR

SEQ ID NO: 44304 - protein, 480 aa, Bacillus sp.
NGTIMQYFEWNVPNDGQHWNRLHNNAQNLKNAGITAIWIPPAWKGTSQNDVGYGAYDLYDLGEFNQKGTVRTKYGTKAELERAIRSLKANGIQVYGDVVMNHKGGADFTERVQAVEVNPQNRNQEVSGTYQIEAWTGFNFPGRGNQHSSFKWRWYHFDGTDWDQSRQLANRIYKFRGDGKAWDWEVDTENGNYDYLMYADVDMDHPEVINELNWWGVWYANTLNLDGFRLDAVKHIKFSFMRDWLGHVRGQTGKNLFAVAEYWKNDLGALENYLSKTNWTMSAFDVPLHYNLYQASNSSGNYDMRNLLNGTLVQRHPSHAVTFVDNHDTQPGEALESFVQGWFKPLAYATILTREQGYPQVFYGDYYGIPSDGVPSYRQQIDPLLKARQQYAYGRQHDYFDHWDVIGWTREGNASHPNSGLATIMSDGPGGSKWMYVGRQKAGEVWHDMTGNRSGTVTINQDGWGHFFVNGGSVSVWVKR

SEQ ID NO: 44305 - protein, 480 aa, Bacillus sp.
NGTIMQYFEWNVPNDGQHWNRLHNNAQNLKNAGITAIWIPPAWKGTSQNDVGYGAYDLYDLGEFNQKGTVRTKYGTKAELERAIRSLKANGIQVYGDVVMNHKGGADFTERVQAVEVNPQNRNQEVSGTYQIEAWTGFNFPGRGNQHSSFKWRWYHFDGTDWDQSRQLANRIYKFRGDGKAWDWEVDTENGNYDYLMYADVDMDHPEVINELNRWGVWYANTLNLDGFRLDAVKHIKFSFMRDWLGHVRGQTGKNLFAVAEYWKNDLGALENYLSKTNWTMSAFDVPLHYNLYQASNSSGNYDMRNLLNGTLVQRHPSHAVTFVDNHDTQPGEALESFVQGWFKPLAYATILTREQGYPQVFYGDYYGIPSDGVPSYRQQIDPLLKARQQYAYGRQHDYFDHWDVIGWTREGNASHPNSGLATIMSDGPGGSKWMYVGSQKAGEVWHDMTGNRSGTVTINQDGWGHFFVNGGSVSVWVKR

SEQ ID NO: 44306 - protein, 480 aa, Bacillus sp.
NGTIMQYFEWNVPNDGQHWNRLHNNAQNLKNAGITAIWIPPAWKGTSQNDVGYGAYDLYDLGEFNQKGTVRTKYGTKAELERAIRSLKANGIQVYGDVVMNHKGGADFTERVQAVEVNPQNRNQEVSGTYQIEAWTGFNFPGRGNQHSSFKWRWYHFDGTDWDQSRQLANRIYKFRGDGKAWDWEVDTENGNYDYLMYADVDMDHPEVINELNRWGVWYANTLNLDGFRLDAVKHIKFSFMRDWLGHVRGQTGKELFAVAEYWKNDLGALENYLSKTNWTMSAFDVPLHYNLYQASNSSGNYDMRNLLNGTLVQRHPSHAVTFVDNHDTQPGEALESFVQGWFKPLAYATILTREQGYPQVFYGDYYGIPSDGVPSYRQQIDPLLKARQQYAYGRQHDYFDHWDVIGWTREGNASHPNSGLATIMSDGPGGSKWMYVGRQKAGEVWHDMTGNRSGTVTINQDGWGHFFVNGGSVSVWVKR

SEQ ID NO: 44307 - protein, 480 aa, Bacillus sp.
NGTIMQYFEWNVPNDGQHWNRLHNNAQNLKNAGITAIWIPPAWKGTSQNDVGYGAYDLYDLGEFNQKGTVRTKYGTKAELERAIRSLKANGIQVYGDVVMNHKGGADFTERVQAVEVNPQNRNQEVSGTYQIEAWTGFNFPGRGNQHSSFKWRWYHFDGTDWDQSRQLANRIYKFRGDGKAWDWEVDTENGNYDYLMYADADMDHPEVINELNRWGVWYANTLNLDGFRLDAVKHIKFSFMRDWLGHVRGQTGKNLFAVAEYWKNDLGALENYLSKTNWTMSAFDVPLHYNLYQASNSSGNYDMRNLLNGTLVQRHPSHAVTFVDNHDTQPGEALESFVQGWFKPLAYATILTREQGYPQVFYGDYYGIPSDGVPSYRQQIDPLLKARQQYAYGRQHDYFDHWDVIGWTREGNASHPNSGLATIMSDGPGGSKWMYVGRQKAGEVWHDMTGNRSGTVTINQDGWGHFFVNGGSVSVWVKR

SEQ ID NO: 44308 - protein, 480 aa, Bacillus sp.
NGTIMQYFEWNVPNDGQHWNLLHNNAQNLKNAGITAIWIPPAWKGTSQNDVGYGAYDLYDLGEFNQKGTVRTKYGTKAELERAIRSLKANGIQVYGDVVMNHKGGADFTERVQAVEVNPQNRNQEVSGTYQIEAWTGFNFPGRGNQHSSFKWRWYHFDGTDWDQSRQLANRIYKFRGDGKAWDWEVDTENGNYDYLMYADVDMDHPEVINELNRWGVWYANTLNLDGFRLDAVKHIKFSFMRDWLGHVRGQTGKNLFAVAEYWKNDLGALENYLSKTNWTMSAFDVPLHYNLYQASNSSGNYDMRNLLNGTLVQRHPSHAVTFVDNHDTQPGEALESFVQGWFKPLAYATILTREQGYPQVFYGDYYGIPSDGVPSYRQQIDPLLKARQQYAYGRQHDYFDHWDVIGWTREGNASHPNSGLATIMSDGPGGSKWMYVGRQKAGEVWHDMTGNRSGTVTINQDGWGHFFVNGGSVSVWVKR

SEQ ID NO: 44309 - protein, 480 aa, Bacillus sp.
NGTIMQYFEWNAPNDGQHWNRLHNNAQNLKNAGITAIWIPPAWKGTSQNDVGYGAYDLYDLGEFNQKGTVRTKYGTKAELERAIRSLKANGIQVYGDVVMNHKGGADFTERVQAVEVNPQNRNQEVSGTYQIEAWTGFNFPGRGNQHSSFKWRWYHFDGTDWDQSRQLANRIYKFRGDGKAWDWEVDTENGNYDYLMYADVDMDHPEVINELNRWGVWYANTLNLDGFRLDAVKHIKFSFMRDWLGHVRGQTGKNLFAVAEYWKNDLGALENYLSKTNWTMSAFDVPLHYNLYQASNSSGNYDMRNLLNGTLVQRHPSHAVTFVDNHDTQPGEALESFVQGWFKPLAYATILTREQGYPQVFYGDYYGIPSDGVPSYRQQIDPLLKARQQYAYGRQHDYFDHWDVIGWTREGNASHPNSGLATIMSDGPGGSKWMYVGRQKAGEVWHDMTGNRSGTVTINQDGWGHFFVNGGSVSVWVKR

SEQ ID NO: 44310 - protein, 480 aa, Bacillus sp.
NGTIMQYFEWNVPNDGQHWNRLHNNAQNLKNAGITAIWIPPAWKGTSQNDVGYGAYDLYDLGEFNQKGTVRTKYGTKAELERAIRSLKANGIQVYGDVVMNHKGGADFTERVQAVEVNPQNRNQEVSGTYQIEAWTGFNFPGRGNQHSSFKWRWYHFDGTDWDQSRQLANRIYKFRGDGKAWDWEVDTENGNYDYLMYADVDMDHPEVINELNRWGVWYANTLNLDGFRLDAVKHIKFSFMRDWLGHVRGQTGKNLFAVAEYWKNDLGALENYLSKTNWTMSAFDVPLHYNLYQASNSSGNYDMRNLLNGTLCQRHPSHAVTFVDNHDTQPGEALESFVQGWFKPLAYATILTREQGYPQVFYGDYYGIPSDGVPSYRQQIDPLLKARQQYAYGRQHDYFDHWDVIGWTREGNASHPNSGLATIMSDGPGGSKWMYVGRQKAGEVWHDMTGNRSGTVTINQDGWGHFFVNGGSVSVWVKR

SEQ ID NO: 44311 - protein, 480 aa, Bacillus sp.
NGTIMQYFEWNVPNDGQHWNRLHNNAQNLKNAGITAIWIPPAWKGTSQNDVGYGAYDLYDLGEFNQKGTVRTKYGTKAELERAIRSLKANGIQVYGDVVMNHKGGADFTERVQAVEVNPQNRNQEVSGTYQIEAWTGFNFPGRGNQHSSFKWRWYHFDGMDWDQSRQLANRIYKFRGDGKAWDWEVDTENGNYDYLMYADVDMDHPEVINELNRWGVWYANTLNLDGFRLDAVKHIKFSFMRDWLGHVRGQTGKNLFAVAEYWKNDLGALENYLSKTNWTMSAFDVPLHYNLYQASNSSGNYDMRNLLNGTLVQRHPSHAVTFVDNHDTQPGEALESFVQGWFKPLAYATILTREQGYPQVFYGDYYGIPSDGVPSYRQQIDPLLKARQQYAYGRQHDYFDHWDVIGWTREGNASHPNSGLATIMSDGPGGSKWMYVGRQKAGEVWHDMTGNRSGTVTINQDGWGHFFVNGGSVSVWVKR

SEQ ID NO: 44312 - protein, 480 aa, Bacillus sp.
NGTIMQYFEWNVPNDGQHWNRLHNNAQNLKNAGITAIWIPPAWKGTSQNDVGYGAYDLYDLGEFNQKGTVRTKYGTKAELERAIRSLKARGIQVYGDVVMNHKGGADFTERVQAVEVNPQNRNQEVSGTYQIEAWTGFNFPGRGNQHSSFKWRWYHFDGTDWDQSRQLANRIYKFRGDGKAWDWEVDTENGNYDYLMYADVDMDHPEVINELNRWGVWYANTLNLDGFRLDAVKHIKFSFMRDWLGHVRGQTGKNLFAVAEYWKNDLGALENYLSKTNWTMSAFDVPLHYNLYQASNSSGNYDMRNLLNGTLVQRHPSHAVTFVDNHDTQPGEALESFVQGWFKPLAYATILTREQGYPQVFYGDYYGIPSDGVPSYRQQIDPLLKARQQYAYGRQHDYFDHWDVIGWTREGNASHPNSGLATIMSDGPGGSKWMYVGRQKAGEVWHDMTGNRSGTVTINQDGWGHFFVNGGSVSVWVKR

SEQ ID NO: 44313 - protein, 480 aa, Bacillus sp.
NGTIMQYFEWNVPNDGQHWNRLHNNAQNLKNAGITAIWIPPAWKGTSQNDVGYGAYDLYDLGEFNQKGTVRTKYGTKAELERAIRSLKANGIQVYGDVVMNHKGGADFTERVQAVEVNPQNRNQEVSGTYQIEAWTGFNFPGRGNQHSSFKWRWYHFDGTDWDQSRQLANRIYKFRGDGKAWDWEVDTENGNYDYLMYADPDMDHPEVINELNRWGVWYANTLNLDGFRLDAVKHIKFSFMRDWLGHVRGQTGKNLFAVAEYWKNDLGALENYLSKTNWTMSAFDVPLHYNLYQASNSSGNYDMRNLLNGTLVQRHPSHAVTFVDNHDTQPGEALESFVQGWFKPLAYATILTREQGYPQVFYGDYYGIPSDGVPSYRQQIDPLLKARQQYAYGRQHDYFDHWDVIGWTREGNASHPNSGLATIMSDGPGGSKWMYVGRQKAGEVWHDMTGNRSGTVTINQDGWGHFFVNGGSVSVWVKR

SEQ ID NO: 44314 - protein, 480 aa, Bacillus sp.
NGTIMQYFEWNVPNDGQHWNRLHNNAQNLKNAGITAIWIPPAWKGTSQNDVGYGAYDLYDLGEFNQKGTVRTKYGTKAELERAIRSLKANGIQVYGDVVMNHKGGADFTERVQAVEVNPQNRNQEVSGTYQIEAWTGFNFPGRGNQHSSFKWRWYHFDGTDWDQSRQLANRIYKFRGDGKAWDWEVDTENGNYDYLMYADVDMDHPEVINELNRWGVWYANTLNLDGFRLDAVKHIKFSFMRDWLGHVRGQTGKNLFAVAEYWKNDLGALENYLSKTNWTMSAFDVPLHYNLYQASNSSGNYDMRNLLNGTLVQRHPSHAVTFVDNHDTQPGEALESFVQGWFKPLAYATILTRGQGYPQVFYGDYYGIPSDGVPSYRQQIDPLLKARQQYAYGRQHDYFDHWDVIGWTREGNASHPNSGLATIMSDGPGGSKWMYVGRQKAGEVWHDMTGNRSGTVTINQDGWGHFFVNGGSVSVWVKR

SEQ ID NO: 44315 - protein, 480 aa, Bacillus sp.
NGTIMQYFEWNVPNDGQHWNRLHNNAQNLKNAGITAIWIPPAWKGTSQNDVGYGAYDLYDLGEFNQKGTVRTKYGTKAELERAIRSLKANGIQVYGDVVMNHKGGADFTEHVQAVEVNPQNRNQEVSGTYQIEAWTGFNFPGRGNQHSSFKWRWYHFDGTDWDQSRQLANRIYKFRGDGKAWDWEVDTENGNYDYLMYADVDMDHPEVINELNRWGVWYANTLNLDGFRLDAVKHIKFSFMRDWLGHVRGQTGKNLFAVAEYWKNDLGALENYLSKTNWTMSAFDVPLHYNLYQASNSSGNYDMRNLLNGTLVQRHPSHAVTFVDNHDTQPGEALESFVQGWFKPLAYATILTREQGYPQVFYGDYYGIPSDGVPSYRQQIDPLLKARQQYAYGRQHDYFDHWDVIGWTREGNASHPNSGLATIMSDGPGGSKWMYVGRQKAGEVWHDMTGNRSGTVTINQDGWGHFFVNGGSVSVWVKR

SEQ ID NO: 44316 - protein, 480 aa, Bacillus sp.
NGTIMQYFEWNVPNDGQHWNRLHNNAQNLKNAGITAIWIPPAWKGTSQNDVGYGAYDLYDLGEFNQKGTVRTKYGTKAELERAIRSLKANGIQVYGDVVMNHKGGADFTERVQAVEVNPQNRNQEVSGTYQIEAWTGFNFPGRGNQHSSFKWRWYHFDGTDWDQSRQLANRIYKFRGDGKAWDWEVDTENGNYDYLMYADVDMDHPEVINELNRWGVWYANTLNLDGFRLDAVKHIKFSFMRDWLGHVRGQTGKNLFAVAEYWKNDLGALENYLSKTNWTMSAFDVPLHYNLYQASNSSGVYDMRNLLNGTLVQRHPSHAVTFVDNHDTQPGEALESFVQGWFKPLAYATILTREQGYPQVFYGDYYGIPSDGVPSYRQQIDPLLKARQQYAYGRQHDYFDHWDVIGWTREGNASHPNSGLATIMSDGPGGSKWMYVGRQKAGEVWHDMTGNRSGTVTINQDGWGHFFVNGGSVSVWVKR

SEQ ID NO: 44317 - protein, 480 aa, Bacillus sp.
NGTIMQYFEWNVPNDGQHWNRLHNNAQNLKNAGITAIWIPPAWKGTSQNDVGYGAYDLYDLGEFNQKGTVRTKYGTKAELERAIRSLKANGIQVYGDVVMNHKGGADFTERVQAVEVNPQNRNQEVSGTYQIEAWTGFNFPGRGNQHSSFKWRWYHFDGTDWDQSRQLANRIYKFRGDGKAWDWEVDTENGNYDYLMYADVDMDHPEVINELNRWGVWYANTLNLDGFRLDAVKHIKFSFMRDWLGHVRGQTGKNLFAVAEYWKNDLGALENYLSKTNWTMSAFDVPLHYNLYQASNSSGNYDMRNLLNGTLVQRRPSHAVTFVDNHDTQPGEALESFVQGWFKPLAYATILTREQGYPQVFYGDYYGIPSDGVPSYRQQIDPLLKARQQYAYGRQHDYFDHWDVIGWTREGNASHPNSGLATIMSDGPGGSKWMYVGRQKAGEVWHDMTGNRSGTVTINQDGWGHFFVNGGSVSVWVKR

SEQ ID NO: 44318 - protein, 480 aa, Bacillus sp.
NGTIMQYFEWNVPNDGQHWNRLHNNAQNLKNAGITAIWIPPAWKGTSQNDVGYGAYDLYDLGEFNQKGTVRTKYGTKAELERAIRSLKANGIQVYGDVVMNHKGGADFTEIVQAVEVNPQNRNQEVSGTYQIEAWTGFNFPGRGNQHSSFKWRWYHFDGTDWDQSRQLANRIYKFRGDGKAWDWEVDTENGNYDYLMYADVDMDHPEVINELNRWGVWYANTLNLDGFRLDAVKHIKFSFMRDWLGHVRGQTGKNLFAVAEYWKNDLGALENYLSKTNWTMSAFDVPLHYNLYQASNSSGNYDMRNLLNGTLVQRHPSHAVTFVDNHDTQPGEALESFVQGWFKPLAYATILTREQGYPQVFYGDYYGIPSDGVPSYRQQIDPLLKARQQYAYGRQHDYFDHWDVIGWTREGNASHPNSGLATIMSDGPGGSKWMYVGRQKAGEVWHDMTGNRSGTVTINQDGWGHFFVNGGSVSVWVKR

SEQ ID NO: 44319 - protein, 480 aa, Bacillus sp.
NGTIMQYFEWNVPNDGQHWNRLHNNAQNLKNAGITAIWIPPAWKGTSQNDVGYGAYDLYDLGEFNQKGTVRTKYGTKAELERAIRSLKANGIQVYGDVVMNHKGGADFTERVQAVEVNPQNRNQEVSGTYQIEAWTGFNFPGRGNQHSSFKWRWYHFDGTDWDQSRQLANRIYKFRGDGKAWDWEVDTENGNYDYLMYADVDMDHPEVINELRRWGVWYANTLNLDGFRLDAVKHIKFSFMRDWLGHVRGQTGKNLFAVAEYWKNDLGALENYLSKTNWTMSAFDVPLHYNLYQASNSSGNYDMRNLLNGTLVQRHPSHAVTFVDNHDTQPGEALESFVQGWFKPLAYATILTREQGYPQVFYGDYYGIPSDGVPSYRQQIDPLLKARQQYAYGRQHDYFDHWDVIGWTREGNASHPNSGLATIMSDGPGGSKWMYVGRQKAGEVWHDMTGNRSGTVTINQDGWGHFFVNGGSVSVWVKR

SEQ ID NO: 44320 - protein, 480 aa, Bacillus sp.
NGTIMQYFEWNVPNDGQHWNRLHNNAQNLKNAGITAIWIPPAWKGTSQNDVGYGAYDLYDLGEFNQKGTVRTKYGTKAEVERAIRSLKANGIQVYGDVVMNHKGGADFTERVQAVEVNPQNRNQEVSGTYQIEAWTGFNFPGRGNQHSSFKWRWYHFDGTDWDQSRQLANRIYKFRGDGKAWDWEVDTENGNYDYLMYADVDMDHPEVINELNRWGVWYANTLNLDGFRLDAVKHIKFSFMRDWLGHVRGQTGKNLFAVAEYWKNDLGALENYLSKTNWTMSAFDVPLHYNLYQASNSSGNYDMRNLLNGTLVQRHPSHAVTFVDNHDTQPGEALESFVQGWFKPLAYATILTREQGYPQVFYGDYYGIPSDGVPSYRQQIDPLLKARQQYAYGRQHDYFDHWDVIGWTREGNASHPNSGLATIMSDGPGGSKWMYVGRQKAGEVWHDMTGNRSGTVTINQDGWGHFFVNGGSVSVWVKR

SEQ ID NO: 44321 - protein, 480 aa, Bacillus sp.
NGTIMQYFEWNVPNDGQHWNRLHNNAQNLKNAGITAIWIPPAWKGTSQNDVGYGAYDLYDLGEFNQKGTVRTKYGTKAELERAIRSLKANGIQVYGDVVMNHKGGADFTERVQAVEVNPQNRNQEVSGTYQIEAWTGFNFPGRGNQHSSFKWRWYHFDGTDWDQSRQLANRIYKFRGDGKAWDWEVDTENGNYDYLMYADVDMDHPEVINELNRWGVWYANTLNLDGFRLDAVKHIKFSFMRDWLGHVRGQTGKNLFAVAEYWKNDLGALENYLSKTNWTMSAFDVPLHYNLYQASNSSGNYDMRNLLNGTLVFRHPSHAVTFVDNHDTQPGEALESFVQGWFKPLAYATILTREQGYPQVFYGDYYGIPSDGVPSYRQQIDPLLKARQQYAYGRQHDYFDHWDVIGWTREGNASHPNSGLATIMSDGPGGSKWMYVGRQKAGEVWHDMTGNRSGTVTINQDGWGHFFVNGGSVSVWVKR

SEQ ID NO: 44322 - protein, 480 aa, Bacillus sp.
NGTIMQYFEWNVPNDGQHWNRLHNNAQNLKNAGITAIWIPPAWKGTSQNDVGYGAYDLYDLGEFNQKGTVRTKYGTKAELERAIRSLKANGIQVYGDVVMNHKGGADFTERVQAVEVNPQNRNQEVSGTYQIEAWTGFNFPGRGNQHSSFKWRWYHFDGTDWDQSRQLANRIYKFRGDGKAWDWEVDTENGNYDYLMYADVDMDHPEVINELNRWGVWYANTLNLDGFRLDAVKHIKFSFMRDWLGHVRGQTGKNLFAVAEYWWNDLGALENYLSKTNWTMSAFDVPLHYNLYQASNSSGNYDMRNLLNGTLVQRHPSHAVTFVDNHDTQPGEALESFVQGWFKPLAYATILTREQGYPQVFYGDYYGIPSDGVPSYRQQIDPLLKARQQYAYGRQHDYFDHWDVIGWTREGNASHPNSGLATIMSDGPGGSKWMYVGRQKAGEVWHDMTGNRSGTVTINQDGWGHFFVNGGSVSVWVKR

SEQ ID NO: 44323 - protein, 480 aa, Bacillus sp.
NGTIMQYFEWNVPNDGQHWNRLHNNAQNLKNAGITAIWIPPAWKGTSQNDVGYGAYDLYDLGEFNQKGTVRTKYGTKAELERAIRSLKANGIQVYGDVVMNHKGGADFTERVQAVEVNPQNRNQEVSGTYQIEAWTGFNFPGRGNQHSSFKWRWYHFDGTDWDQSRQLANRIYKFRGDGKAWDWEVDTENGNYDYLMYADVDMDHPEVINELNRWGLWYANTLNLDGFRLDAVKHIKFSFMRDWLGHVRGQTGKNLFAVAEYWKNDLGALENYLSKTNWTMSAFDVPLHYNLYQASNSSGNYDMRNLLNGTLVQRHPSHAVTFVDNHDTQPGEALESFVQGWFKPLAYATILTREQGYPQVFYGDYYGIPSDGVPSYRQQIDPLLKARQQYAYGRQHDYFDHWDVIGWTREGNASHPNSGLATIMSDGPGGSKWMYVGRQKAGEVWHDMTGNRSGTVTINQDGWGHFFVNGGSVSVWVKR

SEQ ID NO: 44324 - protein, 480 aa, Bacillus sp.
NGTIMQYFEWNVPNDGQHWNRLHNNAQNLKNAGITAIWIPPAWKGTSQNDVGYGAYDLYDLGEFNQKGTVRTKYGTKAELERAIRSLKANGIQVYGDVVMNHKGGADFTERVQAVEVNPQNRNQEVSGTYQIEAWTGFNFPGRGNQHSSFKWRWYHFDGTDWDQSRQLANRIYKFRGDGKAWDWEVDTENGNYDYLMYADVDMDHPEVINELNRWGVWYANTLNLDGFRLDAVKHIKFSFMRDWLGHVRGQTGKNLFAVAEYWKNDLGALENYLSKTNWTMSAFDVPLHYNLYQASNSSGNYDMRNLLNGTLLQRHPSHAVTFVDNHDTQPGEALESFVQGWFKPLAYATILTREQGYPQVFYGDYYGIPSDGVPSYRQQIDPLLKARQQYAYGRQHDYFDHWDVIGWTREGNASHPNSGLATIMSDGPGGSKWMYVGRQKAGEVWHDMTGNRSGTVTINQDGWGHFFVNGGSVSVWVKR

SEQ ID NO: 44325 - protein, 480 aa, Bacillus sp.
NGTIMQYFEWNVPNDGQHWNRLHNNAQNLKNAGITAIWIPPAWKGTSQNDVGYGAYDLYDLGEFNQKGTVRTKYGTKAELERAIRSLKANGIQVYGDVVMNHKGGADFTERVQAVEVNPQNRNQEVSGTYQIEAWTGFNFPGRGNQHSSFKWRWYHFDGTDWDQSRQLANRIYKFRGDGKAWDWEVDTENGNYDYLMYADVDMDHPEVINELNRWGVWYANTLNLDGFRLDAVKHIKFSFMRDWLGHVRGQTGKNLFAVAEYWKNDLGALENYLSKTNWTMSAFDVPLHYNLYQASNSSGSYDMRNLLNGTLVQRHPSHAVTFVDNHDTQPGEALESFVQGWFKPLAYATILTREQGYPQVFYGDYYGIPSDGVPSYRQQIDPLLKARQQYAYGRQHDYFDHWDVIGWTREGNASHPNSGLATIMSDGPGGSKWMYVGRQKAGEVWHDMTGNRSGTVTINQDGWGHFFVNGGSVSVWVKR

SEQ ID NO: 44326 - protein, 480 aa, Bacillus sp.
NGTIMQYFEWNVPNDGQHWNRLHNNAQNLKNAGITAIWIPPAWKGTSQNDVGYGAYDLYDLGEFNQKGTVRTKYGTKAELERAIRSLKANGIQVYGDVVMNHKGGADFTERVQAVEVNPQTRNQEVSGTYQIEAWTGFNFPGRGNQHSSFKWRWYHFDGTDWDQSRQLANRIYKFRGDGKAWDWEVDTENGNYDYLMYADVDMDHPEVINELNRWGVWYANTLNLDGFRLDAVKHIKFSFMRDWLGHVRGQTGKNLFAVAEYWKNDLGALENYLSKTNWTMSAFDVPLHYNLYQASNSSGNYDMRNLLNGTLVQRHPSHAVTFVDNHDTQPGEALESFVQGWFKPLAYATILTREQGYPQVFYGDYYGIPSDGVPSYRQQIDPLLKARQQYAYGRQHDYFDHWDVIGWTREGNASHPNSGLATIMSDGPGGSKWMYVGRQKAGEVWHDMTGNRSGTVTINQDGWGHFFVNGGSVSVWVKR

SEQ ID NO: 44327 - protein, 480 aa, Bacillus sp.
NGTIMQYFEWNVPNDGQHWNRLHNNAQNLKNAGITAIWIPPAWKGTSQNDVGYGAYDLYDLGEFNQKGTVRTKYGTKAELERAIRSLKANGIQVYGDVVMNHKGGADFTERVQAVEVNPQNRNQEVSGTYQIEAWTGFNFPGRGNQHSSFKWRWYHFDGTDWDQSRQLANRIYKFRGDGKAWDWEVDTENGNYDYLMYADVDMDHPEVINELNRWGVWYANTLNLDGFRLDAVKHIKFSFMRDWLGHVRGQTGKNLFAVAEYWKNDLGALENYLSKTNWTMSAFDVPLHYNLYQASNSSGNYDMRNLSNGTLVQRHPSHAVTFVDNHDTQPGEALESFVQGWFKPLAYATILTREQGYPQVFYGDYYGIPSDGVPSYRQQIDPLLKARQQYAYGRQHDYFDHWDVIGWTREGNASHPNSGLATIMSDGPGGSKWMYVGRQKAGEVWHDMTGNRSGTVTINQDGWGHFFVNGGSVSVWVKR

SEQ ID NO: 44328 - protein, 480 aa, Bacillus sp.
NGTIMQYFEWNVPNDGQHWNRLHNNAQNLKNAGITAIWIPPAWKGTSQNDVGYGAYDLYDLGEFNQKGTVRTKYGTKAELERAIRSLKANGIQVYGDVVMNHKGGADFTERVQAVEVNPQNRNQEVSGTYQIEAWTGFNFPGRGNQHSSFKWRWYHFDGTDWDQSRQLANRIYKFRGDGKAWDWEVDTENGNYDYLMYADVDMDHPEVINELNRWGVWYANTLNLDGFRLDAVKHIKFSFMRDWLGHVRGQTGKNLFAVAEYWKNDLGALENYLSKTNWTMSAFDVPLHYNLYQASNSSGNYDMRNLLNGTLVQRHPSHAVTFVDNHDTQPGEALESFVQGWFKPLAYATILTREQGYPQVFYGDYYGIPSDGVPSYRVQIDPLLKARQQYAYGRQHDYFDHWDVIGWTREGNASHPNSGLATIMSDGPGGSKWMYVGRQKAGEVWHDMTGNRSGTVTINQDGWGHFFVNGGSVSVWVKR

SEQ ID NO: 44329 - protein, 480 aa, Bacillus sp.
NGTIMQYFEWNVPNDGQHWNRLHNNAQNLKNAGITAIWIPPAWKGTSQNDVGYGAYDLYDLGEFNQKGTVRTKYGTKAELERAIRSLKANGIQVYGDVVMNHKGGADFTERVQAVEVNPQNRNQEVSGTYQIEAWTGFNFPGRGNQHSSFKWRWYHFDGTDWDQSRQLANRIYKFRGDGKAWDWEVDTENGNYDYLMYADVDMDHPEVINELNRWGVWYANTLNLDGFRLDAVKHIKFSFMRDWLGHVRGQTGKNLFAVAEYWKNDLGALENYLSKTNWTMSAFDVPLHYNLYQASNSSGNYDMRNLLNGTLVQRHPSHAVTFVDNHDTQPGEALESFVQGWFKPLAYATILTREQGYPQVFYGDYYGIPSDGVPSKRQQIDPLLKARQQYAYGRQHDYFDHWDVIGWTREGNASHPNSGLATIMSDGPGGSKWMYVGRQKAGEVWHDMTGNRSGTVTINQDGWGHFFVNGGSVSVWVKR

SEQ ID NO: 44330 - protein, 480 aa, Bacillus sp.
NGTIMQYFEWNVPNDGQHWNRLHNNAQNLKNAGITAIWIPPAWKGTSQNDVGYGAYDLYDLGEFNQKGTVRTKYGTKAELERAIRSLKANGIQVYGDVVMNHKGGADFTERVQAVEVNPQNRNQEVSGTYQIEAWTGFNFPGRGNQHSSFKWRWYHFDGTDWDQSRQLANRIYKFRGDGKAWDWEVDTENGNYDYLMYADVDMDHPEVINELNRWGVWYANTLNLDGFRLDAVKHIKFSFMRDWLGWVRGQTGKNLFAVAEYWKNDLGALENYLSKTNWTMSAFDVPLHYNLYQASNSSGNYDMRNLLNGTLVQRHPSHAVTFVDNHDTQPGEALESFVQGWFKPLAYATILTREQGYPQVFYGDYYGIPSDGVPSYRQQIDPLLKARQQYAYGRQHDYFDHWDVIGWTREGNASHPNSGLATIMSDGPGGSKWMYVGRQKAGEVWHDMTGNRSGTVTINQDGWGHFFVNGGSVSVWVKR

SEQ ID NO: 44331 - protein, 480 aa, Bacillus sp.
NGTIMQYFEWNVPNDGQHWNRLHNNAQNLKNAGITAIWIPPAWKGTSQNDVGYGAYDLYDLGEFNQKGTVRTKYGTKAELERAIRSLKANGIQVYGDVVMNHKGGADFTERVQAVEVNPQNRNQEVSGTYQIEAWTGFNFPGRGNQHSSFKWRWYHFDGTDWDQSRQLANRIYKFRGDGKAWDWEVDTENGNYDYLMYADVDMDHPEVINELNRWGVWYANTLNLDGFRLDAVKHIKFSFMRDWLGHVRGQTGKNLFAVAEYWKNDLGALENYLCKTNWTMSAFDVPLHYNLYQASNSSGNYDMRNLLNGTLVQRHPSHAVTFVDNHDTQPGEALESFVQGWFKPLAYATILTREQGYPQVFYGDYYGIPSDGVPSYRQQIDPLLKARQQYAYGRQHDYFDHWDVIGWTREGNASHPNSGLATIMSDGPGGSKWMYVGRQKAGEVWHDMTGNRSGTVTINQDGWGHFFVNGGSVSVWVKR

SEQ ID NO: 44332 - protein, 480 aa, Bacillus sp.
NGTIMQYFEWNVPNDGQHWNRLHNNAQNLKNAGITAIWIPPAWKGTSQNDVGYGAYDLYDLGEFNQKGTVRTKYGTKAELERAIRSLKANGIQVYGDVVMNHKGGADFTERVQAVEVNPQNRNQEVSGTYQIEAWTGFNFPGRGNQHSSFKWRWYHFDGTDWDQSRQLANRIYKFRGDGKAWDWEVDTENGNYDYLMYADVDMDHPEVINELNRWGVWYANTLNLDGFRLDAVKHIKFSFMRDWLGHVRGQTGKNLFAVAEYWKNDLGALENYLSKTNWTMSAFDVPLHYNLYQASNSSGNYDMRNLLNGTLVQRHPSHAVTFVDNHDTQPGEALESFVQGWFKPLAYATILTREQGYPQVFYGDYYGIPSDGVPSYREQIDPLLKARQQYAYGRQHDYFDHWDVIGWTREGNASHPNSGLATIMSDGPGGSKWMYVGRQKAGEVWHDMTGNRSGTVTINQDGWGHFFVNGGSVSVWVKR

SEQ ID NO: 44333 - protein, 480 aa, Bacillus sp.
NGTIMQYFEWNVPNDGQHWNRLHNNAQNLKNAGITAIWIPPAWKGTSQNDVGYGAYDLYDLGEFNQKGTVRTKYGTKAELERAIRSLKANGIQVYGDVVMNHKGGADFTERVQAVEVNPQNRNQEVSGTYQIEAWTGFNFPGRGNQHSSFKWRWYHFDGTDWDQSRQLANRIYKFRGDGKAWDWEVDTENGNYDYLMYADVDMDHPEVINELNRWGVWYANTLNLDGFRLDAVKHIKFSFMRDWLGTVRGQTGKNLFAVAEYWKNDLGALENYLSKTNWTMSAFDVPLHYNLYQASNSSGNYDMRNLLNGTLVQRHPSHAVTFVDNHDTQPGEALESFVQGWFKPLAYATILTREQGYPQVFYGDYYGIPSDGVPSYRQQIDPLLKARQQYAYGRQHDYFDHWDVIGWTREGNASHPNSGLATIMSDGPGGSKWMYVGRQKAGEVWHDMTGNRSGTVTINQDGWGHFFVNGGSVSVWVKR

SEQ ID NO: 44334 - protein, 480 aa, Bacillus sp.
NGTIMQYFEWNVPNDGEHWNRLHNNAQNLKNAGITAIWIPPAWKGTSQNDVGYGAYDLYDLGEFNQKGTVRTKYGTKAELERAIRSLKANGIQVYGDVVMNHKGGADFTERVQAVEVNPQNRNQEVSGTYQIEAWTGFNFPGRGNQHSSFKWRWYHFDGTDWDQSRQLANRIYKFRGDGKAWDWEVDTENGNYDYLMYADVDMDHPEVINELNRWGVWYANTLNLDGFRLDAVKHIKFSFMRDWLGHVRGQTGKNLFAVAEYWKNDLGALENYLSKTNWTMSAFDVPLHYNLYQASNSSGNYDMRNLLNGTLVQRHPSHAVTFVDNHDTQPGEALESFVQGWFKPLAYATILTREQGYPQVFYGDYYGIPSDGVPSYRQQIDPLLKARQQYAYGRQHDYFDHWDVIGWTREGNASHPNSGLATIMSDGPGGSKWMYVGRQKAGEVWHDMTGNRSGTVTINQDGWGHFFVNGGSVSVWVKR

SEQ ID NO: 44335 - protein, 480 aa, Bacillus sp.
NGTIMQYFEWNVPNDGQHWNRLHNNAQNLKNAGITAIWIPPAWKGTSQNDVGYGAYDLYDLGEFNQKGTVRTKYGTKAELERAIRSLKANGIQVYGDVVMNHKGGADFTERVQAVEVNPQNRNQEVSGTYQIEAWTGFNFPGRGNQHSSFKWRWYHFDGTDWDQSRQLANRIYKFRGDGKAWDWEVDTENGNYDYLMYADVDMDHPEVINELNRWGVWYANTLNLDGFRLDAVKHIKFSFMRDWLGEVRGQTGKNLFAVAEYWKNDLGALENYLSKTNWTMSAFDVPLHYNLYQASNSSGNYDMRNLLNGTLVQRHPSHAVTFVDNHDTQPGEALESFVQGWFKPLAYATILTREQGYPQVFYGDYYGIPSDGVPSYRQQIDPLLKARQQYAYGRQHDYFDHWDVIGWTREGNASHPNSGLATIMSDGPGGSKWMYVGRQKAGEVWHDMTGNRSGTVTINQDGWGHFFVNGGSVSVWVKR

SEQ ID NO: 44336 - protein, 480 aa, Bacillus sp.
NGTIMQYFEWNVPNDGQHWNRLHNNAQNLKNAGITAIWIPPAWKGTSQNDVGYGAYDLYDLGEFNQKGTVRTKYGTKAELERAIRSLKANGIQVYGDVVMNHKGGADFTERVQAVEVNPQNRNQEVSGTYQIEAWTGFNFPGRGNQHSSFKWRWYHFDGTDWDQSRQLANRIYKFRGDGKAWDWEVDTENGNYDYLMYADVDMDHPEVINELNRWGVWYANTLNLDGFRLDAVKHIKFSFMRDWLGHVRGQTGKNLFAVAEYWKNDLGALENYLSKTNWTMSAFDVPLHYNLYQASNSSGNYDMRNLLNGTLVQRHPSHAVTFVDNHDTQPGEALESFVQGWFKPLAYATILTREQGYPQVFYGDYYGIPSDGVPSYRQQIDPLLKARQQYAYGRQHDYFDHPDVIGWTREGNASHPNSGLATIMSDGPGGSKWMYVGRQKAGEVWHDMTGNRSGTVTINQDGWGHFFVNGGSVSVWVKR

SEQ ID NO: 44337 - protein, 480 aa, Bacillus sp.
NGTIMQYFEWNVPNDGQHWNRLHNNAQNLKNAGITAIWIPPAWKGTSQNDVGYGAYDLYDLGEFNQKGTVRTKYGTKAELERAIRSLKANGIQVYGDVVMNHKGGADFTERVQAVEVNPQNRNQEVSGTYQIEAWTGFNFPGRGNQHSSFKWRWYHFDGTDWDQSRQLANRIYKFRGDGKAWDWEVDTENGNYDYLMYADVDMDHPEVINELNRWGVWYANTLNLDGFRLDAVKHIKFSFMRDWLMHVRGQTGKNLFAVAEYWKNDLGALENYLSKTNWTMSAFDVPLHYNLYQASNSSGNYDMRNLLNGTLVQRHPSHAVTFVDNHDTQPGEALESFVQGWFKPLAYATILTREQGYPQVFYGDYYGIPSDGVPSYRQQIDPLLKARQQYAYGRQHDYFDHWDVIGWTREGNASHPNSGLATIMSDGPGGSKWMYVGRQKAGEVWHDMTGNRSGTVTINQDGWGHFFVNGGSVSVWVKR

SEQ ID NO: 44338 - protein, 480 aa, Bacillus sp.
NGTIMQYFEWNVPNDGQHWNRLHNNAQNLKNAGITAIWIPPAWKGTSQNDVGYGAYDLYDLGEFNQKGTVRTKYGTKAELERAIRSLKANGIQVYGDVVMNHKGGADFTERVQAVEVNPQNRNQEVSGTYQIEAWTGFNFPGRGNQHSSFKWRWYHFDGTDWDQSRQLANRIYKFRGDGKAWDWEVDTENGNYDYLMYADFDMDHPEVINELNRWGVWYANTLNLDGFRLDAVKHIKFSFMRDWLGHVRGQTGKNLFAVAEYWKNDLGALENYLSKTNWTMSAFDVPLHYNLYQASNSSGNYDMRNLLNGTLVQRHPSHAVTFVDNHDTQPGEALESFVQGWFKPLAYATILTREQGYPQVFYGDYYGIPSDGVPSYRQQIDPLLKARQQYAYGRQHDYFDHWDVIGWTREGNASHPNSGLATIMSDGPGGSKWMYVGRQKAGEVWHDMTGNRSGTVTINQDGWGHFFVNGGSVSVWVKR

SEQ ID NO: 44339 - protein, 480 aa, Bacillus sp.
NGTIMQYFEWNVPNDGQHWNRLHNNAQNLKNAGITAIWIPPAWKGTSQNDVGYGAYDLYDLGEFNQKGTVRTKYGTKAELERAIRSLKANGIQVYGDVVMNHKGGADFTERVQAVEVNPQNRNQEVSGTYQIEAWTGFNFPGRGNQHSSFKWRWYHFDGTDWDQSRQLANRIYKFRGDGKAWDWEVDTENGNYDYLMYADVDMDHPEVINELNRWGVWYANTLNLDGFRLDAVKHIKFSFMRDWLGHVRGQTGKNLFAVAEYWKNDLGALENYLSKTNWTMSAFDVPLHYNLYQASNSSGNYDMRNLLNGTLVQRHPSHAVTFVDNHDTQPGEALESFVQGWFKPLAYATILTREQGYPQVFYGDYYGIPSDGVPSVRQQIDPLLKARQQYAYGRQHDYFDHWDVIGWTREGNASHPNSGLATIMSDGPGGSKWMYVGRQKAGEVWHDMTGNRSGTVTINQDGWGHFFVNGGSVSVWVKR

SEQ ID NO: 44340 - protein, 480 aa, Bacillus sp.
NGTIMQYFEWNVPNDGQHWNRLHNNAQNLKNAGITAIWIPPAWKGTSQNDVGYGAYDLYDLGEFNQKGTVRTKYGTKAELERAIRSLKANGIQVYGDVVMNHKGGADFTERVQAVEVNPQNRNQEVSGTYQIEAWTGFNFPGRGNQHSSFKWRWYHFDGTDWDQSRQLANRIYKFRGDGKAWDWEVDTENGNYDYLMYADVDMDHPEVINELNRWGVWYANTLNLDGFRLDAVKHIKFSFMRDWLGHVRGQTGKNLFAVAEYWKNDLGALENYLSKTNWTMSAFDVPLHYNLYQASNSSGNYDMRNLLFGTLVQRHPSHAVTFVDNHDTQPGEALESFVQGWFKPLAYATILTREQGYPQVFYGDYYGIPSDGVPSYRQQIDPLLKARQQYAYGRQHDYFDHWDVIGWTREGNASHPNSGLATIMSDGPGGSKWMYVGRQKAGEVWHDMTGNRSGTVTINQDGWGHFFVNGGSVSVWVKR

SEQ ID NO: 44341 - protein, 480 aa, Bacillus sp.
NGTIMQYFEWQVPNDGQHWNRLHNNAQNLKNAGITAIWIPPAWKGTSQNDVGYGAYDLYDLGEFNQKGTVRTKYGTKAELERAIRSLKANGIQVYGDVVMNHKGGADFTERVQAVEVNPQNRNQEVSGTYQIEAWTGFNFPGRGNQHSSFKWRWYHFDGTDWDQSRQLANRIYKFRGDGKAWDWEVDTENGNYDYLMYADVDMDHPEVINELNRWGVWYANTLNLDGFRLDAVKHIKFSFMRDWLGHVRGQTGKNLFAVAEYWKNDLGALENYLSKTNWTMSAFDVPLHYNLYQASNSSGNYDMRNLLNGTLVQRHPSHAVTFVDNHDTQPGEALESFVQGWFKPLAYATILTREQGYPQVFYGDYYGIPSDGVPSYRQQIDPLLKARQQYAYGRQHDYFDHWDVIGWTREGNASHPNSGLATIMSDGPGGSKWMYVGRQKAGEVWHDMTGNRSGTVTINQDGWGHFFVNGGSVSVWVKR

SEQ ID NO: 44342 - protein, 480 aa, Bacillus sp.
NGTIMQYFEWNVPNDGQHWNRLHNNAQNLKNAGITAIWIPPAWKGTSQNDVGYGAYDLYDLGEFNQKGTVRTKYGTKAELERAIRSLKANGIQVYGDVVMNHKGGADFTERVQAVEVNPQNRNQEVSGTYQIEAWTGFNFPGRGNQHSSFKWRWYHFDGTDWDQSRQLANRIYKFRGDGKAWDWEVDTENGNYDYLMYADVDMDHPEVINELNRWGVWYANTLNLDGFRLDAVKHIKFSFMRDWLGHVRGQTGKNLFAVAEYWKNDLGALENYLSKTNWTMSAFDVPLHYNLYQASNSSGNYDMRNLLNGTLVQRHPSHAVTFVDNHDTQPGEALESFVQGWFKPLAYATILTREQGYPQVFYGDYYGIPEDGVPSYRQQIDPLLKARQQYAYGRQHDYFDHWDVIGWTREGNASHPNSGLATIMSDGPGGSKWMYVGRQKAGEVWHDMTGNRSGTVTINQDGWGHFFVNGGSVSVWVKR

SEQ ID NO: 44343 - protein, 480 aa, Bacillus sp.
NGTIMQYFEWNVPNDGQHWNRLHNNAQNLKNAGITAIWIPPAWKGTSQNDVGYGAYDLYDLGEFNQKGTVRTKYGTKAELERAIRSLKANGIQVYGDVVMNHKGGADFTERVQAVEVNPQNRNQEVSGTYQIEAWTGFNFPGRGNQHSSFKWRWYHFDGTDWDQSRQLANRIYKFRGDGKAWDWEVDTENGNYDYLMYADVDMDHPEVINELNLWGVWYANTLNLDGFRLDAVKHIKFSFMRDWLGHVRGQTGKNLFAVAEYWKNDLGALENYLSKTNWTMSAFDVPLHYNLYQASNSSGNYDMRNLLNGTLVQRHPSHAVTFVDNHDTQPGEALESFVQGWFKPLAYATILTREQGYPQVFYGDYYGIPSDGVPSYRQQIDPLLKARQQYAYGRQHDYFDHWDVIGWTREGNASHPNSGLATIMSDGPGGSKWMYVGRQKAGEVWHDMTGNRSGTVTINQDGWGHFFVNGGSVSVWVKR

SEQ ID NO: 44344 - protein, 480 aa, Bacillus sp.
NGTIMQYFEWNVPNDGQHWNRLHNNAQNLKNAGITAIWIPPAWKGTSQNDVGYGAYDLYDLGEFNQKGTVRTKYGTKAELERAIRSLKANGIQVYGDVVMNHKGGADFTERVQAVEVNPQNRNQEVSGTYQIEAWTGFNFPGRGNQHSSFKWRWYHFDGTDWDQSRQLANRIYKFRGDGKAWDWEVDTENGNYDYLMYADXDMDHPEVINELNRWGVWYANTLNLDGFRLDAVKHIKFSFMRDWLGHVRGQTGKNLFAVAEYWXNDLGALENYLSKTNWTMSAFDVPLHYNLYQASNSSGNYDMRNLLNGTLVQRHPSHAVTFVDNHDTQPGEALESFVQGWFKPLAYATILTREQGYPQVFYGDYYGIPSDGVPSYRQQIDPLLKARQQYAYGRQHDYFDHWDVIGWTREGNASHPNSGLATIMSDGPGGSKWMYVGRQKAGEVWHDMTGNRSGTVTINQDGWGHFFVNGGSVSVWVKR

SEQ ID NO: 44345 - protein, 480 aa, Bacillus sp.
NGTIMQYFEWNVPNDGQHWNRLHNNAQNLKNAGITAIWIPPAWKGTSQNDVGYGAYDLYDLGEFNQKGTVRTKYGTKAELERAIRSLKANGIQVYGDVVMNHKGGADFTERVQAVEVNPQNRNQEVSGTYQIEAWTGFNFPGRGNQHSSFKWRWYHFDGTDWDQSRQLANRIYKFRGDGKAWDWEVDTENGNYDYLMYADVDMDHPEVINELNRWGVWYANTLNLDGFRLDAVKHIKFSFMRDWLGHVRGQTGKNLFAVAEYWKNDLGALENYLSKTNWTMSAFDVPLHYNLYQASNSSGNYDMRNLLNGTLVQRHPSHAVTFVDNHDTQPGEALESFVQGWFKPLAYATILTREQGYPQVFYGDYYGIPSDGVPSYRQQIDPLLKARQQYAYGRQHDYFDHWDVIGWTREGNASHPNSGLATIMSDGPGGSKWMYVGRQTAGEVWHDMTGNRSGTVTINQDGWGHFFVNGGSVSVWVKR

SEQ ID NO: 44346 - protein, 480 aa, Bacillus sp.
NGTIMQYFEWNVPNDGQHWNRLHNNAQNLKNAGITAIWIPPAWKGTSQNDVGYGAYDLYDLGEFNQKGTVRTKYGTKAELERAIRSLKADGIQVYGDVVMNHKGGADFTERVQAVEVNPQNRNQEVSGTYQIEAWTGFNFPGRGNQHSSFKWRWYHFDGTDWDQSRQLANRIYKFRGDGKAWDWEVDTENGNYDYLMYADVDMDHPEVINELNRWGVWYANTLNLDGFRLDAVKHIKFSFMRDWLGHVRGQTGKNLFAVAEYWKNDLGALENYLSKTNWTMSAFDVPLHYNLYQASNSSGNYDMRNLLNGTLVQRHPSHAVTFVDNHDTQPGEALESFVQGWFKPLAYATILTREQGYPQVFYGDYYGIPSDGVPSYRQQIDPLLKARQQYAYGRQHDYFDHWDVIGWTREGNASHPNSGLATIMSDGPGGSKWMYVGRQKAGEVWHDMTGNRSGTVTINQDGWGHFFVNGGSVSVWVKR

SEQ ID NO: 44347 - protein, 480 aa, Bacillus sp.
NGTIMQYFEWNVPNDGQHWNRLHNNAQNLKNAGITAIWIPPAWKGTSQNDVGYGAYDLYDLGEFNQKGTVRTKYGTKAELERAIRSLKANGIQVYGDVVMNHKGGADFTERVQAVEVNPQNRNQEVSGTYQIEAWTGFNFPGRGNQHSSFKWRWYHFDGTDWDQSRQLANRIYKFRGDGKAWDWEVDTENGNYDYLMYADVDMDHPEVINELNRWGVWYANTLNLDGFRLDAVKHIKFSFMRDWLGHVRGQTGKNLFAVAEYWKNDLGALENYLSKTNWTMSAFDVPLHYNLYQASNSSGNYDMRNLLNGTLVQRHPSHAVTFVDNHDTQPGEALESFVQGWFKPLAYATILTREQGYPQVFYGDYYGIPSDGVPSYRQQIDPLLKARQQYAYGRQHDYADHWDVIGWTREGNASHPNSGLATIMSDGPGGSKWMYVGRQKAGEVWHDMTGNRSGTVTINQDGWGHFFVNGGSVSVWVKR

SEQ ID NO: 44348 - protein, 480 aa, Bacillus sp.
NGTIMQYFEWNGPNDGQHWNRLHNNAQNLKNAGITAIWIPPAWKGTSQNDVGYGAYDLYDLGEFNQKGTVRTKYGTKAELERAIRSLKANGIQVYGDVVMNHKGGADFTERVQAVEVNPQNRNQEVSGTYQIEAWTGFNFPGRGNQHSSFKWRWYHFDGTDWDQSRQLANRIYKFRGDGKAWDWEVDTENGNYDYLMYADVDMDHPEVINELNRWGVWYANTLNLDGFRLDAVKHIKFSFMRDWLGHVRGQTGKNLFAVAEYWKNDLGALENYLSKTNWTMSAFDVPLHYNLYQASNSSGNYDMRNLLNGTLVQRHPSHAVTFVDNHDTQPGEALESFVQGWFKPLAYATILTREQGYPQVFYGDYYGIPSDGVPSYRQQIDPLLKARQQYAYGRQHDYFDHWDVIGWTREGNASHPNSGLATIMSDGPGGSKWMYVGRQKAGEVWHDMTGNRSGTVTINQDGWGHFFVNGGSVSVWVKR

SEQ ID NO: 44349 - protein, 480 aa, Bacillus sp.
NGTIMQYFEWNVPNDGQHWNRLHNNAQNLKNAGITAIWIPPAWKGTSQNDVGYGAYDLYDLGEFNQKGTVRTKYGTKAELERAIRSLKANGIQVYGDVVMNHKGGADFTERVQAVEVNPQNRNQEVSGTYQIEAWTGFNFPGRGNQHSSFKWRWYHFDGTDWDQSRQLANRIYKFRGDGKAWDWEVDTENGNYDYLMYADVDMDHPEVINELNRWGVWYANTLNLDGFRLDAVKHIKFSFMRDWLGHVRGQTGKNLFAVAEYWKNDLGALENYLSKTNWTMSAFDVPLHYNLYQASNSSGNYDMRNLLNGTLVQRHPSHAVTFVDNHDTQPGEALESFVQGWFKPLAYATILTREQGYPQVFYGDYYGIPSDGVPSYRQQIDPLLKARQQYAYGRQHDYFDHWDVIGWTREGNASHPNSGLATIMSDGPGGSKWMYVGRQKAGEVWHDQTGNRSGTVTINQDGWGHFFVNGGSVSVWVKR

SEQ ID NO: 44350 - protein, 480 aa, Bacillus sp.
NGTIMQYFEWNVPNDGQHWNRLHNNAQNLKNAGITAIWIPPAWKGTSQNDVGYGAYDLYDLGEFNQKGTVRTKYGTKAELERAIRSLKANGIQVYGDVVMNHKGGADFTERVQAVEVNPQNRNQEVSGTYQIEAWTGFNFPGRGNQHSSFKWRWYHFDGTDWDQSRQLANRIYKFRGDGKAWDWEVDTENGNYDYLMYADVDMDHPEVINELNRWGVWYANTLNLDGFRLDAVKHIKFSFMRDWLGVVRGQTGKNLFAVAEYWKNDLGALENYLSKTNWTMSAFDVPLHYNLYQASNSSGNYDMRNLLNGTLVQRHPSHAVTFVDNHDTQPGEALESFVQGWFKPLAYATILTREQGYPQVFYGDYYGIPSDGVPSYRQQIDPLLKARQQYAYGRQHDYFDHWDVIGWTREGNASHPNSGLATIMSDGPGGSKWMYVGRQKAGEVWHDMTGNRSGTVTINQDGWGHFFVNGGSVSVWVKR

SEQ ID NO: 44351 - protein, 480 aa, Bacillus sp.
NGTIMQYFEWNVPNDGQHWNRLHNNAQNLKNAGITAIWIPPAWKGTSQNDVGYGAYDLYDLGEFNQKGTVRTKYGTKAELERAIRSLKANGIQVYGDVVMNHKGGADFTERVQAVEVNPQNRNQEVSGTYQIEAWTGFNFPGRGNQHSSFKWRWYHFDGTDWDQSRQLANRIYKFRGDGKAWDWEVDTENGNYDYLMYADVDMDHPEVINELNRWGVWYANTLNLDGFRLDAVKHIKFSFMRDWLGHVRGQTGKNLFAVAEYWKNDLGALENYLSKTNWTMSAFDVPLHYNLYQASNSSGNYDMRNLLNGTLVQRHPSHAVTFVDNHDTQPGEALESFVQGWFKPLAYATILTREQGYPQVFYGDYYGIPSDGVPSYRQQIDPLLKARQQYAYGMQHDYFDHWDVIGWTREGNASHPNSGLATIMSDGPGGSKWMYVGRQKAGEVWHDMTGNRSGTVTINQDGWGHFFVNGGSVSVWVKR

SEQ ID NO: 44352 - protein, 480 aa, Bacillus sp.
NGTIMQYFEWNVPNDGQHWNRLHNNAQNLKNAGITAIWIPPAWKGTSQNDVGYGAYDLYDLGEFNQKGTVRTKYGTKAELERAIRSLKANGIQVYGDVVMNHKGGADFTERVQAVEVNPQNRNQEVSGTYQIEAWTGFNFPGRGNQHSSFKWRWYHFDGTDWDQSRQLANRIYKFRGDGKAWDWEVDTENGNYDYLMYADVDMDHPEVINELNRWGVWYANTLNLDGFRLDAVKHIKFSFMRDWLGHVRGQTGKNLFAVAEYWLNDLGALENYLSKTNWTMSAFDVPLHYNLYQASNSSGNYDMRNLLNGTLVQRHPSHAVTFVDNHDTQPGEALESFVQGWFKPLAYATILTREQGYPQVFYGDYYGIPSDGVPSYRQQIDPLLKARQQYAYGRQHDYFDHWDVIGWTREGNASHPNSGLATIMSDGPGGSKWMYVGRQKAGEVWHDMTGNRSGTVTINQDGWGHFFVNGGSVSVWVKR

SEQ ID NO: 44353 - protein, 480 aa, Bacillus sp.
NGTIMQYFEWNVPSDGQHWNRLHNNAQNLKNAGITAIWIPPAWKGTSQNDVGYGAYDLYDLGEFNQKGTVRTKYGTKAELERAIRSLKANGIQVYGDVVMNHKGGADFTERVQAVEVNPQNRNQEVSGTYQIEAWTGFNFPGRGNQHSSFKWRWYHFDGTDWDQSRQLANRIYKFRGDGKAWDWEVDTENGNYDYLMYADVDMDHPEVINELNRWGVWYANTLNLDGFRLDAVKHIKFSFMRDWLGHVRGQTGKNLFAVAEYWKNDLGALENYLSKTNWTMSAFDVPLHYNLYQASNSSGNYDMRNLLNGTLVQRHPSHAVTFVDNHDTQPGEALESFVQGWFKPLAYATILTREQGYPQVFYGDYYGIPSDGVPSYRQQIDPLLKARQQYAYGRQHDYFDHWDVIGWTREGNASHPNSGLATIMSDGPGGSKWMYVGRQKAGEVWHDMTGNRSGTVTINQDGWGHFFVNGGSVSVWVKR

SEQ ID NO: 44354 - protein, 480 aa, Bacillus sp.
NGTIMQYFEWNVPNDGQHWNRLHNNAQNLKNAGITAIWIPPAWKGTSQNDVGYGAYDLYDLGEFNQKGTVRTKYGTKAELERAIRSLKANGIQVYGDVVMNHKGGADFTERVQAVEVNPQNRNQEVSGTYQIEAWTGFNFPGRGNQHSSFKWRWYHFDGTDWDQSRCLANRIYKFRGDGKAWDWEVDTENGNYDYLMYADVDMDHPEVINELNRWGVWYANTLNLDGFRLDAVKHIKFSFMRDWLGHVRGQTGKNLFAVAEYWKNDLGALENYLSKTNWTMSAFDVPLHYNLYQASNSSGNYDMRNLLNGTLVQRHPSHAVTFVDNHDTQPGEALESFVQGWFKPLAYATILTREQGYPQVFYGDYYGIPSDGVPSYRQQIDPLLKARQQYAYGRQHDYFDHWDVIGWTREGNASHPNSGLATIMSDGPGGSKWMYVGRQKAGEVWHDMTGNRSGTVTINQDGWGHFFVNGGSVSVWVKR

SEQ ID NO: 44355 - protein, 480 aa, Bacillus sp.
NGTIMQYFEWNVPNDGQHWNRLHNNAQNLKNAGITAIWIPPAWKGTSQIDVGYGAYDLYDLGEFNQKGTVRTKYGTKAELERAIRSLKANGIQVYGDVVMNHKGGADFTERVQAVEVNPQNRNQEVSGTYQIEAWTGFNFPGRGNQHSSFKWRWYHFDGTDWDQSRQLANRIYKFRGDGKAWDWEVDTENGNYDYLMYADVDMDHPEVINELNRWGVWYANTLNLDGFRLDAVKHIKFSFMRDWLGHVRGQTGKNLFAVAEYWKNDLGALENYLSKTNWTMSAFDVPLHYNLYQASNSSGNYDMRNLLNGTLVQRHPSHAVTFVDNHDTQPGEALESFVQGWFKPLAYATILTREQGYPQVFYGDYYGIPSDGVPSYRQQIDPLLKARQQYAYGRQHDYFDHWDVIGWTREGNASHPNSGLATIMSDGPGGSKWMYVGRQKAGEVWHDMTGNRSGTVTINQDGWGHFFVNGGSVSVWVKR

SEQ ID NO: 44356 - protein, 480 aa, Bacillus sp.
NGTIMQYFEWNVPNDGQHWNRLHNNAQNLKNAGITAIWIPPAWKGTSQNDVGYGAYDLYDLGEFNQKGTVRTKYGTKAELERAIRSLKANGIQVYGDVVMNHKGGADFTERVQAVEVNPQNRNQEVSGTYQIEAWTGFNFPGRGNQHSSFKWRWYHFDGTDWDQSRQLANRIYKFRGDGKAWDWEVDTENGNYDYLMYADVDMDHPEVINELNRWGVWYANTLNLDGFRLDAVKHIKFSFMRDWLGHVRGQTGKNLFAVAEYWKNDLGALENYLSKTNWTMSAFDVPLHYNLYQASNSSGNYDMRNLLNGTLVQRHPSHAVTFVDNHDTQPGEALPSFVQGWFKPLAYATILTREQGYPQVFYGDYYGIPSDGVPSYRQQIDPLLKARQQYAYGRQHDYFDHWDVIGWTREGNASHPNSGLATIMSDGPGGSKWMYVGRQKAGEVWHDMTGNRSGTVTINQDGWGHFFVNGGSVSVWVKR

SEQ ID NO: 44357 - protein, 480 aa, Bacillus sp.
NGTIMQYFEWNVPNDGQHWNRLHNNAQNLKNAGITAIWIPPAWKGTSQNDVGYGAYDLYDLGEFNQKGTVRTKYGTKAELERAIRSLKANGIQVYGDVVMNHKGGADFTERVQAVEVNPQNRNQEVSGTYQIEAWTGFNFPGRGNQHSSFKWRWYHFDGTDWDQSRQLANRIYKFRGDGKAWDWEVDTENGNYDYLMYADVDMDHPEVINELNRWGVWYANTLNLDGFRLDAVKHIKFSFMRDWLGHVRGQTGKNLFAVAEYWKNDLGALENYLSKTNITMSAFDVPLHYNLYQASNSSGNYDMRNLLNGTLVQRHPSHAVTFVDNHDTQPGEALESFVQGWFKPLAYATILTREQGYPQVFYGDYYGIPSDGVPSYRQQIDPLLKARQQYAYGRQHDYFDHWDVIGWTREGNASHPNSGLATIMSDGPGGSKWMYVGRQKAGEVWHDMTGNRSGTVTINQDGWGHFFVNGGSVSVWVKR

SEQ ID NO: 44358 - protein, 480 aa, Bacillus sp.
NGTIMQYFEWNVPNDGQHWNRLHNNAQNLKNAGITAIWIPPAWKGTSQNDVGYGAYDLYDLGEFNQKGTVRTKYGTKAELERAIRSLKANGIQVYGDVVMNHKGGADFTERVQAVEVNPQNRNQEVSGTYQIEAWTGFNFPGRGNQHSSFKWRWYHFDGTDWDQSRQLANRIYKFRGDGKAWDWEVDTENGNYDYLMYADVDMDHPEVINELNRWGVWYANTLNLDGFRLDAVKHIKFSFMRDWLGHVRGQTGKNLFAVAEYWKNDLGALENYLSKTNGTMSAFDVPLHYNLYQASNSSGNYDMRNLLNGTLVQRHPSHAVTFVDNHDTQPGEALESFVQGWFKPLAYATILTREQGYPQVFYGDYYGIPSDGVPSYRQQIDPLLKARQQYAYGRQHDYFDHWDVIGWTREGNASHPNSGLATIMSDGPGGSKWMYVGRQKAGEVWHDMTGNRSGTVTINQDGWGHFFVNGRSVSVWVKR

SEQ ID NO: 44359 - protein, 480 aa, Bacillus sp.
NGTIMQYFEWNVPNDGQHWNRLHNNAQNLKNAGITAIWIPPAWKGTSQNDVGYGAYDLYDLGEFNQKGTVRTKYGTKAELERAIRSLKANGIQVYGDVVMNHKGGADFTERVQAVEVNPQNRNQEVSGTYQIEAWTGFNFPGRGNQHSSFKWRWYHFDGTDWDQSRQLANRIYKFRGDGKAWDWEVDTENGNYDYLMYADVDMDHPEVINELNRWGVWYANTLNLDGFRLDAVKHIKFSFMRDWLGHVRGQTGKNLFAVAEYWKNDLGALENYLSKTNWTMSAFDVPLHYNLYQASNSSGNYDMRNLLNGTLVQRHPSHAVTFVDNHDTQPGEALESFVQGWFKPLAYATILTREPGYPQVFYGDYYGIPSDGVPSYRQQIDPLLKARQQYAYGRQHDYFDHWDVIGWTREGNASHPNSGLATIMSDGPGGSKWMYVGRQKAGEVWHDMTGNRSGTVTINQDGWGHFFVNGGSVSVWVKR

SEQ ID NO: 44360 - protein, 480 aa, Bacillus sp.
NGTIMQYFEWNVPNDGQHWNRLHNNAQNLKNAGITAIWIPPAWKGTSQNDVGYGAYDLYDLGEFNQKGTVRTKYGTKAELERAIRSLKANGIQVYGDVVMNHKGGADFTERVQAVEVNPQNRNQEVSGTYQIEAWTGFNFPGRGNQHSSFKWRWYHFDGTDWDQSRQLANRIYKFRGDGKAWDWEVDTENGNYDYLMYADVDMDHPEVINELNRWGVWYANTLNLDGFRLDAVKHIKFSFMRDWLGHVRGQTGKNLFAVAEYWKNDLGALENYLSKTNWTMSAFDVPLHYNLYQASNSSGNYDMRNLLNGTLVQRHPSHAVTFVDNHDTQPGEALISFVQGWFKPLAYATILTREQGYPQVFYGDYYGIPSDGVPSYRQQIDPLLKARQQYAYGRQHDYFDHWDVIGWTREGNASHPNSGLATIMSDGPGGSKWMYVGRQKAGEVWHDMTGNRSGTVTINQDGWGHFFVNGGSVSVWVKR

SEQ ID NO: 44361 - protein, 480 aa, Bacillus sp.
NGTIMQYFEWNVPNDGQHWNRLHNNAQNLKNAGITAIWIPPAWKGTSQNDVGYGAYDLYDLGEFNQKGTVRTKYGTKAELERAIRSLKANGIQVYGDVVMNHKGGADFTERVQAVEVNPQNRNQEVSGTYQIEAWTGFNFPGRGNQHSSFKWRWYHFDGTDWDQSRQLANRIYKFRGDGKAWDWEVDTENGNYDYLMYADVDMDHPEVINELNRWGVWYANTLNLDGFRLDAVKHIKFSFMRDWLGHVRGQTGKNLFAVAEYWKNDLGALENYLSKTNWTMSAFDVPLHYNLYQASNSSGNYDMRNLLNGTLVQRHPSHAVTFVDNHDTQPGEALESFVQGWFKPLAYATILTREQGYPQVFYGDYYGIPSSGVPSYRQQIDPLLKARQQYAYGRQHDYFDHWDVIGWTREGNASHPNSGLATIMSDGPGGSKWMYVGRQKAGEVWHDMTGNRSGTVTINQDGWGHFFVNGGSVSVWVKR

SEQ ID NO: 44362 - protein, 480 aa, Bacillus sp.
NGTIMQYFEWNVPNDGQHWNRLHNNAQNLKNAGITAIWIPPAWKGTSQNDVGYGAYDLYDLGEFNQKGTVRTKYGTKAELERAIRSLKANGIQVYGDVVMNHKGGADFTERVQAVEVNPQNRNQEVSGTYQIEAWTGFNFPGRGNQHSSFKWRWYHFDGTDWDQSRQLANRIYKFRGDGKAWDWEVDTENGNYDYLMYADVDMDHPEVINELNRWGVWYANTLNLDGFRLDAVKHIKFSFMRDWLGHVRGQTGKNLFAVAEYWKNDLGALENYLSKTNWTMSAFDVPLHYNLYQASNSFGNYDMRNLLNGTLVQRHPSHAVTFVDNHDTQPGEALESFVQGWFKPLAYATILTREQGYPQVFYGDYYGIPSDGVPSYRQQIDPLLKARQQYAYGRQHDYFDHWDVIGWTREGNASHPNSGLATIMSDGPGGSKWMYVGRQKAGEVWHDMTGNRSGTVTINQDGWGHFFVNGGSVSVWVKR

SEQ ID NO: 44363 - protein, 480 aa, Bacillus sp.
NGTIMQYFEWNVPNDGQHWNRLHNNAQNLKNAGITAIWIPPAWKGTSQNDVGYGAYDLYDLGEFNQKGTVRTKYGTKAELERAIRSLKANGIQVYGDVVMNHKGGADFTERVQAVEVNPQNRNQEVSGTYQIEAWTGFNFPGRGNQHSSFKWRWYHFDGTDWDQSRQLANRIYKFRGDGKAWDWEVDTENGNYDYLMYADSDMDHPEVINELNRWGVWYANTLNLDGFRLDAVKHIKFSFMRDWLGHVRGQTGKNLFAVAEYWKNDLGALENYLSKTNWTMSAFDVPLHYNLYQASNSSGNYDMRNLLNGTLVQRHPSHAVTFVDNHDTQPGEALESFVQGWFKPLAYATILTREQGYPQVFYGDYYGIPSDGVPSYRQQIDPLLKARQQYAYGRQHDYFDHWDVIGWTREGNASHPNSGLATIMSDGPGGSKWMYVGRQKAGEVWHDMTGNRSGTVTINQDGWGHFFVNGGSVSVWVKR

SEQ ID NO: 44364 - protein, 480 aa, Bacillus sp.
NGTIMQYFEWNVPNDGQHWNRLHNNAQNLKNTGITAIWIPPAWKGTSQNDVGYGAYDLYDLGEFNQKGTVRTKYGTKAELERAIRSLKANGIQVYGDVVMNHKGGADFTERVQAVEVNPQNRNQEVSGTYQIEAWTGFNFPGRGNQHSSFKWRWYHFDGTDWDQSRQLANRIYKFRGDGKAWDWEVDTENGNYDYLMYADVDMDHPEVINELNRWGVWYANTLNLDGFRLDAVKHIKFSFMRDWLGHVRGQTGKNLFAVAEYWKNDLGALENYLSKTNWTMSAFDVPLHYNLYQASNSSGNYDMRNLLNGTLVQRHPSHAVTFVDNHDTQPGEALESFVQGWFKPLAYATILTREQGYPQVFYGDYYGIPSDGVPSYRQQIDPLLKARQQYAYGRQHDYFDHWDVIGWTREGNASHPNSGLATIMSDGPGGSKWMYVGRQKAGEVWHDMTGNRSGTVTINQDGWGHFFVNGGSVSVWVKR

SEQ ID NO: 44365 - protein, 480 aa, Bacillus sp.
NGTIMQYFEWNVPNDGQHWNRLHNNAQNLKNAGITAIWIPPAWKGTSQNDVGYGAYDLYDLGEFNQKGTVRTKYGTKAELERAIRSLKANGIQVYGDVVMNHKGGADFTEQVQAVEVNPQNRNQEVSGTYQIEAWTGFNFPGRGNQHSSFKWRWYHFDGTDWDQSRQLANRIYKFRGDGKAWDWEVDTENGNYDYLMYADVDMDHPEVINELNRWGVWYANTLNLDGFRLDAVKHIKFSFMRDWLGHVRGQTGKNLFAVAEYWKNDLGALENYLSKTNWTMSAFDVPLHYNLYQASNSSGNYDMRNLLNGTLVQRHPSHAVTFVDNHDTQPGEALESFVQGWFKPLAYATILTREQGYPQVFYGDYYGIPSDGVPSYRQQIDPLLKARQQYAYGRQHDYFDHWDVIGWTREGNASHPNSGLATIMSDGPGGSKWMYVGRQKAGEVWHDMTGNRSGTVTINQDGWGHFFVNGGSVSVWVKR

SEQ ID NO: 44366 - protein, 480 aa, Bacillus sp.
NGTIMQYFEWNVPNDGQHWNRLHNNAQNLKNAGITAIWIPPAWKGTSQNDVGYGAYDLYDLGEFNQKGTVRTKYGTKAELERAIRSLKANGIQVYGDVVMNHKGGADFTERVQAVEVNPQNRNQEVSGTYQIEAWTGFNFPGRGNQHSSFKWRWYHFDGTDWDQSRQLANRIYKFRGDGKAWDWEVDTENGNYDYLMYADVDMDHPEVINELNRWGEWYANTLNLDGFRLDAVKHIKFSFMRDWLGHVRGQTGKNLFAVAEYWKNDLGALENYLSKTNWTMSAFDVPLHYNLYQASNSSGNYDMRNLLNGTLVQRHPSHAVTFVDNHDTQPGEALESFVQGWFKPLAYATILTREQGYPQVFYGDYYGIPSDGVPSYRQQIDPLLKARQQYAYGRQHDYFDHWDVIGWTREGNASHPNSGLATIMSDGPGGSKWMYVGRQKAGEVWHDMTGNRSGTVTINQDGWGHFFVNGGSVSVWVKR

SEQ ID NO: 44367 - protein, 480 aa, Bacillus sp.
NGTIMQYFEWNVPNDGQHWNRLHNNAQNLKNAGITAIWIPPAWKGTSQNDVGYGAYDLYDLGEFNQKGTVRTKYGTKAELERAIRSLKANGIQVYGDVVMNHKGGADFTERVQAVEVNPQNRNQEVSGTYQIEAWTGFNFPGRGNQHSSFKWRWYHFDGTDWDQSRQLANRIYKFRGDGKAWDWEVDTENGNYDYLMYADVDMDHPEVINELNRWGVWYANTLNLDGFRLDAVKHIKFSFMRDWLGHVRGQTGKNLFAVAEYWKNDLGALENYLSKTNWTMSAFDVPLHYNLYQASNSSGNYDMRNLLNGTLVQRHPSHAVTFVDNHDTQPGEALESFVQGWFKPLAYATILTREQGYPTVFYGDYYGIPSDGVPSYRQQIDPLLKARQQYAYGRQHDYFDHWDVIGWTREGNASHPNSGLATIMSDGPGGSKWMYVGRQKAGEVWHDMTGNRSGTVTINQDGWGHFFVNGGSVSVWVKR

SEQ ID NO: 44368 - protein, 480 aa, Bacillus sp.
NGTIMQYFEWNVPNDGQHWNRLHNNAQNLKNAGITAIWIPPAWKGTSQNDVGYGAYDLYDLGEFNQKGTVRTKYGTKAELERAIRSLKANGIQVYGDVVMNHKGGADFTERVQAVEVNPQNRNQEVSGTYQIEAWTGFNFPGRGNQHSSFKWRWYHFDGTDWDQSRQLANRIYKFRGDGKAWDWEVDTENGNYDYLMYADVDMDHPEVINELNRWGVWYANTLNLDGFRLDAVKHIKFSFMRDWLGHVRGQTGKNLFAVAEYWKDDLGALENYLSKTNWTMSAFDVPLHYNLYQASNSSGNYDMRNLLNGTLVQRHPSHAVTFVDNHDTQPGEALESFVQGWFKPLAYATILTREQGYPQVFYGDYYGIPSDGVPSYRQQIDPLLKARQQYAYGRQHDYFDHWDVIGWTREGNASHPNSGLATIMSDGPGGSKWMYVGRQKAGEVWHDMTGNRSGTVTINQDGWGHFFVNGGSVSVWVKR

SEQ ID NO: 44369 - protein, 480 aa, Bacillus sp.
NGTIMQYFEWNVPNDGQHWNRLHNNAQNLKNAGITAIWIPPAWKGTSQNDVGYGAYDLYDLGEFNQKGTVRTKYGTKAELERAIRSLKANGIQVYGDVVMNHKGGADFTEDVQAVEVNPQNRNQEVSGTYQIEAWTGFNFPGRGNQHSSFKWRWYHFDGTDWDQSRQLANRIYKFRGDGKAWDWEVDTENGNYDYLMYADVDMDHPEVINELNRWGVWYANTLNLDGFRLDAVKHIKFSFMRDWLGHVRGQTGKNLFAVAEYWKNDLGALENYLSKTNWTMSAFDVPLHYNLYQASNSSGNYDMRNLLNGTLVQRHPSHAVTFVDNHDTQPGEALESFVQGWFKPLAYATILTREQGYPQVFYGDYYGIPSDGVPSYRQQIDPLLKARQQYAYGRQHDYFDHWDVIGWTREGNASHPNSGLATIMSDGPGGSKWMYVGRQKAGEVWHDMTGNRSGTVTINQDGWGHFFVNGGSVSVWVKR

SEQ ID NO: 44370 - protein, 480 aa, Bacillus sp.
NGTIMQYFEWNVPNDGQHWNRLHNNAQNLKNAGITAIWIPPAWKGTSQNDVGYGAYDLYDLGEFNQKGTVRTKYGTKAELERAIRSLKANGIQVYGDVVMNHKGGADFTERVQAVEVNPQNRNQEVSGTYQIEAWTGFNFPGRGNQHSSFKWRWYHFDGTDWDQSRQLANRIYKFRGDGKAWDWEVDTENGNYDYLMYADVDMDHPEVINELNRWGVWYANTLNLDGFRLDAVKHIKFSFMRDWLGHVRGQTGKNLFAVAEYWKNDLGALENYLSKTNWTMSAFDVPLHYNLYQASNSSGNYDMRNLLNGTLVQRHPSHAVTFVDNHDTQPGEALESFVQGWFKPLAYATILTREQGYPQVFYGDYYGIPSDGVPSYRQQIDPLLKARQSYAYGRQHDYFDHWDVIGWTREGNASHPNSGLATIMSDGPGGSKWMYVGRQKAGEVWHDMTGNRSGTVTINQDGWGHFFVNGGSVSVWVKR

SEQ ID NO: 44371 - protein, 480 aa, Bacillus sp.
NGTIMQYFEWNVPNDGQHWNRLHNNAQNLKNAGITAIWIPPAWKGTSQNDVGYGAYDLYDLGEFNQKGTVRTKYGTKAELERAIRSLKANGIQVYGDVVMNHKGGADFTERVQAVEVNPQNRNQEVSGTYQIEAWTGFNFPGRGNQHSSFKWRWYHFDGTDWDQSRQLANRIYKFRGDGKAWDWEVDTENGNYDYLMYADVDMDHPEVINELNRWGVWYANTLNLDGFRLDAVKHIKFSFMRDWLGHVRGQTGKNLFAVAEYWKNDLGALENYLSKTNWTMSAFDVPLHYNLYQASNSSGNYDMRNLLNGTLVQRHPSHAVTFVDNHDTQPGEALESFVQGWFKPLAYATILTREQGYPQVFYGDYYGIPSDGVPSYRQQIDPLLKARQQYAYGRQHDYFDHWDVIGWTREGNASHPNSGLATIMSDGPGGSKWMYVGRQKAGEVWGDMTGNRSGTVTINQDGWGHFFVNGGSVSVWVKR

SEQ ID NO: 44372 - protein, 480 aa, Bacillus sp.
NGTIMQYFEWNVPNDGQHWNRLHNNAQNLKNAGITAIWIPPAWKGTSQNDVGYGAYDLYDLGEFNQKGTVRTKYGTKAELERAIRSLKANGIQVYGDVVMNHKGGADFTERVQAVEVNPQNRNQEVSGTYQIEAWTGFNFPGRGNQHSSFKWRWYHFDGTDWDQSRQLANRIYKFRGDGKAWDWEVDTENGNYDYLMYADVDMDHPEVINELNRWGVWYANTLNLDGFRLDAVKHIKFSFMYDWLGHVRGQTGKNLFAVAEYWKNDLGALENYLSKTNWTMSAFDVPLHYNLYQASNSSGNYDMRNLLNGTLVQRHPSHAVTFVDNHDTQPGEALESFVQGWFKPLAYATILTREQGYPQVFYGDYYGIPSDGVPSYRQQIDPLLKARQQYAYGRQHDYFDHWDVIGWTREGNASHPNSGLATIMSDGPGGSKWMYVGRQKAGEVWHDMTGNRSGTVTINQDGWGHFFVNGGSVSVWVKR

SEQ ID NO: 44373 - protein, 480 aa, Bacillus sp.
NGTIMQYFEWNVPNDGQHWNRLHNNAQNLKNAGITAIWIPPAWKGTSQNDVGYGAYDLYDLGEFNQKGTVRTKYGTKAELERAIRSLKANGIQVYGDVVMNHKGGADFTERVQAVEVNPQNRNQEVSGTYQIEAWTGFNFPGRGNQHSSFKWRWYHFDGTDWDQSRQLANRIYKFRGDGKAWDWEVDTENGNYDYLMYADVDMDHPEVINELNRWGVWYANTLNLDGFRLDAVKHIKFSFMRDWLGHVRGQTGKNLFAVAEYWKNDLGALENYLSKTNWTMSAFDVPLHFNLYQASNSSGNYDMRNLLNGTLVQRHPSHAVTFVDNHDTQPGEALESFVQGWFKPLAYATILTREQGYPQVFYGDYYGIPSDGVPSYRQQIDPLLKARQQYAYGRQHDYFDHWDVIGWTREGNASHPNSGLATIMSDGPGGSKWMYVGRQKAGEVWHDMTGNRSGTVTINQDGWGHFFVNGGSVSVWVKR

SEQ ID NO: 44374 - protein, 480 aa, Bacillus sp.
NGTIMQYFEWNVPNDGQHWNRLHNNAQNLKNAGITAIWIPPAWKGTSQNDVGYGAYDLYDLGEFNQKGTVRTKYGTKAELERAIRSLKANGIQVYGDVVMNHKGGADFTERVQAVEVNPQNRNQEVSGTYQIEAWTGFNFPGRGNQHSSFKWRWYHFDGTDWDQSRQLANRIYKFRGDGKAWDWEVDTENGNYDYLMYADVDMDHPEVINELNRWGVWYANTLNLDGFRLDAVKHIKFSFMRDWLGHVRGQTGKNLFAVAEYWKNDLGALENYLSKTNWTMSAFDVPLHYNLYQASNSSGNYDMRNLLNGTLVQRHPSHAVTFVDNHDTQPGEALESFVQGWFKPLAYATILTREQGYPMVFYGDYYGIPSDGVPSYRQQIDPLLKARQQYAYGRQHDYFDHWDVIGWTREGNASHPNSGLATIMSDGPGGSKWMYVGRQKAGEVWHDMTGNRSGTVTINQDGWGHFFVNGGSVSVWVKR

SEQ ID NO: 44375 - protein, 480 aa, Bacillus sp.
NGTIMQYFEWNVPNDGQHWNRLHNNAQNLKNAGITAIWIPPAWKGTSQNDVGYGAYDLYDLGEFNQKGTVRTKYGTKAELERAIRSLKANGIQVYGDVVMNHKGGADFTERVQAVEVNPQNRNQEVSGTYQIEAWTGFNFPGRGNQHSSFKWRWYHFDGTDWDQSRQLANRIYKFRGDGKAWDWEVDTENGNYDYLMYADVDMDHPEVINELNRWGVWYANTLNLDGFRLDAVKHIKFSFMRDWLGHVRGQTGKNLFAVAEYWKNDLGALENYLSKTNWTMSAFDVPLHYNLYQASNSSGNYDMRNLLNGTLVQRHPSHAVTFVDNHDTQPGEALESFVQGWFKPLAYATILTREQGYPQVFYGDYYGIPSDGVPSARQQIDPLLKARQQYAYGRQHDYFDHWDVIGWTREGNASHPNSGLATIMSDGPGGSKWMYVGRQKAGEVWHDMTGNRSGTVTINQDGWGHFFVNGGSVSVWVKR

SEQ ID NO: 44376 - protein, 480 aa, Bacillus sp.
NGTIMQYFEWNVPNDGQHWNRLHNNAQNLKNAGITAIWIPPAWKGTSQNDVGYGAYDLYDLGEFNQKGTVRTKYGTKAELERAIRSLKANGIQVYGDVVMNHKGGADFTERVQAVEVNPQNRNQEVSGTYQIEAWTGFNFPGRGNQHSSFKWRWYHFDGTDWDQSRQLANRIYKFRGDGKAWDWEVDTENGNYDYLMYADVDMDHPEVINELNRWGVWYANTLNLDGFRLDAVKHIKFSFMRDWLGHVRGQTGKNLFAVAEYWKNDLGALENYLSKTNWTMSAFDVPLHYNLYQASNSSGNYDMRNLLNGTLVQRHPSHAVTFVDNHDTQPGEALESFVQGWFKPLAYATILTREQGYPQVFYGDYYGIPSDGVPSYRQQIDPLLKARQQYAYGRQHDYFDHWDVIGWTREGNLSHPNSGLATIMSDGPGGSKWMYVGRQKAGEVWHDMTGNRSGTVTINQDGWGHFFVNGGSVSVWVKR

SEQ ID NO: 44377 - protein, 480 aa, Bacillus sp.
NGTIMQYFEWNVPNDGQHWNRLHNNAQNLKNAGITAIWIPPAWKGTSQNDVGYGAYDLYDLGEFNQKGTVRTKYGTKAELERAIRGLKANGIQVYGDVVMNHKGGADFTERVQAVEVNPQNRNQEVSGTYQIEAWTGFNFPGRGNQHSSFKWRWYHFDGTDWDQSRQLANRIYKFRGDGKAWDWEVDTENGNYDYLMYADVDMDHPEVINELNRWGVWYANTLNLDGFRLDAVKHIKFSFMRDWLGHVRGQTGKNLFAVAEYWKNDLGALENYLSKTNWTMSAFDVPLHYNLYQASNSSGNYDMRNLLNGTLVQRHPSHAVTFVDNHDTQPGEALESFVQGWFKPLAYATILTREQGYPQVFYGDYYGIPSDGVPSYRQQIDPLLKARQQYAYGRQHDYFDHWDVIGWTREGNASHPNSGLATIMSDGPGGSKWMYVGRQKAGEVWHDMTGNRSGTVTINQDGWGHFFVNGGSVSVWVKR

SEQ ID NO: 44378 - protein, 480 aa, Bacillus sp.
NGTIMQYFEWNVPNDGQHWNRLHNNAQNLKNAGITAIWIPPAWKGTSQNDVGYGAYDLYDLGEFNQKGTVRTKYGTKAELERAIRSLKANGIQVYGDVVMNHKGGADFTERVQAVEVNPQNRNQEVSGTYQIEAYTGFNFPGRGNQHSSFKWRWYHFDGTDWDQSRQLANRIYKFRGDGKAWDWEVDTENGNYDYLMYADVDMDHPEVINELNRWGVWYANTLNLDGFRLDAVKHIKFSFMRDWLGHVRGQTGKPLFAVAEYWKNDLGALENYLSKTNWTMSAFDVPLHYNLYQASNSSGNYDMRNLLNGTLVQRHPSHAVTFVDNHDTQPGEALESFVQGWFKPLAYATILTREQGYPQVFYGDYYGIPSDGVPSYRQQIDPLLKARQQYAYGRQHDYFDHWDVIGWTREGNASHPNSGLATIMSDGPGGSKWMYVGRQKAGEVWHDMTGNRSGTVTINQDGWGHFFVNGGSVSVWVKR

SEQ ID NO: 44379 - protein, 480 aa, Bacillus sp.
NGTIMQYFEWNVPNDGQHWNRLHNNAQNLKNAGITAIWIPPAWKGTSQNDVGYGAYDLYDLGEFNQKGTVRTKYGTKAELERAIRSLKANGIQVYGDVVMNHKGGADFTERVQAVEVNPQNRNQEVSGTYQIEAWTGFNFPGRGNQHSSFKWRWYHFDGTDWDQSRQLANRIYKFRGDGKAWDWEVDTENGNYDYLMYADVDMDHPEVINELNRWGVWYANTLNLDGFRLDAVKHIKFSFMRDWLGHVRGQTGKNLFAVAEYWKNDLGALLNYLSKTNWTMSAFDVPLHYNLYQASNSSGNYDMRNLLNGTLVQRHPSHAVTFVDNHDTQPGEALESFVQGWFKPLAYATILTREQGYPQVFYGDYYGIPSDGVPSYRQQIDPLLKARQQYAYGRQHDYFDHWDVIGWTREGNASHPNSGLATIMSDGPGGSKWMYVGRQKAGEVWHDMTGNRSGTVTINQDGWGHFFVNGGSVSVWVKR

SEQ ID NO: 44380 - protein, 480 aa, Bacillus sp.
NGTIMQYFEWNVPNDGQHWNRLHNNAQNLKNAGITAIWIPPAWKGTSQNDVGYGAYDLYDLGEFNQKGTVRTKYGTKAELERAIRSLKANGIQVYGDVVMNHKGGADFTERVQAVEVNPQNRNQEVSGTYQIEAWTGFNFPGRGNQHSSFKWRWYHFDGTDWDQSRQLANRIYKFRGDGKAWDWEVDTENGNYDYLMYADVDMDHPEVINELNRWGVWYANTLNLDGFRLDAVKHIKFSFMRDWLGHVRGQTGKNLFAVAEYWKNDLGALENYLSKTNWTMSAFDVPLHYNLYQASNSSGNYDMRNLLNGTLVQRHPSHAVTFVDNHDTQPGEALESFVCGWFKPLAYATILTREQGYPQVFYGDYYGIPSDGVPSYRQQIDPLLKARQQYAYGRQHDYFDHWDVIGWTREGNASHPNSGLATIMSDGPGGSKWMYVGRQKAGEVWHDMTGNRSGTVTINQDGWGHFFVNGGSVSVWVKR

SEQ ID NO: 44381 - protein, 480 aa, Bacillus sp.
NGTIMQYFEWNVPNDGQHWNRLHNNAQNLKNAGITAIWIPPAWKGTSQNDVGYGAYDLYDLGEFNQKGTVRTKYGTKAELERAIRSLKANGIQVYGDVVMNHKGGADFTEKVQAVEVNPQNRNQEVSGTYQIEAWTGFNFPGRGNQHSSFKWRWYHFDGTDWDQSRQLANRIYKFRGDGKAWDWEVDTENGNYDYLMYADVDMDHPEVINELNRWGVWYANTLNLDGFRLDAVKHIKFSFMRDWLGHVRGQTGKNLFAVAEYWKNDLGALENYLSKTNWTMSAFDVPLHYNLYQASNSSGNYDMRNLLNGTLVQRHPSHAVTFVDNHDTQPGEALESFVQGWFKPLAYATILTREQGYPQVFYGDYYGIPSDGVPSYRQQIDPLLKARQQYAYGRQHDYFDHWDVIGWTREGNASHPNSGLATIMSDGPGGSKWMYVGRQKAGEVWHDMTGNRSGTVTINQDGWGHFFVNGGSVSVWVKR

SEQ ID NO: 44382 - protein, 480 aa, Bacillus sp.
NGTIMQYFEWNVPNDGQHWNRLHNNAQNLKNAGITAIWIPPAWKGTSQNDVGYGAYDLYDLGEFNQKGTVRTKYGTKAELERAIRSLKANGIQVYGDVVMNHKGGADFTERVQAVEVNPQNRNQEVSGTYQIEAWTGFNFPGRGNQHSSFKWRWYHFDGTDWDQSRQLANRIYKFRGDGKAWDWEVDTENGNYDYLMYADVDMDHPEVINELNRWGVWYANTLNLDGFRLDAVKHIKFSFMRDWLGHVRGQTGKNLFAVAEYWKNDLGALENYLSKTNWTMSAFDVPLHYNLYQASNSSGNYDMRNLLNGTLVQRHPSHAVTFVDNHDTQPGEALESFVQNWFKPLAYATILTREQGYPQVFYGDYYGIPSDGVPSYRQQIDPLLKARQQYAYGRQHDYFDHWDVIGWTREGNASHPNSGLATIMSDGPGGSKWMYVGRQKAGEVWHDMTGNRSGTVTINQDGWGHFFVNGGSVSVWVKR

SEQ ID NO: 44383 - protein, 480 aa, Bacillus sp.
NGTIMQYFEWNVPNDGQHWNRLHNNAQNLKNAGITAIWIPPAWKGTSQNDVGYGAYDLYDLGEFNQKGTVRTKYGTKAELERAIRSLKANGIQVYGDVVMNHKGGADFTERVQAVEVNPQNRNQEVSGTYQIEAWTGFNFPGRGNQHSSFKWRWYHFDGTDWDQSRQLANRIYKFRGDGKAWDWEVDTENGNYDYLMYADVDMDHPEVINELNRWGFWYANTLNLDGFRLDAVKHIKFSFMRDWLGHVRGQTGKNLFAVAEYWKNDLGALENYLSKTNWTMSAFDVPLHYNLYQASNSSGNYDMRNLLNGTLVQRHPSHAVTFVDNHDTQPGEALESFVQGWFKPLAYATILTREQGYPQVFYGDYYGIPSDGVPSYRQQIDPLLKARQQYAYGRQHDYFDHWDVIGWTREGNASHPNSGLATIMSDGPGGSKWMYVGRQKAGEVWHDMTGNRSGTVTINQDGWGHFFVNGGSVSVWVKR

SEQ ID NO: 44384 - protein, 480 aa, Bacillus sp.
NGTIMQYFEWNVPNDGQHWNRLHNNAQNLKNAGITAIWIPPAWKGTSQNDVGYGAYDLYDLGEFNQKGTVRTKYGTKAELERAIRSLKANGIQVYGDVVMNHKGGADFTERVQAVEVNPQNRNQEVSGTYQIEAWTGFNFPGRGNQHSSFKWRWYHFDGTDWDQSRQLANRIYKFRGDGKAWDWEVDTENGNYDYLMYADVDMDHPEVINELNRWGVWYANTLNLDGFRLDAVKHIKFSFMRDWLGHVRGQTGKNLFLVAEYWKNDLGALENYLSKTNWTMSAFDVPLHYNLYQASNSSGNYDMRNLLNGTLVQRHPSHAVTFVDNHDTQPGEALESFVQGWFKPLAYATILTREQGYPQVFYGDYYGIPSDGVPSYRQQIDPLLKARQQYAYGRQHDYFDHWDVIGWTREGNASHPNSGLATIMSDGPGGSKWMYVGRQKAGEVWHDMTGNRSGTVTINQDGWGHFFVNGGSVSVWVKR

SEQ ID NO: 44385 - protein, 480 aa, Bacillus sp.
NGTIMQYFEWNVPNDGQHWNRLHNNAQNLKNAGITAIWIPPAWKGTSQNDVGYGAYDLYDLGEFNQKGTVRTKYGTKAELERAIRSLKANGIQVYGDVVMNHKGGADFTERVQAVEVNPQNRNQEVSGTYQIEAWTGFNFPGRGNQHSSFKWRWYHFDGTDWDQSRQLANRIYKFRGDGKAWDWEVDTENGNYDYLMYADVDMDHPEVINELNRWGVWYANTLNLDGFRLDAVKHIKFSFMRDWLGHVRGQTGKNLFAVAEYWKNDLGALENYLSKTNWTMSAFDVPLHYNLYQASNSSGNYDMRNLLNGTLVQRHPSHAVTFVDNHDTQPGEALESFVQGWFKPLAYATILTREQGYPQVFYGDYYGIPSDGVPSYRRQIDPLLKARQQYAYGRQHDYFDHWDVIGWTREGNASHPNSGLATIMSDGPGGSKWMYVGRQKAGEVWHDMTGNRSGTVTINQDGWGHFFVNGGSVSVWVKR

SEQ ID NO: 44386 - protein, 480 aa, Bacillus sp.
NGTIMQYFEWNVPNDGQHWNRLHNNAQNLKNAGITAIWIPPAWKGTSQNDVGYGAYDLYDLGEFNQKGTVRTKYGTKAELERAIRSLKANGIQVYGDVVMNHKGGADFTERVQAVEVNPQNRNQEVSGTYQIEAWTGFNFPGRGNQHSSFKWRWYHFDGTDWDQSRQLANRIYKFRGDGKAWDWEVDTEXGNYDYLMYADXDMDHPEVINELNRWGVWYANTLNLDGFRLDAVKHIKFSFMRDWLGHVRGQTGKNLFAVAEYWKNDLGALENYLSKTNWTMSAFDVPLHYNLYQASNSSGNYDMRNLLNGTLVQRHPSHAVTFVDNHDTQPGEALESFVQGWFKPLAYATILTREQGYPQVFYGDYYGIPSDGVPSYRQQIDPLLKARQQYAYGRQHDYFDHWDVIGWTREGNASHPNSGLATIMSDGPGGSKWMYVGRQKAGEVWHDMTGNRSGTVTINQDGWGHFFVNGGSVSVWVKR

SEQ ID NO: 44387 - protein, 480 aa, Bacillus sp.
NGTIMQYFEWNVPNDGQHWNRLHNNAQNLKNAGITAIWIPPAWKGTSQNDVGYGAYDLYDLGEFNQKGTVRTKYGTKAELERAIRSLKANGIQVYGDVVMNHKGGADFTERVQAVEVNPQNRNQEVSGTYQIEAWTGFNFPGRGNQHSSFKWRWYHFDGTDWDQSRQLANRIYKFRGDTKAWDWEVDTENGNYDYLMYADVDMDHPEVINELNRWGVWYANTLNLDGFRLDAVKHIKFSFMRDWLGHVRGQTGKNLFAVAEYWKNDLGALENYLSKTNWTMSAFDVPLHYNLYQASNSSGNYDMRNLLNGTLVQRHPSHAVTFVDNHDTQPGEALESFVQGWFKPLAYATILTREQGYPQVFYGDYYGIPSDGVPSYRQQIDPLLKARQQYAYGRQHDYFDHWDVIGWTREGNASHPNSGLATIMSDGPGGSKWMYVGRQKAGEVWHDMTGNRSGTVTINQDGWGHFFVNGGSVSVWVKR

SEQ ID NO: 44388 - protein, 480 aa, Bacillus sp.
NGTIMQYFEWNVPNDGQHWNRLHNTAQNLKNAGITAIWIPPAWKGTSQNDVGYGAYDLYDLGEFNQKGTVRTKYGTKAELERAIRSLKANGIQVYGDVVMNHKGGADFTERVQAVEVNPQNRNQEVSGTYQIEAWTGFNFPGRGNQHSSFKWRWYHFDGTDWDQSRQLANRIYKFRGDGKAWDWEVDTENGNYDYLMYADVDMDHPEVINELNRWGVWYANTLNLDGFRLDAVKHIKFSFMRDWLGHVRGQTGKNLFAVAEYWKNDLGALENYLSKTNWTMSAFDVPLHYNLYQASNSSGNYDMRNLLNGTLVQRHPSHAVTFVDNHDTQPGEALESFVQGWFKPLAYATILTREQGYPQVFYGDYYGIPSDGVPSYRQQIDPLLKARQQYAYGRQHDYFDHWDVIGWTREGNASHPNSGLATIMSDGPGGSKWMYVGRQKAGEVWHDMTGNRSGTVTINQDGWGHFFVNGGSVSVWVKR

SEQ ID NO: 44389 - protein, 480 aa, Bacillus sp.
NGTIMQYFEWNVPNDGQHWNRLHNNAQNLKNAGITAIWIPPAWKGTSQNDVGYGAYDLYDLGEFNQKGTVRTKYGTKAELRRAIRSLKANGIQVYGDVVMNHKGGADFTERVQAVEVNPQNRNQEVSGTYQIEAWTGFNFPGRGNQHSSFKWRWYHFDGTDWDQSRQLANRIYKFRGDGKAWDWEVDTENGNYDYLMYADVDMDHPEVINELNRWGVWYANTLNLDGFRLDAVKHIKFSFMRDWLGHVRGQTGKNLFAVAEYWKNDLGALENYLSKTNWTMSAFDVPLHYNLYQASNSSGNYDMRNLLNGTLVQRHPSHAVTFVDNHDTQPGEALESFVQGWFKPLAYATILTREQGYPQVFYGDYYGIPSDGVPSYRQQIDPLLKARQQYAYGRQHDYFDHWDVIGWTREGNASHPNSGLATIMSDGPGGSKWMYVGRQKAGEVWHDMTGNRSGTVTINQDGWGHFFVNGGSVSVWVKR

SEQ ID NO: 44390 - protein, 480 aa, Bacillus sp.
NGTIMQYFEWNVPNDGQHWNRLHNNADNLKNAGITAIWIPPAWKGTSQNDVGYGAYDLYDLGEFNQKGTVRTKYGTKAELERAIRSLKANGIQVYGDVVMNHKGGADFTERVQAVEVNPQNRNQEVSGTYQIEAWTGFNFPGRGNQHSSFKWRWYHFDGTDWDQSRQLANRIYKFRGDGKAWDWEVDTENGNYDYLMYADVDMDHPEVINELNRWGVWYANTLNLDGFRLDAVKHIKFSFMRDWLGHVRGQTGKNLFAVAEYWKNDLGALENYLSKTNWTMSAFDVPLHYNLYQASNSSGNYDMRNLLNGTLVQRHPSHAVTFVDNHDTQPGEALESFVQGWFKPLAYATILTREQGYPQVFYGDYYGIPSDGVPSYRQQIDPLLKARQQYAYGRQHDYFDHWDVIGWTREGNASHPNSGLATIMSDGPGGSKWMYVGRQKAGEVWHDMTGNRSGTVTINQDGWGHFFVNGGSVSVWVKR

SEQ ID NO: 44391 - protein, 480 aa, Bacillus sp.
NGTIMQYFEWNVPNDGQHWNRLHNNAQNLKNAGITAIWIPPAWKGTSQNDVGYGAYDLYDLGEFNQKGTVRTKYGTKAELERAIRSLKANGIQVYGDVVMNHKGGADFTERVQAVEVNPQNRNQEVSGTYQIEAWTGFNFPGRGNQHSSFKWRWYHFDGTDWDQSRQLANRIYKFRGDGKAWDWEVDTENGNYDYLMYADVDMDHPEVINELNRWGVWYANTLNLDGFRLDAVKHIKFSFMRDWLGHVRGQTGKNLFAVAEYWKNDLGALENYLSKTNWTMSAFDVPLHYNLYQASNSSGNYDMRNLLNGTLVQRHPSHAVTFVDNHDTQPGEALESFVQGWFKPLAYATILTREQGYPQVFYGDYYGIPSDGVPSYRQQIDPLLKARQQYAYGCQHDYFDHWDVIGWTREGNASHPNSGLATIMSDGPGGSKWMYVGRQKAGEVWHDMTGNRSGTVTINQDGWGHFFVNGGSVSVWVKR

SEQ ID NO: 44392 - protein, 480 aa, Bacillus sp.
NGTIMQYFEWNVPNDGQHWNRLHNNAQNLKNAGITAIWIPPAWKGTSQNDVGYGAYDLYDLGEFNQKGTVRTKYGTKAELERAIRSLKANGIQVYGDVVMNHKGGADFTERVQAVEVNPQNRNQEVSGTYQIEAWTGFNFPGRGNQHSSFKWRWYHFDGTDWDQSRQLANRIYKFRGDGKAWDWEVDTENGNYDYLMYADVDMDHPEVINELNRWGVWYANTLNLDGFRLDAVKHIKFSFMRDWLGHVRGQTGKNLFAVAEYWKNDLGALENYLSKTNWTMSAFDVPLHYNLYQASNSSGNYDMRNLLNGTLVQRHPSHAVTFVDNHDTQPGEALESFVQGWFKPLAYATILTREQGYPQVFYGDYYGIPSDGVPSYRQQIDPLLKARQQYAYGRQHDYCDHWDVIGWTREGNASHPNSGLATIMSDGPGGSKWMYVGRQKAGEVWHDMTGNRSGTVTINQDGWGHFFVNGGSVSVWVKR

SEQ ID NO: 44393 - protein, 480 aa, Bacillus sp.
NGTIMQYFEWNVPNDGQHWNRLHNNAQNLKNAGITAIWIPPAWKGTSQNDVGYGAYDLYDLGEFNQKGTVRTKYGTKAELERAIRSLKANGIQVYGDVVMNHKGGADFTERVQAVEVNPQNRNQEVSGTYQIEAWTGFNFPGRGNQHSSFKWRWYHFDGTDWDQSRQLANRIYKFRGDGKAWDWEVDTENGNYDYLMYADVDMDHPEVINELNRWGVWYANTLNLDGFRLDAVKHIKFSFMRDWLGHVRGQTGKNLFAVAEYWKNDLGALENYLSKTNWTMSAFDVPLHYNLYQASNSSGNYDMRNLLNGTLVQRHPSHAVTFVDNHDTQPGEALESFVQGWFKPLAYATILTREQGYPQVFYGDYYGIPSDGVPSYRQQIDPLLKARQQYAYGRQHDYFDHWDLIGWTREGNASHPNSGLATIMSDGPGGSKWMYVGRQKAGEVWHDMTGNRSGTVTINQDGWGHFFVNGGSVSVWVKR

SEQ ID NO: 44394 - protein, 480 aa, Bacillus sp.
NGTIMQYFEWNVPNDGQHWNRLHNNAQNLKNAGITAIWIPPAWKGTSQNDVGYGAYDLYDLGEFNQKGTVRTKYGTKAELERAIRSLKANGIQVYGDVVMNHKGGADFTERVQAVEVNPQNRNQEVSGTYQIEAWTGFNFPGRGNQHSSFKWRWYHFDGTDWDQSRQLANRIYKFRGDGKAWDWEVDTENGNYDYLMYADXDMDHPEVINELNRWGVWYANTLNLDGFRLDAVKHIKFSFMRDWLGHVRGQTGKNLFAVAEYWKNDLGALENYLSKTNWTMSAFDVPLHYNLYQASNSSGNYDMRNLLNGTLVQRHPSHAVTFVDNHDTQPGEALESFVQGWFKPLAYATILTREQGYPQVFYGDYYGIPSDGVPSYRQQIDPLLKARQQYAYGRQHDYFDHWDVIGWTREGNASHPNSGLATIMSDGPGGSKWMYVGRQKAGEVWHDMTGNRSGTVTINQDGWGHFFVNGGSVSVWVKR

SEQ ID NO: 44395 - protein, 480 aa, Bacillus sp.
NGTIMQYFEWNVPNDGQHWNRLHNNAQNLKNAGITAIWIPPAWKGTSQNDVGYGAYDLYDLGEFNQKGTVRTKYGTKAELERAIRSLKANGIQVYGDVVMNHKGGADFTERVQAVEVNPQNRNQEVSGTYQIEAWTGFNFPGRGNQHSSFKWRWYHFDGTDWDQSRQLAVRIYKFRGDGKAWDWEVDTENGNYDYLMYADVDMDHPEVINELNRWGVWYANTLNLDGFRLDAVKHIKFSFMRDWLGHVRGQTGKNLFAVAEYWKNDLGALENYLSKTNWTMSAFDVPLHYNLYQASNSSGNYDMRNLLNGTLVQRHPSHAVTFVDNHDTQPGEALESFVQGWFKPLAYATILTREQGYPQVFYGDYYGIPSDGVPSYRQQIDPLLKARQQYAYGRQHDYFDHWDVIGWTREGNASHPNSGLATIMSDGPGGSKWMYVGRQKAGEVWHDMTGNRSGTVTINQDGWGHFFVNGGSVSVWVKR

SEQ ID NO: 44396 - protein, 480 aa, Bacillus sp.
NGTIMQYFEWNVPNDGQHWNRLHNNAQNLKNAGITAIWIPPAWKGTSQNDVGYGAYDLYDLGEFNQKGTVRTKYGTKAELERAIRSLKASGIQVYGDVVMNHKGGADFTERVQAVEVNPQNRNQEVSGTYQIEAWTGFNFPGRGNQHSSFKWRWYHFDGTDWDQSRQLANRIYKFRGDGKAWDWEVDTENGNYDYLMYADVDMDHPEVINELNRWGVWYANTLNLDGFRLDAVKHIKFSFMRDWLGHVRGQTGKNLFAVAEYWKNDLGALENYLSKTNWTMSAFDVPLHYNLYQASNSSGNYDMRNLLNGTLVQRHPSHAVTFVDNHDTQPGEALESFVQGWFKPLAYATILTREQGYPQVFYGDYYGIPSDGVPSYRQQIDPLLKARQQYAYGRQHDYFDHWDVIGWTREGNASHPNSGLATIMSDGPGGSKWMYVGRQKAGEVWHDMTGNRSGTVTINQDGWGHFFVNGGSVSVWVKR

SEQ ID NO: 44397 - protein, 480 aa, Bacillus sp.
NGTIMQYFEWNVPNDGQHWNRLENNAQNLKNAGITAIWIPPAWKGTSQNDVGYGAYDLYDLGEFNQKGTVRTKYGTKAELERAIRSLKANGIQVYGDVVMNHKGGADFTERVQAVEVNPQNRNQEVSGTYQIEAWTGFNFPGRGNQHSSFKWRWYHFDGTDWDQSRQLANRIYKFRGDGKAWDWEVDTENGNYDYLMYADVDMDHPEVINELNRWGVWYANTLNLDGFRLDAVKHIKFSFMRDWLGHVRGQTGKNLFAVAEYWKNDLGALENYLSKTNWTMSAFDVPLHYNLYQASNSSGNYDMRNLLNGTLVQRHPSHAVTFVDNHDTQPGEALESFVQGWFKPLAYATILTREQGYPQVFYGDYYGIPSDGVPSYRQQIDPLLKARQQYAYGRQHDYFDHWDVIGWTREGNASHPNSGLATIMSDGPGGSKWMYVGRQKAGEVWHDMTGNRSGTVTINQDGWGHFFVNGGSVSVWVKR

SEQ ID NO: 44398 - protein, 480 aa, Bacillus sp.
NGTIMQYFEWNVPNDGQHWNRLHNNAQNLKNAGITAIWIPPAWKGTSQNDVGYGAYDLYDLGEFNQKGTVRTKYGTKAELERAIRSLKANGIQVYGDVVMNHKGGADFTERVQAVEVNPQNRNQEVSGTYQIEAWTGFNFPGRGNQHSSFKWRWYHFDGTDWDQSRQLANRIYKFRGDGKAWDWEVDTENGNYDYLMYADVDMDHPEVINELNRWGVWYANTLNLDGFRLDAVKHIKFSFMRDWLGHVRGQTGKNLFAVAEYWKNDLGALENYLSKTNWTMSAFDVPLHYNLYQASNSSGNYDMRNLLNGTLVQRHPSHAVTFVDNHDTQPGEALESFVQGWFKPLAYATILTREQGYPQVFYGDYYGIPSDGVPSYRQQIDPLLKARQVYAYGRQHDYFDHWDVIGWTREGNASHPNSGLATIMSDGPGGSKWMYVGRQKAGEVWHDMTGNRSGTVTINQDGWGHFFVNGGSVSVWVKR

SEQ ID NO: 44399 - protein, 480 aa, Bacillus sp.
NGTIMQYFEWNVPNDGQHWNRLHNNAQNLKNAGITAIWIPPAWKGTSQNDVGYGAYDLYDLGEFNQKGTVRTKYGTKAELERAIRSLKANGIQVYGDVVMNHKGGADFTERVQAVEVNPQNRNQEVSGTYQIEAWTGFNFPGRGNQHSSFKWRWYHFDGTDWDQSRQLANRIYKFRGDGKAWDWEVDTENGNYDYLMYADVDMDHPEVINELNRWGVWYANTLNLDGFRLDAVKHIKFSFMRDWLGHVRGQTGKNLFAVAEYWKNDLGALENYLSKTNWTMSAFDVPLHYNLYQASNSSGNYDMRNLLNGTLVQRHPSHAVTFVDNHDTQPGEALESFVQGWFKPLAYATILTREQGYPQVFYGDYYGIPSDGVPSYRQQIDPLLKARQQYAYGRQHDYFDHWDVIGWTREGNCSHPNSGLATIMSDGPGGSKWMYVGRQKAGEVWHDMTGNRSGTVTINQDGWGHFFVNGGSVSVWVKR

SEQ ID NO: 44400 - protein, 480 aa, Bacillus sp.
NGTIMQYFEWNVPNDGQHWNRLHNNAQNLKNAGITAIWIPPAWKGTSQNDVGYGAYDLYDLGEFNQKGTVRTKYGTKAELERAIRSLKANGIQVYGDVVMNHKGGADFTERVQAVEVNPQNRNQEVSGTYQIEAWTGFNFPGRGNQHSSFKWRWYHFDGTDWDQSRQLANRIYKFRGDGKAWDWEVDTENGNYDYLMYADVDMDHPEVINELNRWGVWYANTLNLDGFRLDAVKHIKFSFMRDWLGHVRGQTGKNLFAVAEYWKNDLGALENYLSKTNWTMSAFDVPLHYNLYQASNSSGNYDMRNLLNGTLVQRHPSHAVTFVDNHDTQPGEALESFVQGWFKPLAYATILTREQGYPQVFYGDYYGIPSDGVPSYRQQIDPLLKARNQYAYGRQHDYFDHWDVIGWTREGNASHPNSGLATIMSDGPGGSKWMYVGRQKAGEVWHDMTGNRSGTVTINQDGWGHFFVNGGSVSVWVKR

SEQ ID NO: 44401 - protein, 480 aa, Bacillus sp.
NGTIMQYFEWNVPNDGQHWNRLHNNAQNLKNAGITAIWIPPAWKGTSQNDVGYGAYDLYDLGEFNQKGTVRTKYGTKAELERAIRSLKANGIQVYGDVVMNHKGGADFTERVQAVEVNPQNRNQEVSGTYQIEAWTGFNFPGRGNQHSSFKWRWYHFDGTDWDQSRQLANRIYKFRGDGKAWDWEVDTENGNYDYLMYADVDMDHPEVINELNRWGVWYANTLNLDGFRLDAVKHIKFSFMRDWLGHVRGQTGKNLFAVAEYWKNDLGSLENYLSKTNWTMSAFDVPLHYNLYQASNSSGNYDMRNLLNGTLVQRHPSHAVTFVDNHDTQPGEALESFVQGWFKPLAYATILTREQGYPQVFYGDYYGIPSDGVPSYRQQIDPLLKARQQYAYGRQHDYFDHWDVIGWTREGNASHPNSGLATIMSDGPGGSKWMYVGRQKAGEVWHDMTGNRSGTVTINQDGWGHFFVNGGSVSVWVKR

SEQ ID NO: 44402 - protein, 480 aa, Bacillus sp.
NGTIMQYFEWNVPNDGQHWNRLHNNAQNLKNAGITAIWIPPAWKGTSQNDVGYGAYDLYDLGEFNQKGTVRTKYGTKAELERAIRSLKANGIQVYGDVVMNHKGGADFTERVQAVEVNPQNRNQEVSGTYQIEAWTGFNFPGRGNQHSSFKWRWYHFDGTDWDQSRQLANRIYKFRGDGKAWDWEVDTENGNYDYLMYADVDMDHPEVINELNRWGVWYANTLNLDGFRLDAVKHIKFSFMRDWLGHVRGQTGKNLFAVAEYWKNDLGALENYLSKTNWTMSAFDVPLHYNLYQASNSSGNYDMRNLLNRTLVQRHPSHAVTFVDNHDTQPGEALESFVQGWFKPLAYATILTREQGYPQVFYGDYYGIPSDGVPSYRQQIDPLLKARQQYAYGRQHDYFDHWDVIGWTREGNASHPNSGLATIMSDGPGGSKWMYVGRQKAGEVWHDMTGNRSGTVTINQDGWGHFFVNGGSVSVWVKR

SEQ ID NO: 44403 - protein, 480 aa, Bacillus sp.
NGTIMQYFEWNVPNDGQHWNRLHNNAQNLKNAGITAIWIPPAWKGTSQNDVGYGAYDLYDLGEFNQKGTVRTKYGTKAELERAIRSLKANGIQVYGDVVMNHKGGADFTERVQAVEVNPQNRNQEVSGTYQIEAWTGFNFPGRGNQHSSFKWRWYHFDGTDWDQSRQLANRIYKFRGDGKAWDWEVDTENGNYDYLMYADVDMDHPEVIVELNRWGVWYANTLNLDGFRLDAVKHIKFSFMRDWLGHVRGQTGKNLFAVAEYWKNDLGALENYLSKTNWTMSAFDVPLHYNLYQASNSSGNYDMRNLLNGTLVQRHPSHAVTFVDNHDTQPGEALESFVQGWFKPLAYATILTREQGYPQVFYGDYYGIPSDGVPSYRQQIDPLLKARQQYAYGRQHDYFDHWDVIGWTREGNASHPNSGLATIMSDGPGGSKWMYVGRQKAGEVWHDMTGNRSGTVTINQDGWGHFFVNGGSVSVWVKR

SEQ ID NO: 44404 - protein, 480 aa, Bacillus sp.
NGTIMQYFEWNVPNDGQHWNRLHNNAQNLKNAGITAIWIPPAWKGTSQNDVGYGAYDLYDLGEFNQKGTVRTKYGTKAELERAIRSLKANGIQVYGDVVMNHKGGADFTERVQAVEVNPQNRNQEVSGTYQIEAWTGFNFPGRGNQHSSFKWRWYHFDGTDWDQSRQLANRIYKFRGDGKAWDWEVDTENGNYDYLMYADVDMDHPEVINELNRWGVWYANTLNLDGFRLDAVKHIKFSFMRDWLGHVRGQTGKNLFAVAEYWKNDLGALENYLSKTNWTMSAFDVPLHYNLYQASNSSGNYDMRNLLNGTLVQRHPSHAVTFVDNHDTQPGEALESFVQGWFKPLAYAAILTREQGYPQVFYGDYYGIPSDGVPSYRQQIDPLLKARQQYAYGRQHDYFDHWDVIGWTREGNASHPNSGLATIMSDGPGGSKWMYVGRQKAGEVWHDMTGNRSGTVTINQDGWGHFFVNGGSVSVWVKR

SEQ ID NO: 44405 - protein, 480 aa, Bacillus sp.
NGTIMQYFEWNVPNDGQHWNRLHNNAQNLKNAGITAIWIPPAWKGTSQNDVGYGAYDLYDLGEFNQKGTVRTKYGTKAELERAIRSLKANGIQVYGDVVMNHKGGADFTERVQAVEVNPQNRNQEVSGTYQIEAWTGFNFPGRGNQHSSFKWRWYHFDGTDWDQSRQLANRIYKFRGDGKAWDWEVDTENGNYDYLMYADVDMDHPEVINELNRWGVWYANTLNLDGFRLDAVKHIKFSFMRDWLGHVRGQTGKNLFAVAEYWKNDLGALENYLSKTNWTMSAFDVPLHYNLYQASNSSGNYDMRNLLNGTLVPRHPSHAVTFVDNHDTQPGEALESFVQGWFKPLAYATILTREQGYPQVFYGDYYGIPSDGVPSYRQQIDPLLKARQQYAYGRQHDYFDHWDVIGWTREGNASHPNSGLATIMSDGPGGSKWMYVGRQKAGEVWHDMTGNRSGTVTINQDGWGHFFVNGGSVSVWVKR

SEQ ID NO: 44406 - protein, 480 aa, Bacillus sp.
NGTIMQYFEWNVPNDGQHWNRLHNNAQNLKNAGITAIWIPPAWKGTSQNDVGYGAYDLYDLGEFNQKGTVRTKYGTKAELERAIRSFKANGIQVYGDVVMNHKGGADFTERVQAVEVNPQNRNQEVSGTYQIEAWTGFNFPGRGNQHSSFKWRWYHFDGTDWDQSRQLANRIYKFRGDGKAWDWEVDTENGNYDYLMYADVDMDHPEVINELNRWGVWYANTLNLDGFRLDAVKHIKFSFMRDWLGHVRGQTGKNLFAVAEYWKNDLGALENYLSKTNWTMSAFDVPLHYNLYQASNSSGNYDMRNLLNGTLVQRHPSHAVTFVDNHDTQPGEALESFVQGWFKPLAYATILTREQGYPQVFYGDYYGIPSDGVPSYRQQIDPLLKARQQYAYGRQHDYFDHWDVIGWTREGNASHPNSGLATIMSDGPGGSKWMYVGRQKAGEVWHDMTGNRSGTVTINQDGWGHFFVNGGSVSVWVKR

SEQ ID NO: 44407 - protein, 480 aa, Bacillus sp.
NGTIMQYFEWNVPNDGQHWNRLHNNAQNLKNAGITAIWIPPAWKGTSQNDVGYGAYDLYDLGEFNQKGTVRTKYGTKAELERAIRSLKANGIQVYGDVVMNHKGGADFTERVQAVEVNPQNRNQEVSGTYQIEAWTGFNFPGRGNQHSSFKWRWYHFDGTDWDQSRQLANRIYKFRGDGKAWDWEVDTENGNYDYLMYADVDMDHPEVINELNRWGVWYANTLNLDGFRLDAVKHIKFSFMRDWLGHVRGQTGKNLFAVAEYWKNDLGALENYLSKTNWTMSAFDVPLHYNLYQASNSMGNYDMRNLLNGTLVQRHPSHAVTFVDNHDTQPGEALESFVQGWFKPLAYATILTREQGYPQVFYGDYYGIPSDGVPSYRQQIDPLLKARQQYAYGRQHDYFDHWDVIGWTREGNASHPNSGLATIMSDGPGGSKWMYVGRQKAGEVWHDMTGNRSGTVTINQDGWGHFFVNGGSVSVWVKR

SEQ ID NO: 44408 - protein, 480 aa, Bacillus sp.
NGTIMQYFEWNVPNDGQHWNRLHNNAQNLKNAGITAIWIPPAWKGTSQNDVGYGAYDLYDLGEFNQKGTVRTKYGTKAELERAIRSLKANGIQVYGDVVMNHKGGADFTERVQAVEVNPQNRNQEVSGTYQIEAWTGFNFPGRGNQHSSFKWRWYHFDGTDWDQSRQLANRIYKFRGDGKAWDWEVDTENGNYDYLMYADVDMDHPEVINELNRWGVWYANTLNLDGFRLDAVKHIKFSFMRDWLGHVRGQTGKNLFAVAEYWKNDLGALENYLSKTNWTMSAFDVPLHYNLYQASNSSGNYDMRNLLNGTLVQRHPSHAVTFVDNHDTQPGEALESFVQGWFKPLAYATILTREQGYPQVFYGDYYGIPSDGVPSYRQQIDPLLKARQQYAYGRQHDYFDHWDVIGWTREGNASHPNSGLATIMSDGPGGSKWMYVGRQKAGEVWCDMTGNRSGTVTINQDGWGHFFVNGGSVSVWVKR

SEQ ID NO: 44409 - protein, 480 aa, Bacillus sp.
NGTIMQYFEWNVPNDGQHWNRLHNNAQNLKNAGITAIWIPPAWKGTSQNDVGYGAYDLYDLGEFNQKGTVRTKYGTKAELERAIRSLKANGIQVYGDVVMNHKGGADFTERVQAVEVNPQNRNQEVSGTYQIEAWTGFNFPGRGNQHSSFKWRWYHFDGTDWDQSRQLANRIYKFRGDGKAWDWEVDTENGNYDYLMYADVDMDHPEVINELNRWGVWYANTLNLDGFRLDAVKHIKFSFMRDWLGHVRGQTGKNLFAVAEYWKNDLGALENYLSKTNWTMSAFDVPLHYNLYQASNSSGNYDMRNLLNGTLVQRHPSHAVTFVDNHDTQPGEALESFVQGWFKPLAYATILTREQGYPQVFYGDYYGIPFDGVPSYRQQIDPLLKARQQYAYGRQHDYFDHWDVIGWTREGNASHPNSGLATIMSDGPGGSKWMYVGRQKAGEVWHDMTGNRSGTVTINQDGWGHFFVNGGSVSVWVKR

SEQ ID NO: 44410 - protein, 480 aa, Bacillus sp.
NGTIMQYFEWNVPNDGQHWNRLHNNAQNLKNAGITAIWIPPAWKGTSQNDVGYGAYDLYDLGEFNQKGTVRTKYGTKAELERAIRSLKANGIQVYGDVVMNHKGGADFTERVQAVEVNPQNRNQEVSGTYQIEAWTGFNFPGRGNQHSSFKWRWYHFDGTDWDQSRQLANRIYKFRGDGKAWDWEVDTENGNYDYLMYADVDMDHPEVINELNRWGVWYANTLNLDGFRLDAVKHIKFSFMRDWLGHVRGQTGKNLFAVAEYWKNDLGALENYLSKTNWTMSAFDVPLHYNLYQASNSSGNYDMRNLLNGTLVQRHPSHAVTFVDNHDTQPGEALESFVQVWFKPLAYATILTREQGYPQVFYGDYYGIPSDGVPSYRQQIDPLLKARQQYAYGRQHDYFDHWDVIGWTREGNASHPNSGLATIMSDGPGGSKWMYVGRQKAGEVWHDMTGNRSGTVTINQDGWGHFFVNGGSVSVWVKR

SEQ ID NO: 44411 - protein, 480 aa, Bacillus sp.
NGTIMQYFEWNVPNDGQHWNRLHNNAQNLKNAGITAIWIPPAWKGTSQNDVGYGAYDLYDLGEFNQKGTVRTKYGTKAELERAIRSLKANGIQVYGDVVMNHKGGADFTERVQAVEVNPQNRNQEVSGTYQIEAWTGFNFPGRGNQHSSFKWRWYHFDGTDWDQSRQLANRIYKFRGDGKAWDWEVDTENGNYDYLMYADVDMDHPEVINELNRWGVWYANTLNLDGFRLDAVKHIKFSFMRDWLGHVRGQTGKNLFAVAEYWKNDLGALENYLSKTNWTMSAFDVPLHYNLYQASNSSGNYDMRNLLNGTLVQRHPSHAVTFVDNHDTQPGEALESFVQGWFKPLAYAYILTREQGYPQVFYGDYYGIPSDGVPSYRQQIDPLLKARQQYAYGRQHDYFDHWDVIGWTREGNASHPNSGLATIMSDGPGGSKWMYVGRQKAGEVWHDMTGNRSGTVTINQDGWGHFFVNGGSVSVWVKR

SEQ ID NO: 44412 - protein, 480 aa, Bacillus sp.
NGTIMQYFEWNVPNDGQHWNRLHNNAQNLKNAGITAIWIPPAWKGTSQNDVGYGAYDLYDLGEFNQKGTVRTKYGTKAELERAIRSLKANGIQVYGDVVMNHKGGADFTERVQAVEVNPQNRNQEVSGTYQIEAWTGFNFPGRGNQHSSFKWRWYHFDGTDWDQSRQLANRIYKFRGDGKAWDWEVDTENGNYDYLMYADVDMDHPEVINELNRWGVWYANTLNLDGFRLDAVKHIKFSFMRDWLGHVRGQTGKNLFAVAEYWKNDLGALENYLSKTNCTMSAFDVPLHYNLYQASNSSGNYDMRNLLNGTLVQRHPSHAVTFVDNHDTQPGEALESFVQGWFKPLAYATILTREQGYPQVFYGDYYGIPSDGVPSYRQQIDPLLKARQQYAYGRQHDYFDHWDVIGWTREGNASHPNSGLATIMSDGPGGSKWMYVGRQKAGEVWHDMTGNRSGTVTINQDGWGHFFVNGGSVSVWVKR

SEQ ID NO: 44413 - protein, 480 aa, Bacillus sp.
NGTIMQYFEWNVPNDGQHWNRLHNNAQNLKNAGITAIWIPPAWKGTSQNDVGYGAYDLYDLGEFNQKGTVRTKYGTKAELERAIRSLKANGIQVYGDVVMNHKGGADFTERVQAVEVNPQNRNQEVSGTYQIEAWTGFNFPGRGNQHSSFKWRWYHFDGTDWDQSRGLANRIYKFRGDGKAWDWEVDTENGNYDYLMYADVDMDHPEVINELNRWGVWYANTLNLDGFRLDAVKHIKFSFMRDWLGHVRGQTGKNLFAVAEYWKNDLGALENYLSKTNWTMSAFDVPLHYNLYQASNSSGNYDMRNLLNGTLVQRHPSHAVTFVDNHDTQPGEALESFVQGWFKPLAYATILTREQGYPQVFYGDYYGIPSDGVPSYRQQIDPLLKARQQYAYGRQHDYFDHWDVIGWTREGNASHPNSGLATIMSDGPGGSKWMYVGRQKAGEVWHDMTGNRSGTVTINQDGWGHFFVNGGSVSVWVKR

SEQ ID NO: 44414 - protein, 480 aa, Bacillus sp.
NGTIMQYFEWNVPNDGQHWNRLHNNAQNLKNAGITAIWIPPAWKGTSQNDVGYGAYDLYDLGEFNQKGTVRTKYGTKAELERAIRSLKANGIQVYGDVVMNHKGGADFTEGVQAVEVNPQNRNQEVSGTYQIEAWTGFNFPGRGNQHSSFKWRWYHFDGTDWDQSRQLANRIYKFRGDGKAWDWEVDTENGNYDYLMYADVDMDHPEVINELNRWGVWYANTLNLDGFRLDAVKHIKFSFMRDWLGHVRGQTGKNLFAVAEYWKNDLGALENYLSKTNWTMSAFDVPLHYNLYQASNSSGNYDMRNLLNGTLVQRHPSHAVTFVDNHDTQPGEALESFVQGWFKPLAYATILTREQGYPQVFYGDYYGIPSDGVPSYRQQIDPLLKARQQYAYGRQHDYFDHWDVIGWTREGNASHPNSGLATIMSDGPGGSKWMYVGRQKAGEVWHDMTGNRSGTVTINQDGWGHFFVNGGSVSVWVKR

SEQ ID NO: 44415 - protein, 480 aa, Bacillus sp.
NGTIMQYFEWNVPNDGQHWNRLHNNAQNLKNAGITAIWIPPAWKGTSQNDVGYGAYDLYDLGEFNQKGTVRTKYGTKAELERAIRSLKANGIQVYGDVVMNHKGGADETERVQAVEVNPQNRNQEVSGTYQIEAWTGFNFPGRGNQHSSFKWRWYHFDGTDWDQSRQLANRIYKFRGDGKAWDWEVDTENGNYDYLMYADVDMDHPEVINELNRWGVWYANTLNLDGFRLDAVKHIKFSFMRDWLGHVRGQTGKNLFAVAEYWKNDLGALENYLSKTNWTMSAFDVPLHYNLYQASNSSGNYDMRNLLNGTLVQRHPSHAVTFVDNHDTQPGEALESFVQGWFKPLAYATILTREQGYPQVFYGDYYGIPSDGVPSYRQQIDPLLKARQQYAYGRQHDYFDHWDVIGWTREGNASHPNSGLATIMSDGPGGSKWMYVGRQKAGEVWHDMTGNRSGTVTINQDGWGHFFVNGGSVSVWVKR

SEQ ID NO: 44416 - protein, 480 aa, Bacillus sp.
NGTIMQYFEWNVPNDGQHWNRLHNNAQNLKNAGITAIWIPPAWKGTSQNDVGYGAYDLYDLGEFNQKGTVRTKYGTKAELERAIRSLKANGIQVYGDVVMNHKGGADFTERVQAVEVNPQNRNQEVSGTYQIEAWTGFNFPGRGNQHSSFKWRWYHFDGTDWDQSRQLANRIYKFRGDGKAWDWEVDTENGNYDYLMYADVDMDHPEVINELNRWGVWYANTLNLDGFRLDAVKHIKFSFMRDWLGHVRGQTGKNLFAVAEYWKNDLGALENYLSKTNWTMSAFDVPLHYNLYQASNSSGNYDMRNLLNGTLVQRHPSHAVTFVDNHDTQPGEALESFVQGWFKPLAYATILTREQGYPQVFYGDYYGIPSDGVPSYRQQIDPLLKARQQYAYGRQHDYFDHWDVIGWTREGNGSHPNSGLATIMSDGPGGSKWMYVGRQKAGEVWHDMTGNRSGTVTINQDGWGHFFVNGGSVSVWVKR

SEQ ID NO: 44417 - protein, 480 aa, Bacillus sp.
NGTIMQYFEWNVPNDGQHWNRLHNNAQNLKNAGITAIWIPPAWKGTSQNDVGYGAYDLYDLGEFNQKGTVRTKYGTKAMLERAIRSLKANGIQVYGDVVMNHKGGADFTERVQAVEVNPQNRNQEVSGTYQIEAWTGFNFPGRGNQHSSFKWRWYHFDGTDWDQSRQLANRIYKFRGDGKAWDWEVDTENGNYDYLMYADVDMDHPEVINELNRWGVWYANTLNLDGFRLDAVKHIKFSFMRDWLGHVRGQTGKNLFAVAEYWKNDLGALENYLSKTNWTMSAFDVPLHYNLYQASNSSGNYDMRNLLNGTLVQRHPSHAVTFVDNHDTQPGEALESFVQGWFKPLAYATILTREQGYPQVFYGDYYGIPSDGVPSYRQQIDPLLKARQQYAYGRQHDYFDHWDVIGWTREGNASHPNSGLATIMSDGPGGSKWMYVGRQKAGEVWHDMTGNRSGTVTINQDGWGHFFVNGGSVSVWVKR

SEQ ID NO: 44418 - protein, 480 aa, Bacillus sp.
NGTIMQYFEWNVPNDGQHWNRLHNNAQNLKNAGITAIWIPPAWKGTSQNDVGYGAYDLYDLGEFNQKGTVRTKYGTKAELERAIRSLKANGIQVYGDVVMNHKGGADFTERVQAVEVNPQNRNQEVSGTYQIEAWTGFNFPGRGNQHSSFKWRWYHFDGTDWDQSRQLANRIYKFRGDGKAWDWEVDTENGNYDYLMYADVDMDHPEVINELNRWGVWYANTLNLDGFRLDAVKHIKFSFMRDWLGHVRGQTGKNLFAVAEYWKNDLGALENYLSKTNWTMSAFDVPLHYNLYQASNSSGLYDMRNLLNGTLVQRHPSHAVTFVDNHDTQPGEALESFVQGWFKPLAYATILTREQGYPQVFYGDYYGIPSDGVPSYRQQIDPLLKARQQYAYGRQHDYFDHWDVIGWTREGNASHPNSGLATIMSDGPGGSKWMYVGRQKAGEVWHDMTGNRSGTVTINQDGWGHFFVNGGSVSVWVKR

SEQ ID NO: 44419 - protein, 480 aa, Bacillus sp.
NGTIMQYFEWNVPNDGQHWNRLHNNAQNLKNAGITAIWIPPAWKGTSQNDVGYGAYDLYDLGEFNQKGTVRTKYGTKAELERAIRSLKANGIQVYGDVVMNHKGGADFTERVQAVEVNPQNRNQEVSGTYQIEAWTGFNFPGRGNQHSSFKWRWYHFDGTDWDQSRQLANRIYKFRGDGKAWDWEVDTENGNYDYLMYADYDMDHPEVINELNRWGVWYANTLNLDGFRLDAVKHIKFSFMRDWLGHVRGQTGKNLFAVAEYWKNDLGALENYLSKTNWTMSAFDVPLHYNLYQASNSSGNYDMRNLLNGTLVQRHPSHAVTFVDNHDTQPGEALESFVQGWFKPLAYATILTREQGYPQVFYGDYYGIPSDGVPSYRQQIDPLLKARQQYAYGRQHDYFDHWDVIGWTREGNASHPNSGLATIMSDGPGGSKWMYVGRQKAGEVWHDMTGNRSGTVTINQDGWGHFFVNGGSVSVWVKR

SEQ ID NO: 44420 - protein, 480 aa, Bacillus sp.
NGTIMQYFEWNVPNDGQHWNRLHNSAQNLKNAGITAIWIPPAWKGTSQNDVGYGAYDLYDLGEFNQKGTVRTKYGTKAELERAIRSLKANGIQVYGDVVMNHKGGADFTERVQAVEVNPQNRNQEVSGTYQIEAWTGFNFPGRGNQHSSFKWRWYHFDGTDWDQSRQLANRIYKFRGDGKAWDWEVDTENGNYDYLMYADVDMDHPEVINELNRWGVWYANTLNLDGFRLDAVKHIKFSFMRDWLGHVRGQTGKNLFAVAEYWKNDLGALENYLSKTNWTMSAFDVPLHYNLYQASNSSGNYDMRNLLNGTLVQRHPSHAVTFVDNHDTQPGEALESFVQGWFKPLAYATILTREQGYPQVFYGDYYGIPSDGVPSYRQQIDPLLKARQQYAYGRQHDYFDHWDVIGWTREGNASHPNSGLATIMSDGPGGSKWMYVGRQKAGEVWHDMTGNRSGTVTINQDGWGHFFVNGGSVSVWVKR

SEQ ID NO: 44421 - protein, 480 aa, Bacillus sp.
NGTIMQYFEWNVPNDGQHWNRLHNNAQNLKNAGITAIWIPPAWKGTSQNDVGYGAYDLYDLGEFNQKGTVRTKYGTKAELERAIRSLKANGIQVYGDVVMNHKGGADFTERVQAVEVNPQNRNQEVSGTYQIEAWTGFNFPGRGNQHSSFKWRWYHFDGTDWDQSRQLANRIYKFRGDGKAWDWEVDTENGNYDYLMYADVDMDHPEVINELNRWGVWYANTLNLDGFRLDAVKHIKFSFMRDWLGHVRGQTGKNLFAVAEYWKNDLGALENYLSKTNWTMSAFDVPLHYNLYQASTSSGNYDMRNLLNGTLVQRHPSHAVTFVDNHDTQPGEALESFVQGWFKPLAYATILTREQGYPQVFYGDYYGIPSDGVPSYRQQIDPLLKARQQYAYGRQHDYFDHWDVIGWTREGNASHPNSGLATIMSDGPGGSKWMYVGRQKAGEVWHDMTGNRSGTVTINQDGWGHFFVNGGSVSVWVKR

SEQ ID NO: 44422 - protein, 480 aa, Bacillus sp.
NGTIMQYFEWNVPNDGQHWNRLHNNAQNLKNAGITAIWIPPAWKGTSQNDVGYGAYDLYDLGEFNQKGTVRTKYGTKAELERAIRSLKANGIQVYGDVVMNHKGGADFTERVQAVEVNPQNRNQEVSGTYQIEAWTGFNFPGRGNQHSSFKWRWYHFDGTDWDQSRQLANRIYKFRGDRKAWDWEVDTENGNYDYLMYADVDMDHPEVINELNRWGVWYANTLNLDGFRLDAVKHIKFSFMRDWLGHVRGQTGKNLFAVAEYWKNDLGALENYLSKTNWTMSAFDVPLHYNLYQASNSSGNYDMRNLLNGTLVQRHPSHAVTFVDNHDTQPGEALESFVQGWFKPLAYATILTREQGYPQVFYGDYYGIPSDGVPSYRQQIDPLLKARQQYAYGRQHDYFDHWDVIGWTREGNASHPNSGLATIMSDGPGGSKWMYVGRQKAGEVWHDMTGNRSGTVTINQDGWGHFFVNGGSVSVWVKR

SEQ ID NO: 44423 - protein, 480 aa, Bacillus sp.
NGTIMQYFEWNVPNDGQHWNRLHNNAQNLKNAGITAIWIPPAWKGTSQNDVGYGAYDLYDLGEFNQKGTVRTKYGTKAELERAIRSLKANGIQVYGDVVMNHKGGADFTERVQAVEVNPQNRNQEVSGTYQIEAWTGFNFPGRGNQHSSFKWRWYHFDGTDWDQSRQLANRIYKFRGDGKAWDWEVDTENGNYDYLMYADVDMDHPEVINELNRWGVWYANTLNLDGFRLDAVKHIKFSFMRDWLGHVRGQTGKNLFAVAEYWKNDLGALENYLSKTNWTMSAFDVPLHYNLYQASNSSGNYDMRNLLNGTLVQRHPSHAVTFVDNHDTQPGEALESFVQGWFKPLAYATILTREQGYPQVFYGDYYGIPSDGVPSYRQQIDPLLKARQQYAYGRQHDYFDHYDVIGWTREGNASHPNSGLATIMSDGPGGSKWMYVGRQKAGEVWHDMTGNRSGTVTINQDGWGHFFVNGGSVSVWVKR

SEQ ID NO: 44424 - protein, 480 aa, Bacillus sp.
NGTIMQYFEWNVPNDGQHWNILHNNAQNLKNAGITAIWIPPAWKGTSQNDVGYGAYDLYDLGEFNQKGTVRTKYGTKAELERAIRSLKANGIQVYGDVVMNHKGGADFTERVQAVEVNPQNRNQEVSGTYQIEAWTGFNFPGRGNQHSSFKWRWYHFDGTDWDQSRQLANRIYKFRGDGKAWDWEVDTENGNYDYLMYADVDMDHPEVINELNRWGVWYANTLNLDGFRLDAVKHIKFSFMRDWLGHVRGQTGKNLFAVAEYWKNDLGALENYLSKTNWTMSAFDVPLHYNLYQASNSSGNYDMRNLLNGTLVQRHPSHAVTFVDNHDTQPGEALESFVQGWFKPLAYATILTREQGYPQVFYGDYYGIPSDGVPSYRQQIDPLLKARQQYAYGRQHDYFDHWDVIGWTREGNASHPNSGLATIMSDGPGGSKWMYVGRQKAGEVWHDMTGNRSGTVTINQDGWGHFFVNGGSVSVWVKR

SEQ ID NO: 44425 - protein, 480 aa, Bacillus sp.
NGTIMQYFEWNVPNDGQHWNRLRNNAQNLKNAGITAIWIPPAWKGTSQNDVGYGAYDLYDLGEFNQKGTVRTKYGTKAELERAIRSLKANGIQVYGDVVMNHKGGADFTERVQAVEVNPQNRNQEVSGTYQIEAWTGFNFPGRGNQHSSFKWRWYHFDGTDWDQSRQLANRIYKFRGDGKAWDWEVDTENGNYDYLMYADVDMDHPEVINELNRWGVWYANTLNLDGFRLDAVKHIKFSFMRDWLGHVRGQTGKNLFAVAEYWKNDLGALENYLSKTNWTMSAFDVPLHYNLYQASNSSGNYDMRNLLNGTLVQRHPSHAVTFVDNHDTQPGEALESFVQGWFKPLAYATILTREQGYPQVFYGDYYGIPSDGVPSYRQQIDPLLKARQQYAYGRQHDYFDHWDVIGWTREGNASHPNSGLATIMSDGPGGSKWMYVGRQKAGEVWHDMTGNRSGTVTINQDGWGHFFVNGGSVSVWVKR

SEQ ID NO: 44426 - protein, 480 aa, Bacillus sp.
NGTIMQYFEWNVPNDGQHWNRLHNNAQNLKNAGITAIWIPPAWKGTSQNDVGYGAYDLYDLGEFNQKGTVRTKYGTKAELERAIRSLKANGIQVYGDVVMNHKGGADFTERVQAVEVNPQNRNQEVSGTYQIEAWTGFGFPGRGNQHSSFKWRWYHFDGTDWDQSRQLANRIYKFRGDGKAWDWEVDTENGNYDYLMYADVDMDHPEVINELNRWGVWYANTLNLDGFRLDAVKHIKFSFMRDWLGHVRGQTGKNLFAVAEYWKNDLGALENYLSKTNWTMSAFDVPLHYNLYQASNSSGNYDMRNLLNGTLVQRHPSHAVTFVDNHDTQPGEALESFVQGWFKPLAYATILTREQGYPQVFYGDYYGIPSDGVPSYRQQIDPLLKARQQYAYGRQHDYFDHWDVIGWTREGNASHPNSGLATIMSDGPGGSKWMYVGRQKAGEVWHDMTGNRSGTVTINQDGWGHFFVNGGSVSVWVKR

SEQ ID NO: 44427 - protein, 480 aa, Bacillus sp.
NGTIMQYFEWNVPNDGQHWNRLHNNAQNLKNAGITAIWIPPAWKGTSQNDVGYGAYDLYDLGEFNQKGTVRTKYGTKAELERAIRSLKANGIQVYGDVVMNHKGGADFTERVQAVEVNPQNRNQEVSGTYQIEAWTGFNFPGRGNQHSSFKWRWYHFDGTDWDQSRQLANRIYKFRGDGKAWDWEVDTENGNYDYLMYADVDMDHPEVINELNRWGVWYANTLNLDGFRLDAVKHIKFSFMRDWLGHVRGQTGKNLFAVAEYWKNDLGALENYLSKTNWTMSAFDVPLHYNLYQASNSSGNYDMRNLLNGTLVQRHPSHAVTFVDNHDTQPGEALESFVQGWFKPLAYATILTREQGYPQVFYGDYYGIPSDGVPSYRQQIDPLLAARQQYAYGRQHDYFDHWDVIGWTREGNASHPNSGLATIMSDGPGGSKWMYVGRQKAGEVWHDMTGNRSGTVTINQDGWGHFFVNGGSVSVWVKR

SEQ ID NO: 44428 - protein, 480 aa, Bacillus sp.
NGTIMQYFEWNVPNDGQHWNRLHNNAQNLKNAGITAIWIPPAWKGTSQNDVGYGAYDLYDLGEFNQKGTVRTKYGTKAELERAIRSLKANGIQVYGDVVMNHKGGADFTERVQAVEVNPQNRNQEVSGTYQIEAWTGFNFPGRGNQHSSFKWRWYHFDGSDWDQSRQLANRIYKFRGDGKAWDWEVDTENGNYDYLMYADVDMDHPEVINELNRWGVWYANTLNLDGFRLDAVKHIKFSFMRDWLGHVRGQTGKNLFAVAEYWKNDLGALENYLSKTNWTMSAFDVPLHYNLYQASNSSGNYDMRNLLNGTLVQRHPSHAVTFVDNHDTQPGEALESFVQGWFKPLAYATILTREQGYPQVFYGDYYGIPSDGVPSYRQQIDPLLKARQQYAYGRQHDYFDHWDVIGWTREGNASHPNSGLATIMSDGPGGSKWMYVGRQKAGEVWHDMTGNRSGTVTINQDGWGHFFVNGGSVSVWVKR

SEQ ID NO: 44429 - protein, 480 aa, Bacillus sp.
NGTIMQYFEWNVPNDGQHWNRLHNNAQNLKNAGITAIWIPPAWKGTSQNDVGYGAYDLYDLGEFNQKGTVRTKYGTKAELERAIRSLKANGIQVYGDVVMNHKGGADFTERVQAVEVNPQNRNQEVSGTYQIEAWTGFNFPGRGNQHSSFKWRWYHFDGTDWDQSRQLANRIYKFRGDGKAWDWEVDTENGNYDYLMYADVDMDHPEVINELNYWGVWYANTLNLDGFRLDAVKHIKFSFMRDWLGHVRGQTGKNLFAVAEYWKNDLGALENYLSKTNWTMSAFDVPLHYNLYQASNSSGNYDMRNLLNGTLVQRHPSHAVTFVDNHDTQPGEALESFVQGWFKPLAYATILTREQGYPQVFYGDYYGIPSDGVPSYRQQIDPLLKARQQYAYGRQHDYFDHWDVIGWTREGNASHPNSGLATIMSDGPGGSKWMYVGRQKAGEVWHDMTGNRSGTVTINQDGWGHFFVNGGSVSVWVKR

SEQ ID NO: 44430 - protein, 480 aa, Bacillus sp.
NGTIMQYFEWNVPNDGQHWNRLHNNAQNLKNAGITAIWIPPAWKGTSQNDVGYGAYDLYDLGEFNQKGTVRTKYGTKAELERAIRSLKANGIQVYGDVVMNHKGGADFTERVQAVEVNPQNRNQEVSGTYQIEAWTGFNFPGRGNQHSSFKWRWYHFDGTDWDQSRQLANRIYKFRGDGKAWDWEVDTENGNYDYLMYADVDMDHPEVINELNRWGVWYANTLNLDGFRLDAVKHIKFSFMRDWLGHVRGQTGKNLFAVAEYWKNDLGALENYLSKTVWTMSAFDVPLHYNLYQASNSSGNYDMRNLLNGTLVQRHPSHAVTFVDNHDTQPGEALESFVQGWFKPLAYATILTREQGYPQVFYGDYYGIPSDGVPSYRQQIDPLLKARQQYAYGRQHDYFDHWDVIGWTREGNASHPNSGLATIMSDGPGGSKWMYVGRQKAGEVWHDMTGNRSGTVTINQDGWGHFFVNGGSVSVWVKR

SEQ ID NO: 44431 - protein, 480 aa, Bacillus sp.
NGTIMQYFEWNVPNDGQHWNRLHNNAQNLKNAGITAIWIPPAWKGTSQNDVGYGAYDLYDLGEFNQKGTVRTKYGTKAELERAIRSLKANGIQVYGDVVMNHKGGADFTETVQAVEVNPQNRNQEVSGTYQIEAWTGFNFPGRGNQHSSFKWRWYHFDGTDWDQSRQLANRIYKFRGDGKAWDWEVDTENGNYDYLMYADVDMDHPEVINELNRWGVWYANTLNLDGFRLDAVKHIKFSFMRDWLGHVRGQTGKNLFAVAEYWKNDLGALENYLSKTNWTMSAFDVPLHYNLYQASNSSGNYDMRNLLNGTLVQRHPSHAVTFVDNHDTQPGEALESFVQGWFKPLAYATILTREQGYPQVFYGDYYGIPSDGVPSYRQQIDPLLKARQQYAYGRQHDYFDHWDVIGWTREGNASHPNSGLATIMSDGPGGSKWMYVGRQKAGEVWHDMTGNRSGTVTINQDGWGHFFVNGGSVSVWVKR

SEQ ID NO: 44432 - protein, 480 aa, Bacillus sp.
NGTIMQYFEWNVPNDGQHWNRLHNNAQNLKNAGITAIWIPPAWKGTSQNDVGYGAYDLYDLGEFNQKGTVRTKYGTKAELERAIRSLKANGIQVYGDVVMNHKGGADFTERVQAVEVNPQNRNQEVSGTYQIEAWTGFNFPGRGNQHSSFKWRWYHFDGTDWDQSRQLANRIYKFRGDGKAWDWEVDTENGNYDYLMYADVDMDHPEVINELNCWGVWYANTLNLDGFRLDAVKHIKFSFMRDWLGHVRGQTGKNLFAVAEYWKNDLGALENYLSKTNWTMSAFDVPLHYNLYQASNSSGNYDMRNLLNGTLVQRHPSHAVTFVDNHDTQPGEALESFVQGWFKPLAYATILTREQGYPQVFYGDYYGIPSDGVPSYRQQIDPLLKARQQYAYGRQHDYFDHWDVIGWTREGNASHPNSGLATIMSDGPGGSKWMYVGRQKAGEVWHDMTGNRSGTVTINQDGWGHFFVNGGSVSVWVKR

SEQ ID NO: 44433 - protein, 480 aa, Bacillus sp.
NGTIMQYFEWNVPNDGQHWNRLHNNAQNLKNAGITAIWIPPAWKGTSQNDVGYGAYDLYDLGEFNQKGTVRTKYGTKAELERAIRSLKANGIQVYGDVVMNHKGGADFTERVQAVEVNPQNRNQEVSGTYQIEAWTGFNFPGRGNQHSSFKWRWYHFDGTDWDQSRQLANRIYKFRGDGKAWDWEVDTENGNYDYLMYADVDMDHPEVINELNRWGVWYANTLNLDGFRLDAVKHIKFSFIRDWLGHVRGQTGKNLFAVAEYWKNDLGALENYLSKTNWTMSAFDVPLHYNLYQASNSSGNYDMRNLLNGTLVQRHPSHAVTFVDNHDTQPGEALESFVQGWFKPLAYATILTREQGYPQVFYGDYYGIPSDGVPSYRQQIDPLLKARQQYAYGRQHDYFDHWDVIGWTREGNASHPNSGLATIMSDGPGGSKWMYVGRQKAGEVWHDMTGNRSGTVTINQDGWGHFFVNGGSVSVWVKR

SEQ ID NO: 44434 - protein, 480 aa, Bacillus sp.
NGTIMQYFEWNVPNDGQHWNRLHNNAQNLKNAGITAIWIPPAWKGTSQNDVGYGAYDLYDLGEFNQKGTVRTKYGTKAELEMAIRSLKANGIQVYGDVVMNHKGGADFTERVQAVEVNPQNRNQEVSGTYQIEAWTGFNFPGRGNQHSSFKWRWYHFDGTDWDQSRQLANRIYKFRGDGKAWDWEVDTENGNYDYLMYADVDMDHPEVINELNRWGVWYANTLNLDGFRLDAVKHIKFSFMRDWLGHVRGQTGKNLFAVAEYWKNDLGALENYLSKTNWTMSAFDVPLHYNLYQASNSSGNYDMRNLLNGTLVQRHPSHAVTFVDNHDTQPGEALESFVQGWFKPLAYATILTREQGYPQVFYGDYYGIPSDGVPSYRQQIDPLLKARQQYAYGRQHDYFDHWDVIGWTREGNASHPNSGLATIMSDGPGGSKWMYVGRQKAGEVWHDMTGNRSGTVTINQDGWGHFFVNGGSVSVWVKR

SEQ ID NO: 44435 - protein, 480 aa, Bacillus sp.
NGTIMQYFEWNVPNDGQHWNRLHNNAQNLKNAGITAIWIPPAQKGTSQNDVGYGAYDLYDLGEFNQKGTVRTKYGTKAELERAIRSLKANGIQVYGDVVMNHKGGADFTERVQAVEVNPQNRNQEVSGTYQIEAWTGFNFPGRGNQHSSFKWRWYHFDGTDWDQSRQLANRIYKFRGDGKAWDWEVDTENGNYDYLMYADVDMDHPEVINELNRWGVWYANTLNLDGFRLDAVKHIKFSFMRDWLGHVRGQTGKNLFAVAEYWKNDLGALENYLSKTNWTMSAFDVPLHYNLYQASNSSGNYDMRNLLNGTLVQRHPSHAVTFVDNHDTQPGEALESFVQGWFKPLAYATILTREQGYPQVFYGDYYGIPSDGVPSYRQQIDPLLKARQQYAYGRQHDYFDHWDVIGWTREGNASHPNSGLATIMSDGPGGSKWMYVGRQKAGEVWHDMTGNRSGTVTINQDGWGHFFVNGGSVSVWVKR

SEQ ID NO: 44436 - protein, 480 aa, Bacillus sp.
NGTIMQYFEWNVPNDGQHWNRLHNNAQNLKEAGITAIWIPPAWKGTSQNDVGYGAYDLYDLGEFNQKGTVRTKYGTKAELERAIRSLKANGIQVYGDVVMNHKGGADFTERVQAVEVNPQNRNQEVSGTYQIEAWTGFNFPGRGNQHSSFKWRWYHFDGTDWDQSRQLANRIYKFRGDGKAWDWEVDTENGNYDYLMYADVDMDHPEVINELNRWGVWYANTLNLDGFRLDAVKHIKFSFMRDWLGHVRGQTGKNLFAVAEYWKNDLGALENYLSKTNWTMSAFDVPLHYNLYQASNSSGNYDMRNLLNGTLVQRHPSHAVTFVDNHDTQPGEALESFVQGWFKPLAYATILTREQGYPQVFYGDYYGIPSDGVPSYRQQIDPLLKARQQYAYGRQHDYFDHWDVIGWTREGNASHPNSGLATIMSDGPGGSKWMYVGRQKAGEVWHDMTGNRSGTVTINQDGWGHFFVNGGSVSVWVKR

SEQ ID NO: 44437 - protein, 480 aa, Bacillus sp.
NGTIMQYFEWNVPNDGQHWNRLHNNAQNLKNAGITAIWIPPAWKGTSQNDVGYGAYDLYDLGEFNQKGTVRTKYGTKAELERAIRSLKANGIQVYGDVVMNHKGGADFTERVQAVEVNPQNRNQEVSGTYQIEAWTGFNFPGRGNQHSSFKWRWYHFDGTDWDQSRQLANRIYKFRGDGKAWDWEVDTENGNYDYLMYADVDMDHPEVINELNRWGVWYANTLNLDGFRLDAVKHIKFSFMRDWLGHVRGQTGKNLFAVAEYWKNDLGALENYLSKTNWTMSAFDVPLHYNLYAASNSSGNYDMRNLLNGTLVQRHPSHAVTFVDNHDTQPGEALESFVQGWFKPLAYATILTREQGYPQVFYGDYYGIPSDGVPSYRQQIDPLLKARQQYAYGRQHDYFDHWDVIGWTREGNASHPNSGLATIMSDGPGGSKWMYVGRQKAGEVWHDMTGNRSGTVTINQDGWGHFFVNGGSVSVWVKR

SEQ ID NO: 44438 - protein, 480 aa, Bacillus sp.
NGTIMQYFEWNVPNDGQHWNRLHNNAQNLKNAGITAIWIPPAWKGTSQNDVGYGAYDLYDLGEFNQKGTVRTKYGTKAELERAIRSLKANGIQVYGDVVMNHKGGADFTERVQAVEVNPQNRNQEVSGTYQIEAWTGFNFPGRGNQHSSFKWRWYHFDGTDWDQSRQLANRIYKFRGDGKAWDWEVDTENGNYDYLMYADVDMDHPEVINELNRWGVWYANTLNLDGFRLDAVKHIKFSFMRDWLGHVRGQTGKNLFAVAEYWKNDLGALENYLSKTNWTMSAFDVPLHYNLYQASNSSGNYDMRNLLNGTLVQRHPSHAVTFVDNHDTQPGEALESFVQGWFKPLAYATILTRCQGYPQVFYGDYYGIPSDGVPSYRQQIDPLLKARQQYAYGRQHDYFDHWDVIGWTREGNASHPNSGLATIMSDGPGGSKWMYVGRQKAGEVWHDMTGNRSGTVTINQDGWGHFFVNGGSVSVWVKR

SEQ ID NO: 44439 - protein, 480 aa, Bacillus sp.
NGTIMQYFEWNVPTDGQHWNRLHNNAQNLKNAGITAIWIPPAWKGTSQNDVGYGAYDLYDLGEFNQKGTVRTKYGTKAELERAIRSLKANGIQVYGDVVMNHKGGADFTERVQAVEVNPQNRNQEVSGTYQIEAWTGFNFPGRGNQHSSFKWRWYHFDGTDWDQSRQLANRIYKFRGDGKAWDWEVDTENGNYDYLMYADVDMDHPEVINELNRWGVWYANTLNLDGFRLDAVKHIKFSFMRDWLGHVRGQTGKNLFAVAEYWKNDLGALENYLSKTNWTMSAFDVPLHYNLYQASNSSGNYDMRNLLNGTLVQRHPSHAVTFVDNHDTQPGEALESFVQGWFKPLAYATILTREQGYPQVFYGDYYGIPSDGVPSYRQQIDPLLKARQQYAYGRQHDYFDHWDVIGWTREGNASHPNSGLATIMSDGPGGSKWMYVGRQKAGEVWHDMTGNRSGTVTINQDGWGHFFVNGGSVSVWVKR

SEQ ID NO: 44440 - protein, 480 aa, Bacillus sp.
NGTIMQYFEWNVPNDGQHWNRLHNNAQNLKNAGITAIWIPPAWKGTSQNDVGYGAYDLYDLGEFNQKGTVRTKYGTKAELERAIRSLKANGIQVYGDVVMNHKGGADFTERVQAVEVNPQNRNQEVSGTYQIEAWTGFNFPGRGNQHSSFKWRWYHFDGTDWDQSRQLANRIYKFRGDGKAWDWEVDTENGNYDYLMYADVDMDHPEVINELNSWGVWYANTLNLDGFRLDAVKHIKFSFMRDWLGHVRGQTGKNLFAVAEYWKNDLGALENYLSKTNWTMSAFDVPLHYNLYQASNSSGNYDMRNLLNGTLVQRHPSHAVTFVDNHDTQPGEALESFVQGWFKPLAYATILTREQGYPQVFYGDYYGIPSDGVPSYRQQIDPLLKARQQYAYGRQHDYFDHWDVIGWTREGNASHPNSGLATIMSDGPGGSKWMYVGRQKAGEVWHDMTGNRSGTVTINQDGWGHFFVNGGSVSVWVKR

SEQ ID NO: 44441 - protein, 480 aa, Bacillus sp.
NGTIMQYFEWNVPNDGQHWNRLHNNAQNLKNAGITAIWIPPAWKGTSQNDVGYGAYDLYDLGEFNQKGTVRTKYGTKAELERAIRSLKANGIQVYGDVVMNHKGGADFTERVQAVEVNPQNRNQEVSGTYQIEAWTGFNFPGRGNIHSSFKWRWYHFDGTDWDQSRQLANRIYKFRGDGKAWDWEVDTENGNYDYLMYADVDMDHPEVINELNRWGVWYANTLNLDGFRLDAVKHIKFSFMRDWLGHVRGQTGKNLFAVAEYWKNDLGALENYLSKTNWTMSAFDVPLHYNLYQASNSSGNYDMRNLLNGTLVQRHPSHAVTFVDNHDTQPGEALESFVQGWFKPLAYATILTREQGYPQVFYGDYYGIPSDGVPSYRQQIDPLLKARQQYAYGRQHDYFDHWDVIGWTREGNASHPNSGLATIMSDGPGGSKWMYVGRQKAGEVWHDMTGNRSGTVTINQDGWGHFFVNGGSVSVWVKR

SEQ ID NO: 44442 - protein, 480 aa, Bacillus sp.
NGTIMQYFEWNVPNDGQHWNRLHNNAQNLKNAGITAIWIPPAWKGTSQNDVGYGAYDLYDLGEFNQKGTVRTKYGTKAELERAIRSLKANGIQVYGDVVMNHKGGADFTERVQAVEVNPQNRNQEVSGTYQIEAWTGFNFPGRGNQHSSFKWRWYHFDGTDWDQSRQLANRIYKFRGDGKAWDWEVDTENGNYDYLMYADVDMDHPEVINELNRWGVWYANTLNLDGFRLDAVKHIKFSFMRDWLGHVRGQTGKNLFAVAEYWKNDLGALENYLSKTNWTMSAFDVPLHYNLYQASNSSGNYDMRNLLNGTLVQRHPSHAVTFVDNHDTQPGEALESFVQGWFKPLAYATILTREQGYPQVFYGDYYGIPSDGFPSYRQQIDPLLKARQQYAYGRQHDYFDHWDVIGWTREGNASHPNSGLATIMSDGPGGSKWMYVGRQKAGEVWHDMTGNRSGTVTINQDGWGHFFVNGGSVSVWVKR

SEQ ID NO: 44443 - protein, 480 aa, Bacillus sp.
NGTIMQYFEWNVPNDGQHWNRLHNNAQNLKNAGITAIWIPPAWKGTSQNDVGYGAYDLYDLGEFNQKGTVRTKYGTKAELERAIRSLKANGIQVYGDVVMNHKGGADFTERVQAVEVNPQNRNQEVSGTYQIEAWTGFNFPGRGNQHSSFKWRWYHFDGTDWDQSRQLANRIYKFRGDGKAWDWEVDTENGNYDYLMYADVDMDHPEVINELNRWGVWYANTLNLDGFRLDAVKHIKFSFMRDWLGHVRGQTGKNLFAVAEYWKNDLWALENYLSKTNWTMSAFDVPLHYNLYQASNSSGNYDMRNLLNGTLVQRHPSHAVTFVDNHDTQPGEALESFVQGWFKPLAYATILTREQGYPQVFYGDYYGIPSDGVPSYRQQIDPLLKARQQYAYGRQHDYFDHWDVIGWTREGNASHPNSGLATIMSDGPGGSKWMYVGRQKAGEVWHDMTGNRSGTVTINQDGWGHFFVNGGSVSVWVKR

SEQ ID NO: 44444 - protein, 480 aa, Bacillus sp.
NGTIMQYFEWNVPNDGQHWNRLHNNAQNLKNAGITAIWIPPAWKGTSQNDVGYGAYDLYDLGEFNQKGTVRTKYGTKAELERAIRSLKANGIQVYGDVVMNHKGGADFTERVQAVEVNPQNRNQEVSGTYQIEAWTGFNFPGRGNQHSSFKWRWYHFDGTDWDQSRQLANRIYKFRGDGKAWDWEVDTENGNYDYLMYADVDMDHPEVINELNRWGVWYANTLNLDGFRLDAVKHIKFSFMRDWLGHVRGQTGKNLFAVAEYWKNDLGALENYLSKTNWTMSAFDVPLHYNLYQASNSSGNYDMRNLLNGTLVQRHPSHAVTFVDNHDTQPGEALESFVQGWFKPLAYATILTREQGYPQVFYGDYYGIPSDGVPSYRGQIDPLLKARQQYAYGRQHDYFDHWDVIGWTREGNASHPNSGLATIMSDGPGGSKWMYVGRQKAGEVWHDMTGNRSGTVTINQDGWGHFFVNGGSVSVWVKR

SEQ ID NO: 44445 - protein, 480 aa, Bacillus sp.
NGTIMQYFEWNVPNDGQHWNRLHNNAQNLKNAGITAIWIPPAWKGTSQNDVGYGAYDLYDLGEFNQKGTVRTKYGTKAELERAIRSLKANGIQVYGDVVMNHKGGADFTERVQAVEVNPQNRNQEVSGTYQIEAWTGFNFPGRGNQHSSFKWRWYHFDGTDWDQSRQLANRIYKFRGDGKAWDWEVDTENGNYDYLMYADVDMDHPEVINELNRWGVWYANTLNLDGFRLDAVKHIKFSFMRDWLGHVRGQTGKNLFAVAEYWKNDLGALENYLSKTNWTMSAFDVPLHYNLYQASNSSGNYDMRNLLNGTLVQRHPSHAVTFVDNHDTQPGEALESFVQGWFKPLAYATILTREQGYPQVFYGDYYGIPSDGLPSYRQQIDPLLKARQQYAYGRQHDYFDHWDVIGWTREGNASHPNSGLATIMSDGPGGSKWMYVGRQKAGEVWHDMTGNRSGTVTINQDGWGHFFVNGGSVSVWVKR

SEQ ID NO: 44446 - protein, 480 aa, Bacillus sp.
NGTIMQYFEWNVPNDGQHWNRLHNNAQNLKWAGITAIWIPPAWKGTSQNDVGYGAYDLYDLGEFNQKGTVRTKYGTKAELERAIRSLKANGIQVYGDVVMNHKGGADFTERVQAVEVNPQNRNQEVSGTYQIEAWTGFNFPGRGNQHSSFKWRWYHFDGTDWDQSRQLANRIYKFRGDGKAWDWEVDTENGNYDYLMYADVDMDHPEVINELNRWGVWYANTLNLDGFRLDAVKHIKFSFMRDWLGHVRGQTGKNLFAVAEYWKNDLGALENYLSKTNWTMSAFDVPLHYNLYQASNSSGNYDMRNLLNGTLVQRHPSHAVTFVDNHDTQPGEALESFVQGWFKPLAYATILTREQGYPQVFYGDYYGIPSDGVPSYRQQIDPLLKARQQYAYGRQHDYFDHWDVIGWTREGNASHPNSGLATIMSDGPGGSKWMYVGRQKAGEVWHDMTGNRSGTVTINQDGWGHFFVNGGSVSVWVKR

SEQ ID NO: 44447 - protein, 480 aa, Bacillus sp.
NGTIMQYFEWNVPNDGQHWNRLHNNAQNLKNAGITAIWIPPAWKGTSQNDVGYGAYDLYDLGEFNQKGTVRTKYGTKAELERAIRSLKANGIQVYGDVVMNHKGGADFTERVQAVEVNPQNRNQEVSGTYQIEAWTGFNFPGRGNQHSSFKWRWYHFDGLDWDQSRQLANRIYKFRGDGKAWDWEVDTENGNYDYLMYADVDMDHPEVINELNRWGVWYANTLNLDGFRLDAVKHIKFSFMRDWLGHVRGQTGKNLFAVAEYWKNDLGALENYLSKTNWTMSAFDVPLHYNLYQASNSSGNYDMRNLLNGTLVQRHPSHAVTFVDNHDTQPGEALESFVQGWFKPLAYATILTREQGYPQVFYGDYYGIPSDGVPSYRQQIDPLLKARQQYAYGRQHDYFDHWDVIGWTREGNASHPNSGLATIMSDGPGGSKWMYVGRQKAGEVWHDMTGNRSGTVTINQDGWGHFFVNGGSVSVWVKR

SEQ ID NO: 44448 - protein, 480 aa, Bacillus sp.
NGTIMQYFEWNVPNDGQHWNRLHNNAQNLKNAGITAIWIPPAWKGTSQNDVGYGAYDLYDLGEFNQKGTVRTKYGTKAELERAIRSLKANGIQVYGDVVMNHKGGADFTERVQAVEVNPQNRNQEVSGTYQIEAWTGFNFPGRGNQHSSFKWRWYHFDGTDWDQSRQLANRIYKFRGDGKAWDWEVDTENGNYDYLMYADVDMDHPEVINELNRWGVWYANTLNLDGFRLDAVKHIKFSFMRDWLGHVRGQTGKNLFAVAEYWKNDLGALENYVSKTNWTMSAFDVPLHYNLYQASNSSGNYDMRNLLNGTLVQRHPSHAVTFVDNHDTQPGEALESFVQGWFKPLAYATILTREQGYPQVFYGDYYGIPSDGVPSYRQQIDPLLKARQQYAYGRQHDYFDHWDVIGWTREGNASHPNSGLATIMSDGPGGSKWMYVGRQKAGEVWHDMTGNRSGTVTINQDGWGHFFVNGGSVSVWVKR

SEQ ID NO: 44449 - protein, 480 aa, Bacillus sp.
NGTIMQYFEWNVPNDGQHWNRLHNNAQNLKNAGITAIWIPPAWKGTSQNDVGYGAYDLYDLGEFNQKGTVRTKYGTKAELERAIRELKANGIQVYGDVVMNHKGGADFTERVQAVEVNPQNRNQEVSGTYQIEAWTGFNFPGRGNQHSSFKWRWYHFDGTDWDQSRQLANRIYKFRGDGKAWDWEVDTENGNYDYLMYADVDMDHPEVINELNRWGVWYANTLNLDGFRLDAVKHIKFSFMRDWLGHVRGQTGKNLFAVAEYWKNDLGALENYLSKTNWTMSAFDVPLHYNLYQASNSSGNYDMRNLLNGTLVQRHPSHAVTFVDNHDTQPGEALESFVQGWFKPLAYATILTREQGYPQVFYGDYYGIPSDGVPSYRQQIDPLLKARQQYAYGRQHDYFDHWDVIGWTREGNASHPNSGLATIMSDGPGGSKWMYVGRQKAGEVWHDMTGNRSGTVTINQDGWGHFFVNGGSVSVWVKR

SEQ ID NO: 44450 - protein, 480 aa, Bacillus sp.
NGTIMQYFEWNVPNDGQHWNRLHNNAQNLKNAGITAIWIPPAWKGTSQNDVGYGAYDLYDLGEFNQKGTVRTKYGTKAELERAIRSLKANGIQVYGDVVMNHKGGADFTERVQAVEVNPQNRNQEVSGTYQIEAWTGFNFPGRGNQHSSFKWRWYHFDGTDWDQSRQLANRIYKFRGDGKAWDWEVDTENGNYDYLMYADVDMDHPEVINELNRWGVWYANTLNLDGFRLDAVKHIKFSFMRDWLGHVRGQTGKNLFAVAEYWKNDLGALENYLSKTNWTMSAFDVPLHYNLYQASNSSGNYDMRNLLNGTLVQRHPSHAVTFVDNHDTQPGEALESFVQGWFKPLAYATILTREQGYPQVFYGDYYGIPSDGVPSYRQQIDPLLKARQKYAYGRQHDYFDHWDVIGWTREGNASHPNSGLATIMSDGPGGSKWMYVGRQKAGEVWHDMTGNRSGTVTINQDGWGHFFVNGGSVSVWVKR

SEQ ID NO: 44451 - protein, 480 aa, Bacillus sp.
NGTIMQYFEWNVPNDGQHWNRLHNNAQNLKNAGITAIWIPPAWKGTSQNDVGYGAYDLYDLGEFNQKGTVRTKYGTKAELERAIRSLKANGIQVYGDVVMNHKGGADFTERVQAVEVNPQNRNQEVSGTYQIEAWTGFNFPGRGNQHSSFKWRWSHFDGTDWDQSRQLANRIYKFRGDGKAWDWEVDTENGNYDYLMYADVDMDHPEVINELNRWGVWYANTLNLDGFRLDAVKHIKFSFMRDWLGHVRGQTGKPLFAVAEYWKNDLGALENYLSKTNWTMSAFDVPLHYNLYQASNSSGNYDMRNLLNGTLVQRHPSHAVTFVDNHDTQPGEALESFVQGWFKPLAYATILTREQGYPQVFYGDYYGIPSDGVPSYRQQIDPLLKARQQYAYGRQHDYFDHWDVIGWTREGNASHPNSGLATIMSDGPGGSKWMYVGRQKAGEVWHDMTGNRSGTVTINQDGWGHFFVNGGSVSVWVKR

SEQ ID NO: 44452 - protein, 480 aa, Bacillus sp.
NGTIMQYFEWNVPNDGQHWNRLHNNAQNLKNAGITAIWIPPAWKGTSQNDVGYGAYDLYDLGEFNQKGTVRTKYGTKAELERAIRSLKANGIQVYGDVVMNHKGGADFTERVQAVEVNPQNRNQEVSGTYQIEAWTGFNFPGRGNQHSSFKWRWYHFDGTDWDQSRQLANRIYKFRGDGKAWDWEVDTENGNYDYLMYADVDMDHPEVIDELNRWGVWYANTLNLDGFRLDAVKHIKFSFMRDWLGHVRGQTGKNLFAVAEYWKNDLGALENYLSKTNWTMSAFDVPLHYNLYQASNSSGNYDMRNLLNGTLVQRHPSHAVTFVDNHDTQPGEALESFVQGWFKPLAYATILTREQGYPQVFYGDYYGIPSDGVPSYRQQIDPLLKARQQYAYGRQHDYFDHWDVIGWTREGNASHPNSGLATIMSDGPGGSKWMYVGRQKAGEVWHDMTGNRSGTVTINQDGWGHFFVNGGSVSVWVKR

SEQ ID NO: 44453 - protein, 480 aa, Bacillus sp.
NGTIMQYFEWNVPNDGQHWNRLHNNAQNLKNAGITAIWIPPAWKGTSQNDVGYGAYDLYDLGEFNQKGTVRTKYGTKAELERAIRSLKANGIQVYGDVVMNHKGGADFTERVQAVEVNPQNRNQEVSGTYQIEAWTGFNFPGRGNQHSSFKWRWYHFDGTDWDQSRQLANRIYKFRGDGKAWDWEVDTEXGNYDYLMYADVDMDHPEVINELNRWGVWYANTLNLDGFRLDAVKHIKFSFMRDWLGHVRGQTGKNLFAVAEYWXNDLGALENYLSKTNWTMSAFDVPLHYNLYQASNSSGNYDMRNLLNGTLVQRHPSHAVTFVDNHDTQPGEALESFVQGWFKPLAYATILTREQGYPQVFYGDYYGIPSDGVPSYRQQIDPLLKARQQYAYGRQHDYFDHWDVIGWTREGNASHPNSGLATIMSDGPGGSKWMYVGRQKAGEVWHDMTGNRSGTVTINQDGWGHFFVNGGSVSVWVKR

SEQ ID NO: 44454 - protein, 480 aa, Bacillus sp.
NGTIMQYFEWNVPNDGQHWNRLHNNAQNLKNAGITAIWIPPAWKGTSQNDVGYGAYDLYDLGEFNQKGTVRTKYGTKAELERAIRSLKANGIQVYGDVVMNHKGGADFTERVQAVEVNPQNRNQEVSGTYQIEAWTGFNFPGRGNQHSSFKWRWYHFDGTDWDQSRQLANRIYKFRGDGKAWDWEVDTENGNYDYLMYADVDMDHPEVINELNRWGVWYANTLNLDGFRLDAVKHIKFSFMRDWLGHVRGQTGKNLFAVAEYWKNDLGALENYLSKTNWTMSAFDVPLHYNLYQASNSSGNYDMRNLLNGTLVQRHPSHAVTFVDNHDTQPGEALESFVQGWFKPLAYATILTREQGYPQVFYGDYYGIPSDGVPSYRQQIDPLLKARQQYAYGRQHDYFDHWDVIGWTREGNASHPNSGLATIMSDGPGGSKWMYVGRQKAGEVWRDMTGNRSGTVTINQDGWGHFFVNGGSVSVWVKR

SEQ ID NO: 44455 - protein, 480 aa, Bacillus sp.
NGTIMQYFEWNVPNDGQHWNRLHNNAQNLKNAGITAIWIPPAWKGTSQNDVGYGAYDLYDLGEFNQKGTVRTKYGTKAELERAIRSLKANGIQVYGDVVMNHKGGADFTERVQAVEVNPQNRNQEVSGTYQIEAWTGFNFPGRGNQHSSFKWRWYHFDGTDWDQSRQLANRIYKFRGDGKAWDWEVDTENGNYDYLMYADVDMDHPEVINELNRWGVWYANTLNSDGFRLDAVKHIKFSFMRDWLGHVRGQTGKNLFAVAEYWKNDLGALENYLSKTNWTMSAFDVPLHYNLYQASNSSGNYDMRNLLNGTLVQRHPSHAVTFVDNHDTQPGEALESFVQGWFKPLAYATILTREQGYPQVFYGDYYGIPSDGVPSYRQQIDPLLKARQQYAYGRQHDYFDHWDVIGWTREGNASHPNSGLATIMSDGPGGSKWMYVGRQKAGEVWHDMTGNRSGTVTINQDGWGHFFVNGGSVSVWVKR

SEQ ID NO: 44456 - protein, 480 aa, Bacillus sp.
NGTIMQYFEWNVPNDGQHWNRLHNNAGNLKNAGITAIWIPPAWKGTSQNDVGYGAYDLYDLGEFNQKGTVRTKYGTKAELERAIRSLKANGIQVYGDVVMNHKGGADFTERVQAVEVNPQNRNQEVSGTYQIEAWTGFNFPGRGNQHSSFKWRWYHFDGTDWDQSRQLANRIYKFRGDGKAWDWEVDTENGNYDYLMYADVDMDHPEVINELNRWGVWYANTLNLDGFRLDAVKHIKFSFMRDWLGHVRGQTGKNLFAVAEYWKNDLGALENYLSKTNWTMSAFDVPLHYNLYQASNSSGNYDMRNLLNGTLVQRHPSHAVTFVDNHDTQPGEALESFVQGWFKPLAYATILTREQGYPQVFYGDYYGIPSDGVPSYRQQIDPLLKARQQYAYGRQHDYFDHWDVIGWTREGNASHPNSGLATIMSDGPGGSKWMYVGRQKAGEVWHDMTGNRSGTVTINQDGWGHFFVNGGSVSVWVKR

SEQ ID NO: 44457 - protein, 480 aa, Bacillus sp.
NGTIMQYFEWNVPNDGQHWNRLHNNAQNLKNAGITAIWIPPAWKGTSQNDVGYGAYDLYDLGEFNQKGTVRTKYGTKAELERAIRSLKANGIQVYGDVVMNHKGGADFTERVQAVEVNPQNRNQEVSGTYQIEAWTGFNFPGRGNQHSSFKWRWYHFDGTDWDQSRQLANRIYKFRGDGKAWDWEVDTENGNYDYLMYADVDMDHPEVINELNRWGVWYANTLNLDGFRLDAVKHIKFSFMRDWLGHVRGQTGKNLFAVAEYWKNDLGALENYLSKTNWTMSAFDVPLHYNLYQASNSSGNYDMRNLLNGTLVQRHPSHAVTFVDNHDTQPGEALESFVQGWFKPLAYATILTREQGYPQVFYGDYYGIPSCGVPSYRQQIDPLLKARQQYAYGRQHDYFDHWDVIGWTREGNASHPNSGLATIMSDGPGGSKWMYVGRQKAGEVWHDMTGNRSGTVTINQDGWGHFFVNGGSVSVWVKR

SEQ ID NO: 44458 - protein, 480 aa, Bacillus sp.
NGTIMQYFEWNVPNDGQHWNRLHNNAQNLKNAGITAIWIPPAWKGTSQNDVGYGAYDLYDLGEFNQKGTVRTKYGTKAELERAIRSLKANGIQVYGDVVMNHKGGADFTERVQAVEVNPQNRNQEVSGTYQIEAWTGFNFPGRGNQHSSFKWRWYHFDGTDWDQSRQLANRIYKFRGDGKAWDWEVDTENGNYDYLMYADVDMDHPEVINELNAWGVWYANTLNLDGFRLDAVKHIKFSFMRDWLGHVRGQTGKNLFAVAEYWKNDLGALENYLSKTNWTMSAFDVPLHYNLYQASNSSGNYDMRNLLNGTLVQRHPSHAVTFVDNHDTQPGEALESFVQGWFKPLAYATILTREQGYPQVFYGDYYGIPSDGVPSYRQQIDPLLKARQQYAYGRQHDYFDHWDVIGWTREGNASHPNSGLATIMSDGPGGSKWMYVGRQKAGEVWHDMTGNRSGTVTINQDGWGHFFVNGGSVSVWVKR

SEQ ID NO: 44459 - protein, 480 aa, Bacillus sp.
NGTIMQYFEWNVPNDGQHWNRLHNNAQNLKNAGITAIWIPPAWKGTSQNDVGYGAYDLYDLGEFNQKGTVRTKYGTKAELERAIRSLKANGIQVYGDVVMNHKGGADFTERVQAVEVNPQNRNQEVSGTYQIEAWTGFNFPGRGNQHSSFKWRWYHFDGTDWDQSRQLANRIYKFRGDGKAWDWEVDTENGNYDYLMYADVDMDHPEVINELNRWGVWYANTLNLDGFRLDAVKHIKFSFMRDWLGHVRGQTGKNLFAVAEYWKNDLGALENYTSKTNGTMSAFDVPLHYNLYQASNSSGNYDMRNLLNGTLVQRHPSNAVTFVDNHDTQPGEALESFVQGWFKPLAYATILTREQGYPQVFYGDYYGIPSDGVPSYRQQIDPLLKARQQYAYGRQHDYFDHWDVIGWTREGNASHPNSGLATIMSDGPGGSKWMYVGRQKAGEVWHDMTGNRSGTVTINQDGWGHFFVNKGSVSVWVKR

SEQ ID NO: 44460 - protein, 480 aa, Bacillus sp.
NGTIMQYFEWNVPNDGQHWNRLHNNAQNLKNAGITAIWIPPAWKGTSQNDVGYGAYDLYDLGEFNQKGTVRTKYGTKAELERAIRSLKANGIQVYGDVVMNHKGGADFTERVQAVEVNPQNRNQEVSGTYQIEAWTGFNFPGRGNQHSSFKWRWYHFDGTDWDQSRQLANRIYKFRGDGKAWDWEVDTENGNYDYLMYADVDMDHPEVINELNRWGVWYANTLNLDGFRLDAVKHIKFSFMRDWLGHVRGQTGKNLFAVAEYWKNDLGALENYLSKTNWTMSAFDVPLHYNLYQASNSSGNYDMRNLLNGTLVQRHPSHAVTFVDNHDTQPGEALTSFVQGWFKPLAYATILTREQGYPQVFYGDYYGIPSDGVPSYRQQIDPLLKARQQYAYGRQHDYFDHWDVIGWTREGNASHPNSGLATIMSDGPGGSKWMYVGRQKAGEVWHDMTGNRSGTVTINQDGWGHFFVNGGSVSVWVKR

SEQ ID NO: 44461 - protein, 480 aa, Bacillus sp.
NGTIMQYFEWNVPNDGQHWNRLHNNAQNLKNAGITAIWIPPAWKGTSQNDVGYGAYDLYDLGEFNQKGTVRTKYGTKAELERAIRSLKANGIQVYGDVVMNHKGGADFTERVQAVEVNPQNRNQEVSGTYQIEAWTGFNFPGRGNQHSSFKWRWYHFDGTDWDQSRQLANRIYKFRGDGKAWDWEVDTERGNYDYLMYADVDMDHPEVINELNRWGVWYANTLNLDGFRLDAVKHIKFSFMRDWLGHVRGQTGKNLFAVAEYWKNDLGALENYLSKTNWTMSAFDVPLHYNLYQASNSSGNYDMRNLLNGTLVQRHPSHAVTFVDNHDTQPGEALESFVQGWFKPLAYATILTREQGYPQVFYGDYYGIPSDGVPSYRQQIDPLLKARQQYAYGRQHDYFDHWDVIGWTREGNASHPNSGLATIMSDGPGGSKWMYVGRQKAGEVWHDMTGNRSGTVTINQDGWGHFFVNGGSVSVWVKR

SEQ ID NO: 44462 - protein, 480 aa, Bacillus sp.
NGTIMQYFEWNVPNDGQHWNRLHNNAQNLKNAGITAIWIPPAWKGTSQNDVGYGAYDLYDLGEFNQKGTVRTKYGTKAELERAIRSLKANGIQVYGDVVMNHKGGADFTERVQAVEVNPQNRNQEVSGTYQIEAWTGFNFPGRGNQHSSFKWRWYHFDGTDWDQSRQLANRIYKFRGDGKAWDWEVDTENGNYDYLMYADVDMDHPEVINELNRWGVWYANTLNLDGFRLDAVKHIKFSFMRDWLGHVRGQTGKNLFAVAEYWKNDLGALENYLSKTNWTMSAFDVPLHYNLYQASNSAGNYDMRNLLNGTLVQRHPSHAVTFVDNHDTQPGEALESFVQGWFKPLAYATILTREQGYPQVFYGDYYGIPSDGVPSYRQQIDPLLKARQQYAYGRQHDYFDHWDVIGWTREGNASHPNSGLATIMSDGPGGSKWMYVGRQKAGEVWHDMTGNRSGTVTINQDGWGHFFVNGGSVSVWVKR

SEQ ID NO: 44463 - protein, 480 aa, Bacillus sp.
NGTIMQYFEWNVPNDGQHWNRLHNNAQNLKNAGITAIWIPPAWKGTSQNDVGYGAYDLYDLGEFNQKGTVRTKYGTKAELERAIRSLKANGIQVYGDVVMNHKGGADFTERVQAVEVNPQNRNQEVSGTYQIEAWTGFNFPGRGNQHSSFKWRWYHFDGTDWDQSRQLANRIYKFRGDGKAWDWEVDTENGNYDYLMYADVDMDHPEVINELNRWGVWYANTLNLDGFRLDAVKHIKFSFMRDWLGHVRGQTGKNLFAVAEYWKNDLGALENYLSKTNWTMSAFDVPLHYNLYQASNSSGNYDMRNLLNGTLVQRCPSHAVTFVDNHDTQPGEALESFVQGWFKPLAYATILTREQGYPQVFYGDYYGIPSDGVPSYRQQIDPLLKARQQYAYGRQHDYFDHWDVIGWTREGNASHPNSGLATIMSDGPGGSKWMYVGRQKAGEVWHDMTGNRSGTVTINQDGWGHFFVNGGSVSVWVKR

SEQ ID NO: 44464 - protein, 480 aa, Bacillus sp.
NGTIMQYFEWNVPNDGQHWNRLHNNAQNLKNAGITAIWIPPAWKGTSQNDVGYGAYDLYDLGEFNQKGTVRTKYGTKAELERAIRSLKANGIQVYGDVVMNHKGGADFTERVQAVEVNPQNRNQEVSGTYQIEAWTGFNFPGRGNQHSSFKWRWYHFDGTDWDQSRQLANRIYKFRGDGKAWDWEVDTENGNYDYLMYADVDMDHPEVINELNRWGVWYANTLNLDGFRLDAVKHIKFSFMRDWLGHVRGQTGKNLFAVAEYWKNDLGALENYLSKTNWTMSAFDVPLHYNLYQASNSSGNYDMRNLLNGTLVQRHPSHAVTFVDNHDTQPGEALESFVQGWFKPLAYATILTREQGYPQVFYGDYYGIPSDGVPSYRQQIDPLLKARQQYAYGRQHDYFDHWDVIGWTREGNASRPNSGLATIMSDGPGGSKWMYVGRQKAGEVWHDMTGNRSGTVTINQDGWGHFFVNGGSVSVWVKR

SEQ ID NO: 44465 - protein, 480 aa, Bacillus sp.
NGTIMQYFEWNVPNDGQHWNRLHNNAQNLKNAGITAIWIPPAWKGTSQNDVGYGAYDLYDLGEFNQKGTVRTKYGTKAELERAIRSLKANGIQVYGDVVMNHKGGADFTERVQAVEVNPQNRNQEVSGTYQIEAWTGFNFPGRGNQHSSFKWRWYHFDGTDWDQSRQLANRIYKFRGDGKAWDWEVDTENGNYDYLMYADVDMDHPEVINELNRWGVWYANTLNLDGFRLDAVKHIKFSFMRDWLGHVRGQTGKNLFAVAEYWKNDLGALENYLSKTNWTMSAFDVPLHYNLYQASNSSGNYDMRNLLNGTLVQRHPSHAVTFVDNHDTQPGEALESFVQGWFKPLAYATILTREQGYPQVFYGDYYGIPSDGVPSYRQQIDPLLKARQQYAYGRQHDYFDHWDVIGWTREGNASHPNSGLATIMSDGPGGSKWMYVGRQKAGEVWHDMTGNRSSTVTINQDGWGHFFVNGGSVSVWVKR

SEQ ID NO: 44466 - protein, 480 aa, Bacillus sp.
NGTIMQYFEWNVPNDGQHWNRLHNNAQNLKNAGITAIWIPPAWKGTSQNDVGYGAYDLYDLGEFNQKGTVRTKYGTKAELERAIRSLKANGIQVYGDVVMNHKGGADFTERVQAVEVNPQNRNQEVSGTYQIEAWTGFNFPGRGNQHSSFKWRWYHFDGTDWDQSRQLANRIYKFRGDGKAWDWEVDTENGNYDYLMYADVDMDHPEVINELNRWGVWYANTLNLDGFRLDAVKHIKFSFMRDWLGHVRGQTGKNLFAVAEYWKNDLGALENYLSKTNWTMSAFDVPLHYNLYQASNSSGNYDMRNLLNGTLVQRHPSHAVTFVDNHDTQPGEALESFVQGWFKPLAYATILTREQGYPQVFYGDYYGIPSDGVPSYRQQIDPLLKARQQYAYGRQHDYFDHWDVIGWTREGNASHPNSGLATIMSDGPGGSKWMYVGLQKAGEVWHDMTGNRSGTVTINQDGWGHFFVNGGSVSVWVKR

SEQ ID NO: 44467 - protein, 480 aa, Bacillus sp.
NGTIMQYFEWNVPNDGQHWNRLHNNAQNLKNAGITAIWIPPAWKGTSQNDVGYGAYDLYDLGEFNQKGTVRTKYGTKAELERAIRSLKANGIQVYGDVVMNHKGGADFTERVQAVEVNPQNRNQEVSGTYQIEAWTGFRFPGRGNQHSSFKWRWYHFDGTDWDQSRQLANRIYKFRGDGKAWDWEVDTENGNYDYLMYADVDMDHPEVINELNRWGVWYANTLNLDGFRLDAVKHIKFSFMRDWLGHVRGQTGKNLFAVAEYWKNDLGALENYLSKTNWTMSAFDVPLHYNLYQASNSSGNYDMRNLLNGTLVQRHPSHAVTFVDNHDTQPGEALESFVQGWFKPLAYATILTREQGYPQVFYGDYYGIPSDGVPSYRQQIDPLLKARQQYAYGRQHDYFDHWDVIGWTREGNASHPNSGLATIMSDGPGGSKWMYVGRQKAGEVWHDMTGNRSGTVTINQDGWGHFFVNGGSVSVWVKR

SEQ ID NO: 44468 - protein, 480 aa, Bacillus sp.
NGTIMQYFEWNVPNDGQHWNRLHNNAQNLKNAGITAIWIPPAWKGTSQNDVGYGAYDLYDLGEFNQKGTVRTKYGTKAELERAIRSLKANGIQVYGDVVMNHKGGADFTERVQAVEVNPQNRNQEVSGTYQIEAWTGFNFPGRGNQHSSFKWRWYHFDGTDWDQSRQLANRIYKFRGDGKAWDWEVDTENGNYDYLMYADVDMDHPEVINELNRWGVWYANTLNLDGFRLDAVKHIKFSFMRDWLGHVRGQTGKNLFAVAEYWKNDLGALENYLSKTGWTMSAFDVPLHYNLYQASNSSGNYDMRNLLNGTLVQRHPSHAVTFVDNHDTQPGEALESFVQGWFKPLAYATILTREQGYPQVFYGDYYGIPSDGVPSYRQQIDPLLKARQQYAYGRQHDYFDHWDVIGWTREGNASHPNSGLATIMSDGPGGSKWMYVGRQKAGEVWHDMTGNRSGTVTINQDGWGHFFVNGGSVSVWVKR

SEQ ID NO: 44469 - protein, 480 aa, Bacillus sp.
NGTIMQYFEWNVPNDGQHWNRLHNNAQNLKNAGITAIWIPPAWKGTSQNDVGYGAYDLYDLGEFNQKGTVRTKYGTKAELERAIRSLKANGIQVYGDVVMNHKGGADFTERVQAVEVNPQNRNQEVSGTYQIEAWTGFNFPGRGNQHSSFKWRWYHFDGTDWDQSRQLANRIYKFRGDGKAWDWEVDTENGNYDYLMYADVDMDHPEVINELNRWGVWYANTLNLDGFRLDAVKHIKFSFMRDWLGHVRGQTGKNLFAVAEYWKNDLGALENYLSKTNWTMSAFDVPLHYNLYQASNSSGNYDMRNLLNGTLAQRHPSHAVTFVDNHDTQPGEALESFVQGWFKPLAYATILTREQGYPQVFYGDYYGIPSDGVPSYRQQIDPLLKARQQYAYGRQHDYFDHWDVIGWTREGNASHPNSGLATIMSDGPGGSKWMYVGRQKAGEVWHDMTGNRSGTVTINQDGWGHFFVNGGSVSVWVKR

SEQ ID NO: 44470 - protein, 480 aa, Bacillus sp.
NGTIMQYFEWNVPNDGQHWNRLHNNAQNLKNAGITAIWIPPAWKGTSQNDVGYGAYDLYDLGEFNQKGTVRTKYGTKAELERAIRSLKANGIQVYGDVVMNHKGGADFTERVQAVEVNPQNRNQEVSGTYQIEAWTGFNFPGRGNQHSSFKWRWYHFDGTDWDQSRQLANRIYKFRGDGKAWDWEVDTENGNYDYLMYADVDMDHPEVINELNRWGVWYANTLNLDGFRLDAVKHIKFSFMRDWLGHVRGQTGKNLFAVAEYWKNDLGALENYLSKTNWTMSAFDVPLHYNLYQASNSSGNYDMRNLLNGTLVQRHPSHAVTFVDNHDTQPGEALESFVQGWFKPLAYATILTREQGYPQVFYGDYYGIPSDGVPSYRPQIDPLLKARQQYAYGRQHDYFDHWDVIGWTREGNASHPNSGLATIMSDGPGGSKWMYVGRQKAGEVWHDMTGNRSGTVTINQDGWGHFFVNGGSVSVWVKR

SEQ ID NO: 44471 - protein, 480 aa, Bacillus sp.
NGTIMQYFEWNVPNDGQHWNRLHNNAQNLKNAGITAIWIPPAWKGTSQNDVGYGAYDLYDLGEFNQKGTVRTKYGTKAELERAIRSLKANGIQVYGDVVMNHKGGADFTERVQAVEVNPQNRNQEVSGTYQIEAWTGFNFPGRGNQHSSFKWRWYHFDGTDWDQSRQLANRIYKFRGDGKAWDWEVDTENGNYDYLMYADVDMDHPEVINELNRWGVWYANTLNLDGFRLDAVKHIKFSFMRDWLGHVRGQTGKNLFAVAEYWKNDLGALENYLSKTNTTMSAFDVPLHYNLYQASNSSGNYDMRNLLNGTLVQRHPSHAVTFVDNHDTQPGEALESFVQGWFKPLAYATILTREQGYPQVFYGDYYGIPSDGVPSYRQQIDPLLKARQQYAYGRQHDYFDHWDVIGWTREGNASHPNSGLATIMSDGPGGSKWMYVGRQKAGEVWHDMTGNRSGTVTINQDGWGHFFVNGGSVSVWVKR

SEQ ID NO: 44472 - protein, 480 aa, Bacillus sp.
NGTIMQYFEWNVPNDGQHWNRLHNNAQNLKNAGITAIWIPPAWKGTSQNDVGYGAYDLYDLGEFNQKGTVRTKYGTKAELERAIRSLKANGIQVYGDVVMNHKGGADFTERVQAVEVNPQNRNQEVSGTYQIEAWTGFNFPGRGNQHSSFKWRWYHFDGTDWDQSRELANRIYKFRGDGKAWDWEVDTENGNYDYLMYADVDMDHPEVINELNRWGVWYANTLNLDGFRLDAVKHIKFSFMRDWLGHVRGQTGKNLFAVAEYWKNDLGALENYLSKTNWTMSAFDVPLHYNLYQASNSSGNYDMRNLLNGTLVQRHPSHAVTFVDNHDTQPGEALESFVQGWFKPLAYATILTREQGYPQVFYGDYYGIPSDGVPSYRQQIDPLLKARQQYAYGRQHDYFDHWDVIGWTREGNASHPNSGLATIMSDGPGGSKWMYVGRQKAGEVWHDMTGNRSGTVTINQDGWGHFFVNGGSVSVWVKR

SEQ ID NO: 44473 - protein, 480 aa, Bacillus sp.
NGTIMQYFEWNVPNDGQHWNRLHNNAQNLKNAGITAIWIPPAWKGTSQNDVGYGAYDLYDLGEFNQKGTVRTKYGTKAELERAIRSLKANGIQVYGDVVMNHKGGADFTERVQAVEVNPQNRNQEVSGTYQIEAWTGFNFPGRGNQHSSFKWRWYHFDGTDWDQSRQLANRIYKFRGDGKAWDWEVDTENGNYDYLMYADVDMDHPEVINELNRWGVWYANTLNLDGFRLDAVKHIKFSFMRDWLGHVRGQTGKRLFAVAEYWKNDLGALENYLSKTNWTMSAFDVPLHYNLYQASNSSGNYDMRNLLNGTLVQRHPSHAVTFVDNHDTQPGEALESFVQGWFKPLAYATILTREQGYPQVFYGDYYGIPSDGVPSYRQQIDPLLKARQQYAYGRQHDYFDHWDVIGWTREGNASHPNSGLATIMSDGPGGSKWMYVGRQKAGEVWHDMTGNRSGTVTINQDGWGHFFVNGGSVSVWVKR

SEQ ID NO: 44474 - protein, 480 aa, Bacillus sp.
NGTIMQYFEWNVPNDGQHWNRLHNNAQNLKNAGITAIWIPPAWKGTSQNDVGYGAYDLYDLGEFNQKGTVRTKYGTKAELERAIRSLKANGIQVYGDVVMNHKGGADFTERVQAVEVNPQNRNQEVSGTYQIEAWTGFNFPGRGNQHSSFKWRWYHFDGTDWDQSRQLANRIYKFRGDGKAWDWEVDTENGNYDYLMYADVDMDHPEVINELNRWGVWYANTLNLDGFRLDAVKHIKFSFMRDWLGHVRGQTGKNLFAVAEYWKNDLGALENYLSKTNWTMSAFDVPLHYNLYQASNSSGNYDMRNLLNGTLVQRHPSHAVTFVDNHDTQPGEALESFVQGWFKPLAYATILTREQGYPQVFYGDYYGIPSDGVPSYRQQIDPLLKARQQYAYGRQHDYFDHWDVIGWTREGNASHPNSGLATIMSDGPGGSKWMYVGRQKAGEVWHDMTGNRSGTVTINQDGWGHFYVNGGSVSVWVKR

SEQ ID NO: 44475 - protein, 480 aa, Bacillus sp.
NGTIMQYFEWNVPNDGQHWNRLHNNAQNLKNAGITAIWIPPAWKGTSQNDVGYGAYDLYDLGEFNQKGTVRTKYGTKAELERAIRSLKAEGIQVYGDVVMNHKGGADFTERVQAVEVNPQNRNQEVSGTYQIEAWTGFNFPGRGNQHSSFKWRWYHFDGTDWDQSRQLANRIYKFRGDGKAWDWEVDTENGNYDYLMYADVDMDHPEVINELNRWGVWYANTLNLDGFRLDAVKHIKFSFMRDWLGHVRGQTGKNLFAVAEYWKNDLGALENYLSKTNWTMSAFDVPLHYNLYQASNSSGNYDMRNLLNGTLVQRHPSHAVTFVDNHDTQPGEALESFVQGWFKPLAYATILTREQGYPQVFYGDYYGIPSDGVPSYRQQIDPLLKARQQYAYGRQHDYFDHWDVIGWTREGNASHPNSGLATIMSDGPGGSKWMYVGRQKAGEVWHDMTGNRSGTVTINQDGWGHFFVNGGSVSVWVKR

SEQ ID NO: 44476 - protein, 480 aa, Bacillus sp.
NGTIMQYFEWNVPNDGQHWNRLHNNAQNLKNAGITAIWIPPAWKGTSQNDVGYGAYDLYDLGEFNQKGTVRTKYGTKAELERAIRSLKANGIQVYGDVVMNHKGGADFTERVQAVEVNPQNRNQEVSGTYQIEAWTGFNFPGRGNQHSSFKWRWYHFDGTDWDQSRQLAGRIYKFRGDGKAWDWEVDTENGNYDYLMYADVDMDHPEVINELNRWGVWYANTLNLDGFRLDAVKHIKFSFMRDWLGHVRGQTGKNLFAVAEYWKNDLGALENYLSKTNWTMSAFDVPLHYNLYQASNSSGNYDMRNLLNGTLVQRHPSHAVTFVDNHDTQPGEALESFVQGWFKPLAYATILTREQGYPQVFYGDYYGIPSDGVPSYRQQIDPLLKARQQYAYGRQHDYFDHWDVIGWTREGNASHPNSGLATIMSDGPGGSKWMYVGRQKAGEVWHDMTGNRSGTVTINQDGWGHFFVNGGSVSVWVKR

SEQ ID NO: 44477 - protein, 480 aa, Bacillus sp.
NGTIMQYFEWNVPNDGQHWNRLHNNAQNLKNAGITAIWIPPAWKGTSQNDVGYGAYDLYDLGEFNQKGTVRTKYGTKAELERAIRSLKANGIQVYGDVVMNHKGGADFTERVQAVEVNPQNRNQEVSGTYQIEAWTGFNFPGRGNQHSSFKWRWYHFDGTDWDQSRQLANRIYKFRGDGKAWDWEVDTENGNYDYLMYADVDMDHPEVINELNRWGVWYANTLNLDGFRLDAVKHIKFSFMRDWLGHVRGQTGKNLFAVAEYWKNDLGALENYLSKTNWTMSAFDVPLHYNLYQASNSSGNYDMRNLLNGTLVQRHPSHAVTFVDNHDTQPGEALESFVQGWFKPLAYATILTREQGYPQVFYGDYYGIPRDGVPSYRQQIDPLLKARQQYAYGRQHDYFDHWDVIGWTREGNASHPNSGLATIMSDGPGGSKWMYVGRQKAGEVWHDMTGNRSGTVTINQDGWGHFFVNGGSVSVWVKR

SEQ ID NO: 44478 - protein, 480 aa, Bacillus sp.
NGTIMQYFEWNVPNDGQHWNRLHNNAQNLKNAGITAIWIPPAWKGTSQNDVGYGAYDLYDLGEFNQKGTVRTKYGTKAELERAIRSLKANGIQVYGDVVMNHKGGADFTERVQAVEVNPQNRNQEVSGTYQIEAWTGFNFPGRGNQHSSFKWRWYHFDGTDWDQSRQLANRIYKFRGDGKAWDWEVDTENGNYDYLMYADVDMDHPEVINELNRWGVWYANTLNLDGFRLDAVKHIKFSFMRDWLGHVRGQTGKNLFAVAEYWKNDLGALENYLSKTNWTMSAFDVPLHYNLYQASNSSGNYDMRNLLNGTLVQRHPSHAVTFVDNHDTQPGEALESFVQGWFKPLAYATILTREGGYPQVFYGDYYGIPSDGVPSYRQQIDPLLKARQQYAYGRQHDYFDHWDVIGWTREGNASHPNSGLATIMSDGPGGSKWMYVGRQKAGEVWHDMTGNRSGTVTINQDGWGHFFVNGGSVSVWVKR

SEQ ID NO: 44479 - protein, 480 aa, Bacillus sp.
NGTIMQYFEWNVPNDGQHWNRLHNNAQNLKNAGITAIWIPPAWKGTSQNDVGYGAYDLYDLGEFNQKGTVRTKYGTKAELERAIRSLKANGIQVYGDVVMNHKGGADFTERVQAVEVNPQNRNQEVSGTYQIEAWTGFNFPGRGNQHSSFKWRWYHFDGTDWDQSRQLANRIYKFRGDGKAWDWEVDTENGNYDYLMYADIDMDHPEVINELNRWGVWYANTLNLDGFRLDAVKHIKFSFMRDWLGHVRGQTGKNLFAVAEYWKNDLGALENYLSKTNWTMSAFDVPLHYNLYQASNSSGNYDMRNLLNGTLVQRHPSHAVTFVDNHDTQPGEALESFVQGWFKPLAYATILTREQGYPQVFYGDYYGIPSDGVPSYRQQIDPLLKARQQYAYGRQHDYFDHWDVIGWTREGNASHPNSGLATIMSDGPGGSKWMYVGRQKAGEVWHDMTGNRSGTVTINQDGWGHFFVNGGSVSVWVKR

SEQ ID NO: 44480 - protein, 480 aa, Bacillus sp.
NGTIMQYFEWNVPNDGQHWNRLHNNAQNLKNAGITAIWIPPAWKGTSQNDVGYGAYDLYDLGEFNQKGTVRTKYGTKAELERAIRSLKANGIQVYGDVVMNHKGGADMTERVQAVEVNPQNRNQEVSGTYQIEAWTGFNFPGRGNQHSSFKWRWYHFDGTDWDQSRQLANRIYKFRGDGKAWDWEVDTENGNYDYLMYADVDMDHPEVINELNRWGVWYANTLNLDGFRLDAVKHIKFSFMRDWLGHVRGQTGKNLFAVAEYWKNDLGALENYLSKTNWTMSAFDVPLHYNLYQASNSSGNYDMRNLLNGTLVQRHPSHAVTFVDNHDTQPGEALESFVQGWFKPLAYATILTREQGYPQVFYGDYYGIPSDGVPSYRQQIDPLLKARQQYAYGRQHDYFDHWDVIGWTREGNASHPNSGLATIMSDGPGGSKWMYVGRQKAGEVWHDMTGNRSGTVTINQDGWGHFFVNGGSVSVWVKR

SEQ ID NO: 44481 - protein, 480 aa, Bacillus sp.
NGTIMQYFEWNVPNDGQHWVRLHNNAQNLKNAGITAIWIPPAWKGTSQNDVGYGAYDLYDLGEFNQKGTVRTKYGTKAELERAIRSLKANGIQVYGDVVMNHKGGADFTERVQAVEVNPQNRNQEVSGTYQIEAWTGFNFPGRGNQHSSFKWRWYHFDGTDWDQSRQLANRIYKFRGDGKAWDWEVDTENGNYDYLMYADVDMDHPEVINELNRWGVWYANTLNLDGFRLDAVKHIKFSFMRDWLGHVRGQTGKNLFAVAEYWKNDLGALENYLSKTNWTMSAFDVPLHYNLYQASNSSGNYDMRNLLNGTLVQRHPSHAVTFVDNHDTQPGEALESFVQGWFKPLAYATILTREQGYPQVFYGDYYGIPSDGVPSYRQQIDPLLKARQQYAYGRQHDYFDHWDVIGWTREGNASHPNSGLATIMSDGPGGSKWMYVGRQKAGEVWHDMTGNRSGTVTINQDGWGHFFVNGGSVSVWVKR

SEQ ID NO: 44482 - protein, 480 aa, Bacillus sp.
NGTIMQYFEWNVPNDGQHWNRLHNNAQNLKNAGITAIWIPPAWKGTSQNDVGYGAYDLYDLGEFNQKGTVRTKYGTKAELERAIRSLKANGIQVYGDVVMNHKGGADFTERVQAVEVNPQNRNQEVSGTYQIEAWTGFNFPGRGNQHSSFKWRWYHFDGTDWDQSRQLANRIYKFRGDGKAWDWEVDTENGNYDYLMYADVDMDHPEVINELNRWGVWYANTLNLDGFRLDAVKHIKFSFMRDWLGHVRGQTGKNLFAVAEYWKNDLGALENYLSKTNWTMSAFDVPLHYMLYQASNSSGNYDMRNLLNGTLVQRHPSHAVTFVDNHDTQPGEALESFVQGWFKPLAYATILTREQGYPQVFYGDYYGIPSDGVPSYRQQIDPLLKARQQYAYGRQHDYFDHWDVIGWTREGNASHPNSGLATIMSDGPGGSKWMYVGRQKAGEVWHDMTGNRSGTVTINQDGWGHFFVNGGSVSVWVKR

SEQ ID NO: 44483 - protein, 480 aa, Bacillus sp.
NGTIMQYFEWNVPNDGQHWNRLHNNAQNLKNAGITAIWIPPAWKGTSQNDVGYGAYDLYDLGEFNQKGTVRTKYGTKAELERAIRSLKANGIQVYGDVVMNHKGGADFTERVFAVEVNPQNRNQEVSGTYQIEAWTGFNFPGRGNQHSSFKWRWYHFDGTDWDQSRQLANRIYKFRGDGKAWDWEVDTENGNYDYLMYADVDMDHPEVINELNRWGVWYANTLNLDGFRLDAVKHIKFSFMRDWLGHVRGQTGKNLFAVAEYWKNDLGALENYLSKTNWTMSAFDVPLHYNLYQASNSSGNYDMRNLLNGTLVQRHPSHAVTFVDNHDTQPGEALESFVQGWFKPLAYATILTREQGYPQVFYGDYYGIPSDGVPSYRQQIDPLLKARQQYAYGRQHDYFDHWDVIGWTREGNASHPNSGLATIMSDGPGGSKWMYVGRQKAGEVWHDMTGNRSGTVTINQDGWGHFFVNGGSVSVWVKR

SEQ ID NO: 44484 - protein, 480 aa, Bacillus sp.
NGTIMQYFEWNVPNDGQHWNRLHNNAQNLKNAGITAIWIPPAWKGTSQNDVGYGSYDLYDLGEFNQKGTVRTKYGTKAELERAIRSLKANGIQVYGDVVMNHKGGADFTERVQAVEVNPQNRNQEVSGTYQIEAWTGFNFPGRGNQHSSFKWRWYHFDGTDWDQSRQLANRIYKFRGDGKAWDWEVDTENGNYDYLMYADVDMDHPEVINELNRWGVWYANTLNLDGFRLDAVKHIKFSFMRDWLGHVRGQTGKNLFAVAEYWKNDLGALENYLSKTNWTMSAFDVPLHYNLYQASNSSGNYDMRNLLNGTLVQRHPSHAVTFVDNHDTQPGEALESFVQGWFKPLAYATILTREQGYPQVFYGDYYGIPSDGVPSYRQQIDPLLKARQQYAYGRQHDYFDHWDVIGWTREGNASHPNSGLATIMSDGPGGSKWMYVGRQKAGEVWHDMTGNRSGTVTINQDGWGHFFVNGGSVSVWVKR

SEQ ID NO: 44485 - protein, 480 aa, Bacillus sp.
NGTIMQYFEWNVPNDGQHWNRLHNNAQNLKNAGITAIWIPPAWKGTSQNDVGYGAYDLYDLGEFNQKGTVRTKYGTKAELERAIRSLKANGIQVYGDVVMNHKGGADFTERVQAVEVNPQNRNQEVSGTYQIEAWTGFNFPGRGNQHSSFKWRWYHFDGTDWDQSRQLANRIYKFRGDGKAWDWEVDTENGNYDYLMYADVDMDHPEVINELNRWGVWYANTLNLDGFRLDAVKHIKFSFMRDWLGHVRGQTGKNLFAVAEYWKNDLGALENYLSKTNWTMSAFDVPLHYNLYQASNSPGNYDMRNLLNGTLVQRHPSHAVTFVDNHDTQPGEALESFVQGWFKPLAYATILTREQGYPQVFYGDYYGIPSDGVPSYRQQIDPLLKARQQYAYGRQHDYFDHWDVIGWTREGNASHPNSGLATIMSDGPGGSKWMYVGRQKAGEVWHDMTGNRSGTVTINQDGWGHFFVNGGSVSVWVKR

SEQ ID NO: 44486 - protein, 480 aa, Bacillus sp.
NGTIMQYFEWNVPNDGQHWNRLHNNAQNLKNAGITAIWIPPAWKGTSQNDVGYGAYDLYDLGEFNQKGTVRTKYGTKAELERAIRSLKANGIQVYGDVVMNHKGGADFTERVQAVEVNPQNRNQEVSGTYQIEAWTGFNFPGRGNQHSSFKWRWYHFDGTDWDQSRQLANRIYKFRGDGKAWDWEVDTENGNYDYLMYADVDMDHPEVINELNRWGVWYANTLNLDGFRLDAVKHIKFSFMRDWLGHVRGQTGKNLFAVAEYWKNDLGALENYLSKTNWTMSAFDVPLHYNLYQASNSSGNYDMRNLLNGTLVQRHPSHAVTFVDNHDTQPGEALESFVQGWFKPLAYATILTREQGYPQVFYGDYYGIPSDGVPSYRQQIDPLLKARQQYAYGRQHDYFDHWDVIGWTREGNASHPNSGLATIMSDGPGGSKWMYVGRQKAGEVWHDVTGNRSGTVTINQDGWGHFFVNGGSVSVWVKR

SEQ ID NO: 44487 - protein, 480 aa, Bacillus sp.
NGTIMQYFEWNVPNDGQHWNRLHNNAQNLKNAGITAIWIPPAWKGTSQNDVGYGAYDLYDLGEFNQKGTVRTKYGTKAELERAIRSLKANGIQVYGDVVMNHKGGADFTERVQAVEVNPQNRNQEVSGTYQIEAWTGFNFPGRGNQHSSFKWRWYHFDGTDWDQSRQLANRIYKFRGDGKAWDWEVDTENGNYDYLMYADVDMDHPEVINELNRWGVWYANTLNLDGFRLDAVKHIKFSFMRDWLGHVRGQTGKNLFAVAEYWKNDLGALENYLSKTNWTMSAFDVPLHYNLYQASNSSGNYDMRNLLNGTLVQRHPSHAVTFVDNHDTQPGEALESFVQGWFKPLAYATILTREQGYPLVFYGDYYGIPSDGVPSYRQQIDPLLKARQQYAYGRQHDYFDHWDVIGWTREGNASHPNSGLATIMSDGPGGSKWMYVGRQKAGEVWHDMTGNRSGTVTINQDGWGHFFVNGGSVSVWVKR

SEQ ID NO: 44488 - protein, 480 aa, Bacillus sp.
NGTIMQYFEWNVPNDGQHWNRLHNNAQNLKNAGITAIWIPPAWKGTSQNDVGYGAYDLYDLGEFNQKGTVRTKYGTKAELERAIRSLKANGIQVYGDVVMNHKGGADFTERVQAVEVNPQNRNQEVSGTYQIEAWTGFNFPGRGNQHSSFKWRWYHFDGTDWDQSRQLANRIYKFRGDGKAWDWEVDTENGNYDYLMYADVDMDHPEVINELNRWGVWYANTLNLDGFRLDAVKHIKFSFMRDWLGHVRGQTGKPLFAVAEYWKNDLGALENYLSKTNWTMSAFDVPLHYNLYQASNSSGNYDMRNLLNGTLVQRHPSHAVTFVDNHDTQPGEALESFVQGWFKPLAYATILTREQGYPQVFYGDYYGIPSDGVPSYRQQIDPLLKARQQYAYGRQHDYFDHWDVIGWTREGNASHPNSGLATIMSDGPGGSKWMYVGRQKAGEVWHDMTGNRSGTVTINQDGWGHFFVNKGSVSVWVKR

SEQ ID NO: 44489 - protein, 480 aa, Bacillus sp.
NGTIMQYFEWNVPNDGQHWNRLHNNAQNLKNAGITAIWIPPAFKGTSQNDVGYGAYDLYDLGEFNQKGTVRTKYGTKAELERAIRSLKANGIQVYGDVVMNHKGGADFTERVQAVEVNPQNRNQEVSGTYQIEAWTGFNFPGRGNQHSSFKWRWYHFDGTDWDQSRQLANRIYKFRGDGKAWDWEVDTENGNYDYLMYADVDMDHPEVINELNRWGVWYANTLNLDGFRLDAVKHIKFSFMRDWLGHVRGQTGKNLFAVAEYWKNDLGALENYLSKTNWTMSAFDVPLHYNLYQASNSSGNYDMRNLLNGTLVQRHPSHAVTFVDNHDTQPGEALESFVQGWFKPLAYATILTREQGYPQVFYGDYYGIPSDGVPSYRQQIDPLLKARQQYAYGRQHDYFDHWDVIGWTREGNASHPNSGLATIMSDGPGGSKWMYVGRQKAGEVWHDMTGNRSGTVTINQDGWGHFFVNGGSVSVWVKR

SEQ ID NO: 44490 - protein, 480 aa, Bacillus sp.
NGTIMQYFEWNVPNDGQHWNRLHNNAQNLKNAGITAIWIPPAWKGTSQNDVGYGAYDLYDLGEFNQKGTVRTKYGTKAELERAIRSLKANGIQVYGDVVMNHKGGADFTEFVQAVEVNPQNRNQEVSGTYQIEAWTGFNFPGRGNQHSSFKWRWYHFDGTDWDQSRQLANRIYKFRGDGKAWDWEVDTENGNYDYLMYADVDMDHPEVINELNRWGVWYANTLNLDGFRLDAVKHIKFSFMRDWLGHVRGQTGKNLFAVAEYWKNDLGALENYLSKTNWTMSAFDVPLHYNLYQASNSSGNYDMRNLLNGTLVQRHPSHAVTFVDNHDTQPGEALESFVQGWFKPLAYATILTREQGYPQVFYGDYYGIPSDGVPSYRQQIDPLLKARQQYAYGRQHDYFDHWDVIGWTREGNASHPNSGLATIMSDGPGGSKWMYVGRQKAGEVWHDMTGNRSGTVTINQDGWGHFFVNGGSVSVWVKR

SEQ ID NO: 44491 - protein, 480 aa, Bacillus sp.
NGTIMQYFEWNVPNDGQHWNRLHNNAQNLKNAGITAIWIPPAWKGTSQNDVGYGAYDLYDLGEFNQKGTVRTKYGTKAELERAIRSLKANGIQVYGDVVMNHKGGADFTERVQAVEVNPQNRNQEVSGTYQIEAWTGFNFPGRGNQHSSFKWRWYHFDGTDWDQSRQLANRIYKFRGTGKAWDWEVDTENGNYDYLMYADVDMDHPEVINELNRWGVWYANTLNLDGFRLDAVKHIKFSFMRDWLGHVRGQTGKNLFAVAEYWKNDLGALENYLSKTNWTMSAFDVPLHYNLYQASNSSGNYDMRNLLNGTLVQRHPSHAVTFVDNHDTQPGEALESFVQGWFKPLAYATILTREQGYPQVFYGDYYGIPSDGVPSYRQQIDPLLKARQQYAYGRQHDYFDHWDVIGWTREGNASHPNSGLATIMSDGPGGSKWMYVGRQKAGEVWHDMTGNRSGTVTINQDGWGHFFVNGGSVSVWVKR

SEQ ID NO: 44492 - protein, 480 aa, Bacillus sp.
NGTIMQYFEWNVPNDGQHWNRLHNNAQNLKNAGITAIWIPPAWKGTSQNDVGYGAYDLYDLGEFNQKGTVRTKYGTKAELERAIRSLKANGIQVYGDVVMNHKGGADFTERVQAVEVNPQNRNQEVSGTYQIEAWTGFNFPGRGNQHSSFKWRWYHFDGTDWDQSRQLANRIYKFRGDGKAWDWEVDTENGNYDYLMYADVDMDHPEVINELNRWGVWYANTLNLDGFRLDAVKHIKFSFMRDWLGHVRGQTGKNLFAVAEYWKNDLGALENYLSKTNWTMSAFDVPLHYNLYQASNSSGNYDMRNLLNGTLVQRHPSHAVTFVDNHDTQPGEALESFVQGWFKPLAYATILTREQGYPQVFYGDYYGIPSDGVPSYRHQIDPLLKARQQYAYGRQHDYFDHWDVIGWTREGNASHPNSGLATIMSDGPGGSKWMYVGRQKAGEVWHDMTGNRSGTVTINQDGWGHFFVNGGSVSVWVKR

SEQ ID NO: 44493 - protein, 480 aa, Bacillus sp.
NGTIMQYFEWNVPNDGQHWNRLHNNAQNLKNAGITAIWIPPAWKGTSQNDVGYGAYDLYDLGEFNQKGTVRTKYGTKAELERAIRSLKANGIQVYGDVVMNHKGGADFTERVQAVEVNPQNRNQEVSGTYQIEAWTGFNFPGRGNQHSSFKWRWYHFDGTDWDQSRQLANRIYKFRGDGKAWDWEVDTENGNYDYLMYADVDMDHPEVINELNRWGVWYANTLNLDGFRLDAVKHIKFSFMRDWLGHVRGQTGKPLFAVAEYWKNDLGALENYLSKTNWTMSAFDVPLHYNLYQASNSSGNYDMRNLLNGTLVQRHPSHAVTFVDNHDTQPGEALESFVQGWFKPLAYATILTREQGYPQVFYGDYYGIPSDGVPSYRQQIDPLLKARQQYAYGRQHDYFDHWDVIGWTREGNASHPNSGLATIMSDGPGGSKWMYVGRQKAGEVWHDMTGNRSGTVTINQDGRGHFFVNGGSVSVWVKR

SEQ ID NO: 44494 - protein, 480 aa, Bacillus sp.
NGTIMQYFEWNVPNDGQHWNRLHNNAQNLKNAGITAIWIPPAWKGTSQNDVGYGAYDLYDLGEFNQKGTVRTKYGTKAELERAIRTLKANGIQVYGDVVMNHKGGADFTERVQAVEVNPQNRNQEVSGTYQIEAWTGFNFPGRGNQHSSFKWRWYHFDGTDWDQSRQLANRIYKFRGDGKAWDWEVDTENGNYDYLMYADVDMDHPEVINELNRWGVWYANTLNLDGFRLDAVKHIKFSFMRDWLGHVRGQTGKNLFAVAEYWKNDLGALENYLSKTNWTMSAFDVPLHYNLYQASNSSGNYDMRNLLNGTLVQRHPSHAVTFVDNHDTQPGEALESFVQGWFKPLAYATILTREQGYPQVFYGDYYGIPSDGVPSYRQQIDPLLKARQQYAYGRQHDYFDHWDVIGWTREGNASHPNSGLATIMSDGPGGSKWMYVGRQKAGEVWHDMTGNRSGTVTINQDGWGHFFVNGGSVSVWVKR

SEQ ID NO: 44495 - protein, 480 aa, Bacillus sp.
NGTIMQYFEWNVPNDGQHWNRLHNNAQNLKNAGITAIWIPPAWKGTSQNDVGYGAYDLYDLGEFNQKGTVRTKYGTKAELERAIRSLKANGIQVYGDVVMNHKGGADFTEEVQAVEVNPQNRNQEVSGTYQIEAWTGFNFPGRGNQHSSFKWRWYHFDGTDWDQSRQLANRIYKFRGDGKAWDWEVDTENGNYDYLMYADVDMDHPEVINELNRWGVWYANTLNLDGFRLDAVKHIKFSFMRDWLGHVRGQTGKNLFAVAEYWKNDLGALENYLSKTNWTMSAFDVPLHYNLYQASNSSGNYDMRNLLNGTLVQRHPSHAVTFVDNHDTQPGEALESFVQGWFKPLAYATILTREQGYPQVFYGDYYGIPSDGVPSYRQQIDPLLKARQQYAYGRQHDYFDHWDVIGWTREGNASHPNSGLATIMSDGPGGSKWMYVGRQKAGEVWHDMTGNRSGTVTINQDGWGHFFVNGGSVSVWVKR

SEQ ID NO: 44496 - protein, 480 aa, Bacillus sp.
NGTIMQYFEWNVPNDGQHWNRLHNNAQNLKNAGITAIWIPPAWKGTSQNDVGYGAYDLYDLGEFNQKGTVRTKYGTKAELERAIRSLKANGIQVYGDVVMNHKGGADFTERVQAVEVNPQNRNQEVSGTYQIEAWTGFNFPGRGNQHSSFKWRWYHFDGTDWDQSRQLANRIYKFRGDGKAWDWEVDTENGNYDYLMYADVDMDHPEVICELNRWGVWYANTLNLDGFRLDAVKHIKFSFMRDWLGHVRGQTGKNLFAVAEYWKNDLGALENYLSKTNWTMSAFDVPLHYNLYQASNSSGNYDMRNLLNGTLVQRHPSHAVTFVDNHDTQPGEALESFVQGWFKPLAYATILTREQGYPQVFYGDYYGIPSDGVPSYRQQIDPLLKARQQYAYGRQHDYFDHWDVIGWTREGNASHPNSGLATIMSDGPGGSKWMYVGRQKAGEVWHDMTGNRSGTVTINQDGWGHFFVNGGSVSVWVKR

SEQ ID NO: 44497 - protein, 480 aa, Bacillus sp.
NGTIMQYFEWNVPNDGQHWNRLHNNAQNLKNAGITAIWIPPAWKGTSQNDVGYGAYDLYDLGEFNQKGTVRTKYGTKAELERAIRSLKANGIQVYGDVVMNHKGGADFTERVQAVEVNPQNRNQEVSGTYQIEAWTGFNFPGRGNQHSSFKWRWYHFDGTDWDQSRQLANRIYKFRGDGKAWDWEVDTENGNYDYLMYADVDMDHPEVINELNRWGVWYANTLNLDGFRLDAVKHIKFSFMRDWLGHVRGQTGKNLFAVAEYWKNDLGALENYLSKTNWTMSAFDVPLHYNLYQASNSSGNYDMRNLLNGTLVQRHPSHAVTFVDNHDTQPGEALESFVQRWFKPLAYATILTREQGYPQVFYGDYYGIPSDGVPSYRQQIDPLLKARQQYAYGRQHDYFDHWDVIGWTREGNASHPNSGLATIMSDGPGGSKWMYVGRQKAGEVWHDMTGNRSGTVTINQDGWGHFFVNGGSVSVWVKR

SEQ ID NO: 44498 - protein, 480 aa, Bacillus sp.
NGTIMQYFEWNVPNDGQHWNRLHNNAQNLKNAGITAIWIPPAWKGTSQNDVGYGAYDLYDLGEFNQKGTVRTKYGTKAELERAIRSLKANGIQVYGDVVMNHKGGADFTERVQAVEVNPQNRNQEVSGTYQIEAWTGFNFPGRGNQHSSFKWRWYHFDGTDWDQSRQLANRIYKFRGDGKAWDWEVDTENGNYDYLMYADVDMDHPEVINELNRWGVWYANTLNLDGFRLDAVKHIKFSFMRDWLGHVRGQTGKNLFAVAEYWKNDLGALENYLSKTQWTMSAFDVPLHYNLYQASNSSGNYDMRNLLNGTLVQRHPSHAVTFVDNHDTQPGEALESFVQGWFKPLAYATILTREQGYPQVFYGDYYGIPSDGVPSYRQQIDPLLKARQQYAYGRQHDYFDHWDVIGWTREGNASHPNSGLATIMSDGPGGSKWMYVGRQKAGEVWHDMTGNRSGTVTINQDGWGHFFVNGGSVSVWVKR

SEQ ID NO: 44499 - protein, 480 aa, Bacillus sp.
NGTIMQYFEWNVPNDGQHWNRLHNNAQNLKNAGITAIWIPPAWKGTSQNDVGYGAYDLYDLGEFNQKGTVRTKYGTKAELERAIRSLKANGIQVYGDVVMNHKGGADFTERVQAVEVNPQNRNQEVSGTYQIEAWTGFNFPGRGNQHSSFKWRWYHFDGTDWDQSRQLANRIYKFRGDGKAWDWEVDTENGNYDYLMYADVDMDHPEVINELNRWGCWYANTLNLDGFRLDAVKHIKFSFMRDWLGHVRGQTGKNLFAVAEYWKNDLGALENYLSKTNWTMSAFDVPLHYNLYQASNSSGNYDMRNLLNGTLVQRHPSHAVTFVDNHDTQPGEALESFVQGWFKPLAYATILTREQGYPQVFYGDYYGIPSDGVPSYRQQIDPLLKARQQYAYGRQHDYFDHWDVIGWTREGNASHPNSGLATIMSDGPGGSKWMYVGRQKAGEVWHDMTGNRSGTVTINQDGWGHFFVNGGSVSVWVKR

SEQ ID NO: 44500 - protein, 480 aa, Bacillus sp.
NGTIMQYFEWNVPNDGYHWNRLHNNAQNLKNAGITAIWIPPAWKGTSQNDVGYGAYDLYDLGEFNQKGTVRTKYGTKAELERAIRSLKANGIQVYGDVVMNHKGGADFTERVQAVEVNPQNRNQEVSGTYQIEAWTGFNFPGRGNQHSSFKWRWYHFDGTDWDQSRQLANRIYKFRGDGKAWDWEVDTENGNYDYLMYADVDMDHPEVINELNRWGVWYANTLNLDGFRLDAVKHIKFSFMRDWLGHVRGQTGKNLFAVAEYWKNDLGALENYLSKTNWTMSAFDVPLHYNLYQASNSSGNYDMRNLLNGTLVQRHPSHAVTFVDNHDTQPGEALESFVQGWFKPLAYATILTREQGYPQVFYGDYYGIPSDGVPSYRQQIDPLLKARQQYAYGRQHDYFDHWDVIGWTREGNASHPNSGLATIMSDGPGGSKWMYVGRQKAGEVWHDMTGNRSGTVTINQDGWGHFFVNGGSVSVWVKR

SEQ ID NO: 44501 - protein, 480 aa, Bacillus sp.
NGTIMQYFEWNVPNDGQHWNRLHNNAQNLKNAGITAIWIPPAWKGTSQNDVGYGAYDLYDLGEFNQKGTVRTKYGTKAELERAIRSLKANGIQVYGDVVMNHKGGADFTERVQAVEVNPQNRNQEVSGTYQIEAWTGFNFPGRGNQHSSFKWRWYHFDGTDWDQSRQLANRIYKFRGDGKAWDWEVDTENGNYDYLMYADVDMDHPEVINELNRWGVWYANTLNLDGFRLDAVKHIKFSFMRDWLGHVRGQTGKNLFAVAEYWKNDLGALENYLSKTNWTMSYFDVPLHYNLYQASNSSGNYDMRNLLNGTLVQRHPSHAVTFVDNHDTQPGEALESFVQGWFKPLAYATILTREQGYPQVFYGDYYGIPSDGVPSYRQQIDPLLKARQQYAYGRQHDYFDHWDVIGWTREGNASHPNSGLATIMSDGPGGSKWMYVGRQKAGEVWHDMTGNRSGTVTINQDGWGHFFVNGGSVSVWVKR

SEQ ID NO: 44502 - protein, 480 aa, Bacillus sp.
NGTIMQYFEWNVPNDGQHWNRLHNNAQNLKNAGITAIWIPPAWKGTSQNDVGYGAYDLYDLGEFNQKGTVRTKYGTKAELERAIRSLKANGIQVYGDVVMNHKGGADFTERVQAVEVNPQNRNQEVSGTYQIEAWTGFNFPGRGNQHSSFKWRWYHFDGTDWDQSRQLANRIYKFRGDGKAWDWEVDTENGNYDYLMYADVDMDHPEVINELNRWGVWYANTLNLDGFRLDAVKHIKFSFMRDWLGHVRGQTGKNLFAVAEYWKNDLGALENYLSKTNWTMSAFDVPLHYNLYQASNSSGNYDMRNLLNGTLVQRHPSHAVTFVDNHDTQPGEALESFVQGWFKPLAYATILTREQGYPQVFYGDYYGIPSDGVPSYSQQIDPLLKARQQYAYGRQHDYFDHWDVIGWTREGNASHPNSGLATIMSDGPGGSKWMYVGRQKAGEVWHDMTGNRSGTVTINQDGWGHFFVNGGSVSVWVKR

SEQ ID NO: 44503 - protein, 480 aa, Bacillus sp.
NGTIMQYFEWNVPNDGQHWNRLHNNAQNLKNAGITAIWIPPAWKGTSQNDVGYGAYDLYDLGEFNQKGTVRTKYGTKAELERAIRSLKANGIQVYGDVVMNHKGGADFTERVQAVEVNPQNRNQEVSGTYQIEAWTGFNFPGRGNQHSSFKWRWYHFDGTDWDQSRQLANRIYKFRGDGKAWDWEVDTENGNYDYLMYADVDMDHPEVINELNRWGVWYANTLNLDGFRLDAVKHIKFSFMRDWLGHVRGQTGKNLFAVAEYWKNDLGALENYLSKTNWTMSAFDVPLHYNLYQASNSSGNYDMRNLLNGTLVQRHPSHAVTFVDNHDTQPGEALESFVQGWFKPLAYATILTREQGYPQVFYGDYYGIPSDGVPSYRQQIDPLLKARQQYAYGRQHDYFDHWDVIGWTREGNASHPNSGLATIMADGPGGSKWMYVGRQKAGEVWHDMTGNRSGTVTINQDGWGHFFVNGGSVSVWVKR

SEQ ID NO: 44504 - protein, 480 aa, Bacillus sp.
NGTIMQYFEWNVPNDGQHWNRLHNNAQNLKNAGITAIWIPPAWKGTSQNDVGYGAYDLYDLGEFNQKGTVRTKYGTKAELERAIRSLKANGIQVYGDVVMNHKGGADFTERVQAVEVNPQNRNQEVSGTYQIEAWTGFNFPGRGNQHSSFKWRWYHFDGTDWDQSRQLANRIYKFRGDGKAWDWEVDTENGNYDYLMYADVDMDHPEVINELNRWGVWYANTLNLDGFRLDAVKHIKFSFMRDWLGHVRGQTGKNLFAVAEYWKNDLGALENYLSKTNWTMSAFDVPLHYNLYQASNSSGNYDMRNLLNGTLVQRHPSHAVTFVDNHDTQPGEALESFVQGWFKPLAYATILTREQGYPQVFYGDYYGIPSDGVPSYRQQIDPLLKARQQYAYGRQHDYFDHWDVIGWTREGNASHPNSGLATIASDGPGGSKWMYVGRQKAGEVWHDMTGNRSGTVTINQDGWGHFFVNGGSVSVWVKR

SEQ ID NO: 44505 - protein, 480 aa, Bacillus sp.
NGTIMQYFEWNVPNDGQHWNRLHNNAQNLKNAGITAIWIPPAWKGTSQNDVGYGAYDLYDLGEFNQKGTVRTKYGTKAELERAIRSLKANGIQVYGDVVMNHKGGADFTERVQAVEVNPQNRNQEVSGTYQIEAWTGFNFPGRGNQHSSFKWRWYHFDGTDWDQSRQLANRIYKFRGDGKAWDWEVDTENGNYDYLMYADVDMDHPEVINELNRWGVWYANTLNLDGFRLDAVKHIKFSFMRDWLGHVREQTGKNLFAVAEYWKNDLGALENYLSKTNWTMSAFDVPLHYNLYQASNSSGNYDMRNLLNGTLVQRHPSHAVTFVDNHDTQPGEALESFVQGWFKPLAYATILTREQGYPQVFYGDYYGIPSDGVPSYRQQIDPLLKARQQYAYGRQHDYFDHWDVIGWTREGNASHPNSGLATIMSDGPGGSKWMYVGRQKAGEVWHDMTGNRSGTVTINQDGWGHFFVNGGSVSVWVKR

SEQ ID NO: 44506 - protein, 480 aa, Bacillus sp.
NGTIMQYFEWNVPNDGQHWNRLKNNAQNLKNAGITAIWIPPAWKGTSQNDVGYGAYDLYDLGEFNQKGTVRTKYGTKAELERAIRSLKANGIQVYGDVVMNHKGGADFTERVQAVEVNPQNRNQEVSGTYQIEAWTGFNFPGRGNQHSSFKWRWYHFDGTDWDQSRQLANRIYKFRGDGKAWDWEVDTENGNYDYLMYADVDMDHPEVINELNRWGVWYANTLNLDGFRLDAVKHIKFSFMRDWLGHVRGQTGKNLFAVAEYWKNDLGALENYLSKTNWTMSAFDVPLHYNLYQASNSSGNYDMRNLLNGTLVQRHPSHAVTFVDNHDTQPGEALESFVQGWFKPLAYATILTREQGYPQVFYGDYYGIPSDGVPSYRQQIDPLLKARQQYAYGRQHDYFDHWDVIGWTREGNASHPNSGLATIMSDGPGGSKWMYVGRQKAGEVWHDMTGNRSGTVTINQDGWGHFFVNGGSVSVWVKR

SEQ ID NO: 44507 - protein, 480 aa, Bacillus sp.
NGTIMQYFEWNVPNDGQHWNRLHNNAQNLKNAGITAIWIPPAWKGTSQNDVGYGAYDLYDLGEFNQKGTVRTKYGTKAELERAIRSLKANGIQVYGDVVMNHKGGADFTERVQAVEVNPQNRNQEVSGTYQIEAWTGFNFPGRGNQHSSFKWRWYHFDGTDWDQSRQLANRIYKFRGDGKAWDWEVDTENGNYDYLMYADVDMDHPEVINELNRWGVWYANTLNLDGFRLDAVKHIKFSFMRDWLGHVRGQTGKNLFAVAEYWKNDLGALENYLSKTNWTMSAFDVPLHYNLYQASNSSGNYDMRRLLNGTLVQRHPSHAVTFVDNHDTQPGEALESFVQGWFKPLAYATILTREQGYPQVFYGDYYGIPSDGVPSYRQQIDPLLKARQQYAYGRQHDYFDHWDVIGWTREGNASHPNSGLATIMSDGPGGSKWMYVGRQKAGEVWHDMTGNRSGTVTINQDGWGHFFVNGGSVSVWVKR

SEQ ID NO: 44508 - protein, 480 aa, Bacillus sp.
NGTIMQYFEWNVPNDGQHWNRLHNNAQNLKNAGITAIWIPPAWKGTSQNDVGYGAYDLYDLGEFNQKGTVRTKYGTKAELERAIRSLKANGIQVYGDVVMNHKGGADFTERVQAVEVNPQNRNQEVSGTYQIEAWTGFNFPGRGNQHSSFKWRWYHFDGTDWDQSRQLANRIYKFRGDGKAWDWEVDTENGNYDYLMYADVDMDHPEVINELNRWGVWYANTLNLDGFRLDAVKHIKFSFMRDWLGHVRGQTGKNLFAVAEYWKNDLGALENYLSKTNWTMSAFDVPLHYNLYQASNSSGNYDMRNLLNGTLVQRHPSHAVTFVDNHDTQPGEALESFVQAWFKPLAYATILTREQGYPQVFYGDYYGIPSDGVPSYRQQIDPLLKARQQYAYGRQHDYFDHWDVIGWTREGNASHPNSGLATIMSDGPGGSKWMYVGRQKAGEVWHDMTGNRSGTVTINQDGWGHFFVNGGSVSVWVKR

SEQ ID NO: 44509 - protein, 480 aa, Bacillus sp.
NGTIMQYFEWNVPNDGQHWNRLHNNAQNLKNAGITAIWIPPAWKGTSQNDVGYGAYDLYDLGEFNQKGTVRTKYGTKAELERAIRSLKANGIQVYGDVVMNHKGGADFTERVQAVEVNPQNRNQEVSGTYQIEAWTGFNFPGRGNQHSSFKWRWYHFDGTDWDQSRQLANRIYKFRGDGKAWDWEVDTENGNYDYLMYADVDMDHPEVINELNRWGVWYANTLNLDGFRLDAVKHIKFSFMRDWLGHVRGQTGKNLFAVAEYWKNDLGALENYLSKTNWTMSAFDVPLHYNLYQASNSSGNYDMRNLLNGTLVQSHPSHAVTFVDNHDTQPGEALESFVQGWFKPLAYATILTREQGYPQVFYGDYYGIPSDGVPSYRQQIDPLLKARQQYAYGRQHDYFDHWDVIGWTREGNASHPNSGLATIMSDGPGGSKWMYVGRQKAGEVWHDMTGNRSGTVTINQDGWGHFFVNGGSVSVWVKR

SEQ ID NO: 44510 - protein, 480 aa, Bacillus sp.
NGTIMQYFEWNVPNDGQHWNRLHNNAQNLKNAGITAIWIPPAWKGTSQNDVGYGAYDLYDLGEFNQKGTVRTKYGTKAELERAIRSLKANGIQVYGDVVMNHKGGADFTERVQAVEVNPQNRNQEVSGTYQIEAWTGFNFPGRGNQHSSFKWRWYHFDGTDWDQSRQLANRIYKFRGDGKAWDWEVDTENGNYDYLMYADVDMDHPEVINELNRWGVWYANTLNLDGFRLDAVKHIKFSFMRDWLGHVRGQTGKNLFAVAEYWKNDLGALENYLSKTNWTMSAFDVPLHYNWYQASNSSGNYDMRNLLNGTLVQRHPSHAVTFVDNHDTQPGEALESFVQGWFKPLAYATILTREQGYPQVFYGDYYGIPSDGVPSYRQQIDPLLKARQQYAYGRQHDYFDHWDVIGWTREGNASHPNSGLATIMSDGPGGSKWMYVGRQKAGEVWHDMTGNRSGTVTINQDGWGHFFVNGGSVSVWVKR

SEQ ID NO: 44511 - protein, 480 aa, Bacillus sp.
NGTIMQYFEWNVPNDGQHWNRLHNNAQNLKNAGITAIWIPPAWKGTSQNDVGYGAYDLYDLGEFNQKGTVRTKYGTKAELERAIRSLKANGIQVYGDVVMNHKGGADFTERVQAVEVNPQNRNQEVSGTYQIEAWTGFNFPGRGNQHSSFKWRWYHFDGTDWDQSRQLANRIYKFRGDGKAWDWEVDTENGNYDYLMYADVDMDHPEVINELNRWGVWYANTLNLDGFRLDAVKHIKFSFMRDWLGHVRGQTGKNLFAVAEYWKNDLGALENYLSKTNWTMSAFDVPLHYNLYQASNSSGNYDMRNLLNGTLVQRHPSHAVTFVDNHDTQPGEALESFVQGWFKPLAYATILTREQGYPQVFYGDYYGIPSDGVPSYRQQIDPLLKARQQYAYGRQHDYPDHWDVIGWTREGNASHPNSGLATIMSDGPGGSKWMYVGRQKAGEVWHDMTGNRSGTVTINQDGWGHFFVNGGSVSVWVKR

SEQ ID NO: 44512 - protein, 480 aa, Bacillus sp.
NGTIMQYFEWNVPNDGQHWNRLHNNAQNLKNAGITAIWIPPAWKGTSQNDVGYGAYDLYDLGEFNQKGTVRTKYGTKAELERAIRSLKANGIQVYGDVVMNHKGGADFTERVQAVEVNPQNRNQEVSGTYQIEAWTGFNFPGRGNQHSSFKWRWYHFDGTDWDQSRQLANRIYKFRGDGKAWDWEVDTENGNYDYLMYADVDMDHPEVINELNRWGVWYANTLNLDGFRLDAVKHIKFSFMRDWLGCVRGQTGKNLFAVAEYWKNDLGALENYLSKTNWTMSAFDVPLHYNLYQASNSSGNYDMRNLLNGTLVQRHPSHAVTFVDNHDTQPGEALESFVQGWFKPLAYATILTREQGYPQVFYGDYYGIPSDGVPSYRQQIDPLLKARQQYAYGRQHDYFDHWDVIGWTREGNASHPNSGLATIMSDGPGGSKWMYVGRQKAGEVWHDMTGNRSGTVTINQDGWGHFFVNGGSVSVWVKR

SEQ ID NO: 44513 - protein, 480 aa, Bacillus sp.
NGTIMQYFEWNVPNDGQHWNRLHNNAQNLKNAGITAIWIPPAWKGTSQNDVGYGAYDLYDLGEFNQKGTVRTKYGTKAELERAIRSLKANGIQVYGDVVMNHKGGADFTERVQAVEVNPQNRNQEVSGTYQIEAWTGFNFPGRGNQHSSFKWRWYHFDGTDWDQSRQLANRIYKFRGDGKAWDWEVDTENGNYDYLMYADVDMDHPEVINELNRWGVWYANTLNLDGFRLDAVKHIKFSFMRDWLGHVRGQTGKNLFAVAEYWKNDLGALENYLSKTNWTMSAFDVPLHYNLYQASNSSGNYDMRNLLNGTLVQRHPSHAVTFVDNHDTQPGEALESFVQGWFKPLAYATILTREQGYPQVFYGDYYGIPSDGVPSYRQQIDPLLKARQQYAYGRQHDYFDHWDVIGWTREGNASHPNSGLATIMSDGPGGSKWMYVGRQKAGEVWTDMTGNRSGTVTINQDGWGHFFVNGGSVSVWVKR

SEQ ID NO: 44514 - protein, 480 aa, Bacillus sp.
NGTIMQYFEWNVPNDGQHWNRLHNNAQNLKNAGITAIWIPPAWKGTSQNDVGYGAYDLYDLGEFNQKGTVRTKYGTKAELERAIRSLKANGIQVYGDVVMNHKGGADFTERVQAVEVNPQNRNQEVSGTYQIEAWTGFNFPGRGNQHSSFKWRWYHFDGEDWDQSRQLANRIYKFRGDGKAWDWEVDTENGNYDYLMYADVDMDHPEVINELNRWGVWYANTLNLDGFRLDAVKHIKFSFMRDWLGHVRGQTGKNLFAVAEYWKNDLGALENYLSKTNWTMSAFDVPLHYNLYQASNSSGNYDMRNLLNGTLVQRHPSHAVTFVDNHDTQPGEALESFVQGWFKPLAYATILTREQGYPQVFYGDYYGIPSDGVPSYRQQIDPLLKARQQYAYGRQHDYFDHWDVIGWTREGNASHPNSGLATIMSDGPGGSKWMYVGRQKAGEVWHDMTGNRSGTVTINQDGWGHFFVNGGSVSVWVKR

SEQ ID NO: 44515 - protein, 480 aa, Bacillus sp.
NGTIMQYFEWNVPNDGQHWNRLHNNAQNLKNAGITAIWIPPAWKGTSQNDVGYGAYDLYDLGEFNQKGTVRTKYGTKAELERAIRSLKANGIQVYGDVVMNHKGGADFTERVQAVEVNPQNRNQEVSGTYQIEAWTGFNFPGRGNQHSSFKWRWYHFDGTDWDQSRQLANRIYKFRGDGKAWDWEVDTENGNYDYLMYADVDMDHPEVINELNRWGVWYANTLNLDGFRLDAVKHIKFSFMRDWLGHVRGQTGKNLFAVAEYWKNDLGALENYLSKTNWTMSAFDVPLHYNLYQASNSSGNYDMRNLLNGTLVQRHPSHAVTFVDNHDTQPGEALESFVQGWFKPLAYATILTREQGYPQVFYGDYYGIPSDGVPSYRQQIDPLLKARQQYAYGRQHDYFDHWDVIGWTREGFASHPNSGLATIMSDGPGGSKWMYVGRQKAGEVWHDMTGNRSGTVTINQDGWGHFFVNGGSVSVWVKR

SEQ ID NO: 44516 - protein, 480 aa, Bacillus sp.
NGTIMQYFEWNVPNDGQHWNRLHNNAQNLKNAGITAIWIPPAWKGTSQNDVGYGAYDLYDLGEFNQKGTVRTKYGTKAELERAIRSLKANGIQVYGDVVMNHKGGADFTERVQAVEVNPQNRNQEVSGTYQIEAWTGFNFPGRGNQHSSFKWRWYHFDGTDWDQSRQLANRIYKFRGDGKAWDWEVDTENGNYDYLMYADVDMDHPEVINELNRWGVWYANTLNLDGFRLDAVKHIKFSFMRDWLGHVRGQTGKNLFAVAEYWKNDLGALENYLSKTNWTMSAFDVPLHYNLYQASNSSGNYDMRNLLNGTLVQRHPNHAVTFVDNHDTQPGEALESFVQGWFKPLAYATILTREQGYPQVFYGDYYGIPSDGVPSYRQQIDPLLKARQQYAYGRQHDYFDHWDVIGWTREGNASHPNSGLATIMSDGPGGSKWMYVGRQKAGEVWHDMTGNRSGTVTINQDGWGHFFVNGGSVSVWVKR

SEQ ID NO: 44517 - protein, 480 aa, Bacillus sp.
NGTIMQYFEWNVPNDGQHWNRLHNNAQNLKNAGITAIWIPPAWKGTSQNDVGYGAYDLYDLGEFNQKGTVRTKYGTKAELERAIRSLKANGIQVYGDVVMNHKGGADFTERVQAVEVNPQNRNQEVSGTYQIEAWTGFNFPGRGNQHSSFKWRWYHFDGTDWDQSRQLANRIYKFRGDGKAWDWEVDTENGNYDYLMYADVDMDHPEVINELNRWGVWYANTLNLDGFRLDAVKHIKFSFMRDWLGHVRGQTGKNLFAVAEYWKNDLGALENYLSKTNWTMSAFDVPLHYNLYQASNSSGNYDMRNLLNGTLVQRHPSHAVTFVDNHDTQPGEALESFVQGWFKPLAYATILTREQGYPQVFYGDYYGIPSDGSPSYRQQIDPLLKARQQYAYGRQHDYFDHWDVIGWTREGNASHPNSGLATIMSDGPGGSKWMYVGRQKAGEVWHDMTGNRSGTVTINQDGWGHFFVNGGSVSVWVKR

SEQ ID NO: 44518 - protein, 480 aa, Bacillus sp.
NGTIMQYFEWNVPNDGQHWNRLHNNAQNLKNAGITAIWIPPAWKGTSLNDVGYGAYDLYDLGEFNQKGTVRTKYGTKAELERAIRSLKANGIQVYGDVVMNHKGGADFTERVQAVEVNPQNRNQEVSGTYQIEAWTGFNFPGRGNQHSSFKWRWYHFDGTDWDQSRQLANRIYKFRGDGKAWDWEVDTENGNYDYLMYADVDMDHPEVINELNRWGVWYANTLNLDGFRLDAVKHIKFSFMRDWLGHVRGQTGKNLFAVAEYWKNDLGALENYLSKTNWTMSAFDVPLHYNLYQASNSSGNYDMRNLLNGTLVQRHPSHAVTFVDNHDTQPGEALESFVQGWFKPLAYATILTREQGYPQVFYGDYYGIPSDGVPSYRQQIDPLLKARQQYAYGRQHDYFDHWDVIGWTREGNASHPNSGLATIMSDGPGGSKWMYVGRQKAGEVWHDMTGNRSGTVTINQDGWGHFFVNGGSVSVWVKR

SEQ ID NO: 44519 - protein, 480 aa, Bacillus sp.
NGTIMQYFEWNVPNDGQHWNRLHNNAQNLKNAGITAIWIPPAWKGTSQNDVGYGAYDLYDLGEFNQKGTVRTKYGTKAELERAIRSLKANGIQVYGDVVMNHKGGADFTERVQAVEVNPQNRNQEVSGTYQIEAWTGFNFPGRGNQHSSFKWRWYHFDGTDWDQSRQLANRIYKFRGDGKAWDWEVDTENGNYDYLMYADVDMDHPEVINELNRWGVWYANTLNLDGFRLDAVKHIKFSFMRDWLGHVRGQTGKCLFAVAEYWKNDLGALENYLSKTNWTMSAFDVPLHYNLYQASNSSGNYDMRNLLNGTLVQRHPSHAVTFVDNHDTQPGEALESFVQGWFKPLAYATILTREQGYPQVFYGDYYGIPSDGVPSYRQQIDPLLKARQQYAYGRQHDYFDHWDVIGWTREGNASHPNSGLATIMSDGPGGSKWMYVGRQKAGEVWHDMTGNRSGTVTINQDGWGHFFVNGGSVSVWVKR

SEQ ID NO: 44520 - protein, 480 aa, Bacillus sp.
NGTIMQYFEWNVPNDGQHWNRLHNNAQNLKNAGITAIWIPPAWKGTSQKDVGYGAYDLYDLGEFNQKGTVRTKYGTKAELERAIRSLKANGIQVYGDVVMNHKGGADFTERVQAVEVNPQNRNQEVSGTYQIEAWTGFNFPGRGNQHSSFKWRWYHFDGTDWDQSRQLANRIYKFRGDGKAWDWEVDTENGNYDYLMYADVDMDHPEVINELNRWGVWYANTLNLDGFRLDAVKHIKFSFMRDWLGHVRGQTGKNLFAVAEYWKNDLGALENYLSKTNWTMSAFDVPLHYNLYQASNSSGNYDMRNLLNGTLVQRHPSHAVTFVDNHDTQPGEALESFVQGWFKPLAYATILTREQGYPQVFYGDYYGIPSDGVPSYRQQIDPLLKARQQYAYGRQHDYFDHWDVIGWTREGNASHPNSGLATIMSDGPGGSKWMYVGRQKAGEVWHDMTGNRSGTVTINQDGWGHFFVNGGSVSVWVKR

SEQ ID NO: 44521 - protein, 480 aa, Bacillus sp.
NGTIMQYFEWNVPNDGMHWNRLHNNAQNLKNAGITAIWIPPAWKGTSQNDVGYGAYDLYDLGEFNQKGTVRTKYGTKAELERAIRSLKANGIQVYGDVVMNHKGGADFTERVQAVEVNPQNRNQEVSGTYQIEAWTGFNFPGRGNQHSSFKWRWYHFDGTDWDQSRQLANRIYKFRGDGKAWDWEVDTENGNYDYLMYADVDMDHPEVINELNRWGVWYANTLNLDGFRLDAVKHIKFSFMRDWLGHVRGQTGKNLFAVAEYWKNDLGALENYLSKTNWTMSAFDVPLHYNLYQASNSSGNYDMRNLLNGTLVQRHPSHAVTFVDNHDTQPGEALESFVQGWFKPLAYATILTREQGYPQVFYGDYYGIPSDGVPSYRQQIDPLLKARQQYAYGRQHDYFDHWDVIGWTREGNASHPNSGLATIMSDGPGGSKWMYVGRQKAGEVWHDMTGNRSGTVTINQDGWGHFFVNGGSVSVWVKR

SEQ ID NO: 44522 - protein, 480 aa, Bacillus sp.
NGTIMQYFEWNVPVDGQHWNRLHNNAQNLKNAGITAIWIPPAWKGTSQNDVGYGAYDLYDLGEFNQKGTVRTKYGTKAELERAIRSLKANGIQVYGDVVMNHKGGADFTERVQAVEVNPQNRNQEVSGTYQIEAWTGFNFPGRGNQHSSFKWRWYHFDGTDWDQSRQLANRIYKFRGDGKAWDWEVDTENGNYDYLMYADVDMDHPEVINELNRWGVWYANTLNLDGFRLDAVKHIKFSFMRDWLGHVRGQTGKNLFAVAEYWKNDLGALENYLSKTNWTMSAFDVPLHYNLYQASNSSGNYDMRNLLNGTLVQRHPSHAVTFVDNHDTQPGEALESFVQGWFKPLAYATILTREQGYPQVFYGDYYGIPSDGVPSYRQQIDPLLKARQQYAYGRQHDYFDHWDVIGWTREGNASHPNSGLATIMSDGPGGSKWMYVGRQKAGEVWHDMTGNRSGTVTINQDGWGHFFVNGGSVSVWVKR

SEQ ID NO: 44523 - protein, 480 aa, Bacillus sp.
NGTIMQYFEWNVPNDGQHWNRLHNNAQNLKNAGITAIWIPPAWKGTSQNDVGYGAYDLYDLGEFNQKGTVRTKYGTKAELERAIRSLKANGIQVYGDVVMNHKGGADFTESVQAVEVNPQNRNQEVSGTYQIEAWTGFNFPGRGNQHSSFKWRWYHFDGTDWDQSRQLANRIYKFRGDGKAWDWEVDTENGNYDYLMYADVDMDHPEVINELNRWGVWYANTLNLDGFRLDAVKHIKFSFMRDWLGHVRGQTGKNLFAVAEYWKNDLGALENYLSKTNWTMSAFDVPLHYNLYQASNSSGNYDMRNLLNGTLVQRHPSHAVTFVDNHDTQPGEALESFVQGWFKPLAYATILTREQGYPQVFYGDYYGIPSDGVPSYRQQIDPLLKARQQYAYGRQHDYFDHWDVIGWTREGNASHPNSGLATIMSDGPGGSKWMYVGRQKAGEVWHDMTGNRSGTVTINQDGWGHFFVNGGSVSVWVKR

SEQ ID NO: 44524 - protein, 480 aa, Bacillus sp.
NGTIMQYFEWNVPNDGQHWNRLHNNAQNLKNAGITAIWIPPAWKGTSQNDVGYGAYDLYDLGEFNQKGTVRTKYGTKAELERAIRSLKANGIQVYGDVVMNHKGGADFTERVQAVEVNPQNRNQEVSGTYQIEAWTGFNFPGRGNQHSSFKWRWYHFDGTDWDQSRQLANRIYKFRGDGKAWDWEVDTENGNYDYLMYADVDMDHPEVINELNRWGVWYANTLNLDGFRLDAVKHIKFSFMRDWLGHVRGQTGKNLFAVAEYWKNDLGALENYLSKTNWTMSAFDVPLHYNLYQASNSSGNYDMRNLLNGTLVQRHPSHAVTFVDNHDTQPGEALESFVQGWFKPLAYATILTREQGYPQVFYGDYYGIPSDGVPSYRQQIDPLLKARQQYAYGRQHDYFDHWDVIGWTREGNASHPNSGLATIMSDGPGGSKWMYVGRQKAGEVWHDMTGNRSETVTINQDGWGHFFVNGGSVSVWVKR

SEQ ID NO: 44525 - protein, 480 aa, Synthetic construct
NGTIMQYFEWNVPNDGQHWNRLHNNAQNLKNAGITAIWIPPAWKGTSQNDVGYGAYDLYDLGEFNQKGTVRTKYGTKAELERAIRSLKANGIQVYGDVVMNHKGGADATEMVRAVEVNPNNRNQEVTGEYTIEAWTRFDFPGRGNTHSSFKWRWYHFDGVDWDQSRRLNNRIYKFRGHGKAWDWEVDTENGNYDYLMYADIDMDHPEVINELNRWGVWYANTLNLDGFRLDAVKHIKFSFMRDWLGHVRGQTGKNLFAVAEYWKNDLGALENYLSKTNWTMSAFDVPLHYNLYQASNSSGNYDMRNLLNGTLVQRHPSHAVTFVDNHDTQPGEALESFVQGWFKPLAYATILTREQGYPQVFYGDYYGIPSDGVPSYRQQIDPLLKARQQYAYGRQHDYFDHWDVIGWTREGNASHPNSGLATIMSDGPGGSKWMYVGRQKAGEVWHDMTGNRSGTVTINQDGWGHFFVNGGSVSVWVKR

SEQ ID NO: 44526 - protein, 480 aa, Bacillus sp.
NGTIMQYFEWNVPNDGQHWNRLHNNAQNLKNAGITAIWIPPAWKGTSQNDVGYGAYDLYDLGEFNQKGTVRTKYGTKAELERAIRSLKANGIQVYGDVVMNHKGGADFTERVQAVEVNPQNRNQEVSGTYQIEAWTGFNFPGRGNQHSSFKWRWYHFDGTDWDQSRQLANRIYKFRGDGKAWDWEVDTENGNYDYLMYADVDMDHPEVINELNRWGVWYANTLNLDGFRLDAVKHIKFSFMRDWLGHVRGQTGKNLFAVAEYWKNDLGALENYLSKTNWTMSAFDVPLHYNLYSASNSSGNYDMRNLLNGTLVQRHPSHAVTFVDNHDTQPGEALESFVQGWFKPLAYATILTREQGYPQVFYGDYYGIPSDGVPSYRQQIDPLLKARQQYAYGRQHDYFDHWDVIGWTREGNASHPNSGLATIMSDGPGGSKWMYVGRQKAGEVWHDMTGNRSGTVTINQDGWGHFFVNGGSVSVWVKR

SEQ ID NO: 44527 - protein, 480 aa, Bacillus sp.
NGTIMQYFEWNVPNDGQHWNRLHNNAQNLKNAGITAIWIPPAWKGTSQNDVGYGAYDLYDLGEFNQKGTVRTKYGTKAELERAIRSLKANGIQVYGDVVMNHKGGADFTERVQAVEVNPQNRNQEVSGTYQIEAWTGFNFPGRGNQHSSFKWRWYHFDGTDWDQSRQLANRIYKFRGDGKAWDWEVDTENGNYDYLMYADVDMDHPEVINELNRWGVWYANTLNLDGFRLDAVKHIKFSFMRDWLKHVRGQTGKNLFAVAEYWKNDLGALENYLSKTNWTMSAFDVPLHYNLYQASNSSGNYDMRNLLNGTLVQRHPSHAVTFVDNHDTQPGEALESFVQGWFKPLAYATILTREQGYPQVFYGDYYGIPSDGVPSYRQQIDPLLKARQQYAYGRQHDYFDHWDVIGWTREGNASHPNSGLATIMSDGPGGSKWMYVGRQKAGEVWHDMTGNRSGTVTINQDGWGHFFVNGGSVSVWVKR

SEQ ID NO: 44528 - protein, 480 aa, Bacillus sp.
NGTIMQYFEWNVPNDGQHWNRLHNNAQNLKNAGITAIWIPPAWKGTSQNDVGYGAYDLYDLGEFNQKGTVRTKYGTKAELERAIRSLKANGIQVYGDVVMNHKGGADFTERVQAVEVNPQNRNQEVSGTYQIEAWTGFNFPGRGNQHSSFKWRWYHFDGTDWDQSRQLANRIYKFRGDGKAWDWEVDTENGNYDYLMYADVDMDHPEVINELNRWGVWYANTLNLDGFRLDAVKHIKFSFMRDWLGHVRGQTGKNLFAVAEYWKNDLGALENYLSKTNWTMSAFDVPLHYNLYQASNSSGNYDMRNLLNGTLVQRHPSHAVTFVDNHDTQPGEALESFVQGWFKPLAYATILTREQGYPQVFYGDYYGIPSDGVPSYRQQIDPLLLARQQYAYGRQHDYFDHWDVIGWTREGNASHPNSGLATIMSDGPGGSKWMYVGRQKAGEVWHDMTGNRSGTVTINQDGWGHFFVNGGSVSVWVKR

SEQ ID NO: 44529 - protein, 480 aa, Bacillus sp.
NGTIMQYFEWNVPNDGQHWNRLHNNAQNLKNAGITAIWIPPAWKGTSQNDVGYGAYDLYDLGEFNQKGTVRTKYGTKAELERAIRSLKANGIQVYGDVVMNHKGGADYTERVQAVEVNPQNRNQEVSGTYQIEAWTGFNFPGRGNQHSSFKWRWYHFDGTDWDQSRQLANRIYKFRGDGKAWDWEVDTENGNYDYLMYADVDMDHPEVINELNRWGVWYANTLNLDGFRLDAVKHIKFSFMRDWLGHVRGQTGKNLFAVAEYWKNDLGALENYLSKTNWTMSAFDVPLHYNLYQASNSSGNYDMRNLLNGTLVQRHPSHAVTFVDNHDTQPGEALESFVQGWFKPLAYATILTREQGYPQVFYGDYYGIPSDGVPSYRQQIDPLLKARQQYAYGRQHDYFDHWDVIGWTREGNASHPNSGLATIMSDGPGGSKWMYVGRQKAGEVWHDMTGNRSGTVTINQDGWGHFFVNGGSVSVWVKR

SEQ ID NO: 44530 - protein, 480 aa, Bacillus sp.
NGTIMQYFEWNVPNDGQHWNRLHNNAQNLKNAGITAIWIPPAWKGTSQNDVGYGAYDLYDLGEFNQKGTVRTKYGTKAELERAIRSLKANGIQVYGDVVMNHKGGADFTERVQAVEVNPQNRNQEVSGTYQIEAWTGFNFPGRGNQHSSFKWRWYHFDGTDWDQSRQLANRIYKFRGDGKAWDWEVDTENGNYDYLMYADVDMDHPEVINELNRWGVWYANTLNLDGFRLDAVKHIKFSFMRDWLGHVRGQTGKNLFAVAEYWKNDLGALENYTSKTNGTMSAFDVPLHYNLYQASNSSGNYDMRNLLNGTLVQRHPSNAVTFVDNHDTQPGEALESFVQGWFKPLAYATILTREQGYPQVFYGDYYGIPSDGVPSYRQQIDPLLKARQQYAYGRQHDYFDHWDVIGWTREGNASHPNSGLATIMSDGPGGSKWMYVGRQKAGEVWHDMTGNRSGTVTINQDGWGHFFVNGRSVSVWVKR

SEQ ID NO: 44531 - protein, 480 aa, Bacillus sp.
NGTIMQYFEWNVPNDGQHWNRLHNNAQNLKNGGITAIWIPPAWKGTSQNDVGYGAYDLYDLGEFNQKGTVRTKYGTKAELERAIRSLKANGIQVYGDVVMNHKGGADFTERVQAVEVNPQNRNQEVSGTYQIEAWTGFNFPGRGNQHSSFKWRWYHFDGTDWDQSRQLANRIYKFRGDGKAWDWEVDTENGNYDYLMYADVDMDHPEVINELNRWGVWYANTLNLDGFRLDAVKHIKFSFMRDWLGHVRGQTGKNLFAVAEYWKNDLGALENYLSKTNWTMSAFDVPLHYNLYQASNSSGNYDMRNLLNGTLVQRHPSHAVTFVDNHDTQPGEALESFVQGWFKPLAYATILTREQGYPQVFYGDYYGIPSDGVPSYRQQIDPLLKARQQYAYGRQHDYFDHWDVIGWTREGNASHPNSGLATIMSDGPGGSKWMYVGRQKAGEVWHDMTGNRSGTVTINQDGWGHFFVNGGSVSVWVKR

SEQ ID NO: 44532 - protein, 480 aa, Bacillus sp.
NGTIMQYFEWNVPNDGQHWNRLHNNAQNLKNAGITAIWIPPAWKGTSQNDVGYGAYDLYDLGEFNQKGTVRTKYGTKAELERAIRSLKANGIQVYGDVVMNHKGGADFTERVQAVEVNPQNRNQEVSGTYQIEAWTGFNFPGRGNQHSSFKWRWYHFDGTDWDQSRQLANRIYKFRGDGKAWDWEVDTENGNYDYLMYADVDMDHPEVINELNRWGVWYANTLNLDGFRLDAVKHIKFSFMRDWLGHVRGQTGKNLFAVAEYWKNDLGALENYLSKTNWTMSAFDVPLHYNLYQASISSGNYDMRNLLNGTLVQRHPSHAVTFVDNHDTQPGEALESFVQGWFKPLAYATILTREQGYPQVFYGDYYGIPSDGVPSYRQQIDPLLKARQQYAYGRQHDYFDHWDVIGWTREGNASHPNSGLATIMSDGPGGSKWMYVGRQKAGEVWHDMTGNRSGTVTINQDGWGHFFVNGGSVSVWVKR

SEQ ID NO: 44533 - protein, 480 aa, Bacillus sp.
NGTIMQYFEWNVPNDGQHWNRLHNNAQNLKNAGITAIWIPPAWKGTSQNDVGYGAYDLYDLGEFNQKGTVRTKYGTKAELERAIRSLKANGIQVYGDVVMNHKGGADFTERVQAVEVNPQNRNQEVSGTYQIEAWTGFNFPGRGNQHSSFKWRWYHFDGTDWDQSRQLANRIYKFRGDGKAWDWEVDTENGNYDYLMYADVDMDHPEVINELNRWGVWYANTLNLDGFRLDAVKHIKFSFMRDWLGHVRGQTGKNLFAVAEYWKMDLGALENYLSKTNWTMSAFDVPLHYNLYQASNSSGNYDMRNLLNGTLVQRHPSHAVTFVDNHDTQPGEALESFVQGWFKPLAYATILTREQGYPQVFYGDYYGIPSDGVPSYRQQIDPLLKARQQYAYGRQHDYFDHWDVIGWTREGNASHPNSGLATIMSDGPGGSKWMYVGRQKAGEVWHDMTGNRSGTVTINQDGWGHFFVNGGSVSVWVKR

SEQ ID NO: 44534 - protein, 480 aa, Bacillus sp.
NGTIMQYFEWNVPNDGQHWNRLHNHAQNLKNAGITAIWIPPAWKGTSQNDVGYGAYDLYDLGEFNQKGTVRTKYGTKAELERAIRSLKANGIQVYGDVVMNHKGGADFTERVQAVEVNPQNRNQEVSGTYQIEAWTGFNFPGRGNQHSSFKWRWYHFDGTDWDQSRQLANRIYKFRGDGKAWDWEVDTENGNYDYLMYADVDMDHPEVINELNRWGVWYANTLNLDGFRLDAVKHIKFSFMRDWLGHVRGQTGKNLFAVAEYWKNDLGALENYLSKTNWTMSAFDVPLHYNLYQASNSSGNYDMRNLLNGTLVQRHPSHAVTFVDNHDTQPGEALESFVQGWFKPLAYATILTREQGYPQVFYGDYYGIPSDGVPSYRQQIDPLLKARQQYAYGRQHDYFDHWDVIGWTREGNASHPNSGLATIMSDGPGGSKWMYVGRQKAGEVWHDMTGNRSGTVTINQDGWGHFFVNGGSVSVWVKR

SEQ ID NO: 44535 - protein, 480 aa, Bacillus sp.
NGTIMQYFEWNVPNDGQHWNRLHNNAQNLKNAGITAIWIPPAWKGTSQNDVGYGAYDLYDLGEFNQKGTVRTKYGTKAELERAIRSLKANGIQVYGDVVMNHKGGADFTERVQAVEVNPQERNQEVSGTYQIEAWTGFNFPGRGNQHSSFKWRWYHFDGTDWDQSRQLANRIYKFRGDGKAWDWEVDTENGNYDYLMYADVDMDHPEVINELNRWGVWYANTLNLDGFRLDAVKHIKFSFMRDWLGHVRGQTGKNLFAVAEYWKNDLGALENYLSKTNWTMSAFDVPLHYNLYQASNSSGNYDMRNLLNGTLVQRHPSHAVTFVDNHDTQPGEALESFVQGWFKPLAYATILTREQGYPQVFYGDYYGIPSDGVPSYRQQIDPLLKARQQYAYGRQHDYFDHWDVIGWTREGNASHPNSGLATIMSDGPGGSKWMYVGRQKAGEVWHDMTGNRSGTVTINQDGWGHFFVNGGSVSVWVKR

SEQ ID NO: 44536 - protein, 480 aa, Bacillus sp.
NGTIMQYFEWNVPNDGQHWNRLHNNAQNLKNAGITAIWIPPAWKGTSQNDVGYGAYDLYDLGEFNQKGTVRTKYGTKAELERAIRSLKANGIQVYGDVVMNHKGGADFTERVQAVEVNPQNRNQEVSGTYQIEAWTGFNFPGRGNQHSSFKWRWYHFDGTDWDQSRQLANRIYKFRGDGKAWDWEVDTENGNYDYLMYADVDMDHPEVINELNRWGVWYANTLNLDGFRLDAVKHIKFSFMRDWLGHVRGQTGKNLFAVAEYWKNDLGALENYLSKTNWTMSAFDVPLHYNLYQASNSSGTYDMRNLLNGTLVQRHPSHAVTFVDNHDTQPGEALESFVQGWFKPLAYATILTREQGYPQVFYGDYYGIPSDGVPSYRQQIDPLLKARQQYAYGRQHDYFDHWDVIGWTREGNASHPNSGLATIMSDGPGGSKWMYVGRQKAGEVWHDMTGNRSGTVTINQDGWGHFFVNGGSVSVWVKR

SEQ ID NO: 44537 - protein, 480 aa, Bacillus sp.
NGTIMQYFEWNVPNDGQHWNRLHNNAQNLKNAGITAIWIPPAWKGTSQNDVGYGAYDLYDLGEFNQKGTVRTKYGTKAELERAIRSLKANGIQVYGDVVMNHKGGADFTERVQAVEVNPQNRNQEVSGTYQIEAWTGFNFPGRGNQHSSFKWRWYHFDGTDWDQSRQLANRIYKFRGDGKAWDWEVDTENGNYDYLMYADVDMDHPEVINELNRWGVWYANTLNLDGFRLDAVKHIKFSFMRDWLGHVRGQTGKNLFAVAEYWKNDLGALENYMSKTNWTMSAFDVPLHYNLYQASNSSGNYDMRNLLNGTLVQRHPSHAVTFVDNHDTQPGEALESFVQGWFKPLAYATILTREQGYPQVFYGDYYGIPSDGVPSYRQQIDPLLKARQQYAYGRQHDYFDHWDVIGWTREGNASHPNSGLATIMSDGPGGSKWMYVGRQKAGEVWHDMTGNRSGTVTINQDGWGHFFVNGGSVSVWVKR

SEQ ID NO: 44538 - protein, 480 aa, Bacillus sp.
NGTIMQYFEWNVPNDGQHWNRLHNNAQNLKNAGITAIWIPPAWKGTSQNDVGYGAYDLYDLGEFNQKGTVRTKYGTKAELDRAIRSLKANGIQVYGDVVMNHKGGADFTERVQAVEVNPQNRNQEVSGTYQIEAWTGFNFPGRGNQHSSFKWRWYHFDGTDWDQSRQLANRIYKFRGDGKAWDWEVDTENGNYDYLMYADVDMDHPEVINELNRWGVWYANTLNLDGFRLDAVKHIKFSFMRDWLGHVRGQTGKNLFAVAEYWKNDLGALENYLSKTNWTMSAFDVPLHYNLYQASNSSGNYDMRNLLNGTLVQRHPSHAVTFVDNHDTQPGEALESFVQGWFKPLAYATILTREQGYPQVFYGDYYGIPSDGVPSYRQQIDPLLKARQQYAYGRQHDYFDHWDVIGWTREGNASHPNSGLATIMSDGPGGSKWMYVGRQKAGEVWHDMTGNRSGTVTINQDGWGHFFVNGGSVSVWVKR

SEQ ID NO: 44539 - protein, 480 aa, Bacillus sp.
NGTIMQYFEWNVPNDGQHWNRLHNNAQNLKNAGITAIWIPPAWKGTSQNDVGYGAYDLYDLGEFNQKGTVRTKYGTKAELERAIRSLKANGIQVYGDVVMNHKGGADFTERVQAVEVNPQNRNQEVSGTYQIEAWTGFNFPGRGNQHSSFKWRWYHFDGTDWDQSRQLANRIYKFRGDGKAWDWEVDTENGNYDYLMYADVDMDHPEVINELNRWGVWYANTLNLDGFRLDAVKHIKFSFMRDWLGHVRGQTGKNLFAVAEYWKNDLGALENYLSKTNWTMSAFDVPLHYNSYQASNSSGNYDMRNLLNGTLVQRHPSHAVTFVDNHDTQPGEALESFVQGWFKPLAYATILTREQGYPQVFYGDYYGIPSDGVPSYRQQIDPLLKARQQYAYGRQHDYFDHWDVIGWTREGNASHPNSGLATIMSDGPGGSKWMYVGRQKAGEVWHDMTGNRSGTVTINQDGWGHFFVNGGSVSVWVKR

SEQ ID NO: 44540 - protein, 480 aa, Bacillus sp.
NGTIMQYFEWNVPNDGQHWNRLHNNAQNLKNAGITAIWIPPAWKGTSQNDVGYGAYDLYDLGEFNQKGTVRTKYGTKAELERAIRSLKANGIQVYGDVVMNHKGGADFTERVQAVEVNPQNRNQEVSGTYQIEAWTGFNFPGRGNQHSSFKWRWYHFDGTDWDQSRQLANRIYKFRGDGKAWDWEVDTENGNYDYLMYADVDMDHPEVINELNRWGVWYANTLNLDGFRLDAVKHIKFSFMRDWLGHVRGQTGKNLFAVAEYWKNDLGALENYLSKTNWTMSAFDVPLHYNLYQASNSSGNYDMRNLLNGTLVQRHPSHAVTFVDNHDTQPGEALESFVQGWFKPLAYATILTREQGYPQVFYGDYYGIPSDGVPSYRQQIDPLLKARQQYAYGEQHDYFDHWDVIGWTREGNASHPNSGLATIMSDGPGGSKWMYVGRQKAGEVWHDMTGNRSGTVTINQDGWGHFFVNGGSVSVWVKR

SEQ ID NO: 44541 - protein, 480 aa, Bacillus sp.
NGTIMQYFEWNVPNDGQHWNRLHNNAQNLKNAGITAIWIPPAWKGTSQNDVGYGAYDLYDLGEFNQKGTVRTKYGTKAELERAIRSLKANGIQVYGDVVMNHKGGADFTERVQAVEVNPQNRNQEVSGTYQIEAWTGFNFPGRGNQHSSFKWRWYHFDGTDWDQSRQLANRIYKFRGDGKAWDWEVDTENGNYDYLMYADVDMDHPEVINELNRWGVWYANTLNLDGFRLDAVKHIKFSFMRDWLGHVRGQTGKNLFAVAEYWKNDLGALENYLSKTNWTMSAFDVPLHYNLYQASNSSGNYDMRNLLNGTLVQRHPSHAVTFVDNHDTQPGEALMSFVQGWFKPLAYATILTREQGYPQVFYGDYYGIPSDGVPSYRQQIDPLLKARQQYAYGRQHDYFDHWDVIGWTREGNASHPNSGLATIMSDGPGGSKWMYVGRQKAGEVWHDMTGNRSGTVTINQDGWGHFFVNGGSVSVWVKR

SEQ ID NO: 44542 - protein, 480 aa, Bacillus sp.
NGTIMQYFEWNVPNDGQHWNRLHNNAQNLKNAGITAIWIPPAWKGTSQNDVGYGAYDLYDLGEFNQKGTVRTKYGTKAELERAIRSLKANGIQVYGDVVMNHKGGADFTERVQAVEVNPQNRNQEVSGTYQIEAWTGFNFPGRGNQHSSFKWRWYHFDGTDWDQSRQLANRIYKFRGDGKAWDWEVDTENGNYDYLMYADVDMDHPEVINELNRWGVWYANTLNLDGFRLDAVKHIKFSFMRDWLGHVRGQTGKNLFAVAEYWKNDLGALENYLSKTNWTMSAFDVPLHYNLYQASNSSGNYDMRNLLNGTLVQRHPSHAVTFVDNHDTQPGEALESFVWGWFKPLAYATILTREQGYPQVFYGDYYGIPSDGVPSYRQQIDPLLKARQQYAYGRQHDYFDHWDVIGWTREGNASHPNSGLATIMSDGPGGSKWMYVGRQKAGEVWHDMTGNRSGTVTINQDGWGHFFVNGGSVSVWVKR

SEQ ID NO: 44543 - protein, 480 aa, Bacillus sp.
NGTIMQYFEWNVPNDGQHWNRLHNNAQNLKNAGITAIWIPPAWKGTSQNDVGYGAYDLYDLGEFNQKGTVRTKYGTKAELERAIRSLKANGIQVYGDVVMNHKGGADFTERVQAVEVNPQNRNQEVSGTYQIEAWTGFNFPGRGNQHSSFKWRWYHFDGTDWDQSRQLANRIYKFRGDGKAWDWEVDTENGNYDYLMYADVDMDHPEVINELNRWGVWYANTLNLDGFRLDAVKHIKFSFMRDWLGHVRGQTGKNLFAVAEYWKNDLGALENYLSKTNWTMSAFDVPLHYNLYQASNSSGNYDMRNLLNGTLVQRHPSHAVTFVDNHDTQPGEALESFVQGWFKPLAYATILTREQGYPQVFYGDYYGIPSDGVPSYRQQIDPLLKARQQYAYGRQHDYFDHWDVIGWTREGNASHPNSGLATIMFDGPGGSKWMYVGRQKAGEVWHDMTGNRSGTVTINQDGWGHFFVNGGSVSVWVKR

SEQ ID NO: 44544 - protein, 480 aa, Bacillus sp.
NGTIMQYFEWNVPNDGQHWNRLHNNAQNLKNAGITAIWIPPAWKGTSQNDVGYGAYDLYDLGEFNQKGTVRTKYGTKAELERAIRSLKANGIQVYGDVVMNHKGGADFTERVQAVEVNPQNRNQEVSGTYQIEAWTGFNFPGRGNQHSSFKWRWYHFDGTDWDQSRQLANRIYKFRGDGKAWDWEVDTENGNYDYLMYADVDMDHPEVINELNRWGVWYANTLNLDGFRLDAVKHIKFSFMRDWLGHVRGQTGKNLFAVAEYWKNDLGALENYLSKTNWTMSAFDVPLHYNLYQASNSSGNYDMRNLLNGTLVQRHPSHAVTFVDNHDTQPGEALESFVQLWFKPLAYATILTREQGYPQVFYGDYYGIPSDGVPSYRQQIDPLLKARQQYAYGRQHDYFDHWDVIGWTREGNASHPNSGLATIMSDGPGGSKWMYVGRQKAGEVWHDMTGNRSGTVTINQDGWGHFFVNGGSVSVWVKR

SEQ ID NO: 44545 - protein, 480 aa, Bacillus sp.
NGTIMQYFEWNVPNDGQHWNRLHNNAQNLKNAGITAIWIPPAWKGTSQNDVGYGAYDLYDLGEFNQKGTVRTKYGTKAELERAIRSLKANGIQVYGDVVMNHKGGADFTERVQAVEVNPQNRNQEVSGTYQIEAWTGFNFPGRGNQHSSFKWRWYHFDGTDWDQSRQLANRIYKFRGDGKAWDWEVDTENGNYDYLMYADVDMDHPEVINELNRWGVWYANTLNLDGFRLDAVKHIKFSFMRDWLGHVRGQTGKNLFAVAEYWKNDLGALENYLSKTNWTMSAFDVPLHYNLYQASNSSGNYDMRNLLNGTLVQRHPSHAVTFVDNHDTQPGEALESFVQGWFKPLAYATILTREQGYPQVFYGDYYGIPSDGVPSIRQQIDPLLKARQQYAYGRQHDYFDHWDVIGWTREGNASHPNSGLATIMSDGPGGSKWMYVGRQKAGEVWHDMTGNRSGTVTINQDGWGHFFVNGGSVSVWVKR

SEQ ID NO: 44546 - protein, 480 aa, Bacillus sp.
NGTIMQYFEWNVPNDGQHWNRLHNNAQNLKNAGITAIWIPPAWKGTSQNDVGYGAYDLYDLGEFNQKGTVRTKYGTKAELERAIRSLKANGIQVYGDVVMNHKGGADFTENVQAVEVNPQNRNQEVSGTYQIEAWTGFNFPGRGNQHSSFKWRWYHFDGTDWDQSRQLANRIYKFRGDGKAWDWEVDTENGNYDYLMYADVDMDHPEVINELNRWGVWYANTLNLDGFRLDAVKHIKFSFMRDWLGHVRGQTGKNLFAVAEYWKNDLGALENYLSKTNWTMSAFDVPLHYNLYQASNSSGNYDMRNLLNGTLVQRHPSHAVTFVDNHDTQPGEALESFVQGWFKPLAYATILTREQGYPQVFYGDYYGIPSDGVPSYRQQIDPLLKARQQYAYGRQHDYFDHWDVIGWTREGNASHPNSGLATIMSDGPGGSKWMYVGRQKAGEVWHDMTGNRSGTVTINQDGWGHFFVNGGSVSVWVKR

SEQ ID NO: 44547 - protein, 480 aa, Bacillus sp.
NGTIMQYFEWNVPNDGQHWNRLHNNAQNLKNAGITAIWIPPAMKGTSQNDVGYGAYDLYDLGEFNQKGTVRTKYGTKAELERAIRSLKANGIQVYGDVVMNHKGGADFTERVQAVEVNPQNRNQEVSGTYQIEAWTGFNFPGRGNQHSSFKWRWYHFDGTDWDQSRQLANRIYKFRGDGKAWDWEVDTENGNYDYLMYADVDMDHPEVINELNRWGVWYANTLNLDGFRLDAVKHIKFSFMRDWLGHVRGQTGKNLFAVAEYWKNDLGALENYLSKTNWTMSAFDVPLHYNLYQASNSSGNYDMRNLLNGTLVQRHPSHAVTFVDNHDTQPGEALESFVQGWFKPLAYATILTREQGYPQVFYGDYYGIPSDGVPSYRQQIDPLLKARQQYAYGRQHDYFDHWDVIGWTREGNASHPNSGLATIMSDGPGGSKWMYVGRQKAGEVWHDMTGNRSGTVTINQDGWGHFFVNGGSVSVWVKR

SEQ ID NO: 44548 - protein, 480 aa, Bacillus sp.
NGTIMQYFEWNVPNDGQHWNRLHNLAQNLKNAGITAIWIPPAWKGTSQNDVGYGAYDLYDLGEFNQKGTVRTKYGTKAELERAIRSLKANGIQVYGDVVMNHKGGADFTERVQAVEVNPQNRNQEVSGTYQIEAWTGFNFPGRGNQHSSFKWRWYHFDGTDWDQSRQLANRIYKFRGDGKAWDWEVDTENGNYDYLMYADVDMDHPEVINELNRWGVWYANTLNLDGFRLDAVKHIKFSFMRDWLGHVRGQTGKNLFAVAEYWKNDLGALENYLSKTNWTMSAFDVPLHYNLYQASNSSGNYDMRNLLNGTLVQRHPSHAVTFVDNHDTQPGEALESFVQGWFKPLAYATILTREQGYPQVFYGDYYGIPSDGVPSYRQQIDPLLKARQQYAYGRQHDYFDHWDVIGWTREGNASHPNSGLATIMSDGPGGSKWMYVGRQKAGEVWHDMTGNRSGTVTINQDGWGHFFVNGGSVSVWVKR

SEQ ID NO: 44549 - protein, 480 aa, Bacillus sp.
NGTIMQYFEWNVPNDGQHWNRLHNNAQNLKNAGITAIWIPPAWKGTSQNDVGYGAYDLYDLGEFNQKGTVRTKYGTKAELERAIRSLKANGIQVYGDVVMNHKGGADFTERVQAVEVNPQNRNQEVSGTYQIEAWTGFNFPGRGNQHSSFKWRWYHFDGTDWDQSRQLANRIYKFRGDGKAWDWEVDTENGNYDYLMYADVDMDHPEVINELNRWGVWYANTLNLDGFRLDAVKHIKFSFMRDWLGHVRGQTGKNLFAVAEYWKNDLGALENYLSKTNWTMSAFDVPLHYNLYQASNSSGNYDMRNLLNGTLVQRHPSHAVTFVDNHDTQPGEALESFVQGWFKPLAYATILTREQGYPQVFYGDYYGIPSDGVPSYRQQIDPLLKARQQYAYGRQHDYFDHWDVIGWTREGNAMHPNSGLATIMSDGPGGSKWMYVGRQKAGEVWHDMTGNRSGTVTINQDGWGHFFVNGGSVSVWVKR

SEQ ID NO: 44550 - protein, 480 aa, Bacillus sp.
NGTIMQYFEWNVPNDGQHWNRLHNNAQNLKNAGITAIWIPPAAKGTSQNDVGYGAYDLYDLGEFNQKGTVRTKYGTKAELERAIRSLKANGIQVYGDVVMNHKGGADFTERVQAVEVNPQNRNQEVSGTYQIEAWTGFNFPGRGNQHSSFKWRWYHFDGTDWDQSRQLANRIYKFRGDGKAWDWEVDTENGNYDYLMYADVDMDHPEVINELNRWGVWYANTLNLDGFRLDAVKHIKFSFMRDWLGHVRGQTGKNLFAVAEYWKNDLGALENYLSKTNWTMSAFDVPLHYNLYQASNSSGNYDMRNLLNGTLVQRHPSHAVTFVDNHDTQPGEALESFVQGWFKPLAYATILTREQGYPQVFYGDYYGIPSDGVPSYRQQIDPLLKARQQYAYGRQHDYFDHWDVIGWTREGNASHPNSGLATIMSDGPGGSKWMYVGRQKAGEVWHDMTGNRSGTVTINQDGWGHFFVNGGSVSVWVKR

SEQ ID NO: 44551 - protein, 480 aa, Bacillus sp.
NGTIMQYFEWNVPNDGQHWNRLHNNAQNLKNAGITAIWIPPAWKGTSQNDVGYGAYDLYDLGEFNQKGTVRTKYGTKAELERAIRSLKANGIQVYGDVVMNHKGGADVTERVQAVEVNPQNRNQEVSGTYQIEAWTGFNFPGRGNQHSSFKWRWYHFDGTDWDQSRQLANRIYKFRGDGKAWDWEVDTENGNYDYLMYADVDMDHPEVINELNRWGVWYANTLNLDGFRLDAVKHIKFSFMRDWLGHVRGQTGKNLFAVAEYWKNDLGALENYLSKTNWTMSAFDVPLHYNLYQASNSSGNYDMRNLLNGTLVQRHPSHAVTFVDNHDTQPGEALESFVQGWFKPLAYATILTREQGYPQVFYGDYYGIPSDGVPSYRQQIDPLLKARQQYAYGRQHDYFDHWDVIGWTREGNASHPNSGLATIMSDGPGGSKWMYVGRQKAGEVWHDMTGNRSGTVTINQDGWGHFFVNGGSVSVWVKR

SEQ ID NO: 44552 - protein, 480 aa, Bacillus sp.
NGTIMQYFEWNVPNDGQHWNRLHNNAQNLKNAGITAIWIPPAWKGTSQNDVGYGAYDLYDLGEFNQKGTVRTKYGTKAELERAIRSLKANGIQVYGDVVMNHKGGADFTERVQAVEVNPQNRNQEVSGTYQIEAWTGFNFPGRGNQHSSFKWRWYHFDGTDWDQSRQLANRIYKFRGDGKAWDWEVDTENGNYDYLMYADVDMDHPEVINELNRWGVWYANTLNLDGFRLDAVKHIKFSFMRDWLGHVRGQTGKNLFAVAEYWKNDLGALENYLSKTNWTMSAFDVPLHYNLYQASNSSGNYDMRNLLNGTLVQLHPSHAVTFVDNHDTQPGEALESFVQGWFKPLAYATILTREQGYPQVFYGDYYGIPSDGVPSYRQQIDPLLKARQQYAYGRQHDYFDHWDVIGWTREGNASHPNSGLATIMSDGPGGSKWMYVGRQKAGEVWHDMTGNRSGTVTINQDGWGHFFVNGGSVSVWVKR

SEQ ID NO: 44553 - protein, 480 aa, Bacillus sp.
NGTIMQYFEWNVPNDGQHWNRLHNNAQNLKNAGITAIWIPPAWKGTSQNDVGYGAYDLYDLGEFNQKGTVRTKYGTKAELERAIRSLKANGIQVYGDVVMNHKGGADFTERVQAVEVNPQNRNQEVSGTYQIEAWTGFNFPGRGNQHSSFKWRWYHFDGTDWDQSRQLANRIYKFRGDGKAWDWEVDTENGNYDYLMYADVDMDHPEVINELNRWGVWYANTLNLDGFRLDAVKHIKFSFMRDWLGHVRGQTGKNLFAVAEYWKNDLGALENYLSKTNWTMSAFDVPLHYNLYQASNSSGNYDMRNLLNGTLVQRHPSHAVTFVDNHDTQPGEALESFVQGWFKPLAYATILTREQGYPQVFYGDYYGIPSDGVPSYRQQIDPLLKARQQYAYGRQHDYFDHWDVIGWTREGNRSHPNSGLATIMSDGPGGSKWMYVGRQKAGEVWHDMTGNRSGTVTINQDGWGHFFVNGGSVSVWVKR

SEQ ID NO: 44554 - protein, 480 aa, Bacillus sp.
NGTIMQYFEWNVPNDGQHWNRLHNNAQNLKNAGITAIWIPPAWKGTSQNDVGYGAYDLYDLGEFNQKGTVRTKYGTKAELERAIRSLKANGIQVYGDVVMNHKGGADFTERVQAVEVNPQNRNQEVSGTYQIEAWTGFNFPGRGNQHSSFKWRWYHFDGTDWDQSRQLANRIYKFRGDGKAWDWEVDTENGNYDYLMYADVDMDHPEVINELNRWGVWYANTLNLDGFRLDAVKHIKFSFMGDWLGHVRGQTGKNLFAVAEYWKNDLGALENYLSKTNWTMSAFDVPLHYNLYQASNSSGNYDMRNLLNGTLVQRHPSHAVTFVDNHDTQPGEALESFVQGWFKPLAYATILTREQGYPQVFYGDYYGIPSDGVPSYRQQIDPLLKARQQYAYGRQHDYFDHWDVIGWTREGNASHPNSGLATIMSDGPGGSKWMYVGRQKAGEVWHDMTGNRSGTVTINQDGWGHFFVNGGSVSVWVKR

SEQ ID NO: 44555 - protein, 480 aa, Bacillus sp.
NGTIMQYFEWNVPNDGQHWNRLHNNAQNLKNAGITAIWIPPAWKGTSQNDVGYGTYDLYDLGEFNQKGTVRTKYGTKAELERAIRSLKANGIQVYGDVVMNHKGGADFTERVQAVEVNPQNRNQEVSGTYQIEAWTGFNFPGRGNQHSSFKWRWYHFDGTDWDQSRQLANRIYKFRGDGKAWDWEVDTENGNYDYLMYADVDMDHPEVINELNRWGVWYANTLNLDGFRLDAVKHIKFSFMRDWLGHVRGQTGKNLFAVAEYWKNDLGALENYLSKTNWTMSAFDVPLHYNLYQASNSSGNYDMRNLLNGTLVQRHPSHAVTFVDNHDTQPGEALESFVQGWFKPLAYATILTREQGYPQVFYGDYYGIPSDGVPSYRQQIDPLLKARQQYAYGRQHDYFDHWDVIGWTREGNASHPNSGLATIMSDGPGGSKWMYVGRQKAGEVWHDMTGNRSGTVTINQDGWGHFFVNGGSVSVWVKR

SEQ ID NO: 44556 - protein, 480 aa, Bacillus sp.
NGTIMQYFEWNVPNDGQHWNRLHNNAQNLKNAGITAIWIPPAWKGTSQNDVGYGAYDLYDLGEFNQKGTVRTKYGTKAELERAIRSLKANGIQVYGDVVMNHKGGADFTERVQAVEVNPQNRNQEVSGTYQIEAWTGFNFPGRGNQHSSFKWRWYHFDGTDWDQSRQLANRIYKFRGDGKAWDWEVDTENGNYDYLMYADVDMDHPEVINELNHWGVWYANTLNLDGFRLDAVKHIKFSFMRDWLGHVRGQTGKNLFAVAEYWKNDLGALENYLSKTNWTMSAFDVPLHYNLYQASNSSGNYDMRNLLNGTLVQRHPSHAVTFVDNHDTQPGEALESFVQGWFKPLAYATILTREQGYPQVFYGDYYGIPSDGVPSYRQQIDPLLKARQQYAYGRQHDYFDHWDVIGWTREGNASHPNSGLATIMSDGPGGSKWMYVGRQKAGEVWHDMTGNRSGTVTINQDGWGHFFVNGGSVSVWVKR

SEQ ID NO: 44557 - protein, 480 aa, Bacillus sp.
NGTIMQYFEWNVPNDGQHWNRLHNNAQNLKNAGITAIWIPPAWKGTSQNDVGYGAYDLYDLGEFNQKGTVRTKYGTKAELERAIRSLKANGIQVYGDVVMNHKGGADFTERVQAVEVNPQNRNQEVSGTYQIEAWTGFNFPGRGNQHSSFKWRWYHFDGTDWDQSRQLANRIYKFRGDGKAWDWEVDTENGNYDYLMYADVDMDHPEVINELNRWGVWYANTLNLDGFRLDAVKHIKFSFMRDWLGHVRGQTGKNLFAVAEYWKNDLGALENYLSKTNWTMSAFDVPLHYNLYQASNSSGNYDMRNLLNGTLVQRHPSHAVTFVDNHDTQPGEALESFVNGWFKPLAYATILTREQGYPQVFYGDYYGIPSDGVPSYRQQIDPLLKARQQYAYGRQHDYFDHWDVIGWTREGNASHPNSGLATIMSDGPGGSKWMYVGRQKAGEVWHDMTGNRSGTVTINQDGWGHFFVNGGSVSVWVKR

SEQ ID NO: 44558 - protein, 480 aa, Bacillus sp.
NGTIMQYFEWNVPNDGQHWNRLHNNAQNLKNAGITAIWIPPAWKGTSQTDVGYGAYDLYDLGEFNQKGTVRTKYGTKAELERAIRSLKANGIQVYGDVVMNHKGGADFTERVQAVEVNPQNRNQEVSGTYQIEAWTGFNFPGRGNQHSSFKWRWYHFDGTDWDQSRQLANRIYKFRGDGKAWDWEVDTENGNYDYLMYADVDMDHPEVINELNRWGVWYANTLNLDGFRLDAVKHIKFSFMRDWLGHVRGQTGKNLFAVAEYWKNDLGALENYLSKTNWTMSAFDVPLHYNLYQASNSSGNYDMRNLLNGTLVQRHPSHAVTFVDNHDTQPGEALESFVQGWFKPLAYATILTREQGYPQVFYGDYYGIPSDGVPSYRQQIDPLLKARQQYAYGRQHDYFDHWDVIGWTREGNASHPNSGLATIMSDGPGGSKWMYVGRQKAGEVWHDMTGNRSGTVTINQDGWGHFFVNGGSVSVWVKR

SEQ ID NO: 44559 - protein, 480 aa, Bacillus sp.
NGTIMQYFEWNVPNDGQHWNRLHNNAQNLKNAGITAIWIPPAWKGTSQNDVGYGAYDLYDLGEFNQKGTVRTKYGTKAELERAIRSLKANGIQVYGDVVMNHKGGADFTERVQAVEVNPQNRNQEVSGTYQIEAWTGFNFPGRGNQHSSFKWRWYHFDGTDWDFSRQLANRIYKFRGDGKAWDWEVDTENGNYDYLMYADVDMDHPEVINELNRWGVWYANTLNLDGFRLDAVKHIKFSFMRDWLGHVRGQTGKNLFAVAEYWKNDLGALENYLSKTNWTMSAFDVPLHYNLYQASNSSGNYDMRNLLNGTLVQRHPSHAVTFVDNHDTQPGEALESFVQGWFKPLAYATILTREQGYPQVFYGDYYGIPSDGVPSYRQQIDPLLKARQQYAYGRQHDYFDHWDVIGWTREGNASHPNSGLATIMSDGPGGSKWMYVGRQKAGEVWHDMTGNRSGTVTINQDGWGHFFVNGGSVSVWVKR

SEQ ID NO: 44560 - protein, 480 aa, Bacillus sp.
NGTIMQYFEWNVPNDGQHWRRLHNNAQNLKNAGITAIWIPPAWKGTSQNDVGYGAYDLYDLGEFNQKGTVRTKYGTKAELERAIRSLKANGIQVYGDVVMNHKGGADFTERVQAVEVNPQNRNQEVSGTYQIEAWTGFNFPGRGNQHSSFKWRWYHFDGTDWDQSRQLANRIYKFRGDGKAWDWEVDTENGNYDYLMYADVDMDHPEVINELNRWGVWYANTLNLDGFRLDAVKHIKFSFMRDWLGHVRGQTGKNLFAVAEYWKNDLGALENYLSKTNWTMSAFDVPLHYNLYQASNSSGNYDMRNLLNGTLVQRHPSHAVTFVDNHDTQPGEALESFVQGWFKPLAYATILTREQGYPQVFYGDYYGIPSDGVPSYRQQIDPLLKARQQYAYGRQHDYFDHWDVIGWTREGNASHPNSGLATIMSDGPGGSKWMYVGRQKAGEVWHDMTGNRSGTVTINQDGWGHFFVNGGSVSVWVKR

SEQ ID NO: 44561 - protein, 480 aa, Bacillus sp.
NGTIMQYFEWNVPNDGQHWNRLHNNAQNLKNAGITAIWIPPAWKGTSQNDVGYGAYDLYDLGEFNQKGTVRTKYGTKAELERAIRSLKANGIQVYGDVVMNHKGGADFTERVQAVEVNPQNRNQEVSGTYQIEAWTGFNFPGRGNQHSSFKWRWYHFDGTDWDQSRQLANRIYKFRGDGKAWDWEVDTENGNYDYLMYADVDMDHPEVINELNRWGVWYANTLNLDGFRLDAVKHIKFSFMRDWLGHVRGQTGKNLFAVAEYWKNDLGALENYLSKTNWTMSAFDVPLHYNLYQASNSSGNYDMRNLLNGTLVQRHPSHAVTFVDNHDTQPGEALESFVQGWFKPLAYATILTREQGYPQVFYGDYYGIPSDGVPSYRQQIDPLLKARQQYAYGIQHDYFDHWDVIGWTREGNASHPNSGLATIMSDGPGGSKWMYVGRQKAGEVWHDMTGNRSGTVTINQDGWGHFFVNGGSVSVWVKR

SEQ ID NO: 44562 - protein, 480 aa, Bacillus sp.
NGTIMQYFEWNVPNDGQHWNFLHNNAQNLKNAGITAIWIPPAWKGTSQNDVGYGAYDLYDLGEFNQKGTVRTKYGTKAELERAIRSLKANGIQVYGDVVMNHKGGADFTERVQAVEVNPQNRNQEVSGTYQIEAWTGFNFPGRGNQHSSFKWRWYHFDGTDWDQSRQLANRIYKFRGDGKAWDWEVDTENGNYDYLMYADVDMDHPEVINELNRWGVWYANTLNLDGFRLDAVKHIKFSFMRDWLGHVRGQTGKNLFAVAEYWKNDLGALENYLSKTNWTMSAFDVPLHYNLYQASNSSGNYDMRNLLNGTLVQRHPSHAVTFVDNHDTQPGEALESFVQGWFKPLAYATILTREQGYPQVFYGDYYGIPSDGVPSYRQQIDPLLKARQQYAYGRQHDYFDHWDVIGWTREGNASHPNSGLATIMSDGPGGSKWMYVGRQKAGEVWHDMTGNRSGTVTINQDGWGHFFVNGGSVSVWVKR

SEQ ID NO: 44563 - protein, 480 aa, Bacillus sp.
NGTIMQYFEWNVPNDGQHWNRLHNNAQNLKNAGITAIWIPPAWKGTSQNDVGYGAYDLYDLGEFNQKGTVRTKYGTKAELERAIRSLKANGIQVYGDVVMNHKGGADFTERVQAVEVNPQNRNQEVSGTYQIEAWTGFNFPGRGNQHSSFKWRWYHFDGTDWDQSRQLANRIYKFRGDGKAWDWEVDTETGNYDYLMYADVDMDHPEVINELNRWGVWYANTLNLDGFRLDAVKHIKFSFMRDWLGHVRGQTGKNLFAVAEYWKNDLGALENYLSKTNWTMSAFDVPLHYNLYQASNSSGNYDMRNLLNGTLVQRHPSHAVTFVDNHDTQPGEALESFVQGWFKPLAYATILTREQGYPQVFYGDYYGIPSDGVPSYRQQIDPLLKARQQYAYGRQHDYFDHWDVIGWTREGNASHPNSGLATIMSDGPGGSKWMYVGRQKAGEVWHDMTGNRSGTVTINQDGWGHFFVNGGSVSVWVKR

SEQ ID NO: 44564 - protein, 480 aa, Bacillus sp.
NGTIMQYFEWNVPNDGQHWNRLHNNAQNLKNAGITAIWIPPAWKGTSQNDVGYGAYDLYDLGEFNQKGTVRTKYGTKAELERAIRSLKANGIQVYGDVVMNHKGGADFTERVQAVEVNPQNRNQEVSGTYQIEAWTGFNFPGRGNQHSSFKWRWYHFDGTDWDQSRQLANRIYKFRGDGKAWDWEVDTENGNYDYLMYADVDMDHPEVPNELNRWGVWYANTLNLDGFRLDAVKHIKFSFMRDWLGHVRGQTGKNLFAVAEYWKNDLGALENYLSKTNWTMSAFDVPLHYNLYQASNSSGNYDMRNLLNGTLVQRHPSHAVTFVDNHDTQPGEALESFVQGWFKPLAYATILTREQGYPQVFYGDYYGIPSDGVPSYRQQIDPLLKARQQYAYGRQHDYFDHWDVIGWTREGNASHPNSGLATIMSDGPGGSKWMYVGRQKAGEVWHDMTGNRSGTVTINQDGWGHFFVNGGSVSVWVKR

SEQ ID NO: 44565 - protein, 480 aa, Bacillus sp.
NGTIMQYFEWNVPNDGQHWNRLHNNAQNLKNAGITAIWIPPAWKGTSQNDVGYGAYDLYDLGEFNQKGTVRTKYGTKAELERAIRSLKANGIQVYGDVVMNHKGGADFTERVQAVEVNPQNRNQEVSGTYQIEAWTGFNFPGRGNQHSSFKWRWYHFDGTDWDQSRQLANRIYKFRGDGKAWDWEVDTENGNYDYLMYADVDMDHPEVINELNRWGVWYANTLNLDGFRLDAVKHIKFSFMRDWLGHVRGQTGKNLFAVAEYWKNDLGALENYLSKTNWTMSAFDVPLHYNLYQASNSSGNYDMRNLLNGTLVQRHPSHAVTFVDNHDTQPGEALESFVQGWFKPLAYATILTREQGYPQVFYGDYYGIPSDGVPSYRQQIDPLLKARQQYAYGRQHDYFDHWDVIGWTREGNASHPNSGLATIMSDGPGGSKWMYVGVQKAGEVWHDMTGNRSGTVTINQDGWGHFFVNGGSVSVWVKR

SEQ ID NO: 44566 - protein, 480 aa, Bacillus sp.
NGTIMQYFEWNVPNDGQHWNRLHNNAQNLKNAGITAIWIPPAWKGTSQNDVGYGAYDLYDLGEFNQKGTVRTKYGTKAELERAIRSLKANGIQVYGDVVMNHKGGADFTERVQAVEVNPQNRNQEVSGTYQIEAWTGFNFPGRGNQHSSFKWRWYHFDGTDWDQSRQLANRIYKFRGDGKAWDWEVDTENGNYDYLMYADVDMDHPEVINELNRWGVWYANTLNLDGFRLDAVKHIKFSFMRDWLGHVRGQTGKNLFAVAEYWKNDLGALENYLDKTNWTMSAFDVPLHYNLYQASNSSGNYDMRNLLNGTLVQRHPSHAVTFVDNHDTQPGEALESFVQGWFKPLAYATILTREQGYPQVFYGDYYGIPSDGVPSYRQQIDPLLKARQQYAYGRQHDYFDHWDVIGWTREGNASHPNSGLATIMSDGPGGSKWMYVGRQKAGEVWHDMTGNRSGTVTINQDGWGHFFVNGGSVSVWVKR

SEQ ID NO: 44567 - protein, 480 aa, Bacillus sp.
NGTIMQYFEWNVPNDGQHWNRLHNNAQNLKNAGITAIWIPPAWKGTSQNDVGYGAYDLYDLGEFNQKGTVRTKYGTKAELERAIRSLKANGIQVYGDVVMNHKGGADFTERVQAVEVNPQNRNQEVSGTYQIEAWTGFNFPGRGNQHSSFKWRWYHFDGTDWDQSRQLANRIYKFRGDGKAWDWEVDTENGNYDYLMYADVDMDHPEVINELNRWGVWYANTLNLDGFRLDAVKHIKFSFMRDWLGHVRGQTGKNLFAVAEYWKNDLGALENYLSKTNWTMSAFDVPLHYNLYQASNSIGNYDMRNLLNGTLVQRHPSHAVTFVDNHDTQPGEALESFVQGWFKPLAYATILTREQGYPQVFYGDYYGIPSDGVPSYRQQIDPLLKARQQYAYGRQHDYFDHWDVIGWTREGNASHPNSGLATIMSDGPGGSKWMYVGRQKAGEVWHDMTGNRSGTVTINQDGWGHFFVNGGSVSVWVKR

SEQ ID NO: 44568 - protein, 480 aa, Bacillus sp.
NGTIMQYFEWNVPNDGQHWNRLHNNAQNLKNAGITAIWIPPAWKGTSQNDVGYGAYDLYDLGEFNQKGTVRTKYGTKAELERAIRSLKANGIQVYGDVVMNHKGGADFTERVQAVEVNPQNRNQEVSGTYQIEAWTGFNFPGRGNQHSSFKWRWYHFDGTDWDQSRQLANRIYKFRGDGKAWDWEVDTENGNYDYLMYADVDMDHPEVINELNRWGVWYANTLNLDGFRLDAVKHIKFSFMRDWLGHVRGQTGKNLFAVAEYWKNDLGALENYLSKTNWTMSAFDVPLHYNLYQASNSSGNYDMRNLLNGTLVQRHPSHAVTFVDNHDTQPGEALESFVQGWFKPLAYATILTREQGYPQVFYGDYYGIPSDGVPSYRQQIDPLLKARQQYAYGRQHDYFDHWDVIGWTREGCASHPNSGLATIMSDGPGGSKWMYVGRQKAGEVWHDMTGNRSGTVTINQDGWGHFFVNGGSVSVWVKR

SEQ ID NO: 44569 - protein, 480 aa, Bacillus sp.
NGTIMQYFEWNVPNDGQHWNRLHNNAQNLKNAGITAIWIPPAWKGTSQNDVGYGAYDLYDLGEFNQKGTVRTKYGTKAELERAIRSLKANGIQVYGDVVMNHKGGADFTERVQAVEVNPQNRNQEVSGTYQIEAWTGFNFPGRGNQHSSFKWRWYHFDGTDWDQSRQLANRIYKFRGDGKAWDWEVDTENGNYDYLMYADVDMDHPEVINELNRWGVWYANTLNLDGFRLDAVKHIKFSFMRDWLGHVRGQTGKNLFAVAEYWKNDLGALENYLSKTNWTMSAFDVPLHYNLYPASNSSGNYDMRNLLNGTLVQRHPSHAVTFVDNHDTQPGEALESFVQGWFKPLAYATILTREQGYPQVFYGDYYGIPSDGVPSYRQQIDPLLKARQQYAYGRQHDYFDHWDVIGWTREGNASHPNSGLATIMSDGPGGSKWMYVGRQKAGEVWHDMTGNRSGTVTINQDGWGHFFVNGGSVSVWVKR

SEQ ID NO: 44570 - protein, 480 aa, Bacillus sp.
NGTIMQYFEWNVPNDGQHWNRLHNNAQNLKNAGITAIWIPPAWKGTSQNDVGYGAYDLYDLGEFNQKGTVRTKYGTKAELERAIRSLKANGIQVYGDVVMNHKGGADFTERVQAVEVNPQNRNQEVSGTYQIEAWTGFNFPGRGNQHSSFKWRWYHFDGTDWDQSRQLANRIYKFRGDGKAWDWEVDTENGNYDYLMYADVDMDHPEVINELNRWGVWYANTLNLDGFRLDAVKHIKFSFMRDWLGHVRGQTGKNLFAVAEYWKNDLGALENYLSKTNWTMSAFDVPLHYNLYQASNSSGNYDMRNLLNGTLVQRHPSHAVTFVDNHDTQPGEALESFVQGWFKPLAYATILTREQGYPQVFYGDYYGIPSDGVPSYRQQIDPLLKARQQYAYGRQHDYFDHWDVIGWTREGNASHPNSGLATIRSDGPGGSKWMYVGRQKAGEVWHDMTGNRSGTVTINQDGWGHFFVNGGSVSVWVKR

SEQ ID NO: 44571 - protein, 480 aa, Bacillus sp.
NGTIMQYFEWNVPNDGQHWNRLHNNAQNLKNAGITAIWIPPAWKGTSQNDVGYGAYDLYDLGEFNQKGTVRTKYGTKAELERAIRSLKANGIQVYGDVVMNHKGGADFTERVQAVEVNPQNRNQEVSGTYQIEAWTGFNFPGRGNQHSSFKWRWYHFDGTDWDQSRQLANRIYKFRGDGKAWDWEVDTENGNYDYLMYADVDMDHPEVINELNRWGVWYANTLNLDGFRLDAVKHIKFSFMRDWLGHVRGQTGKNLFAVAEYWKNDLGALENYLSKTNWTMSAFDVPLHYNLYQASNSSGNYDMRNLLNGTLVQRHPSHAVTFVDNHDTQPGEALESFVQGWFKPLAYATILTREQGYPQVFYGDYYGIPSDGVPSYRQQIDPLLKARQLYAYGRQHDYFDHWDVIGWTREGNASHPNSGLATIMSDGPGGSKWMYVGRQKAGEVWHDMTGNRSGTVTINQDGWGHFFVNGGSVSVWVKR

SEQ ID NO: 44572 - protein, 480 aa, Bacillus sp.
NGTIMQYFEWNVPNDGQHWNRLHNNAQNLKNAGITAIWIPPAWKGTSQNDVGYGAYDLYDLGEFNQKGTVRTKYGTKAELERAIRSLKANGIQVYGDVVMNHKGGADFTERVQAVEVNPQNRNQEVSGTYQIEAWTGFNFPGRGNQHSSFKWRWYHFDGTDWDQSRQLANRIYKFRGDGKAWDWEVDTENGNYDYLMYADVDMDHPEVINELNRWGVWYANTLNLDGFRLDAVKHIKFSFMRDWLGHVRGQTGKNLFAVAEYWKNDLGALENYLSKTNWTMSAFDVPLHYNLYQASNSSGNYDMRNLLNGTLVQRHPSHAVTFVDNHDTQPGEALESFVQGWFKPLAYATILTRSQGYPQVFYGDYYGIPSDGVPSYRQQIDPLLKARQQYAYGRQHDYFDHWDVIGWTREGNASHPNSGLATIMSDGPGGSKWMYVGRQKAGEVWHDMTGNRSGTVTINQDGWGHFFVNGGSVSVWVKR

SEQ ID NO: 44573 - protein, 480 aa, Bacillus sp.
NGTIMQYFEWNVPNDGQHWNRLHNNAQNLKNAGITAIWIPPAWKGTSQNDVGYGAYDLYDLGEFNQKGTVRTKYGTKAELERAIRSLKANGIQVYGDVVMNHKGGADFTERVQAVEVNPQNRNQEVSGTYQIEAWTGFNFPGRGNQHSSFKWRWYHFDGTDWDQSRQLANRIYKFRGDGKAWDWEVDTENGNYDYLMYADVDMDHPEVINELNRWGVWYANTLNLDGFRLDAVKHIKFSFMRDWLGHVRGQTGKNLFAVAEYWKNDLGALENYLSKTNWTMSAFDVPLHYNLYQASNSSGNYDMRNLLNGTLVQRHPSHAVTFVDNHDTQPGEALESFVQGWFKPLAYATILTREQGYPQVFYGDYYGIPSDGVPSYRQQIDPLLKARQQYAYGRQHDYFDHWDVIGWTREGNASHPNSGLATVMSDGPGGSKWMYVGRQKAGEVWHDMTGNRSGTVTINQDGWGHFFVNGGSVSVWVKR

SEQ ID NO: 44574 - protein, 480 aa, Bacillus sp.
NGTIMQYFEWNVPNDGQHWNRLHNNAQNLKNAGITAIWIPPAWKGTSQNDVGYGAYDLYDLGEFNQKGTVRTKYGTKAELERAIRSLKANGIQVYGDVVMNHKGGADFTERVQAVEVNPQNRNQEVSGTYQIEAWTGFNFPGRGNQHSSFKWRWYHFDGTDWDQSRQLANRIYKFRGDGKAWDWEVDTENGNYDYLMYADVDMDHPEVINELNRWGVWYANTLNLDGFRLDAVKHIKFSFMRDWLGHVRGQTGKNLFAVAEYWKNDLGALENYLSKTNWTMSAFDVPLHYNLYQASNSSGNYDMRNLLNGTLVQCHPSHAVTFVDNHDTQPGEALESFVQGWFKPLAYATILTREQGYPQVFYGDYYGIPSDGVPSYRQQIDPLLKARQQYAYGRQHDYFDHWDVIGWTREGNASHPNSGLATIMSDGPGGSKWMYVGRQKAGEVWHDMTGNRSGTVTINQDGWGHFFVNGGSVSVWVKR

SEQ ID NO: 44575 - protein, 480 aa, Bacillus sp.
NGTIMQYFEWNVPNDGQHWNRLHNNAQNLKAAGITAIWIPPAWKGTSQNDVGYGAYDLYDLGEFNQKGTVRTKYGTKAELERAIRSLKANGIQVYGDVVMNHKGGADFTERVQAVEVNPQNRNQEVSGTYQIEAWTGFNFPGRGNQHSSFKWRWYHFDGTDWDQSRQLANRIYKFRGDGKAWDWEVDTENGNYDYLMYADVDMDHPEVINELNRWGVWYANTLNLDGFRLDAVKHIKFSFMRDWLGHVRGQTGKNLFAVAEYWKNDLGALENYLSKTNWTMSAFDVPLHYNLYQASNSSGNYDMRNLLNGTLVQRHPSHAVTFVDNHDTQPGEALESFVQGWFKPLAYATILTREQGYPQVFYGDYYGIPSDGVPSYRQQIDPLLKARQQYAYGRQHDYFDHWDVIGWTREGNASHPNSGLATIMSDGPGGSKWMYVGRQKAGEVWHDMTGNRSGTVTINQDGWGHFFVNGGSVSVWVKR

SEQ ID NO: 44576 - protein, 480 aa, Bacillus sp.
NGTIMQYFEWNVPNDGQHWNRLHNNAQNLKNAGITAIWIPPAWKGTSQNDVGYGAYDLYDLGEFNQKGTVRTKYGTKAELERAIRSLKANGIQVYGDVVMNHKGGADFTERVQAVEVNPQNRNQEVSGTYQIEAWTGFNFPGRGNQHSSFKWRWYHFDGTDWDQSRQLANRIYKFRGDGKAWDWEVDTENGNYDYLMYADVDMDHPEVINELNRWGVWYANTLNLDGFRLDAVKHIKFSFMRDWLGHVRGQTGKNLFAVAEYWKNDLGALENYLSKTNWTMSAFDVPLHYNLYQASNSSGNYDMRNLLNGTLVQRHPSHAVTFVDNHDTQPGEALESFVQGWFKPLAYATILTREQGYPQVFYGDYYGIPSDGVPSYRLQIDPLLKARQQYAYGRQHDYFDHWDVIGWTREGNASHPNSGLATIMSDGPGGSKWMYVGRQKAGEVWHDMTGNRSGTVTINQDGWGHFFVNGGSVSVWVKR

SEQ ID NO: 44577 - protein, 480 aa, Bacillus sp.
NGTIMQYFEWNVPNDGQHWNRLHNNAQNLKNAGITAIWIPPAWKGTSQNDVGYGAYDLYDLGEFNQKGTVRTKYGTKAELERAIRSLKANGIQVYGDVVMNHKGGADCTERVQAVEVNPQNRNQEVSGTYQIEAWTGFNFPGRGNQHSSFKWRWYHFDGTDWDQSRQLANRIYKFRGDGKAWDWEVDTENGNYDYLMYADVDMDHPEVINELNRWGVWYANTLNLDGFRLDAVKHIKFSFMRDWLGHVRGQTGKNLFAVAEYWKNDLGALENYLSKTNWTMSAFDVPLHYNLYQASNSSGNYDMRNLLNGTLVQRHPSHAVTFVDNHDTQPGEALESFVQGWFKPLAYATILTREQGYPQVFYGDYYGIPSDGVPSYRQQIDPLLKARQQYAYGRQHDYFDHWDVIGWTREGNASHPNSGLATIMSDGPGGSKWMYVGRQKAGEVWHDMTGNRSGTVTINQDGWGHFFVNGGSVSVWVKR

SEQ ID NO: 44578 - protein, 480 aa, Bacillus sp.
NGTIMQYFEWNVPNDGQHWNRLHNNAQNLKNAGITAIWIPPAWKGTSQNDVGYGAYDLYDLGEFNQKGTVRTKYGTKAELERAIRSLLANGIQVYGDVVMNHKGGADFTERVQAVEVNPQNRNQEVSGTYQIEAWTGFNFPGRGNQHSSFKWRWYHFDGTDWDQSRQLANRIYKFRGDGKAWDWEVDTENGNYDYLMYADVDMDHPEVINELNRWGVWYANTLNLDGFRLDAVKHIKFSFMRDWLGHVRGQTGKNLFAVAEYWKNDLGALENYLSKTNWTMSAFDVPLHYNLYQASNSSGNYDMRNLLNGTLVQRHPSHAVTFVDNHDTQPGEALESFVQGWFKPLAYATILTREQGYPQVFYGDYYGIPSDGVPSYRQQIDPLLKARQQYAYGRQHDYFDHWDVIGWTREGNASHPNSGLATIMSDGPGGSKWMYVGRQKAGEVWHDMTGNRSGTVTINQDGWGHFFVNGGSVSVWVKR

SEQ ID NO: 44579 - protein, 480 aa, Bacillus sp.
NGTIMQYFEWNVPNDGQHWNRLHNNAQNLKNAGITAIWIPPAWKGTSQNDVGYGAYDLYDLGEFNQKGTVRTKYGTKAELERAIRSLKANGIQVYGDVVMNHKGGADFTERVQAVEVNPQNRNQEVSGTYQIEAWTGFNFPGRGNQHSSFKWRWYHFDGTDWDQSRQLANRIYKFRGDGKAWDWEVDTENGNYDYLMYADVDMDHPEVINELNRWGVWYANTLNLDGFRLDAVKHIKFSFMRDWLGHVRGQTGKNLFAVAEYWKNDLGALENYLSKTNWTMSAFDVPLHYNLYQASNSSGNYDMRNLLNGTLVQRHPSHAVTFVDNHDTQPGEALFSFVQGWFKPLAYATILTREQGYPQVFYGDYYGIPSDGVPSYRQQIDPLLKARQQYAYGRQHDYFDHWDVIGWTREGNASHPNSGLATIMSDGPGGSKWMYVGRQKAGEVWHDMTGNRSGTVTINQDGWGHFFVNGGSVSVWVKR

SEQ ID NO: 44580 - protein, 480 aa, Bacillus sp.
NGTIMQYFEWNVPNDGQHWNRLHNNAQNLKNAGITAIWIPPAWKGTSQNDVGYGAYDLYDLGEFNQKGTVRTKYGTKAELERAIRSLKANGIQVYGDVVMNHKGGADFTERVQAVEVNPQNRNQEVSGTYQIEAWTGFNFPGRGNQHSSFKWRWYHFDGTDWDQSRQLANRIYKFRGDGKAWDWEVDTENGNYDYLMYADVDMDHPEVINELNRWGVWYANTLNLDGFRLDAVKHIKFSFMRDWLGHVRGQTGKNLFAVAEYWKNDLGALENYLSKTNWTMSAFDVPLHYNLYQASNSSGNYDMRNLLNGTLVIRHPSHAVTFVDNHDTQPGEALESFVQGWFKPLAYATILTREQGYPQVFYGDYYGIPSDGVPSYRQQIDPLLKARQQYAYGRQHDYFDHWDVIGWTREGNASHPNSGLATIMSDGPGGSKWMYVGRQKAGEVWHDMTGNRSGTVTINQDGWGHFFVNGGSVSVWVKR

SEQ ID NO: 44581 - protein, 480 aa, Bacillus sp.
NGTIMQYFEWNVPNDGQHWNRLHNNAQNLKNEGITAIWIPPAWKGTSQNDVGYGAYDLYDLGEFNQKGTVRTKYGTKAELERAIRSLKANGIQVYGDVVMNHKGGADFTERVQAVEVNPQNRNQEVSGTYQIEAWTGFNFPGRGNQHSSFKWRWYHFDGTDWDQSRQLANRIYKFRGDGKAWDWEVDTENGNYDYLMYADVDMDHPEVINELNRWGVWYANTLNLDGFRLDAVKHIKFSFMRDWLGHVRGQTGKNLFAVAEYWKNDLGALENYLSKTNWTMSAFDVPLHYNLYQASNSSGNYDMRNLLNGTLVQRHPSHAVTFVDNHDTQPGEALESFVQGWFKPLAYATILTREQGYPQVFYGDYYGIPSDGVPSYRQQIDPLLKARQQYAYGRQHDYFDHWDVIGWTREGNASHPNSGLATIMSDGPGGSKWMYVGRQKAGEVWHDMTGNRSGTVTINQDGWGHFFVNGGSVSVWVKR

SEQ ID NO: 44582 - protein, 480 aa, Bacillus sp.
NGTIMQYFEWNVPNDGQHWNRLHNNAQNLKNAGITAIWIPPAWKGTSQNDVGYGAYDLYDLGEFNQKGTVRTKYGTKAELERAIRSLKANGIQVYGDVVMNHKGGADFTERVQAVEVNPQNRNQEVSGTYQIEAWTGFNFPGRGNQHSSFKWRWYHFDGTDWDQSRQLANRIYKFRGDGKAWDWEVDTENGNYDYLMYADVDMDHPEVINELNRWGVWYANTLNLDGFRLDAVKHIKFSFMRDWLGHVRGQTGKNLFAVAEYWKNDLGALENYLSKTNWTMSAFDVPLHYNLYQASNSSGNYDMRNLLNGTLVQRHPSHAVTFVDNHDTQPGEALESFVQGWFKPLAYATILTRESGYPQVFYGDYYGIPSDGVPSYRQQIDPLLKARQQYAYGRQHDYFDHWDVIGWTREGNASHPNSGLATIMSDGPGGSKWMYVGRQKAGEVWHDMTGNRSGTVTINQDGWGHFFVNGGSVSVWVKR

SEQ ID NO: 44583 - protein, 480 aa, Bacillus sp.
NGTIMQYFEWNVPNDGQHWNRLHNNAQNLKNAGITAIWIPPAWKGTSQNDVGYGAYDLYDLGEFNQKGTVRTKYGTKAELERAIRSLKANGIQVYGDVVMNHKGGADFTERVQAVEVNPQNRNQEVSGTYQIEAWTGFNFPGRGNQHSSFKWRWYHFDGTDWDQSRQLANRIYKFRGDGKAWDWEVDTENGNYDYLMYADVDMDHPEVINELNRWGVWYANTLNLDGFRLDAVKHIKFSFMRDWLGHVRLQTGKNLFAVAEYWKNDLGALENYLSKTNWTMSAFDVPLHYNLYQASNSSGNYDMRNLLNGTLVQRHPSHAVTFVDNHDTQPGEALESFVQGWFKPLAYATILTREQGYPQVFYGDYYGIPSDGVPSYRQQIDPLLKARQQYAYGRQHDYFDHWDVIGWTREGNASHPNSGLATIMSDGPGGSKWMYVGRQKAGEVWHDMTGNRSGTVTINQDGWGHFFVNGGSVSVWVKR

SEQ ID NO: 44584 - protein, 480 aa, Bacillus sp.
NGTIMQYFEWNVPNDGQHWNRLHNNAQNLKNAGITAIWIPPAWKGTSQNDVGYGAYDLYDLGEFNQKGTVRTKYGTKAELERAIRSLKANGIQVYGDVVMNHKGGADFTERVQAVEVNPQNRNQEVSGTYQIEAWTGFNFPGRGNQHSSFKWRWYHFDGTDWDQSRQLANRIYKFRGDGKAWDWEVDTENGNYDYLMYADVDMDHPEVINELNRWGVWYANTLNLDGFRLDAVKHIKFSFMRDWLGHVRGQTGKNLFAVAEYWKNDLGALENYLSKTNWTMSAFDVPLHYNLYQASNSSGNYDMRNLLNGTLVQRHPSHAVTFVDNHDTQPGEALESFVQGWFKPLAYATILTREQGYPQVFYGDYYGIPSDGVPSYPQQIDPLLKARQQYAYGRQHDYFDHWDVIGWTREGNASHPNSGLATIMSDGPGGSKWMYVGRQKAGEVWHDMTGNRSGTVTINQDGWGHFFVNGGSVSVWVKR

SEQ ID NO: 44585 - protein, 480 aa, Bacillus sp.
NGTIMQYFEWNVPNDGQHWNRLHNNAQNLKNAGITAIWIPPAWKGTSQNDVGYGAYDLYDLGEFNQKGTVRTKYGTKAELERAIRSLKANGIQVYGDVVMNHKGGADFTERVQAVEVNPQNRNQEVSGTYQIEAWTGFNFPGRGNQHSSFKWRWYHFDGTDWDQSRQLANRIYKFRGDGKAWDWEVDTENGNYDYLMYADVDMDHPEVINELNRWGVWYANTLNLDGFRLDAVKHIKFSFMRDWLGHVRGQTGKNLFAVAEYWKNDLGALENYLSKTNWTMSAFDVPLHYNLYQASNSSGNYDMRNLLNGTLVQRHPSHAVTFVDNHDTQPGEALESFVQGWFKPLAYATILTREQGYPQVFYGDYYGIPSDGVPSYRQQIDPLLKARQQYAYGRQHDYFDHWDVIGWTREGNASHPNSGLATIMSDGPGGSKWMYVGRQPAGEVWHDMTGNRSGTVTINQDGWGHFFVNGGSVSVWVKR

SEQ ID NO: 44586 - protein, 480 aa, Bacillus sp.
NGTIMQYFEWNVPNDGQHWNRLHNNAQNLKNAGITAIWIPPAWKGTSQNDVGYGAYDLYDLGEFNQKGTVRTKYGTKAELERAIRSLKANGIQVYGDVVMNHKGGADFTERVQAVEVNPQNRNQEVSGTYQIEAWTGFNFPGRGNQHSSFKWRWYHFDGTDWDQSRQLANRIYKFRGDGKAWDWEVDTENGNYDYLMYADVDMDHPEVINELNRWGVWYANTLNLDGFRLDAVKHIKFSFMRDWLGHVRGQTGKNLFAVAEYWKNDLGALENYLSKTNWTMSAFDVPLHYNLYQASNSSGNYDMRNLLNGTLVQRHPSHAVTFVDNHDTQPGEALESFVQGWFKPLAYATILTREQGYPQVFYGDYYGIPSDGVPSYRQQIDPLLKARQQYAYGRQHDYFDHWDVIGWTREGNASHPNSGLATIMSDGPGGSKWMYVGRQKAGEVLHDMTGNRSGTVTINQDGWGHFFVNGGSVSVWVKR

SEQ ID NO: 44587 - protein, 480 aa, Bacillus sp.
NGTIMQYFEWNVPNDGQHWNRLHNNAQNLKNAGITAIWIPPAWKGTSQNDVGYGAYDLYDLGEFNQKGTVRTKYGTKAELERAIRSLKANGIQVYGDVVMNHKGGADFTERVQAVEVNPQNRNQEVSGTYQIEAWTGFNFPGRGNQHSSFKWRWYHFDGTDWDQSRQLANRIYKFRGDGKAWDWEVDTENGNYDYLMYADVDMDHPEVINELNRWGVWYANTLNLDGFRLDAVKHIKFSFMRDWLGHVRGQTGKNLFAVAEYWKNDLGALENYLSKTNWTMSAFDVPLHYNLYQASNSSGNYDMRNLLNGTLVQRHPSHAVTFVDNHDTQPGEALESFVIGWFKPLAYATILTREQGYPQVFYGDYYGIPSDGVPSYRQQIDPLLKARQQYAYGRQHDYFDHWDVIGWTREGNASHPNSGLATIMSDGPGGSKWMYVGRQKAGEVWHDMTGNRSGTVTINQDGWGHFFVNGGSVSVWVKR

SEQ ID NO: 44588 - protein, 480 aa, Bacillus sp.
NGTIMQYFEWNVPNDGQHWNRLHNNAQNLKNAGITAIWIPPAWKGTSQNDVGYGAYDLYDLGEFNQKGTVRTKYGTKAELERAIRSLKANGIQVYGDVVMNHKGGADFTERVQAVEVNPQNRNQEVSGTYQIEAWTGFNFPGRGNQHSSFKWRWYHFDGTDWDQSRQLANRIYKFRGDGKAWDWEVDTENGNYDYLMYADVDMDHPEVINELNTWGVWYANTLNLDGFRLDAVKHIKFSFMRDWLGHVRGQTGKNLFAVAEYWKNDLGALENYLSKTNWTMSAFDVPLHYNLYQASNSSGNYDMRNLLNGTLVQRHPSHAVTFVDNHDTQPGEALESFVQGWFKPLAYATILTREQGYPQVFYGDYYGIPSDGVPSYRQQIDPLLKARQQYAYGRQHDYFDHWDVIGWTREGNASHPNSGLATIMSDGPGGSKWMYVGRQKAGEVWHDMTGNRSGTVTINQDGWGHFFVNGGSVSVWVKR

SEQ ID NO: 44589 - protein, 480 aa, Bacillus sp.
NGTIMQYFEWNVPNDGQHWNRLHNNAQNLKNAGITAIWIPPAWKGTSQNDVGYGAYDLYDLGEFNQKGTVRTKYGTKAELERAIRSLKANGIQVYGDVVMNHKGGADFTERVQAVEVNPQNRNQEVSGTYQIEAWTGFNFPGRGNQHSSFKWRWYHFDGTDWDQSRQLANRIYKFRGDGKAWDWEVDTENGNYDYLMYADVDMDHPEVINELNRWGVWYANTLNLDGFRLDAVKHIKFSFMRDWLGHVRGQTGKNLFAVAEYWKNDLGALENYLSKTNWTMSAFDVPLHYHLYQASNSSGNYDMRNLLNGTLVQRHPSHAVTFVDNHDTQPGEALESFVQGWFKPLAYATILTREQGYPQVFYGDYYGIPSDGVPSYRQQIDPLLKARQQYAYGRQHDYFDHWDVIGWTREGNASHPNSGLATIMSDGPGGSKWMYVGRQKAGEVWHDMTGNRSGTVTINQDGWGHFFVNGGSVSVWVKR

SEQ ID NO: 44590 - protein, 480 aa, Bacillus sp.
NGTIMQYFEWNVPNDGQHWNRLHNNAQNLKNAGITAIWIPPAWKGTSQNDVGYGAYDLYDLGEFNQKGTVRTKYGTKAELERAIRSLKANGIQVYGDVVMNHKGGADFTERVQAVEVNPQNRNQEVSGTYQIEAWTGFNFPGRGNQHSSFKWRWYHFDGTDWDQSRQLANRIYKFRGDGKAWDWEVDTENGNYDYLMYADVDMDHPEVINELNRWGVWYANTLNLDGFRLDAVKHIKFSFMRDWLGHVRGQTGKNLFAVAEYWKNDLGALRNYLSKTNWTMSAFDVPLHYNLYQASNSSGNYDMRNLLNGTLVQRHPSHAVTFVDNHDTQPGEALESFVQGWFKPLAYATILTREQGYPQVFYGDYYGIPSDGVPSYRQQIDPLLKARQQYAYGRQHDYFDHWDVIGWTREGNASHPNSGLATIMSDGPGGSKWMYVGRQKAGEVWHDMTGNRSGTVTINQDGWGHFFVNGGSVSVWVKR

SEQ ID NO: 44591 - protein, 480 aa, Bacillus sp.
NGTIMQYFEWNVPNDGQHWNRLHNNAQNLKNAGITAIWIPPAWKGTSQNDVGYGAYDLYDLGEFNQKGTVRTKYGTKAELERAIRSLKANGIQVYGDVVMNHKGGADDTERVQAVEVNPQNRNQEVSGTYQIEAWTGFNFPGRGNQHSSFKWRWYHFDGTDWDQSRQLANRIYKFRGDGKAWDWEVDTENGNYDYLMYADVDMDHPEVINELNRWGVWYANTLNLDGFRLDAVKHIKFSFMRDWLGHVRGQTGKNLFAVAEYWKNDLGALENYLSKTNWTMSAFDVPLHYNLYQASNSSGNYDMRNLLNGTLVQRHPSHAVTFVDNHDTQPGEALESFVQGWFKPLAYATILTREQGYPQVFYGDYYGIPSDGVPSYRQQIDPLLKARQQYAYGRQHDYFDHWDVIGWTREGNASHPNSGLATIMSDGPGGSKWMYVGRQKAGEVWHDMTGNRSGTVTINQDGWGHFFVNGGSVSVWVKR

SEQ ID NO: 44592 - protein, 480 aa, Bacillus sp.
NGTIMQYFEWNVPNDGQHWNRLHNNAQNLKNAGITAIWIPPAWKGTSQNDVGYGAYDLYDLGEFNQKGTVRTKYGTKAELERAIRSLKANGIQVYGDVVMNHKGGADFTERVQAVEVNPQNRNQEVSGTYQIEAWTGFNFPGRGNQHSSFKWRWYHFDGTDWDQSRQLANRIYKFRGDGKAWDWEVDTENGNYDYLMYADVDMDHPEVINELNRWGVWYANTLNLDGFRLDAVKHIKFSFMRDWLGHVRGQTGKNLFAVAEYWKNDLGALENYLEKTNWTMSAFDVPLHYNLYQASNSSGNYDMRNLLNGTLVQRHPSHAVTFVDNHDTQPGEALESFVQGWFKPLAYATILTREQGYPQVFYGDYYGIPSDGVPSYRQQIDPLLKARQQYAYGRQHDYFDHWDVIGWTREGNASHPNSGLATIMSDGPGGSKWMYVGRQKAGEVWHDMTGNRSGTVTINQDGWGHFFVNGGSVSVWVKR

SEQ ID NO: 44593 - protein, 480 aa, Bacillus sp.
NGTIMQYFEWNVPNDGQHWNRLHNNAQNLKNAGITAIWIPPAWKGTSQNDVGYGAYDLYDLGEFNQKGTVRTKYGTKAELERAIRSLKANGIQVYGDVVMNHKGGADFTERVQAVEVNPQNRNQEVSGTYQIEAWTGFNFPGRGNQHSSFKWRWYHFDGTDWDQSRQLANRIYKFRGDGKAWDWEVDTENGNYDYLMYADVDMDHPEVINELNRWGVWYANTLNLDGFRLDAVKHIKFSFMRDWLGHVRGQTGKNLFAVAEYWKNDLGALENYLSKTNWTMSAFDVPLHYNLYQASNSSGNYDMRNLLNGTLVQREPSHAVTFVDNHDTQPGEALESFVQGWFKPLAYATILTREQGYPQVFYGDYYGIPSDGVPSYRQQIDPLLKARQQYAYGRQHDYFDHWDVIGWTREGNASHPNSGLATIMSDGPGGSKWMYVGRQKAGEVWHDMTGNRSGTVTINQDGWGHFFVNGGSVSVWVKR

SEQ ID NO: 44594 - protein, 480 aa, Bacillus sp.
NGTIMQYFEWNVPNDGQHWNRLHNNAQNLKNAGITAIWIPPAWKGTSQNDVGYGAYDLYDLGEFNQKGTVRTKYGTKAELERAIRSLKANGIQVYGDVVMNHKGGADFTERVQAVEVNPQNRNQEVSGTYQIEAWTGFNFPGRGNQHSSFKWRWYHFDGTDWDQSRQLANRIYKFRGDGKAWDWEVDTENGNYDYLMYADVDMDHPEVINELNRWGVWYANTLNLDGFRLDAVKHIKFSFMRDWLGHVRGQTGKNLFAVAEYWKNDLGALENYLSKTNWTMSAFDVPLHYNLYQASNSSGNYDMRNLLNGTLVQRHPSHAVTFVDNHDTQPGEALESFVQGWFKPLAYATILTREQGYPQVFYGDYYGIPSDGVPSYRQQIDPLLKARQQYAYGRQHDYFDHWDVIGWTREGMASHPNSGLATIMSDGPGGSKWMYVGRQKAGEVWHDMTGNRSGTVTINQDGWGHFFVNGGSVSVWVKR

SEQ ID NO: 44595 - protein, 480 aa, Bacillus sp.
NGTIMQYFEWNVPNDGQHWNRLMNNAQNLKNAGITAIWIPPAWKGTSQNDVGYGAYDLYDLGEFNQKGTVRTKYGTKAELERAIRSLKANGIQVYGDVVMNHKGGADFTERVQAVEVNPQNRNQEVSGTYQIEAWTGFNFPGRGNQHSSFKWRWYHFDGTDWDQSRQLANRIYKFRGDGKAWDWEVDTENGNYDYLMYADVDMDHPEVINELNRWGVWYANTLNLDGFRLDAVKHIKFSFMRDWLGHVRGQTGKNLFAVAEYWKNDLGALENYLSKTNWTMSAFDVPLHYNLYQASNSSGNYDMRNLLNGTLVQRHPSHAVTFVDNHDTQPGEALESFVQGWFKPLAYATILTREQGYPQVFYGDYYGIPSDGVPSYRQQIDPLLKARQQYAYGRQHDYFDHWDVIGWTREGNASHPNSGLATIMSDGPGGSKWMYVGRQKAGEVWHDMTGNRSGTVTINQDGWGHFFVNGGSVSVWVKR

SEQ ID NO: 44596 - protein, 480 aa, Bacillus sp.
NGTIMQYFEWNVPNDGQHWNRLHNNAQNLKNAGITAIWIPPAWKGTSQNDVGYGAYDLYDLGEFNQKGTVRTKYGTKAELERAIRSLKANGIQVYGDVVMNHKGGADFTERVQAVEVNPQNRNQEVSGTYQIEAWTGFNFPGRGNQHSSFKWRWYHFDGTDWDQSRQLANRIYKFRGDGKAWDWEVDTENGNYDYLMYADVDMDHPEVINELNRWGVWYANTLNLDGFRLDAVKHIKFSFMRDWLGHVRGQTGKWLFAVAEYWKNDLGALENYLSKTNWTMSAFDVPLHYNLYQASNSSGNYDMRNLLNGTLVQRHPSHAVTFVDNHDTQPGEALESFVQGWFKPLAYATILTREQGYPQVFYGDYYGIPSDGVPSYRQQIDPLLKARQQYAYGRQHDYFDHWDVIGWTREGNASHPNSGLATIMSDGPGGSKWMYVGRQKAGEVWHDMTGNRSGTVTINQDGWGHFFVNGGSVSVWVKR

SEQ ID NO: 44597 - protein, 480 aa, Bacillus sp.
NGTIMQYFEWNTPNDGQHWNRLHNNAQNLKNAGITAIWIPPAWKGTSQNDVGYGAYDLYDLGEFNQKGTVRTKYGTKAELERAIRSLKANGIQVYGDVVMNHKGGADFTERVQAVEVNPQNRNQEVSGTYQIEAWTGFNFPGRGNQHSSFKWRWYHFDGTDWDQSRQLANRIYKFRGDGKAWDWEVDTENGNYDYLMYADVDMDHPEVINELNRWGVWYANTLNLDGFRLDAVKHIKFSFMRDWLGHVRGQTGKNLFAVAEYWKNDLGALENYLSKTNWTMSAFDVPLHYNLYQASNSSGNYDMRNLLNGTLVQRHPSHAVTFVDNHDTQPGEALESFVQGWFKPLAYATILTREQGYPQVFYGDYYGIPSDGVPSYRQQIDPLLKARQQYAYGRQHDYFDHWDVIGWTREGNASHPNSGLATIMSDGPGGSKWMYVGRQKAGEVWHDMTGNRSGTVTINQDGWGHFFVNGGSVSVWVKR

SEQ ID NO: 44598 - protein, 480 aa, Bacillus sp.
NGTIMQYFEWNVPNDGQHWNELHNNAQNLKNAGITAIWIPPAWKGTSQNDVGYGAYDLYDLGEFNQKGTVRTKYGTKAELERAIRSLKANGIQVYGDVVMNHKGGADFTERVQAVEVNPQNRNQEVSGTYQIEAWTGFNFPGRGNQHSSFKWRWYHFDGTDWDQSRQLANRIYKFRGDGKAWDWEVDTENGNYDYLMYADVDMDHPEVINELNRWGVWYANTLNLDGFRLDAVKHIKFSFMRDWLGHVRGQTGKNLFAVAEYWKNDLGALENYLSKTNWTMSAFDVPLHYNLYQASNSSGNYDMRNLLNGTLVQRHPSHAVTFVDNHDTQPGEALESFVQGWFKPLAYATILTREQGYPQVFYGDYYGIPSDGVPSYRQQIDPLLKARQQYAYGRQHDYFDHWDVIGWTREGNASHPNSGLATIMSDGPGGSKWMYVGRQKAGEVWHDMTGNRSGTVTINQDGWGHFFVNGGSVSVWVKR

SEQ ID NO: 44599 - protein, 480 aa, Bacillus sp.
NGTIMQYFEWNVPNDGQHWNRLHNNAQNLKNAGITAIWIPPAWKGTSQNDVGYGAYDLYDLGEFNQKGTVRTKYGTKAELERAIRSLKANGIQVYGDVVMNHKGGADFTERVQAVEVNPQNRNQEVSGTYQIEAWTGFNFPGRGNQHSSFKWRWYHFDGTDWDQSRQLANRIYKFRGDGKAWDWEVDTENGNYDYLMYADVDMDHPEVINELNRWGVWYANTLNLDGFRLDAVKHIKFSFMRDWLGHVRGQTGKNLFAVAEYWKNDLGALENYLSKTNWTMSAFDVPLHYNLYQASNSSGNYDMRNLLNGTLVQRHPSHAVTFVDNHDTQPGHALESFVQGWFKPLAYATILTREQGYPQVFYGDYYGIPSDGVPSYRQQIDPLLKARQQYAYGRQHDYFDHWDVIGWTREGNASHPNSGLATIMSDGPGGSKWMYVGRQKAGEVWHDMTGNRSGTVTINQDGWGHFFVNGGSVSVWVKR

SEQ ID NO: 44600 - protein, 480 aa, Bacillus sp.
NGTIMQYFEWNVPNDGQHWNRLHNNAQNLKNAGITAIWIPPAWKGTSQNDVGYGAYDLYDLGEFNQKGTVRTKYGTKAELERAIRSLWANGIQVYGDVVMNHKGGADFTERVQAVEVNPQNRNQEVSGTYQIEAWTGFNFPGRGNQHSSFKWRWYHFDGTDWDQSRQLANRIYKFRGDGKAWDWEVDTENGNYDYLMYADVDMDHPEVINELNRWGVWYANTLNLDGFRLDAVKHIKFSFMRDWLGHVRGQTGKNLFAVAEYWKNDLGALENYLSKTNWTMSAFDVPLHYNLYQASNSSGNYDMRNLLNGTLVQRHPSHAVTFVDNHDTQPGEALESFVQGWFKPLAYATILTREQGYPQVFYGDYYGIPSDGVPSYRQQIDPLLKARQQYAYGRQHDYFDHWDVIGWTREGNASHPNSGLATIMSDGPGGSKWMYVGRQKAGEVWHDMTGNRSGTVTINQDGWGHFFVNGGSVSVWVKR

SEQ ID NO: 44601 - protein, 480 aa, Bacillus sp.
NGTIMQYFEWNVPNDGQHWNRLHNNAQNLKNAGITAIWIPPAWKGTSQNDVGYGAYDLYDLGEFNQKGTVRTKYGTKAELERAIRSLKACGIQVYGDVVMNHKGGADFTERVQAVEVNPQNRNQEVSGTYQIEAWTGFNFPGRGNQHSSFKWRWYHFDGTDWDQSRQLANRIYKFRGDGKAWDWEVDTENGNYDYLMYADVDMDHPEVINELNRWGVWYANTLNLDGFRLDAVKHIKFSFMRDWLGHVRGQTGKNLFAVAEYWKNDLGALENYLSKTNWTMSAFDVPLHYNLYQASNSSGNYDMRNLLNGTLVQRHPSHAVTFVDNHDTQPGEALESFVQGWFKPLAYATILTREQGYPQVFYGDYYGIPSDGVPSYRQQIDPLLKARQQYAYGRQHDYFDHWDVIGWTREGNASHPNSGLATIMSDGPGGSKWMYVGRQKAGEVWHDMTGNRSGTVTINQDGWGHFFVNGGSVSVWVKR

SEQ ID NO: 44602 - protein, 480 aa, Bacillus sp.
NGTIMQYFEWNVPNDGQHWNRLHNNAQNLKNAGITAIWIPPAWKGTSQNDVGYGAYDLYDLGEFNQKGTVRTKYGTKAELERAIRSLKANGIQVYGDVVMNHKGGADFTERVQAVEVNPQRRNQEVSGTYQIEAWTGFNFPGRGNQHSSFKWRWYHFDGTDWDQSRQLANRIYKFRGDGKAWDWEVDTENGNYDYLMYADVDMDHPEVINELNRWGVWYANTLNLDGFRLDAVKHIKFSFMRDWLGHVRGQTGKNLFAVAEYWKNDLGALENYLSKTNWTMSAFDVPLHYNLYQASNSSGNYDMRNLLNGTLVQRHPSHAVTFVDNHDTQPGEALESFVQGWFKPLAYATILTREQGYPQVFYGDYYGIPSDGVPSYRQQIDPLLKARQQYAYGRQHDYFDHWDVIGWTREGNASHPNSGLATIMSDGPGGSKWMYVGRQKAGEVWHDMTGNRSGTVTINQDGWGHFFVNGGSVSVWVKR

SEQ ID NO: 44603 - protein, 480 aa, Bacillus sp.
NGTIMQYFEWNVPNDGQHWNRLHNNAQNLKNAGITAIWIPPAWKGTSQNDVGYGAYDLYDLGEFNQKGTVRTKYGTKAELERAIRSLKANGIQVYGDVVMNHKGGADFTERVQAVEVNPQNRNQEVSGTYQIEAWTGFNFPGRGNQHSSFKWRWYHFDGTDWDQSRQLANRIYKFRGDGKAWDWEVDTENGNYDYLMYADVDMDHPEVINELNRWGVWYANTLNLDGFRLDAVKHIKFSFMRDWLGHVRGQTGKNLFAVAEYWKNDLGALENYLSKTNWTMSAFDVPLHYNLYQASNSSGNYDMRNLLNGTLVQRHPSHAVTFVDNHDTQPGEALESFVQGWFKPLAYATILTREQGYPQVFYGDYYGIPSDGVPSYRQQIDPLLKARQQYAYGKQHDYFDHWDVIGWTREGNASHPNSGLATIMSDGPGGSKWMYVGRQKAGEVWHDMTGNRSGTVTINQDGWGHFFVNGGSVSVWVKR

SEQ ID NO: 44604 - protein, 480 aa, Bacillus sp.
NGTIMQYFEWNVPNDGQHWNRLHNNAQNLKNAGITAIWIPPAWKGTSQNDVGYGAYDLYDLGEFNQKGTVRTKYGTKAELERAIRSLKANGIQVYGDVVMNHKGGADFTERVQAVEVNPQNRNQEVSGTYQIEAWTGFNFPGRGNQHSSFKWRWYHFDGTDWDQSRQLANRIYKFRGDDKAWDWEVDTENGNYDYLMYADVDMDHPEVINELNRWGVWYANTLNLDGFRLDAVKHIKFSFMRDWLGHVRGQTGKNLFAVAEYWKNDLGALENYLSKTNWTMSAFDVPLHYNLYQASNSSGNYDMRNLLNGTLVQRHPSHAVTFVDNHDTQPGEALESFVQGWFKPLAYATILTREQGYPQVFYGDYYGIPSDGVPSYRQQIDPLLKARQQYAYGRQHDYFDHWDVIGWTREGNASHPNSGLATIMSDGPGGSKWMYVGRQKAGEVWHDMTGNRSGTVTINQDGWGHFFVNGGSVSVWVKR

SEQ ID NO: 44605 - protein, 480 aa, Bacillus sp.
NGTIMQYFEWNVPNDGQHWNRLHNNAQNLKNAGITAIWIPPAWKGTSQNDVGYGAYDLYDLGEFNQKGTVRTKYGTKAELERAIRSLKANGIQVYGDVVMNHKGGADFTERVQAVEVNPQNRNQEVSGTYQIEAWTGFNFPGRGNQHSSFKWRWYHFDGTDWDQSRQLANRIYKFRGDGKAWDWEVDTENGNYDYLMYADVDMDHPEVINELNRWGVWYANTLNLDGFRLDAVKHIKFSFMRDWLGHVRGQTGKNLFAVAEYWKNDLGALENYLSKTNWTMSAFDVPLHYNLYQASNSSGNYDMRNLLNGTLVQRHPSHAVTFVDNHDTQPGEALESFVLGWFKPLAYATILTREQGYPQVFYGDYYGIPSDGVPSYRQQIDPLLKARQQYAYGRQHDYFDHWDVIGWTREGNASHPNSGLATIMSDGPGGSKWMYVGRQKAGEVWHDMTGNRSGTVTINQDGWGHFFVNGGSVSVWVKR

SEQ ID NO: 44606 - protein, 480 aa, Bacillus sp.
NGTIMQYFEWNVPNDGQHWNRLHNNAQNLKNAGITAIWIPPAWKGTSQNDVGYGAYDLYDLGEFNQKGTVRTKYGTKAELERAIRSLKANGIQVYGDVVMNHKGGADFTERVQAVEVNPQNRNQEVSGTYQIEAWTGFNFPGRGNQHSSFKWRWYHFDGTDWDQSRQLANRIYKFRGDGKAWDWEVDTENGNYDYLMYADVDMDHPEVINELNRWGVWYANTLNLDGFRLDAVKHIKFSFMRDWLGHVRGQTGKNLFAVAEYWKNDLGALENYLSKTNWTMSAFDVPLHYNLYQASNSSGNYDMRNLLNGTLVQRHPSHAVTFVDNHDTQPGEALESFVQGWFKPLAYATILTREQGYPQVFYGDYYGIPSDGVPSYRQQIDPLLKARQQYAYGRQHDYFDHWDVIGWTREGNASHPNSGLATIMSDGPGGSKWMYVGRQKAGEVWHDMTGNRSGTVTINQDGWGHFEVNGGSVSVWVKR

SEQ ID NO: 44607 - protein, 480 aa, Bacillus sp.
NGTIMQYFEWNVPNDGQHWNRLHNNAQNLKNAGITAIWIPPAWKGTSQNDVGYGAYDLYDLGEFNQKGTVRTKYGTKAELERAIRSLKANGIQVYGDVVMNHKGGADFTERVQAVEVNPQNRNQEVSGTYQIEAWTGFNFPGRGNQHSSFKWRWYHFDGTDWDQSRQLANRIYKFRGDGKAWDWEVDTENGNYDYLMYADVDMDHPEVINELNRWGVWYANTLNLDGFRLDAVKHIKFSFMRDWLGHVRGQTGKPLFAVAEYWKNDLGALENYLSKTNWTMSAFDVPLHYNLYQASNSSGNYDMRNLLNGTLVQRHPSHAVTFVDNHDTQPGEALESFVQGWFKPLAYATILTREQGYPQVFYGDYYGIPSDGVPSYRQQIDPLLKARQQYAYGRQHDYFDHWDVIGWTREGNASHPNSGLATIMSDGPGGSKWMYVGRQKAGEVWHDMTGNRSGTVTINQDGWGHFFVNGRSVSVWVKR

SEQ ID NO: 44608 - protein, 480 aa, Bacillus sp.
NGTIMQYFEWNVPNDGQHWNRLINNAQNLKNAGITAIWIPPAWKGTSQNDVGYGAYDLYDLGEFNQKGTVRTKYGTKAELERAIRSLKANGIQVYGDVVMNHKGGADFTERVQAVEVNPQNRNQEVSGTYQIEAWTGFNFPGRGNQHSSFKWRWYHFDGTDWDQSRQLANRIYKFRGDGKAWDWEVDTENGNYDYLMYADVDMDHPEVINELNRWGVWYANTLNLDGFRLDAVKHIKFSFMRDWLGHVRGQTGKNLFAVAEYWKNDLGALENYLSKTNWTMSAFDVPLHYNLYQASNSSGNYDMRNLLNGTLVQRHPSHAVTFVDNHDTQPGEALESFVQGWFKPLAYATILTREQGYPQVFYGDYYGIPSDGVPSYRQQIDPLLKARQQYAYGRQHDYFDHWDVIGWTREGNASHPNSGLATIMSDGPGGSKWMYVGRQKAGEVWHDMTGNRSGTVTINQDGWGHFFVNGGSVSVWVKR

SEQ ID NO: 44609 - protein, 480 aa, Bacillus sp.
NGTIMQYFEWNVPNDGQHWNRLHNNAQNLQNAGITAIWIPPAWKGTSQNDVGYGAYDLYDLGEFNQKGTVRTKYGTKAELERAIRSLKANGIQVYGDVVMNHKGGADFTERVQAVEVNPQNRNQEVSGTYQIEAWTGFNFPGRGNQHSSFKWRWYHFDGTDWDQSRQLANRIYKFRGDGKAWDWEVDTENGNYDYLMYADVDMDHPEVINELNRWGVWYANTLNLDGFRLDAVKHIKFSFMRDWLGHVRGQTGKNLFAVAEYWKNDLGALENYLSKTNWTMSAFDVPLHYNLYQASNSSGNYDMRNLLNGTLVQRHPSHAVTFVDNHDTQPGEALESFVQGWFKPLAYATILTREQGYPQVFYGDYYGIPSDGVPSYRQQIDPLLKARQQYAYGRQHDYFDHWDVIGWTREGNASHPNSGLATIMSDGPGGSKWMYVGRQKAGEVWHDMTGNRSGTVTINQDGWGHFFVNGGSVSVWVKR

SEQ ID NO: 44610 - protein, 480 aa, Bacillus sp.
NGTIMQYFEWNVPNDGQHWNRLHNNAQNLKNAGITAIWIPPAWKGTSQNDVGYGAYDLYDLGEFNQKGTVRTKYGTKAELERAIRSLKANGIQVYGDVVMNHKGGADFTERVQAVEVNPQNRNQEVSGTYQIEAWTGFNFPGRGNQHSSFKWRWYHFDGIDWDQSRQLANRIYKFRGDGKAWDWEVDTENGNYDYLMYADVDMDHPEVINELNRWGVWYANTLNLDGFRLDAVKHIKFSFMRDWLGHVRGQTGKNLFAVAEYWKNDLGALENYLSKTNWTMSAFDVPLHYNLYQASNSSGNYDMRNLLNGTLVQRHPSHAVTFVDNHDTQPGEALESFVQGWFKPLAYATILTREQGYPQVFYGDYYGIPSDGVPSYRQQIDPLLKARQQYAYGRQHDYFDHWDVIGWTREGNASHPNSGLATIMSDGPGGSKWMYVGRQKAGEVWHDMTGNRSGTVTINQDGWGHFFVNGGSVSVWVKR

SEQ ID NO: 44611 - protein, 480 aa, Bacillus sp.
NGTIMQYFEWNVPNDGQHWNRLHNNAQNLKNAGITAIWIPPAWKGTSQNDVGYGAYDLYDLGEFNQKGTVRTKYGTKAELERAIGSLKANGIQVYGDVVMNHKGGADFTERVQAVEVNPQNRNQEVSGTYQIEAWTGFNFPGRGNQHSSFKWRWYHFDGTDWDQSRQLANRIYKFRGDGKAWDWEVDTENGNYDYLMYADVDMDHPEVINELNRWGVWYANTLNLDGFRLDAVKHIKFSFMRDWLGHVRGQTGKNLFAVAEYWKNDLGALENYLSKTNWTMSAFDVPLHYNLYQASNSSGNYDMRNLLNGTLVQRHPSHAVTFVDNHDTQPGEALESFVQGWFKPLAYATILTREQGYPQVFYGDYYGIPSDGVPSYRQQIDPLLKARQQYAYGRQHDYFDHWDVIGWTREGNASHPNSGLATIMSDGPGGSKWMYVGRQKAGEVWHDMTGNRSGTVTINQDGWGHFFVNGGSVSVWVKR

SEQ ID NO: 44612 - protein, 480 aa, Bacillus sp.
NGTIMQYFEWNVPNDGQHWNRLHNNAQNLKNAGITAIWIPPAWKGTSQNDVGYGAYDLYDLGEFNQKGTVRTKYGTKAELERAIRSLKANGIQVYGDVVMNHKGGADFTERVQAVEVNPQNRNQEVSGTYQIEAWTGFNFPGRGNQHSSFKWRWYHFDGTDWDQSRQLANRIYKFRGDGKAWDWEVDTENGNYDYLMYADVDMDHPEVINELNRWGVWYANTLNLDGFRLDAVKHIKFSFMRDWLGHVRGQTGKNLFAVAEYWKNDLGALENYLSKTNWTMSAFDVPLHYNLYLASNSSGNYDMRNLLNGTLVQRHPSHAVTFVDNHDTQPGEALESFVQGWFKPLAYATILTREQGYPQVFYGDYYGIPSDGVPSYRQQIDPLLKARQQYAYGRQHDYFDHWDVIGWTREGNASHPNSGLATIMSDGPGGSKWMYVGRQKAGEVWHDMTGNRSGTVTINQDGWGHFFVNGGSVSVWVKR

SEQ ID NO: 44613 - protein, 480 aa, Bacillus sp.
NGTIMQYFEWNVPNDGQHWNRLHNNAQNLKNAGITAIWIPPAWKGTSQNDVGYGAYDLYDLGEFNQKGTVRTKYGTKAELERAIRSLKANGIQVYGDVVMNHKGGADFTERVQAVEVNPQNRNQEVSGTYQIEAWTGFNFPGRGNQHSSFKWRWYHFDGTDWDQSRQLANRIYKFRGDGKAWDWEVDTENGNYDYLMYADVDMDHPEVINELNRWGVWYANTLNLDGFRLDAVKHIKFSFMRDWLGHVRGQTGKNLFAVAEYWKNDLGALENYLSKTNWTMSAFDVPLHYNLYQASNSSGNYDMRNLLNGTLVQRHPSHAVTFVDNHDTQPGEALESFVQGWFKPLAYATILTREQGYPQVFYGDYYGIPSDGVPSYRQQIDPLLQARQQYAYGRQHDYFDHWDVIGWTREGNASHPNSGLATIMSDGPGGSKWMYVGRQKAGEVWHDMTGNRSGTVTINQDGWGHFFVNGGSVSVWVKR

SEQ ID NO: 44614 - protein, 480 aa, Bacillus sp.
NGTIMQYFEWNVPNDGQHWNRLHNNAQNLKNAGITAIWIPPAWKGTSQNDVGYGAYDLYDLGEFNQKGTVRTKYGTKAELERAIRSLKANGIQVYGDVVMNHKGGADFTERVQAVEVNPQNRNQEVSGTYQIEAWTGFNFPGRGNQHSSFKWRWYHFDGTDWDQSRQLANRIYKFRGDGKAWDWEVDTENGNYDYLMYADVDMDHPEVINELNRWGVWYANTLNLDGFRLDAVKHIKFSFMRDWLGHVRGQTGKNLFAVAEYWKNDLGALENYLRKTNWTMSAFDVPLHYNLYQASNSSGNYDMRNLLNGTLVQRHPSHAVTFVDNHDTQPGEALESFVQGWFKPLAYATILTREQGYPQVFYGDYYGIPSDGVPSYRQQIDPLLKARQQYAYGRQHDYFDHWDVIGWTREGNASHPNSGLATIMSDGPGGSKWMYVGRQKAGEVWHDMTGNRSGTVTINQDGWGHFFVNGGSVSVWVKR

SEQ ID NO: 44615 - protein, 480 aa, Bacillus sp.
NGTIMQYFEWNVPNDGQHWNRLHNNAQNLKNAGITAIWIPPAWKGTSQNDVGYGAYDLYDLGEFNQKGTVRTKYGTKAELERAIRSLKANGIQVYGDVVMNHKGGADFTERVQAVEVNPQNRNQEVSGTYQIEAWTGFNFPGRGNQHSSFKWRWYHFDGTDWDQSRQLANRIYKFRGDGKAWDWEVDTENGNYDYLMYADVDMDHPEVINELNRWGVWYANTLNLDGFRLDAVKHIKFSFMRDWLGHVRGQTGKDLFAVAEYWKNDLGALENYLSKTNWTMSAFDVPLHYNLYQASNSSGNYDMRNLLNGTLVQRHPSHAVTFVDNHDTQPGEALESFVQGWFKPLAYATILTREQGYPQVFYGDYYGIPSDGVPSYRQQIDPLLKARQQYAYGRQHDYFDHWDVIGWTREGNASHPNSGLATIMSDGPGGSKWMYVGRQKAGEVWHDMTGNRSGTVTINQDGWGHFFVNGGSVSVWVKR

SEQ ID NO: 44616 - protein, 480 aa, Bacillus sp.
NGTIMQYFEWNVPNDGQHWNRLHNNAQNLKNAGITAIWIPPAWKGTSQNDVGYGAYDLYDLGEFNQKGTVRTKYGTKAELERAIRSLKANGIQVYGDVVMNHKGGADFTERVQAVEVNPQNRNQEVSGTYQIEAWTAFNFPGRGNQHSSFKWRWYHFDGTDWDQSRQLANRIYKFRGDGKAWDWEVDTENGNYDYLMYADVDMDHPEVINELNRWGVWYANTLNLDGFRLDAVKHIKFSFMRDWLGHVRGQTGKNLFAVAEYWKNDLGALENYLSKTNWTMSAFDVPLHYNLYQASNSSGNYDMRNLLNGTLVQRHPSHAVTFVDNHDTQPGEALESFVQGWFKPLAYATILTREQGYPQVFYGDYYGIPSDGVPSYRQQIDPLLKARQQYAYGRQHDYFDHWDVIGWTREGNASHPNSGLATIMSDGPGGSKWMYVGRQKAGEVWHDMTGNRSGTVTINQDGWGHFFVNGGSVSVWVKR

SEQ ID NO: 44617 - protein, 480 aa, Bacillus sp.
NGTIMQYFEWNVPNDGQHWNRLHNNAQNLKNAGITAIWIPPAWKGTSQNDVGYGAYDLYDLGEFNQKGTVRTKYGTKAELERAIRSLKANGIQVYGDVVMNHKGGADFTERVQAVEVNPQNRNQEVSGTYQIEAWTGFNFPGRGNQHSSFKWRWYHFDGTDWDQSRQLANRIYKFRGDGKAWDWEVDTENGNYDYLMYADVDMDHPEVINELNRWGVWYANTLNLDGFRLDAVKHIKFSFMRDWLGHVRGQTGKNLFAVAEYWKNDLGALENYLSKTNWTMSAFDVPLHYNLYQASNSSGNYDMRNLLNGTLVQRHPSHAVTFVDNHDTQPGEALESFVQGWFKPLAYATILTREQGYPQVFYGDYYGIPVDGVPSYRQQIDPLLKARQQYAYGRQHDYFDHWDVIGWTREGNASHPNSGLATIMSDGPGGSKWMYVGRQKAGEVWHDMTGNRSGTVTINQDGWGHFFVNGGSVSVWVKR

SEQ ID NO: 44618 - protein, 480 aa, Bacillus sp.
NGTIMQYFEWNVPNDGQHWNRLHNNAQNLKNAGITAIWIPPAWKGTSQNDVGYGAYDLYDLGEFNQKGTVRTKYGTKAELERAIRSLKANGIQVYGDVVMNHKGGADFTERVQAVEVNPQNRNQEVSGTYQIEAWTGFNFPGRGNQHSSFKWRWYHFDGTDWDQSRQLANRIYKFRGDGKAWDWEVDTENGNYDYLMYADVDMDHPEVINELNRWGVWYANTLNLDGFRLDAVKHIKFSFMRDWLGHVRGQTGKNLFAVAEYWKNDLGALENYLSKTNWTMSAFDVPLHYNLYQASNSSGNYDMRNLLNGTLVQRHPSHAVTFVDNHDTQPGEALESFVQGWFKPLAYATILTREQGYPQVFYGDYYGIPSDGVPSYRTQIDPLLKARQQYAYGRQHDYFDHWDVIGWTREGNASHPNSGLATIMSDGPGGSKWMYVGRQKAGEVWHDMTGNRSGTVTINQDGWGHFFVNGGSVSVWVKR

SEQ ID NO: 44619 - protein, 480 aa, Bacillus sp.
NGTIMQYFEWNVPNDGQHWSRLHNNAQNLKNAGITAIWIPPAWKGTSQNDVGYGAYDLYDLGEFNQKGTVRTKYGTKAELERAIRSLKANGIQVYGDVVMNHKGGADFTERVQAVEVNPQNRNQEVSGTYQIEAWTGFNFPGRGNQHSSFKWRWYHFDGTDWDQSRQLANRIYKFRGDGKAWDWEVDTENGNYDYLMYADVDMDHPEVINELNRWGVWYANTLNLDGFRLDAVKHIKFSFMRDWLGHVRGQTGKNLFAVAEYWKNDLGALENYLSKTNWTMSAFDVPLHYNLYQASNSSGNYDMRNLLNGTLVQRHPSHAVTFVDNHDTQPGEALESFVQGWFKPLAYATILTREQGYPQVFYGDYYGIPSDGVPSYRQQIDPLLKARQQYAYGRQHDYFDHWDVIGWTREGNASHPNSGLATIMSDGPGGSKWMYVGRQKAGEVWHDMTGNRSGTVTINQDGWGHFFVNGGSVSVWVKR

SEQ ID NO: 44620 - protein, 480 aa, Bacillus sp.
NGTIMQYFEWNVPNDGQHWNRLHNNAQNLKNAGITAIWIPPAWKGTSQNDVGYGAYDLYDLGEFNQKGTVRTKYGTKAELERAIRSLKANGIQVYGDVVMNHKGGADFTERVQAVEVNPQNRNQEVSGTYQIEAWTGFNFPGRGNQHSSFKWRWYHFDGTDWDQSRQLANRIYKFRGDGKAWDWEVDTENGNYDYLMYADVDMDHPEVINELNRWGVWYANTLNLDGFRLDAVKHIKFSFMRDWLGHVRGQTGKNLFAVAEYWKNDLGALENYLSKTNWTMSAFDVPLHYNLYQASNSSGNYDMRNLLNGTLVQRHPSHAVTFVDNHDTQPGEALESFVQGWFKPLAYATILTREQGYPQVFYGDYYGIPNDGVPSYRQQIDPLLKARQQYAYGRQHDYFDHWDVIGWTREGNASHPNSGLATIMSDGPGGSKWMYVGRQKAGEVWHDMTGNRSGTVTINQDGWGHFFVNGGSVSVWVKR

SEQ ID NO: 44621 - protein, 480 aa, Bacillus sp.
NGTIMQYFEWNVPNDGQHWNRLHNNAQNLKNAGITAIWIPPAWKGTSQNDVGYGAYDLYDLGEFNQKGTVRTKYGTKAELERAIRSLKANGIQVYGDVVMNHKGGADFTERVQAVEVNPQNRNQEVSGTYQIEAWTGFNFPGRGNQHSSFKWRWYHFDGTDWDQSRQLANRIYKFRGDGKAWDWEVDTENGNYDYLMYADVDMDHPEVINELNRWGVWYANTLNLDGFRLDAVKHIKFSFMRDWLGHVRGQTGKNLFAVAEYWKNDLGALENYLSKTNWTMSAFDVPLHYNLYQASNSSGNYDMRNLLNITLVQRHPSHAVTFVDNHDTQPGEALESFVQGWFKPLAYATILTREQGYPQVFYGDYYGIPSDGVPSYRQQIDPLLKARQQYAYGRQHDYFDHWDVIGWTREGNASHPNSGLATIMSDGPGGSKWMYVGRQKAGEVWHDMTGNRSGTVTINQDGWGHFFVNGGSVSVWVKR

SEQ ID NO: 44622 - protein, 480 aa, Bacillus sp.
NGTIMQYFEWNVPNDGQHWNRLHNNAQNLKNAGITAIWIPPAWKGTSQNDVGYGAYDLYDLGEFNQKGTVRTKYGTKAELERAIRSLKANGIQVYGDVVMNHKGGADFTERVQAVEVNPQNRNQEVSGTYQIEAWTGFKFPGRGNQHSSFKWRWYHFDGTDWDQSRQLANRIYKFRGDGKAWDWEVDTENGNYDYLMYADVDMDHPEVINELNRWGVWYANTLNLDGFRLDAVKHIKFSFMRDWLGHVRGQTGKNLFAVAEYWKNDLGALENYLSKTNWTMSAFDVPLHYNLYQASNSSGNYDMRNLLNGTLVQRHPSHAVTFVDNHDTQPGEALESFVQGWFKPLAYATILTREQGYPQVFYGDYYGIPSDGVPSYRQQIDPLLKARQQYAYGRQHDYFDHWDVIGWTREGNASHPNSGLATIMSDGPGGSKWMYVGRQKAGEVWHDMTGNRSGTVTINQDGWGHFFVNGGSVSVWVKR

SEQ ID NO: 44623 - protein, 480 aa, Bacillus sp.
NGTIMQYFEWNVPNDGQHWNRLHNNAQNLKNAGITAIWIPPAWKGTSQNDVGYGAYDLYDLGEFNQKGTVRTKYGTKAELERAIRSLKANGIQVYGDVVMNHKGGADFTERVQAVEVNPQNRNQEVSGTYQIEAWTGFNFPGRGNQHSSFKWRWYHFDGTDWDQSRQLANRIYKFRGDGKAWDWEVDTEXGNYDYLMYADVDMDHPEVINELNRWGVWYANTLNLDGFRLDAVKHIKFSFMRDWLGHVRGQTGKNLFAVAEYWKNDLGALENYLSKTNWTMSAFDVPLHYNLYQASNSSGNYDMRNLLNGTLVQRHPSHAVTFVDNHDTQPGEALESFVQGWFKPLAYATILTREQGYPQVFYGDYYGIPSDGVPSYRQQIDPLLKARQQYAYGRQHDYFDHWDVIGWTREGNASHPNSGLATIMSDGPGGSKWMYVGRQKAGEVWHDMTGNRSGTVTINQDGWGHFFVNGGSVSVWVKR

SEQ ID NO: 44624 - protein, 480 aa, Bacillus sp.
NGTIMQYFEWNVPNDGQHWNRLHNNAQNLKNAGITAIWIPPAWKGTSQNDVGYGGYDLYDLGEFNQKGTVRTKYGTKAELERAIRSLKANGIQVYGDVVMNHKGGADFTERVQAVEVNPQNRNQEVSGTYQIEAWTGFNFPGRGNQHSSFKWRWYHFDGTDWDQSRQLANRIYKFRGDGKAWDWEVDTENGNYDYLMYADVDMDHPEVINELNRWGVWYANTLNLDGFRLDAVKHIKFSFMRDWLGHVRGQTGKNLFAVAEYWKNDLGALENYLSKTNWTMSAFDVPLHYNLYQASNSSGNYDMRNLLNGTLVQRHPSHAVTFVDNHDTQPGEALESFVQGWFKPLAYATILTREQGYPQVFYGDYYGIPSDGVPSYRQQIDPLLKARQQYAYGRQHDYFDHWDVIGWTREGNASHPNSGLATIMSDGPGGSKWMYVGRQKAGEVWHDMTGNRSGTVTINQDGWGHFFVNGGSVSVWVKR

SEQ ID NO: 44625 - protein, 480 aa, Bacillus sp.
NGTIMQYFEWNVPNDGQHWNRLHNNAQNLKNAGITAIWIPPAWKGTSQNDVGYGAYDLYDLGEFNQKGTVRTKYGTKAELERAIRSLKANGIQVYGDVVMNHKGGADFTERVQAVEVNPQNRNQEVSGTYQIEAWTGFNFPGRGNQHSSFKWRWYHFDGTDWDQSRQLANRIYKFRGDGKAWDWEVDTENGNYDYLMYADVDMDHPEVINELNRWGVWYANTLNLDGFRLDAVKHIKFSFMRDWLGHVRGQTGKNLFAVAEYWKNDLGALENYLSKTNWTMSAFDVPLHYNLYQASNSSGNYDMRNLLNGTLVQRHPSHAVTFVDNHDTQPGEALESFVQGWFKPLAYATILTREQGYPQVFYGDYYGIPSDGVPSYVQQIDPLLKARQQYAYGRQHDYFDHWDVIGWTREGNASHPNSGLATIMSDGPGGSKWMYVGRQKAGEVWHDMTGNRSGTVTINQDGWGHFFVNGGSVSVWVKR

SEQ ID NO: 44626 - protein, 480 aa, Bacillus sp.
NGTIMQYFEWNVPNDGQHWNRLHNNAQNLKNAGITAIWIPPAWKGTSQNDVGYGAYDLYDLGEFNQKGTVRTKYGTKAELERAIRSLKANGIQVYGDVVMNHKGGADFTERVQAVEVNPQNRNQEVSGTYQIEAWTGFNFPGRGNQHSSFKWRWYHFDGTDWDQSRQLANRIYKFRGDGKAWDWEVDTENGNYDYLMYADVDMDHPEVINELNRWGVWYANTLNLDGFRLDAVKHIKFSFMRDWLGHVRGQTGKNLFAVAEYWKNDLGALENYLSKTNGTMSAFDVPLHYNLYQASNSSGNYDMRNLLNGTLVQRHPSHAVTFVDNHDTQPGEALESFVQGWFKPLAYATILTREQGYPQVFYGDYYGIPSDGVPSYRQQIDPLLKARQQYAYGRQHDYFDHWDVIGWTREGNASHPNSGLATIMSDGPGGSKWMYVGRQKAGEVWHDMTGNRSGTVTINQDGTGHFFVNGGSVSVWVKR

SEQ ID NO: 44627 - protein, 480 aa, Bacillus sp.
NGTIMQYFEWNVPNDGQHWNRLHNNAQNLKNAGITAIWIPPAWKGTSQNDVGYGWYDLYDLGEFNQKGTVRTKYGTKAELERAIRSLKANGIQVYGDVVMNHKGGADFTERVQAVEVNPQNRNQEVSGTYQIEAWTGFNFPGRGNQHSSFKWRWYHFDGTDWDQSRQLANRIYKFRGDGKAWDWEVDTENGNYDYLMYADVDMDHPEVINELNRWGVWYANTLNLDGFRLDAVKHIKFSFMRDWLGHVRGQTGKNLFAVAEYWKNDLGALENYLSKTNWTMSAFDVPLHYNLYQASNSSGNYDMRNLLNGTLVQRHPSHAVTFVDNHDTQPGEALESFVQGWFKPLAYATILTREQGYPQVFYGDYYGIPSDGVPSYRQQIDPLLKARQQYAYGRQHDYFDHWDVIGWTREGNASHPNSGLATIMSDGPGGSKWMYVGRQKAGEVWHDMTGNRSGTVTINQDGWGHFFVNGGSVSVWVKR

SEQ ID NO: 44628 - protein, 480 aa, Bacillus sp.
NGTIMQYFEWNVPNDGQHWNRLHNNAQNLKTAGITAIWIPPAWKGTSQNDVGYGAYDLYDLGEFNQKGTVRTKYGTKAELERAIRSLKANGIQVYGDVVMNHKGGADFTERVQAVEVNPQNRNQEVSGTYQIEAWTGFNFPGRGNQHSSFKWRWYHFDGTDWDQSRQLANRIYKFRGDGKAWDWEVDTENGNYDYLMYADVDMDHPEVINELNRWGVWYANTLNLDGFRLDAVKHIKFSFMRDWLGHVRGQTGKNLFAVAEYWKNDLGALENYLSKTNWTMSAFDVPLHYNLYQASNSSGNYDMRNLLNGTLVQRHPSHAVTFVDNHDTQPGEALESFVQGWFKPLAYATILTREQGYPQVFYGDYYGIPSDGVPSYRQQIDPLLKARQQYAYGRQHDYFDHWDVIGWTREGNASHPNSGLATIMSDGPGGSKWMYVGRQKAGEVWHDMTGNRSGTVTINQDGWGHFFVNGGSVSVWVKR

SEQ ID NO: 44629 - protein, 480 aa, Bacillus sp.
NGTIMQYFEWNVPNDGQHWNRLHNNAQNLKNAGITAIWIPPAWKGTSQNDVGYGAYDLYDLGEFNQKGTVRTKYGTKAELERAIRSLKANGIQVYGDVVMNHKGGADFTERVQAVEVNPQNRNQEVSGTYQIEAWTGFNFPGRGNQHSSFKWRWYHFDGTDWDQSRQLANRIYKFRGDGKAWDWEVDTENGNYDYLMYADVDMDHPEVINELNRWGVWYANTLNLDGFRLDAVKHIKFSFMRDWLGHVRGQTGKNLFAVAEYWKNDLGALENYLSKTNWTMSAFDVPLHYNLYQASNSSGNYDMRNLLNGTLVQRHPSHAVTFVDNHDTQPGEALESFVQGWFKPLAYATILTREQGYPQVFYGDYYGIPSDGVPSYRQQIDPLLKARQQYAYGRQHDYFDHWDVIGWTREGNASHPNSGLATIMSDGPGGSKWMYVGRQKAGEVWHDMTGNRSGTVTINQDGWGHFTVNGGSVSVWVKR

SEQ ID NO: 44630 - protein, 480 aa, Bacillus sp.
NGTIMQYFEWNVPNDGQHWNRLHNNAQNLKNAGITAIWIPPAWKGTSQNDVGYGAYDLYDLGEFNQKGTVRTKYGTKAELERAIRSLKANGIQVYGDVVMNHKGGADFTERVQAVEVNPQNRNQEVSGTYQIEAWTGFNFPGRGNQHSSFKWRWYHFDGTDWDQSRQLANRIYKFRGDGKAWDWEVDTENGNYDYLMYADVDMDHPEVINELNRWGVWYANTLNLDGFRLDAVKHIKFSFMRDWLGHVRGQTGKNLFAVAEYWKNDLGALENYLSKTNWTMSAFDVPLHYNLYQASNSSGNYDMRNLLNGTLVQRHPSHAVTFVDNHDTQPGEALESFVQGWFKPLAYATILTREQGYPQVFYGDYYGIPSDGVPSYRQQIDPLLKARQQYAYGRQHDYFDHWDVIGWTREGNASHPNSGLATIMSDGPGGSKWMYVGRQKAGEVWHDMTGNRSGTVTINQDGWGHFCVNGGSVSVWVKR

SEQ ID NO: 44631 - protein, 480 aa, Bacillus sp.
NGTIMQYFEWNVPNDGQHWNRLHNNAQNLKNAGITAIWIPPAWKGTSQNDVGYGAYDLYDLGEFNQKGTVRTKYGTKAELERAIRSLKANGIQVYGDVVMNHKGGADFTERVQAVEVNPQNRNQEVSGTYQIEAWTGFNFPGRGNQHSSFKWRWYHFDGTDWDQSRQLANRIYKFRGDGKAWDWEVDTENGNYDYLMYADVDMDHPEVINELNRWGVWYANTLNLDGFRLDAVKHIKFSFMRDWLGHVRGQTGKNLFAVAEYWKNDLGALENYLSKTNWTMSAFDVPLHYNLYQASNSSGNYDMRNLLNGTLVQRHPSHAVTFVDNHDTQPGEALESFVQGWFKPLAYATILTREQGYPQVFYGDYYGIPSDGVPSYRQQIDPLLKARQQYAYGRQHDYFDHWDVIGWTREGNASHPNSGLATIMSDGPGGSKWMYVGRQKAGEVWHDMTGNRSGTVTINQDGWGHFFVNGGSVSVWVKR

SEQ ID NO: 44632 - protein, 480 aa, Bacillus sp.
NGTIMQYFEWNVPNDGQHWNRLHNNAQNLKNAGITAIWIPPAWKGTSQNDVGYGAYDLYDLGEFNQKGTVRTKYGTKAELERAIRSLKANGIQVYGDVVMNHKGGADFTERVQAVEVNPQNRNQEVSGTYQIEAWTGFNFPGRGNQHSSFKWRWYHFDGTDWDQSRQLANRIYKFRGDGKAWDWEVDTENGNYDYLMYADVDMDHPEVINELNRWGVWYANTLNLDGFRLDAVKHIKFSFMRDWLGHVRGQTGKNLFAVAEYWKNDLGALENYLSKTNWTMSAFDVPLHYNLYQASNSSGNYDMRNLLNGTLVQRHPSHAVTFVDNHDTQPGEALESFVQGWFKPLAYATILTREQGYPQVFYGDYYGIPSDGVPSYRQQIDPLLKARSQYAYGRQHDYFDHWDVIGWTREGNASHPNSGLATIMSDGPGGSKWMYVGRQKAGEVWHDMTGNRSGTVTINQDGWGHFFVNGGSVSVWVKR

SEQ ID NO: 44633 - protein, 480 aa, Bacillus sp.
NGTIMQYFEWNVPNDGQHWNRLHNNAQNLKNAGITAIWIPPAWKGTSQNDVGYGAYDLYDLGEFNQKGTVRTKYGTKAELERAIRSLKANGIQVYGDVVMNHKGGADFTERVQAVEVNPQNRNQEVSGTYQIEAWTGFNFPGRGNQHSSFKWRWYHFDGTDWDQSRQLANRIYKFRGDGKAWDWEVDTENGNYDYLMYADVDMDHPEVINELNRWGVWYANTLNLDGFRLDAVKHIKFSFMRDWLGHVRGQTGKNLFAVAEYWKNDLGALENYLSKTNWTMSAFDVPLHYNLYQASNSSGNYDMRNLLNGTLVQRHPSHAVTFVDNHDTQPGEALESFVQGWFKPLAYATILTREQGYPQVFYGDYYGIPLDGVPSYRQQIDPLLKARQQYAYGRQHDYFDHWDVIGWTREGNASHPNSGLATIMSDGPGGSKWMYVGRQKAGEVWHDMTGNRSGTVTINQDGWGHFFVNGGSVSVWVKR

SEQ ID NO: 44634 - protein, 480 aa, Bacillus sp.
NGTIMQYFEWNVPNDGQHWNRLHNNAQNLKNAGITAIWIPPAWKGTSQNDVGYGAYDLYDLGEFNQKGTVRTKYGTKAELERAIRSLKANGIQVYGDVVMNHKGGADFTERVQAVEVNPQNRNQEVSGTYQIEAWTGFNFPGRGNQHSSFKWRWYHFDGTDWDQSRWLANRIYKFRGDGKAWDWEVDTENGNYDYLMYADVDMDHPEVINELNRWGVWYANTLNLDGFRLDAVKHIKFSFMRDWLGHVRGQTGKNLFAVAEYWKNDLGALENYLSKTNWTMSAFDVPLHYNLYQASNSSGNYDMRNLLNGTLVQRHPSHAVTFVDNHDTQPGEALESFVQGWFKPLAYATILTREQGYPQVFYGDYYGIPSDGVPSYRQQIDPLLKARQQYAYGRQHDYFDHWDVIGWTREGNASHPNSGLATIMSDGPGGSKWMYVGRQKAGEVWHDMTGNRSGTVTINQDGWGHFFVNGGSVSVWVKR

SEQ ID NO: 44635 - protein, 480 aa, Bacillus sp.
NGTIMQYFEWNVPNDGQHWNRLHNNAQNLKNAGITAIWIPPAWKGTSQNDVGYGAYDLYDLGEFNQKGTVRTKYGTKAELERAIRSLKANGIQVYGDVVMNHKGGADFTERVQAVEVNPQNRNQEVSGTYQIEAWTGFNFPGRGNQHSSFKWRWYHFDGTDWDQSRQLANRIYKFRGDGKAWDWEVDTENGNYDYLMYADVDMDHPEVINELNRWGVWYANTLNLDGFRLDAVKHIKFSFMRDWLGHVRGQTGKNLFAVAEYWKNDLGALENYLSKTNWTMSAFDVPLHYNLYQASNSSGNYDMRNLLNGTLVQAHPSHAVTFVDNHDTQPGEALESFVQGWFKPLAYATILTREQGYPQVFYGDYYGIPSDGVPSYRQQIDPLLKARQQYAYGRQHDYFDHWDVIGWTREGNASHPNSGLATIMSDGPGGSKWMYVGRQKAGEVWHDMTGNRSGTVTINQDGWGHFFVNGGSVSVWVKR

SEQ ID NO: 44636 - protein, 480 aa, Bacillus sp.
NGTIMQYFEWNVPNDGQHWNRLHNNAQNLKNAGITAIWIPPAWKGTSQNDVGYGAYDLYDLGEFNQKGTVRTKYGTKAELERAIRSLKANGIQVYGDVVMNHKGGADFTERVQAVEVNPQNRNQEVSGTYQIEAWTGFNFPGRGNQHSSFKWRWYHFDGTDWDQSRQLANRIYKFRGDGKAWDWEVDTEAGNYDYLMYADVDMDHPEVINELNRWGVWYANTLNLDGFRLDAVKHIKFSFMRDWLGHVRGQTGKNLFAVAEYWKNDLGALENYLSKTNWTMSAFDVPLHYNLYQASNSSGNYDMRNLLNGTLVQRHPSHAVTFVDNHDTQPGEALESFVQGWFKPLAYATILTREQGYPQVFYGDYYGIPSDGVPSYRQQIDPLLKARQQYAYGRQHDYFDHWDVIGWTREGNASHPNSGLATIMSDGPGGSKWMYVGRQKAGEVWHDMTGNRSGTVTINQDGWGHFFVNGGSVSVWVKR

SEQ ID NO: 44637 - protein, 480 aa, Bacillus sp.
NGTIMQYFEWNVPNDGQHWNRLHNNAQNLKNAGITAIWIPPAWKGTSQNDVGYGAYDLYDLGEFNQKGTVRTKYGTKAELERAIRSLKANGIQVYGDVVMNHKGGADFTERVQAVEVNPQNRNQEVSGTYQIEAWTGFNFPGRGNQHSSFKWRWYHFDGTDWDQSRQLANRIYKFRGDGKAWDWEVDTENGNYDYLMYADHDMDHPEVINELNRWGVWYANTLNLDGFRLDAVKHIKFSFMRDWLGHVRGQTGKNLFAVAEYWKNDLGALENYLSKTNWTMSAFDVPLHYNLYQASNSSGNYDMRNLLNGTLVQRHPSHAVTFVDNHDTQPGEALESFVQGWFKPLAYATILTREQGYPQVFYGDYYGIPSDGVPSYRQQIDPLLKARQQYAYGRQHDYFDHWDVIGWTREGNASHPNSGLATIMSDGPGGSKWMYVGRQKAGEVWHDMTGNRSGTVTINQDGWGHFFVNGGSVSVWVKR

SEQ ID NO: 44638 - protein, 480 aa, Bacillus sp.
NGTIMQYFEWNVPNDGQHWNRLHNNAQNLKNAGITAIWIPPAWKGTSQNDVGYGAYDLYDLGEFNQKGTVRTKYGTKAELERAIRSLKANGIQVYGDVVMNHKGGADFTERVQAVEVNPQNRNQEVSGTYQIEAWTGFNFPGRGNQHSSFKWRWYHFDGTDWDQSRQLANRIYKFRGDGKAWDWEVDTENGNYDYLMYADVDMDHPEVINELNRWGVWYANTLNLDGFRLDAVKHIKFSFMRDWLGHVRGQTGKNLFAVAEYWKNDLGALENYLSKTNWTMSAFDVPLHYNLYQASNSSGNYDMRNLLNGTLVQRHPSHAVTFVDNHDTQPGEALESFVQGWFKPLAYATILTREQGYPQVFYGDYYGIPSDGVPSYRQQIDPLLKARQQYAYGLQHDYFDHWDVIGWTREGNASHPNSGLATIMSDGPGGSKWMYVGRQKAGEVWHDMTGNRSGTVTINQDGWGHFFVNGGSVSVWVKR

SEQ ID NO: 44639 - protein, 480 aa, Bacillus sp.
NGTIMQYFEWNVPNDGQHWNRLHNNAQNLKNAGITAIWIPPAWKGTSQNDVGYGAYDLYDLGEFNQKGTVRTKYGTKAELERAIRSLKANGIQVYGDVVMNHKGGADFTERVQAVEVNPQNRNQEVSGTYQIEAWTGFNFPGRGNQHSSFKWRWYHFDGTDWDQSRQLVNRIYKFRGDGKAWDWEVDTENGNYDYLMYADVDMDHPEVINELNRWGVWYANTLNLDGFRLDAVKHIKFSFMRDWLGHVRGQTGKNLFAVAEYWKNDLGALENYLSKTNWTMSAFDVPLHYNLYQASNSSGNYDMRNLLNGTLVQRHPSHAVTFVDNHDTQPGEALESFVQGWFKPLAYATILTREQGYPQVFYGDYYGIPSDGVPSYRQQIDPLLKARQQYAYGRQHDYFDHWDVIGWTREGNASHPNSGLATIMSDGPGGSKWMYVGRQKAGEVWHDMTGNRSGTVTINQDGWGHFFVNGGSVSVWVKR

SEQ ID NO: 44640 - protein, 480 aa, Bacillus sp.
NGTIMQYFEWNVPNDGQHWNRLHNNAQNLKPAGITAIWIPPAWKGTSQNDVGYGAYDLYDLGEFNQKGTVRTKYGTKAELERAIRSLKANGIQVYGDVVMNHKGGADFTERVQAVEVNPQNRNQEVSGTYQIEAWTGFNFPGRGNQHSSFKWRWYHFDGTDWDQSRQLANRIYKFRGDGKAWDWEVDTENGNYDYLMYADVDMDHPEVINELNRWGVWYANTLNLDGFRLDAVKHIKFSFMRDWLGHVRGQTGKNLFAVAEYWKNDLGALENYLSKTNWTMSAFDVPLHYNLYQASNSSGNYDMRNLLNGTLVQRHPSHAVTFVDNHDTQPGEALESFVQGWFKPLAYATILTREQGYPQVFYGDYYGIPSDGVPSYRQQIDPLLKARQQYAYGRQHDYFDHWDVIGWTREGNASHPNSGLATIMSDGPGGSKWMYVGRQKAGEVWHDMTGNRSGTVTINQDGWGHFFVNGGSVSVWVKR

SEQ ID NO: 44641 - protein, 480 aa, Bacillus sp.
NGTIMQYFEWNEPNDGQHWNRLHNNAQNLKNAGITAIWIPPAWKGTSQNDVGYGAYDLYDLGEFNQKGTVRTKYGTKAELERAIRSLKANGIQVYGDVVMNHKGGADFTERVQAVEVNPQNRNQEVSGTYQIEAWTGFNFPGRGNQHSSFKWRWYHFDGTDWDQSRQLANRIYKFRGDGKAWDWEVDTENGNYDYLMYADVDMDHPEVINELNRWGVWYANTLNLDGFRLDAVKHIKFSFMRDWLGHVRGQTGKNLFAVAEYWKNDLGALENYLSKTNWTMSAFDVPLHYNLYQASNSSGNYDMRNLLNGTLVQRHPSHAVTFVDNHDTQPGEALESFVQGWFKPLAYATILTREQGYPQVFYGDYYGIPSDGVPSYRQQIDPLLKARQQYAYGRQHDYFDHWDVIGWTREGNASHPNSGLATIMSDGPGGSKWMYVGRQKAGEVWHDMTGNRSGTVTINQDGWGHFFVNGGSVSVWVKR

SEQ ID NO: 44642 - protein, 480 aa, Bacillus sp.
NGTIMQYFEWNVPNDGQHWNRLHNNAQNLKNAGITAIWIPPAWKGTSMNDVGYGAYDLYDLGEFNQKGTVRTKYGTKAELERAIRSLKANGIQVYGDVVMNHKGGADFTERVQAVEVNPQNRNQEVSGTYQIEAWTGFNFPGRGNQHSSFKWRWYHFDGTDWDQSRQLANRIYKFRGDGKAWDWEVDTENGNYDYLMYADVDMDHPEVINELNRWGVWYANTLNLDGFRLDAVKHIKFSFMRDWLGHVRGQTGKNLFAVAEYWKNDLGALENYLSKTNWTMSAFDVPLHYNLYQASNSSGNYDMRNLLNGTLVQRHPSHAVTFVDNHDTQPGEALESFVQGWFKPLAYATILTREQGYPQVFYGDYYGIPSDGVPSYRQQIDPLLKARQQYAYGRQHDYFDHWDVIGWTREGNASHPNSGLATIMSDGPGGSKWMYVGRQKAGEVWHDMTGNRSGTVTINQDGWGHFFVNGGSVSVWVKR

SEQ ID NO: 44643 - protein, 480 aa, Bacillus sp.
NGTIMQYFEWNVPNDGQHWNRLHNNAQNLKNAGITAIWIPPAWKGTSQNDVGYGAYDLYDLGEFNQKGTVRTKYGTKAELERAIRSLKANGIQVYGDVVMNHKGGADFTERVQAVEVNPQNRNQEVSGTYQIEAWTGFNFPGRGNQHSSFKWRWYHFDGTDWDQSRQLANRIYKFRGDGKAWDWEVDTENGNYDYLMYADVDMDHPEVINELNRWGVWYANTLNLDGFRLDAVKHIKFSFMRDWLGHVRGQTGKNLFAVAEYWKNDLGALENYLSKTNWTMSAFDVPLHYNLYQASNSSGNYDMRNLLNGTLVQRHPSHAVTFVDNHDTQPGEALESFVQGWFKPLAYATILTREQGYPQVFYGDYYGIPWDGVPSYRQQIDPLLKARQQYAYGRQHDYFDHWDVIGWTREGNASHPNSGLATIMSDGPGGSKWMYVGRQKAGEVWHDMTGNRSGTVTINQDGWGHFFVNGGSVSVWVKR

SEQ ID NO: 44644 - protein, 480 aa, Bacillus sp.
NGTIMQYFEWNVPNDGQHWNRLHNNAQNLKNAGITAIWIPPAWKGTSQNDVGYGAYDLYDLGEFNQKGTVRTKYGTKAELERAIRSLKANGIQVYGDVVMNHKGGADFTERVQAVEVNPQNRNQEVSGTYQIEAWTGFNFPGRGNQHSSFKWRWYHFDGTDWDQSRQLANRIYKFRGDGKAWDWEVDTENGNYDYLMYADVDMDHPEVINELNRWGVWYANTLNLDGFRLDAVKHIKFSFMRDWLGHVRGQTGKNLFAVAEYWKNDLGALENYLSKTNWTMSAFDVPLHINLYQASNSSGNYDMRNLLNGTLVQRHPSHAVTFVDNHDTQPGEALESFVQGWFKPLAYATILTREQGYPQVFYGDYYGIPSDGVPSYRQQIDPLLKARQQYAYGRQHDYFDHWDVIGWTREGNASHPNSGLATIMSDGPGGSKWMYVGRQKAGEVWHDMTGNRSGTVTINQDGWGHFFVNGGSVSVWVKR

SEQ ID NO: 44645 - protein, 480 aa, Bacillus sp.
NGTIMQYFEWNVPNDGQHWNRLHNNAQNLKNAGITAIWIPPAWKGTSQNDVGYGAYDLYDLGEFNQKGTVRTKYGTKAELERAIRSLKANGIQVYGDVVMNHKGGADFTERVQAVEVNPQNRNQEVSGTYQITAWTGFNFPGRGNQHSSFKWRWYHFDGTDWDQSRQLANRIYKFRGDGKAWDWEVDTENGNYDYLMYADVDMDHPEVINELNRWGVWYANTLNLDGFRLDAVKHIKFSFMRDWLGHVRGQTGKNLFAVAEYWKNDLGALENYLSKTNWTMSAFDVPLHYNLYQASNSSGNYDMRNLLNGTLVQRHPSHAVTFVDNHDTQPGEALESFVQGWFKPLAYATILTREQGYPQVFYGDYYGIPSDGVPSYRQQIDPLLKARQQYAYGRQHDYFDHWDVIGWTREGNASHPNSGLATIMSDGPGGSKWMYVGRQKAGEVWHDMTGNRSGTVTINQDGWGHFFVNGGSVSVWVKR

SEQ ID NO: 44646 - protein, 480 aa, Bacillus sp.
NGTIMQYFEWNVPNDGQHWNRLHNNAQNLKNAGITAIWIPPAWKGTSQNDVGYGAYDLYDLGEFNQKGTVRTKYGTKAELERAIRSLKANGIQVYGDVVMNHKGGADFTERVQAVEVNPQNRNQEVSGTYQIEAWTGFNFPGRGNQHSSFKWRWYHFDGTDWDQSRQLANRIYKFRGDGKAWDWEVDTENGNYDYLMYADVDMDHPEVINELNRWGVWYANTLNLDGFRLDAVKHIKFSFMRDWLGHVRGQTGKNLFAVAEYWKADLGALENYLSKTNWTMSAFDVPLHYNLYQASNSSGNYDMRNLLNGTLVQRHPSHAVTFVDNHDTQPGEALESFVQGWFKPLAYATILTREQGYPQVFYGDYYGIPSDGVPSYRQQIDPLLKARQQYAYGRQHDYFDHWDVIGWTREGNASHPNSGLATIMSDGPGGSKWMYVGRQKAGEVWHDMTGNRSGTVTINQDGWGHFFVNGGSVSVWVKR

SEQ ID NO: 44647 - protein, 480 aa, Bacillus sp.
NGTIMQYFEWNVPNDGQHWNRLHNNAQNLKNAGITAIWIPPAWKGTSQNDVGYGAYDLYDLGEFNQKGTVRTKYGTKAWLERAIRSLKANGIQVYGDVVMNHKGGADFTERVQAVEVNPQNRNQEVSGTYQIEAWTGFNFPGRGNQHSSFKWRWYHFDGTDWDQSRQLANRIYKFRGDGKAWDWEVDTENGNYDYLMYADVDMDHPEVINELNRWGVWYANTLNLDGFRLDAVKHIKFSFMRDWLGHVRGQTGKNLFAVAEYWKNDLGALENYLSKTNWTMSAFDVPLHYNLYQASNSSGNYDMRNLLNGTLVQRHPSHAVTFVDNHDTQPGEALESFVQGWFKPLAYATILTREQGYPQVFYGDYYGIPSDGVPSYRQQIDPLLKARQQYAYGRQHDYFDHWDVIGWTREGNASHPNSGLATIMSDGPGGSKWMYVGRQKAGEVWHDMTGNRSGTVTINQDGWGHFFVNGGSVSVWVKR

SEQ ID NO: 44648 - protein, 480 aa, Bacillus sp.
NGTIMQYFEWNVPNDGQHWNRLHNNAQNLKNAGITAIWIPPAWKGTSQNDVGYGAYDLYDLGEFNQKGTVRTKYGTKAELERAIRSLKANGIQVYGDVVMNHKGGADFTERVQAVEVNPQNRNQEVSGTYQIEAWTGFNFPGRGNQHSSFKWRWYHFDGTDWDQSRQLANRIYKFRGDGKAWDWEVDTENGNYDYLMYADVDMDHPEVINELNRWGVWYANTLNLDGFRLDAVKHIKFSFMRDWLGHVRGQTGKNLFAVAEYWKNDLGALENYLSKTNWTMSAFDVPLHYNLYQASNSSGNYDMRNLLNGTLVQRHPSHAVTFVDNHDTQPGEALESFVQGWFKPLAYATILTREQGYPQVFYGDYYGIPSDGVPSYRQQIDPLLKARQQYAYGRQHDYFDHWDVIGWTREGNASAPNSGLATIMSDGPGGSKWMYVGRQKAGEVWHDMTGNRSGTVTINQDGWGHFFVNGGSVSVWVKR

SEQ ID NO: 44649 - protein, 480 aa, Bacillus sp.
NGTIMQYFEWNVPNDGQHWNRLHNNAQNLKNAGITAIWIPPAWKGTSQNDVGYGAYDLYDLGEFNQKGTVRTKYGTKAELERAIRSLKANGIQVYGDVVMNHKGGADFTERVQAVEVNPQNRNQEVSGTYQIEAWTGFNFPGRGNQHSSFKWRWYHFDGTDWDQSRQLANRIYKFRGDGKAWDWEVDTENGNYDYLMYADVDMDHPEVINELNRWGVWYANTLNLDGFRLDAVKHIKFSFMRDWLGHVRGQTGKNLFAVAEYWKNDLGALENYLSKTNWTMSAFDVPLHYNLYQASNSSGNYDMRNLLNGTLVQRHPSHAVTFVDNHDTQPGEALESFVQGWFKPLAYATILTREQGYPQVFYGDYYGIPSDGVPSYRQQIDPLLKARQQYAYGRQHDYFDHGDVIGWTREGNASHPNSGLATIMSDGPGGSKWMYVGRQKAGEVWHDMTGNRSGTVTINQDGWGHFFVNGGSVSVWVKR

SEQ ID NO: 44650 - protein, 480 aa, Bacillus sp.
NGTIMQYFEWNVPNDGQHWNRLHNNAQNLKNAGITAIWIPPAWKGTSQNDVGYGAYDLYDLGEFNQKGTVRTKYGTKAELERAIRSLKANGIQVYGDVVMNHKGGADFTERVQAVEVNPQNRNQEVSGTYQIEAWTGFNFPGRGNQHSSFKWRWYHFDGTDWDQSRQLANRIYKFRGDGKAWDWEVDTENGNYDYLMYADVDMDHPEVINELNRWGVWYANTLNLDGFRLDAVKHIKFSFMRDWLGHVRGQTGKNLFAVAEYWKNDLGALENYLSKTNWTMSAFDVPLHYNLYQASNSSGNYDMRNLLNGTLVQVHPSHAVTFVDNHDTQPGEALESFVQGWFKPLAYATILTREQGYPQVFYGDYYGIPSDGVPSYRQQIDPLLKARQQYAYGRQHDYFDHWDVIGWTREGNASHPNSGLATIMSDGPGGSKWMYVGRQKAGEVWHDMTGNRSGTVTINQDGWGHFFVNGGSVSVWVKR

SEQ ID NO: 44651 - protein, 480 aa, Bacillus sp.
NGTIMQYFEWNVPNDGQHWNRLHNNAQNLKNAGITAIWIPPAWKGTSQNDVGYGAYDLYDLGEFNQKGTVRTKYGTKAELERAIRSLKANGIQVYGDVVMNHKGGADFTERVQAVEVNPQNRNQEVSGTYQIEAWTGFNFPGRGNQHSSFKWRWYHFDGTDWDQSRQLANRIYKFRGDGKAWDWEVDTENGNYDYLMYADVDMDHPEVINELNRWGVWYANTLNLDGFRLDAVKHIKFSFMRDWLGHVRGQTGKNLFAVAEYWKNDLGALENYLSKTNWTMSAFDVPLHYSLYQASNSSGNYDMRNLLNGTLVQRHPSHAVTFVDNHDTQPGEALESFVQGWFKPLAYATILTREQGYPQVFYGDYYGIPSDGVPSYRQQIDPLLKARQQYAYGRQHDYFDHWDVIGWTREGNASHPNSGLATIMSDGPGGSKWMYVGRQKAGEVWHDMTGNRSGTVTINQDGWGHFFVNGGSVSVWVKR

SEQ ID NO: 44652 - protein, 480 aa, Bacillus sp.
NGTIMQYFEWNVPNDGQHWNRLHNNAQNLKNAGITAIWIPPAWKGTSQNDVGYGAYDLYDLGEFNQKGTVRTKYGTKAELERAIRSLKANGIQVYGDVVMNHKGGADFTERVQAVEVNPQNRNQEVSGTYQIEAWTGFNFPGRGNQHSSFKWRWYHFDGTDWDQSRQLANRIYKFRGDGKAWDWEVDTENGNYDYLMYADKDMDHPEVINELNRWGVWYANTLNLDGFRLDAVKHIKFSFMRDWLGHVRGQTGKNLFAVAEYWKNDLGALENYLSKTNWTMSAFDVPLHYNLYQASNSSGNYDMRNLLNGTLVQRHPSHAVTFVDNHDTQPGEALESFVQGWFKPLAYATILTREQGYPQVFYGDYYGIPSDGVPSYRQQIDPLLKARQQYAYGRQHDYFDHWDVIGWTREGNASHPNSGLATIMSDGPGGSKWMYVGRQKAGEVWHDMTGNRSGTVTINQDGWGHFFVNGGSVSVWVKR

SEQ ID NO: 44653 - protein, 480 aa, Bacillus sp.
NGTIMQYFEWNVPNDGQHWNRLHNNAQNLKNAGITAIWIPPAWKGTSQNDVGYGAYDLYDLGEFNQKGTVRTKYGTKAELERAIRSLKANGIQVYGDVVMNHKGGADFTERVQAVEVNPQNRNQEVSGTYQIEAWTGFNFPGRGNCHSSFKWRWYHFDGTDWDQSRQLANRIYKFRGDGKAWDWEVDTENGNYDYLMYADVDMDHPEVINELNRWGVWYANTLNLDGFRLDAVKHIKFSFMRDWLGHVRGQTGKNLFAVAEYWKNDLGALENYLSKTNWTMSAFDVPLHYNLYQASNSSGNYDMRNLLNGTLVQRHPSHAVTFVDNHDTQPGEALESFVQGWFKPLAYATILTREQGYPQVFYGDYYGIPSDGVPSYRQQIDPLLKARQQYAYGRQHDYFDHWDVIGWTREGNASHPNSGLATIMSDGPGGSKWMYVGRQKAGEVWHDMTGNRSGTVTINQDGWGHFFVNGGSVSVWVKR

SEQ ID NO: 44654 - protein, 480 aa, Bacillus sp.
NGTIMQYFEWNVPNDGQHWNRLHNNAQNLKNAGITAIWIPPAWKGTSQNDVGYGAYDLYDLGEFNQKGTVRTKYGTKAELERAIRSLKANGIQVYGDVVMNHKGGADFTERVQAVEVNPQNRNQEVSGTYQIEAWTGFNFPGRGNQHSSFKWRWYHFDGTDWDQSRQLANRIYKFRGDGKAWDWEVDTENGNYDYLMYADVDMDHPEVINELNRWGVWYANTLNLDGFRLDAVKHIKFSFMRDWLGHVRGQTGKNLFAVAEYWKNDLGALENYLSKTNWTMSAFDVPLHYNLYQASNSSGNYDMRNLLNGTLVQRHPSHAVTFVDNHDTQPGEALESFVQGWFKPLAYATILTREQGYPQVFYGDYYGIPSDGVPSYRQQIDPLLKARQQYAYGRQHDYFDHWDVIGWTREGNASTPNSGLATIMSDGPGGSKWMYVGRQKAGEVWHDMTGNRSGTVTINQDGWGHFFVNGGSVSVWVKR

SEQ ID NO: 44655 - protein, 480 aa, Bacillus sp.
NGTIMQYFEWNVPNDGQHWLRLHNNAQNLKNAGITAIWIPPAWKGTSQNDVGYGAYDLYDLGEFNQKGTVRTKYGTKAELERAIRSLKANGIQVYGDVVMNHKGGADFTERVQAVEVNPQNRNQEVSGTYQIEAWTGFNFPGRGNQHSSFKWRWYHFDGTDWDQSRQLANRIYKFRGDGKAWDWEVDTENGNYDYLMYADVDMDHPEVINELNRWGVWYANTLNLDGFRLDAVKHIKFSFMRDWLGHVRGQTGKNLFAVAEYWKNDLGALENYLSKTNWTMSAFDVPLHYNLYQASNSSGNYDMRNLLNGTLVQRHPSHAVTFVDNHDTQPGEALESFVQGWFKPLAYATILTREQGYPQVFYGDYYGIPSDGVPSYRQQIDPLLKARQQYAYGRQHDYFDHWDVIGWTREGNASHPNSGLATIMSDGPGGSKWMYVGRQKAGEVWHDMTGNRSGTVTINQDGWGHFFVNGGSVSVWVKR

SEQ ID NO: 44656 - protein, 480 aa, Bacillus sp.
NGTIMQYFEWNVPNDGQHWNRLHNNAQNLKNAGITAIWIPPAWKGTSQNDVGYGAYDLYDLGEFNQKGTVRTKYGTKAELERAIRSLKANGIQVYGDVVMNHKGGADFTERVQAVEVNPQNRNQEVSGTYQIEAWTGFNFPGRGNQHSSFKWRWYHFDGTDWDQSRQLANRIYKFRGDGKAWDWEVDTENGNYDYLMYADVDMDHPEVINELNRWGVWYANTLNLDGFRLDAVKHIKFSFMRDWLGHVRGQTGKNLFAVAEYWKNDLGALENYLSKTNWTMSAFDVPLHYNLYQASNSSGNYDMRNLLNGTLVQRHPSHAVTFVDNHDTQPGEALESFVQGWFKPLAYATILTREQGYPQVFYGDYYGIPSDGVPSYRQQIDPLLKARQQYAYGRQHDYFDHWDVIGWTREGNASHPNSGLANIMSDGPGGSKWMYVGRQKAGEVWHDMTGNRSGTVTINQDGWGHFFVNGGSVSVWVKR

SEQ ID NO: 44657 - protein, 480 aa, Bacillus sp.
NGTIMQYFEWNVPNDGQHWNRLHNNAQNLKNAGITAIWIPPAWKGTSQNDVGYGAYDLYDLGEFNQKGTVRTKYGTKAELERAIRSLKANGIQVYGDVVMNHKGGADFTERVQAVEVNPQNRNQEVSGTYQIEAWTGFNFPGRGNQHSSFKWRWYHFDGTDWDQSRQLANRIYKFRGDGKAWDWEVDTENGNYDYLMYADVDMDHPEVINELNRWGVWYANTLNLDGFRLDAVKHIKFSFMRDWLGHVRGQTGKNLFAVAEYWKNDLGALENYLSKTNWTMSAFDVPLHYNLYQASNSSGNYDMRNLLNGTLVQRHPSHAVTFVDNHDTQPGEALESFVQGWFKPLAYATILTREQGYPQVFYGDYYGIPSDGVPSYRQQIDPLLKARQRYAYGRQHDYFDHWDVIGWTREGNASHPNSGLATIMSDGPGGSKWMYVGRQKAGEVWHDMTGNRSGTVTINQDGWGHFFVNGGSVSVWVKR

SEQ ID NO: 44658 - protein, 480 aa, Bacillus sp.
NGTIMQYFEWNVPNDGQHWNRLHNNAQNLKNAGITAIWIPPAWKGTSQNDVGYGAYDLYDLGEFNQKGTVRTKYGTKAELERAIRSLKANGIQVYGDVVMNHKGGADFTERVQAVEVNPQNRNQEVSGTYQIEAWTGFNFPGRGNQHSSFKWRWYHFDGTDWDQSRQLANRIYKFRGDGKAWDWEVDTENGNYDYLMYADVDMDHPEVINELNRWGVWYANTLNLDGFRLDAVKHIKFSFMRDWLGHVRGQTGKNLFAVAEYWQNDLGALENYLSKTNWTMSAFDVPLHYNLYQASNSSGNYDMRNLLNGTLVQRHPSHAVTFVDNHDTQPGEALESFVQGWFKPLAYATILTREQGYPQVFYGDYYGIPSDGVPSYRQQIDPLLKARQQYAYGRQHDYFDHWDVIGWTREGNASHPNSGLATIMSDGPGGSKWMYVGRQKAGEVWHDMTGNRSGTVTINQDGWGHFFVNGGSVSVWVKR

SEQ ID NO: 44659 - protein, 480 aa, Bacillus sp.
NGTIMQYFEWNVPNDGQHWNRLHNNAQNLKNAGITAIWIPPAWKGTSQNDVGYGAYDLYDLGEFNQKGTVRTKYGTKAELERAIRSLKANGIQVYGDVVMNHKGGADFTERVQAVEVNPQNRNQEVSGTYQIEAWTGFNFPGRGNQHSSFKWRWYHFDGTDWDQSRQLANRIYKFRGDGKAWDWEVDTENGNYDYLMYADVDMDHPEVINELNRWGVWYANTLNLDGFRLDAVKHIKFSFMRDWLGHVRGQTGKNLFAVAEYWKNDLGALENYLSKTNWTMSAFDVPLHYNLYQASNSSGNYDMRNLLNFTLVQRHPSHAVTFVDNHDTQPGEALESFVQGWFKPLAYATILTREQGYPQVFYGDYYGIPSDGVPSYRQQIDPLLKARQQYAYGRQHDYFDHWDVIGWTREGNASHPNSGLATIMSDGPGGSKWMYVGRQKAGEVWHDMTGNRSGTVTINQDGWGHFFVNGGSVSVWVKR

SEQ ID NO: 44660 - protein, 510 aa, Synthetic construct
MKNFKKKLSALLLSFILIFSSFNAAIVQAATNGTMFQYFEWYLPNDGTLWDKLGNDAPNLKSIGVTAVWIPPAYKGSSQADVGYGTYDLYDLGEFNQKGTVRTKYGTKSQLISAVDKLHNNGIQVYGDVVLNHKMGADGTETVWAVEVNPSNRNQETSGDYQISAWTKFDFPGRGNTYSSFKWRWYHFDGVDWDQSRSLSRIYKLRGDYKGWDWEVDTENGNYDYLMGADVDMQHPEVVNELNNWGKWFTQTVKLDGYRLDAVKHIKFDFFNTWLDYQRQQSGKELFTVGEYWSDDLGKLQNYISKTGRRMSLFDVPLQRNFYNASNGGGYYDMRNIKSGTLISVDPTKAVTFVDNHDTEPGQSLQRFVQDWFKPLAYTFILTREEGYPCIFYGDYYGIPAKGVSAKKVAIDKIMLARKNYAYGKQNDYLDHWDIIGWTREGDNEHANSGMAALITDGPGGSKWMYVGQKFIGKTFYDITGNRTDTVVINSSGWGEFKVNGGSYSIWVPK

SEQ ID NO: 44661 - protein, 476 aa, Bacillus sp. (in: firmicutes)
NGTIMQYFEWNVPNDGQHWNRLHNNAQNLKNAGITAIWIPPAWKGTSQNDVGYGAYDLYDLGEFNQKGTVRTKYGTKAELERAIRSLKANGIQVYGDVVMNHKGGADFTERVQAVEVNPQNRNQEVSGTYQIEAWTGFNFPGRGNQHSSFKWRWYHFDGTDWDQSRQLRIFKFRGKAWDWEVDTENGNYDYLMYADVDMDHPEVINELNRWGVWYANTLNLDGFRLDAVKHIKFSFMRDWLGHVRGQTGKNLFAVAEYWKNDLGALENYLSKTNWTMSAFDVPLHYNLYQASNSSGNYDMRNLLNGTLVQRHPSHAVTFVDNHDTQPGEALESFVQGWFKPLAYATILTREQGYPQVFYGDYYGIPSDGVPSYRQQIDPLLKARQQYAYGRQHDYFDHWDVIGWTREGNASHPNSGLATIMSDGPGGSKWMYVGRQKAGEVWHDMTGNRSGTVTINQDGWGHFFVNGGSVSVWVKR

SEQ ID NO: 44662 - protein, 477 aa, Bacillus sp. (in: firmicutes)
NGTIMQYFEWNVPNDGQHWNRLHNNAQNLKNAGITAIWIPPAWKGTSQNDVGYGAYDLYDLGEFNQKGTVRTKYGTKAELERAIRSLKANGIQVYGDVVMNHKGGADFTERVQAVEVNPQNRNQEVSGTYQIEAWTGFNFPGRGNQHSSFKWRWYHFDGTDWDQSRQLANRIYKFRGKAWDWEVDTENGNYDYLMYADVDMDHPEVINELNRWGVWYANTLNLDGFRLDAVKHIKFSFMRDWLGHVRGQTGKNLFAIAEYWKNDLGALENYLSKTNWTMSAFDPLHYNLYQASNSSGNYDMRNLLNGTLVQRHPSHAVTFVDNHDTQPGEALESFVQGWFKPLAYATILTREQGYPSVFYGDYYGIPSDGVPSYRQQIDPLLKARQQYAYGRQHDYFDHWDVIGWTREGNASHPNSGLATIMSDGPGGSKWMYVGRQKAGEVWHDMTGNRSGTVTINQDGWGHFFVNGGSVSVWVKR

SEQ ID NO: 44663 - protein, 477 aa, Bacillus sp. (in: firmicutes)
NGTIMHYFEWNVPNDGQHWNRLHNNAQNLKNAGITAIWIPPAWKGTSQNDVGYGAYDLYDLGEFNQKGTVRTKYGTKAELERAIRSLKANGIQVYGDVVMNHKGGADFTERVQAVEVNPQNRNQEVSGTYQIEAWTGFNFPGRGNQHSSFKWRWYHFDGTDWDQSRQLANRIYKFRGKAWDWEVDTENGNYDYLMYADVDMDHPEVINELNRWGVWYANTLNLDGFRLDAVKHIKFSFMRDWLGHVRGQTGKNLFAGEFWKNDLGALENYLSKTNWTMSAFDVPLHYNLYQASNSSGNYDMRNLLNGTLVQRHPSHAVTFVDNHDTQPGEALESFVQGWFKPLAYATILTREQGYPCVFYGDYYGIPSDGVPSYRQQIDPLLKARQQYAYGRQHDYFDHWDVIGWTREGNASHPNSGLATIMSDGPGGSKWMYVGRQKAGEVWHDMTGNRSGTVTINQDGWGHFFVNGGSVSVWVKR

SEQ ID NO: 44664 - protein, 484 aa, Synthetic construct
TNGTMMQYFEWYVPNDGQQWNRLRTDAPYLSSVGITAVWTPPAYKGTSQADVGYGPYDLYDLGEFNQKGTVRTKYGTKGELKSAVNTLHSNGIQVYGDVVMNHKGGADATEMVRAVEVNPNNRNQEVTGEYTIEAWTRFDFPGRGNTHSSFKWRWYHFDGVDWDQSRRLNNRIYKFRGHGKAWDWEVDTENGNYDYLMYADIDYDHPDVVNEMKKWGVWYANEVGLDGYRLDAVKHIKFSFLKDWVDNARAATGKEMFTVGEYWQNDLGALNNYLAKVNYNQSLFDAPLHYNFYAASTGGGYYDMRNILNNTLVASNPTKAVTLVENHDTQPGQSLESTVQPWFKPLAYAFILTRSGGYPSVFYGDMYGTKGTTTREIPALKSKIEPLLKARKDYAYGTQRDYIDNPDVIGWTREGDSTKAKSGLATVITDGPGGSKRMYVGTSNAGEIWYDLTGNRTDKITIGSDGYATFPVNGGSVSVWVQQ

SEQ ID NO: 44665 - protein, 479 aa, Synthetic construct
NGTIMQYFEWNVPNDGQHWNRLHNNAQNLKNAGITAIWIPPAWKGTSQNDVGYGAYDLYDLGEFNQKGTVRTKYGTKAELERAIRSLKANGIQVYGDVVMNHKAGADYTENVTAVEVNPSNRNQETSGEYNIQAWTGFNFPGRGTTYSNFKWQWFHFDGTDWDQSRSLSRIFKFRGTGKAWDWEVSSENGNYDYLMYADIDMDHPEVINELNRWGVWYANTLNLDGFRLDAVKHIKFSFMRDWLGHVRGQTGKNLFAVAEYWKNDLGALENYLSKTNWTMSAFDVPLHYNLYQASNSSGNYDMRNLLNGTLVQRHPSHAVTFVDNHDTQPGEALESFVQGWFKPLAYATILTREQGYPQVFYGDYYGIPSDGVPSYRQQIDPLLKARQQYAYGRQHDYFDHWDVIGWTREGNASHPNSGLATIMSDGPGGSKWMYVGRQKAGEVWHDMTGNRSGTVTINQDGWGHFFVNGGSVSVWVKR

SEQ ID NO: 44666 - protein, 475 aa, Bacillus sp.
NGTIMQYFEWNVPNDGQHWNRLHNNAQNLKNAGITAIWIPPAWKGTSQNDVGYGAYDLYDLGEFNQKGTVRTKYGTKAELERAIRSLKANGIQVYGDVVMNHKGGADFTERVQAVEVNPQNRNQEVSGTYQIEAWTGFNFPGRGNQHSSFKWRWYHFDGTDWDQQLNRIYKFRGKAWDWEVDTENGNYDYLMYADVDMDHPEVINELNRWGVWYANTLNLDGFRLDAVKHIKFSFMRDWLGHVRGQTGKNLFAVAEYWKNDLGALENYLSKTNWTMSAFDVPLHYNLYQASNSSGNYDMRNLLNGTLVQRHPSHAVTFVDNHDTQPGEALESFVQGWFKPLAYATILTREQGYPQVFYGDYYGIPSDGVPSYRQQIDPLLKARQQYAYGRQHDYFDHWDVIGWTREGNASHPNSGLATIMSDGPGGSKWMYVGRQKAGEVWHDMTGNRSGTVTINQDGWGHFFVNGGSVSVWVKR

SEQ ID NO: 44667 - protein, 478 aa, Bacillus subtilis
NGTMMQYFEWYLPNDGNHWNRLRSDASNLKDKGISAVWIPPAWKGASQNDVGYGAYDLYDLGEFNQKGTIRTKYGTRNQLQAAVNALKSNGIQVYGDVVMNHKGGADATEMVRAVEVNPNNRNQEVSGEYTIEAWTKFDFPGRGNTHSNFKWRWYHFDGVDWDQSRKLNNRIYKFRGKGWDWEVDTENGNYDYLMYADIDMDHPEVVNELRNWGVWYTNTLGLDGFRIDAVKHIKYSFTRDWINHVRSATGKNMFAVAEFWKNDLGAIENYLNKTNWNHSVFDVPLHYNLYNASKSGGNYDMRQIFNGTVVQRHPMHAVTFVDNHDSQPEEALESFVEEWFKPLAYALTLTREQGYPSVFYGDYYGIPTHGVPAMKSKIDPILEARQKYAYGTQRDYLDHPDVIGWTREGDGVHADSGLATLMSDGPGGSKWMEVGKNNAGEVWYDITGNQTNTVTINKDGWGQFHVSGGSVSIYVQQ

SEQ ID NO: 44668 - protein, 478 aa, Cytophaga sp.
NGTMMQYFEWYLPNDGNHWNRLRSDASNLKDKGISAVWIPPAWKGASQNDVGYGAYDLYDLGEFNQKGTIRTKYGTRNQLQAAVNALKSNGIQVYGDVVMNHKGGADATEMVKAVEVNPNNRNQEVSGEYTIEAWTKFDFPGRGNTHSNFKWRWYHFDGVDWDQSRKLNNRIYKFRGKGWDWEVDTEFGNYDYLMYADIDMDHPEVVNELRNWGVWYTNTLGLDGFRIDAVKHIKYSFTRDWINHVRSATGKNMFAVAEFWKNDLGAIENYLNKTNWNHSVFDVPLHYNLYNASKSGGNYDMRQIFNGTVVQKHPMHAVTFVDNHDSQPEEALESFVEEWFKPLAYALTLTREQGYPSVFYGDYYGIPTHGVPAMKSKIDPILEARQKYAYGTQRDYIDNPDVIGWTREGDSTKAKSGLATVITDGPGGSKRMYVGTSNAGEIWYDLTGNRTDKITIGSDGYATFPVNGGSVSVWVQQ

SEQ ID NO: 44669 - protein, 483 aa, Synthetic construct
TNGTMMQYFEWYLPNDGNHWTRLQNDAANLSSKGVTAVWIPPAYKGTSQNDVGYGAYDLYDLGEFNQKGTVRTKYGTKAQLKSAIAELHKQNIHVYGDVVMNHKGGADFTETVTAVEVDPNNRNRETSGDYQISAWTGFTFPGRGNTYSPFKWNWYHFDGTDWDESRKINRIYKFRGTGKAWDWEVSSENGNYDYLMYADIDYEHPDVINEMKKWGTWYAKELNLDGFTLDAVKHIKHDYLRDWVTHVRNQTGKELFTVAEYWQNDIGQLNNYLAKTNYNQSVFDAPLHYHFHYASNSNGNYDMRNILKGTVMESNPRLAVTLVENHDSQPGQSLESVVSTWFKPLAYAFILTRAEGYPSVFYGDYYGTKGNSNYEIPSLKTQLDPILTARKNYAYGLQRDYIDHWDIIGCQLFPGAARDKSGLATLITDGPGGYKWMEVGKQNAGEVWYDITGNRKETVTINNDGWGQFYVNGGSVSIYVQK

SEQ ID NO: 44670 - protein, 480 aa, Synthetic construct
NETMMQYFEWDLPNDGTLWTKVKNEAANLSSLGITALWLPPAYKGTSQSDVGYGVYDLYDLGEFNQKGTIRTKYGTKTQYIQAIQAAKAAGMQVYADVVFNHKGGADFTERVQAVEVNPQNRNQEVSGTYQIEAWTGFNFPGRGNQHSSFKWRWYHFDGTDWDQSRQLANRIYKFRGDGKAWDWEVDTENGNYDYLMYADVDMDHPEVVTELKNWGTWYVNTTNIDGFRLDAVKHIKYSFFPDWLTYVRNQTGKNLFAVGEFWSYDVNKLHNYITKTNGSMSLFDAPLHNNFYTASKSSGYFDMRYLLNNTLMKDQPSLAVTLVDNHDTQPGQSLQSWVEPWFKPLAYAFILTRQEGYPCVFYGDYYGIPKYNIPGLKSKIDPLLIARRDYAYGTQRDYIDHQDIIGWTREGIDTKPNSGLAALITDGPGGSKWMYVGKKHAGKVFYDLTGNRSDTVTINADGWGEFKVNGGSVSIWVAK

SEQ ID NO: 44671 - protein, 481 aa, Bacillus sp.
WNGTIMQYFEWNVPNDGQHWNRLHNNAQNLKNAGITAIWIPPAWKGTSQNDVGYGAYDLYDLGEFNQKGTVRTKYGTKAELERAIRSLKANGIQVYGDVVMNHKGGADFTERVQAVEVNPQNRNQEVSGTYQIEAWTGFNFPGRGNQHSSFKWRWYHFDGTDWDQSRQLANRIYKFRGDGKAWDWEVDTENGNYDYLMYADVDMDHPEVINELNRWGVWYANTLNLDGFRLDAVKHIKFSFMRDWLGHVRGQTGKNLFAVAEYWKNDLGALENYLSKTNWTMSAFDVPLHYNLYQASNSSGNYDMRNLLNGTLVQRHPSHAVTFVDNHDTQPGEALESFVQGWFKPLAYATILTREQGYPQVFYGDYYGIPSDGVPSYRQQIDPLLKARQQYAYGRQHDYFDHWDVIGWTREGNASHPNSGLATIMSDGPGGSKWMYVGRQKAGEVWHDMTGNRSGTVTINQDGWGHFFVNGGSVSVWVKR

SEQ ID NO: 44672 - protein, 489 aa, Aspergillus turcosus
SLSLLGQAAHALTPAEWRSQSIYFLLTDRFGREDNSTTAACDVTERLYCGGSWQGIINHLDYIQGMGFTAIWITPVTEQFYEDTGDGTSYHGYWQQNIYEVNYNYGTAQDLKNLADALHARGMYLMVDVVANHMGYDGAGNTVDYSVFTPFDSSSYFHPYCLISDYSNQTNVEDCWLGDTTVSLPDLDTTETKVQAIWYDWVKGLVANYSIDGLRIDTVKHVEKDFWPGYNDAAGVYCVGEVFSGDPTYTCPYQNYLDGVLNYPIYYQLLYAFESTSGSISNLYDMINSVASDCADPTLLGNFIENHDNPRFASYTSDYSQARNVISFMFFSDGIPIVYAGQEQHYSGGADPANREAVWLSGYSTSATLYSWIASTNKIRKLAISKDAAYITSKNNPFYYDSNTLAMRKGSTAGAQVITVLSNKGSSGSSYTLSLSGTGYSAGASLVEMYTCTTLTVDSSGNLAVPMASGLPRVLVPSSWVSGSGLCGS

SEQ ID NO: 44673 - protein, 479 aa, Exiguobacterium oxidotolerans
NGTMMQYFEWYLPNDGNHWNRLGNDASKLDQLGITSVWIPPAYKGTTQNDVGYGAYDLYDLGEFNQKGTVRTKYGTKTQLKSAIGQLHTAGIDVYGDVVMNHKGGADFTESVTAVEVNPGNRNQEVSGDYQIQAWTGFNFAARSNAYSNFKWKWYHFDGTDWDQSRSKSAIYKFRGTGKSWDSNVSSENGNYDYLMYADIDFDHPEVQQEMKNWGKWYVNELGLDGFRLDAVKHIKHTYLADWLTNVRQTTGKELFTVAEYWQNDLGTLKNYLSQTNYKQSVFDAPLHYKFEQASKGGGFYDMRTIFNGTLVQDNPTLAVTLVENHDSQPGQSLESTVQSWFKPLAYAMILTREQGYPSVFYGDYYGTKGSSNREIPALASKIDPILKARKDYAFGKQNDYLDNPDVIGWTREGVSDRSKSGLATILSDGPGGSKWMYVGTQNKGEVWTDITGNNSASVTINADGYGQFFVNGGSVSIY

SEQ ID NO: 44674 - protein, 480 aa, Bacillus amyloliquefaciens
NGTLMQYFEWYTPNDGQHWKRLQNDAEHLSDIGITAVWIPPAYKALTQADVGYGAYDLYDLGEFHQKGTVRTKYGTKGELQSAIKSLHSRDINVYGDVVINHKAGADATEDVTAVEVDPADRNRVISGEHLIKAWTHFHFPGRGSTYSDFKWYWYHFDGTDWDESRKLNRIYLFQGKTWDWPVSNEFGNYDYLMYADFDYDHPDVVAEIKRWGTWYANELQLDGFRLDAVKHIKFSFLRDWVNHVREKTGKEMFTVAEYWSNDLGALENYLNKTNFNHSVFDVPLHYQFHAASTQGGGYDMRKLLNGTVVSKHPLKSVTFVDNHDTQPGQSLESTVQTWFKPLAYAFILTRESGYPQVFYGDMYGTKGDSQREIPALKHKIEPILKARKQYAYGAQHDYFDHHDIVGWTREGDSSVANSGLAALITDGPGGAKRMYVGRQNAGETWHDITGNRSEPVVINSEGWGEFHVNGGSVSIYVQR

SEQ ID NO: 44675 - protein, 480 aa, Bacillus licheniformis
NGTLMQYFEWYTPNDGQHWKRLQNDAEHLSDIGITAVWIPPAYKAISQADVGYGAYDLYDLGEFHQKWTVRTKYGTKGELQSAIKSLHSRDINVYGDVVINHKAGADATEDVTAVEVDPADRNRVISGEHLIKAWTHFHFPGRGSTYSDFKWYWYHFDGTDWDESRKLNRIYLFQGKTWDWPVSNEFGNYDYLMYADFDYDHPDVVAEIKRWGTWYANELQLDGFRLDAVKHIKFSFLRDWVNHVREKTGKEMFTVAEYWSNDLGALENYLNKTNFNHSVFDVPLHYQFHAASTQGGGYDMRKLLNGTVVSKHPLKSVTFVDNHDTQPGQSLESTVQTWFKPLAYAFILTRESGYPQVFYGDMYGTKGDSQREIPALKHKIEPILKARKQYAYGAQHDYFDHHDIVGWTREGDSSVANSGLAALITDGPGGAKRMYVGRQNAGETWHDITGNRSEPVVINSEGWGEFHVNGGSVSIYVQR

SEQ ID NO: 44676 - protein, 480 aa, Bacillus licheniformis
NGTLMQYFEWYTPNDGQHWKRLQNDAEHLSDIGITAVWIPPAYKAISQADVGYGAYDLYDLGEFWQKGTVRTKYGTKGELQSAIKSLHSRDINVYGDVVINHKAGADATEDVQAVEVDPADRNRVISGEHLIKAWTHFHFPGRGSTYSDFKWYWYHFDGTDWDESRKLNRIYLFQGKTWDWPVSNEFGNYDYLMYADYDYDYPDVVAEITRWGTWYANELQLDGFRLDAVKHIKFPFLRDWVNHVREKTGKEMFTVAEYWSNDLGALENYLNITNFNHSVFDVPLHYQFHAASTQGGGYDMRKLLNGTVVSKHPLKSVTFVDNHDTQPGQSLESTVQTWFKPLAYAFILTRESGYPSVFYGDMYGTKGDSQREIPALKHKIEPILKARKQYAYGAQHDYFDHHDIVGWTREGVSSVANSGLAALITDGPGGAKWMYVGRQNAGETWHDITGNRSEPVVINSEGWGEFHVNGGSVSIYVQR

SEQ ID NO: 44677 - protein, 480 aa, Bacillus licheniformis
NGTLMQYFEWYTPNDGQHWKRLQNDAEHLSDIGITAVWIPPAYKAISQADVGYGAYDLYDLGEFHQKGTVRTKYGTKGELQSAIKSLHSRDINVYGDVVINHKAGADATEDVTAVEVDPADRNRVISGEHLIKAWTHFHFWGRGSTYSDFKWYWYHFDGTDWDESRKLNRIYLFQGKTWDWPVSNEFGNYDYLMYADFDYDHPDVVAEIKRWGTWYANELQLDGFRLDAVKHIKFSFLRDWVNHVREKTGKEMFTVAEYWSNDLGALENYLNKTNFNHSVFDVPLHYQFHAASTQGGGYDMRKLLNGTVVSKHPLKSVTFVDNHDTQPGQSLESTVQTWFKPLAYAFILTRESGYPQVFYGDMYGTKGDSQREIPALKHKIEPILKARKQYAYGAQHDYFDHHDIVGWTREGDSSVANSGLAALITDGPGGAKRMYVGRQNAGETWHDITGNRSEPVVINSEGWGEFHVNGGSVSIYVQR

SEQ ID NO: 44678 - protein, 480 aa, Bacillus licheniformis
NGTLMQYFEWYTPNDGQHWKRLQNDAEHLSDIGITAVWIPPAYKAISQADVGYGAYDLYDLGEFWQKGTVRTKYGTKGELQSAIKSLHSRDINVYGDVVINHKAGADATEDVQAVEVDPADRNRVISGEHLIKAWTHFHFPGRGSTYSDFKWYWYHFDGTDWDESRKLNRIYLFQGKTWDWPVSNEFGNYDYLMYADYDYDYPDVVAEITRWGTWYANELQLDGFRLDAVKHIKFLFLRDWVNHVREKTGKEMFTVAEYWSNDLGALENYLNWTNFNHSVFDVPLHYQFHAASTQGGGYDMRKLLNGTVVSKHPLKSVTFVDNHDTQPGQSLESTVQTWFKPLAYAFILTRESGYPSVFYGDMYGTKGDSQREIPALKHKIEPILKARKQYAYGAQHDYFDHHDIVGWTREGVSSVANSGLAALITDGPGGAKWMYVGRQNAGETWHDITGNRSEPVVINSEGWGEFHVNGGSVSIYVQR

SEQ ID NO: 44679 - protein, 480 aa, Bacillus licheniformis
NGTLMQYFEWYTPNDGQHWKRLQNDAEHLSDIGITAVWIPPAYKAISQADVGYGAYDLYDLGEFWQKGTVRTKYGTKGELQSAIKSLHSRDINVYGDVVINHKAGADATEDVQAVEVDPADRNRVISGEHLIKAWTHFHFPGRGSTYSDFKWYWYHFDGTDWDESRKLNRIYLFQGKTWDWPVSNEFGNYDYLMYADYDYDYPDVVAEITRWGTWYANELQLDGFRLDAVKHIKFLFLRDWVNHVREKTGKEMFTVAEYWSNDLGALENYLNITNFNHSVFDVPLHYQFHAASTQGGGYDMRKLLNGTVVSKHPLKSVTFVDNHDTQPGQSLESTVQTWFKPLAYAFILTRESGYPSVFYGDMYGTKGDSQREIPALKHKIEPILKARKQYAYGAQHDYFDHHDIVGWTREGVSSVANSGLAALITDGPGGAKWMYVGRQNAGETWHDITGNRSEPVVINSEGWGEFHVNGGSVSIYVQR

SEQ ID NO: 44680 - protein, 480 aa, Bacillus licheniformis
NGTLMQYFEWYTPNDGQHWKRLQNDAEHLSDIGITAVWIPPAYKAISQADVGYGAYDLYDLGEFHQKGTVRTKYGTKGELQSAIKSLHSRDINVYGDVVINHKAGADATEDVTAVEVDPADRNRVISGEHLIKAWTHFHFPGRGSTYSDFKWYWWHFDGTDWDESRKLNRIYLFQGKTWDWPVSNEFGNYDYLMYADYDYDYPDVVAEITRWGTWYANELQLDGFRLDAVKHIKFSFLRDWVNHVREKTGKEMFTVAEYWSNDLGALENYLNKTNFNHSVFDVPLHYQFHAASTQGGGYDMRKLLNGTVVSKWPLKSVTFVDNHDTQPGQSLESTVQTWFKPLAYAFILTRESGYPSVFYGDMYGTKGDSQREIPALKHKIEPILKARKQYAYGAQHDYFDHHDIVGWTREGVSSVANSGLAALITDGPGGAKWMYVGRQNAGETWHDITGNRSEPVVINSEGWGEFHVNGGSVSIYVQR

SEQ ID NO: 44681 - protein, 480 aa, Bacillus licheniformis
NGTLMQYFEWYTPNDGQHWKRLQNDAEHLSDIGITAVWIPPAYKAISQADVGYGAYDLYDLGEFHQKGTVRTKYGTKGELQSAIKSLHSRDINVYGDVVINHKAGADATEDVTAVEVDPADRNRVISGEHLIKAWTHFHFPGRGSTYSDFKWYWWHFDGTDWDESRKLNRIYLFQGKTWDWPVSNEFGNYDYLMYADFDYDHPDVVAEIKRWGTWYANELQLDGFRLDAVKHIKFSFLRDWVNHVREKTGKEMFTVAEYWSNDLGALENYLNKTNFNHSVFDVPLHYQFHAASTQGGGYDMRKLLNGTVVSKHPLKSVTFVDNHDTQPGQSLESTVQTWFKPLAYAFILTRESGYPQVFYGDMYGTKGDSQREIPALKHKIEPILKARKQYAYGAQHDYFDHHDIVGWTREGDSSVANSGLAALITDGPGGAKRMYVGRQNAGETWHDITGNRSEPVVINSEGWGEFHVNGGSVSIYVQR

SEQ ID NO: 44682 - protein, 480 aa, Bacillus licheniformis
NGTLMQYFEWYTPNDGQHWKRLQNDAEHLSDIGITAVWIPPAYKAISQADVGYGAYDLYDLGEFHQKGTVRTKYGTKGELQSAIKSLHSRDINVYGDVVINHKAGADATEDVTAVEVDPADRNRVISGEHLIKAWTHFHFPGRGSTYSDFKWYWYHFDGTDWDESRKLNRIYLFQGKTWDWPVSNEFGNYDYLMYADFDYDHPDVVAEIKRWGTWYANELQLDGFRLDAVKHIKFSFLRDWVNHVREKTGKEMFTVAEYWSNDLGALENYLNKTNFNHSVFDVPLHYQFHAASTQGGGYDMRKLLNGTVVSKWPLKSVTFVDNHDTQPGQSLESTVQTWFKPLAYAFILTRESGYPQVFYGDMYGTKGDSQREIPALKHKIEPILKARKQYAYGAQHDYFDHHDIVGWTREGDSSVANSGLAALITDGPGGAKRMYVGRQNAGETWHDITGNRSEPVVINSEGWGEFHVNGGSVSIYVQR

SEQ ID NO: 44683 - protein, 480 aa, Bacillus licheniformis
NGTLMQYFEWYTPNDGQHWKRLQNDAEHLSDIGITAVWIPPAYKAISQADVGYGAYDLYDLGEFWQKGTVRTKYGTKGELQSAIKSLHSRDINVYGDVVINHKAGADATEDVQAVEVDPADRNRVISGEHLIKAWTHFHFPGRGSTYSDFKWYWYHFDGTDWDESRKLNRIYLFQGKTWDWPVSNEFGNYDYLMYADYDYDYPDVVAEITRWGTWYANELQLDGFRLDAVKHIKFPFLRDWVNHVREKTGKEMFTVAEYWSNDLGALENYLNWTNFNHSVFDVPLHYQFHAASTQGGGYDMRKLLNGTVVSKHPLKSVTFVDNHDTQPGQSLESTVQTWFKPLAYAFILTRESGYPSVFYGDMYGTKGDSQREIPALKHKIEPILKARKQYAYGAQHDYFDHHDIVGWTREGVSSVANSGLAALITDGPGGAKWMYVGRQNAGETWHDITGNRSEPVVINSEGWGEFHVNGGSVSIYVQR

SEQ ID NO: 44684 - protein, 480 aa, Bacillus licheniformis
NGTLMQYFEWYTPNDGQHWKRLQNDAEHLSDIGITAVWIPPAYKAISQADVGYGAYDLYDLGEFHQKGTVRTKYGTKGELQSAIKSLHSRDINVYGDVVINHKAGADATEDVTAVEVDPADRNRVISGEHLIKAWTHFHFPGRGSTYSDFKWYWYHFDGTDWDESRKLNRIYLFQGKTWDWPVSNEFGNYDYLMYADFDYDHPDVVAEIKRWGTWYANELQLDGFRLDAVKHIKFSFLRDWVNHVREKTGKEMFTVAEYWSNDLGALENYLNKTNFNHSVFDVPLHYQFHAASTQGGGYDMRKLLNGTVVSKHPLKSVTFVDNHDTQPGQSLESTVQTWFKPLAYAFILTRESGYPQVFYGDMYGTKGDSQREIPALKHKIEPILKARKQYAYGAQHDYFDHHDIVGWTREGDSSVANSGLAALITDGPGGAKRMYVGRQNAGETWWDITGNRSEPVVINSEGWGEFHVNGGSVSIYVQR

SEQ ID NO: 44685 - protein, 480 aa, Bacillus amyloliquefaciens
NGTLMQYFEWYTPNDGQHWKRLQNDAEHLSDIGITAVWIPPAYKAISQADVGYGAYDLYDLGEFHQKGTVRTKYGTKGELQSAIKSLHSRDINVYGDVVINHKAGADATEDVTAVEVDPADRNRVISGEHLIKAWTHFHFPGRGSTYSDFKWYWWHFDGTDWDESRKLNRIYLFQGKTWDWPVSNEFGNYDYLMYADYDYDYPDVVAEITRWGTWYANELQLDGFRLDAVKHIKFSFLRDWVNHVREKTGKEMFTVAEYWSNDLGALENYLNKTNFNHSVFDVPLHYQFHAASTQGGGYDMRKLLNGTVVSKWPWKSVTFVDNHDTQPGQSLESTVQTWFKPLAYAFILTRESGYPSVFYGDMYGTKGDSQREIPALKHKIEPILKARKQYAYGAQHDYFDHHDIVGWTREGVSSVANSGLAALITDGPGGAKWMYVGRQNAGETWHDITGNRSEPVVINSEGWGEFHVNGGSVSIYVQR

SEQ ID NO: 44686 - protein, 480 aa, Bacillus licheniformis
NGTLMQYFEWYTPNDGQHWKRLQNDAEHLSDIGITAVWIPPAYKAISQADVGYGAYDLYDLGEFWQKGTVRTKYGTKGELQSAIKSLHSRDINVYGDVVINHKAGADATEDVQAVEVDPADRNRVISGEHLIKAWTHFHFPGRGSTYSDFKWYWYHFDGTDWDESRKLNRIYLFQGKTWDWPVSNEFGNYDYLMYADYDYDYPDVVAEITRWGTWYANELQLDGFRLDAVKHIKFYFLRDWVNHVREKTGKEMFTVAEYWSNDLGALENYLNITNFNHSVFDVPLHYQFHAASTQGGGYDMRKLLNGTVVSKHPLKSVTFVDNHDTQPGQSLESTVQTWFKPLAYAFILTRESGYPSVFYGDMYGTKGDSQREIPALKHKIEPILKARKQYAYGAQHDYFDHHDIVGWTREGVSSVANSGLAALITDGPGGAKWMYVGRQNAGETWHDITGNRSEPVVINSEGWGEFHVNGGSVSIYVQR

SEQ ID NO: 44687 - protein, 477 aa, Bacillus sp. TS-23
NETMMQYFEWDLPNDGTLWTKVKNEAANLSSLGITALWLPPAWKGTSQSDVGYGAYDLYDLGEFNQKGTIRTKYGTKTQYIQAIQAAKAAGMQVYADVVMNHKAGADGTEFVDAVEVDPSNRNQETSGTYQIQAWTKFDFPGRGNTYSSFKWRWYHFDGTDWDESRKLNRIYKFTGKAWDWEVDTENGNYDYLMFADLDMDHPEVVTELKNWGTWYVNTTNIDGFRLDAVKHIKYSFFPDWLTYVRNQTGKNLFAVGEFWSYDVNKLHNYITKTNGSMSLFDAPLHNNFYTASKSSGYFDMRYLLNNTLMKDQPSLAVTLVDNHDTQPGQSLQSWVEPWFKPLAYAFILTRQEGYPCVFYGDYYGIPKYNIPGLKSKIDPLLIARRDYAYGTQRDYIDHQDIIGWTREGIDTKPNSGLAALITDGPGGSKWMYVGKKHAGKVFYDLTGNRSDTVTINADGWGEFKVNGGSVSIWVAK

SEQ ID NO: 44688 - protein, 477 aa, Bacillus sp.
NETMMQYFEWDLPNDGTLWTKVKNEAANLSSLGITALWLPPAYKGTSQSDVGYGVYDLYDLGEFNQKGTIRTKYGTKTQYIQAIQAAKAAGMQVYADVVFNHKAGADQTEFVDAVEVDPSNRNQEVSGTYQIEAWTKFDFPGRGNTYSSFKWRWYHFDGTDWDESRKLNRIYKFRGKAWDWEVDTENGNYDYLMFADLDMDHPEVVTELKNWGTWYVNTTNIDGFRLDAVKHIKFSFMRDWLTYVRNQTGKNLFAVGEFWSYDVNKLHNYITKTNGSMSLFDAPLHNNFYTASKSSGYFDMRYLLNNTLMKDQPSLAVTLVDNHDTQPGQSLQSWVEPWFKPLAYAFILTRQEGYPCVFYGDYYGIPSDGVPGLKSKIDPLLIARRDYAYGTQRDYIDHQDIIGWTREGIDTKPNSGLAALITDGPGGSKWMYVGKKHAGKVFYDLTGNRSDTVTINADGWGEFKVNGGSVSIWVAK

SEQ ID NO: 44689 - protein, 480 aa, Bacillus licheniformis
NGTLMQYFEWYTPNDGQHWKRLQNDAEHLSDIGITAVWIPPAYKAISQADVGYGAYDLYDLGEFHQKGTVRTKYGTKGELQSAIKSLHSRDINVYGDVVINHKAGADATEDVTAVEVDPADRNRVISGEHLIKAWTHFHFPGRGSTYSDFKWWWWHFDGTDWDESRKLNRIYLFQGKTWDWPVSNEFGNYDYLMYADFDYDHPDVVAEIKRWGTWYANELQLDGFRLDAVKHIKFSFLRDWVNHVREKTGKEMFTVAEYWSNDLGALENYLNKTNFNHSVFDVPLHYQFHAASTQGGGYDMRKLLNGTVVSKWPLKSVTFVDNHDTQPGQSLESTVQTWFKPLAYAFILTRESGYPQVFYGDMYGTKGDSQREIPALKHKIEPILKARKQYAYGAQHDYFDHHDIVGWTREGDSSVANSGLAALITDGPGGAKWMYVGRQNAGETWHDITGNRSEPVVINSEGWGEFHVNGGSVSIYVQR

SEQ ID NO: 44690 - protein, 480 aa, Bacillus amyloliquefaciens
NGTLMQYFEWYTPNDGQHWKRLQNDAEHLSDIGITAVWIPPAYKAISQADVGYGAYDLYDLGEFWQKGTVRTKYGTKGELQSAIKSLHSRDINVYGDVVINHKAGADATEDVTAVEVDPADRNRVISGEHLIKAWTHFHFPGRGSTYSDFKWYWWHFDGTDWDESRKLNRIYLFQGKTWDWPVSNEFGNYDYLMYADFDYDHPDVVAEIKRWGTWYANELQLDGFRLDAVKHIKFSFLRDWVNHVREKTGKEMFTVAEYWSNDLGALENYLNKTNFNHSVFDVPLHYQFHAASTQGGGYDMRKLLNGTVVSKHPLKSVTFVDNHDTQPGQSLESTVQTWFKPLAYAFILTRESGYPQVFYGDMYGTKGDSQREIPALKHKIEPILKARKQYAYGAQHDYFDHHDIVGWTREGDSSVANSGLAALITDGPGGAKRMYVGRQNAGETWHDITGNRSEPVVINSEGWGEFHVNGGSVSIYVQR

SEQ ID NO: 44691 - protein, 477 aa, Bacillus sp.
NETMMQYFEWDLPNDGTLWTKVKNEAANLSSLGITALWLPPAYKGTSQSDVGYGVYDLYDLGEFNQKGTIRTKYGTKTQYIQAIQAAKAAGMQVYADVVFNHKAGADGTEFVDAVEVDPSNRNQEVSGTYQIEAWTKFDFPGRGNTYSSFKWRWYHFDGTDWDESRKLNRIYKFRGKAWDWEVDTENGNYDYLMFADLDMDHPEVVTELKNWGTWYVNTTNIDGFRLDAVKHIKFSFMRDWLTYVRNQTGKNLFAVGEFWSYDVNKLHNYITKTNGSMSLFDAPLHNNFYTASKSSGYFDMRYLLNNTLMKDQPSLAVTLVDNHDTQPGQSLQSWVEPWFKPLAYAFILTRQEGYPCVFYGDYYGIPSDGVPGLKSKIDPLLIARRDYAYGTQRDYIDHQDIIGWTREGIDTKPNSGLAALITDGPGGSKWMYVGKKHAGKVFYDLTGNRSDTVTINADGWGEFKVNGGSVSIWVAK

SEQ ID NO: 44692 - protein, 478 aa, Bacillus sp.
NGTIMQYFEWNVPNDGQHWNRLHNNAQNLKNAGITAIWIPPAWKGTSQNDVGYGAYDLYDLGEFNQKGTVRTKYGTKAELERAIRSLKANGIQVYGDVVMNHKGGADFTERVQAVEVNPQNRNQEVSGTYQIEAWTGFNFPGRGNQHSSFKWRWYHFDGTDWDQSRQLANRIYKFDGKAWDWEVDTEFGNYDYLMYADVDMDHPEVINQLNRWGVWYANTLNLDGFRLDAVKHIKFSFMRDWLGHVRGQTGKNLFAVAEYWKNDLGALENYLSKTNWTMSAFDVPLHYNLYQASNSSGNYDMRNLLNGTLVQRHPSHAVTFVDNHDTQPGEALESFVQGWFKPLAYATILTREQGYPQVFYGDYYGIPSDGVPSYRQQIDPLLKARQQYAYGRQHDYFDHWDVIGWTREGNASHPNSGLATIMSDGPGGSKWMYVGRQKAGEVWHDMTGNRSGTVTINQDGWGHFFVNGGSVSVWVKR

SEQ ID NO: 44693 - protein, 478 aa, Bacillus sp. (in: firmicutes)
NGTIMQYFEWEVPNDGQHWNRLHNNAQNLKNAGITAIWIPPAWKGTSQNDVGYGAYDLYDLGEFNQKGTVRTKYGTKAELERAIRSLKANGIQVYGDVVMNHKGGADFTERVQAVEVNPQNRNQEVSGTYQIEAWTGFNFPGRGNQHSSFKWRWYHFDGTDWDQSRQLANRIYKFRGKAWDWEVDTEFGNYDYLMYADVDMDHPEVINELNRWGVWYANTLNLDGFRLDAVKHIKFSFMRDWLGHVRGQTGKNLFAVAEYWKNDLGALENYLSKTNWTMSAFDVPLHYNLYQASNSSGNYDMRNLLNGTLVQRHPSHAVTFVDNHDTQPDEALESFVQGWFKPLAYATILTREQGYPSVFYGDYYGIKSNGVPSYRQQIDPLLKARQQYAYGRQHDYFDHWDVIGWTREGNASHPNSGLATIMSDGPGGSKWMYVGRQKAGEVWHDMTGNRSGTVTINQDGWGHFFVNGGSVSVWVKR

SEQ ID NO: 44694 - protein, 478 aa, Bacillus sp.
NGTIMQYFEWNVPNDGQHWNRLHNNAQNLKNAGITAIWIPPAWKGTSQNDVGYGAYDLYDLGEFNQKGTVRTKYGTKAELERAIRSLKANGIQVYGDVVMNHKGGADFTERVQAVEVNPQNRNQEVSGTYQIEAWTGFNFPGRGNQHSSFKWRWYHFDGTDWDQSRQLANRIYKFXGKAWDWEVDTENGNYDYLMYADVDMDHPEVINELNRWGVWYANTLNLDGFRLDAVKHIKFSFMRDWLGHVRGQTGKNLFAVAEYWKNDLGALENYLSKTNWTMSAFDVPLHYNLYQASNSSGNYDMRNLLNGTLVQRHPSHAVTFVDNHDTQPGEALESFVQGWFKPLAYATILTREQGYPQVFYGDYYGIPSDGVPSYRQQIDPLLKARQQYAYGRQHDYFDHWDVIGWTREGNASHPNSGLATIMSDGPGGSKWMYVGRQKAGEVWHDMTGNRSGTVTINQDGWGHFFVNGGSVSVWVKR

SEQ ID NO: 44695 - protein, 478 aa, Bacillus sp. (in: firmicutes)
NGTIMQYFEWNVPNDGQHWNRLHNNAQNLKNAGITAIWIPPAWKGTSQNDVGYGSYDLYDLGEFNQKGTVRTKYGTKAELERAIRSLKANGIQVYGDVVMNHKGGADFTERVQAVEVNPQNRNQEVSGTYQIEAWTGFNFPGRGNQHSSFKWRWYHFDGTDWDQSYQLANRIYKFRGKAWDWEVDTENGNYDYLMYADVDMDHPEVINELNRWGVWYANTLNLDGFRLDAVKHIKFSFMRDWLGHVRGQTGKNLFAVAEYWKNDLGALENYLSKTNWTMSAFDVPLHYNLYQASNSSGNYDMRNLLNGTLVQRHPSHAVTFVDNHDTQPGEALESFVQGWFKPLAYATILTREQGYPSVFYGDYYGIPSDGVPSYRQQIDPLLKARQQYAYGRQHDYFDHWDVIGWTREGNASHPNSGLATIMSDGPGGSKWMYVGRQKAGEVWHDMTGNRSGTVTINQDGWGHFFVNGGSVSVWVKR

SEQ ID NO: 44696 - protein, 478 aa, Bacillus sp. (in: firmicutes)
NGTIMQYFEWNVPNDGQHWNRLHNNAQNLKNAGITAIWIPPAWKGTSQNDVGYGAYDLYDLGEFNQKGTVRTKYGTKAELERAIRSLKANGIQVYGDVVMNHKGGADFTERVQAVEVNPQNRNQEVSGTYQIEAWTGFNFPGRGNQHSSFKWRWYHFDGTDWDQSRQLANRIYKFRGKAMDWEVDTEFGNYDYLMYADVDMDKPEVINELNRWGVWYANTLNLDGFRLDAVKHIKFSFMRDWLGHVRGQTGKNLFAVAEYWKNDLGALENYLSKTNWTMSAFDVPLHYNLYQASNSSGNYDMRNLLNGTLVQRHPSHAVTFVDNHDTQPGEALESFVQGWFKPLAYATILTREQGYPSVFYGDYYGIPSDGVPSYRQQIDPLLKARQQYAYGRQHDYFDHWDVIGWTREGNASHPNSGLATIMSDGPGGSKWMYVGRQKAGEVWHDMTGNRSGTVTINQDGWGHFFVNGGSVSVWVKR

SEQ ID NO: 44697 - protein, 478 aa, Bacillus sp. (in: firmicutes)
NGTIMQYFEWEVPNDGQHWNRLHNNAQNLKNAGITAIWIPPAWKGTSQNDVGYGAYDLYDLGEFNQKGTVRTKYGTKAELERAIRSLKANGIQVYGDVVMNHKGGADFTERVQAVEVNPQNRNQEVSGTYQIEAWTGFNFPGRGNQHSSFKWRWYHFDGTDWDQSRQLANRIYKFRGKAWDWEVDTEFGNYDYLMYADVDMDHPEVINELNRWGVWYANTLNLDGFRLDAVKHIKFSFMRDWLGHVRGQTGKNLFAVAEYWKNDLGALENYLSKTNWTMSAFDVPLHYNLYQASNSSGNYDMRNLLNGTLVQRHPSHAVTFVDNHDTQPEEALESFVQGWFKPLAYATILTREQGYPSVFYGDYYGITSHGVPSYRQQIDPLLKARQQYAYGRQHDYFDHWDVIGWTREGNASHPNSGLATIMSDGPGGSKWMYVGRQKAGEVWHDMTGNRSGTVTINQDGWGHFFVNGGSVSVWVKR

SEQ ID NO: 44698 - protein, 478 aa, Bacillus sp. (in: firmicutes)
NGTIMQYFEWNVPNDGQHWNRLHNNAQNLKNAGITAIWIPPAWKGTSQNDVGYGAYDLYDLGEFNQKGTVRTKYGTKAELERAIRSLKANGIQVYGDVVMNHKGGADFTERVQAVEVNPQNLNQEVSGTYQIEAWTGFNFPGRGNQHSSFKWRWYHFDGTDWDQSRQLANRIYKFRGKAWDWEVDTENGNYDYLMYADVDMDHPEVINELNRWGVWYANTLNLDGFRLDAVKHIKFSFMRDWLGHVRGQTGKNLFAVAEYWKNDLGALENYLSKTNWTMSAFDVPLHYNLYQASNSSGNYDMRNLLNGTLVQRHPSHAVTFVDNHDTQPGEALESFVQGWFKPLAYATILTREQGYPQVFYGDYYGIPSDGVPSYRQQIDPLLKARQQYAYGRQHDYFDHWDVIGWTREGNASHPNSGLATIMSDGPGGSKWMYVGRQKAGEVWHDMTGNRSGTVTINQDGWGHFFVNGGSVSVWVKR

SEQ ID NO: 44699 - protein, 478 aa, Bacillus sp. (in: firmicutes)
NGTIMQYFEWNVPNDGQHWNRLHNNAQNLKNAGITAIWIPPAWKGTSQNDVGYGAYDLYDLGEFNQKGTVRTKYGTKAELERAIRSLKANGIQVYGDVVMNHKGGADFTERVQAVEVNPQNRNQEVSGTYQIEAWTGFNFPGRGNQHSSFKWRWYHFDGTDWDQSRQLANRIYKFRGKAWDWEVDTEFGNYDYLMYADVDMDHPEVINELNRWGVWYANTLNLDGFRLDAVKHIKFSFMRDWLGHVRGQTGKNLFAVAEYWKNDLGALENYLSKTNWTMSAFDVPLHYNLYQASNSSGNYDMRNLLNGTLVQRHPSHAVTFVDNHDTQPEEALESFVQGWFKPLAYATILTREQGYPSVFYGDYYGIKSNGVPSYRQQIDPLLKARQQYAYGRQHDYFDHWDVIGWTREGNASHPNSGLATIMSDGPGGSKWMYVGRQKAGEVWHDMTGNRSGTVTINQDGWGHFFVNGGSVSVWVKR

SEQ ID NO: 44700 - protein, 478 aa, Bacillus sp. (in: firmicutes)
NGTIMQYFEWNVPNDGQHWNRLHNNAQNLKNAGITAIWIPPAWKGTSQNDVGYGAYDLYDLGEFNQKGTVRTKYGTKAELERAIRSLKANGIQVYGDVVMNHKGGADFTERVQAVEVNPQNLNQEVSGTYQIEAWTGFNFPGRGNQHSSFKWRWYHFDGTDWDQSRQLANRIYKFRGKAWDWEVDTENGNYDYLMYADVDMDHPEVINELNRWGVWYANTLNLDGFRIDAVKHIKFSFIRDWLGHVRGQTGKNLFAVAEYWKNDLGALENYLSKTNWTMSAFDVPLHYNLYQASNSSGNYDMRNLLNGTLVQRHPSHAVTFVDNHDTQPGEALESFVQGWFKPLAYATILTREQGYPCVFYGDYYGIPSDGVPSYRQQIDPLLKARQQYAYGRQHDYFDHWDVIGWTREGNASHPNSGLATIMSDGPGGSKWMYVGRQKAGEVWHDMTGNRSGTVTINQDGWGHFFVNGGSVSVWVKR

SEQ ID NO: 44701 - protein, 478 aa, Bacillus sp. (in: firmicutes)
NGTIMQYFEWNVPNDGQHWNRLHNNAQNLKNAGITAIWIPPAWKGTSQNDVGYGAYDLYDLGEFNQKGTVRTKYGTKAELERAIRSLKANGIQVYGDVVMNHKGGADFTERVQAVEVNPQNNNQEVSGTYQIEAWTGFNFPGRGNQHSSFKWRWYHFDGTDWDQSRQLANRIYKFRGKAWDWEVDTENGNYDYLMYADVDMDHPEVINELNRWGVWYANTLNLDGFRLDAVKHIKFSFIRDWLGHVRGQTGKNLFAVGEHWKNDLGALENYLSKTNWTMSAFDVPLHYNLYQASNSSGNYDMRNLLNGTLVQRHPSHAVTFVDNHDTQPGEALESFVQGWFKPLAYATILTREQGYPSVFYGDYYGIPSDGVPSYRQQIDPLLKARQQYAYGRQHDYFDHWDVIGWTREGNASHPNSGLATIMSDGPGGSKWMYVGRQKAGEVWHDMTGNRSGTVTINQDGWGHFFVNGGSVSVWVKR

SEQ ID NO: 44702 - protein, 478 aa, Bacillus sp. (in: firmicutes)
NGTIMQYFEWNVPNDGQHWNRLHNNAQNLKNAGITAIWIPPAWKGTSQNDVGYGAYDLYDLGEFNQKGTVRTKYGTKAELERAIRSLKANGIQVYGDVVMNHKGGADFTERVQAVEVNPQNRNQEVSGTYQIEAWTGFNFPGRGNQHSSFKWRWYHFDGTDWDQSLQLANRIYKFRGKAWDWEVDTENGNYDYLMYADVDMDHPEVINELNRWGVWYANTLNLDGFRLDAVKHIKFSFMRDWLGHVRGQTGKNLFAVAEYWKNDLGALENYLSKTNWTMSAFDVPLHYNLYQASNSSGNYDMRNLLNGTLVQRHPSHAVTFVDNHDTQPGEALESFVQGWFKPLAYATILTREQGYPSVFYGDYYGIPSDGVPSYRQQIDPLLKARQQYAYGRQHDYFDHWDVIGWTREGNASHPNSGLATIMSDGPGGSKWMYVGRQKAGEVWHDMTGNRSGTVTINQDGWGHFFVNGGSVSVWVKR

SEQ ID NO: 44703 - protein, 478 aa, Bacillus sp. (in: firmicutes)
NGTIMQYFEWNVPNDGQHWNRLHNNAQNLKNAGITAIWIPPAWKGTSQNDVGYGAYDLYDLGEFNQKGTVRTKYGTKAELERAIRSLKANGIQVYGDVVMNHKGGADFTENVQAVEVNPQNRNQEVMGTYRIEAWTGFNFPGRGNQHSSFKWRWYHFDGTDWDQSRQLANRIYKFRGKAWDWEVDTEFGNYDYLMYADVDMDHPEVINELNRWGVWYANTLNLDGFRLDAVKHIKFSFMRDWLGHVRGQTGKNLFAVAEYWKNDLGALENYLSKTNWTMSAFDVPLHYNLYQASNSSGNYDMRNLLNGTLVQRHPSHAVTFVDNHDTQPGEALESFVQGWFKPLAYATILTREQGYPSVFYGDYYGIPSDGVPSYRQQIDPLLKARQQYAYGRQHDYFDHWDVIGWTREGNASHPNSGLATIMSDGPGGSKWMYVGRQKAGEVWHDMTGNRSGTVTINQDGWGHFFVNGGSVSVWVKR

SEQ ID NO: 44704 - protein, 478 aa, Bacillus sp.
NGTIMQYFEWNVPNDGQHWNRLHNNAQNLKNAGITAIWIPPAWKGTSQNDVGYGAYDLYDLGEFNQKGTVRTKYGTKAELERAIRSLKANGIQVYGDVVMNHKGGADFTERVQAVEVNPQNRNQEVSGTYQIEAWTGFNFPGRGNQHSSFKWRWYHFDGTDWDQSRQLANRIYKFDGKAWDWEVDTENGNYDYLMYADXDMDHPEVINELNRWGVWYANTLNLDGFRLDAVKHIKFSFMRDWLGHVRGQTGKNLFAVAEYWKNDLGALENYLSKTNWTMSAFDVPLHYNLYQASNSSGNYDMRNLLNGTLVQRHPSHAVTFVDNHDTQPGEALESFVQGWFKPLAYATILTREQGYPQVFYGDYYGIPSDGVPSYRQQIDPLLKARQQYAYGRQHDYFDHWDVIGWTREGNASHPNSGLATIMSDGPGGSKWMYVGRQKAGEVWHDMTGNRSGTVTINQDGWGHFFVNGGSVSVWVKR

SEQ ID NO: 44705 - protein, 478 aa, Bacillus sp. (in: firmicutes)
NGTIMQYFEWNVPNDGQHWNRLHNNAQNLKNAGITAIWIPPAWKGTSQNDVGYGAYDLYDLGEFNQKGTVRTKYGTKAELERAIRSLKANGIQVYGDVVMNHKGGADFTERVQAVEVNPQNRNQEVSGTYQIEAWTGFNFPGRGNQHSSFKWRWYHFDGTDWDQSYQLANRIYKFRGKAWDWEVDTENGNYDYLMYADVDMDHPEVINELNRWGVWYANTLNLDGFRLDAVKHIKFSFMRDWLGHVRGQTGKNLFAVAEYWKNDLGALENYLSKTNWTMSAFDVPLHYNLYQASNSSGKYDMRNLLNGTLVQRHPSHAVTFVDNHDTQPGEALESFVQGWFKPLAYATILTREQGYPQVFYGDYYGIPSDGVPSYRQQIDPLLKARQQYAYGRQHDYFDHWDVIGWTREGNASHPNSGLATIMSDGPGGSKWMYVGRQKAGEVWHDMTGNRSGTVTINQDGWGHFFVNGGSVSVWVKR

SEQ ID NO: 44706 - protein, 478 aa, Bacillus sp. (in: firmicutes)
NGTIMHYFEWNVPNDGQHWNRLHNNAQNLKNAGITAIWIPPAWKGTSQNDVGYGAYDLYDLGEFNQKGTVRTKYGTKAELERAIRSLKANGIQVYGDVVMNHKGGADFTERVQAVEVNPQNRNQEVSGTYQIEAWTGFNFPGRGNQHSSFKWRWYHFDGTDWDQSRQLANRIYKFRGKAWDWEVDTENGNYDYLMYADVDMDHPEVINELNRWGVWYANTLNLDGFRLDAVKHIKFSFMRDWLGHVRGQTGKNLFAIGEFWKNDLGALENYLSKTNWTMSAFDVPLHYNLYQASNSSGNYDMRNLLNGTLVQRHPSHAVTFVDNHDTQPGEALESFVQGWFKPLAYATILTREQGYPCVFYGDYYGIPSDGVPSYRQQIDPLLKARQQYAYGRQHDYFDHWDVIGWTREGNASHPNSGLATIMSDGPGGSKWMYVGRQKAGEVWHDMTGNRSGTVTINQDGWGHFFVNGGSVSVWVKR

SEQ ID NO: 44707 - protein, 478 aa, Bacillus sp. (in: firmicutes)
NGTIMQYFEWNVPNDGQHWNRLHNNAQNLKNAGITAIWIPPAWKGTSQNDVGYGAYDLYDLGEFNQKGTVRTKYGTKAELERAIRSLKANGIQVYGDVVMNHKGGADFTERVQAVEVNPQNRNQEVSGTYQIEAWTGFNFPGRGNQHSSFKWRWYHFDGTDWDQSRQLANRIYKFRGKAWDWEVDTENGNYDYLMYADVDMDHPEVINELNRWGVWYANTLNLDGFRLDAVKHIKFSFMRDWLGHVRGQTGKNLFAIAEYWKNDLGALENYLSKTNWTMSAFDVPLHYNLYQASNSSGNYDMRNLLNGTLVQRHPSHAVTLVDNHDTQPGEALESFVQGWFKPLAYATILTREQGYPCVFYGDYYGIPSDGVPSYRQQIDPLLKARQQYAYGRQHDYFDHWDVIGWTREGNASHPNSGLATIMSDGPGGSKWMYVGRQKAGEVWHDMTGNRSGTVTINQDGWGHFFVNGGSVSVWVKR

SEQ ID NO: 44708 - protein, 478 aa, Bacillus sp. (in: firmicutes)
NGTIMQYFEWNVPNDGQHWNRLHNNAQNLKNAGITAIWIPPAWKGTSQNDVGYGAYDLYDLGEFNQKGTVRTKYGTKAELERAIRSLKANGIQVYGDVVMNHKGGADFTERVQAVEVNPQNRNQEVSGTYQIEAWTGFNFPGRGNQHSSFKWRWYHFDGTDWDQSRQLANRIYKFRGKAWDWEVDTENGNYDYLMYADVDMDHPEVINELNRWGVWYANTLNLDGFRLDAVKHIKFSFMRDWLGHVRGQTGKNLFAVAEYWKNDLGALENYLSKTNWTMSAFDVPLHYNLYQASNSSGNYDMRNLLNGTLVQRHPSHAVTLVDNHDTQPGEALESFVQGWFKPLAYATILTREQGYPSVFYGDYYGIPSDGVPSYRQQIDPLLKARQQYAYGRQHDYFDHWDVIGWTREGNASHPNSGLATIMSDGPGGSKWMYVGRQKAGEVWHDMTGNRSGTVTINQDGWGHFFVNGGSVSVWVKR

SEQ ID NO: 44709 - protein, 478 aa, Bacillus sp. (in: firmicutes)
NGTIMQYFEWNVPNDGQHWNRLHNNAQNLKNAGITAIWIPPAWKGTSQNDVGYGAYDLYDLGEFNQKGTVRTKYGTKAELERAIRSLKANGIQVYGDVVMNHKGGADFTERVQAVEVNPQNRNQEVSGTYQIEAWTGFNFPGRGNQHSSFKWRWYHFDGTDWDQSYQLANRIYKFRGKAWDWEVDTENGNYDYLMYADVDMDHPEVINELNRWGVWYANTLNLDGFRLDAVKHIKFSFLRDWLGHVRGQTGKNLFAVAEYWKNDLGALENYLSKTNWTMSAFDVPLHYNLYQASNSSGNYDMRNLLNGTLVQRHPSHAVTFVDNHDTQPGEALESFVQGWFKPLAYATILTREQGYPSVFYGDYYGIPSDGVPSYRQQIDPLLKARQQYAYGRQHDYFDHWDVIGWTREGNASHPNSGLATIMSDGPGGSKWMYVGRQKAGEVWHDMTGNRSGTVTINQDGWGHFFVNGGSVSVWVKR

SEQ ID NO: 44710 - protein, 478 aa, Bacillus sp. (in: firmicutes)
NGTIMQYFEWNVPNDGQHWNRLHNNAQNLKNAGITAIWIPPAWKGTSQNDVGYGAYDLYDLGEFNQKGTVRTKYGTKAELERAIRSLKANGIQVYGDVVMNHKGGADFTERVQAVEVNPQNRNQEVSGTYQIEAWTGFNFPGRGNQHSSFKWRWYHFDGTDWDQSRQLANRIYKFRGKAWDWEVDTENGNYDYLMYADVDMDHPEVINELNRWGVWYANTLNLDGFRLDAVKHIKFSFLRDWLGHVRGQTGKNLFAVAEYWKNDLGAVENYLSKTNWTMSAFDVPLHYNLYQASNSSGNYDMRNLLNGTLVQRHPSHAVTFVDNHDTQPGEALESFVQGWFKPLAYATILTREQGYPSVFYGDYYGIPSDGVPSYRQQIDPLLKARQQYAYGRQHDYFDHWDVIGWTREGNASHPNSGLATIMSDGPGGSKWMYVGRQKAGEVWHDMTGNRSGTVTINQDGWGHFFVNGGSVSVWVKR

SEQ ID NO: 44711 - protein, 478 aa, Bacillus sp.
NGTIMQYFEWNVPNDGQHWNRLHNNAQNLKNAGITAIWIPPAWKGTSQNDVGYGAYDLYDLGEFNQKGTVRTKYGTKAELERAIRSLKANGIQVYGDVVMNHKGGADFTERVQAVEVNPQNRNQEVSGTYQIEAWTGFNFPGRGNQHSSFKWRWYHFDGTDWDQSRQLANRIYKFDGKAWDWEVDTENGNYDYLMYADVDMDHPEVINELNRWGVWYANTLNLDGFRLDAVKHIKFSFMRDWLGHVRGQTGKNLFAVAEYWXNDLGALENYLSKTNWTMSAFDVPLHYNLYQASNSSGNYDMRNLLNGTLVQRHPSHAVTFVDNHDTQPGEALESFVQGWFKPLAYATILTREQGYPQVFYGDYYGIPSDGVPSYRQQIDPLLKARQQYAYGRQHDYFDHWDVIGWTREGNASHPNSGLATIMSDGPGGSKWMYVGRQKAGEVWHDMTGNRSGTVTINQDGWGHFFVNGGSVSVWVKR

SEQ ID NO: 44712 - protein, 478 aa, Bacillus sp.
NGTIMQYFEWNVPNDGQHWNRLHNNAQNLKNAGITAIWIPPAWKGTSQNDVGYGAYDLYDLGEFNQKGTVRTKYGTKAELERAIRSLKANGIQVYGDVVMNHKGGADFTERVQAVEVNPQNRNQEVSGTYQIEAWTGFNFPGRGNQHSSFKWRWYHFDGTDWDQSRQLANRIYKFDGKAWDWEVDTEXGNYDYLMYADVDMDHPEVINELNRWGVWYANTLNLDGFRLDAVKHIKFSFMRDWLGHVRGQTGKNLFAVAEYWKNDLGALENYLSKTNWTMSAFDVPLHYNLYQASNSSGNYDMRNLLNGTLVQRHPSHAVTFVDNHDTQPGEALESFVQGWFKPLAYATILTREQGYPQVFYGDYYGIPSDGVPSYRQQIDPLLKARQQYAYGRQHDYFDHWDVIGWTREGNASHPNSGLATIMSDGPGGSKWMYVGRQKAGEVWHDMTGNRSGTVTINQDGWGHFFVNGGSVSVWVKR

SEQ ID NO: 44713 - protein, 478 aa, Bacillus sp. (in: firmicutes)
NGTIMQYFEWNVPNDGQHWNRLHNNAQNLKNAGITAIWIPPAWKGTSQNDVGYGAYDLYDLGEFNQKGTVRTKYGTKAELERAIRSLKANGIQVYGDVVMNHKGGADFTERVQAVEVNPQNRNQEVSGTYQIEAWTGFNFPGRGNQHSSFKWRWYHFDGTDWDQSRQLANRIYKFRGKAWDWEVDTENGNYDYLMYADVDMDHPEVINELNRWGVWYANTLNLDGFRLDAVKHIKFSFMRDWLGHVRGQTGKNLFAIAEFWKNDLGALENYLSKTNWTMSAFDAPLHYNLYQASNSSGNYDMRNLLNGTLVQRHPSHAVTLVDNHDTQPGEALESFVQGWFKPLAYATILTREQGYPCVFYGDYYGIPSDGVPSYRQQIDPLLKARQQYAYGRQHDYFDHWDVIGWTREGNASHPNSGLATIMSDGPGGSKWMYVGRQKAGEVWHDMTGNRSGTVTINQDGWGHFFVNGGSVSVWVKR

SEQ ID NO: 44714 - protein, 478 aa, Bacillus sp. (in: firmicutes)
NGTIMQYFEWNVPNDGQHWNRLHNNAQNLKNAGITAIWIPPAWKGTSQNDVGYGAYDLYDLGEFNQKGTVRTKYGTKAELERAIRSLKANGIQVYGDVVMNHKGGADFTERVQAVEVNPQNRNQEVSGTYQIEAWTGFNFPGRGNQHSSFKWRWYHFDGTDWDQSRQLANRIYKFRGKAWDWEVDTENGNYDYLMYADVDMDHPEVINELNRWGVWYANTLNLDGFRLDAVKHIKFSFMRDWLGHVRGQTGKNLFAVAEFWKNDLGALENYLSKTNWTMSAFDAPLHYNLYQASNSSGNYDMRNLLNGTLVQRHPSHAVTLVDNHDTQPGEALESFVQGWFKPLAYATILTREQGYPSVFYGDYYGIPSDGVPSYRQQIDPLLKARQQYAYGRQHDYFDHWDVIGWTREGNASHPNSGLATIMSDGPGGSKWMYVGRQKAGEVWHDMTGNRSGTVTINQDGWGHFFVNGGSVSVWVKR

SEQ ID NO: 44715 - protein, 478 aa, Bacillus sp. (in: firmicutes)
NGTIMQYFEWNVPNDGQHWNRLHNNAQNLKNAGITAIWIPPAWKGTSQNDVGYGAYDLYDLGEFNQKGTVRTKYGTKAELERAIRSLKANGIQVYGDVVMNHKGGADFTERVQAVEVNPQNRNQEVSGTYQIEAWTGFNFPGRGNQHSSFKWRWYHFDGTDWDQSHQLANRIYKFRGKAWDWEVDTENGNYDYLMYADVDMDHPEVINELNRWGVWYANTLNLDGFRLDAVKHIKFSFMRDWLGHVRGQTGKNLFAVAEYWKNDLGALENYLSKTNWTMSAFDVPLHYNLYQASNSSGNYDMRNLLNGTLVQRHPSHAVTFVDNHDTQPGEALESFVQGWFKPLAYATILTREQGYPQVFYGDYYGIPSDGVPSYRQQIDPLLKARQQYAYGRQHDYFDHWDVIGWTREGNASHPNSGLATIMSDGPGGSKWMYVGRQKAGEVWHDMTGNRSGTVTINQDGWGHFFVNGGSVSVWVKR

SEQ ID NO: 44716 - protein, 478 aa, Bacillus sp. (in: firmicutes)
NGTIMQYFEWNVPNDGQHWNRLHNNAQNLKNAGITAIWIPPAWKGTSQNDVGYGAYDLYDLGEFNQKGTVRTKYGTKAELERAIRSLKANGIQVYGDVVMNHKGGADFTERVQAVEVNPQNRNQEVSGTYQIEAWTGFNFPGRGNQHSSFKWRWYHFDGTDWDQSRQLANRIYKFRGKAWDWEVDTENGNYDYLMYADVDMDHPEVINELNRWGVWYANTLNLDGFRLDAVKHIKFSFMRDWLGHVRGQTGKNLFAIAEYWKNDLGALENYLSKTNWTMSAFDIPLHYNLYQASNSSGNYDMRNLLNGTLVQRHPSHAVTFVDNHDTQPGEALESFVQGWFKPLAYATILTREQGYPSVFYGDYYGIPSDGVPSYRQQIDPLLKARQQYAYGRQHDYFDHWDVIGWTREGNASHPNSGLATIMSDGPGGSKWMYVGRQKAGEVWHDMTGNRSGTVTINQDGWGHFFVNGGSVSVWVKR

SEQ ID NO: 44717 - protein, 478 aa, Bacillus sp. (in: firmicutes)
NGTIMQYFEWNVPNDGQHWNRLHNNAQNLKNAGITAIWIPPAWKGTSQNDVGYGAYDLYDLGEFNQKGTVRTKYGTKAELERAIRSLKANGIQVYGDVVMNHKGGADFTERVQAVEVNPQNHNQEVSGTYQIEAWTGFNFPGRGNQHSSFKWRWYHFDGTDWDQSRQLANRIYKFRGKAWDWEVDTENGNYDYLMYADVDMDHPEVINELNRWGVWYANTLNLDGFRLDAVKHIKFSFIRDWLGHVRGQTGKNLFAVAEYWKNDLGALENYLSKTNWTMSAFDVPLHYNLYQASNSSGNYDMRNLLNGTLVQRHPSHAVTFVDNHDTQPGEALESFVQGWFKPLAYATILTREQGYPCVFYGDYYGIPSDGVPSYRQQIDPLLKARQQYAYGRQHDYFDHWDVIGWTREGNASHPNSGLATIMSDGPGGSKWMYVGRQKAGEVWHDMTGNRSGTVTINQDGWGHFFVNGGSVSAWVKR

SEQ ID NO: 44718 - protein, 478 aa, Bacillus sp. (in: firmicutes)
NGTIMQYFEWNVPNDGQHWNRLHNNAQNLKNAGITAIWIPPAWKGTSQNDVGYGAYDLYDLGEFNQKGTVRTKYGTKAELERAIRSLKANGIQVYGDVVMNHKGGADFTEYVQAVEVNPQNRNQEVPGTYNIEAWTGFNFPGRGNQHSSFKWRWYHFDGTDWDQSRQLANRIYKFRGKAWDWEVDTEFGNYDYLMYADVDMDHPEVINELNRWGVWYANTLNLDGFRLDAVKHIKFSFMRDWLGHVRGQTGKNLFAVAEYWKNDLGALENYLSKTNWTMSAFDVPLHYNLYQASNSSGNYDMRNLLNGTLVQRHPSHAVTFVDNHDTQPGEALESFVQGWFKPLAYATILTREQGYPSVFYGDYYGIPSDGVPSYRQQIDPLLKARQQYAYGRQHDYFDHWDVIGWTREGNASHPNSGLATIMSDGPGGSKWMYVGRQKAGEVWHDMTGNRSGTVTINQDGWGHFFVNGGSVSVWVKR

SEQ ID NO: 44719 - protein, 478 aa, Bacillus sp. (in: firmicutes)
NGTIMQYFEWNVPNDGQHWNRLHNNAQNLKNAGITAIWIPPAWKGTSQNDVGYGAYDLYDLGEFNQKGTVRTKYGTKAELERAIRSLKANGIQVYGDVVMNHKGGADFTERVQAVEVNPQNLNQEVSGTYQIEAWTGFNFPGRGNQHSSFKWRWYHFDGTDWDQSRQLANRIYKFRGKAWDWEVDTENGNYDYLMYADVDMDHPEVINELNRWGVWYANTLNLDGFRLDAVKHIKFSFVRDWLGHVRGQTGKNLFAVAEYWKNDLGALENYLSKTNWTMSAFDVPLHYNLYQASNSSGNYDMRNLLNGTLVQRHPSHAVTFVDNHDTQPGEALESFVQGWFKPLAYATILTREQGYPSVFYGDYYGIPSDGVPSYRQQIDPLLKARQQYAYGRQHDYFDHWDVIGWTREGNASHPNSGLATIMSDGPGGSKWMYVGRQKAGEVWHDMTGNRSGTVTINQDGWGHFFVNGGSVSVWVKR

SEQ ID NO: 44720 - protein, 478 aa, Bacillus sp. (in: firmicutes)
NGTIMQYFEWNVPNDGQHWNRLHNNAQNLKNAGITAIWIPPAWKGTSQNDVGYGAYDLYDLGEFNQKGTVRTKYGTKAELERAIRSLKANGIQVYGDVVMNHKGGADTTERVQAVEVNPQNRNQEVSGTYQIEAWTGFNFPGRGNQHSSFKWRWYHFDGTDWDQSKQLANRIYKFRGKAWDWEVDTENGNYDYLMYADVDMDHPEVINELNRWGVWYANTLNLDGFRLDAVKHIKFSFMRDWLGHVRGQTGKNLFAVAEYWKNDLVALENYLSKTNWTMSAFDVPLHYNLYQASNSSGNYDMRNLLNGTLVQRHPSHAVTFVDNHDTQPGEALESFVQGWFKPLAYATILTREQGYPQVFYGDYYGIPSDGVPSYRQQIDPLLKARQQYAYGRQHDYFDHWDVIGWTREGNASHPNSGLATIMSDGPGGSKWMYVGRQKAGEVWHDMTGNRSGTVTINQDGWGHFFVNGGSVSVWVKR

SEQ ID NO: 44721 - protein, 478 aa, Bacillus sp. (in: firmicutes)
NGTIMQYFEWNVPNDGQHWNRLHNNAQNLKNAGITAIWIPPAWKGTSQNDVGYGAYDLYDLGEFNQKGTVRTKYGTKAELERAIRSLKANGIQVYGDVVMNHKGGADFTESVQAVEVNPQNRNQEVFGTYQIEAWTGFNFPGRGNQHSSFKWRWYHFDGTDWDQSRQLANRIYKFNGKAWDWEVDTEFGNYDYLMYADVDMDHPEVINELNRWGVWYANTLNLDGFRLDAVKHIKFSFMRDWLGHVRGQTGKNLFAVAEYWKNDLGALENYLSKTNWTMSAFDVPLHYNLYQASNSSGNYDMRNLLNGTLVQRHPSHAVTFVDNHDTQPGEALESFVQGWFKPLAYATILTREQGYPSVFYGDYYGIPSDGVPSYRQQIDPLLKARQQYAYGRQHDYFDHWDVIGWTREGNASHPNSGLATIMSDGPGGSKWMYVGRQKAGEVWHDMTGNRSGTVTINQDGWGHFFVNGGSVSVWVKR

SEQ ID NO: 44722 - protein, 478 aa, Bacillus sp. (in: firmicutes)
NGTIMQYFEWNVPNDGQHWNRLHNNAQNLKNAGITAIWIPPAWKGTSQNDVGYGAYDLYDLGEFNQKGTVRTKYGTKAELERAIRSLKANGIQVYGDVVMNHKGGADFTERVQAVEVNPQNRNQEVSGTYQIEAWTGFNFPGRGNQHSSFKWRWYHFDGTDWDQSRQLANRIYKFRGKAWDWEVDTENGNYDYLMYADVDMDHPEVINELNRWGVWYANTLNLDGFRLDAVKHIKFSFMRDWLGHVRGQTGKNLFAIAEYWKNDLGALENYLSKTNWTMSAFDTPLHYNLYQASNSSGNYDMRNLLNGTLVQRHPSHAVTFVDNHDTQPGEALESFVQGWFKPLAYATILTREQGYPKVFYGDYYGIPSDGVPSYRQQIDPLLKARQQYAYGRQHDYFDHWDVIGWTREGNASHPNSGLATIMSDGPGGSKWMYVGRQKAGEVWHDMTGNRSGTVTINQDGWGHFFVNGGSVSVWVKR

SEQ ID NO: 44723 - protein, 478 aa, Bacillus sp. (in: firmicutes)
NGTIMQYFEWNVPNDGQHWNRLHNNAQNLKNAGITAIWIPPAWKGTSQNDVGYGAYDLYDLGEFNQKGTVRTKYGTKAELERAIRSLKANGIQVYGDVVMNHKGGADFTERVQAVEVNPQNRNQEVSGTHQIEAWTGFNFPGRGNQHSSFKWRWYHFDGTDWDQSRQLANRIYKFRGKAWDWEVDTENGNYDYLMYADVDMDHPEVINELNRWGVWYANTLNLDGFRLDAVKHIKFSFMRDWLGHVRGQTGKNLFAVAEYWKNDLGALENYLSKTNWTMSAFDVPLHYNLYQASNSSGNYDMRNLLNGTLVQRHPSHAVTFVDNHDTQPGEALESFVQGWFKPLAYATILTREQGYPQVFYGDYYGIPSDGVPSYRQQIDPLLKARQQYAYGRQHDYFDHWDVIGWTREGNASHPNSGLATIMSDGPGGSKWMYVGRQKAGEVWHDMTGNRSGTVTINQDGWGHFFVNGGSVSVWVKR

SEQ ID NO: 44724 - protein, 478 aa, Bacillus sp. (in: firmicutes)
NGTIMQYFEWNVPNDGQHWNRLHNNAQNLKNAGITAIWIPPAWKGTSQNDVGYGAYDLYDLGEFNQKGTVRTKYGTKAELERAIRSLKANGIQVYGDVVMNHKGGADFTERVQAVEVNPQNRNQEVSGTYQIEAWTGFNFPGRGNQHSSFKWRWYHFDGTDWDQSRQLANRIYKFRGKAWDWEVDTEFGNYDYLMYADVDMDHPEVINELNRWGVWYANTLNLDGFRLDAVKHIKFSFMRDWLGHVRGQTGKNLFAVAEYWKNDLGALENYLSKTNWTMSAFDVPLHYNLYQASNSSGNYDMRNLLNGTLVQRHPSHAVTFVDNHDTQPDEALESFVQGWFKPLAYATILTREQGYPSVFYGDYYGIKSNGVPSYRQQIDPLLKARQQYAYGRQHDYFDHWDVIGWTREGNASHPNSGLATIMSDGPGGSKWMYVGRQKAGEVWHDMTGNRSGTVTINQDGWGHFFVNGGSVSVWVKR

SEQ ID NO: 44725 - protein, 478 aa, Bacillus sp. (in: firmicutes)
NGTIMQYFEWNVPNDGQHWNRLHNNAQNLKNAGITAIWIPPAWKGTSQNDVGYGAYDLYDLGEFNQKGTVRTKYGTKAELERAIRSLKANGIQVYGDVVMNHKGGADFTERVQAVEVNPQNLNQEVSGTYQIEAWTGFNFPGRGNQHSSFKWRWYHFDGTDWDQSRQLANRIYKFRGKAWDWEVDTENGNYDYLMYADVDMDHPEVINELNRWGVWYANTLNLDGFRLDAVKHIKFSFMRDWLGHVRGQTGKNLFAVAEYWKNDLGALENYLSKTNWTMSAFDVPLHYNLYQASNSSGNYDMRNLLNGTLVQRHPSHAVTFVDNHDTQPGEALESFVQGWFKPLAYATILTREQGYPSVFYGDYYGIPSDGVPSYRQQIDPLLKARQQYAYGRQHDYFDHWDVIGWTREGNASHPNSGLATIMSDGPGGSKWMYVGRQKAGEVWHDMTGNRSGTVTINQDGWGHFFVNGGSVSVWVKR

SEQ ID NO: 44726 - protein, 478 aa, Bacillus sp. (in: firmicutes)
NGTIMQYFEWNVPNDGQHWNRLHNNAQNLKNAGITAIWIPPAWKGTSQNDVGYGAYDLYDLGEFNQKGTVRTKYGTKAELERAIRSLKANGIQVYGDVVMNHKGGADFTERVQAVEVNPQNRNQEVSGTYQIEAWTGFNFPGRGNQHSSFKWRWYHFDGTDWDFARQLANRIYKFRGKAWDWEVDTENGNYDYLMYADVDMDHPEVINELNRWGVWYANTLNLDGFRLDAVKHIKFSFMRDWLGHVRGQTGKNLFAVAEYWKNDLGALENYLSKTNWTMSAFDVPLHYNLYQASNSSGNYDMRNLLNGTLVQRHPSHAVTFVDNHDTQPGEALESFVQGWFKPLAYATILTREQGYPQVFYGDYYGIPSDGVPSYRQQIDPLLKARQQYAYGRQHDYFDHWDVIGWTREGNASHPNSGLATIMSDGPGGSKWMYVGRQKAGEVWHDMTGNRSGTVTINQDGWGHFFVNGGSVSVWVKR

SEQ ID NO: 44727 - protein, 478 aa, Bacillus sp. (in: firmicutes)
NGTIMQYFEWNVPNDGQHWNRLHNNAQNLKNAGITAIWIPPAWKGTSQNDVGYGAYDLYDLGEFNQKGTVRTKYGTKAELERAIRSLKANGIQVYGDVVMNHKGGADFTERVQAVEVNPQNRNQEVSGTYQIEAWTGFNFPGRGNQHSSFKWRWYHFDGTDWDQSRQLANRIYKFRGKAWDWEVDTENGNYDYLMYADVDMDHPEVINELNRWGVWYANTLNLDGFRLDAVKHIKFSFMRDWLGHVRGQTGKNLFAIAEFWKNDLGALENYLSKTNWTMSAFDVPLHYNLYQASNSSGNYDMRNLLNGTLVQRHPSHAVTFVDNHDTQPGEALESFVQGWFKPLAYATILTREQGYPKVFYGDYYGIPSDGVPSYRQQIDPLLKARQQYAYGRQHDYFDHHDIIGWTREGNASHPNSGLATIMSDGPGGSKWMYVGRQKAGEVWHDMTGNRSGTVTINQDGWGHFFVNGGSVSVWVKR

SEQ ID NO: 44728 - protein, 478 aa, Bacillus sp. (in: firmicutes)
NGTIMQYFEWNVPNDGQHWNRLHNNAQNLKNAGITAIWIPPAWKGTSQNDVGYGAYDLYDLGEFNQKGTVRTKYGTKAELERAIRSLKANGIQVYGDVVMNHKGGADFTERVQAVEVNPQNRNQEVSGTYQIEAWTGFNFPGRGNQHSSFKWRWYHFDGTDWDQSRQLANRIYKFRGKAWDWEVDTENGNYDYLMYADVDMDHPEVINELNRWGVWYANTLNLDGFRLDAVKHIKFSFMRDWLGHVRGQTGKNLFAIGEFWKNDLGALENYLSKTNWTMSAFDVPLHYNLYQASNSSGNYDMRNLLNGTLVQRHPSHAVTFVDNHDTQPGEALESFVQGWFKPLAYATILTREQGYPQVFYGDYYGIPSDGVPSYRQQIDPLLKARQQYAYGRQHDYFDHWDVIGWTREGNASHPNSGLATIMSDGPGGSKWMYVGRQKAGEVWHDMTGNRSGTVTINQDGWGHFFVNGGSVSVWVKR

SEQ ID NO: 44729 - protein, 478 aa, Bacillus sp. (in: firmicutes)
NGTIMHYFEWNVPNDGQHWNRLHNNAQNLKNAGITAIWIPPAWKGTSQNDVGYGAYDLYDLGEFNQKGTVRTKYGTKAELERAIRSLKANGIQVYGDVVMNHKGGADFTERVQAVEVNPQNRNQEVSGTYQIEAWTGFNFPGRGNQHSSFKWRWYHFDGTDWDQSRQLANRIYKFRGKAWDWEVDTENGNYDYLMYADVDMDHPEVINELNRWGVWYANTLNLDGFRLDAVKHIKFSFMRDWLGHVRGQTGKNLFAVAEFWKNDLGALENYLSKTNWTMSAFDVPLHYNLYQASNSSGNYDMRNLLNGTLVQRHPSHAVTFVDNHDTQPGEALESFVQGWFKPLAYATILTREQGYPCVFYGDYYGIPSDGVPSYRQQIDPLLKARQQYAYGRQHDYFDHWDVIGWTREGNASHPNSGLATIMSDGPGGSKWMYVGRQKAGEVWHDMTGNRSGTVTINQDGWGHFFVNGGSVSVWVKR

SEQ ID NO: 44730 - protein, 478 aa, Bacillus sp.
NGTIMQYFEWNVPNDGQHWNRLHNNAQNLKNAGITAIWIPPAWKGTSQNDVGYGAYDLYDLGEFNQKGTVRTKYGTKAELERAIRSLKANGIQVYGDVVMNHKGGADFTERVQAVEVNPQNRNQEVSGTYQIEAWTGFNFPGRGNQHSSFKWRWYHFDGTDWDQSRQLANRIYKFRGKAWDWEVDTENGNYDYLMYADVDMDHPEVINXLNRWGVWYANTLNLDGFRLDAVKHIKFSFMRDWLGHVRGQTGKNLFAVAEYWKNDLGALENYLSKTNWTMSAFDVPLHYNLYQASNSSGNYDMRNLLNGTLVQRHPSHAVTFVDNHDTQPGEALESFVQGWFKPLAYATILTREQGYPQVFYGDYYGIPSDGVPSYRQQIDPLLKARQQYAYGRQHDYFDHWDVIGWTREGNASHPNSGLATIMSDGPGGSKWMYVGRQKAGEVWHDMTGNRSGTVTINQDGWGHFFVNGGSVSVWVKR

SEQ ID NO: 44731 - protein, 478 aa, Bacillus sp. (in: firmicutes)
NGTIMQYFEWNVPNDGQHWNRLHNNAQNLKNAGITAIWIPPAWKGTSQNDVGYGAYDLYDLGEFNQKGTVRTKYGTKAELERAIRSLKANGIQVYGDVVMNHKGGADFTERVQAVEVNPQNRNQEVSGTYQIEAWTGFNFPGRGNQHSSFKWRWYHFDGTDWDQSRQLANRIYKFRGKAWDWEVDTENGNYDYLMYADVDMDHPEVINELNRWGVWYANTLNLDGFRLDAVKHIKFSFMRDWLGHVRGQTGKNLFAVAEFWKNDLGALENYLSKTNWTMSAFDVPLHYNLYQASNSSGNYDMRNLLNGTLVQRHPSHAVTFVDNHDTQPGEALESFVQGWFKPLAYATILTREQGYPSVFYGDYYGIPSDGVPSYRQQIDPLLKARQQYAYGRQHDYFDHWDVIGWTREGNASHPNSGLATIMSDGPGGSKWMYVGRQKAGEVWHDMTGNRSGTVTINQDGWGHFFVNGGSVSVWVKR

SEQ ID NO: 44732 - protein, 478 aa, Bacillus sp. (in: firmicutes)
NGTIMQYFEWNVPNDGQHWNRLHNNAQNLKNAGITAIWIPPAWKGTSQNDVGYGAYDLYDLGEFNQKGTVRTKYGTKAELERAIRSLKANGIQVYGDVVMNHKGGADFTERVQAVEVNPQNRNQEVSGTYQIEAWTGFNFPGRGNQHSSFKWRWYHFDGTDWDQSHQLANRIYKFRGKAWDWEVDTENGNYDYLMYADVDMDHPEVINELNRWGVWYANTLNLDGFRLDAVKHIKFSFMRDWLGHVRGQTGKNLFAVAEYWKNDLGALENYLSKTNWTMSAFDVPLHYNLYQASHSSGNYDMRNLLNGTLVQRHPSHAVTFVDNHDTQPGEALESFVQGWFKPLAYATILTREQGYPSVFYGDYYGIPSDGVPSYRQQIDPLLKARQQYAYGRQHDYFDHWDVIGWTREGNASHPNSGLATIMSDGPGGSKWMYVGRQKAGEVWHDMTGNRSGTVTINQDGWGHFFVNGGSVSVWVKR

SEQ ID NO: 44733 - protein, 478 aa, Bacillus sp. (in: firmicutes)
NGTIMQYFEWNVPNDGQHWNRLHNNAQNLKNAGITAIWIPPAWKGTSQNDVGYGAYDLYDLGEFNQKGTVRTKYGTKAELERAIRSLKANGIQVYGDVVMNHKGGADFTERVQAVEVNPQNRNQEVSGTYQIEAWTGFNFPGRGNQHSSFKWRWYHFDGTDWDQSRQLANRIYKFRGKAWDWEVDTENGNYDYLMYADVDMDHPEVINELNRWGVWYANTLNLDGFRLDAVKHIKFSFMRDWLGHVRGQTGKNLFATAEYWKNDLGALENYLSKTNWTMSAFDAPLHYNLYQASNSSGNYDMRNLLNGTLVQRHPSHAVTLVDNHDTQPGEALESFVQGWFKPLAYATILTREQGYPSVFYGDYYGIPSDGVPSYRQQIDPLLKARQQYAYGRQHDYFDHWDVIGWTREGNASHPNSGLATIMSDGPGGSKWMYVGRQKAGEVWHDMTGNRSGTVTINQDGWGHFFVNGGSVSVWVKR

SEQ ID NO: 44734 - protein, 478 aa, Bacillus sp. (in: firmicutes)
NGTIMQYFEWNVPNDGQHWNRLHNNAQNLKNAGITAIWIPPAWKGTSQNDVGYGAYDLYDLGEFNQKGTVRTKYGTKAELERAIRSLKANGIQVYGDVVMNHKGGADFTERVQAVEVNPQNNNQEVSGTYQIEAWTGFNFPGRGNQHSSFKWRWYHFDGTDWDQSRQLANRIYKFRGKAWDWEVDTENGNYDYLMYADVDMDHPEVINELNRWGVWYANTLNLDGFRLDAVKHIKFSFMRDWLGHVRGQTGKNLFAVAEYWKNDLGALENYLSKTNWTMSAFDVPLHYNLYQASNSSGNYDMRNLLNGTLVQRHPSHAVTFVDNHDTQPGEALESFVQGWFKPLAYATILTREQGYPSVFYGDYYGIPSDGVPSYRQQIDPLLKARQQYAYGRQHDYFDHWDVIGWTREGNASHPNSGLATIMSDGPGGSKWMYVGRQKAGEVWHDMTGNRSGTVTINQDGWGHFFVNGGSVSVWVKR

SEQ ID NO: 44735 - protein, 478 aa, Bacillus sp. (in: firmicutes)
NGTIMQYFEWNVPNDGQHWNRLHNNAQNLKNAGITAIWIPPAWKGTSQNDVGYGAYDLYDLGEFNQKGTVRTKYGTKAELERAIRSLKANGIQVYGDVVMNHKGGADFTERVQAVEVNPQNRNQEVSGTYQIEAWTGFNFPGRGNQHSSFKWRWYHFDGTDWDQSRQLANRIYKFRGKAWDWEVDTENGNYDYLLYADVDMDHPEVINELNRWGVWYANTLNLDGFRLDAVKHIKFSFMRDWLGHVRGQTGKNLFAVAEYWKNDLGALENYLSKTNWTMSAFDVPLHYNLYQASNSSGNYDMRNLLNGTLVQRHPSHAVTFVDNHDTQPGEALESFVQGWFKPLAYATILTREQGYPQVFYGDYYGIPSDGVPSYRQQIDPLLKARQQYAYGRQHDYFDHWDVIGWTREGNASHPNSGLATIMSDGPGGSKWMYVGRQKAGEVWHDMTGNRSGTVTINQDGWGHFFVNGGSVSVWVKR

SEQ ID NO: 44736 - protein, 478 aa, Bacillus sp.
NGTIMQYFEWNVPNDGQHWNRLHNNAQNLKNAGITAIWIPPAWKGTSQNDVGYGAYDLYDLGEFNQKGTVRTKYGTKAELERAIRSLKANGIQVYGDVVMNHKGGADFTERVQAVEVNPQNRNQEVSGTYEIEAWTGFNFPGRGNQHSSFKWRWYHFDGTDWDQSRQLSNRIYKFRGKAWDWEVDTEFGNYDYLMYADVDMNHPEVINELNRWGVWYANTLNLDGFRLDAVKHIQFSFMRNWLGHVRGQTGKNLFAVAEYWKNDLGALENYLSKTNWTMSAFDVPLHYNLYQASNSGGNYDMRNLLNGTLVQRHPSHAVTFVDNHDTQPGEALESFVQGWFKPLAYATILTREQGYPQVFYGDYYGIPSDGVPSYRQQIDPLLKARQQYAYGRQHDYFDHWDVIGWTREGNASHPNSGLATIMSDGPGGSKWMYVGRQKAGEVWHDITGNRSGTVTINQDGWGQFFVNGGSVSVWVKR

SEQ ID NO: 44737 - protein, 478 aa, Bacillus sp.
NGTIMQYFEWNVPNDGQHWNRLHNNAQNLKNAGITAIWIPPAWKGTSQNDVGYGAYDLYDLGEFNQKGTVRTKYGTKAELERAIRSLKANGIQVYGDVVMNHKGGADFTERVQAVEVNPQNRNQEVSGTYQIEAWTGFNFPGRGNQHSSFKWRWYHFDGTDWDQSRQLANRIYKFRGKAWDWEVDTENGNYDYLMYADVDMDHPXVINELNRWGVWYANTLNLDGFRLDAVKHIKFSFMRDWLGHVRGQTGKNLFAVAEYWKNDLGALENYLSKTNWTMSAFDVPLHYNLYQASNSSGNYDMRNLLNGTLVQRHPSHAVTFVDNHDTQPGEALESFVQGWFKPLAYATILTREQGYPQVFYGDYYGIPSDGVPSYRQQIDPLLKARQQYAYGRQHDYFDHWDVIGWTREGNASHPNSGLATIMSDGPGGSKWMYVGRQKAGEVWHDMTGNRSGTVTINQDGWGHFFVNGGSVSVWVKR

SEQ ID NO: 44738 - protein, 478 aa, Bacillus sp. (in: firmicutes)
NGTIMQYFEWNVPNDGQHWNRLHNNAQNLKNAGITAIWIPPAWKGTSQNDVGYGAYDLYDLGEFNQKGTVRTKYGTKAELERAIRSLKANGIQVYGDVVMNHKGGADFTERVQAVEVNPQNRNQEVSGTYQIEAWTGFNFPGRGNQHSSFKWRWYHFDGTDWDQSRQLANRIYKFRGKAWDWEVDTENGNYDYLMYADVDMDHPEVINELNRWGVWYANTLNLDGFRLDAVKHIKFSFMRDWLGHVRGQTGKNLFATGELWKNDLGALENYLSKTNWTMSAFDVPLHYNLYQASNSSGNYDMRNLLNGTLVQRHPSHAVTLVDNHDTQPGEALESFVQGWFKPLAYATILTREQGYPCVFYGDYYGIPSDGVPSYRQQIDPLLKARQQYAYGRQHDYFDHWDVIGWTREGNASHPNSGLATIMSDGPGGSKWMYVGRQKAGEVWHDMTGNRSGTVTINQDGWGHFFVNGGSVSVWVKR

SEQ ID NO: 44739 - protein, 477 aa, Bacillus sp. TS-23
NETMMQYFEWDLPNDGTLWTKVKNEAANLSSLGITALWLPPAWKGTSQSDVGYGAYDLYDLGEFNQKGTIRTKYGTKTQYIQAIQAAKAAGMQVYADVVFNHKAGADGTEFVDAVEVDPSNRNQETSGTYQIQAWTKFDFPGRGNTYSSFKWRWYHFDGTDWDESRKLNRIYKFRSKAWDWEVDTENGNYDYLMFADYDMDHPEVVTELKNWGTWYVNTTNIDGFRLDAVKHIKYSFFPDWLTYVRNQTGKNLFAVGEFWSYDVNKLHNYITKTNGSMSLFDAPLHNNFYTASKSSGYFDMRYLLNNTLMKDQPSLAVTLVDNHDTQPGQSLQSWVEPWFKPLAYAFILTRQEGYPCVFYGDYYGIPKYNIPGLKSKIDPLLEARRDYAYGTQRDYIDHQDIIGWTREGIDTKPNSGLAALITDGPGGSKWMYVGKKHAGKVFYDLTGNRSDTVTINADGWGEFKVNGGSVSIWVAK

SEQ ID NO: 44740 - protein, 483 aa, Bacillus sp. YR288
NGTMMQYFEWYVPNDGQHWNRLRNDAAYLKSIGVSAIWTPPAYKGTSQNDVGYGAYDLYDLGEFNQKGTIRTKYGTKAELKSAVSTLKSNGIKVYGDVVMNHKGGADYTENVTAVEVNPSNRNQETSDEYTIQAWTGFNFPGRGTTHSPFKWQWYHFDGTDWDQSRNASRIFKFRGTGKAWDWPVSSEFGNYDYLMYADLDFDHPDVRNEMKNWGVWYANEVGLDGFRLDAVKHIKHSYLGDWVNHVRTKTGKEMWTVAEYWQNDVNAINNYLAKVNYNHSVFDAPLHYNFHYASQSGGNYDMRNLLNGTVVAAHPTKAVTLVENHDSQPGQSLESVVQPWFKPLAYAFILTRAEGYPSIFYGDMYGTKGNSSYEIPALKTKIEPLLKARKDYAYGTQHNYMDHWDVIGWTREGDSTKEKSGLATLVTDGSAGGSKWMYVGKQNAGEVWYDITGNRTDKITINTDGWGNFQVNGGSVSVYVQQ

SEQ ID NO: 44741 - protein, 482 aa, Bacillus sp. YR288
NGTMMQYFEWYVPNDGQHWNRLRNDAAYLKSIGVNAIWTPPAYKGTSQNDVGYGAYDLYDLGEFNQKGTIRTKYGTKAELKSAVSTLKSNGIQVYGDVVMNHKGGADYTENVTAVEVNPSNRNQETSDEYTIQAWTGFNFPGRGTTHSPFKWQWYHFDGTDWDQSRNASRIFKFRGTGKAWDWEVSSENGNYDYLLYADLDYDHPDVINEMKNWGVWYANEVGLDGFRLDAVKHIKFQFLGDWVNHVRTKTGKEMFTVAEYWQNDVNAINNYLAKVNYNHSVFDAPLHYNFHYASQSGGNYDMRNLLNGTVVAAHPTKAVTLVENHDSQPGQSLESVVQPWFKPLAYAFILTRAEGYPSIFYGDMYGTKGNSSYEIPALKTKIEPLLKARKDYAYGTQHNYMDHWDVIGWTREGDSTKEKSGLATLVTDGAGGSKWMYVGKQNAGEVWYDITGNRTDKITINTDGWGTFQVNKESVSVYVQQ

SEQ ID NO: 44742 - protein, 483 aa, Bacillus sp. YR288
NRTMMQYFEWYVPNDGQHWNRLRNDAAYLKSIGVSAIWTPPAYKGTSQNDVGYGAYDLYDLGEFNQKGTIRTKYGTKAELKSAVSTLKSNGIKVYGDVVMNHKGGADYTENVTAVEVNPSNRNQETSDEYTIQAWTGFNFPGRGTTHSPFKWQWYHFDGTDWDQSRNASRIFKFRGTGKAWDWEVSSENGNYDYLMYADLDFDHPDVRNEMKNWGVWYANEVGLDGFRLDAVKHIKHSYLGDWVNHVRTKTGKEMWTVAEYWQNDVNAINNYLAKVNYNHSVFDAPLHYNFHYASQSGGNYDMRNLLNGTVVAAHPTKAVTLVENHDSQPGQSLESVVQPWFKPLAYAFILTRAEGLPSIFYGDMYGTKGNSSYEIPALKTKIEPLLKARKDYAYGTQHNYMDHWDVIGWTREGDSTKEKSGLATLVTDGSAGGSKWMYVGKQNAGEVWYDITGNRTDKITINTDGWGNFQVNGGSVSVYVQQ

SEQ ID NO: 44743 - protein, 477 aa, Bacillus sp. TS-23
NETMMQYFEWDLPNDGTLWTKVKNEAANLSSLGITALWLPPAWKGTSQSDVGYGAYDLYDLGEFNQKGTIRTKYGTKTQYIQAIQAAKAAGMQVYADVVFNHKAGADGTEFVDAVEVDPSNRNQETSGTYQIQAWTKFDFPGRGNTYSSFKWRWYHFDGTDWDESRKLNRIYKFTGKAWDWEVDTENGNYDYLMFADYDMDHPEVVTELKNWGTWYVNTTNIDGFRLDAVKHIKYSFFPDWLTYVRNQTGKNLFAVGEFWSYDVNKLHNYITKTNGSMSLFDAPLHNNFYTASKSSGYFDMRYLLNNTLMKDQPSLAVTLVDNHDTQPGQSLQSWVEPWFKPLAYAFILTRQEGYPCVFYGDYYGIPKYNIPGLKSKIDPLLEARRDYAYGTQRDYIDHQDIIGWTREGIDTKPNSGLAALITDGPGGSKWMYVGKKHAGKVFYDLTGNRSDTVTINADGWGEFKVNGGSVSIWVAK

SEQ ID NO: 44744 - protein, 482 aa, Bacillus sp. YR288
NGTMMQYFEWYVPNDGQHWNRLRNDAAYLKSIGVSAIWTPPAYKGTSQNDVGYGAYDLYDLGEFNQKGTIRTKYGTKAELKSAVSTLKSNGIQVYGDVVMNHKGGADYTENVTAVEVNPSNRNQETSDEYTIQAWTGFNFPGRGTTHSPFKWQWYHFDGTDWDQSRNASRIFKFRGTGKAWDWEVSSENGNYDYLLYADLDYDHPDVRNEMKNWGVWYANEVGLDGFRLDAVKHIKFQFLGDWVNHVRTKTGKTMFTVAEYWQNDVNAINNYLAKVNYNHSVFDAPLHYNFHYASQSGGNYDMRNLLNGTVVAAHPTKAVTLVENHDSQPGQSLESVVQPWFKPLAYAFILTRAEGLPSIFYGDMYGTKGNSSYEIPALKTKIEPLLKARKDYAYGTQHNYMDHWDVIGWTREGDSTKEKSGLATLVTDGAGGSKWMYVGKQNAGEVWYDITGNRTDKITINTDGWGNFQVNKGSVSVYVQQ

SEQ ID NO: 44745 - protein, 482 aa, Synthetic construct
NGTLMQYFEWYTPNDGQHWKRLQNDAEHLSDIGITAVWIPPAYKGLSQSDNGYGPYDLYDLGEFQQKGTVRTKYGTKSELQDAIGSLHSRNVQVYGDVVLNHKAGADATEWVDAVEVNPSNRNQEVSGTYKIQAWTKFDFPGRGNTYSSFKWRWYHFDGTDWDQSRQLNRIYKFRGTGKAWDWEVDTENGNYDYLMFADLDYDHPDVVAETKKWGIWYANELSLDGFRIDAAKHIKFSFLRDWVQAVRQATGKEMFTVAEYWQNNAGKLENYLNKTSFNQSVFDVPLHFNLQAASSQGGGYDMRRLLDGTVVSRHPEKAVTFVENHDTQPGQSLESTVQTWFKPLAYAFILTRESGYPQVFYGDMYGTKGTSPKEIPSLKDNIEPILKARKEYAYGPQHDYIDHPDVIGWTREGDSSAAKSGLAALITDGPGGSKRMYAGLKNAGETWYDITGNRSDTVKIGSDGWGEFHVNDGSVSIYVQK

SEQ ID NO: 44746 - protein, 477 aa, Bacillus sp. TS-23
NETMMQYFEWDLPNDGTLWTKVKNEAANLSSLGITALWLPPAWKGTSQSDVGYGAYDLYDLGEFNQKGTIRTKYGTKTQYIQAIQAAKAAGMQVYADVVFNHKAGADGTEFVDAVEVDPSNRNQETSGTYQIQAWTKFDFPGRGNTYSSFKWRWYHFDGTDWDESRKLNRIYKFSGKAWDWEVDTENGNYDYLMFADYDMDHPEVVTELKNWGTWYVNTTNIDGFRLDAVKHIKYSFFPDWLTYVRNQTGKNLFAVGEFWSYDVNKLHNYITKTNGSMSLFDAPLHNNFYTASKSSGYFDMRYLLNNTLMKDQPSLAVTLVDNHDTQPGQSLQSWVEPWFKPLAYAFILTRQEGYPCVFYGDYYGIPKYNIPGLKSKIDPLLEARRDYAYGTQRDYIDHQDIIGWTREGIDTKPNSGLAALITDGPGGSKWMYVGKKHAGKVFYDLTGNRSDTVTINADGWGEFKVNGGSVSIWVAK

SEQ ID NO: 44747 - protein, 482 aa, Unidentified
NGTLMQYFEWYLPNDGAHWQRLHNDAGNLANKGINAVWIPPAYKGTSQNDVGYGAYDLYDLGEFNQKGTIRTKYGTKAQLKSAISALQSQNINVYGDVVMNHKGGADFTQPVTVVQVDPNNRNNEISGDYQIDAWTGFNFPGRGNTYSNFKWSWYHFDGTDWDERRDQSGVYKFRGTGKAWDWEVSNERGNYDYLMYADLDFSHPDVANEMKNWGTWYANELNLDGFRLDAVKHIKHDYLGEWVSHVRSQTGKNLFTVAEYWQNDINALNNYLAKTNYNHSIFDAPLHYNFHYASNSNGNYDMRNILNGTVVKQHPSLAVTLVENHDSQPGQALESVVGTWFKPLAYAFILTRQQGYPSVFYGDYYGTNGDSSYEIPSLKNKIDPLLTARKNFAYGVQHDYLDHWDIIGWTREGEGTRQKSGLATLITDGPGGSKWMYVGRQNAGEVWYDMTGNRSTTVTINNDGWGQFYVNGGSVSVYVQK

SEQ ID NO: 44748 - protein, 483 aa, Bacillus sp. YR288
NRTMMQYFEWYVPNDGQHWNRLRNDAAYLKSIGVSAIWTPPAYKGTSQNDVGYGAYDLYDLGEFNQKGTIRTKYGTKAELKSAVSTLKSNGIKVYGDVVMNHKGGADYTENVTAVEVNPSNRNQETSDEYTIQAWTGFNFPGRGTTHSPFKWQWYHFDGTDWDQSRNASRIFKFRGTGKAWDLEVSSENGNYDYLMYADLDFDHPDVRNEMKNWGVWYANEVGLDGFRLDAVKHIKHSYLGDWVNHVRTKTGKEMFTVAEYWQNDVNAINNYLAKVNYNHSVFDAPLHYNFHYASQSGGNYDMRNLLNGTVVAAHPTKAVTLVENHDSQPGQSLESVVQPWFKPLAYAFILTRAEGLPSIFYGDMYGTKGNSSYEIPALKTKIEPLLKARKDYAYGTQHNYMDHPDVIGWTREGDSTKEKSGLATLVTDGSAGGSKWMYVGKQNAGEVWYDITGNRTDKITINTDGWGNFQVNGGSVSVYVQQ

SEQ ID NO: 44749 - protein, 482 aa, Bacillus sp. YR288
NGTMMQYFEWYVPNDGQHWNRLRNDAAYLKSIGVSAIWTPPAYKGTSQNDVGYGAYDLYDLGEFNQKGTIRTKYGTKAELKSAVSTLKSNGIQVYGDVVMNHKGGADYTENVTAVEVNPSNRNQETSDEYTIQAWTGFNFPGRGTTHSPFKWQWYHFDGTDWDQSRNASRIFKFRGTGKAWDWEVSSENGNYDYLLYADLDYDHPDVRNEMKNWGVWYANEVGLDGFRLDAVKHIKFQFLGDWVNHVRTKTGKTMFTVAEYWQNDVNAINNYLAKVNYNHSVFDAPLHYNFHYASQSGGNYDMRNLLNGTVVAAHPTKAVTLVENHDSQPGQSLESVVQPWFKPLAYAFILTRAEGLPSIFYGDMYGTKGNSSYEIPALKTKIEPLLKARKDYAYGTQHNYMDHPDVIGWTREGDSTKEKSGLATLVTDGAGGSKWMYVGKQNAGEVWYDITGNRTDKITINTDGWGNFQVNKGSVSVYVQQ

SEQ ID NO: 44750 - protein, 483 aa, Bacillus sp. YR288
NGTMMQYFEWYVPNDGQHWNRLRNDAAYLKSIGVSAIWTPPAYKGTSQNDVGYGAYDLYDLGEFNQKGTIRTKYGTKAELKSAVSTLKSNGIKVYGDVVMNHKGGADYTENVTAVEVNPSNRNQETSDEYTIQAWTGFNFPGRGTTHSPFKWQWYHFDGTDWDQSRNASRIFKFRGTGKAWDWEVSSENGNYDYLMYADLDFDHPDVRNEMKNWGVWYANEVGLDGFRLDAVKHIKHSYLGDWVNHVRTKTGKTMWTVAEYWQNDVNAINNYLAKVNYNHSVFDAPLHYNFHYASQSGGNYDMRNLLNGTVVAAHPEKAVTLVENHDSQPGQSLESVVQPWFKPLAYAFILTRAEGYPSIFYGDMYGTKGNSSYEIPALKTKIEPLLKARKDYAYGTQHNYMDHWDVIGWTREGDSTKEKSGLATLVTDGSAGGSKWMYVGKQNAGEVWYDITGNRTDKITINTDGWGTFQVNGGSVSVYVQQ

SEQ ID NO: 44751 - protein, 479 aa, Synthetic construct
NGTMMQYFEWDLPNDGTLWTKVKNEATNLFSLGITALWLPPAYKGTSQSDVGYGVYDLYDLGEFNQKGTIRTKYGTKTQYIQAIQAAKAAGMQVYADVVFNHKAGADSTEWVDAVEVNPSNRNQETSGTYQIQAWTKFDFPGRGNTYSSFKWRWYHFDGTDWDESRKLNRIYKFRGTGKAWDWEVDTENGNYDYLMFADLDMDHPEVVTELKNWGTWYVNTTNIDGFRLDAVKHIKYSFFPDWLTYVRNQTGKNLFAVGEFWSYDVNKLHNYITKTNGSMSLFDAPLHNNFYTASKSSGYFDMRYLLNNTLMKDQPSLAVTLVDNHDTQPGQSLQSWVEPWFKPLAYAFILTRQEGYPCVFYGDYYGIPKYNIPGLKSKIDPLLIARRDYAYGTQRDYIDHQDIIGWTREGIDTKPNSGLAALITDGPGGSKWMYVGKKHAGKVFYDLTGNRSDTVTINADGWGEFKVNGGSVSIWVAK

SEQ ID NO: 44752 - protein, 479 aa, Synthetic construct
NETMMQYFEWDLPNDGTLWTKVKNEAANLSSLGITALWLPPAYKGTSQSDVGYGVYDLYDLGEFNQKGTIRTKYGTKTQYIQAIQAAKAAGMQVYADVVFDHKGGADGTEWVDAVEVNPSDRNQEISGTYQIQAWTKFDFPGRGNTYSSFKWRWYHFDGVDWDESRKLSRIYKFRGIGKAWDWEVDTENGNYDYLMYADLDMDHPEVVTELKNWGTWYVNTTNIDGFRLDAVKHIKYSFFPDWLTYVRNQTGKNLFAVGEFWSYDVNKLHNYITKTNGSMSLFDAPLHNNFYTASKSSGYFDMRYLLNNTLMKDQPSLAVTLVDNHDTQPGQSLQSWVEPWFKPLAYAFILTRQEGYPCVFYGDYYGIPKYNIPGLKSKIDPLLIARRDYAYGTQRDYIDHQDIIGWTREGIDTKPNSGLAALITDGPGGSKWMYVGKKHAGKVFYDLTGNRSDTVTINADGWGEFKVNGGSVSIWVAK

SEQ ID NO: 44753 - protein, 482 aa, Bacillus sp. YR288
NGTMMQYFEWYVPNDGQHWNRLRNDAAYLKSIGVSAIWTPPAYKGTSQNDVGYGAYDLYDLGEFNQKGTIRTKYGTKAELKSAVSTLKSNGIKVYGDVVMNHKGGADYTENVTAVEVNPSNRNQETSDEYTIQAWTGFNFPGRGTTHSPFKWQWYHFDGTDWDQSRNASRIFKFRGTGKAWDWEVSSENGNYDYLMYADLDFDHPDVRNEMKNWGVWYANEVGLDGFRLDAVKHIKHSYLGDWVNHVRTKTGKEMFTVAEYWQNDVNAINNYLAKVNYNHWVFDAPLHYNFHYASQSGGNYDMRNLLNGTVVAAHPEKAVTLVENHDSQPGQSLESVVQPWFKPLAYAFILTRAEGYPSIFYGDMYGTKGNSSYEIPALKTKIEPLLKARKDYAYGTQHNYMDHPDVIGWTREGDSTKEKSGLATLVTDGAGGSKRMYVGKQNAGEVWYDITGNRTDKITINTDGWGTFQVNGGSVSVYVQQ

SEQ ID NO: 44754 - protein, 483 aa, Bacillus sp. YR288
NGTMMQYFEWYVPNDGQHWNRLRNDAAYLKSIGVSAIWTPPAYKGTSQNDVGYGAYDLYDLGEFNQKGTIRTKYGTKAELKSAVSTLKSNGIKVYGDVVMNHKGGADYTENVTAVEVNPSNRNQETSDEYTIQAWTGFNFPGRGTTHSPFKWQWYHFDGTDWDQSRNASRIFKFRGTGKAWDWPVSSEFGNYDYLMYADLDFDHPDVINEMKNWGVWYANEVGLDGFRLDAVKHIKHSYLGDWVNHVRTKTGKEMWTVAEYWQNDVNAINNYLAKVNYNHSVFDAPLHYNFHYASQSGGNYDMRNLLNGTVVAAHPTKAVTLVENHDSQPGQSLESVVQPWFKPLAYAFILTRAEGYPSIFYGDMYGTKGNSSYEIPALKTKIEPLLKARKDYAYGTQHNYMDHWDVIGWTREGDSTKEKSGLATLVTDGSAGGSKWMYVGKQNAGEVWYDITGNRTDKITINTDGWGNFQVNGGSVSVYVQQ

SEQ ID NO: 44755 - protein, 482 aa, Bacillus sp. YR288
NGTMMQYFEWYVPNDGQHWNRLRNDAAYLKSIGVSAIWTPPAYKGTSQNDVGYGAYDLYDLGEFNQKGTIRTKYGTKAELKSAVSTLKSNGIQVYGDVVMNHKGGADYTENVTAVEVNPSNRNQETSDEYTIQAWTGFNFPGRGTTHSPFKWQWYHFDGTDWDQSRNASRIFKFRGTGKAWDWEVSSENGNYDYLLYADLDYDHPDVINEMKNWGVWYANEVGLDGFRLDAVKHIKFQFLGDWVNHVRTKTGKTMFTVAEYWQNDVNAINNYLAKVNYNHSVFDAPLHYNFHYASQSGGNYDMRNLLNGTVVAAHPTKAVTLVENHDSQPGQSLESVVQPWFKPLAYAFILTRAEGLPSIFYGDMYGTKGNSSYEIPALKTKIEPLLKARKDYAYGTQHNYMDHPDVIGWTREGDSTKEKSGLATLVTDGAGGSKWMYVGKQNAGEVWYDITGNRTDKITINTDGWGNFQVNKGSVSVYVQQ

SEQ ID NO: 44756 - protein, 482 aa, Bacillus sp. YR288
NRTMMQYFEWYVPNDGQHWNRLRNDAAYLKSIGVSAIWTPPAYKGTSQNDVGYGAYDLYDLGEFNQKGTIRTKYGTKAELKSAVSTLKSNGIQVYGDVVMNHKGGADYTENVTAVEVNPSNRNQETSDEYTIQAWTGFNFPGRGTTHSPFKWQWYHFDGTDWDQSRNASRIFKFRGTGKAWDWEVSSENGNYDYLLYADLDYDHPDVINEMKNWGVWYANEVGLDGFRLDAVKHIKFQFLGDWVNHVRTKTGKEMFTVAEYWQNDVNAINNYLAKVNYNHWVFDAPLHYNFHYASQSGGNYDMRNLLNGTVVAAHPTKAVTLVENHDSQPGQSLESVVQPWFKPLAYAFILTRAEGYPSIFYGDMYGTKGNSSYEIPALKTKIEPLLKARKDYAYGTQHNYMDHWDVIGWTREGDSTKEKSGLATLVTDGAGGSKRMYVGKQNAGEVWYDITGNRTDKITINTDGWGNFQVNGGSVSVYVQQ

SEQ ID NO: 44757 - protein, 480 aa, Bacillus licheniformis
NGTLMQYFEWYMPNDGQHWRRLQNDSAYLAEHGITAVWIPPAYKGTSQADVGYGAYDLYDLGEFHQKGTVRTKYGTKGELQSAIKSLHSRDINVYGDVVIDHKGGADATEDVTAVEVDPADRNRVISGEHLIKAWTHFHFPGRGSTYSDFKWHWYHFNGTDWDESRKLNRIYKFQGKNWNWEVSNENGNYDYLMYANIDYSHPDVAAEIKRWGTWYANELQLDGFRLDAVKHIKFSFLRDWVNHVREKTGKEMFTVAEYWQNDLGALENYLNKTNFNHSVFDVPLHYQFHAASTQGGGYDMRKLLNGTVVSKHPLKSVTFVDNHDTQPGQSLESTVQTWFKPLAYAFILTRESGYPQVFYGDMYGTKGDSQREIPALKHKIEPILKARKQYAYGAQHDYFDHHDIVGWTREGDSSVANSGLAALITDGPGGAKRMYVGRQNAGETWHDITGNRSEPVVINSEGWGEFHVNGGSVSIYVQR

SEQ ID NO: 44758 - protein, 483 aa, Bacillus sp. YR288
NRTMMQYFEWYVPNDGQHWNRLRNDAAYLKSIGVSAIWTPPAYKGTSQNDVGYGAYDLYDLGEFNQKGTIRTKYGTKAELKSAVSTLKSNGIQVYGDVVMNHKGGADYTENVTAVEVNPSNRNQETSDEYTIQAWTGFNFPGRGTTHSPFKWQWYHFDGTDWDQSRNASRIFKFRGTGKAWDWPVSSEFGNYDYLMYADLDFDHPDVRNEMKNWGVWYANEVGLDGFRLDAVKHIKHSYLGDWVNHVRTKTGKEMFTVAEYWQNDVNAINNYLAKVNYNHSVFDAPLHYNFHYASQSGGNYDMRNLLNGTVVAAHPTKAVTLVENHDSQPGQSLESVVQPWFKPLAYAFILTRAEGLPSIFYGDMYGTKGNSSYEIPALKTKIEPLLKARKDYAYGTQHNYMDHWDVIGWTREGDSTKEKSGLATLVTDGSAGGSKWMYVGKQNAGEVWYDITGNRTDKITINTDGWGNFQVNGGSVSVYVQQ

SEQ ID NO: 44759 - protein, 477 aa, Bacillus sp. TS-23
NETMMQYFEWDLPNDGTLWTKVKNEAANLSSLGITALWLPPAWKGTSQSDVGYGAYDLYDLGEFNQKGTIRTKYGTKTQYIQAIQAAKAAGMQVYADVVFNHKAGADGTEFVDAVEVDPSNRNQETSGTYQIQAWTKFDFPGRGNTYSSFKWRWYHFDGTDWDESRKLNRIYKFRGKAWDWEVDTENGNYDYLMFADYDMDHPEVVTELKNWGTWYVNTTNIDGFRLDAVKHIKYSFFPDWLTYVRNQTGKNLFAVGEFWSYDVNKLHNYITKTNGSMSLFDAPLHNNFYTASKSSGYFDMRYLLNNTLMKDQPSLAVTLVDNHDTQPGQSLQSWVEPWFKPLAYAFILTRQEGYPCVFYGDYYGIPKYNIPGLKSKIDPLLIARRDYAYGTQRDYIDHQDIIGWTREGIDTKPNSGLAALITDGPGGSKWMYVGKKHAGKVFYDLTGNRSDTVTINADGWGEFKVNGGSVSIWVAK

SEQ ID NO: 44760 - protein, 480 aa, Bacillus subtilis
NGTLMQYFEWXMPNDGQHWKRLQNDSAYLAEHGITAVWIPPAYKGTSQADVGYGAYDLYDLGEFHQKGTVRTKYGTKGELQSAIKSLHSRDINVYGDVVINHKGGADATEDVTAVEVDPAXRNRVISGEXXIKAWTHFHFPGRGSTYSDFKWHWYHFDGTXWDESRKLNRIYKFQGXAWDWEVSNENGNYDYLMYADIDYDHPDVAAXIKRWGTWYANELQLDGFRLDAVKHIKFSFLRDWVNHVREKTGKEMFTVAEYWXNDLGALEXYLNKTNFNHSVFDVPLHYQFHAASTQGGGYDMRKLLNXTVVSKHPLKAVTFVDNHDTQPGQSLESTVQTWFKPLAYAFILTRESGYPQVFYGDMYGTKGDXQREIPALKHKIEPILKARKQYAXGAQHDYFDHHDIVGWTREGDSSVANSGLAALITDGPGGAKRMYVGRQNAGETWHDITGNRSEPVVINSEGWGEFHVNGGSVSIYVQR

SEQ ID NO: 44761 - protein, 480 aa, Bacillus licheniformis
NGTLMQYFEWYMPNDGQHWRRLQNDSAYLAEHGITAVWIPPAYKGTSQADVGYGAYDLYDLGEFHQKGTVRTKYGTKGELQSAIKSLHSRDINVYGDVVINHKGGADATEDVTAVEVDPADRNRVISGEHLIKAWTHFHFPGRGSTYSDFKWHWYHFNGTDWDESRKLNRIYKFQGKNWNWEVSNENGNYDYLMYANIDYSHPDVAAEIKRWGTWYANELQLDGFRLDAVKHIPFSFLRDWVNHVREKTGKEMFTVAEYWQNDLGALENYLNKTNFNHSVFDVPLHYQFHAASTQGGGYDMRKLLNGTVVSKHPLKSVTFVDNHDTQPGQSLESTVQTWFKPLAYAFILTRESGYPQVFYGDMYGTKGDSQREIPALKHKIEPILKARKQYAYGAQHDYFDHHDIVGWTREGDSSVANSGLAALITDGPGGAKRMYVGRQNAGETWHDITGNRSEPVVINSEGWGEFHVNGGSVSIYVQR

SEQ ID NO: 44762 - protein, 480 aa, Bacillus licheniformis
NGTLMQYFEWYMPNDGQHWRRLQNDSAYLAEHGITAVWIPPAYKGTSQADVGYGAYDLYDLGEFHQKGTVRTKYGTKGELQSAIKSLHSRDINVYGDVVINHKGGADATEDVTAVEVDPADRNRVISGEHLIKAWTHFHFPGRGSTYSDFKWHWYHFNGTDWDESRKLNRIYKFQGKNWNWEVSNENGNYDYLMYANIDYSHPDVAAEIKRWGTWYANELQLDGFRLDAVKHIPFWFLRDWVNHVREKTGKEMFTVAEYWQNDLGALENYLNKTNFNHSVFDVPLHYQFHAASTQGGGYDMRKLLNGTVVSKHPLKSVTFVDNHDTQPGQSLESTVQTWFKPLAYAFILTRESGYPQVFYGDMYGTKGDSQREIPALKHKIEPILKARKQYAYGAQHDYFDHWDIVGWTREGDSSVANSGLAALITNGPGGAKRMYVGRQKAGQTWHDITGNRSEPVVINSEGWGEFHVNGGSVSIYVKR

SEQ ID NO: 44763 - protein, 479 aa, Synthetic construct
NETMMQYFEWDLPNDGTLWTKVKNEAANLSSLGITALWLPPAYKGTSQSDVGYGVYDLYDLGEFNQKGTIRTKYGTKTQYIQAIQAAKAAGMQVYADVVFNHKAGADGTELVDAVEVNPSDRNQEISGTYQIQAWTKFDFPGRGNTYSSFKWRWYHFDGTDWDESRKLNRIYKFRGTGKAWDWEVDTENGNYDYLMYADLDMDHPEVVTELKNWGTWYVNTTNIDGFRLDAVKHIKYSFFPDWLTYVRNQTGKNLFAVGEFWSYDVNKLHNYITKTNGSMSLFDAPLHNNFYTASKSSGYFDMRYLLNNTLMKDQPSLAVTLVDNHDTQPGQSLQSWVEPWFKPLAYAFILTRQEGYPCVFYGDYYGIPKYNIPGLKSKIDPLLIARRDYAYGTQRDYIDHQDIIGWTREGIDTKPNSGLAALITDGPGGSKWMYVGKKHAGKVFYDLTGNRSDTVTINADGWGEFKVNGGSVSIWVAK

SEQ ID NO: 44764 - protein, 483 aa, Bacillus sp. YR288
NGTMMQYFEWYVPNDGQHWNRLRNDAAYLKSIGVSAIWTPPAYKGTSQNDVGYGAYDLYDLGEFNQKGTIRTKYGTKAELKSAVSTLKSNGIKVYGDVVMNHKGGADYTENVTAVEVNPSNRNQETSDEYTIQAWTGFNFPGRGTTHSPFKWQWYHFDGTDWDQSRNASRIFKFRHTGKAWDWEVSSEFGNYDYLLYADLDYDHPDVINEMKNWGVWYANEVGLDGFRLDAVKHIKFQFLGDWVNHVRTKTGKEMWTVAEYWQNDVNAINNYLAKVNYNHSVFDAPLHYNFHYASQSGGNYDMRNLLNGTVVAAHPTKAVTLVENHDSQPGQSLESVVQPWFKPLAYAFILTRAEGYPSIFYGDMYGTKGNSSYEIPALKTKIEPLLKARKDYAYGTQHNYMDHWDVIGWTREGDSTKEKSGLATLVTDGSAGGSKWMYVGKQNAGEVWYDITGNRTDKITINTDGWGNFQVNGGSVSVYVQQ

SEQ ID NO: 44765 - protein, 482 aa, Bacillus sp. YR288
NRTMMQYFEWYVPNDGQHWNRLRNDAAYLKSIGVSAIWTPPAYKGTSQNDVGYGAYDLYDLGEFNQKGTIRTKYGTKAELKSAVSTLKSNGIQVYGDVVMNHKGGADYTENVTAVEVNPSNRNQETSDEYTIQAWTGFNFPGRGTTHSPFKWQWYHFDGTDWDQSRNASRIFKFRGTGKAWDWEVSSENGNYDYLMYADLDFDHPDVRNEMKNWGVWYANEVGLDGFRLDAVKHIKHSYLGDWVNHVRTKTGKEMWTVAEYWQNDVNAINNYLAKVNYNHWVFDAPLHYNFHYASQSGGNYDMRNLLNGTVVAAHPEKAVTLVENHDSQPGQSLESVVQPWFKPLAYAFILTRAEGLPSIFYGDMYGTKGNSSYEIPALKTKIEPLLKARKDYAYGTQHNYMDHWDVIGWTREGDSTKEKSGLATLVTDGVGGSKWMYVGKQNAGEVWYDITGNRTDKITINTDGWGNFQVNGGSVSVYVQQ

SEQ ID NO: 44766 - protein, 482 aa, Bacillus sp. YR288
NGTMMQYFEWYVPNDGQHWNRLRNDAAYLKSIGVSAIWTPPAYKGTSQNDVGYGAYDLYDLGEFNQKGTIRTKYGTKAELKSAVSTLKSNGIKVYGDVVMNHKGGADYTENVTAVEVNPSNRNQETSDEYTIQAWTGFNFPGRGTTHSPFKWQWYHFDGTDWDQSRNASRIFKFRGTGKAWDLEVSSENGNYDYLMYADLDFDHPDVRNEMKNWGVWYANEVGLDGFRLDAVKHIKHSYLGDWVNHVRTKTGKTMFTVAEYWQNDVNAINNYLAKVNYNHSVFDAPLHYNFHYASQSGGNYDMRNLLNGTVVAAHPTKAVTLVENHDSQPGQSLESVVQPWFKPLAYAFILTRAEGYPSIFYGDMYGTKGNSSYEIPALKTKIEPLLKARKDYAYGTQHNYMDHPDVIGWTREGDSTKEKSGLATLVTDGVGGSKWMYVGKQNAGEVWYDITGNRTDKITINTDGWGTFQVNGGSVSVYVQQ

SEQ ID NO: 44767 - protein, 478 aa, Geobacillus stearothermophilus
LNGTLMQYFEWYTPNDGQHWKRLQNDSAYLAEHGITAVWIPPAYKGTSQADVGYGAYDLYDLGEFHQKGTVRTKYGTKGELQSAIKSLHSRDINVYGDVVINHKGGADATEDVTAVEVDPADRNRVISGEYLIKAWTHFHFPGRGSTYSDFKWHWYHFDGTDWDESRKLNRIYKFQGKAWDWEVDTENGNYDYLMYADIDMDHPEVVTELKNWGKWYVNTTNIDGFRLDAVKHIKFSFFPDWLSYVRSQTGKPLFTVGEYWSYDINKLHNYITKTNGTMSLFDAPLHNKFYTASKSGGAFDMRTLMTNTLMKDQPTLAVTFVDNHDTEPGQALQSWVDPWFKPLAYAFILTRQEGYPCVFYGDYYGIPQYNIPSLKSKIDPLLIARRDYAYGTQHDYLDHSDIIGWTREGVTEKPGSGLAALITDGPGGSKWMYVGKQHAGKVFYDLTGNRSDTVTINSDGWGEFKVNGGSVSVWVPR

SEQ ID NO: 44768 - protein, 478 aa, Geobacillus stearothermophilus
LNGTLMQYFEWYTPNDGQHWKRLQNDSAYLAEHGITAVWIPPAYKGTSQADVGYGAYDLYDLGEFHQKGTVRTKYGTKGELQSAIKSLHSRDINVYGDVVINHKGGADATEDVTAVEVDPADRNRVISGEYLIKAWTHFHFPGRGSTYSDFKWHWYHFDGTDWDESRKLNRIYKFQGKAWDWEVDTENGNYDYLMYADLDMDHPEVVTELKNWGKWYVNTTNIDGFRLDAVKHIKFSFFPDWLSYVRSQTGKPLFTVGEYWSYDINKLHNYITKTNGTMSLFDAPLHNKFYTASKSGGAFDMRTLMTNTLMKDQPTLAVTFVDNHDTEPGQALQSWVDPWFKPLAYAFILTRQEGYPCVFYGDYYGIPQYNIPSLKSKIDPLLIARRDYAYGTQHDYLDHSDIIGWTREGVTEKPGSGLAALITDGPGGSKWMYVGKQHAGKVFYDLTGNRSDTVTINSDGWGEFKVNGGSVSVWVPR

SEQ ID NO: 44769 - protein, 479 aa, Bacillus sp. (in: firmicutes)
NGTIMQYFEWNVPNDGQHWNRLHNNAQNLKNAGITAIWIPPAWKGTSQNDVGYGAYDLYDLGEFNQKGTVRTKYGTKAELERAIRSLKANGIQVYGDVVMNHKGGADFTERVQAVEVNPQNRNQEVSGTYQIEAWTGFNFPGRGNQHSSFKWRWYHFDGTDWDQSRQLANRIYKFSGSKAWDWEVDTENGNYDYLMYADVDMDHPEVINELNRWGVWYANTLNLDGFRLDAVKHIKFSFMRDWLGHVRGQTGKNLFAVAEYWKNDLGALENYLSKTNWTMSAFDVPLHYNLYQASNSSGNYDMRNLLNGTLVQRHPSHAVTFVDNHDTQPGEALESFVQGWFKPLAYATILTREQGYPQVFYGDYYGIPSDGVPSYRQQIDPLLKARQQYAYGRQHDYFDHWDVIGWTREGNASHPNSGLATIMSDGPGGSKWMYVGRQKAGEVWHDMTGNRSGTVTINQDGWGHFFVNGGSVSVWVKR

SEQ ID NO: 44770 - protein, 480 aa, Bacillus sp.
NGTIMQYFEWNVPNDGQHWNRLHNNAQNLKNAGITAIWIPPAWKGTSQNDVGYGAYDLYDLGEFNQKGTVRTKYGTKAELERAIRSLKANGIQVYGDVVMNHKGGADFTERVQAVEVNPQNRNQEVSGTYQIEAWTGFNFPGRGNQHSSFKWRWYHFDGTDWDQSRQLANRIYKFRGDGKAWDWEVDTENGNYDYLMYADVDMDHPEVINEVNRWGVWYANTLNLDGFRLDAVKHIKFSFMRDWLGHVRGQTGKNLFAVAEYWKNDLGALENYLSKTNWTMSAFDVPLHYNLYQASNSSGNYDMRNLLNGTLVQRHPSHAVTFVDNHDTQPGEALESFVQGWFKPLAYATILTREQGYPQVFYGDYYGIPSDGVPSYRQQIDPLLKARQQYAYGRQHDYFDHWDVIGWTREGNASHPNSGLATIMSDGPGGSKWMYVGRQKAGEVWHDMTGNRSGTVTINQDGWGHFFVNGGSVSVWVKR

SEQ ID NO: 44771 - protein, 480 aa, Bacillus sp.
NGTIMQYFEWNVPNDGQHWNRLHNNAQNLKNAGITAIWIPPAWKGTSQNDVGYGAYDLYDLGEFNQKGTVRTKYGTKAELERAIRSLKANGIQVYGDVVMNHKGGADFTERVQAVEVNPQNRNQEVSGTYQIEAWTGFNFPGRGNQHSSFKWRWYHFDGTDWDQSRQLANRIYKFRGDGKAWDWEVDTENGNYDYLMYADVDMDHPEVINELNRWGVWYANTLNLDGFRLDAVKHIKFSFMRDWLGHVRGQTGKNLFAVAEYWKNDLGALENYLSKTNWTMSAFDVPLHYNLYQASNSSGNYDMRNLLNGTLVQRHPSHAVTFVDNHDTQPGEALEGFVQGWFKPLAYATILTREQGYPQVFYGDYYGIPSDGVPSYRQQIDPLLKARQQYAYGRQHDYFDHWDVIGWTREGNASHPNSGLATIMSDGPGGSKWMYVGRQKAGEVWHDMTGNRSGTVTINQDGWGHFFVNGGSVSVWVKR

SEQ ID NO: 44772 - protein, 480 aa, Bacillus sp.
NGTIMQYFEWNVPNDGQHWNRLHNNAQNLKNAGITAIWIPPAWKGTSQNDVGYGAYDLYDLGEFNQKGTVRTKYGTKAELERAIRSLKANGIQVYGDVVMNHKGGADFTERVQAVEVNPQNRNQEVSGTYQIEAWTGFNFPGRGNQHSSFKWRWYHFDGTDWDQSRQLANRIYKFRGDGKAWDWEVDTENGNYDYLMYADVDMDHPEVINELNRWGVWYANTLNLDGFRLDAVKHIKFSFMRDWLGHVRGQTGKNLFAVAEYWKNDLGALENYLSKTNWTMSAFDVPLHYNLYQASNSSGNYDMRNLLNGTLVQRHPSHAVTFVDNHDTQPGEALESFVQGWFKPLAYATILTREQGYPQVFYGDYYGIPSDGVPSYRQQIDPLLKARQQYAYGRQHDYFDHWDVIGWTREGNASHPNSGLATIMSDGPGGSKWMYVGRQKAGEVWHDMTGNREGTVTINQDGWGHFFVNGGSVSVWVKR

SEQ ID NO: 44773 - protein, 480 aa, Bacillus sp.
NGTIMQYFEWNVPNDGQHWNRLHNNAQNLKNAGITAIWIPPAWKGTSQNDVGYGAYDLYDLGEFNQKGTVRTKYGTKAELERAIRSLKANGIQVYGDVVMNHKGGADFTERVQAVEVNPQNRNQEVSGTYQIEAWTGFNFPGRGNQHSSFKWRWYHFDGTDWDQSRQLANRIWKFRGDGKAWDWEVDTENGNYDYLMYADVDMDHPEVINELNRWGVWYANTLNLDGFRLDAVKHIKFSFMRDWLGHVRGQTGKNLFAVAEYWKNDLGALENYLSKTNWTMSAFDVPLHYNLYQASNSSGNYDMRNLLNGTLVQRHPSHAVTFVDNHDTQPGEALESFVQGWFKPLAYATILTREQGYPQVFYGDYYGIPSDGVPSYRQQIDPLLKARQQYAYGRQHDYFDHWDVIGWTREGNASHPNSGLATIMSDGPGGSKWMYVGRQKAGEVWHDMTGNRSGTVTINQDGWGHFFVNGGSVSVWVKR

SEQ ID NO: 44774 - protein, 480 aa, Bacillus sp.
NGTIMQYFEWNVPNDGQHWNRLHNNAQNLKNAGITAIWIPPAWKGTSQNDVGYGAYDLYDLGEFNQKGTVRTKYGTKAELERAIRSLKANGIQVYGDVVMNHKGGADFTERVQAVEVNPQNRNQEVSGTYQIEAWTGFNFPGRGNQHSSFKWRWYHFDGTDWDQSRQLANRIYKFRGDGNAWDWEVDTENGNYDYLMYADVDMDHPEVINELNRWGVWYANTLNLDGFRLDAVKHIKFSFMRDWLGHVRGQTGKNLFAVAEYWKNDLGALENYLSKTNWTMSAFDVPLHYNLYQASNSSGNYDMRNLLNGTLVQRHPSHAVTFVDNHDTQPGEALESFVQGWFKPLAYATILTREQGYPQVFYGDYYGIPSDGVPSYRQQIDPLLKARQQYAYGRQHDYFDHWDVIGWTREGNASHPNSGLATIMSDGPGGSKWMYVGRQKAGEVWHDMTGNRSGTVTINQDGWGHFFVNGGSVSVWVKR

SEQ ID NO: 44775 - protein, 480 aa, Bacillus sp.
NGTIMQYFEWNVPNDGQHWNRLHNNAQNLKNAGITAIWIPPAWKGTSQNDVGYGAYDLYDLGEFNQKGTVRTKYGTKAELERAIRSLKANGIQIYGDVVMNHKGGADFTERVQAVEVNPQNRNQEVSGTYQIEAWTGFNFPGRGNQHSSFKWRWYHFDGTDWDQSRQLANRIYKFRGDGKAWDWEVDTENGNYDYLMYADVDMDHPEVINELNRWGVWYANTLNLDGFRLDAVKHIKFSFMRDWLGHVRGQTGKNLFAVAEYWKNDLGALENYLSKTNWTMSAFDVPLHYNLYQASNSSGNYDMRNLLNGTLVQRHPSHAVTFVDNHDTQPGEALESFVQGWFKPLAYATILTREQGYPQVFYGDYYGIPSDGVPSYRQQIDPLLKARQQYAYGRQHDYFDHWDVIGWTREGNASHPNSGLATIMSDGPGGSKWMYVGRQKAGEVWHDMTGNRSGTVTINQDGWGHFFVNGGSVSVWVKR

SEQ ID NO: 44776 - protein, 480 aa, Bacillus sp.
NGTIMQYFEWNVPNDGQHWNRLHNNAQNLKNAGISAIWIPPAWKGTSQNDVGYGAYDLYDLGEFNQKGTVRTKYGTKAELERAIRSLKANGIQVYGDVVMNHKGGADFTERVQAVEVNPQNRNQEVSGTYQIEAWTGFNFPGRGNQHSSFKWRWYHFDGTDWDQSRQLANRIYKFRGDGKAWDWEVDTENGNYDYLMYADVDMDHPEVINELNRWGVWYANTLNLDGFRLDAVKHIKFSFMRDWLGHVRGQTGKNLFAVAEYWKNDLGALENYLSKTNWTMSAFDVPLHYNLYQASNSSGNYDMRNLLNGTLVQRHPSHAVTFVDNHDTQPGEALESFVQGWFKPLAYATILTREQGYPQVFYGDYYGIPSDGVPSYRQQIDPLLKARQQYAYGRQHDYFDHWDVIGWTREGNASHPNSGLATIMSDGPGGSKWMYVGRQKAGEVWHDMTGNRSGTVTINQDGWGHFFVNGGSVSVWVKR

SEQ ID NO: 44777 - protein, 480 aa, Bacillus sp.
NGTIMQYFEWNVPNDGQHWNRLHNNAQNLKNAGITAIWIPPAWKGTSQNDVGYGAYDLYDLGEFNQKGTVRTKYGTKAELERAIRSLKANGIQVYGDVVMNHKGGADFTERVQAVEVNPQNRNQEVSGTYQIEAWTGFNFPGRGNQHSSFKWRWYHFDGTDWDQSRQLANRIYKFRGDGKAWDWEVDTDNGNYDYLMYADVDMDHPEVINELNRWGVWYANTLNLDGFRLDAVKHIKFSFMRDWLGHVRGQTGKNLFAVAEYWKNDLGALENYLSKTNWTMSAFDVPLHYNLYQASNSSGNYDMRNLLNGTLVQRHPSHAVTFVDNHDTQPGEALESFVQGWFKPLAYATILTREQGYPQVFYGDYYGIPSDGVPSYRQQIDPLLKARQQYAYGRQHDYFDHWDVIGWTREGNASHPNSGLATIMSDGPGGSKWMYVGRQKAGEVWHDMTGNRSGTVTINQDGWGHFFVNGGSVSVWVKR

SEQ ID NO: 44778 - protein, 480 aa, Bacillus sp.
NGTIMQYFEWNVPNDGQHWNRLHNNAQNLKNAGITAIWIPPAWKGTSQNDVGYGAYDLYDLGEFNQKGTVRTKYGTKAELERAIRSLKANGIQVYGDVVMNHKGGADFTERVQAVEVNPQNRNQEVSGTYQIEAWTGFNFPGRGNQHSSFKWRWYHFDGTDWDQSRQLANRIYKFRGDGKAWDWEVDTENGNYDYLMYADVDMDHPEVINELNRWGVWYANTLNLDGFRLDAVKHIKFSFMRDWLGHVRGQTGKNLFAVAEYWKNDLGALENYLSKTNWTMPAFDVPLHYNLYQASNSSGNYDMRNLLNGTLVQRHPSHAVTFVDNHDTQPGEALESFVQGWFKPLAYATILTREQGYPQVFYGDYYGIPSDGVPSYRQQIDPLLKARQQYAYGRQHDYFDHWDVIGWTREGNASHPNSGLATIMSDGPGGSKWMYVGRQKAGEVWHDMTGNRSGTVTINQDGWGHFFVNGGSVSVWVKR

SEQ ID NO: 44779 - protein, 480 aa, Bacillus sp.
NGTIMQYFEWNVPNDGQHWNRLHNNAQNLKNAGITAIWIPPAWKGTSQNDVGYGAYDLYDLGEFNQKGTVRTKYGTKAELERAIRSLKANGIQVYGDVVMNHKGGADFTERVQAVEVNPQNRNQEVSGTYQIEAWTGFNFPGRGNQHSSFKWRWYHFDGTDWDQSRQLANRIYKFRGDGKAWDWEVDTENGNYDYLMYADVDMDHPEVINELNRWGVWYANTLNLDGFRLDAVKHIKFSFMRDWLGHVRGQTGKNLFAVAEYWKNDLGALENYLSKTNWTMSAFDVPLHYNLYQASNSSGNYDMRNLLNGTLVQRHPSHAVTFVDNHDTQPGEALESFVQGWFKPLAYATILTREQGYPQVFYGDYYGIPSDGVPSYRQQIDPLLKARQQYAYGRQHDYFDHWDVIGWTREGNASHPNSGLATIMSDGPGGSKWMYIGRQKAGEVWHDMTGNRSGTVTINQDGWGHFFVNGGSVSVWVKR

SEQ ID NO: 44780 - protein, 480 aa, Bacillus sp.
NGTIMQYFEWNVPNDGQHWNRLHNNAQNLKNAGITAIWIPPAWKGTSQNDVGYGAYDLYDLGEFNQKGTVRTKYGTKAELERAIRSLKANGIQVYGDVVMNHKGGADFTERVQAVEVNPQNRNQEVSGTYQIEAWTGFNFPGRGNQHSSFKWRWYHFDGTDWDQSRQLANRIYKFRGDGKAWDWEVDTENGNYDYLMYADVDMDHPEVINELNRWGVWYANTLNLDGFRLDAVKHIKFSFMRDWLGHVRGQTGKNLFAVAEYWKNDLGALENYLSKTNWTMSAFDVPLHYNLYQASNSSGNYDMRNLLNGTLVQRHPSHAVTFVDNHDTQPGEALESFVQGWFKPLAYATILTREQGYPQVFYGDYYGIPSDGVPSYRQQIDPLLKARQQYAYGRQHDYFDHWDVIGWTRQGNASHPNSGLATIMSDGPGGSKWMYVGRQKAGEVWHDMTGNRSGTVTINQDGWGHFFVNGGSVSVWVKR

SEQ ID NO: 44781 - protein, 480 aa, Bacillus sp.
NGTIMQYFEWNVPNDGQHWNRLHNNAQNLKNAGITAIWIPPAWKGTSQNDVGYGAYDLYDLGEFNQKGTVRTKYGTKAELERAIRSLKANGIQVYGDVVMNHKGGADFTERVQAVEVNPQNRNQEVSGTYQIEAWTGFNFPGRGNQHSSFKWRWYHFDGTDWDQSRQLANRIYKFRGDGKAWDWEVDTENGNYDYLMYADVDMDHPEVINELNRWGVWYANTLNLDGFRLDAVKHIKFSFMRDWLGHVRGQTGKNLFAVAEYWKNDLGALENYLSKTNWTMSAFDVPLHYNLYQASNSSGNYDMRNLLNGTLVQRHPSHAVTFVDNHDTQPGEALETFVQGWFKPLAYATILTREQGYPQVFYGDYYGIPSDGVPSYRQQIDPLLKARQQYAYGRQHDYFDHWDVIGWTREGNASHPNSGLATIMSDGPGGSKWMYVGRQKAGEVWHDMTGNRSGTVTINQDGWGHFFVNGGSVSVWVKR

SEQ ID NO: 44782 - protein, 480 aa, Bacillus sp.
NGTIMQYFEWNVPNDGQHWNRLHNNAQNLKNAGITAIWIPPAWKGTSQNDVGYGAYDLYDLGEFNQKGTVRTKYGTKAELERAIRSLKANGIQVYGDVVMNHKGGADFTERVQALEVNPQNRNQEVSGTYQIEAWTGFNFPGRGNQHSSFKWRWYHFDGTDWDQSRQLANRIYKFRGDGKAWDWEVDTENGNYDYLMYADVDMDHPEVINELNRWGVWYANTLNLDGFRLDAVKHIKFSFMRDWLGHVRGQTGKNLFAVAEYWKNDLGALENYLSKTNWTMSAFDVPLHYNLYQASNSSGNYDMRNLLNGTLVQRHPSHAVTFVDNHDTQPGEALESFVQGWFKPLAYATILTREQGYPQVFYGDYYGIPSDGVPSYRQQIDPLLKARQQYAYGRQHDYFDHWDVIGWTREGNASHPNSGLATIMSDGPGGSKWMYVGRQKAGEVWHDMTGNRSGTVTINQDGWGHFFVNGGSVSVWVKR

SEQ ID NO: 44783 - protein, 480 aa, Bacillus sp.
NGTIMQYFEWNVPNDGQHWNRLHNNAQNLKNAGITAIWIPPAWKGTSQNDVGYGAYDLYDLGEFNQKGTVRTKYGTKAELERAIRSLKANGIQVYGDVVMNHKGGADFTERVQAVEVNPQNRNQEVSGTYQIEAWTGFNFPGRGNQHSSFKWRWYHFDGTDWDQSRQLANRIYKFRGDGKAWDWEVDTENGNYDYLMYADVDMDHPEVINELNRWGVWYANTLNLDGFRLDAVKHIKFSFMRDWLGHVRGQTGKNLFAVAEYWKNDLGALENYLSKTNWTMSAFDVPLHYNLYQASNSSGNYDMRNLLNGTLVQRHPSHAVTFVDNHDTQPGEALESFVQGWFKPLAYATILTREQGYPQVFYGDYYGIPSDGVPSYRQQIDPLLKIRQQYAYGRQHDYFDHWDVIGWTREGNASHPNSGLATIMSDGPGGSKWMYVGRQKAGEVWHDMTGNRSGTVTINQDGWGHFFVNGGSVSVWVKR

SEQ ID NO: 44784 - protein, 480 aa, Bacillus sp.
NGTIMQYFEWNVPNDGQHWNRLHNNAQNLKNAGITAIWIPPAWKGTSQNDVGYGAYDLYDLGEFNQKGTVRTKYGTKAELERAIRSLKANGIQVYGDVVMNHKGGADFTERVQAVEVNPQNRNQEVSGTYQIEAWTGFNFPGRGNQHSSFKWRWYHFDGTDWDQSRQLANRIYKFRGDGKAWDWEVDTENGNYDYLMYADVDMDHPEVINELNRWGVWYANTLNLDGFRLDAVKHIKFSFMRDWLGHVRGQTGKNLFAVAEYWKNDLGALENYLSKTNWTMSAFDVPLHYNLYQASNSSGNYDMRNLLNGTLVQRHPSHAVTFVDNHDTQPGEALESFVQGWFKPLAYATILTREQGYPQVFYGDYYGIPSDGVPSYRQQIDPLTKARQQYAYGRQHDYFDHWDVIGWTREGNASHPNSGLATIMSDGPGGSKWMYVGRQKAGEVWHDMTGNRSGTVTINQDGWGHFFVNGGSVSVWVKR

SEQ ID NO: 44785 - protein, 480 aa, Bacillus sp.
NGTIMQYFEWNVPNDGQHWNRLHNNAQNLKNAGITAIWIPPAWKGTSQNDVGYGAYDLYDLGEFNQKGTVRTKYGTKAELERAIRSLKANGIQVYGDVVMNHKGGADFTERVQAVEVNPQNRNQEVSGTYQIEAWTGFNFPGRGNQHSSFKWRWYHFDGTDWDQSRQLANRIYKFRGDGKAWDWEVDTENGNYDYLMYADVDMDHPEVINELNRWGVWYANTLNLDGFRLDAVKHIKFSFMRDWLGHVRGQTGKNLFAVAEYWKNDLGALENYLSKTNWTMSAFDVPLHYNLYQASNSSGNYDMRNLLNGTLVQRHPSHAATFVDNHDTQPGEALESFVQGWFKPLAYATILTREQGYPQVFYGDYYGIPSDGVPSYRQQIDPLLKARQQYAYGRQHDYFDHWDVIGWTREGNASHPNSGLATIMSDGPGGSKWMYVGRQKAGEVWHDMTGNRSGTVTINQDGWGHFFVNGGSVSVWVKR

SEQ ID NO: 44786 - protein, 480 aa, Bacillus sp.
NGTIMQYFSWNVPNDGQHWNRLHNNAQNLKNAGITAIWIPPAWKGTSQNDVGYGAYDLYDLGEFNQKGTVRTKYGTKAELERAIRSLKANGIQVYGDVVMNHKGGADFTERVQAVEVNPQNRNQEVSGTYQIEAWTGFNFPGRGNQHSSFKWRWYHFDGTDWDQSRQLANRIYKFRGDGKAWDWEVDTENGNYDYLMYADVDMDHPEVINELNRWGVWYANTLNLDGFRLDAVKHIKFSFMRDWLGHVRGQTGKNLFAVAEYWKNDLGALENYLSKTNWTMSAFDVPLHYNLYQASNSSGNYDMRNLLNGTLVQRHPSHAVTFVDNHDTQPGEALESFVQGWFKPLAYATILTREQGYPQVFYGDYYGIPSDGVPSYRQQIDPLLKARQQYAYGRQHDYFDHWDVIGWTREGNASHPNSGLATIMSDGPGGSKWMYVGRQKAGEVWHDMTGNRSGTVTINQDGWGHFFVNGGSVSVWVKR

SEQ ID NO: 44787 - protein, 480 aa, Bacillus sp.
NGTIMQYFEWNVPNDGQHWNRLHNNAQNLKNAGITAIWIPPAWKGTSQNDVGYGAYDLYDLGEFNQKGTVRTKYGTKAELERAIRSLKANGIQVYGDVVMNHKGGADFTERVQAVEVNPQNRNQEVSGTYQIEAWTGFNFPGRGNQHSSFKWRWYHFDGTDWDQSRQLANRIYKFRGDGKAWDWEVDTENGNYDYLMYADVDMDHPEVINELNRWGVWYANTLNLDGFRLDAVKHIKFSFMRDWLGHVRGQTGKNLFAVAEYWKNDLGALENYLSKTNWTMSAFDVPLHYNLYQASNSSGNYDMRNILNGTLVQRHPSHAVTFVDNHDTQPGEALESFVQGWFKPLAYATILTREQGYPQVFYGDYYGIPSDGVPSYRQQIDPLLKARQQYAYGRQHDYFDHWDVIGWTREGNASHPNSGLATIMSDGPGGSKWMYVGRQKAGEVWHDMTGNRSGTVTINQDGWGHFFVNGGSVSVWVKR

SEQ ID NO: 44788 - protein, 480 aa, Bacillus sp.
NGTIMQYFEWNVPNDGQHWNRLHNNAQNLKNAGITAIWIPPAWKGTSQNDVGYGAYDLYDLGEFNQKGTVRTKYGTKAELERAIRSLKANGIQVYGDVVMNHKGGADFTERVQAVEVNPQNRNQEVSGTYQIEAWTGFNFPGRGNQHSSFKWRWYHFDGTDWDQSRQLANRIYKFRGDGKAWDWEVDTENGNYDYLMYADVDMDHPEVINELNRWGVWYANTLNLDGFRLDAVKHIKFSFMRDWLGHVRGQTGKNLFAVAEYWKNDLGALENYLSKTNWTMSAFDVPLHYNLYQASNESGNYDMRNLLNGTLVQRHPSHAVTFVDNHDTQPGEALESFVQGWFKPLAYATILTREQGYPQVFYGDYYGIPSDGVPSYRQQIDPLLKARQQYAYGRQHDYFDHWDVIGWTREGNASHPNSGLATIMSDGPGGSKWMYVGRQKAGEVWHDMTGNRSGTVTINQDGWGHFFVNGGSVSVWVKR

SEQ ID NO: 44789 - protein, 480 aa, Bacillus sp.
NGTIMQYFEWNVPNDGQHWNRLHNNAQNLKNAGITAIWIPPAWKGTSQNDVGYGAYDLYDLGEFNQKGTVRTKYGTKAELERAIRSLKANGIQVYGDVVMNHKGGADFTERVQAVEVNPQNRNQEVSGTYQIEAWTGFNFPGRGNQHSSFKWRWYHFDGTDWDQSRQLANRIYKFRGDGKAWDWEVDTENGNYDYLMYADVDMDHPEVINELNRWGVWYANTLNLDGFRLDAVKHIKFSFMRDWLGHVRGQTGKNLFAVAEYWKNDLGALENYLSKTNWTMSAFDVPLHYNLYQASNSSGNYDMRNLLNGTLVQRHPSHAVTFVDNHDTQPGEALESFVQGWFKPLAYATILTREQGYPQVFYGDYYGIPSDGVPSYRQQIDPLLKARQQYAYGRQHDYFDHWDVIGWTREGNASHPNSGLATIMSDGPGGSKWMYVGRQKSGEVWHDMTGNRSGTVTINQDGWGHFFVNGGSVSVWVKR

SEQ ID NO: 44790 - protein, 480 aa, Bacillus sp.
NGTIMQYFEWNVPNDGQHWNRLHNNAQNLKNAGITAIWIPPAWKGTSQNDVGYGAYDLYDLGEFNQKGTVRTKYGTKAELERAIRSLKANGIQVYGDVVMNHKGGADFTERVQAVEVNPQNRNQEVSGTYQIEAWTGFNFPGRGNQHSSFKWRWYHFDGTDWDQSRQLANRIYKFRGDGKAWDWEVDTENGNYDYLMYADVDMDHPEVINELNRWGVWYANTLNLDGFRLDAVKHIRFSFMRDWLGHVRGQTGKNLFAVAEYWKNDLGALENYLSKTNWTMSAFDVPLHYNLYQASNSSGNYDMRNLLNGTLVQRHPSHAVTFVDNHDTQPGEALESFVQGWFKPLAYATILTREQGYPQVFYGDYYGIPSDGVPSYRQQIDPLLKARQQYAYGRQHDYFDHWDVIGWTREGNASHPNSGLATIMSDGPGGSKWMYVGRQKAGEVWHDMTGNRSGTVTINQDGWGHFFVNGGSVSVWVKR

SEQ ID NO: 44791 - protein, 480 aa, Bacillus sp.
NGTIMQYFEWNVPNDGQHWNRLHNNAQNLKNAGITAIWIPPAWKGTSQNDVGYGAYDLYDLGEFNQKGTVRTKYGTKAELERAIRSLKANGIQVYGDVVMNHKGGADFTERVQAVEVNPQNRNQEVSGTYQIEAWTGFNFPGRGNQHSSFKWRWYHFDGTDWDQSRQLANRIYKFRGDGKAWDWEVDTENGNYDYLMYADVDMDHPEVINELNRWGVWYANTLNLDGFRLDAVKHIKFSFMRDWLGHVRGQTGKNLFAVAEYWKNDLGALENYLSKTNWTMSAFDVPLHYNLYQASNSSGNYDMRNLLNGTLVQRHPSHAVTFVDNHDTQPGEALESFVQGWFKPLAYATILTREQGYPQVFYGDYYGIPSDGVPSYRQQIDPLLKTRQQYAYGRQHDYFDHWDVIGWTREGNASHPNSGLATIMSDGPGGSKWMYVGRQKAGEVWHDMTGNRSGTVTINQDGWGHFFVNGGSVSVWVKR

SEQ ID NO: 44792 - protein, 480 aa, Bacillus sp.
NGTIMQYFEWNVPNDGQHWNRLHNNAQNLKNAGITAIWIPPAWKGTSQNDVGYGAYDLYDLGEFNQKGTVRTKYGTKAELERAIRSLKANGIQVYGDVVMNHKGGADFTERVQAVEVNPQNRNQEVSGTYQIEAWTGFNFPGRGNQHSSFKWRWYHFDGTDWDQSRQLANRIYKFRGDGKAWDWEVDTENGNYDYLMYADVDMDHPEVINELNRWGVWYANTLNLDGFRLDAVKHIKFSFMRDWLGHVRGQTGKNLFAVAEYWKNDLGALENYLSKTNWTMSAFDVPLHYNLYQVSNSSGNYDMRNLLNGTLVQRHPSHAVTFVDNHDTQPGEALESFVQGWFKPLAYATILTREQGYPQVFYGDYYGIPSDGVPSYRQQIDPLLKARQQYAYGRQHDYFDHWDVIGWTREGNASHPNSGLATIMSDGPGGSKWMYVGRQKAGEVWHDMTGNRSGTVTINQDGWGHFFVNGGSVSVWVKR

SEQ ID NO: 44793 - protein, 480 aa, Bacillus sp.
NGTIMQYFEWNVPNDGQHWNRLHNNAQNLKNAGITAIWIPPAWKGTSQNDVGYGAYDLYDLGEFNQKGTVRTKYGTKAELERAIRSLKANGIQVYGDVVMNHKGGADFTERVQAVEVNPQNRNQEVSGTYQIEAWTGFNFPGRGNQHSSFKWRWYHFDGTDWDQSRQLANRIYKFRGDGKAWDWEVDTEXGNYDYLMYADVDMDHPEVINXLNRWGVWYANTLNLDGFRLDAVKHIKFSFMRDWLGHVRGQTGKNLFAVAEYWKNDLGALENYLSKTNWTMSAFDVPLHYNLYQASNSSGNYDMRNLLNGTLVQRHPSHAVTFVDNHDTQPGEALESFVQGWFKPLAYATILTREQGYPQVFYGDYYGIPSDGVPSYRQQIDPLLKARQQYAYGRQHDYFDHWDVIGWTREGNASHPNSGLATIMSDGPGGSKWMYVGRQKAGEVWHDMTGNRSGTVTINQDGWGHFFVNGGSVSVWVKR

SEQ ID NO: 44794 - protein, 480 aa, Bacillus sp.
NGTIMQYFEWNVPNDGQHWNRLHNNAQNLKNAGITAIWIPPAWKGTSQNDVGYGAYDLYDLGEFNQKGTVRTKYGTKAELERAIRSLKANGIQVYGDVVMNHKGGADFTERVQAVEVNPQNRNQEVSGTYQIEAWTGFNFPGRGNQHSSFKWRWYHFDGTDWDQSRQLANRIYKFRGDGKAWDWEMDTENGNYDYLMYADVDMDHPEVINELNRWGVWYANTLNLDGFRLDAVKHIKFSFMRDWLGHVRGQTGKNLFAVAEYWKNDLGALENYLSKTNWTMSAFDVPLHYNLYQASNSSGNYDMRNLLNGTLVQRHPSHAVTFVDNHDTQPGEALESFVQGWFKPLAYATILTREQGYPQVFYGDYYGIPSDGVPSYRQQIDPLLKARQQYAYGRQHDYFDHWDVIGWTREGNASHPNSGLATIMSDGPGGSKWMYVGRQKAGEVWHDMTGNRSGTVTINQDGWGHFFVNGGSVSVWVKR

SEQ ID NO: 44795 - protein, 480 aa, Bacillus sp.
NGTIMQYFEWNVPNDGQHWNRLHNNAQNLKNAGITAIWIPPSWKGTSQNDVGYGAYDLYDLGEFNQKGTVRTKYGTKAELERAIRSLKANGIQVYGDVVMNHKGGADFTERVQAVEVNPQNRNQEVSGTYQIEAWTGFNFPGRGNQHSSFKWRWYHFDGTDWDQSRQLANRIYKFRGDGKAWDWEVDTENGNYDYLMYADVDMDHPEVINELNRWGVWYANTLNLDGFRLDAVKHIKFSFMRDWLGHVRGQTGKNLFAVAEYWKNDLGALENYLSKTNWTMSAFDVPLHYNLYQASNSSGNYDMRNLLNGTLVQRHPSHAVTFVDNHDTQPGEALESFVQGWFKPLAYATILTREQGYPQVFYGDYYGIPSDGVPSYRQQIDPLLKARQQYAYGRQHDYFDHWDVIGWTREGNASHPNSGLATIMSDGPGGSKWMYVGRQKAGEVWHDMTGNRSGTVTINQDGWGHFFVNGGSVSVWVKR

SEQ ID NO: 44796 - protein, 480 aa, Bacillus sp.
NGTIMQYFEWNVPNDGQHWNRLHNNAQNLKNAGITAIWIPPAWKGTSQNDVGYGAYDLYDLGEFNQKGTVRTKYGTKAELERAIRSLKANGIQVYGDVVMNHKGGADFTERVQAVEVNPQNRNQEVSGTYQIEAWTGFNFPGRGNQHSSFKWRWYHFDGTDWDQSRQLANRIYKFRGDGKAWDWEVDTENGNYDYLMYADVDMDHPEVINELNRWGVWYANTLNLDGFRLDAVKHIKFSFMRDWLGHVRGQTGKNLFAVAEYWKNDLGALENYLSKTNWTMCAFDVPLHYNLYQASNSSGNYDMRNLLNGTLVQRHPSHAVTFVDNHDTQPGEALESFVQGWFKPLAYATILTREQGYPQVFYGDYYGIPSDGVPSYRQQIDPLLKARQQYAYGRQHDYFDHWDVIGWTREGNASHPNSGLATIMSDGPGGSKWMYVGRQKAGEVWHDMTGNRSGTVTINQDGWGHFFVNGGSVSVWVKR

SEQ ID NO: 44797 - protein, 480 aa, Bacillus sp.
NGTIMQYFEWNVPNDGQHWNRLHNNAQNLKNAGITAIWIPPAWKGTSQNDVGYGAYDLYDLGEFNQKGTVRTKYGTKAELERAIRSLKANGIQVYGDVVMNHKGGADFTERVQAVEVNPQNRNQEVSGTYQIEAWTGFNFPGRGNQHSSFKWRWYHFDGTDWDQSRQLANRIYKFRGDGKAWDWEVDTENGNYDYLMYADVDMDHPEVINELNRWGVWYANTLNLDGFRLDAVKHIKFSFMRDWLGHVRGQTGKNLFAVAEYWKNDLGALENYLSKTNWTMSAFDVPLHYNLYQASNSSGNYDMRNLLNGTLVQRHPSHAVTFVDNHDSQPGEALESFVQGWFKPLAYATILTREQGYPQVFYGDYYGIPSDGVPSYRQQIDPLLKARQQYAYGRQHDYFDHWDVIGWTREGNASHPNSGLATIMSDGPGGSKWMYVGRQKAGEVWHDMTGNRSGTVTINQDGWGHFFVNGGSVSVWVKR

SEQ ID NO: 44798 - protein, 480 aa, Bacillus sp.
NGTIMQYFEWNVPNDGQHWNRLHNNAQNLKNAGITAIWIPPAWKGTSQNDVGYGAYDLYDLGEFNQKGTVRTKYGTKAELERAIRSLKANGIQVYGDVVMNHKGGADFTERVQAVEVNPQNRNQEVSGTYQIEAWTGFNFPGRGNQHSSFKWRWYHFDGTDWDQSRQLANRIYKFRGDGKAWDWEVDTENGNYDYLMYADVDMDHPDVINELNRWGVWYANTLNLDGFRLDAVKHIKFSFMRDWLGHVRGQTGKNLFAVAEYWKNDLGALENYLSKTNWTMSAFDVPLHYNLYQASNSSGNYDMRNLLNGTLVQRHPSHAVTFVDNHDTQPGEALESFVQGWFKPLAYATILTREQGYPQVFYGDYYGIPSDGVPSYRQQIDPLLKARQQYAYGRQHDYFDHWDVIGWTREGNASHPNSGLATIMSDGPGGSKWMYVGRQKAGEVWHDMTGNRSGTVTINQDGWGHFFVNGGSVSVWVKR

SEQ ID NO: 44799 - protein, 480 aa, Bacillus sp.
NGTIMQYFEWNVPNDGQHWNRLHNNAQNLKNAGITAIWIPPAWKGTSQNDVGYGAYDLYDLGEFNQKGTVRTKYGTKAELERAIRSLKANGIQVYGDVVMNHKGGADFTERVQAVEVNPQNRNQEVSGTYQIEAWTGFNFPGRGNQHSSFKWQWYHFDGTDWDQSRQLANRIYKFRGDGKAWDWEVDTENGNYDYLMYADVDMDHPEVINELNRWGVWYANTLNLDGFRLDAVKHIKFSFMRDWLGHVRGQTGKNLFAVAEYWKNDLGALENYLSKTNWTMSAFDVPLHYNLYQASNSSGNYDMRNLLNGTLVQRHPSHAVTFVDNHDTQPGEALESFVQGWFKPLAYATILTREQGYPQVFYGDYYGIPSDGVPSYRQQIDPLLKARQQYAYGRQHDYFDHWDVIGWTREGNASHPNSGLATIMSDGPGGSKWMYVGRQKAGEVWHDMTGNRSGTVTINQDGWGHFFVNGGSVSVWVKR

SEQ ID NO: 44800 - protein, 480 aa, Bacillus sp.
NGTIMQYFEWNVPNDGQHWNRLHNNAQNLKNAGITAIWIPPAWKGTSQNDVGYGAYDLYDLGEFNQKGTVRTKYGTKAELERAIRSLKANGIQVYGDVVMNHKGGADFTERVQAVEVNPQNRNQEVSGTYQIEAWTGFNFPGRGNQHSSFKWRWYHFDGTDWDQSRQLANRIYKFRGDGKAWDWEVDTENGNYDYLMYADVDMDHPEVINELNRWGVWYANTLNLDGFRLDAVKHIKFSFMRDWLGHVRGQTGKNLFAVAEYWKNDLGALENYLSKTNWTMQAFDVPLHYNLYQASNSSGNYDMRNLLNGTLVQRHPSHAVTFVDNHDTQPGEALESFVQGWFKPLAYATILTREQGYPQVFYGDYYGIPSDGVPSYRQQIDPLLKARQQYAYGRQHDYFDHWDVIGWTREGNASHPNSGLATIMSDGPGGSKWMYVGRQKAGEVWHDMTGNRSGTVTINQDGWGHFFVNGGSVSVWVKR

SEQ ID NO: 44801 - protein, 480 aa, Bacillus sp.
NGTIMQYFEWNVPNDGQHWNRLHNNAQNLKNAGITAIWIPPAWKGTSQNDVGYGAYDLYDLGEFNQKGTVRTKYGTKAELERAIRSLKANGIQVYGDVVMNHKGGADFTERVQAVEVNPQNRNQEVSGTYQIEAWTGFNFPGRGNQHSSFKWRWYHFDGTDWDQSRQLANRIYKFRGDGKAWDWEVDTENGNYDYLMFADVDMDHPEVINELNRWGVWYANTLNLDGFRLDAVKHIKFSFMRDWLGHVRGQTGKNLFAVAEYWKNDLGALENYLSKTNWTMSAFDVPLHYNLYQASNSSGNYDMRNLLNGTLVQRHPSHAVTFVDNHDTQPGEALESFVQGWFKPLAYATILTREQGYPQVFYGDYYGIPSDGVPSYRQQIDPLLKARQQYAYGRQHDYFDHWDVIGWTREGNASHPNSGLATIMSDGPGGSKWMYVGRQKAGEVWHDMTGNRSGTVTINQDGWGHFFVNGGSVSVWVKR

SEQ ID NO: 44802 - protein, 480 aa, Bacillus sp.
NGTIMQYFEWNVPNDGQHWNRLHNNAQNLKNAGITAIWIPPAWKGTSQNDVGYGAYDLYDLGEFNQKGTVRTKYGTKAELERAIRSLKANGIQVYGDVVMNHKGGADFTERVQAVEVNPQNRNQEVSGTYQIEAWTGFNFPGRGNQHSSFKWRWYHFDGTDWDQSRQLANRIYKFRGDGKAWDWEVDTENGNYDYLMYADVDMDHPEVINELNRWGVWYANTLNLDGFRLDAVKHIKFSFMRDWLGHVRGQTGKNLFAVAEYWKNDLGALENYLSKTNWTMSAFDVPLHYNLYQAQNSSGNYDMRNLLNGTLVQRHPSHAVTFVDNHDTQPGEALESFVQGWFKPLAYATILTREQGYPQVFYGDYYGIPSDGVPSYRQQIDPLLKARQQYAYGRQHDYFDHWDVIGWTREGNASHPNSGLATIMSDGPGGSKWMYVGRQKAGEVWHDMTGNRSGTVTINQDGWGHFFVNGGSVSVWVKR

SEQ ID NO: 44803 - protein, 480 aa, Bacillus sp.
NGTIMQYFEWNVPNDGQHWNRLHNNAQNLKNAGITAIWIPPAWKGTSQNDVGYGAYDLYDLGEFNQKGTVRTKYGTKAELERAIRSLKANGIQVYGDVVMNHKGGADFTERVQAVEVNPQNRNQEVSGTYQIEAWTGFNFPGRGNQHSSFKWRWYHFDGTDWDQSRQLANRIYKFRGDGKAWDWEVDTENGNYDYLMYADVDMDHPEVINELNRWGVWYANTLNLDGFRLDAVKHIKFSFMRDWLGHVRGQTGKNLFAVAEYWKNDLGALENYLSKTNWTMSAFDVPLHYNLYQASNSSGNYDMRNLLNGTLVQRHPSHAVTFVDNHDTQPGEALESFVQGWFKPLAYATILTREQGYPQVFYGDYYGIPSDGVPSYRQQIDPVLKARQQYAYGRQHDYFDHWDVIGWTREGNASHPNSGLATIMSDGPGGSKWMYVGRQKAGEVWHDMTGNRSGTVTINQDGWGHFFVNGGSVSVWVKR

SEQ ID NO: 44804 - protein, 480 aa, Bacillus sp.
NGTIMQYFEWNVPNDGQHWNRLHNNAQNLKNAGITAIWIPPAWKGTSQNDVGYGAYDLYDLGEFNQKGTVRTKYGTKAELERAIRSLKANGIQVYGDVVMNHKGGADFTERVQAVEVNPQNRNQEVSGTYQIEAWTGFNFPGRGNQHSSFKWRWYHFDGTDWDQSRQLANRIYKFRGDGKAWDWEVDTENGNYDYLMYADVDMDHPEVINELNRWGVWYANTLNLDGFRLDAVKHIKFSFMRDWLGHVRGQTGKNLFAVAEYWKNDLGALENYLSKTNWTMSAFDVPLHYNLYQASNSSGNYDMRNLLNGTLVQRHPSHAVTFVDNHDTQPGEALESFVQGWFKPLSYATILTREQGYPQVFYGDYYGIPSDGVPSYRQQIDPLLKARQQYAYGRQHDYFDHWDVIGWTREGNASHPNSGLATIMSDGPGGSKWMYVGRQKAGEVWHDMTGNRSGTVTINQDGWGHFFVNGGSVSVWVKR

SEQ ID NO: 44805 - protein, 480 aa, Bacillus sp.
NGTIMQYFEWNVPNDGQHWNRLHNNAQNLKNAGITAIWIPPAWKGTSQNDVGYGAYDLYDLGEFNQKGTVRTKYGTKAELERAIRSLKANGIQVYGDVVMNHKGGADFTERVQAVEVNPQNRNQEVSGTYQIEAWTGFNFPGRGNQHSSFKWRWYHFDGTDWDQSRQLANRIYKFRGDGKAWDWEVDTENGNYDYLMYADVDMDHPEVINELNRWGVWYANTLNLDGFRLDAVKHIKFSFMRDWLGHVRGQTGKNLFAVAEYWKNDLGALENYLSKTNWTMSAFDVPLHYNLYQASNSSGNYDMRNLLNGTLVQRHPSHAVTFVDNHDTQPGEALESFVQGWFKPLAYATILTREQGYPQVFYGDYYGIPSDGVPSYRQQIDPMLKARQQYAYGRQHDYFDHWDVIGWTREGNASHPNSGLATIMSDGPGGSKWMYVGRQKAGEVWHDMTGNRSGTVTINQDGWGHFFVNGGSVSVWVKR

SEQ ID NO: 44806 - protein, 480 aa, Bacillus sp.
NGTIMQYFEWNVPNDGQHWNRLHNNAQNLKNAGITAIWIPPAWKGTSQNDVGYGAYDLYDLGEFNQKGTVRTKYGTKAELERAIRSLKANGIQVYGDVVMNHKGGSDFTERVQAVEVNPQNRNQEVSGTYQIEAWTGFNFPGRGNQHSSFKWRWYHFDGTDWDQSRQLANRIYKFRGDGKAWDWEVDTENGNYDYLMYADVDMDHPEVINELNRWGVWYANTLNLDGFRLDAVKHIKFSFMRDWLGHVRGQTGKNLFAVAEYWKNDLGALENYLSKTNWTMSAFDVPLHYNLYQASNSSGNYDMRNLLNGTLVQRHPSHAVTFVDNHDTQPGEALESFVQGWFKPLAYATILTREQGYPQVFYGDYYGIPSDGVPSYRQQIDPLLKARQQYAYGRQHDYFDHWDVIGWTREGNASHPNSGLATIMSDGPGGSKWMYVGRQKAGEVWHDMTGNRSGTVTINQDGWGHFFVNGGSVSVWVKR

SEQ ID NO: 44807 - protein, 480 aa, Bacillus sp.
NGTIMQYFEWNVPNDGQHWNRLHNNAQNLKNAGITAIWIPPAWKGTSQNDVGYGAYDLYDLGEFNQKGTVRTKYGTKAELERAIRSLKANGIQVYGDVVMNHKGGADFTERVQAVEVNPQNRNQEVSGTYQIEAWTGFNFPGRGNQHSSFKWRWYHFDGTDWDQSRQLANRIYKFRGDGKAWDWEVETENGNYDYLMYADVDMDHPEVINELNRWGVWYANTLNLDGFRLDAVKHIKFSFMRDWLGHVRGQTGKNLFAVAEYWKNDLGALENYLSKTNWTMSAFDVPLHYNLYQASNSSGNYDMRNLLNGTLVQRHPSHAVTFVDNHDTQPGEALESFVQGWFKPLAYATILTREQGYPQVFYGDYYGIPSDGVPSYRQQIDPLLKARQQYAYGRQHDYFDHWDVIGWTREGNASHPNSGLATIMSDGPGGSKWMYVGRQKAGEVWHDMTGNRSGTVTINQDGWGHFFVNGGSVSVWVKR

SEQ ID NO: 44808 - protein, 480 aa, Bacillus sp.
NGTIMQYFEWNVPNDGQHWNRLHNNAQNLKNAGITAIWIPPAWKGTSQNDVGYGAYDLYDLGEFNQKGTVRTKYGTKAELERAIRSLKANGIQVYGDVVMNHKGGADFTERVQACEVNPQNRNQEVSGTYQIEAWTGFNFPGRGNQHSSFKWRWYHFDGTDWDQSRQLANRIYKFRGDGKAWDWEVDTENGNYDYLMYADVDMDHPEVINELNRWGVWYANTLNLDGFRLDAVKHIKFSFMRDWLGHVRGQTGKNLFAVAEYWKNDLGALENYLSKTNWTMSAFDVPLHYNLYQASNSSGNYDMRNLLNGTLVQRHPSHAVTFVDNHDTQPGEALESFVQGWFKPLAYATILTREQGYPQVFYGDYYGIPSDGVPSYRQQIDPLLKARQQYAYGRQHDYFDHWDVIGWTREGNASHPNSGLATIMSDGPGGSKWMYVGRQKAGEVWHDMTGNRSGTVTINQDGWGHFFVNGGSVSVWVKR

SEQ ID NO: 44809 - protein, 480 aa, Bacillus sp.
NGTIMQYFEWNVPNDGQHWNRLHNNAQNLKNAGITAIWIPPAWKGTSQNDVGYGAYDLYDLGQFNQKGTVRTKYGTKAELERAIRSLKANGIQVYGDVVMNHKGGADFTERVQAVEVNPQNRNQEVSGTYQIEAWTGFNFPGRGNQHSSFKWRWYHFDGTDWDQSRQLANRIYKFRGDGKAWDWEVDTENGNYDYLMYADVDMDHPEVINELNRWGVWYANTLNLDGFRLDAVKHIKFSFMRDWLGHVRGQTGKNLFAVAEYWKNDLGALENYLSKTNWTMSAFDVPLHYNLYQASNSSGNYDMRNLLNGTLVQRHPSHAVTFVDNHDTQPGEALESFVQGWFKPLAYATILTREQGYPQVFYGDYYGIPSDGVPSYRQQIDPLLKARQQYAYGRQHDYFDHWDVIGWTREGNASHPNSGLATIMSDGPGGSKWMYVGRQKAGEVWHDMTGNRSGTVTINQDGWGHFFVNGGSVSVWVKR

SEQ ID NO: 44810 - protein, 480 aa, Bacillus sp.
NGTIMQYFEWNVPNDGQHWNRLHNNAQNLKNAGITAIWIPPAWKGTSQNDVGYGAYDLYDLGEFNQKGTVRTKYGTKAELERAIRSLKANGIQVYGDVVMNHKGGADFTERVQAVEVNPQNRNQEVSGTYQIEAWTGFNFPGRGNQHSSFKWRWYHFDGTDWDQSRQLANRIYKFRGDGKAWDWEVDTENGNYDYLMYADVDMDHPEVINELNRWGVWYANTLNLDGFRLDAVKHIKFSFMRDWLGHVRGQTGKNLFAVAEYWKNDLGALENYLSKTNWTMSAFDVPLHYNLYQASNSSGNYDMRNLLNGTLVQRHPSHAVTFVDNHDTQPGEALESFVQGWFKPLAYATILTREQGYPQVFYGDYYGIPSDGVPSYRQQTDPLLKARQQYAYGRQHDYFDHWDVIGWTREGNASHPNSGLATIMSDGPGGSKWMYVGRQKAGEVWHDMTGNRSGTVTINQDGWGHFFVNGGSVSVWVKR

SEQ ID NO: 44811 - protein, 480 aa, Bacillus sp.
NGTIMQYFEWNVPNDGQHWNRLHNNAQNLKNAGITAIWIPPAWKGTSQNDVGYGAYDLYDLGEFNQKGTVRTKYGTKAELERAIRSLKANGIQVYGDVVMNHKGGADFTERVQAVEVNPQNRNQEVSGTYQIEAWTGFNFPGRGNQHSSFKWRWYHFDGTDWDQSRQLANRIYKFRGDGKAWDWEVDTSNGNYDYLMYADVDMDHPEVINELNRWGVWYANTLNLDGFRLDAVKHIKFSFMRDWLGHVRGQTGKNLFAVAEYWKNDLGALENYLSKTNWTMSAFDVPLHYNLYQASNSSGNYDMRNLLNGTLVQRHPSHAVTFVDNHDTQPGEALESFVQGWFKPLAYATILTREQGYPQVFYGDYYGIPSDGVPSYRQQIDPLLKARQQYAYGRQHDYFDHWDVIGWTREGNASHPNSGLATIMSDGPGGSKWMYVGRQKAGEVWHDMTGNRSGTVTINQDGWGHFFVNGGSVSVWVKR

SEQ ID NO: 44812 - protein, 480 aa, Bacillus sp.
NGTILQYFEWNVPNDGQHWNRLHNNAQNLKNAGITAIWIPPAWKGTSQNDVGYGAYDLYDLGEFNQKGTVRTKYGTKAELERAIRSLKANGIQVYGDVVMNHKGGADFTERVQAVEVNPQNRNQEVSGTYQIEAWTGFNFPGRGNQHSSFKWRWYHFDGTDWDQSRQLANRIYKFRGDGKAWDWEVDTENGNYDYLMYADVDMDHPEVINELNRWGVWYANTLNLDGFRLDAVKHIKFSFMRDWLGHVRGQTGKNLFAVAEYWKNDLGALENYLSKTNWTMSAFDVPLHYNLYQASNSSGNYDMRNLLNGTLVQRHPSHAVTFVDNHDTQPGEALESFVQGWFKPLAYATILTREQGYPQVFYGDYYGIPSDGVPSYRQQIDPLLKARQQYAYGRQHDYFDHWDVIGWTREGNASHPNSGLATIMSDGPGGSKWMYVGRQKAGEVWHDMTGNRSGTVTINQDGWGHFFVNGGSVSVWVKR

SEQ ID NO: 44813 - protein, 480 aa, Bacillus sp.
NGTIMQYFEWNVPNDGQHWNRLHNNAQNLKNAGITAIWIPPAWKGTEQNDVGYGAYDLYDLGEFNQKGTVRTKYGTKAELERAIRSLKANGIQVYGDVVMNHKGGADFTERVQAVEVNPQNRNQEVSGTYQIEAWTGFNFPGRGNQHSSFKWRWYHFDGTDWDQSRQLANRIYKFRGDGKAWDWEVDTENGNYDYLMYADVDMDHPEVINELNRWGVWYANTLNLDGFRLDAVKHIKFSFMRDWLGHVRGQTGKNLFAVAEYWKNDLGALENYLSKTNWTMSAFDVPLHYNLYQASNSSGNYDMRNLLNGTLVQRHPSHAVTFVDNHDTQPGEALESFVQGWFKPLAYATILTREQGYPQVFYGDYYGIPSDGVPSYRQQIDPLLKARQQYAYGRQHDYFDHWDVIGWTREGNASHPNSGLATIMSDGPGGSKWMYVGRQKAGEVWHDMTGNRSGTVTINQDGWGHFFVNGGSVSVWVKR

SEQ ID NO: 44814 - protein, 480 aa, Bacillus sp.
NGTIMQYFEWNVPNDGQHWNRLHNNAQNLKNAGITAIWIPPAWKGTSQNDVGYGAYDLYDLGEFNQKGTVRTKYGTKAELERAIRSLKANGIQVYGDVVMNHKGGADFTERVQAVEVNPQNRNQEVSGTYQIEAWTGFNFPGRGNQHSSFKWRWYHFDGTDWDQSRQLANRIYKFRGDGKAWDWEVDTENGNYDYLMYADVDMDHPEVINELNRWGVWYANTLNLDGFRLDAVKHIKFSFMRDWLGHVRGQTGKNLFAVAEYWKNDLGALENYLSKTNWTMSAFDVPLHYNLYQASNSSGNYDMRNLLNGTLVQRHPSHAVTFVDNHDTQPGEALESFVQGWFKPLAYATILTREQGYPQVFYGDYYGLPSDGVPSYRQQIDPLLKARQQYAYGRQHDYFDHWDVIGWTREGNASHPNSGLATIMSDGPGGSKWMYVGRQKAGEVWHDMTGNRSGTVTINQDGWGHFFVNGGSVSVWVKR

SEQ ID NO: 44815 - protein, 480 aa, Bacillus sp.
NGTIMQYFEWNVPNDGQHWNRLHNNAQNLKNAGITAIWIPPAWKGTSQNDVGYGAYDLYDLGEFNQKGTVRTKYGTKAELERAIRSLKANGIQVYGDVVMNHKGGADFTERVQAVEVNPQNRNQEVSGTYQIEAWTGFNFPGRGNQHSSFKWRWYHFDGTDWDQSRQLANRIYKFRGDGKAWDWEVDTENGNYDYLMYADVDMDHPEVINELNRWGVWYANTLNLDGFRLDAVKHIKFSFMRDWLGHVRGQTGKNLFAVAEYWKNDLGALENYLSKTNWTMSAFDVPLHYNLYQASNSSGNYDMRNLLNGTLVQRHPSHATTFVDNHDTQPGEALESFVQGWFKPLAYATILTREQGYPQVFYGDYYGIPSDGVPSYRQQIDPLLKARQQYAYGRQHDYFDHWDVIGWTREGNASHPNSGLATIMSDGPGGSKWMYVGRQKAGEVWHDMTGNRSGTVTINQDGWGHFFVNGGSVSVWVKR

SEQ ID NO: 44816 - protein, 480 aa, Bacillus sp.
NGTIMQYFEWNVPNDGQHWNRLHNNAQNLKNAGITAIWIPPAWKGTSQNDVGYGAYDLYDLGEFNQKGTVRTKYGTKAELERAIRSLKANGIQVYGDVVMNHKGGADFTERVQAVEVNPQNRSQEVSGTYQIEAWTGFNFPGRGNQHSSFKWRWYHFDGTDWDQSRQLANRIYKFRGDGKAWDWEVDTENGNYDYLMYADVDMDHPEVINELNRWGVWYANTLNLDGFRLDAVKHIKFSFMRDWLGHVRGQTGKNLFAVAEYWKNDLGALENYLSKTNWTMSAFDVPLHYNLYQASNSSGNYDMRNLLNGTLVQRHPSHAVTFVDNHDTQPGEALESFVQGWFKPLAYATILTREQGYPQVFYGDYYGIPSDGVPSYRQQIDPLLKARQQYAYGRQHDYFDHWDVIGWTREGNASHPNSGLATIMSDGPGGSKWMYVGRQKAGEVWHDMTGNRSGTVTINQDGWGHFFVNGGSVSVWVKR

SEQ ID NO: 44817 - protein, 480 aa, Bacillus sp.
NGTIMQYFEWNVPNDGQHWNRLHNNAQNLKNAGITAIWIPPAWKGTSQNDVGYGAYDLYDLGEFNQKGTVRTKYGTKAELERAIRSLKANGIQVYGDVVMNHKGGADFTERVQAVEVNPQNRNQEVSGTYQIEAWTGFNFPGRGNQHSSFKWRWYHFDGTDWDQSRQLANRIYKFRGDGKAWDWEVDTENGNYDYLMYADVDMDHPEVINELNRWGVWYANTLNLDGFRLDAVKHIKFSFMRDWLGHVRGQTGKNLFAVAEYWKNDLGALENYLSKTNWTMSAFDVPLHYNLYQASNSSGNYDMRNLLNGTLVQRHPSHAVTFVDNHDTQPGEALESFLQGWFKPLAYATILTREQGYPQVFYGDYYGIPSDGVPSYRQQIDPLLKARQQYAYGRQHDYFDHWDVIGWTREGNASHPNSGLATIMSDGPGGSKWMYVGRQKAGEVWHDMTGNRSGTVTINQDGWGHFFVNGGSVSVWVKR

SEQ ID NO: 44818 - protein, 480 aa, Bacillus sp.
NGTIMQYFEWNVPNDGQHWNRLHNNAQNLKNAGITAIWIPPAWKGTSQNDVGYGAYDLYDLGEFNQKGTVRTKYGTKAELERAIRSLKANGIQVYGDVVMNHKGGADFTERAQAVEVNPQNRNQEVSGTYQIEAWTGFNFPGRGNQHSSFKWRWYHFDGTDWDQSRQLANRIYKFRGDGKAWDWEVDTENGNYDYLMYADVDMDHPEVINELNRWGVWYANTLNLDGFRLDAVKHIKFSFMRDWLGHVRGQTGKNLFAVAEYWKNDLGALENYLSKTNWTMSAFDVPLHYNLYQASNSSGNYDMRNLLNGTLVQRHPSHAVTFVDNHDTQPGEALESFVQGWFKPLAYATILTREQGYPQVFYGDYYGIPSDGVPSYRQQIDPLLKARQQYAYGRQHDYFDHWDVIGWTREGNASHPNSGLATIMSDGPGGSKWMYVGRQKAGEVWHDMTGNRSGTVTINQDGWGHFFVNGGSVSVWVKR

SEQ ID NO: 44819 - protein, 480 aa, Bacillus sp.
NGTIMQYFEWNVPNDGQHWNRLHNNAQNLKNAGITAIWIPPAWKGTSQNDVGYGAYDLYDLGEFNQKGTVRTKYGTKAELERAIRSLKANGIQVYGDVVMNHKGGADFTERVQAVEVNPQNRNQEVSGTYQIEAWTGFNFPGRGNQHSSFKWRWYHFDGTDWDQSRQFANRIYKFRGDGKAWDWEVDTENGNYDYLMYADVDMDHPEVINELNRWGVWYANTLNLDGFRLDAVKHIKFSFMRDWLGHVRGQTGKNLFAVAEYWKNDLGALENYLSKTNWTMSAFDVPLHYNLYQASNSSGNYDMRNLLNGTLVQRHPSHAVTFVDNHDTQPGEALESFVQGWFKPLAYATILTREQGYPQVFYGDYYGIPSDGVPSYRQQIDPLLKARQQYAYGRQHDYFDHWDVIGWTREGNASHPNSGLATIMSDGPGGSKWMYVGRQKAGEVWHDMTGNRSGTVTINQDGWGHFFVNGGSVSVWVKR

SEQ ID NO: 44820 - protein, 480 aa, Bacillus sp.
NGTIMQYFEWNVPNDGQHWNRLHNNAQNLKNAGITAIWIPPAWKGTSQNDVGYGAYDLYDLGEFNQKGTVRTKYGTKAELERAIRSLKANGIQVYGDVVMNHKGGADFTERVQAVEVNPQNRNQEVSGTYQVEAWTGFNFPGRGNQHSSFKWRWYHFDGTDWDQSRQLANRIYKFRGDGKAWDWEVDTENGNYDYLMYADVDMDHPEVINELNRWGVWYANTLNLDGFRLDAVKHIKFSFMRDWLGHVRGQTGKNLFAVAEYWKNDLGALENYLSKTNWTMSAFDVPLHYNLYQASNSSGNYDMRNLLNGTLVQRHPSHAVTFVDNHDTQPGEALESFVQGWFKPLAYATILTREQGYPQVFYGDYYGIPSDGVPSYRQQIDPLLKARQQYAYGRQHDYFDHWDVIGWTREGNASHPNSGLATIMSDGPGGSKWMYVGRQKAGEVWHDMTGNRSGTVTINQDGWGHFFVNGGSVSVWVKR

SEQ ID NO: 44821 - protein, 480 aa, Bacillus sp.
NGTIMQYFEWNVPNDGQHWNRLHNNAQNLKNAGITAIWIPPAWKGTSQNDVGYGAYDLYDLGEFNQKGTVRTKYGTKAELERAIRSLKANGIQVYGDVVMNHKGGADFTERVQAVEVNPQNRNQEVSGTYQIEAWTGFNFPGRGNQHSSFKWRWYHFDGTDWDQSRQLANRIYKFRGDGKAWDWEVDTENGNYDYLMYADVDMDHPEVINELNRWGVWYANTLNLDGFRLDAVKHIKFSFMRDWLGHVRGQTGKNLFAVAEYWKNDLGALENYLSKTNWTMSAFDVPLHYNLYQASNSSGNYDMRNLLNGTLVQRHPSHAVTFVDNHDTQPGEALESFVQGWFKPLAYATILTREQGYPQVFYGDYYGIPSDGVPSYRQQIDPLLKARQQWAYGRQHDYFDHWDVIGWTREGNASHPNSGLATIMSDGPGGSKWMYVGRQKAGEVWHDMTGNRSGTVTINQDGWGHFFVNGGSVSVWVKR

SEQ ID NO: 44822 - protein, 480 aa, Bacillus sp.
NGTIMQYFEWNVPNDGQHWNRLHNNAQNLKNAGITAIWIPPAWKGTSQNDVGYGAYDLYDLGEFNQKGTVRTKYGTKAELERAIRSLKANGIQVYGDVVMNHKGGADFTERVQAVEVNPQNRNQEVSGTYQIEAWTGFNFPGRGNQHSSFKWRWYHFDGTDWDQSRQLANRIYKFRGDGKAWDWEVDTENGNYDYLMYADVDMDHPEVINELNRWGVWYANTLNLDGFRLDAVKHIKFSFMRDWLGHVRGQTGKNLFATAEYWKNDLGALENYLSKTNWTMSAFDVPLHYNLYQASNSSGNYDMRNLLNGTLVQRHPSHAVTFVDNHDTQPGEALESFVQGWFKPLAYATILTREQGYPQVFYGDYYGIPSDGVPSYRQQIDPLLKARQQYAYGRQHDYFDHWDVIGWTREGNASHPNSGLATIMSDGPGGSKWMYVGRQKAGEVWHDMTGNRSGTVTINQDGWGHFFVNGGSVSVWVKR

SEQ ID NO: 44823 - protein, 480 aa, Bacillus sp.
NGTIMQYFEWNVPNDGQHWNRLHNNAQNLKNAGITAIWIPPAWKGTSQNDVGYGAYDLYDLGEFNQKGTVRTKYGTKAELERAIRSLKANGIQVYGDTVMNHKGGADFTERVQAVEVNPQNRNQEVSGTYQIEAWTGFNFPGRGNQHSSFKWRWYHFDGTDWDQSRQLANRIYKFRGDGKAWDWEVDTENGNYDYLMYADVDMDHPEVINELNRWGVWYANTLNLDGFRLDAVKHIKFSFMRDWLGHVRGQTGKNLFAVAEYWKNDLGALENYLSKTNWTMSAFDVPLHYNLYQASNSSGNYDMRNLLNGTLVQRHPSHAVTFVDNHDTQPGEALESFVQGWFKPLAYATILTREQGYPQVFYGDYYGIPSDGVPSYRQQIDPLLKARQQYAYGRQHDYFDHWDVIGWTREGNASHPNSGLATIMSDGPGGSKWMYVGRQKAGEVWHDMTGNRSGTVTINQDGWGHFFVNGGSVSVWVKR

SEQ ID NO: 44824 - protein, 480 aa, Bacillus sp.
NGTIMQYFEWNVPNDGQHWNRLHNNAQNLKNAGITAIWIPPAWKGTSQNDVGYGAYDLYDLGEFNQKGTVRTKYGTKAELERAIRSLKANGIQVYGDVVMNHKGGADFTERVQAVEVNPQNRNQEVSGTYQIEAWTGFNFPGRGNQHSAFKWRWYHFDGTDWDQSRQLANRIYKFRGDGKAWDWEVDTENGNYDYLMYADVDMDHPEVINELNRWGVWYANTLNLDGFRLDAVKHIKFSFMRDWLGHVRGQTGKNLFAVAEYWKNDLGALENYLSKTNWTMSAFDVPLHYNLYQASNSSGNYDMRNLLNGTLVQRHPSHAVTFVDNHDTQPGEALESFVQGWFKPLAYATILTREQGYPQVFYGDYYGIPSDGVPSYRQQIDPLLKARQQYAYGRQHDYFDHWDVIGWTREGNASHPNSGLATIMSDGPGGSKWMYVGRQKAGEVWHDMTGNRSGTVTINQDGWGHFFVNGGSVSVWVKR

SEQ ID NO: 44825 - protein, 480 aa, Bacillus sp.
NGTIMQYFEWNVPNDGQHWNRLHNNAQNLKNAGITAIWIPPAWKGTSQNDVGYGAYDLYDLGEFNQKGTVRTKYGTKAELERAIRSLKANGIQVYGDVVMNHKGGADFTERVQAVEVNPQNRNQEVSGTYQIEAWTGFNFPGRGNQHSSFKWRWYHFDGTDWDQARQLANRIYKFRGDGKAWDWEVDTENGNYDYLMYADVDMDHPEVINELNRWGVWYANTLNLDGFRLDAVKHIKFSFMRDWLGHVRGQTGKNLFAVAEYWKNDLGALENYLSKTNWTMSAFDVPLHYNLYQASNSSGNYDMRNLLNGTLVQRHPSHAVTFVDNHDTQPGEALESFVQGWFKPLAYATILTREQGYPQVFYGDYYGIPSDGVPSYRQQIDPLLKARQQYAYGRQHDYFDHWDVIGWTREGNASHPNSGLATIMSDGPGGSKWMYVGRQKAGEVWHDMTGNRSGTVTINQDGWGHFFVNGGSVSVWVKR

SEQ ID NO: 44826 - protein, 480 aa, Bacillus sp.
NGTIMQYFEWNVPNDGQHWNRLHNNAQNLKNAGITAIWIPPAWKGTSQNDVGYGAYDLYDLGEFNQKGTVRTKYGTKAELERAIRSLKANGIQVYGDVVMNHKGGADFTERVQAVEVNPQNRNQEVSGTYQIEAWTGFNFPGRGNQHSSFKWRWYHFDGTDWDQSRQLANRIYKFRGDGKAWDWEVDTENGNYDYLMYADVDMDHPEVINELNRWGVWYANTLNLDGFRLDAVKHIKFSFMRDWLGHVRGQTGKNLFAVAEYWKNDLGALEDYLSKTNWTMSAFDVPLHYNLYQASNSSGNYDMRNLLNGTLVQRHPSHAVTFVDNHDTQPGEALESFVQGWFKPLAYATILTREQGYPQVFYGDYYGIPSDGVPSYRQQIDPLLKARQQYAYGRQHDYFDHWDVIGWTREGNASHPNSGLATIMSDGPGGSKWMYVGRQKAGEVWHDMTGNRSGTVTINQDGWGHFFVNGGSVSVWVKR

SEQ ID NO: 44827 - protein, 480 aa, Bacillus sp.
NGTIMQYFEWNVPNDGQHWNRLHNNAQNLKNAGITAIWIPPAWKGTSQNDVGYGAYDLYDLGEFNQKGTVRTKYGTKAELERAIRSLKANGIQVYGDVVMNHKGGADFTERVQAVEVNPQNRNQEVSGTYQIEAWTGFNFPGRGNQHSSFKWRWYHFDGTDWDQSRQLANRIYKFRGDGKAWDWEVDTQNGNYDYLMYADVDMDHPEVINELNRWGVWYANTLNLDGFRLDAVKHIKFSFMRDWLGHVRGQTGKNLFAVAEYWKNDLGALENYLSKTNWTMSAFDVPLHYNLYQASNSSGNYDMRNLLNGTLVQRHPSHAVTFVDNHDTQPGEALESFVQGWFKPLAYATILTREQGYPQVFYGDYYGIPSDGVPSYRQQIDPLLKARQQYAYGRQHDYFDHWDVIGWTREGNASHPNSGLATIMSDGPGGSKWMYVGRQKAGEVWHDMTGNRSGTVTINQDGWGHFFVNGGSVSVWVKR

SEQ ID NO: 44828 - protein, 480 aa, Bacillus sp.
NGTIMQYFEWNVPNDGQHWNRLHNNAQNLKNAGITAIWIPPAWKGTSQNDVGYGAYDLYDLGEFNQKGTVRTKYGTKAELERAIRSLKANGIQVYGDVVMNHKGGADFTERVQAVEVNPQNRNQEVSGTYQIEAWTGFNFPGRGNQHSSFKWRWYHFDGTDWDQSRQLANRIYKFRGDGKAWDWEVDTENGNYDYLMYADVDMDHPEVINELNRWGVWYANTLNLEGFRLDAVKHIKFSFMRDWLGHVRGQTGKNLFAVAEYWKNDLGALENYLSKTNWTMSAFDVPLHYNLYQASNSSGNYDMRNLLNGTLVQRHPSHAVTFVDNHDTQPGEALESFVQGWFKPLAYATILTREQGYPQVFYGDYYGIPSDGVPSYRQQIDPLLKARQQYAYGRQHDYFDHWDVIGWTREGNASHPNSGLATIMSDGPGGSKWMYVGRQKAGEVWHDMTGNRSGTVTINQDGWGHFFVNGGSVSVWVKR

SEQ ID NO: 44829 - protein, 480 aa, Bacillus sp.
NGTIMQYFEWNVPNDGQHWNRLHNNAQNLKNAGITAIWIPPAWKGTSQNDVGYGAYDLYDLGEFNQKGTVRTKYGTKAELERAIRSLKANGIQVYGDVVMNHKGGADFTERVQAVEVNPQNRNQEVSGTYQIEAWTGFNFPGRGNQHSSFKWRWYHFDGTDWDQSRQIANRIYKFRGDGKAWDWEVDTENGNYDYLMYADVDMDHPEVINELNRWGVWYANTLNLDGFRLDAVKHIKFSFMRDWLGHVRGQTGKNLFAVAEYWKNDLGALENYLSKTNWTMSAFDVPLHYNLYQASNSSGNYDMRNLLNGTLVQRHPSHAVTFVDNHDTQPGEALESFVQGWFKPLAYATILTREQGYPQVFYGDYYGIPSDGVPSYRQQIDPLLKARQQYAYGRQHDYFDHWDVIGWTREGNASHPNSGLATIMSDGPGGSKWMYVGRQKAGEVWHDMTGNRSGTVTINQDGWGHFFVNGGSVSVWVKR

SEQ ID NO: 44830 - protein, 480 aa, Bacillus sp.
NGTIMQYFEWNVPNDGQHWNRLHNNAQNLKNAGITAIWIPPAWKGTSQNDVGYGAYDLYDLGEFNQKGTVRTKYGTKAELERAIRSLKANGIQVYGDVVMNHKGGADFTERVQAVEVNPQNRNQEVSGTYQIEAWTGFNFPGRGNQHSSFKWRWYHFDGTDWDQSRQLANRIYKFRGDGKAWDWEVDTENGNYDYLMYADVDMDHPEVINELNRWGVWYANTLNLDGFRLDAVKHIKFSFMRDWLGHVRGQTGKNLFAVAEYWKNDLGALENYLSKTNWTMSAFDVPLHYNLYQASNASGNYDMRNLLNGTLVQRHPSHAVTFVDNHDTQPGEALESFVQGWFKPLAYATILTREQGYPQVFYGDYYGIPSDGVPSYRQQIDPLLKARQQYAYGRQHDYFDHWDVIGWTREGNASHPNSGLATIMSDGPGGSKWMYVGRQKAGEVWHDMTGNRSGTVTINQDGWGHFFVNGGSVSVWVKR

SEQ ID NO: 44831 - protein, 480 aa, Bacillus sp.
NGTIMQYFEWNVPNDGQHWNRLHNNAQNLKNAGITAIWIPPAWKGTSQNDVGYGAYDLYDLGEFNQKGTVRTKYGTKAELERAIRSLKANGIQVYGDVVMNHKGGADFTERMQAVEVNPQNRNQEVSGTYQIEAWTGFNFPGRGNQHSSFKWRWYHFDGTDWDQSRQLANRIYKFRGDGKAWDWEVDTENGNYDYLMYADVDMDHPEVINELNRWGVWYANTLNLDGFRLDAVKHIKFSFMRDWLGHVRGQTGKNLFAVAEYWKNDLGALENYLSKTNWTMSAFDVPLHYNLYQASNSSGNYDMRNLLNGTLVQRHPSHAVTFVDNHDTQPGEALESFVQGWFKPLAYATILTREQGYPQVFYGDYYGIPSDGVPSYRQQIDPLLKARQQYAYGRQHDYFDHWDVIGWTREGNASHPNSGLATIMSDGPGGSKWMYVGRQKAGEVWHDMTGNRSGTVTINQDGWGHFFVNGGSVSVWVKR

SEQ ID NO: 44832 - protein, 480 aa, Bacillus sp.
NGTIMQYFEWNVPNDGQHWNRLHNNAQNLKNAGITAIWIPPAWKGTKQNDVGYGAYDLYDLGEFNQKGTVRTKYGTKAELERAIRSLKANGIQVYGDVVMNHKGGADFTERVQAVEVNPQNRNQEVSGTYQIEAWTGFNFPGRGNQHSSFKWRWYHFDGTDWDQSRQLANRIYKFRGDGKAWDWEVDTENGNYDYLMYADVDMDHPEVINELNRWGVWYANTLNLDGFRLDAVKHIKFSFMRDWLGHVRGQTGKNLFAVAEYWKNDLGALENYLSKTNWTMSAFDVPLHYNLYQASNSSGNYDMRNLLNGTLVQRHPSHAVTFVDNHDTQPGEALESFVQGWFKPLAYATILTREQGYPQVFYGDYYGIPSDGVPSYRQQIDPLLKARQQYAYGRQHDYFDHWDVIGWTREGNASHPNSGLATIMSDGPGGSKWMYVGRQKAGEVWHDMTGNRSGTVTINQDGWGHFFVNGGSVSVWVKR

SEQ ID NO: 44833 - protein, 480 aa, Bacillus sp.
NGTIMQYFEWNVPNDGQHWNRLHNNAQNLKNAGITAIWIPPAWKGTSQNDVGYGAYDLYDLGEFNQKGTVRTKYGTKAELERAIRSLKANGIQVYGDVVMNHKGGADFTERVQAVEVNPQNRNQEVSGTYQIEAWTGFNFPGRGNQHSSFKWRWYHFDGTDWDQSRQLANRIYKFRGDGKAWDWEVDTENGNYDYLMYADVDMDHPEVINELNRWGVWYANTLNLDGFRLDAVKHIKFSFMRDWLGHVRGQTGKNLFAVAEYWKNDLGALENYLSKTNWTMSAFDVPLHYNLYQASNSSGNYDMRNLLNGTLVQRHPSHAVTFVDNHDTQPGEALESFVQGWFKPLAYATILTREQGYPQVFYGDYYGIPSDGVPSYRQQIDPLLKARQQYAYGRQHDYFDHWDVIGWTREGNASHPNSGLATIMSDGPGGSKWMYVGRQKAGEVWHDMTGNRSGTVTVNQDGWGHFFVNGGSVSVWVKR

SEQ ID NO: 44834 - protein, 480 aa, Bacillus sp.
NGTIMQYFEWNVPNDGQHWNRLHNNAQNLKNAGITAIWIPPAWKGTSQNDVGYGAYDLYDLGEFNQKGTVRTKYGTKAELERAIRSLKANGIQVYGDVVMNHKGGADFTERVQAVEVNPQNRNQEVSGTYQIEAWTGFNFPGRGNQHSSFKWRWYHFDGTDWDQSRQLANRIYKFRGDGKAWDWEVDTENGNYDYLMYADVDMDHPEVINELNRWGVWYANTLNLDGFRLDAVKHIKFSFMRDWLGHLRGQTGKNLFAVAEYWKNDLGALENYLSKTNWTMSAFDVPLHYNLYQASNSSGNYDMRNLLNGTLVQRHPSHAVTFVDNHDTQPGEALESFVQGWFKPLAYATILTREQGYPQVFYGDYYGIPSDGVPSYRQQIDPLLKARQQYAYGRQHDYFDHWDVIGWTREGNASHPNSGLATIMSDGPGGSKWMYVGRQKAGEVWHDMTGNRSGTVTINQDGWGHFFVNGGSVSVWVKR

SEQ ID NO: 44835 - protein, 480 aa, Bacillus sp.
NGTIMQYFEWNVPNDGQHWNRLHNNAQNLKNAGITAIWIPPAWKGTSQNDVGYGAYDLYDLGEFNQKGTVRTKYGTKAELERAIRSLKANGIQVYGDVVMNHKGGADFTERVQAVEVNPQNRNQEVSGTYQIEAWTGFNFPGRGNQHSSFKWRWYHFDGTDWDQSRQLANRIYKFRGDGKAWDWEVDTENGNYDYLMYADVDMDHPEVINELNRWGVWYANTLNLDGFRLDAVKHIKFSFMRDWLGHVRGQTGKNLFAVAEYWKNDLGALENYLSKTNWTMSAFDVPLHYNLYQASNSSGNYDMRNLLNGTLVQRHPSHAVSFVDNHDTQPGEALESFVQGWFKPLAYATILTREQGYPQVFYGDYYGIPSDGVPSYRQQIDPLLKARQQYAYGRQHDYFDHWDVIGWTREGNASHPNSGLATIMSDGPGGSKWMYVGRQKAGEVWHDMTGNRSGTVTINQDGWGHFFVNGGSVSVWVKR

SEQ ID NO: 44836 - protein, 480 aa, Bacillus sp.
NGTIMQYFEWNVPNDGQHWNRLHNNAQNLKNAGITAIWIPPAWKGTSQNDVGYGAYDLYDLGEFNQKGTVRTKYGTKAELERAIRSLKANGIQVYGDVVMNHKGGADFTERVQAVEVNPQNRNQEVSGTYQIEAWTGFNFPGRGNQHSSFKWRWYHFDGTDWDQSRQLANRIYKFRGDGKAWDWEVDTENGNYDYLMYADVDMDHPEVINELNRWGVWYANTLNLDGFRLDAVKHIKFSFMRDWLGHVRGQTGKNLFAVAEYWKNDLGALENYLSKTNWTMSAFDVPLHYNLYQASNSSGNYDMRNLLNGTLVQRHPSHAVTFVDNHDTQPGEALESFVQGWFKPLAYATILTREQGYPQVFYGDYYGIPSDGVPSYRQQIDPLLKARQQYAYGRQHDYFDHWDVIGWTREGNASHPNSGLATIMSDGPGGSKWMYVGRQKAGEAWHDMTGNRSGTVTINQDGWGHFFVNGGSVSVWVKR

SEQ ID NO: 44837 - protein, 480 aa, Bacillus sp.
NGTIMQYFEWNVPNDGQHWNRLHNNAQNLKNAGITAIWIPPAWKGTSQNDVGYGAYDLYDLGEFNQKGTVRTKYGTKAELERAIRSLKANGIQVYGDVVMNHKGGADFTERVQAVEVNPQNRNQEVSGTYQIEAWTGFNFPGRGNQHSSFKWRWYHFDGTDWDQSRQLANRIYKFRGDGKAWDWEVDTENGNYDYLMYADVDMDHPEVINELNRWGVWYANTLNLDGFRLDAVKHIKFSFMRDWLGHVRGQTGKNLFAVAEYWKNDLGALENYLSKTNWTMSAFDVPLHYNLYQASNSSGNYDMRNLLNGTLVQRHPSHAVTFVDNHDTQPGEALESFVQGWFKPLAYATILTREQGYPQVFYGDYYGIPSDGVPSYRQQIDPLLKARQQYAYGRQHDYFDHWDVVGWTREGNASHPNSGLATIMSDGPGGSKWMYVGRQKAGEVWHDMTGNRSGTVTINQDGWGHFFVNGGSVSVWVKR

SEQ ID NO: 44838 - protein, 480 aa, Bacillus sp.
NGTIMQYFEWNVPNDGQHWNRLHNNAQNLKNAGITAIWIPPAWKGTSQNDVGYGAYDLYDLGEFNQKGTVRTKYGTKAELERAIRSLKANGIQVYGDVVMNHKGGADFTERVQAVEVNPQNRNQEVSGTYQIEAWTGFNFPGRGNQHSSFKWRWYHFDGTDWDQSRQLANRIYKFRGDGKAWDWEVDTENGNYDYLMYADVDMDHPEVINELNRWGVWYANTLNLDGFRLDAVKHIKFSFMRDWLGHVRGQTGKNLFAVAEYWKNDLGALENYLSKTNWTMSAFDVPLHYNLYQASNSSGNYDMRNFLNGTLVQRHPSHAVTFVDNHDTQPGEALESFVQGWFKPLAYATILTREQGYPQVFYGDYYGIPSDGVPSYRQQIDPLLKARQQYAYGRQHDYFDHWDVIGWTREGNASHPNSGLATIMSDGPGGSKWMYVGRQKAGEVWHDMTGNRSGTVTINQDGWGHFFVNGGSVSVWVKR

SEQ ID NO: 44839 - protein, 480 aa, Bacillus sp.
NGTIMQYFEWNVPNDGQHWNRLHNNRQNLKNAGITAIWIPPAWKGTSQNDVGYGAYDLYDLGEFNQKGTVRTKYGTKAELERAIRSLKANGIQVYGDVVMNHKGGADFTERVQAVEVNPQNRNQEVSGTYQIEAWTGFNFPGRGNQHSSFKWRWYHFDGTDWDQSRQLANRIYKFRGDGKAWDWEVDTENGNYDYLMYADVDMDHPEVINELNRWGVWYANTLNLDGFRLDAVKHIKFSFMRDWLGHVRGQTGKNLFAVAEYWKNDLGALENYLSKTNWTMSAFDVPLHYNLYQASNSSGNYDMRNLLNGTLVQRHPSHAVTFVDNHDTQPGEALESFVQGWFKPLAYATILTREQGYPQVFYGDYYGIPSDGVPSYRQQIDPLLKARQQYAYGRQHDYFDHWDVIGWTREGNASHPNSGLATIMSDGPGGSKWMYVGRQKAGEVWHDMTGNRSGTVTINQDGWGHFFVNGGSVSVWVKR

SEQ ID NO: 44840 - protein, 480 aa, Bacillus sp.
NGTIMQYFEWNVPNDGQHWNRLHNNAQNLKNAGITAIWIPPAWKGTSQNDVGYGAYDLYDLGEFNQKGTVRTKYGTKAELERAIRSLKANGIQVYGDVVMNHKGGADFTERVQAVEVNPQNRNQEVSGTYQIESWTGFNFPGRGNQHSSFKWRWYHFDGTDWDQSRQLANRIYKFRGDGKAWDWEVDTENGNYDYLMYADVDMDHPEVINELNRWGVWYANTLNLDGFRLDAVKHIKFSFMRDWLGHVRGQTGKNLFAVAEYWKNDLGALENYLSKTNWTMSAFDVPLHYNLYQASNSSGNYDMRNLLNGTLVQRHPSHAVTFVDNHDTQPGEALESFVQGWFKPLAYATILTREQGYPQVFYGDYYGIPSDGVPSYRQQIDPLLKARQQYAYGRQHDYFDHWDVIGWTREGNASHPNSGLATIMSDGPGGSKWMYVGRQKAGEVWHDMTGNRSGTVTINQDGWGHFFVNGGSVSVWVKR

SEQ ID NO: 44841 - protein, 480 aa, Bacillus sp.
NGTIMQYFQWNVPNDGQHWNRLHNNAQNLKNAGITAIWIPPAWKGTSQNDVGYGAYDLYDLGEFNQKGTVRTKYGTKAELERAIRSLKANGIQVYGDVVMNHKGGADFTERVQAVEVNPQNRNQEVSGTYQIEAWTGFNFPGRGNQHSSFKWRWYHFDGTDWDQSRQLANRIYKFRGDGKAWDWEVDTENGNYDYLMYADVDMDHPEVINELNRWGVWYANTLNLDGFRLDAVKHIKFSFMRDWLGHVRGQTGKNLFAVAEYWKNDLGALENYLSKTNWTMSAFDVPLHYNLYQASNSSGNYDMRNLLNGTLVQRHPSHAVTFVDNHDTQPGEALESFVQGWFKPLAYATILTREQGYPQVFYGDYYGIPSDGVPSYRQQIDPLLKARQQYAYGRQHDYFDHWDVIGWTREGNASHPNSGLATIMSDGPGGSKWMYVGRQKAGEVWHDMTGNRSGTVTINQDGWGHFFVNGGSVSVWVKR

SEQ ID NO: 44842 - protein, 480 aa, Bacillus sp.
NGTIMQYFEWNVPNDGQHWNRLHNNAQNLKNAGITAIWIPPAWKGTSQNDVGYGAYDLYDLGEFNQKGTVRTKYGTKAELERAIRSLKANGIQVYGDVVMNHKGGADFTERVQAVEVNPQNRNQEVSGTYQIEAWTGFNFPGRGNQHSSFKWRWYHFDGTDWDQSRQLANRIYKFRGDGKAWDWEVDTENGNYDYLMYADVDMDHPEVINELNRWGVWYANTLNLDGFRLDAVKHIKFSFMRDWLGHVRGQTGKNLFAVAEYWKNDLGALENYLSKTNWTMSAFDVPLHYNLYQASNSSGNYDMRNLLNGTLVQRHPSHAVTFVDNHDTQPGEALESFVQGWFKPLAYATILTREQGYPQVFYGDYYGIPSDGVPSYRQQIDPLLKARQQYAYGRQHDYFDHWDVIGWTREGNASHPNSGLATIMSDGPGGGKWMYVGRQKAGEVWHDMTGNRSGTVTINQDGWGHFFVNGGSVSVWVKR

SEQ ID NO: 44843 - protein, 480 aa, Bacillus sp.
NGTIMQYFEWNVPNDGQHWNRLHNNAQNLKNAGITAIWIPPAWKGTSQNDVGYGAYDLYDLGEFNQKGTVRTKYGTKAELERAIRSLKANGIQVYGDVVMNHKGGADFTERVQAVEVNPQNRNQEVSGTYQIEAWTGFNFPGRGNQHSSFKWRWYHFDGTDWDQSRQLANRIYKFRGDGKAWDWEVDTENGNYDYLMYADVDMDHPEVINELNRWGVWYANTLNLDGFRLDAVKHIKFSFMRDWLGHVRGQTGKNLFAVAEYWKNDLGALENYLSKTNWTMSAFDVPAHYNLYQASNSSGNYDMRNLLNGTLVQRHPSHAVTFVDNHDTQPGEALESFVQGWFKPLAYATILTREQGYPQVFYGDYYGIPSDGVPSYRQQIDPLLKARQQYAYGRQHDYFDHWDVIGWTREGNASHPNSGLATIMSDGPGGSKWMYVGRQKAGEVWHDMTGNRSGTVTINQDGWGHFFVNGGSVSVWVKR

SEQ ID NO: 44844 - protein, 480 aa, Bacillus sp.
NGTIMQYFEWNVPNDGQHWNRLHNNAQNLKNAGITAIWIPPAWKGTSQNDVGYGAYDLYDLGEFNQKGTVRTKYGTKAELERAIRSLKANGIQVYGDVVMNHKGGADFTERVQAVEVNPQNRNQEVSGTYQIEAWTGFNFPGRGNQHSSFKWRWYHFDGTDWDQSRQLANRIYKFRGDGKAWDWEVDTENGNYDYLMYADVDMDHPEVINELNRWGVWYANTLNLDGFRLDAVKHIKFSFMRDWLGHVRGQTGKNLFAVAEYWKNDLGALENYLSKTNWTMSAFDVPLHYNLYQASNSSGNYDMRNLLNGTLVQRHPSHAVTFVDNHDTQPGEALESFVQGWFKPLAYATILTREQGYPQVFYGDYYGIPSDGVPSYRQQIDPLLKARQQYAYGRQHEYFDHWDVIGWTREGNASHPNSGLATIMSDGPGGSKWMYVGRQKAGEVWHDMTGNRSGTVTINQDGWGHFFVNGGSVSVWVKR

SEQ ID NO: 44845 - protein, 480 aa, Bacillus sp.
NGTIMQYFEWNVPNDGQHWNRLHNNAQNLKNAGITAIWIPPAWKGTSQNDVGYGAYDLYDLGEFNQKGTVRTKYGTKAELERAIRSLKANGIQVYGDVVMNHKGGADFTERVQAVEVNPQNRNQEVSGTYQIEAWTGFNFPGRGNQHSSFKWRWYHFDGTDWDQSRQLANRIYKFRGDGKAWDWEVDTENGNYDYLMYADVDMDHPEVINELNRWGVWYANTLNLDGFRLDAVKHIKFSFMRDWLGHVRGQTGKNLFAVAEYWKNDLGALENYLSKTNWTMSAFDVPLHYNLYQASNSSGNYDMRNLLNGTLVQRHPSHAVTFVDNHDTQPGEALEAFVQGWFKPLAYATILTREQGYPQVFYGDYYGIPSDGVPSYRQQIDPLLKARQQYAYGRQHDYFDHWDVIGWTREGNASHPNSGLATIMSDGPGGSKWMYVGRQKAGEVWHDMTGNRSGTVTINQDGWGHFFVNGGSVSVWVKR

SEQ ID NO: 44846 - protein, 480 aa, Bacillus sp.
NGTIMQYFEWNVPNDGQHWNRLHNNAQNLKNAGITAIWIPPAWKGTSQNDVGYGAYDLYDLGEFNQKGTVRTKYGTKAELERAIRSLKANGIQVYGDVVMNHKGGADFTERVQAVEVNPQNRNQEVSGTYQIEAWTGFNFPGRGNQHSSFKWRWYHFDGTDWDQSRQLANRIYKFRGDGKAWDWEVDTENGNYDYLMYADVDMDHPEVINELNRWGVWYANTLNLDGFRLDAVKHIKFSFMRDWLGHVRGQTGKNLFAVAEYWKNDLGALENYLSKTNWTMSAFDVPLHYNLYQASNSSGNYDMRNLLNGTLVQRHPSHAVTFVDNHDTQPGEALESFVQGWFKPLAYATILTREQGYPQVFYGDYYGMPSDGVPSYRQQIDPLLKARQQYAYGRQHDYFDHWDVIGWTREGNASHPNSGLATIMSDGPGGSKWMYVGRQKAGEVWHDMTGNRSGTVTINQDGWGHFFVNGGSVSVWVKR

SEQ ID NO: 44847 - protein, 480 aa, Bacillus sp.
NGTIMQYFEWNVPNDGQHWNRLHNNAQNLKNAGITAIWIPPAWKGTSQNDVGYGAYDLYDLGEFNQKGTVRTKYGTKAELERAIRSLKANGIQVYGDVVMNHKGGADFTERVQAVEVNPQNRNQEVSGTYQIEAWTGFNFPGRGNQHSSFKWRWYHFDGTDWDQSRQLANRIYKFRGDGKAWDWEVDTENGNYDYLMYADVDMDHPEVINELNRWGVWYANTLNLDGFRLDAVKHIKFSFMRDWLGHVRGQTGKNLFAVAEYWKNDLGALENYLSKTNWTMSAFDVPLHYNLYQASNSSGNYDMRNVLNGTLVQRHPSHAVTFVDNHDTQPGEALESFVQGWFKPLAYATILTREQGYPQVFYGDYYGIPSDGVPSYRQQIDPLLKARQQYAYGRQHDYFDHWDVIGWTREGNASHPNSGLATIMSDGPGGSKWMYVGRQKAGEVWHDMTGNRSGTVTINQDGWGHFFVNGGSVSVWVKR

SEQ ID NO: 44848 - protein, 480 aa, Bacillus sp.
NGTIMQYFEWNVPNDGQHWNRLHNNAQNLKNAGITAIWIPPAWKGTAQNDVGYGAYDLYDLGEFNQKGTVRTKYGTKAELERAIRSLKANGIQVYGDVVMNHKGGADFTERVQAVEVNPQNRNQEVSGTYQIEAWTGFNFPGRGNQHSSFKWRWYHFDGTDWDQSRQLANRIYKFRGDGKAWDWEVDTENGNYDYLMYADVDMDHPEVINELNRWGVWYANTLNLDGFRLDAVKHIKFSFMRDWLGHVRGQTGKNLFAVAEYWKNDLGALENYLSKTNWTMSAFDVPLHYNLYQASNSSGNYDMRNLLNGTLVQRHPSHAVTFVDNHDTQPGEALESFVQGWFKPLAYATILTREQGYPQVFYGDYYGIPSDGVPSYRQQIDPLLKARQQYAYGRQHDYFDHWDVIGWTREGNASHPNSGLATIMSDGPGGSKWMYVGRQKAGEVWHDMTGNRSGTVTINQDGWGHFFVNGGSVSVWVKR

SEQ ID NO: 44849 - protein, 480 aa, Bacillus sp.
NGTIMQYFEWNVPNDGQHWNRLHNNAQNLKNAGITAIWIPPAWKGTSQNDVGYGAYDLYDLGEFNQKGTVRTKYGTKAELERAIRSLKANGIQVYGDVVMNHKGGADFTERVQAVEVNPQNRNQEVSGTYQIEAWTGFNFPGRGNQHSSFKWRWYHFDGTDWDQSRQLANRIYKFRGDGKAWDWEVDTENGNYDWLMYADVDMDHPEVINELNRWGVWYANTLNLDGFRLDAVKHIKFSFMRDWLGHVRGQTGKNLFAVAEYWKNDLGALENYLSKTNWTMSAFDVPLHYNLYQASNSSGNYDMRNLLNGTLVQRHPSHAVTFVDNHDTQPGEALESFVQGWFKPLAYATILTREQGYPQVFYGDYYGIPSDGVPSYRQQIDPLLKARQQYAYGRQHDYFDHWDVIGWTREGNASHPNSGLATIMSDGPGGSKWMYVGRQKAGEVWHDMTGNRSGTVTINQDGWGHFFVNGGSVSVWVKR

SEQ ID NO: 44850 - protein, 480 aa, Bacillus sp.
NGTIMQYFEWNVPNDGQHWNRLHNNAQNLKNAGITAIWIPPAWKGTSQNDVGYGAYDLYDLGEFNQKGTVRTKYGTKAELERAIRSLKANGIQVYGDVVMNHKGGADFTERVQAVEVNPQNRNQEVSGTYQIEAWTGFNFPGRGNQHSSFKWRWYHFDGTDWDQSRQLANRIYKFRGDGKAWDWEADTENGNYDYLMYADVDMDHPEVINELNRWGVWYANTLNLDGFRLDAVKHIKFSFMRDWLGHVRGQTGKNLFAVAEYWKNDLGALENYLSKTNWTMSAFDVPLHYNLYQASNSSGNYDMRNLLNGTLVQRHPSHAVTFVDNHDTQPGEALESFVQGWFKPLAYATILTREQGYPQVFYGDYYGIPSDGVPSYRQQIDPLLKARQQYAYGRQHDYFDHWDVIGWTREGNASHPNSGLATIMSDGPGGSKWMYVGRQKAGEVWHDMTGNRSGTVTINQDGWGHFFVNGGSVSVWVKR

SEQ ID NO: 44851 - protein, 480 aa, Bacillus sp.
NGTIMQYFEWNVPNDGQHWNRLHNNAQNLKNAGITAIWIPPAWKGTSQNDVGYGAYDLYDLGEFNQKGTVRTKYGTKAELERAIRSLKANGIQVYGDVVMNHKGGADFTERVQAVEVNPQNRNQEVSGTYQIEAWTGFNFPGRGNQHSSFKWRWYHFDGTDWDQSRQLANRIYKFRGDGKAWDWEVDTENGNYDYLMYADVDMDHPEVINELNRWGVWYANTLNLDGFRLDAVKHIKFSFMRDWLGHVRGQTGKNLFAVAEYWKNDLGALENYLSKTNWTMSAFDVPLHYNLYQASNSSGNYDMRNLLNGTLVQRHPSHAVTFVDNHDTQPGEALESFVQGWFKPLAYATILTREQGYPQVFYGDYYGIPSDGVPSYRQQIDPLLKARQQYAYGRQHDYFEHWDVIGWTREGNASHPNSGLATIMSDGPGGSKWMYVGRQKAGEVWHDMTGNRSGTVTINQDGWGHFFVNGGSVSVWVKR

SEQ ID NO: 44852 - protein, 480 aa, Bacillus sp.
NGTIMQYFEWNVPNDGQHWNRLHNNAQNLKNAGITAIWIPPGWKGTSQNDVGYGAYDLYDLGEFNQKGTVRTKYGTKAELERAIRSLKANGIQVYGDVVMNHKGGADFTERVQAVEVNPQNRNQEVSGTYQIEAWTGFNFPGRGNQHSSFKWRWYHFDGTDWDQSRQLANRIYKFRGDGKAWDWEVDTENGNYDYLMYADVDMDHPEVINELNRWGVWYANTLNLDGFRLDAVKHIKFSFMRDWLGHVRGQTGKNLFAVAEYWKNDLGALENYLSKTNWTMSAFDVPLHYNLYQASNSSGNYDMRNLLNGTLVQRHPSHAVTFVDNHDTQPGEALESFVQGWFKPLAYATILTREQGYPQVFYGDYYGIPSDGVPSYRQQIDPLLKARQQYAYGRQHDYFDHWDVIGWTREGNASHPNSGLATIMSDGPGGSKWMYVGRQKAGEVWHDMTGNRSGTVTINQDGWGHFFVNGGSVSVWVKR

SEQ ID NO: 44853 - protein, 480 aa, Bacillus sp.
NGTIMQYFEWNVPNDGQHWNRLHNNAQNLKNAGITAIWIPPAWKGTSQNDVGYGAYDLYDLGEFNQKGTVRTKYGTKAELERAIRSLKANGIQVYGDVVMNHKGGADFTERVQAVEVNPQNRNQEVSGTYQIEAWTGFNFPGRGNQHSSFKWRWYHFDGTDWDQSRQLANRIYKFRGDGKAWDWEVDTENGNYDYLMYADVDMDHPEVINELNRWGVWYANTLNLDGFRLDAVKHIKFSFMRDWLGHVRGQTGKNLFAVAEYWKNDLGALENYLSKTNWTMSAFDVPLHYNLYQASNSSGNYDMRNLLNGTLVQRHPSHVVTFVDNHDTQPGEALESFVQGWFKPLAYATILTREQGYPQVFYGDYYGIPSDGVPSYRQQIDPLLKARQQYAYGRQHDYFDHWDVIGWTREGNASHPNSGLATIMSDGPGGSKWMYVGRQKAGEVWHDMTGNRSGTVTINQDGWGHFFVNGGSVSVWVKR

SEQ ID NO: 44854 - protein, 480 aa, Bacillus sp.
NGTIMQYFEWNVPNDGQHWNRLHNNAQNLKNAGITAIWIPPAWKGTSQNDVGYGAYDLYDLGEFNQKGTVRTKYGTKAELERAIRSLKANGIQVYGDVVMNHKGGADFTERVQAVEVNPQNRNQEVSGTYQIEAWTGFNFPGRGNQHSSFKWRWYHYDGTDWDQSRQLANRIYKFRGDGKAWDWEVDTENGNYDYLMYADVDMDHPEVINELNRWGVWYANTLNLDGFRLDAVKHIKFSFMRDWLGHVRGQTGKNLFAVAEYWKNDLGALENYLSKTNWTMSAFDVPLHYNLYQASNSSGNYDMRNLLNGTLVQRHPSHAVTFVDNHDTQPGEALESFVQGWFKPLAYATILTREQGYPQVFYGDYYGIPSDGVPSYRQQIDPLLKARQQYAYGRQHDYFDHWDVIGWTREGNASHPNSGLATIMSDGPGGSKWMYVGRQKAGEVWHDMTGNRSGTVTINQDGWGHFFVNGGSVSVWVKR

SEQ ID NO: 44855 - protein, 480 aa, Bacillus sp.
NGTIMQYFEWNVPNDGQHWNRLHNNAQNLKNAGITAIWIPPAWKGTSQNDVGYGAYDLYDLGEFNQKGTVRTKYGTKAELERAIRSLKANGIQVYGDVVMNHKGGADFTERVQAVEVNPQNRNQEVSGTYQIEAWTGFNFPGRGNQHSSFKWRWYHFDGTDWDQSRQLANRIYKFRGDGKAWDWEVDTENGNYDYLMYADVDMDHPEVINELNRWGVWYANTLNLDGFRLDAVKHIKFSFMRDWLGHVRGQTGKNLFAVAEYWKNDLGALENYLSKTNWTMTAFDVPLHYNLYQASNSSGNYDMRNLLNGTLVQRHPSHAVTFVDNHDTQPGEALESFVQGWFKPLAYATILTREQGYPQVFYGDYYGIPSDGVPSYRQQIDPLLKARQQYAYGRQHDYFDHWDVIGWTREGNASHPNSGLATIMSDGPGGSKWMYVGRQKAGEVWHDMTGNRSGTVTINQDGWGHFFVNGGSVSVWVKR

SEQ ID NO: 44856 - protein, 480 aa, Bacillus sp.
NGTIMQYFEWNVPNDGQHWNRLHNNGQNLKNAGITAIWIPPAWKGTSQNDVGYGAYDLYDLGEFNQKGTVRTKYGTKAELERAIRSLKANGIQVYGDVVMNHKGGADFTERVQAVEVNPQNRNQEVSGTYQIEAWTGFNFPGRGNQHSSFKWRWYHFDGTDWDQSRQLANRIYKFRGDGKAWDWEVDTENGNYDYLMYADVDMDHPEVINELNRWGVWYANTLNLDGFRLDAVKHIKFSFMRDWLGHVRGQTGKNLFAVAEYWKNDLGALENYLSKTNWTMSAFDVPLHYNLYQASNSSGNYDMRNLLNGTLVQRHPSHAVTFVDNHDTQPGEALESFVQGWFKPLAYATILTREQGYPQVFYGDYYGIPSDGVPSYRQQIDPLLKARQQYAYGRQHDYFDHWDVIGWTREGNASHPNSGLATIMSDGPGGSKWMYVGRQKAGEVWHDMTGNRSGTVTINQDGWGHFFVNGGSVSVWVKR

SEQ ID NO: 44857 - protein, 480 aa, Bacillus sp.
NGTIMQYFEWNVPNDGQHWNRLHNNAQNLKNAGITAIWIPPAWKGTSQNDVGYGAYDLYDLGEFNQKGTVRTKYGTKAELERAIRSLKANGIQVYGDVVMNHKGGADFTERVQAVEVNPQNRNQEVSGTYQIEAWTGFNFPGRGNQHSSFKWRWYHFDGTDWDQSRQLANRIYKFRGDGKAWDWEVDTENGNYDYLMYADVDMDHPEVINELNRWGVWYANTLNLDGFRLDAVKHIKFSFMRDWLGHVRGQTGKNLFAVAEYWKNDLGALENYLSKTNWTMSAFDVPLHYNLYQASNSSGNYDMRNLLNGTLVQRHPSHAVTFVDNHDTQPGEALESFVQGWFKPLAYATILTREQGYPQVFYGDYYGIPSDGVPSYRQQMDPLLKARQQYAYGRQHDYFDHWDVIGWTREGNASHPNSGLATIMSDGPGGSKWMYVGRQKAGEVWHDMTGNRSGTVTINQDGWGHFFVNGGSVSVWVKR

SEQ ID NO: 44858 - protein, 480 aa, Bacillus sp.
NGTIMQYFEWNVPNDGQHWNRLHNNAQNLKNAGITAIWIPPAWKGTSQNDVGYGAYDLYDLGEFNQKGTVRTKYGTKAELERAIRSLKANGIQVYGDVVMNHKGGAEFTERVQAVEVNPQNRNQEVSGTYQIEAWTGFNFPGRGNQHSSFKWRWYHFDGTDWDQSRQLANRIYKFRGDGKAWDWEVDTENGNYDYLMYADVDMDHPEVINELNRWGVWYANTLNLDGFRLDAVKHIKFSFMRDWLGHVRGQTGKNLFAVAEYWKNDLGALENYLSKTNWTMSAFDVPLHYNLYQASNSSGNYDMRNLLNGTLVQRHPSHAVTFVDNHDTQPGEALESFVQGWFKPLAYATILTREQGYPQVFYGDYYGIPSDGVPSYRQQIDPLLKARQQYAYGRQHDYFDHWDVIGWTREGNASHPNSGLATIMSDGPGGSKWMYVGRQKAGEVWHDMTGNRSGTVTINQDGWGHFFVNGGSVSVWVKR

SEQ ID NO: 44859 - protein, 480 aa, Bacillus sp.
NGTIMQYFEWNVPNDGQHWNRLHNNAQNLKNAGITAIWIPPAWKGTSQNDVGYGAYDLYDLGEFNQKGTVRTKYGTKAELERAIRSLKANGIQVYGDVVMNHKGGADFTERVQAVEVNPQNRNQEVEGTYQIEAWTGFNFPGRGNQHSSFKWRWYHFDGTDWDQSRQLANRIYKFRGDGKAWDWEVDTENGNYDYLMYADVDMDHPEVINELNRWGVWYANTLNLDGFRLDAVKHIKFSFMRDWLGHVRGQTGKNLFAVAEYWKNDLGALENYLSKTNWTMSAFDVPLHYNLYQASNSSGNYDMRNLLNGTLVQRHPSHAVTFVDNHDTQPGEALESFVQGWFKPLAYATILTREQGYPQVFYGDYYGIPSDGVPSYRQQIDPLLKARQQYAYGRQHDYFDHWDVIGWTREGNASHPNSGLATIMSDGPGGSKWMYVGRQKAGEVWHDMTGNRSGTVTINQDGWGHFFVNGGSVSVWVKR

SEQ ID NO: 44860 - protein, 480 aa, Bacillus sp.
NGTIMQYFEWNVPNDGQHWNRLHNNAQNLKNAGITAIWIPPAWKGTSQNDVGYGAYDLYDLGEFNQKGTVRTKYGTKAELERAIRSLKANGIQVYGDVVMNHKGGADFTERVQAVEVNPQNRNQEVSGTYQIEVWTGFNFPGRGNQHSSFKWRWYHFDGTDWDQSRQLANRIYKFRGDGKAWDWEVDTENGNYDYLMYADVDMDHPEVINELNRWGVWYANTLNLDGFRLDAVKHIKFSFMRDWLGHVRGQTGKNLFAVAEYWKNDLGALENYLSKTNWTMSAFDVPLHYNLYQASNSSGNYDMRNLLNGTLVQRHPSHAVTFVDNHDTQPGEALESFVQGWFKPLAYATILTREQGYPQVFYGDYYGIPSDGVPSYRQQIDPLLKARQQYAYGRQHDYFDHWDVIGWTREGNASHPNSGLATIMSDGPGGSKWMYVGRQKAGEVWHDMTGNRSGTVTINQDGWGHFFVNGGSVSVWVKR

SEQ ID NO: 44861 - protein, 480 aa, Bacillus sp.
NGTIMQYFEWNVPNDGQHWNRLHNNAQNLKNAGITAIWIPPAWKGTSQNDVGYGAYDLYDLGEFNQKGTVRTKYGTKAELERAIRSLKANGIQVYGDVVMNHKGGADFTERVQAIEVNPQNRNQEVSGTYQIEAWTGFNFPGRGNQHSSFKWRWYHFDGTDWDQSRQLANRIYKFRGDGKAWDWEVDTENGNYDYLMYADVDMDHPEVINELNRWGVWYANTLNLDGFRLDAVKHIKFSFMRDWLGHVRGQTGKNLFAVAEYWKNDLGALENYLSKTNWTMSAFDVPLHYNLYQASNSSGNYDMRNLLNGTLVQRHPSHAVTFVDNHDTQPGEALESFVQGWFKPLAYATILTREQGYPQVFYGDYYGIPSDGVPSYRQQIDPLLKARQQYAYGRQHDYFDHWDVIGWTREGNASHPNSGLATIMSDGPGGSKWMYVGRQKAGEVWHDMTGNRSGTVTINQDGWGHFFVNGGSVSVWVKR

SEQ ID NO: 44862 - protein, 480 aa, Bacillus sp.
NGTIMQYFEWNVPNDGQHWNRLHNNAQNLKNAGITAIWIPPAWKGTSQNDVGYGAYDLYDLGEFNQKGTVRTKYGTKAELERAIRSLKANGIQVYGDVVMNHKGGADFTERVQAVEVNPQNRNQEVSGTYQIEAWTGFNFPGRGNQHSSFKWRWYHFDGTDWDQSRQLANRIYKFRGDGKAWDWEVDTENGNYDYLMYADVDMDHPEVINELNRWGVWYANTLNLDGFRLDAVKHIKFSFMRDWLGHVRGQTGKNLFAVAEYWKNDLGALENYLSKTNWTMSAFDVPLHYNLYQASNSSGNYDMRNLLNGTLVQRHPSHAVTFVDNHDTQPGEALESFVQGWFKPLAYATILTREQGYPQAFYGDYYGIPSDGVPSYRQQIDPLLKARQQYAYGRQHDYFDHWDVIGWTREGNASHPNSGLATIMSDGPGGSKWMYVGRQKAGEVWHDMTGNRSGTVTINQDGWGHFFVNGGSVSVWVKR

SEQ ID NO: 44863 - protein, 480 aa, Bacillus sp.
NGTIMQYFEWNVPNDGQHWNRLHNNAQNLKNAGITAIWIPPAWKGTSQNDVGYGAYDLYDLGEFNQKGTVRTKYGTKAELERAIRSLKANGIQVYGDVVMNHKGGADFTERVQAVEVNPQNRNQEVSGTYQIEAWTGFNFPGRGNQHSSFKWRWYHFDGTDWDQQRQLANRIYKFRGDGKAWDWEVDTENGNYDYLMYADVDMDHPEVINELNRWGVWYANTLNLDGFRLDAVKHIKFSFMRDWLGHVRGQTGKNLFAVAEYWKNDLGALENYLSKTNWTMSAFDVPLHYNLYQASNSSGNYDMRNLLNGTLVQRHPSHAVTFVDNHDTQPGEALESFVQGWFKPLAYATILTREQGYPQVFYGDYYGIPSDGVPSYRQQIDPLLKARQQYAYGRQHDYFDHWDVIGWTREGNASHPNSGLATIMSDGPGGSKWMYVGRQKAGEVWHDMTGNRSGTVTINQDGWGHFFVNGGSVSVWVKR

SEQ ID NO: 44864 - protein, 480 aa, Bacillus sp.
NGTIMQYFEWNVPNDGQHWNRLHNNAQNLKNAGITAIWIPPAWKGTSQNDVGYGAYDLYDLGEFNQKGTVRTKYGTKAELERAIRSLKANGIQVYGDVVMNHKGGADFTERVQAVEVNPQNRNQEVSGTYQIEAWTGFNFPGRGNQHSSFKWRWYHFDGTDWDQSRQLANRIYKFRGDGKAWDWEVDTENGNYDYLMYADVDMDHPEVINELNRWGVWYANTLNLDGFRLDAVKHIKFSFMRDWLGHVRGQTGKNLFAVAEYWKNDLGALENYLSKTNWTMSAFDVPLHYNLYQASNSSGNYDMRNLLNGTLVQRHPSHAVTFVDNHDTQPGEALESFVQGWFKPLAYATILTREQGYPQVFYGDYYGIPSDGVPSYRQQLDPLLKARQQYAYGRQHDYFDHWDVIGWTREGNASHPNSGLATIMSDGPGGSKWMYVGRQKAGEVWHDMTGNRSGTVTINQDGWGHFFVNGGSVSVWVKR

SEQ ID NO: 44865 - protein, 480 aa, Bacillus sp.
NGTIMQYFEWNVPNDGQHWNRLHNNAQNLKNAGITAIWIPPAWKGTSQNDVGYGAYDLYDLGEFNQKGTVRTKYGTKAELERAIRSLKANGIQVYGDVVMNHKGGADFTERVQAVEVNPQNRNQEVQGTYQIEAWTGFNFPGRGNQHSSFKWRWYHFDGTDWDQSRQLANRIYKFRGDGKAWDWEVDTENGNYDYLMYADVDMDHPEVINELNRWGVWYANTLNLDGFRLDAVKHIKFSFMRDWLGHVRGQTGKNLFAVAEYWKNDLGALENYLSKTNWTMSAFDVPLHYNLYQASNSSGNYDMRNLLNGTLVQRHPSHAVTFVDNHDTQPGEALESFVQGWFKPLAYATILTREQGYPQVFYGDYYGIPSDGVPSYRQQIDPLLKARQQYAYGRQHDYFDHWDVIGWTREGNASHPNSGLATIMSDGPGGSKWMYVGRQKAGEVWHDMTGNRSGTVTINQDGWGHFFVNGGSVSVWVKR

SEQ ID NO: 44866 - protein, 480 aa, Bacillus sp.
NGTIMQYFEWNVPNDGQHWNRLHNNAQNLKNAGITAIWIPPAWKGTSQNDVGYGAYDLYDLGEFNQKGTVRTKYGTKAELERSIRSLKANGIQVYGDVVMNHKGGADFTERVQAVEVNPQNRNQEVSGTYQIEAWTGFNFPGRGNQHSSFKWRWYHFDGTDWDQSRQLANRIYKFRGDGKAWDWEVDTENGNYDYLMYADVDMDHPEVINELNRWGVWYANTLNLDGFRLDAVKHIKFSFMRDWLGHVRGQTGKNLFAVAEYWKNDLGALENYLSKTNWTMSAFDVPLHYNLYQASNSSGNYDMRNLLNGTLVQRHPSHAVTFVDNHDTQPGEALESFVQGWFKPLAYATILTREQGYPQVFYGDYYGIPSDGVPSYRQQIDPLLKARQQYAYGRQHDYFDHWDVIGWTREGNASHPNSGLATIMSDGPGGSKWMYVGRQKAGEVWHDMTGNRSGTVTINQDGWGHFFVNGGSVSVWVKR

SEQ ID NO: 44867 - protein, 480 aa, Bacillus sp.
NGTIMQYFEWNVPNDGQHWNRLHNNAQNLKNAGITAIWIPPAWKGTSQNDVGYGAYDLYDLGEFNQKGTVRTKYGTKAELERAIRSLKANGIQVYGDVVMNHKGGADFTERVQAVEVNPQNRNQEVSGTYQIEAWTGFNFPGRGNQHSSFKWRWYHFDGTDWDQSRQLANRIYKFRGDGKAWDWEVDTENGNYDYLMYADVDMDHPETINELNRWGVWYANTLNLDGFRLDAVKHIKFSFMRDWLGHVRGQTGKNLFAVAEYWKNDLGALENYLSKTNWTMSAFDVPLHYNLYQASNSSGNYDMRNLLNGTLVQRHPSHAVTFVDNHDTQPGEALESFVQGWFKPLAYATILTREQGYPQVFYGDYYGIPSDGVPSYRQQIDPLLKARQQYAYGRQHDYFDHWDVIGWTREGNASHPNSGLATIMSDGPGGSKWMYVGRQKAGEVWHDMTGNRSGTVTINQDGWGHFFVNGGSVSVWVKR

SEQ ID NO: 44868 - protein, 480 aa, Bacillus sp.
NGTIMQYFEWNVPNDGQHWNRLHNNAQNLKNAGITAIWIPPAWKGTSQNDVGYGAYDLYDLGEFNQKGTVRTKYGTKAELERAIRSLKANGIQLYGDVVMNHKGGADFTERVQAVEVNPQNRNQEVSGTYQIEAWTGFNFPGRGNQHSSFKWRWYHFDGTDWDQSRQLANRIYKFRGDGKAWDWEVDTENGNYDYLMYADVDMDHPEVINELNRWGVWYANTLNLDGFRLDAVKHIKFSFMRDWLGHVRGQTGKNLFAVAEYWKNDLGALENYLSKTNWTMSAFDVPLHYNLYQASNSSGNYDMRNLLNGTLVQRHPSHAVTFVDNHDTQPGEALESFVQGWFKPLAYATILTREQGYPQVFYGDYYGIPSDGVPSYRQQIDPLLKARQQYAYGRQHDYFDHWDVIGWTREGNASHPNSGLATIMSDGPGGSKWMYVGRQKAGEVWHDMTGNRSGTVTINQDGWGHFFVNGGSVSVWVKR

SEQ ID NO: 44869 - protein, 480 aa, Bacillus sp.
NGTIMQYFEWNVPNDGQHWNRLHNNAQNLKNAGITAIWIPPAWKGTSQNDVGYGAYDLYDLGEFNQKGTVRTKYGTKAELERAIRSLKANGIQVYGDVVMNHKGGADFTERVQAVEVNPQNRNQEVSGTYQIEAWTGFNFPGRGNQHSSFKWRWYHFDGTDWDQSRQLANRIYKFRGDGKAWDWEVDTENGNYDYLMYADVDMDHPEVINELNRWGVWYANTLNLDGFRLDAVKHIKFSFMRDWLGHVRGQTGKNLFAVAEYWKNDLGALENYLSKTNWTMSAFDVPLHYNLYQASNSSGNYDMRNLLNGTLVQRHPSHAITFVDNHDTQPGEALESFVQGWFKPLAYATILTREQGYPQVFYGDYYGIPSDGVPSYRQQIDPLLKARQQYAYGRQHDYFDHWDVIGWTREGNASHPNSGLATIMSDGPGGSKWMYVGRQKAGEVWHDMTGNRSGTVTINQDGWGHFFVNGGSVSVWVKR

SEQ ID NO: 44870 - protein, 480 aa, Bacillus sp.
NGTIMQYFEWNVPNDGQHWNRLHNNAQNLKNAGITAIWIPPAWKGTSQNDVGYGAYDIYDLGEFNQKGTVRTKYGTKAELERAIRSLKANGIQVYGDVVMNHKGGADFTERVQAVEVNPQNRNQEVSGTYQIEAWTGFNFPGRGNQHSSFKWRWYHFDGTDWDQSRQLANRIYKFRGDGKAWDWEVDTENGNYDYLMYADVDMDHPEVINELNRWGVWYANTLNLDGFRLDAVKHIKFSFMRDWLGHVRGQTGKNLFAVAEYWKNDLGALENYLSKTNWTMSAFDVPLHYNLYQASNSSGNYDMRNLLNGTLVQRHPSHAVTFVDNHDTQPGEALESFVQGWFKPLAYATILTREQGYPQVFYGDYYGIPSDGVPSYRQQIDPLLKARQQYAYGRQHDYFDHWDVIGWTREGNASHPNSGLATIMSDGPGGSKWMYVGRQKAGEVWHDMTGNRSGTVTINQDGWGHFFVNGGSVSVWVKR

SEQ ID NO: 44871 - protein, 480 aa, Bacillus sp.
NGTIMQYFEWNVPNDGQHWNRLHNNAQNLKNAGITAIWIPPAWKGTSQNDVGYGAYDLYDLGDFNQKGTVRTKYGTKAELERAIRSLKANGIQVYGDVVMNHKGGADFTERVQAVEVNPQNRNQEVSGTYQIEAWTGFNFPGRGNQHSSFKWRWYHFDGTDWDQSRQLANRIYKFRGDGKAWDWEVDTENGNYDYLMYADVDMDHPEVINELNRWGVWYANTLNLDGFRLDAVKHIKFSFMRDWLGHVRGQTGKNLFAVAEYWKNDLGALENYLSKTNWTMSAFDVPLHYNLYQASNSSGNYDMRNLLNGTLVQRHPSHAVTFVDNHDTQPGEALESFVQGWFKPLAYATILTREQGYPQVFYGDYYGIPSDGVPSYRQQIDPLLKARQQYAYGRQHDYFDHWDVIGWTREGNASHPNSGLATIMSDGPGGSKWMYVGRQKAGEVWHDMTGNRSGTVTINQDGWGHFFVNGGSVSVWVKR

SEQ ID NO: 44872 - protein, 480 aa, Bacillus sp.
NGTIMQYFEWNVPNDGQHWNRLHNNAQNLKNAGITAIWIPPAWKGTSQNDVGYGAYDLYDLGEFNQKGTVRTKYGTKAELERAIRSLKANGIQVYGDVVMNHKGGADFTERVQAVEVNPQNRNQEVSGTYQIEAWTGFNFPGRGNQHSSFKWRWYHFDGTDWDQSRQLANRIYKFRGDGKAWDWEVDTENGNYDFLMYADVDMDHPEVINELNRWGVWYANTLNLDGFRLDAVKHIKFSFMRDWLGHVRGQTGKNLFAVAEYWKNDLGALENYLSKTNWTMSAFDVPLHYNLYQASNSSGNYDMRNLLNGTLVQRHPSHAVTFVDNHDTQPGEALESFVQGWFKPLAYATILTREQGYPQVFYGDYYGIPSDGVPSYRQQIDPLLKARQQYAYGRQHDYFDHWDVIGWTREGNASHPNSGLATIMSDGPGGSKWMYVGRQKAGEVWHDMTGNRSGTVTINQDGWGHFFVNGGSVSVWVKR

SEQ ID NO: 44873 - protein, 480 aa, Bacillus sp.
NGTIMQYFEWNVPNDGQHWNRLHNNAQNLKNAGITAIWIPPAWKGTSQNDVGYGAYDLYDLGEFNQKGTVRTKYGTKAELERAIRSLKANGIQVYGDVVMNHKGGADFTERVQAVEVNPQNRNQEVSGTYQIEAWTGFNFPGRGNQHSSFKWRWYHFDGTDWDQSRQLANRIYKFRGDGKAWDWEVDTENGNYDYLMYADVDMDHPEVINELNRWGVWYANTLNLDGFRLDAVKHIKFSFMRDWLGHVRGQTGKNLFAVAEYWKNDLGALENYLSKTNWTMSAFDVPYHYNLYQASNSSGNYDMRNLLNGTLVQRHPSHAVTFVDNHDTQPGEALESFVQGWFKPLAYATILTREQGYPQVFYGDYYGIPSDGVPSYRQQIDPLLKARQQYAYGRQHDYFDHWDVIGWTREGNASHPNSGLATIMSDGPGGSKWMYVGRQKAGEVWHDMTGNRSGTVTINQDGWGHFFVNGGSVSVWVKR

SEQ ID NO: 44874 - protein, 480 aa, Bacillus sp.
NGTIMQYFEWNVPNDGQHWNRLHNNAQNLKNAGITAIWIPPAWKGTSQNDVGYGAYDLYDLGEFNQKGTVRTKYGTKAELERAIRSLKANGIQVYGDVVMNHKGGADFTERVQAVEVNPQNRNQEVSGTYQIEGWTGFNFPGRGNQHSSFKWRWYHFDGTDWDQSRQLANRIYKFRGDGKAWDWEVDTENGNYDYLMYADVDMDHPEVINELNRWGVWYANTLNLDGFRLDAVKHIKFSFMRDWLGHVRGQTGKNLFAVAEYWKNDLGALENYLSKTNWTMSAFDVPLHYNLYQASNSSGNYDMRNLLNGTLVQRHPSHAVTFVDNHDTQPGEALESFVQGWFKPLAYATILTREQGYPQVFYGDYYGIPSDGVPSYRQQIDPLLKARQQYAYGRQHDYFDHWDVIGWTREGNASHPNSGLATIMSDGPGGSKWMYVGRQKAGEVWHDMTGNRSGTVTINQDGWGHFFVNGGSVSVWVKR

SEQ ID NO: 44875 - protein, 480 aa, Bacillus sp.
NGTIMQYFEWNVPNDGQHWNRLHNNAQNLKNAGITAIWIPPAWKGTSQNDVGYGAYDLYDLGEFNQKGTVRTKYGTKAELERAIRSLKANGIQVYGDVVMNHKGGADFTERVQAVEVNPQNRNQEVSGTYQIEAWTGFNFPGRGNQHSSFKWRWYHFDGTDWDQSRQLANRIYKFRGDGKAWDWEVDTENGNYDYLMYADVDMDHPEVINELNRWGVWYANTLNLDGFRLDAVKHIKFSFMRDWLGHVRGQTGKNLFAVAEYWKNDLGALENYLSKTNWTMSAFDVPLHYNLYQASNSSGNYDMRNLLNGTLVQRHPSHAVTFVDNHDTQPGEALESFVQGWFKPLAYATILTREQGYPQVFYGDYYGIPSDGVPSYRQQIDPLLKARQQYAYGRQHDYFDHWDVIGWTREGNASHPNSGLATIMSDGPGGQKWMYVGRQKAGEVWHDMTGNRSGTVTINQDGWGHFFVNGGSVSVWVKR

SEQ ID NO: 44876 - protein, 480 aa, Bacillus sp.
NGTIMQYFEWNVPNDGQHWNRLHNNAQNLKNAGITAIWIPPAWKGTSQNDVGYGAYDLYDLGEFNQKGTVRTKYGTKAELERAIRSLKANGIQVYGDVVMNHKGGADFTERVQAVEVNPQNRNQEVSGTYQIEAWTGFNFPGRGNQHSSFKWRWYHFDGTDWDQSRQLANRIYKFRGDGKAWDWEVDTENGNYDYLMYLDVDMDHPEVINELNRWGVWYANTLNLDGFRLDAVKHIKFSFMRDWLGHVRGQTGKNLFAVAEYWKNDLGALENYLSKTNWTMSAFDVPLHYNLYQASNSSGNYDMRNLLNGTLVQRHPSHAVTFVDNHDTQPGEALESFVQGWFKPLAYATILTREQGYPQVFYGDYYGIPSDGVPSYRQQIDPLLKARQQYAYGRQHDYFDHWDVIGWTREGNASHPNSGLATIMSDGPGGSKWMYVGRQKAGEVWHDMTGNRSGTVTINQDGWGHFFVNGGSVSVWVKR

SEQ ID NO: 44877 - protein, 480 aa, Bacillus sp.
NGTIMQYFEWNVPNDGQHWNRLHNNAQNLKNAGITAIWIPPAWKGTSQNDVGYGAYDLYDLGEFNQKGTVRTKYGTKAELERAIRSLKANGIQVYGDVVMNHKGGADFTERVQAVEVNPQNRNQEVSGTYQIEAWTGFNFPGRGNQHSSFKWRWYHFDGTDWDQSRQLANRIYKFRGDGKAWDWEVDTENGNYDYLMYADVDMDHPEVINELNRWGVWYANTLNLDGFRLDAVKHIKFSFMRDWLGHVRGQTGKNLFAVAEYWKNDLGALENYLSKTNWTMSAFDVPLHYNLYQASNSSGNYDMRNLLNGTLVQRHPSHAVTFVDNHDTQPGEALESFVQGWFKPLAYATILTREQGYPQIFYGDYYGIPSDGVPSYRQQIDPLLKARQQYAYGRQHDYFDHWDVIGWTREGNASHPNSGLATIMSDGPGGSKWMYVGRQKAGEVWHDMTGNRSGTVTINQDGWGHFFVNGGSVSVWVKR

SEQ ID NO: 44878 - protein, 480 aa, Bacillus sp.
NGTIMQYFEWNVPNDGQHWNRLHNNAQNLKNAGITAIWIPPAWKGTSQNDVGYGAYDLYDLGEFNQKGTVRTKYGTKAELERAIRSLKANGIQVYGDVVMNHKGGADFTERVQAVEVNPQNRNQEVSGTYQIEAWTGFNFPGRGNQHSSFKWRWYHFDGTDWDQSRQLANRIYKFRGDGKAWDWEVDTENGNYDYLMYADVDMDHPEVINELNRWGVWYANTLNLDGFRLDAVKHIKFSFMRDWLGHVRGQTGKNLFAVAEYWKNDLGALENYLSKTNWTMSAFDVPLHYNLYQASNSSGNYDMRNLLNGTLVQRHPSHAVTFVDNHDTQPGEALESFVQGWFKPLAYATILTREQGYPQVFYGDYYGIPSDGVPSYRQQIDPLLKARQQYAYGRQHDYFDHWDVIGWTREGNASHPNSGLATIMSDGPGGSKWMYVGRQKAGEVWHDMSGNRSGTVTINQDGWGHFFVNGGSVSVWVKR

SEQ ID NO: 44879 - protein, 480 aa, Bacillus sp.
NGTIMQYFEWNVPNDGQHWNRLHNNAQNLKNAGITAIWIPPAWKGTSQNDVGYGAYDLYDLGEFNQKGTVRTKYGTKAELERAIRSLKANGIQVYGDVVMNHKGGADFTERVQAVEVNPQNRNQEVSGTYQIEAWTGFNFPGRGNQHSSFKWRWYHFDGTDWDQSRQLANRIYKFRGDGKAWDWEVDTENGNYDYLMYADVDMDHPEVINELNRWGVWYANTLNLDGFRLDAVKHIKFSFMRDWLGHVRGQTGKNLFAVAEYWKNDLGALENYLSKTNWTMSAFDVPLHYNLYQASNSSGNYDMRNLLNGTLVQRHPSHAVTFADNHDTQPGEALESFVQGWFKPLAYATILTREQGYPQVFYGDYYGIPSDGVPSYRQQIDPLLKARQQYAYGRQHDYFDHWDVIGWTREGNASHPNSGLATIMSDGPGGSKWMYVGRQKAGEVWHDMTGNRSGTVTINQDGWGHFFVNGGSVSVWVKR

SEQ ID NO: 44880 - protein, 480 aa, Bacillus sp.
NGTIMQYFEWNVPNDGQHWNRLHNNAQNLKNAGITAIWIPPAWKGTSQNDVGYGAYDLYDLGEFNQKGTVRTKYGTKAELERAIRSLKANGIQVYGDVVMNHKGGADFTERVQAVEVNPQNRNQEVSGTYQIEAWTGFNFPGRGNQHSSFKWRWYHFDGTDWDQSRQLANKIYKFRGDGKAWDWEVDTENGNYDYLMYADVDMDHPEVINELNRWGVWYANTLNLDGFRLDAVKHIKFSFMRDWLGHVRGQTGKNLFAVAEYWKNDLGALENYLSKTNWTMSAFDVPLHYNLYQASNSSGNYDMRNLLNGTLVQRHPSHAVTFVDNHDTQPGEALESFVQGWFKPLAYATILTREQGYPQVFYGDYYGIPSDGVPSYRQQIDPLLKARQQYAYGRQHDYFDHWDVIGWTREGNASHPNSGLATIMSDGPGGSKWMYVGRQKAGEVWHDMTGNRSGTVTINQDGWGHFFVNGGSVSVWVKR

SEQ ID NO: 44881 - protein, 480 aa, Bacillus sp.
NGTIMQYFEWNVPNDGQHWNRLHNNAQNLKNAGITAIWIPPAWKGTSQNDVGYGAYDLYDLGEFNQKGTVRTKYGTKAELERAIRSLKANGIQTYGDVVMNHKGGADFTERVQAVEVNPQNRNQEVSGTYQIEAWTGFNFPGRGNQHSSFKWRWYHFDGTDWDQSRQLANRIYKFRGDGKAWDWEVDTENGNYDYLMYADVDMDHPEVINELNRWGVWYANTLNLDGFRLDAVKHIKFSFMRDWLGHVRGQTGKNLFAVAEYWKNDLGALENYLSKTNWTMSAFDVPLHYNLYQASNSSGNYDMRNLLNGTLVQRHPSHAVTFVDNHDTQPGEALESFVQGWFKPLAYATILTREQGYPQVFYGDYYGIPSDGVPSYRQQIDPLLKARQQYAYGRQHDYFDHWDVIGWTREGNASHPNSGLATIMSDGPGGSKWMYVGRQKAGEVWHDMTGNRSGTVTINQDGWGHFFVNGGSVSVWVKR

SEQ ID NO: 44882 - protein, 480 aa, Bacillus sp.
NGTIMQYFEWNVPNDGQHWNRLHNNAQNLKNAGITAIWIPPAWKGTSQNDVGYGAYDLYDLGEFNQKGTVRTKYGTKAELERAIRSLKANGIQVYGDVVMNHKGGADFTERVQAVEVNPQNRNQEVSGTYQIEAWTGFNFPGRGNQHSSFKWRWYHFDGTDWDQSRQLANRIYSFRGDGKAWDWEVDTENGNYDYLMYADVDMDHPEVINELNRWGVWYANTLNLDGFRLDAVKHIKFSFMRDWLGHVRGQTGKNLFAVAEYWKNDLGALENYLSKTNWTMSAFDVPLHYNLYQASNSSGNYDMRNLLNGTLVQRHPSHAVTFVDNHDTQPGEALESFVQGWFKPLAYATILTREQGYPQVFYGDYYGIPSDGVPSYRQQIDPLLKARQQYAYGRQHDYFDHWDVIGWTREGNASHPNSGLATIMSDGPGGSKWMYVGRQKAGEVWHDMTGNRSGTVTINQDGWGHFFVNGGSVSVWVKR

SEQ ID NO: 44883 - protein, 480 aa, Bacillus sp.
NGTIMQYFEWNVPNDGQHWNRLHNNSQNLKNAGITAIWIPPAWKGTSQNDVGYGAYDLYDLGEFNQKGTVRTKYGTKAELERAIRSLKANGIQVYGDVVMNHKGGADFTERVQAVEVNPQNRNQEVSGTYQIEAWTGFNFPGRGNQHSSFKWRWYHFDGTDWDQSRQLANRIYKFRGDGKAWDWEVDTENGNYDYLMYADVDMDHPEVINELNRWGVWYANTLNLDGFRLDAVKHIKFSFMRDWLGHVRGQTGKNLFAVAEYWKNDLGALENYLSKTNWTMSAFDVPLHYNLYQASNSSGNYDMRNLLNGTLVQRHPSHAVTFVDNHDTQPGEALESFVQGWFKPLAYATILTREQGYPQVFYGDYYGIPSDGVPSYRQQIDPLLKARQQYAYGRQHDYFDHWDVIGWTREGNASHPNSGLATIMSDGPGGSKWMYVGRQKAGEVWHDMTGNRSGTVTINQDGWGHFFVNGGSVSVWVKR

SEQ ID NO: 44884 - protein, 480 aa, Bacillus sp.
NGTIMQYFEWNVPNDGQHWNRLHNNAQNLKNAGITAIWIPPAWKGTSQNDVGYGAYDLYDLGEFNQKGTVRTKYGTKAELERAIRSLKANGIQVYGDVVMNHKGGADFTERVQAVEVNPQNRNQEVSGTYQIEAWTGFNFPGRGNQHSSFKWRWYHFDGTDWDQSRQLANRIYKFRGDGKAWDWEVDSENGNYDYLMYADVDMDHPEVINELNRWGVWYANTLNLDGFRLDAVKHIKFSFMRDWLGHVRGQTGKNLFAVAEYWKNDLGALENYLSKTNWTMSAFDVPLHYNLYQASNSSGNYDMRNLLNGTLVQRHPSHAVTFVDNHDTQPGEALESFVQGWFKPLAYATILTREQGYPQVFYGDYYGIPSDGVPSYRQQIDPLLKARQQYAYGRQHDYFDHWDVIGWTREGNASHPNSGLATIMSDGPGGSKWMYVGRQKAGEVWHDMTGNRSGTVTINQDGWGHFFVNGGSVSVWVKR

SEQ ID NO: 44885 - protein, 480 aa, Bacillus sp.
NGTIMQYFEWNVPNDGQHWNRLHNNAQNLKNAGITAIWIPPAWKGTSQNDVGYGAYDLYDLGEFNQKGTVRTKYGTKAELERAIRSLKANGIQVYGDVVMNHKGGADFTERVQAVEVNPQNRNQEVSGTYQIEAWTGFNFPGRGNQHSSFKWRWYHFDGTDWDQSRQLANRIYKFRGDGKAWDWEVDTENGNYDYLMYADVDMDHPEVINELNRWGVWYANTLNLDGFRLDAVKHIKFSFMRDWLGHVRGQTGKNLFAVAEYWKNDLGALENYLSKTNWTMSAFDVPLHYNLYQASNSSGNYDMRNLLNGSLVQRHPSHAVTFVDNHDTQPGEALESFVQGWFKPLAYATILTREQGYPQVFYGDYYGIPSDGVPSYRQQIDPLLKARQQYAYGRQHDYFDHWDVIGWTREGNASHPNSGLATIMSDGPGGSKWMYVGRQKAGEVWHDMTGNRSGTVTINQDGWGHFFVNGGSVSVWVKR

SEQ ID NO: 44886 - protein, 480 aa, Bacillus sp.
NGTIMQYFEWNVPNDGQHWNRLHNNAQNLKNAGITAIWIPPAWKGTSQNDVGYGAYDLYDLGEFNQKGTVRTKYGTKAELERAIRSLKANGIQVYGDVVMNHKGGADFTERVQAVEVNPQNRNQEVSGTYQIEAWTGFNFPGRGNQHSSFKWRWYHFDGTDWDQSRQLANRIYKFRGDGKAWDWEVDTENGNYDYLMYADVDMDHPEVINELNRWGVWYANTLNLDGFRLDAVKHIKFSFMRDWLGHVRGQTGKNLFAVAEYWKNDLGALENYLSKTNWTMSAFDVPLHYNLYQASNSSGNYDMRNLLNGTLVQRHPSHAVTFVDNHDTQPGEALESFVQGWFKPLAYATILTREQGYPQVFYGDYYGIPSDGVPSYRQQIDPLLKARQQYAYGRQHDYFDHWDVIGWTREGNASHPNAGLATIMSDGPGGSKWMYVGRQKAGEVWHDMTGNRSGTVTINQDGWGHFFVNGGSVSVWVKR

SEQ ID NO: 44887 - protein, 480 aa, Bacillus sp.
NGTIMQYFEWNVPNDGQHWNRLHNNAQNLKNAGITAIWIPPAWKGTSQNDVGYGAYDLYDLGEFNQKGTVRTKYGTKAELERAIRSLKANGIQVYGDVVMNHKGGADFTERVQAVEVNPQNRNQEVSGTYQIEAWTGFNFPGRGNQHSSFKWRWYHFDGTDWDQSRQLANRIYKFRGDGKAWDWEVDTENGNYDYLMYADVDMDHPEVINELNRWGVWYANTLNLDGFRLDAVKHIKFSFMRDWLGHVRGQTGKNLFAVAEYWKNDLGALENYLSKANWTMSAFDVPLHYNLYQASNSSGNYDMRNLLNGTLVQRHPSHAVTFVDNHDTQPGEALESFVQGWFKPLAYATILTREQGYPQVFYGDYYGIPSDGVPSYRQQIDPLLKARQQYAYGRQHDYFDHWDVIGWTREGNASHPNSGLATIMSDGPGGSKWMYVGRQKAGEVWHDMTGNRSGTVTINQDGWGHFFVNGGSVSVWVKR

SEQ ID NO: 44888 - protein, 480 aa, Bacillus sp.
NGTIMQYFEWNVPNDGQHWNRLHNNAQNLKNAGMTAIWIPPAWKGTSQNDVGYGAYDLYDLGEFNQKGTVRTKYGTKAELERAIRSLKANGIQVYGDVVMNHKGGADFTERVQAVEVNPQNRNQEVSGTYQIEAWTGFNFPGRGNQHSSFKWRWYHFDGTDWDQSRQLANRIYKFRGDGKAWDWEVDTENGNYDYLMYADVDMDHPEVINELNRWGVWYANTLNLDGFRLDAVKHIKFSFMRDWLGHVRGQTGKNLFAVAEYWKNDLGALENYLSKTNWTMSAFDVPLHYNLYQASNSSGNYDMRNLLNGTLVQRHPSHAVTFVDNHDTQPGEALESFVQGWFKPLAYATILTREQGYPQVFYGDYYGIPSDGVPSYRQQIDPLLKARQQYAYGRQHDYFDHWDVIGWTREGNASHPNSGLATIMSDGPGGSKWMYVGRQKAGEVWHDMTGNRSGTVTINQDGWGHFFVNGGSVSVWVKR

SEQ ID NO: 44889 - protein, 480 aa, Bacillus sp.
NGTIMQYFEWNVPNDGQHWNRLHNNAQNLKNAGITAIWIPPAWKGTSQNDVGYGAYDLYDLGEFNQKGTVRTKYGTKAELERAIRSLKANGIQVYGDVVMNHKGGADFTERVQAVEVNPQNRNQEVSGTYQIEAWTGFNFPGRGNQHSSFKWRWYHFDGTDWDQSRQLANRIYKFRGDGKAWDWEVDTENGNYDYLMYADVDMDHPEVINELNRWGVWYANTLNLDGFRLDAVKHIKFSFMRDWFGHVRGQTGKNLFAVAEYWKNDLGALENYLSKTNWTMSAFDVPLHYNLYQASNSSGNYDMRNLLNGTLVQRHPSHAVTFVDNHDTQPGEALESFVQGWFKPLAYATILTREQGYPQVFYGDYYGIPSDGVPSYRQQIDPLLKARQQYAYGRQHDYFDHWDVIGWTREGNASHPNSGLATIMSDGPGGSKWMYVGRQKAGEVWHDMTGNRSGTVTINQDGWGHFFVNGGSVSVWVKR

SEQ ID NO: 44890 - protein, 480 aa, Bacillus sp.
NGTIMQYFEWNVPNDGQHWNRLHNNAQNLKNAGITAIWIPPAWKGTSQNDVGYGAYDLYDLGEFNQKGTVRTKYGTKAELERAIRSLKANGIQVYGDVVMNHKGGADFTERVQAVEVNPQNRNQEVSGTYQIEAWTGFNFPGRGNQHSSFKWRWYHFDGTDWDQSRQLANRIYKFRGDGKAWDWDVDTENGNYDYLMYADVDMDHPEVINELNRWGVWYANTLNLDGFRLDAVKHIKFSFMRDWLGHVRGQTGKNLFAVAEYWKNDLGALENYLSKTNWTMSAFDVPLHYNLYQASNSSGNYDMRNLLNGTLVQRHPSHAVTFVDNHDTQPGEALESFVQGWFKPLAYATILTREQGYPQVFYGDYYGIPSDGVPSYRQQIDPLLKARQQYAYGRQHDYFDHWDVIGWTREGNASHPNSGLATIMSDGPGGSKWMYVGRQKAGEVWHDMTGNRSGTVTINQDGWGHFFVNGGSVSVWVKR

SEQ ID NO: 44891 - protein, 480 aa, Bacillus sp.
NGTIMQYFEWNVPNDGQHWNRLHNNAQNLKNAGITAIWIPPAWKGTSQNDVGYGAYDLYDLGEFNQKGTVRTKYGTKAELERAIRSLKANGIQVYGDVVMNHKGGADFTERVQAVEVNPQNRNQEVSGTYQIEAWTGFNFPGRGNQHSSFKWRWYHFDGTDWDQSRQLANRIYKFRGDGKAWDWEVDTENGNYDYLMYADVDMDHPEVINELNRWGVWYANTLNLDGFRLDAVKHIKFSFMRDWLGHVRGQTGKNLFAVAEYWKNDLGALENYLSKTNWTMSAFDVPLHYNLYQASNSSGNYDMRNLLNGTLVQRHPSHAVTFVDNHDTQPGEALESFVQGWFKPLAYATILTREQGYPQVFYGDYYGIPSDGVPSYRQQIDPLLKARQQYAYGRQHDFFDHWDVIGWTREGNASHPNSGLATIMSDGPGGSKWMYVGRQKAGEVWHDMTGNRSGTVTINQDGWGHFFVNGGSVSVWVKR

SEQ ID NO: 44892 - protein, 480 aa, Bacillus sp.
NGTIMQYFEWNVPNDGQHWNRLHNNAQNLKNAGITAIWIPPAWKGTSQNDVGYGAYDLYDLGEFNQKGTVRTKYGTKAELERAIRSLKANGIQVYGDVVMNHKGGADFTERVQAVEVNPQNRNQEVSGTYQIEAWTGFNFPGRGNQHSEFKWRWYHFDGTDWDQSRQLANRIYKFRGDGKAWDWEVDTENGNYDYLMYADVDMDHPEVINELNRWGVWYANTLNLDGFRLDAVKHIKFSFMRDWLGHVRGQTGKNLFAVAEYWKNDLGALENYLSKTNWTMSAFDVPLHYNLYQASNSSGNYDMRNLLNGTLVQRHPSHAVTFVDNHDTQPGEALESFVQGWFKPLAYATILTREQGYPQVFYGDYYGIPSDGVPSYRQQIDPLLKARQQYAYGRQHDYFDHWDVIGWTREGNASHPNSGLATIMSDGPGGSKWMYVGRQKAGEVWHDMTGNRSGTVTINQDGWGHFFVNGGSVSVWVKR

SEQ ID NO: 44893 - protein, 480 aa, Bacillus sp.
NGTIMQYFEWNVPNDGQHWNRLHNNAQNLKNAGITAIWIPPAWKGTSQNDVGYGAYDLYDLGEFNQKGTVRTKYGTKAELERAIRSLKANGIQVYGDVVMNHKGGADFTERVQAVEVNPQNRNQEVSGTYQIEAWTGFNFPGRGNQHSSFKWRWYHFDGTDWDQSRQLANRIYKFRGDGKAWDWEVDTENGNYDYLMYADVDMDHPEVINELNRWGVWYANTLNLDGFRLDAVKHIKFSFMRDWLGHVRGQTGKNLFAVAEYWKNDLGALENYLSKTNWTMSAFDVPLHYNLYQASNSSGNYDMRNLLNGTLVQRHPSHAVTFVDNHDTQPGEALESFVQGWFKPLAYATILTREQGYPQVFYGDYYGIPSDGVPSYRQQVDPLLKARQQYAYGRQHDYFDHWDVIGWTREGNASHPNSGLATIMSDGPGGSKWMYVGRQKAGEVWHDMTGNRSGTVTINQDGWGHFFVNGGSVSVWVKR

SEQ ID NO: 44894 - protein, 480 aa, Bacillus sp.
NGTIMQYFEWNVPNDGQHWNRLHNNAQNLKNAGITAIWIPPAWKGTSQNDVGYGAYDLYDLGEFNQKGTVRTKYGTKAELERAIRSLKANGIQVYGDVVMNHKGGADFTERVQAVEVNPQNRNQEVSGTYQIEAWTGFNFPGRGNQHSSFKWRWYHFDGTDWDQSRQLANRIYKFRGDGKAWDWEVDTENGNYDYLMYADVDMDHPEVINELNRWGVWYANTLNLDGFRLDAVKHIKFSFMRDWLGHVRGQTGKNLFAVAEYWKNDLGALENYLSKTNWTMSAFDVPLHYNLYQASNSSGNYDMRNLLNGTLVQRHPSHAVTFVDNHDTQPGEALESFVQGWFKPLAYATILTREQGYPQVFYGDYYGIPSDGVPSYRQQIDPLVKARQQYAYGRQHDYFDHWDVIGWTREGNASHPNSGLATIMSDGPGGSKWMYVGRQKAGEVWHDMTGNRSGTVTINQDGWGHFFVNGGSVSVWVKR

SEQ ID NO: 44895 - protein, 480 aa, Bacillus sp.
NGTIMQYFEWNVPNDGQHWNRLHNNAQNLKNAGITAIWIPPAWKGTSQNDVGYGAYDLYDLGEFNQKGTVRTKYGTKAELERAIRSLKANGIQVYGDVVMNHKGGADFTERVQAVEVNPQNRNQEVSGTYQIEAWTGFNFPGRGNQHSSFKWRWYHFDGTDWDQSRQLANRIYKFRGDGKAWDWEVDTENGNYDYLMYADVDMDHPEVINELNRWGVWYANTLNLDGFRLDAVKHIKFSFMRDWLGHVRGQTGKNLFAVAEYWKNDLGALENYLSKTNWTMSAFDVPLHYNLYQASNSSGNYDMRNLLNGTLVQRHPSHAVTFVDNHDTQPGEALESFVQGWFKPLCYATILTREQGYPQVFYGDYYGIPSDGVPSYRQQIDPLLKARQQYAYGRQHDYFDHWDVIGWTREGNASHPNSGLATIMSDGPGGSKWMYVGRQKAGEVWHDMTGNRSGTVTINQDGWGHFFVNGGSVSVWVKR

SEQ ID NO: 44896 - protein, 480 aa, Bacillus sp.
NGTIMMYFEWNVPNDGQHWNRLHNNAQNLKNAGITAIWIPPAWKGTSQNDVGYGAYDLYDLGEFNQKGTVRTKYGTKAELERAIRSLKANGIQVYGDVVMNHKGGADFTERVQAVEVNPQNRNQEVSGTYQIEAWTGFNFPGRGNQHSSFKWRWYHFDGTDWDQSRQLANRIYKFRGDGKAWDWEVDTENGNYDYLMYADVDMDHPEVINELNRWGVWYANTLNLDGFRLDAVKHIKFSFMRDWLGHVRGQTGKNLFAVAEYWKNDLGALENYLSKTNWTMSAFDVPLHYNLYQASNSSGNYDMRNLLNGTLVQRHPSHAVTFVDNHDTQPGEALESFVQGWFKPLAYATILTREQGYPQVFYGDYYGIPSDGVPSYRQQIDPLLKARQQYAYGRQHDYFDHWDVIGWTREGNASHPNSGLATIMSDGPGGSKWMYVGRQKAGEVWHDMTGNRSGTVTINQDGWGHFFVNGGSVSVWVKR

SEQ ID NO: 44897 - protein, 480 aa, Bacillus sp.
NGTIMQYFEWNVPNDGQHWNRLHNNAQNLKNAGITAIWIPPAWKGTSQNDVGYGAYDLYDLGEFNQKGTVRTKYGTKAELERAIRSLKANGIQVYGDVVMNHKGGADFTERVQAVEVNPQNRNQEVSGTYQIEAWTGFNFPGRGNQHSSFKWRWYHFDGTDWDQSRQLANRIYKFRGDGKAWDWNVDTENGNYDYLMYADVDMDHPEVINELNRWGVWYANTLNLDGFRLDAVKHIKFSFMRDWLGHVRGQTGKNLFAVAEYWKNDLGALENYLSKTNWTMSAFDVPLHYNLYQASNSSGNYDMRNLLNGTLVQRHPSHAVTFVDNHDTQPGEALESFVQGWFKPLAYATILTREQGYPQVFYGDYYGIPSDGVPSYRQQIDPLLKARQQYAYGRQHDYFDHWDVIGWTREGNASHPNSGLATIMSDGPGGSKWMYVGRQKAGEVWHDMTGNRSGTVTINQDGWGHFFVNGGSVSVWVKR

SEQ ID NO: 44898 - protein, 480 aa, Bacillus sp.
NGTIMQYFEWNVPNDGQHWNRLHNNAQNLKNAGITAIWIPPAWKGTSQNDVGYGAYDLYDLGEFNQKGTVRTKYGTKAELERAIRSLKANGIQVYGDVVMNHKGGADFTERVQAVEVNPQNRNQEVSGTYEIEAWTGFNFPGRGNQHSSFKWRWYHFDGTDWDQSRQLANRIYKFRGDGKAWDWEVDTENGNYDYLMYADVDMDHPEVINELNRWGVWYANTLNLDGFRLDAVKHIKFSFMRDWLGHVRGQTGKNLFAVAEYWKNDLGALENYLSKTNWTMSAFDVPLHYNLYQASNSSGNYDMRNLLNGTLVQRHPSHAVTFVDNHDTQPGEALESFVQGWFKPLAYATILTREQGYPQVFYGDYYGIPSDGVPSYRQQIDPLLKARQQYAYGRQHDYFDHWDVIGWTREGNASHPNSGLATIMSDGPGGSKWMYVGRQKAGEVWHDMTGNRSGTVTINQDGWGHFFVNGGSVSVWVKR

SEQ ID NO: 44899 - protein, 480 aa, Bacillus sp.
NGTIMQYFEWNVPNDGQHWNRLHNNAQNLKNAGITAIWIPPAWKGTSQNDVGYGAYDLYDLGEFNQKGTVRTKYGTKAELERAIRSLKANGIQVYGDVVMNHKGGADFTERVQAVEVNPQNRNQEVSGTYQIEAWTGFNFPGRGNQHSSFKWRWYHFDGTDWDQSRQVANRIYKFRGDGKAWDWEVDTENGNYDYLMYADVDMDHPEVINELNRWGVWYANTLNLDGFRLDAVKHIKFSFMRDWLGHVRGQTGKNLFAVAEYWKNDLGALENYLSKTNWTMSAFDVPLHYNLYQASNSSGNYDMRNLLNGTLVQRHPSHAVTFVDNHDTQPGEALESFVQGWFKPLAYATILTREQGYPQVFYGDYYGIPSDGVPSYRQQIDPLLKARQQYAYGRQHDYFDHWDVIGWTREGNASHPNSGLATIMSDGPGGSKWMYVGRQKAGEVWHDMTGNRSGTVTINQDGWGHFFVNGGSVSVWVKR

SEQ ID NO: 44900 - protein, 480 aa, Bacillus sp.
NGTIMQYFEWNVPNDGQHWNRLHNNAQNLKNAGITAIWIPPAWKGTSQNDVGYGAYDLYDLGEFNQKGTVRTKYGTKAELERAIRSLKANGIQVYGDVVMNHKGGADFTERVQAVEVNPQNRNQEVSGTYEIEAWTGFNFPGRGNQHSSFKWRWYHFDGTDWDQSRQLSNRIYKFRGDGKAWDWEVDTEFGNYDYLMYADVDMNHPEVINELNRWGVWYANTLNLDGFRLDAVKHIQFSFMRNWLGHVRGQTGKNLFAVAEYWKNDLGALENYLSKTNWTMSAFDVPLHYNLYQASNSGGNYDMRNLLNGTLVQRHPSHAVTFVDNHDTQPGEALESFVQGWFKPLAYATILTREQGYPQVFYGDYYGIPSDGVPSYRQQIDPLLKARQQYAYGRQHDYFDHWDVIGWTREGNASHPNSGLATIMSDGPGGSKWMYVGRQKAGEVWHDITGNRSGTVTINQDGWGQFFVNGGSVSVWVKR

SEQ ID NO: 44901 - protein, 480 aa, Bacillus sp.
NGTIMQYFEWNVPNDGQHWNRLHNNAQNLKNAGITAIWIPPTWKGTSQNDVGYGAYDLYDLGEFNQKGTVRTKYGTKAELERAIRSLKANGIQVYGDVVMNHKGGADFTERVQAVEVNPQNRNQEVSGTYQIEAWTGFNFPGRGNQHSSFKWRWYHFDGTDWDQSRQLANRIYKFRGDGKAWDWEVDTENGNYDYLMYADVDMDHPEVINELNRWGVWYANTLNLDGFRLDAVKHIKFSFMRDWLGHVRGQTGKNLFAVAEYWKNDLGALENYLSKTNWTMSAFDVPLHYNLYQASNSSGNYDMRNLLNGTLVQRHPSHAVTFVDNHDTQPGEALESFVQGWFKPLAYATILTREQGYPQVFYGDYYGIPSDGVPSYRQQIDPLLKARQQYAYGRQHDYFDHWDVIGWTREGNASHPNSGLATIMSDGPGGSKWMYVGRQKAGEVWHDMTGNRSGTVTINQDGWGHFFVNGGSVSVWVKR

SEQ ID NO: 44902 - protein, 480 aa, Bacillus sp.
NGTIMQYFEWNVPNDGQHWNRLHNNAQNLKNAGITAIWIPPAWKGTSQNDVGYGAYDLYDLGEFNQKGTVRTKYGTKAELERAIRSLKANGIQVYGDVVMNHKGGADFTERLQAVEVNPQNRNQEVSGTYQIEAWTGFNFPGRGNQHSSFKWRWYHFDGTDWDQSRQLANRIYKFRGDGKAWDWEVDTENGNYDYLMYADVDMDHPEVINELNRWGVWYANTLNLDGFRLDAVKHIKFSFMRDWLGHVRGQTGKNLFAVAEYWKNDLGALENYLSKTNWTMSAFDVPLHYNLYQASNSSGNYDMRNLLNGTLVQRHPSHAVTFVDNHDTQPGEALESFVQGWFKPLAYATILTREQGYPQVFYGDYYGIPSDGVPSYRQQIDPLLKARQQYAYGRQHDYFDHWDVIGWTREGNASHPNSGLATIMSDGPGGSKWMYVGRQKAGEVWHDMTGNRSGTVTINQDGWGHFFVNGGSVSVWVKR

SEQ ID NO: 44903 - protein, 480 aa, Bacillus sp.
NGTIMQYFEWNVPNDGQHWNRLHNNAQNLKNAGITAIWIPPAWKGTSQNDVGYGAYDLYDLGEFNQKGTVRTKYGTKAELERAIRSLKANGIQVYGDVVMNHKGGADFTERVQAVEVNPQNRNQEVSGTYQIEAWTGFNFPGRGNQHSSFKWRWYHFDGTDWDQSRQLANRIYKFRGDGKAWDWEVDTENGDYDYLMYADVDMDHPEVINELNRWGVWYANTLNLDGFRLDAVKHIKFSFMRDWLGHVRGQTGKNLFAVAEYWKNDLGALENYLSKTNWTMSAFDVPLHYNLYQASNSSGNYDMRNLLNGTLVQRHPSHAVTFVDNHDTQPGEALESFVQGWFKPLAYATILTREQGYPQVFYGDYYGIPSDGVPSYRQQIDPLLKARQQYAYGRQHDYFDHWDVIGWTREGNASHPNSGLATIMSDGPGGSKWMYVGRQKAGEVWHDMTGNRSGTVTINQDGWGHFFVNGGSVSVWVKR

SEQ ID NO: 44904 - protein, 480 aa, Bacillus sp.
NGTIMQYFEWNVPNDGQHWNRLHNNAQNLKNAGITAIWIPPAWKGTSQNDVGYGAYDLYDLGEFNQKGTVRTKYGTKAELERAIRSLKANGIQVYGDVVMNHKGGADFTERVQAVEVNPQNRNQEVSGTYQIEAWTGFNFPGRGNQHSSFKWRWYHFDGTDWDQSRQLANRIYKFRGDGKAWDWEVDTENGNYDYLMYADVDMDHPEVINELNRWGVWYANTLNLDGFRLDAVKHIKFSFMRDWLGHVRGQTGKNLFAVAEYWKNDLGALENYLSKTNWTMSAFDVPLHYNLYQASNSSGNYDMRNLLNGTLVQRHPSHAVTFVDNHDTQPGEALESFVQGWFKPLAYATILTREQGYPQVFYGDYYGIPSDGVPSYRQQIDPLLKARQQYAYGRQHDYFDHWDVIGWTREGNASHPNSGLATIMSDGPGGSKWMYVGRQKGGEVWHDMTGNRSGTVTINQDGWGHFFVNGGSVSVWVKR

SEQ ID NO: 44905 - protein, 480 aa, Bacillus sp.
NGTIMQYFEWNVPNDGQHWNRLHNNAQNLKNAGITAIWIPPAWKGTSQNDVGYGAYDLYDLGEFNQKGTVRTKYGTKAELERAIRSLKANGIQVYGDVVMNHKGGADFTERVQAVEVNPQNRNQEVSGTYQIEAWTGFNFPGRGNQHSSFKWRWYHFDGTDWDQSRQLANRLYKFRGDGKAWDWEVDTENGNYDYLMYADVDMDHPEVINELNRWGVWYANTLNLDGFRLDAVKHIKFSFMRDWLGHVRGQTGKNLFAVAEYWKNDLGALENYLSKTNWTMSAFDVPLHYNLYQASNSSGNYDMRNLLNGTLVQRHPSHAVTFVDNHDTQPGEALESFVQGWFKPLAYATILTREQGYPQVFYGDYYGIPSDGVPSYRQQIDPLLKARQQYAYGRQHDYFDHWDVIGWTREGNASHPNSGLATIMSDGPGGSKWMYVGRQKAGEVWHDMTGNRSGTVTINQDGWGHFFVNGGSVSVWVKR

SEQ ID NO: 44906 - protein, 480 aa, Bacillus sp.
NGTIMQYFEWNVPNDGQHWNRLHNNAQNLKNAGITAIWIPPAWKGTSQNDVGYGAYDLYDLGEFNQKGTVRTKYGTKAELERAIRSLKANGIQVYGDVVMNHKGGADFTERVQAVEVNPQNRNQEVSGTYQIEAWTGFNFPGRGNQHSSFKWRWYHFDGTDWDQSRQLANRIYKFRGDGKAWDWEVDTENGNYDYLMYADVDMDHPEVINELNRWGVWYANTLNLDGFRLDAVKHIKFSFMRDWLGHVRGQTGKNLFAVAEYWKNDLGALENYLSKTNWTMSAFDVPLHYNLYQASNSSGNYDMRNLLNGTLVQRHPSHAVTFVDNHDTQPGEALESFVQGWFKPLAYCTILTREQGYPQVFYGDYYGIPSDGVPSYRQQIDPLLKARQQYAYGRQHDYFDHWDVIGWTREGNASHPNSGLATIMSDGPGGSKWMYVGRQKAGEVWHDMTGNRSGTVTINQDGWGHFFVNGGSVSVWVKR

SEQ ID NO: 44907 - protein, 480 aa, Bacillus sp.
NGTIMQYFEWNVPNDGQHWNRLHNNAQNLKNAGITAIWIPPAWKGTSQNDVGYGAYDLYDLGEFNQKGTVRTKYGTKAELERAIRSLKANGIQVYGDVVMNHKGGADFVERVQAVEVNPQNRNQEVSGTYQIEAWTGFNFPGRGNQHSSFKWRWYHFDGTDWDQSRQLANRIYKFRGDGKAWDWEVDTENGNYDYLMYADVDMDHPEVINELNRWGVWYANTLNLDGFRLDAVKHIKFSFMRDWLGHVRGQTGKNLFAVAEYWKNDLGALENYLSKTNWTMSAFDVPLHYNLYQASNSSGNYDMRNLLNGTLVQRHPSHAVTFVDNHDTQPGEALESFVQGWFKPLAYATILTREQGYPQVFYGDYYGIPSDGVPSYRQQIDPLLKARQQYAYGRQHDYFDHWDVIGWTREGNASHPNSGLATIMSDGPGGSKWMYVGRQKAGEVWHDMTGNRSGTVTINQDGWGHFFVNGGSVSVWVKR

SEQ ID NO: 44908 - protein, 480 aa, Bacillus sp.
NGTIMQYFEWNVPNDGQHWNRLHNNAQNLKNAGITAIWIPPAWKGTSQNDVGYGAYDLYDLGEFNQKGTVRTKYGTKAELERAIRSLKANGIQVYGDVVMNHKGGADFTERVQAVEVNPQNRNQEVSGTYQIEAWTGFNFPGRGNQHSSFKWRWYHFDGTDWDQSRQLANRIYKFQGDGKAWDWEVDTENGNYDYLMYADVDMDHPEVINELNRWGVWYANTLNLDGFRLDAVKHIKFSFMRDWLGHVRGQTGKNLFAVAEYWKNDLGALENYLSKTNWTMSAFDVPLHYNLYQASNSSGNYDMRNLLNGTLVQRHPSHAVTFVDNHDTQPGEALESFVQGWFKPLAYATILTREQGYPQVFYGDYYGIPSDGVPSYRQQIDPLLKARQQYAYGRQHDYFDHWDVIGWTREGNASHPNSGLATIMSDGPGGSKWMYVGRQKAGEVWHDMTGNRSGTVTINQDGWGHFFVNGGSVSVWVKR

SEQ ID NO: 44909 - protein, 480 aa, Bacillus sp.
NGTIMQYFEWNVPNDGQHWNRLHNNAQNLKNAGITAIWIPPAWKGTSQNDVGYGAYDLYDLGEFNQKGTVRTKYGTKAELERAIRSLKANGIQVYGDVVMNHKGGADFTERVQAVEVNPQNRNQEVSGTYQIEAWTGFNFPGRGNQHSSFKWRWYHFDGTDWDQSRQLANRIYKFRGDGKAWDWEVDTENGNYDYLMYADVDMDHPEVINELNRWGVWYANTLNLDGFRLDAVKHIKFSFMRDWLGHVRGQTGKNLFAVAEYWKNDLGALENYLSKTNWTMSAFDVPLHYNLYQASNMSGNYDMRNLLNGTLVQRHPSHAVTFVDNHDTQPGEALESFVQGWFKPLAYATILTREQGYPQVFYGDYYGIPSDGVPSYRQQIDPLLKARQQYAYGRQHDYFDHWDVIGWTREGNASHPNSGLATIMSDGPGGSKWMYVGRQKAGEVWHDMTGNRSGTVTINQDGWGHFFVNGGSVSVWVKR

SEQ ID NO: 44910 - protein, 480 aa, Bacillus sp.
NGTIMQYFEWNVPNDGQHWNRLHNNAQNLKNAGITAIWIPPAWKGTSQNDVGYGAYDLYDLGEFNQKGTVRTKYGTKAELERAIRSLKANGIQVYGDVVMNHKGGADFTERVQAVEVNPQNRNQEVSGTYQIEAWTGFNFPGRGNQHSSFEWRWYHFDGTDWDQSRQLANRIYKFRGDGKAWDWEVDTENGNYDYLMYADVDMDHPEVINELNRWGVWYANTLNLDGFRLDAVKHIKFSFMRDWLGHVRGQTGKNLFAVAEYWKNDLGALENYLSKTNWTMSAFDVPLHYNLYQASNSSGNYDMRNLLNGTLVQRHPSHAVTFVDNHDTQPGEALESFVQGWFKPLAYATILTREQGYPQVFYGDYYGIPSDGVPSYRQQIDPLLKARQQYAYGRQHDYFDHWDVIGWTREGNASHPNSGLATIMSDGPGGSKWMYVGRQKAGEVWHDMTGNRSGTVTINQDGWGHFFVNGGSVSVWVKR

SEQ ID NO: 44911 - protein, 480 aa, Bacillus sp.
NGTIMQYFEWNVPNDGQHWNRLHNNAQNLKNAGITAIWIPPAWKGTSQNDVGYGAYDLYDLGEFNQKGTVRTKYGTKAELERAIRSLKANGIQVYGDVVMNHKGGADFTERVQAVEVNPQNRNQEVSGTYQIEAWTGFNFPGRGNQHSSFKWRWYHFDGTDWDQSRQLANRIYKFRGDGKAWDWEVDTENGNYDYLMYADVDMDHPEVINELNRWGVWYANTLNLDGFRLDAVKHIKFSFMRDWLGHVRGQTGKNLFAVAEYWKNDLGALENYLSKTNWTMSAFDVPLHYNLYQASNSSGNYDMRNLLNGTLVQRHPSHAVTFVDNHDTQPGEALESFVQGWFKPLAYATILTREQGYPQVFYGDYYGIPSDGVPSYRQQIDPLLKARQQYAYGRQHDYFDHWDVIGWTREGNASHPNSGLSTIMSDGPGGSKWMYVGRQKAGEVWHDMTGNRSGTVTINQDGWGHFFVNGGSVSVWVKR

SEQ ID NO: 44912 - protein, 480 aa, Bacillus sp.
NGTIMQYFEWNVPNDGQHWNRLHNNAQNLKNAGITAIWIPPAWKGTSQNDVGYGAYDLYDLGEFNQKGTVRTKYGTKAELERAIRSLKANGIQVYGDVVMNHKGGADFTERVQAVEVNPQNRNQEVSGTYQIEAWTGFNFPGRGNQHSSFKWRWYHFDGTDWDQSRQLANRIYKFRGDGKAWDWEVDTENGNYDYLMYADVDMDHPEVINELNRWGVWYANTLNLDGFRLDAVKHIKFSFMRDWLGHVRGQTGKNLFAVAEYWKNDLGALENYLSKTNWTMSAFDVPLHYNLYQASNSSGNYDMRNLLNGTLVQRHPSHAVTFVDNHDTQPGEALESFVQGWFKPLAYATILTREQGYPQVFYGDYYGIPSDGVPAYRQQIDPLLKARQQYAYGRQHDYFDHWDVIGWTREGNASHPNSGLATIMSDGPGGSKWMYVGRQKAGEVWHDMTGNRSGTVTINQDGWGHFFVNGGSVSVWVKR

SEQ ID NO: 44913 - protein, 480 aa, Bacillus sp.
NGTIMQYFEWNVPNDGQHWNRLHNNAQNLKNAGITAIWIPPAWKGTSQNDVGYGAYDLYDLGEFNQKGTVRTKYGTKGELERAIRSLKANGIQVYGDVVMNHKGGADFTERVQAVEVNPQNRNQEVSGTYQIEAWTGFNFPGRGNQHSSFKWRWYHFDGTDWDQSRQLANRIYKFRGDGKAWDWEVDTENGNYDYLMYADVDMDHPEVINELNRWGVWYANTLNLDGFRLDAVKHIKFSFMRDWLGHVRGQTGKNLFAVAEYWKNDLGALENYLSKTNWTMSAFDVPLHYNLYQASNSSGNYDMRNLLNGTLVQRHPSHAVTFVDNHDTQPGEALESFVQGWFKPLAYATILTREQGYPQVFYGDYYGIPSDGVPSYRQQIDPLLKARQQYAYGRQHDYFDHWDVIGWTREGNASHPNSGLATIMSDGPGGSKWMYVGRQKAGEVWHDMTGNRSGTVTINQDGWGHFFVNGGSVSVWVKR

SEQ ID NO: 44914 - protein, 480 aa, Bacillus sp.
NGTIMQYFEWNVPNDGQHWNRLHNNAQNLKNAGITAIWIPPAWKGTSQNDVGYGAYDLYDLGEFNQKGTVRTKYGTKAELERAIRSLKANGIQVYGDVVMNHKGGADFTERVQAVEVNPQNRNQEVSGTYQIEAWTGFNFPGRGNQHSSFKWRWYHFDGTDWDQSRQLANRIYKFRGDGKAWDWEVDTENGNYDYLMYADVDMDHPEVINELNRWGVWYANTLNLDGFRLDAVKHIKFSFMRDWLGHVRGQTGKNLFAVAEYWKNDLGALENYLSKTNWTMSAFDVPLHYNLYQCSNSSGNYDMRNLLNGTLVQRHPSHAVTFVDNHDTQPGEALESFVQGWFKPLAYATILTREQGYPQVFYGDYYGIPSDGVPSYRQQIDPLLKARQQYAYGRQHDYFDHWDVIGWTREGNASHPNSGLATIMSDGPGGSKWMYVGRQKAGEVWHDMTGNRSGTVTINQDGWGHFFVNGGSVSVWVKR

SEQ ID NO: 44915 - protein, 480 aa, Bacillus sp.
NGTIMQYFEWNVPNDGQHWNRLHNNAQNLKNAGITAIWIPPAWKGTSQNDVGYGAYDLYDLGEFNQKGTVRTKYGTKAELERAIRSLKANGIQVYGDVVMNHKGGADFTERVQAVEVNPQNRNQEVSGTYQIEAWTGFNFPGRGNQHSSFKWRWYHFDGTDWDQSRQLANRIYKFRGDGKAWDWEVDTENGNYDYLMYADVDMDHPEVINELNRWGVWYANTLNLDGFRLDAVKHIKFSFMRDWLGHVRGQTGKNLFAVAEYWKNDLGALENYLSKTNWTMSAFDVPLHYNLYQAANSSGNYDMRNLLNGTLVQRHPSHAVTFVDNHDTQPGEALESFVQGWFKPLAYATILTREQGYPQVFYGDYYGIPSDGVPSYRQQIDPLLKARQQYAYGRQHDYFDHWDVIGWTREGNASHPNSGLATIMSDGPGGSKWMYVGRQKAGEVWHDMTGNRSGTVTINQDGWGHFFVNGGSVSVWVKR

SEQ ID NO: 44916 - protein, 480 aa, Bacillus sp.
NGTIMQYFEWNVPNDGQHWNRLHNNAQNLKNAGITAIWIPPAWKGTSQNDVGYGAYDLYDLGEFNQKGTVRTKYGTKAELERAIRSLKANGIQVYGDVVMNHKGGADFTERVQAVEVNPQNRNQEVSGTYQIEAWTGFNFPGRGNQHSSFKWRWYHFDGTDWDQSRQLANRIYKFRGDGKAWDWEVDTENGNYDYLMYADVDMDHPEVINELNRWGVWYANTLNLDGFRLDAVKHIKFSFMRDWLGHVRGQTGKNLFAVAEYWKNDLGALENYLSKTNWTMSAFDVPLHYNLYQASNSSGNYDMRNLLNGTLVQRHPSHAVTFVDNHDTQPGEALESFVQGWFKPLAYATILTREQGYPQVFYGDYYGIPSDGVPSYRQQIDPLFKARQQYAYGRQHDYFDHWDVIGWTREGNASHPNSGLATIMSDGPGGSKWMYVGRQKAGEVWHDMTGNRSGTVTINQDGWGHFFVNGGSVSVWVKR

SEQ ID NO: 44917 - protein, 480 aa, Bacillus sp.
NGTIMQYFEWNVPNDGQHWNRLHNNAQNLKNAGITAIWIPPAWKGTSQNDVGYGAYDLYDLGEFNQKGTVRTKYGTKAELERAIRSLKANGIQVYGDVVMNHKGGADFTERVQAVEVNPQNRNQEVSGTYQIEAWTGFNFPGRGNQHSSFKWRWYHFDGTDWDQSRQLANRIYKFRGDGKCWDWEVDTENGNYDYLMYADVDMDHPEVINELNRWGVWYANTLNLDGFRLDAVKHIKFSFMRDWLGHVRGQTGKNLFAVAEYWKNDLGALENYLSKTNWTMSAFDVPLHYNLYQASNSSGNYDMRNLLNGTLVQRHPSHAVTFVDNHDTQPGEALESFVQGWFKPLAYATILTREQGYPQVFYGDYYGIPSDGVPSYRQQIDPLLKARQQYAYGRQHDYFDHWDVIGWTREGNASHPNSGLATIMSDGPGGSKWMYVGRQKAGEVWHDMTGNRSGTVTINQDGWGHFFVNGGSVSVWVKR

SEQ ID NO: 44918 - protein, 480 aa, Bacillus sp.
NGTIMQYFEWNVPNDGQHWNRLHNNAQNLKNAGITAIWIPPAWKGTSQNDVGYGAYDLYDLGEFNQKGTVRTKYGTKAELERAIRSLKANGIQVYGDVVMNHKGGADFTERVQAVEVNPQNRNQEVSGTYQIEAWTGFNFPGRGNQHSSFKWRWYHFDGTDWDQSRQLANRIYKFRGDGKAWDWEVDTENGNYDYLMYADVDMDHPEVINELNRWGVWYANTLNLDGFRLDAVKHIKFSFMRDWLGHVQGQTGKNLFAVAEYWKNDLGALENYLSKTNWTMSAFDVPLHYNLYQASNSSGNYDMRNLLNGTLVQRHPSHAVTFVDNHDTQPGEALESFVQGWFKPLAYATILTREQGYPQVFYGDYYGIPSDGVPSYRQQIDPLLKARQQYAYGRQHDYFDHWDVIGWTREGNASHPNSGLATIMSDGPGGSKWMYVGRQKAGEVWHDMTGNRSGTVTINQDGWGHFFVNGGSVSVWVKR

SEQ ID NO: 44919 - protein, 480 aa, Bacillus sp.
NGTIMQYFEWNVPNDGQHWNRLHNNAQNLKNAGITAIWIPPAWKGTSQNDVGYGAYDLYDLGEFNQKGTTRTKYGTKAELERAIRSLKANGIQVYGDVVMNHKGGADFTERVQAVEVNPQNRNQEVSGTYQIEAWTGFNFPGRGNQHSSFKWRWYHFDGTDWDQSRQLANRIYKFRGDGKAWDWEVDTENGNYDYLMYADVDMDHPEVINELNRWGVWYANTLNLDGFRLDAVKHIKFSFMRDWLGHVRGQTGKNLFAVAEYWKNDLGALENYLSKTNWTMSAFDVPLHYNLYQASNSSGNYDMRNLLNGTLVQRHPSHAVTFVDNHDTQPGEALESFVQGWFKPLAYATILTREQGYPQVFYGDYYGIPSDGVPSYRQQIDPLLKARQQYAYGRQHDYFDHWDVIGWTREGNASHPNSGLATIMSDGPGGSKWMYVGRQKAGEVWHDMTGNRSGTVTINQDGWGHFFVNGGSVSVWVKR

SEQ ID NO: 44920 - protein, 480 aa, Bacillus sp.
NGTIMQYFEWNVPNDGQHWNRLHNNAQNLKNAGITAIWIPPAWKGTSQNDVGYGAYDLYDLGEFNQKGTVRTKYGTKAELERAIRSLKANGIQVYGDVVMNHKGGADFTERVQAVEVNPQNRNQEVSGTYQIEAWTGFNFPGRGNQHSSFKWRWYHFDGTDWDQSRQLANRIYKFRGDGKAWDWEVDTENGNYDYLMYADVDMDHPEVINELNRWGVWYANTLNLDGFRLDAVKHIKFSFMRDWLGHVRGQTGKNLFAVAEYWKNDLGALENYLSKTNWTMSAFDVPLHYNLYQASNSSGNYDMRNLLNGTLVQRHPSHAVTFVDNHDTQPGEALESFVQGWFKPLAYATILTREQGYPQVFYGDYYGIPSDGVPSYRQQIDPLLKMRQQYAYGRQHDYFDHWDVIGWTREGNASHPNSGLATIMSDGPGGSKWMYVGRQKAGEVWHDMTGNRSGTVTINQDGWGHFFVNGGSVSVWVKR

SEQ ID NO: 44921 - protein, 480 aa, Bacillus sp.
NGTIMQYFEWNVPNDGQHWNRLHNNAQNLKNAGITAIWIPPAWKGTSQNDVGYGAYDLYDLGEFNQKGTVRTKYGTKAELERAIRSLKANGIQVYGDVVMNHKGGADFTERVQAVEVNPQNRNEEVSGTYQIEAWTGFNFPGRGNQHSSFKWRWYHFDGTDWDQSRQLANRIYKFRGDGKAWDWEVDTENGNYDYLMYADVDMDHPEVINELNRWGVWYANTLNLDGFRLDAVKHIKFSFMRDWLGHVRGQTGKNLFAVAEYWKNDLGALENYLSKTNWTMSAFDVPLHYNLYQASNSSGNYDMRNLLNGTLVQRHPSHAVTFVDNHDTQPGEALESFVQGWFKPLAYATILTREQGYPQVFYGDYYGIPSDGVPSYRQQIDPLLKARQQYAYGRQHDYFDHWDVIGWTREGNASHPNSGLATIMSDGPGGSKWMYVGRQKAGEVWHDMTGNRSGTVTINQDGWGHFFVNGGSVSVWVKR

SEQ ID NO: 44922 - protein, 480 aa, Bacillus sp.
NGTIMQYFEWNVPNDGQHWNRLHNNAQNLKNAGITAIWIPPAWKGTSQNDVGYGAYDLYDLGEFNQKGTVRTKYGTKAELERAIRSLKANGIQVYGDVVMNHKGGADFTERVQAVEVNPQNRNQEVSGTYQIEAWTGFNFPGRGNQHSSFKWRWYHFDGTDWDQSRQLANRIYKFRGDGKAWDWEVDTENGNYDYLMYADVDMDHPEVINELNRWGVWYANTLNLDGFRLDAVKHIKFSFMRDWLGHVRGQTGKNLFAVAEYWKNDLGALENYLSKTNWTMSAFDVPLHYNLYQASNSSGNYDMRNLLNGTLVQRHPSHAVTFVDNHDTQPGEALESFVQGWFKPLAYATILTREQGYPQVFYGDYYGIPSDGVPSYRQQIDPLIKARQQYAYGRQHDYFDHWDVIGWTREGNASHPNSGLATIMSDGPGGSKWMYVGRQKAGEVWHDMTGNRSGTVTINQDGWGHFFVNGGSVSVWVKR

SEQ ID NO: 44923 - protein, 480 aa, Bacillus sp.
NGTIMQYFEWNVPNDGQHWNRLHNNAQNLKNAGITAIWIPPAWKGTSQNDVGYGAYDLYDLGEFNQKGTVRTKYGTKAELERAIRSLKANGIQVYGDVVMNHKGGADFTERVQAVEVNPQNRNQEVSGTYQIEAWTGFNFPGRGNQHSSFKWRWYHFDGTDWDQSRQLANRIYKFRGDGKAWDWEVDTENGNYDYLMYADVDMDHPEVINELNRWGVWYANTLNLDGFRLDAVKHLKFSFMRDWLGHVRGQTGKNLFAVAEYWKNDLGALENYLSKTNWTMSAFDVPLHYNLYQASNSSGNYDMRNLLNGTLVQRHPSHAVTFVDNHDTQPGEALESFVQGWFKPLAYATILTREQGYPQVFYGDYYGIPSDGVPSYRQQIDPLLKARQQYAYGRQHDYFDHWDVIGWTREGNASHPNSGLATIMSDGPGGSKWMYVGRQKAGEVWHDMTGNRSGTVTINQDGWGHFFVNGGSVSVWVKR

SEQ ID NO: 44924 - protein, 480 aa, Bacillus sp.
NGTIMQYFEWNVPNDGQHWNRLHNNAQNLKNAGITAIWIPPAWKGSSQNDVGYGAYDLYDLGEFNQKGTVRTKYGTKAELERAIRSLKANGIQVYGDVVMNHKGGADFTERVQAVEVNPQNRNQEVSGTYQIEAWTGFNFPGRGNQHSSFKWRWYHFDGTDWDQSRQLANRIYKFRGDGKAWDWEVDTENGNYDYLMYADVDMDHPEVINELNRWGVWYANTLNLDGFRLDAVKHIKFSFMRDWLGHVRGQTGKNLFAVAEYWKNDLGALENYLSKTNWTMSAFDVPLHYNLYQASNSSGNYDMRNLLNGTLVQRHPSHAVTFVDNHDTQPGEALESFVQGWFKPLAYATILTREQGYPQVFYGDYYGIPSDGVPSYRQQIDPLLKARQQYAYGRQHDYFDHWDVIGWTREGNASHPNSGLATIMSDGPGGSKWMYVGRQKAGEVWHDMTGNRSGTVTINQDGWGHFFVNGGSVSVWVKR

SEQ ID NO: 44925 - protein, 480 aa, Bacillus sp.
NGTIMQYFEWNVPNDGQHWNRLHNNAQNLKNAGITAIWIPPAWKGTSQNDVGYGAYDLYDLGEFNQKGTVRTKYGTKAELERAIRSLKANGIQVYGDVVMNHKGGADFTERVQAVEVNPQNRNQEVSGTYQIEAWTGFNFPGRGNQHSSFKWRWYHFDGTDWDQSRQLANRIYKFRGDGKAWDWEVDTENGNYDYLMYADVDMDHPEVINELNRWGVWYANTLNLDGFRLDAVKHIKFSFMRDWLGHVRGQTGKNLFAVAEYWKNDLGALENYLSKTNWTMSAFDVPLHYNLYQASNSSGNYDMRNLLNGTLVQRHPSHAVTFVDNHDTQPGEALESFVQGWFKPLAYATILTREQGYPQVFYGDYYGIPSDGVPSYRQQIDPLLKARQQYAYGRQHDYFDHWDVIGWTREGNASHPNSGLATIMSDGPGGSKWMYVGRQKAGEVWHEMTGNRSGTVTINQDGWGHFFVNGGSVSVWVKR

SEQ ID NO: 44926 - protein, 480 aa, Bacillus sp.
NGTIMQYFEWNVPNDGQHWNRLHNNAQNLKNAGITAIWIPPAWKGTSQNDVGYGAYDLYDLGEFNQKGTVRTKYGTKAELERAIRSLKANGIQVYGDVVMNHKGGADFTERVQAVEVNPQNRNQEVSGTYQIEAWTGFNFPGRGNQHSSFKWRWYHFDGTDWDQSRQLANRIYKFRGDGKAWDWEVDTENGNYDYLMYADVDMDHPEVINELNRWGVWYANTLNLDGFRLDAVKHIKFSFMRDWLGHVRGQTGKNLFAVAEYWKNDLGALENYLSKTNWTMSAFDVPLHYNLYQASNSSGNYDLRNLLNGTLVQRHPSHAVTFVDNHDTQPGEALESFVQGWFKPLAYATILTREQGYPQVFYGDYYGIPSDGVPSYRQQIDPLLKARQQYAYGRQHDYFDHWDVIGWTREGNASHPNSGLATIMSDGPGGSKWMYVGRQKAGEVWHDMTGNRSGTVTINQDGWGHFFVNGGSVSVWVKR

SEQ ID NO: 44927 - protein, 480 aa, Bacillus sp.
NGTIMQYFEWNVPNDGQHWNRLHNNAQNLKNAGITAIWIPPAWKGTSQNDVGYGAYDLYDLGEFNQKGTVRTKYGTKAELERAIRSLKANGIQVYGDVVMNHKGGADFTERVQAVEVNPQNRNQEVSGTYQIEAWTGFNFPGRGNQHSSFKWRWYHFDGTDWDQSRQLANRIYKFRGDGKAWDWEVDTENGNYDYLMYADVDMDHPEVINELNRWGVWYANTLNLDGFRLDAVKHIKFSFMRDWLGHVRGQTGKNLFAVAEYWKNDLGALENYLSKTNWSMSAFDVPLHYNLYQASNSSGNYDMRNLLNGTLVQRHPSHAVTFVDNHDTQPGEALESFVQGWFKPLAYATILTREQGYPQVFYGDYYGIPSDGVPSYRQQIDPLLKARQQYAYGRQHDYFDHWDVIGWTREGNASHPNSGLATIMSDGPGGSKWMYVGRQKAGEVWHDMTGNRSGTVTINQDGWGHFFVNGGSVSVWVKR

SEQ ID NO: 44928 - protein, 480 aa, Bacillus sp.
NGTIMQYFEWNVPNDGQHWNRLHNNAQNLKNAGITAIWIPPAWKGTSQNDVGYGAYDLYDLGEFNQKGTVRTKYGTKAELERAIRSLKANGIQVYGDVVMNHKGGADFTERVQAVEVNPQNRNQEVSGTYQIEAWTGFNFPGRGNQHSSFKWRWYHFDGTDWDQSRQLANRIYKFRGDGKAWDWEVDTENGNYDYLMYADVDLDHPEVINELNRWGVWYANTLNLDGFRLDAVKHIKFSFMRDWLGHVRGQTGKNLFAVAEYWKNDLGALENYLSKTNWTMSAFDVPLHYNLYQASNSSGNYDMRNLLNGTLVQRHPSHAVTFVDNHDTQPGEALESFVQGWFKPLAYATILTREQGYPQVFYGDYYGIPSDGVPSYRQQIDPLLKARQQYAYGRQHDYFDHWDVIGWTREGNASHPNSGLATIMSDGPGGSKWMYVGRQKAGEVWHDMTGNRSGTVTINQDGWGHFFVNGGSVSVWVKR

SEQ ID NO: 44929 - protein, 480 aa, Bacillus sp.
NGTIMQYFEWNVPNDGQHWNRLHNNAQNLKNAGITAIWIPPAWKGTSQNDVGYGAYDLYDLGEFNQKGTVRTKYGTKAELERAIRSLKANGIQVYGDVVMNHKGGADFTERVQAVEVNPQNRNQEVHGTYQIEAWTGFNFPGRGNQHSSFKWRWYHFDGTDWDQSRQLANRIYKFRGDGKAWDWEVDTENGNYDYLMYADVDMDHPEVINELNRWGVWYANTLNLDGFRLDAVKHIKFSFMRDWLGHVRGQTGKNLFAVAEYWKNDLGALENYLSKTNWTMSAFDVPLHYNLYQASNSSGNYDMRNLLNGTLVQRHPSHAVTFVDNHDTQPGEALESFVQGWFKPLAYATILTREQGYPQVFYGDYYGIPSDGVPSYRQQIDPLLKARQQYAYGRQHDYFDHWDVIGWTREGNASHPNSGLATIMSDGPGGSKWMYVGRQKAGEVWHDMTGNRSGTVTINQDGWGHFFVNGGSVSVWVKR

SEQ ID NO: 44930 - protein, 480 aa, Bacillus sp.
NGTIMQYFEWNVPNDGQHWNRLHNNAQNLKNAGITAIWIPPAWKGTSQNDVGYGAYDLYDLGEFNQKGTVRTKYGTKAELERAIRSLKANGIQVYGDAVMNHKGGADFTERVQAVEVNPQNRNQEVSGTYQIEAWTGFNFPGRGNQHSSFKWRWYHFDGTDWDQSRQLANRIYKFRGDGKAWDWEVDTENGNYDYLMYADVDMDHPEVINELNRWGVWYANTLNLDGFRLDAVKHIKFSFMRDWLGHVRGQTGKNLFAVAEYWKNDLGALENYLSKTNWTMSAFDVPLHYNLYQASNSSGNYDMRNLLNGTLVQRHPSHAVTFVDNHDTQPGEALESFVQGWFKPLAYATILTREQGYPQVFYGDYYGIPSDGVPSYRQQIDPLLKARQQYAYGRQHDYFDHWDVIGWTREGNASHPNSGLATIMSDGPGGSKWMYVGRQKAGEVWHDMTGNRSGTVTINQDGWGHFFVNGGSVSVWVKR

SEQ ID NO: 44931 - protein, 480 aa, Bacillus sp.
NGTIMQYFEWNVPNDGQHWNRLHNNAQNFKNAGITAIWIPPAWKGTSQNDVGYGAYDLYDLGEFNQKGTVRTKYGTKAELERAIRSLKANGIQVYGDVVMNHKGGADFTERVQAVEVNPQNRNQEVSGTYQIEAWTGFNFPGRGNQHSSFKWRWYHFDGTDWDQSRQLANRIYKFRGDGKAWDWEVDTENGNYDYLMYADVDMDHPEVINELNRWGVWYANTLNLDGFRLDAVKHIKFSFMRDWLGHVRGQTGKNLFAVAEYWKNDLGALENYLSKTNWTMSAFDVPLHYNLYQASNSSGNYDMRNLLNGTLVQRHPSHAVTFVDNHDTQPGEALESFVQGWFKPLAYATILTREQGYPQVFYGDYYGIPSDGVPSYRQQIDPLLKARQQYAYGRQHDYFDHWDVIGWTREGNASHPNSGLATIMSDGPGGSKWMYVGRQKAGEVWHDMTGNRSGTVTINQDGWGHFFVNGGSVSVWVKR

SEQ ID NO: 44932 - protein, 480 aa, Bacillus sp.
NGTIMQYFEWNVPNDGQHWNRLHNNAQNLKNAGITAIWIPPAWKGTSQNDVGYGAYDLYDLGEFNQKGTVRTKYGTKAELERAIRSLKANGIQVYGDVVMNHKGGADFTERVQAVEVNPQNRNQEVSGTYQIEAWTGFNFPGRGNQHSSFKWRWYHFDGTDWDQSRQLANRIYKFRGDGKAWDWEVDTENGNYDYLMYADVDMDHPEVINELNRWGVWYANTLNLDGFRLDAVKHIKFSFMRDWLGHVRGQTGKNLFAVAEYWKNDLGALENYLSKTNWTMSAFDVPLHYNLYQASNSSGNYDMRNLLNGTLVQRHPSHAVTFVDNHDTQPGEALESFVQGWFKPLAYATILTREQGYPQVFYGDYYGIPSDGVPSYRQQIDPALKARQQYAYGRQHDYFDHWDVIGWTREGNASHPNSGLATIMSDGPGGSKWMYVGRQKAGEVWHDMTGNRSGTVTINQDGWGHFFVNGGSVSVWVKR

SEQ ID NO: 44933 - protein, 480 aa, Bacillus sp.
NGTIMQYFEWNVPNDGQHWNRLHNNAQNLKNAGITAIWIPPAWKGTSQNDVGYGAYDLYDLGEFNQKGTVRTKYGTKAELERAIRSLKANGIQVYGDVVMNHKGGADFTERCQAVEVNPQNRNQEVSGTYQIEAWTGFNFPGRGNQHSSFKWRWYHFDGTDWDQSRQLANRIYKFRGDGKAWDWEVDTENGNYDYLMYADVDMDHPEVINELNRWGVWYANTLNLDGFRLDAVKHIKFSFMRDWLGHVRGQTGKNLFAVAEYWKNDLGALENYLSKTNWTMSAFDVPLHYNLYQASNSSGNYDMRNLLNGTLVQRHPSHAVTFVDNHDTQPGEALESFVQGWFKPLAYATILTREQGYPQVFYGDYYGIPSDGVPSYRQQIDPLLKARQQYAYGRQHDYFDHWDVIGWTREGNASHPNSGLATIMSDGPGGSKWMYVGRQKAGEVWHDMTGNRSGTVTINQDGWGHFFVNGGSVSVWVKR

SEQ ID NO: 44934 - protein, 480 aa, Bacillus sp.
NGTIMQYFEWNVPNDGQHWNRLHNNAQNLKNAGITAIWIPPAWKGTSQNDVGYGAYDLYDLGEFNQKGTVRTKYGTKAELERAIRSLKANGIQVFGDVVMNHKGGADFTERVQAVEVNPQNRNQEVSGTYQIEAWTGFNFPGRGNQHSSFKWRWYHFDGTDWDQSRQLANRIYKFRGDGKAWDWEVDTENGNYDYLMYADVDMDHPEVINELNRWGVWYANTLNLDGFRLDAVKHIKFSFMRDWLGHVRGQTGKNLFAVAEYWKNDLGALENYLSKTNWTMSAFDVPLHYNLYQASNSSGNYDMRNLLNGTLVQRHPSHAVTFVDNHDTQPGEALESFVQGWFKPLAYATILTREQGYPQVFYGDYYGIPSDGVPSYRQQIDPLLKARQQYAYGRQHDYFDHWDVIGWTREGNASHPNSGLATIMSDGPGGSKWMYVGRQKAGEVWHDMTGNRSGTVTINQDGWGHFFVNGGSVSVWVKR

SEQ ID NO: 44935 - protein, 480 aa, Bacillus sp.
NGTIMQYFEWNVPNDGQHWNRLHNNAQNLKNAGITAIWIPPAWKGTSQNDVGYGAYDLYDLGEFNQKGTVRTKYGTKAELERAIRSLKANGIQVYGDVVMNHKGGADFTERVQAVEVNPQNRNQEVSGTYQIEAWTGFNFPGRGNQHSSFKWRWYHFDGTDWDQSRQLANRIYKFRGDGKAWDWEVDTENGNYDYLMYADVDMDHPEVINELNRWGVWYANTLNLDGFRLDAVKHIKFSFMRDWLGHVRGQTGKNLFAVAEYWKNDLGALENYLSKTNWTMSAFDVPLHYNLYQASNSSGNYDMRNLLNGTLVQRHPSHAVTFVDNHDTQPGEALESFVQGWFKPLAYATILTREQGYPQVFYGDYYGIPSDGVPSYRQQIDPLLKARQQYAYGRQHDYFDHWDVIGWTQEGNASHPNSGLATIMSDGPGGSKWMYVGRQKAGEVWHDMTGNRSGTVTINQDGWGHFFVNGGSVSVWVKR

SEQ ID NO: 44936 - protein, 480 aa, Bacillus sp.
NGTIMQYFEWNVPNDGQHWNRLHNNAQNLKNAGITAIWIPPAWKGTSQNDVGYGAYDLYDMGEFNQKGTVRTKYGTKAELERAIRSLKANGIQVYGDVVMNHKGGADFTERVQAVEVNPQNRNQEVSGTYQIEAWTGFNFPGRGNQHSSFKWRWYHFDGTDWDQSRQLANRIYKFRGDGKAWDWEVDTENGNYDYLMYADVDMDHPEVINELNRWGVWYANTLNLDGFRLDAVKHIKFSFMRDWLGHVRGQTGKNLFAVAEYWKNDLGALENYLSKTNWTMSAFDVPLHYNLYQASNSSGNYDMRNLLNGTLVQRHPSHAVTFVDNHDTQPGEALESFVQGWFKPLAYATILTREQGYPQVFYGDYYGIPSDGVPSYRQQIDPLLKARQQYAYGRQHDYFDHWDVIGWTREGNASHPNSGLATIMSDGPGGSKWMYVGRQKAGEVWHDMTGNRSGTVTINQDGWGHFFVNGGSVSVWVKR

SEQ ID NO: 44937 - protein, 480 aa, Bacillus sp.
NGTIMQYFEWNVPNDGQHWNRLHNNAQNLKNAGITAIWIPPAWKGTSQNDVGYGAYDLYDLGEFNQKGTVRTKYGTKAELERVIRSLKANGIQVYGDVVMNHKGGADFTERVQAVEVNPQNRNQEVSGTYQIEAWTGFNFPGRGNQHSSFKWRWYHFDGTDWDQSRQLANRIYKFRGDGKAWDWEVDTENGNYDYLMYADVDMDHPEVINELNRWGVWYANTLNLDGFRLDAVKHIKFSFMRDWLGHVRGQTGKNLFAVAEYWKNDLGALENYLSKTNWTMSAFDVPLHYNLYQASNSSGNYDMRNLLNGTLVQRHPSHAVTFVDNHDTQPGEALESFVQGWFKPLAYATILTREQGYPQVFYGDYYGIPSDGVPSYRQQIDPLLKARQQYAYGRQHDYFDHWDVIGWTREGNASHPNSGLATIMSDGPGGSKWMYVGRQKAGEVWHDMTGNRSGTVTINQDGWGHFFVNGGSVSVWVKR

SEQ ID NO: 44938 - protein, 480 aa, Bacillus sp.
NGTIMQYFEWNVPNDGQHWNRLHNNAQNLKNAGITAIWIPPAWKGTSQNDVGYGAYDLYDLGEFNQKGTVRTKYGTKAELERAIRSLKANGIQVYGDVVMNHKGGADFTERVQAVEVNPQNRNQEVSGTYQIEAWTGFNFPGRGNQHSSFKWRWYHFDGTDWDQSRQLANRIYKFRGDGKAWDWEVDTENGNYDYLMYADVDMDHPEVINELNRWGVWYANTLNLDGFRLDAVKHIKFSFMRDWLGHVRGQTGKNLFAVAEYWKNDLGALENYLSKTNWTMSAFDVPLHYNLYQARNSSGNYDMRNLLNGTLVQRHPSHAVTFVDNHDTQPGEALESFVQGWFKPLAYATILTREQGYPQVFYGDYYGIPSDGVPSYRQQIDPLLKARQQYAYGRQHDYFDHWDVIGWTREGNASHPNSGLATIMSDGPGGSKWMYVGRQKAGEVWHDMTGNRSGTVTINQDGWGHFFVNGGSVSVWVKR

SEQ ID NO: 44939 - protein, 480 aa, Bacillus sp.
NGTIMQYFEWNVPNDGQHWNRLHNNAQNLKNAGITAIWIPPAWKGTSQNDVGYGAYDLYDLGEFNQKGTVRTKYGTKAELERALRSLKANGIQVYGDVVMNHKGGADFTERVQAVEVNPQNRNQEVSGTYQIEAWTGFNFPGRGNQHSSFKWRWYHFDGTDWDQSRQLANRIYKFRGDGKAWDWEVDTENGNYDYLMYADVDMDHPEVINELNRWGVWYANTLNLDGFRLDAVKHIKFSFMRDWLGHVRGQTGKNLFAVAEYWKNDLGALENYLSKTNWTMSAFDVPLHYNLYQASNSSGNYDMRNLLNGTLVQRHPSHAVTFVDNHDTQPGEALESFVQGWFKPLAYATILTREQGYPQVFYGDYYGIPSDGVPSYRQQIDPLLKARQQYAYGRQHDYFDHWDVIGWTREGNASHPNSGLATIMSDGPGGSKWMYVGRQKAGEVWHDMTGNRSGTVTINQDGWGHFFVNGGSVSVWVKR

SEQ ID NO: 44940 - protein, 480 aa, Bacillus sp.
NGTIMQYFEWNVPNDGQHWNRLHNNAQDLKNAGITAIWIPPAWKGTSQNDVGYGAYDLYDLGEFNQKGTVRTKYGTKAELERAIRSLKANGIQVYGDVVMNHKGGADFTERVQAVEVNPQNRNQEVSGTYQIEAWTGFNFPGRGNQHSSFKWRWYHFDGTDWDQSRQLANRIYKFRGDGKAWDWEVDTENGNYDYLMYADVDMDHPEVINELNRWGVWYANTLNLDGFRLDAVKHIKFSFMRDWLGHVRGQTGKNLFAVAEYWKNDLGALENYLSKTNWTMSAFDVPLHYNLYQASNSSGNYDMRNLLNGTLVQRHPSHAVTFVDNHDTQPGEALESFVQGWFKPLAYATILTREQGYPQVFYGDYYGIPSDGVPSYRQQIDPLLKARQQYAYGRQHDYFDHWDVIGWTREGNASHPNSGLATIMSDGPGGSKWMYVGRQKAGEVWHDMTGNRSGTVTINQDGWGHFFVNGGSVSVWVKR

SEQ ID NO: 44941 - protein, 480 aa, Bacillus sp.
NGTIMQYFEWNVPNDGQHWNRLHNNAQNLKNAGITAIWIPPAWKGTSQNDVGYGAYDLYDLGEFNQRGTVRTKYGTKAELERAIRSLKANGIQVYGDVVMNHKGGADFTERVQAVEVNPQNRNQEVSGTYQIEAWTGFNFPGRGNQHSSFKWRWYHFDGTDWDQSRQLANRIYKFRGDGKAWDWEVDTENGNYDYLMYADVDMDHPEVINELNRWGVWYANTLNLDGFRLDAVKHIKFSFMRDWLGHVRGQTGKNLFAVAEYWKNDLGALENYLSKTNWTMSAFDVPLHYNLYQASNSSGNYDMRNLLNGTLVQRHPSHAVTFVDNHDTQPGEALESFVQGWFKPLAYATILTREQGYPQVFYGDYYGIPSDGVPSYRQQIDPLLKARQQYAYGRQHDYFDHWDVIGWTREGNASHPNSGLATIMSDGPGGSKWMYVGRQKAGEVWHDMTGNRSGTVTINQDGWGHFFVNGGSVSVWVKR

SEQ ID NO: 44942 - protein, 480 aa, Bacillus sp.
NGTIMQYFEWNVPNDGQHWNRLHNNAQNLKNAGITAIWIPPAWKGTSQNDVGYGAYDLYDLGEFNQKGTVRTKYGTKAELERAIRSLKANGIQVYGDVVMNHKGGADFTERVQAVEVNPQNRNQEVNGTYQIEAWTGFNFPGRGNQHSSFKWRWYHFDGTDWDQSRQLANRIYKFRGDGKAWDWEVDTENGNYDYLMYADVDMDHPEVINELNRWGVWYANTLNLDGFRLDAVKHIKFSFMRDWLGHVRGQTGKNLFAVAEYWKNDLGALENYLSKTNWTMSAFDVPLHYNLYQASNSSGNYDMRNLLNGTLVQRHPSHAVTFVDNHDTQPGEALESFVQGWFKPLAYATILTREQGYPQVFYGDYYGIPSDGVPSYRQQIDPLLKARQQYAYGRQHDYFDHWDVIGWTREGNASHPNSGLATIMSDGPGGSKWMYVGRQKAGEVWHDMTGNRSGTVTINQDGWGHFFVNGGSVSVWVKR

SEQ ID NO: 44943 - protein, 480 aa, Bacillus sp.
NGTIMQYFEWNVPNDGQHWNRLHNNAQNLKNAGITAIWIPPAWKGTSQNDVGYGAYDLYDLGEFNQKGTVRTKYGTKAELERAIRSLKANGIQVYGDVVMNHKGGADFTERVQAVEVNPQNRNQEVSGTYQIEAWTGFNFPGRGNQHSSFKWRWYHFDGTDWDQSRQLANRIYKFRGDGKAWDWEVDTENGNYDYLMYADVDMDHPEVINELNRWGVWYANTLNLDGFRLDAVKHIKFSFMRDWLGHVRGQTGKNLFAVAEYWKNDLGALENYLSKTNWTMSAFDVPLHYNLYQASNSSGNYDMRNLLNGTLVQRHPSHAVTFVDNHDTQPGEALESFVQGWFKPLAYATILTREQGYPQVFYGDYYGIPSDGVPSYRQQIDPLLKARQQYAYGRQHDYFDHWDVIGWTREGNASHPNSGLVTIMSDGPGGSKWMYVGRQKAGEVWHDMTGNRSGTVTINQDGWGHFFVNGGSVSVWVKR

SEQ ID NO: 44944 - protein, 480 aa, Bacillus sp.
NGTIMQYFEWNVPNDGQHWNRLHNNAQNLKNAGITAIWIPPAWKGTSQNDVGYGAYDLYDLGEFNQKGTVRTKYGTKAELERAIRSLKANGIQVYGDVVMNHKGGADFTERVQAVEVNPQNRNQEVSGTYQIEAWTGFNFPGRGNQHSSFKWRWYHFDGTDWDQSRQLANRIYKFRGDGKAWDWEVDTEXGNYDYLMYADVDMDHPXVINELNRWGVWYANTLNLDGFRLDAVKHIKFSFMRDWLGHVRGQTGKNLFAVAEYWKNDLGALENYLSKTNWTMSAFDVPLHYNLYQASNSSGNYDMRNLLNGTLVQRHPSHAVTFVDNHDTQPGEALESFVQGWFKPLAYATILTREQGYPQVFYGDYYGIPSDGVPSYRQQIDPLLKARQQYAYGRQHDYFDHWDVIGWTREGNASHPNSGLATIMSDGPGGSKWMYVGRQKAGEVWHDMTGNRSGTVTINQDGWGHFFVNGGSVSVWVKR

SEQ ID NO: 44945 - protein, 480 aa, Bacillus sp.
NGTIMQYFEWNVPNDGQHWNRLHNNAQNLKNAGITAIWIPPAWKGTSQNDLGYGAYDLYDLGEFNQKGTVRTKYGTKAELERAIRSLKANGIQVYGDVVMNHKGGADFTERVQAVEVNPQNRNQEVSGTYQIEAWTGFNFPGRGNQHSSFKWRWYHFDGTDWDQSRQLANRIYKFRGDGKAWDWEVDTENGNYDYLMYADVDMDHPEVINELNRWGVWYANTLNLDGFRLDAVKHIKFSFMRDWLGHVRGQTGKNLFAVAEYWKNDLGALENYLSKTNWTMSAFDVPLHYNLYQASNSSGNYDMRNLLNGTLVQRHPSHAVTFVDNHDTQPGEALESFVQGWFKPLAYATILTREQGYPQVFYGDYYGIPSDGVPSYRQQIDPLLKARQQYAYGRQHDYFDHWDVIGWTREGNASHPNSGLATIMSDGPGGSKWMYVGRQKAGEVWHDMTGNRSGTVTINQDGWGHFFVNGGSVSVWVKR

SEQ ID NO: 44946 - protein, 480 aa, Bacillus sp.
NGTIMQFFEWNVPNDGQHWNRLHNNAQNLKNAGITAIWIPPAWKGTSQNDVGYGAYDLYDLGEFNQKGTVRTKYGTKAELERAIRSLKANGIQVYGDVVMNHKGGADFTERVQAVEVNPQNRNQEVSGTYQIEAWTGFNFPGRGNQHSSFKWRWYHFDGTDWDQSRQLANRIYKFRGDGKAWDWEVDTENGNYDYLMYADVDMDHPEVINELNRWGVWYANTLNLDGFRLDAVKHIKFSFMRDWLGHVRGQTGKNLFAVAEYWKNDLGALENYLSKTNWTMSAFDVPLHYNLYQASNSSGNYDMRNLLNGTLVQRHPSHAVTFVDNHDTQPGEALESFVQGWFKPLAYATILTREQGYPQVFYGDYYGIPSDGVPSYRQQIDPLLKARQQYAYGRQHDYFDHWDVIGWTREGNASHPNSGLATIMSDGPGGSKWMYVGRQKAGEVWHDMTGNRSGTVTINQDGWGHFFVNGGSVSVWVKR

SEQ ID NO: 44947 - protein, 480 aa, Bacillus sp.
NGTIMQYFEWNVPNDGQHWNRLHNNAQNLKNAGITAIWIPPAWKGTSQNDVGYGAYDLYDLGEFNQKGTVRTKYGTKAELERAIRSLKANGIQVYGDVVMNHKGGADFTERVQAVEVNPQNRNQEVDGTYQIEAWTGFNFPGRGNQHSSFKWRWYHFDGTDWDQSRQLANRIYKFRGDGKAWDWEVDTENGNYDYLMYADVDMDHPEVINELNRWGVWYANTLNLDGFRLDAVKHIKFSFMRDWLGHVRGQTGKNLFAVAEYWKNDLGALENYLSKTNWTMSAFDVPLHYNLYQASNSSGNYDMRNLLNGTLVQRHPSHAVTFVDNHDTQPGEALESFVQGWFKPLAYATILTREQGYPQVFYGDYYGIPSDGVPSYRQQIDPLLKARQQYAYGRQHDYFDHWDVIGWTREGNASHPNSGLATIMSDGPGGSKWMYVGRQKAGEVWHDMTGNRSGTVTINQDGWGHFFVNGGSVSVWVKR

SEQ ID NO: 44948 - protein, 480 aa, Bacillus sp.
NGTIMQYFEWNVPNDGQHWNRLHNNAQNLKNAGITAIWIPPAWKGTSQNDVGYGAYDLYDLGEFNQKGTVRTKYGTKAELERAIRSLKANGIQVYGDVVMNHKGGADFTERVQAVEVNPQNRNQEVSGTYQIEAWTGFNFPGRGNQHSSFKWRWYHFDGTDWDQSRQLANRIYKFRGDGKAWDWEVDTENGNYDYLMYRDVDMDHPEVINELNRWGVWYANTLNLDGFRLDAVKHIKFSFMRDWLGHVRGQTGKNLFAVAEYWKNDLGALENYLSKTNWTMSAFDVPLHYNLYQASNSSGNYDMRNLLNGTLVQRHPSHAVTFVDNHDTQPGEALESFVQGWFKPLAYATILTREQGYPQVFYGDYYGIPSDGVPSYRQQIDPLLKARQQYAYGRQHDYFDHWDVIGWTREGNASHPNSGLATIMSDGPGGSKWMYVGRQKAGEVWHDMTGNRSGTVTINQDGWGHFFVNGGSVSVWVKR

SEQ ID NO: 44949 - protein, 480 aa, Bacillus sp.
NGTIMQYFEWNVPNDGQHWNRLHNNAQNLKNAGITAIWIPPAWKGTSQNDVGYGAYDLYDLGEFNQKGTVRTKYGTKAELERAIRSLKANGIQVYGDVVMNHKGGADFTERVQAVELNPQNRNQEVSGTYQIEAWTGFNFPGRGNQHSSFKWRWYHFDGTDWDQSRQLANRIYKFRGDGKAWDWEVDTENGNYDYLMYADVDMDHPEVINELNRWGVWYANTLNLDGFRLDAVKHIKFSFMRDWLGHVRGQTGKNLFAVAEYWKNDLGALENYLSKTNWTMSAFDVPLHYNLYQASNSSGNYDMRNLLNGTLVQRHPSHAVTFVDNHDTQPGEALESFVQGWFKPLAYATILTREQGYPQVFYGDYYGIPSDGVPSYRQQIDPLLKARQQYAYGRQHDYFDHWDVIGWTREGNASHPNSGLATIMSDGPGGSKWMYVGRQKAGEVWHDMTGNRSGTVTINQDGWGHFFVNGGSVSVWVKR

SEQ ID NO: 44950 - protein, 480 aa, Bacillus sp.
NGTIMQYFEWNVPNDGQHWNRLHNNAQNLKNAGITAIWIPPAWKGTSQNDVGYGAYDLYDLGEFNQKGTVRTKYGTKAELERAIRSLKANGIQVYGDVVMNHKGGADFSERVQAVEVNPQNRNQEVSGTYQIEAWTGFNFPGRGNQHSSFKWRWYHFDGTDWDQSRQLANRIYKFRGDGKAWDWEVDTENGNYDYLMYADVDMDHPEVINELNRWGVWYANTLNLDGFRLDAVKHIKFSFMRDWLGHVRGQTGKNLFAVAEYWKNDLGALENYLSKTNWTMSAFDVPLHYNLYQASNSSGNYDMRNLLNGTLVQRHPSHAVTFVDNHDTQPGEALESFVQGWFKPLAYATILTREQGYPQVFYGDYYGIPSDGVPSYRQQIDPLLKARQQYAYGRQHDYFDHWDVIGWTREGNASHPNSGLATIMSDGPGGSKWMYVGRQKAGEVWHDMTGNRSGTVTINQDGWGHFFVNGGSVSVWVKR

SEQ ID NO: 44951 - protein, 480 aa, Bacillus sp.
NGTIMQYFEWNVPNDGQHWNRLHNNAQNLKNAGITAIWIPPAWKGTSQNDVGYGAYDLYDLGEFNQKGTVRTKYGTKAELERAIRSLKANGIQVYGDVVMNHKGGADFTERVQAVEVNPQNRNQEVSGTYQIEAWTGFNFPGRGNQHSSFKWRWYHFDGTDWDQSRQLANRIYKFEGDGKAWDWEVDTENGNYDYLMYADVDMDHPEVINELNRWGVWYANTLNLDGFRLDAVKHIKFSFMRDWLGHVRGQTGKNLFAVAEYWKNDLGALENYLSKTNWTMSAFDVPLHYNLYQASNSSGNYDMRNLLNGTLVQRHPSHAVTFVDNHDTQPGEALESFVQGWFKPLAYATILTREQGYPQVFYGDYYGIPSDGVPSYRQQIDPLLKARQQYAYGRQHDYFDHWDVIGWTREGNASHPNSGLATIMSDGPGGSKWMYVGRQKAGEVWHDMTGNRSGTVTINQDGWGHFFVNGGSVSVWVKR

SEQ ID NO: 44952 - protein, 480 aa, Bacillus sp.
NGTIMQYFEWNVPNDGQHWNRLHNNAQNLKNAGITAIWIPPAWKGTSQNDVGYGAYDLYDLGEFNQKGTVRTKYGTKAELERAIRSLKANGIQVYGDVVMNHKGGADFTERVQAVEVNPQNRNQEVSGTYQIEAWTGFNFPGRGNQHSSFKWRWYHFDGTDWDQSRQLANRIYKFRGDGKAWDWEVDTENGNYDYLMYADVDMDHPEVINELNRWGVWYANTLNLDGFRLDAVKHIKFSFMRDWLGHVRGQTGKNLFAVAEYWKNDLGALENYLSKTNWTMSAFDVPLHYNLYQASNSSGNYDMRNLLNGTLVQRHPSHAVTFVDNHDTQPGEALESFVQGWFKPLAYATILTREQGYPQVFYGDYYGIPSDGVPSYRQQIDPLCKARQQYAYGRQHDYFDHWDVIGWTREGNASHPNSGLATIMSDGPGGSKWMYVGRQKAGEVWHDMTGNRSGTVTINQDGWGHFFVNGGSVSVWVKR

SEQ ID NO: 44953 - protein, 480 aa, Bacillus sp.
NGTIMQYFEWNVPNDGQHWNRLHNNAQNLKNAGITAIWIPPAWKGTSQNDVGYGAYDLYDLGEFNQKGTVRTKYGTKAELERAIRSLKANGIQVYGDVVMNHKGGADFTERVQAVEVNPQNRNQEVSGTYQIEAWTGFNFPGRGNQHSSFKWRWYHFDGTDWDQSRQLANRIYKFRGDGKAWDWEVDTENGNYDYLMYADVDMDHPEVINELNRWGVWYANTLNLDGFRLDAVKHIKFSFMRDWLGHARGQTGKNLFAVAEYWKNDLGALENYLSKTNWTMSAFDVPLHYNLYQASNSSGNYDMRNLLNGTLVQRHPSHAVTFVDNHDTQPGEALESFVQGWFKPLAYATILTREQGYPQVFYGDYYGIPSDGVPSYRQQIDPLLKARQQYAYGRQHDYFDHWDVIGWTREGNASHPNSGLATIMSDGPGGSKWMYVGRQKAGEVWHDMTGNRSGTVTINQDGWGHFFVNGGSVSVWVKR

SEQ ID NO: 44954 - protein, 480 aa, Bacillus sp.
NGTIMQYFEWNVPNDGQHWNRLHNNAQNLKNAGITAIWIPPAWKGTSQNDVGYGAYDLYDLGEFNQKGTVRTKYGTKAELERAIRSLKANGIQVYGDVVMNHKGGADFTERVQAVEVNPQNRNQEVSGTYQIEAWTGFNFPGRGNQHSSFKWRWYHFDGTDWDQSRQLANRIYKFRGDGKAWDWEVDTENGNYDYLMYADVDMDHPEVINELNRWGVWYANTLNLDGFRLDAVKHIKFSFMRDWLGHVRGQTGKNLFAVAEYWKNDLGALENYLSKTNWTMSAFDVPLHYNLYQASNSSGNYDMRNLLNGTLVQRHPSHAVTFVDNHDTQPGEALESFVQGWFKPLAYATILTREQGYPQVFYGDYYGIPSDGVPSYRQQIDPLLKARQQYAYGRQHDYFDHWDVIGWTREGNASHPNSGLATIMSDGPGGSKWLYVGRQKAGEVWHDMTGNRSGTVTINQDGWGHFFVNGGSVSVWVKR

SEQ ID NO: 44955 - protein, 480 aa, Bacillus sp.
NGTIMQYFEWNVPNDGQHWNRLHNNAQNLKNAGITAIWIPPAWKGTSQNDVGYGAYDLYDLGEFNQKGTVRTKYGTKAELERAIRSLKANGIQVYGDVVMNHKGGADFTERVQAVEVNPQNRNQEVSGTYQIEAWTGFNFPGRGNQHSSFKWRWYHFDGTDWDQSRQLANRIYKFRGDGKAWDWEVDTENGNYDYLMYGDVDMDHPEVINELNRWGVWYANTLNLDGFRLDAVKHIKFSFMRDWLGHVRGQTGKNLFAVAEYWKNDLGALENYLSKTNWTMSAFDVPLHYNLYQASNSSGNYDMRNLLNGTLVQRHPSHAVTFVDNHDTQPGEALESFVQGWFKPLAYATILTREQGYPQVFYGDYYGIPSDGVPSYRQQIDPLLKARQQYAYGRQHDYFDHWDVIGWTREGNASHPNSGLATIMSDGPGGSKWMYVGRQKAGEVWHDMTGNRSGTVTINQDGWGHFFVNGGSVSVWVKR

SEQ ID NO: 44956 - protein, 480 aa, Bacillus sp.
NGTIMQYFEWNVPNDGQHWNRLHNNAQNLKNAGITAIWIPPAWKGTSQNDVGYGAYDLYDLGEFNQKGTVRTKYGTKAELERAIRSLKANGIQVYGDVVMNHKGGADFTERVQAVEVNPQNRNQEVSGTYQIEAWTGFNFPGRGNQHSSFKWRWYHFDGTDWDQSRQLANRIYKFRGDGKAWDWEVDTENGNYDYLMYADVDMDHPEVINELNRWGVWYANTLNLDGFRLDAVKHIKFSFMRDWLGHVRGQTGQNLFAVAEYWKNDLGALENYLSKTNWTMSAFDVPLHYNLYQASNSSGNYDMRNLLNGTLVQRHPSHAVTFVDNHDTQPGEALESFVQGWFKPLAYATILTREQGYPQVFYGDYYGIPSDGVPSYRQQIDPLLKARQQYAYGRQHDYFDHWDVIGWTREGNASHPNSGLATIMSDGPGGSKWMYVGRQKAGEVWHDMTGNRSGTVTINQDGWGHFFVNGGSVSVWVKR

SEQ ID NO: 44957 - protein, 480 aa, Bacillus sp.
NGTIMQYFEWNVPNDGQHWNRLHNNAQNLKNAGITAIWIPPAWKGTSQNDVGYGAYDLYDLGEFNQKGTVRTKYGTKAELERAIRSLKANGIQVYGDVVMNHKGGADFTERVQAVEVNPQNRNQEVSGTYQIEAWTGFNFPGRGNQHSSFKWRWYHFDGTDWDQSRQLANRIYKFRGDGKAWDWEVDTENGNYDYLMYADVDMDHPEVINELNRWGVWYANTLNLDGFRLDAVKHIKFSFMRDWLGHVRGQTGKNLFAVAEYWKNDLGALENYLSKTNWTMSAFDVPLHYNLYQASNSSGNYDMRNLLNGTLVQRHPSHAVTFVDNHDTQPGEALESFVQGWFKPLAYATILTREQGYPQVFYGDYYGIPSDGVPSYRQQIDPFLKARQQYAYGRQHDYFDHWDVIGWTREGNASHPNSGLATIMSDGPGGSKWMYVGRQKAGEVWHDMTGNRSGTVTINQDGWGHFFVNGGSVSVWVKR

SEQ ID NO: 44958 - protein, 480 aa, Bacillus sp.
NGTIMQYFEWNVPNDGQHWNRLHNNAQNLKNAGITAIWIPPAWKGTSQNDVGYGAYDLYDLGEFNQKGTVRTKYGTKAELERAIRSLKANGIQVYGDVVMNHKGGADFTERVQAVEVNPQNRNQEVSGTYQIEAWTGFNFPGRGNQHSSFKWRWYHFDGTDWDQSRQLANRIYKFRGDGKQWDWEVDTENGNYDYLMYADVDMDHPEVINELNRWGVWYANTLNLDGFRLDAVKHIKFSFMRDWLGHVRGQTGKNLFAVAEYWKNDLGALENYLSKTNWTMSAFDVPLHYNLYQASNSSGNYDMRNLLNGTLVQRHPSHAVTFVDNHDTQPGEALESFVQGWFKPLAYATILTREQGYPQVFYGDYYGIPSDGVPSYRQQIDPLLKARQQYAYGRQHDYFDHWDVIGWTREGNASHPNSGLATIMSDGPGGSKWMYVGRQKAGEVWHDMTGNRSGTVTINQDGWGHFFVNGGSVSVWVKR

SEQ ID NO: 44959 - protein, 480 aa, Bacillus sp.
NGTIMQYFEWNVPNDGQHWNRLHNNAQNLKNAGITAIWIPPAWKGTSQNDVGYGAYDLYDLGEFNQKGTVRTKYGTKAELERAIRSLKANGIQVYGDVVMNHKGGADFTERVQAVEVNPQNRNQEVSGTYQIEAWSGFNFPGRGNQHSSFKWRWYHFDGTDWDQSRQLANRIYKFRGDGKAWDWEVDTENGNYDYLMYADVDMDHPEVINELNRWGVWYANTLNLDGFRLDAVKHIKFSFMRDWLGHVRGQTGKNLFAVAEYWKNDLGALENYLSKTNWTMSAFDVPLHYNLYQASNSSGNYDMRNLLNGTLVQRHPSHAVTFVDNHDTQPGEALESFVQGWFKPLAYATILTREQGYPQVFYGDYYGIPSDGVPSYRQQIDPLLKARQQYAYGRQHDYFDHWDVIGWTREGNASHPNSGLATIMSDGPGGSKWMYVGRQKAGEVWHDMTGNRSGTVTINQDGWGHFFVNGGSVSVWVKR

SEQ ID NO: 44960 - protein, 480 aa, Bacillus sp.
NGTIMQYFEWNVPNDGQHWNRLHNNAQNLKNAGITAIWIPPAWKGTSQNDVGYGAYDLYDLGEFNQKGTVRTKYGTKAELERAIRSLKANGIQVYGDVVMNHKGGADFTERVQAVEVNPQNRNQEVCGTYQIEAWTGFNFPGRGNQHSSFKWRWYHFDGTDWDQSRQLANRIYKFRGDGKAWDWEVDTENGNYDYLMYADVDMDHPEVINELNRWGVWYANTLNLDGFRLDAVKHIKFSFMRDWLGHVRGQTGKNLFAVAEYWKNDLGALENYLSKTNWTMSAFDVPLHYNLYQASNSSGNYDMRNLLNGTLVQRHPSHAVTFVDNHDTQPGEALESFVQGWFKPLAYATILTREQGYPQVFYGDYYGIPSDGVPSYRQQIDPLLKARQQYAYGRQHDYFDHWDVIGWTREGNASHPNSGLATIMSDGPGGSKWMYVGRQKAGEVWHDMTGNRSGTVTINQDGWGHFFVNGGSVSVWVKR

SEQ ID NO: 44961 - protein, 480 aa, Bacillus sp.
NGTIMQYFEWNVPNDGQHWNRLHNNAQNLKNAGITAIWIPPAWKGTSQNDVGYGAYDLYDLGEFNQKGTVRTKYGTKAELERAIRSLKANGIQVYGDVVMNHKGGADFTERVQAAEVNPQNRNQEVSGTYQIEAWTGFNFPGRGNQHSSFKWRWYHFDGTDWDQSRQLANRIYKFRGDGKAWDWEVDTENGNYDYLMYADVDMDHPEVINELNRWGVWYANTLNLDGFRLDAVKHIKFSFMRDWLGHVRGQTGKNLFAVAEYWKNDLGALENYLSKTNWTMSAFDVPLHYNLYQASNSSGNYDMRNLLNGTLVQRHPSHAVTFVDNHDTQPGEALESFVQGWFKPLAYATILTREQGYPQVFYGDYYGIPSDGVPSYRQQIDPLLKARQQYAYGRQHDYFDHWDVIGWTREGNASHPNSGLATIMSDGPGGSKWMYVGRQKAGEVWHDMTGNRSGTVTINQDGWGHFFVNGGSVSVWVKR

SEQ ID NO: 44962 - protein, 480 aa, Bacillus sp.
NGTIMQYFEWNVPNDGQHWNRLHNNAQNLKNAGVTAIWIPPAWKGTSQNDVGYGAYDLYDLGEFNQKGTVRTKYGTKAELERAIRSLKANGIQVYGDVVMNHKGGADFTERVQAVEVNPQNRNQEVSGTYQIEAWTGFNFPGRGNQHSSFKWRWYHFDGTDWDQSRQLANRIYKFRGDGKAWDWEVDTENGNYDYLMYADVDMDHPEVINELNRWGVWYANTLNLDGFRLDAVKHIKFSFMRDWLGHVRGQTGKNLFAVAEYWKNDLGALENYLSKTNWTMSAFDVPLHYNLYQASNSSGNYDMRNLLNGTLVQRHPSHAVTFVDNHDTQPGEALESFVQGWFKPLAYATILTREQGYPQVFYGDYYGIPSDGVPSYRQQIDPLLKARQQYAYGRQHDYFDHWDVIGWTREGNASHPNSGLATIMSDGPGGSKWMYVGRQKAGEVWHDMTGNRSGTVTINQDGWGHFFVNGGSVSVWVKR

SEQ ID NO: 44963 - protein, 480 aa, Bacillus sp.
NGTIMQYFEWNVPNDGQHWNRLHNNAQNLKNAGITAIWIPPAWKGTSQNDTGYGAYDLYDLGEFNQKGTVRTKYGTKAELERAIRSLKANGIQVYGDVVMNHKGGADFTERVQAVEVNPQNRNQEVSGTYQIEAWTGFNFPGRGNQHSSFKWRWYHFDGTDWDQSRQLANRIYKFRGDGKAWDWEVDTENGNYDYLMYADVDMDHPEVINELNRWGVWYANTLNLDGFRLDAVKHIKFSFMRDWLGHVRGQTGKNLFAVAEYWKNDLGALENYLSKTNWTMSAFDVPLHYNLYQASNSSGNYDMRNLLNGTLVQRHPSHAVTFVDNHDTQPGEALESFVQGWFKPLAYATILTREQGYPQVFYGDYYGIPSDGVPSYRQQIDPLLKARQQYAYGRQHDYFDHWDVIGWTREGNASHPNSGLATIMSDGPGGSKWMYVGRQKAGEVWHDMTGNRSGTVTINQDGWGHFFVNGGSVSVWVKR

SEQ ID NO: 44964 - protein, 480 aa, Bacillus sp.
NGTIMQYFEWNVPNDGQHWNRLHNNAQNLKNAGITAIWIPPAWKGTSQNDVGYGAYDLYDLGEFNQKGTVRTKYGTKAELERAIRSLKANGIQVYGDVVMNHKGGADFTERVQAVEVNPQNRNQEVSGTYQIEAWTGFNFPGRGNQHSSFKWRWYHFDGTDWDQSRQLANRIYKFRGDGKAWDWEVDTENGNYDYLMYADVDMDHPEVINELNRWGVWYANTLNLDGFRLDAVKHIKFSFMRDWLGHVRGQTGKNLFAVAEYWKNDLGALENYLSKTNWTMEAFDVPLHYNLYQASNSSGNYDMRNLLNGTLVQRHPSHAVTFVDNHDTQPGEALESFVQGWFKPLAYATILTREQGYPQVFYGDYYGIPSDGVPSYRQQIDPLLKARQQYAYGRQHDYFDHWDVIGWTREGNASHPNSGLATIMSDGPGGSKWMYVGRQKAGEVWHDMTGNRSGTVTINQDGWGHFFVNGGSVSVWVKR

SEQ ID NO: 44965 - protein, 480 aa, Bacillus sp.
NGTIMQYFEWNVPNDGQHWNRLHNNAQNLKNAGITAIWIPPAWKGTSQNDVGYGAYDLYDLGEFNQKGTVRTKYGTKAELERAIRSLKANGIQVYGDVVMNHKGGADFTERVQAVEVNPQNRNQEVSGTYQIETWTGFNFPGRGNQHSSFKWRWYHFDGTDWDQSRQLANRIYKFRGDGKAWDWEVDTENGNYDYLMYADVDMDHPEVINELNRWGVWYANTLNLDGFRLDAVKHIKFSFMRDWLGHVRGQTGKNLFAVAEYWKNDLGALENYLSKTNWTMSAFDVPLHYNLYQASNSSGNYDMRNLLNGTLVQRHPSHAVTFVDNHDTQPGEALESFVQGWFKPLAYATILTREQGYPQVFYGDYYGIPSDGVPSYRQQIDPLLKARQQYAYGRQHDYFDHWDVIGWTREGNASHPNSGLATIMSDGPGGSKWMYVGRQKAGEVWHDMTGNRSGTVTINQDGWGHFFVNGGSVSVWVKR

SEQ ID NO: 44966 - protein, 480 aa, Bacillus sp.
NGTIMQYFEWNVPNDGQHWNRLHNNAQNLKNAGITAIWIPPAWKGTSQNDVGYGAYDLYDLGEFNQKGTVRTKYGTKAELERAIRSLKANGIQVYGDVVMNHKGGADFTERVQAVEVNPQNRNQEVSGTYQIEAWTGFNFPGRGNQHSSFKWRWYHFDGTDWDQSRQLANRIYKFRGDGKAWDWEVDTENGNYDYLMYADVDMDHPEVINELNRWGVWYANSLNLDGFRLDAVKHIKFSFMRDWLGHVRGQTGKNLFAVAEYWKNDLGALENYLSKTNWTMSAFDVPLHYNLYQASNSSGNYDMRNLLNGTLVQRHPSHAVTFVDNHDTQPGEALESFVQGWFKPLAYATILTREQGYPQVFYGDYYGIPSDGVPSYRQQIDPLLKARQQYAYGRQHDYFDHWDVIGWTREGNASHPNSGLATIMSDGPGGSKWMYVGRQKAGEVWHDMTGNRSGTVTINQDGWGHFFVNGGSVSVWVKR

SEQ ID NO: 44967 - protein, 480 aa, Bacillus sp.
NGTIMQYFEWNVPNDGQHWNRLHNNAQNLKNAGITAIWIPPAWKGTSQNDVGYGAYDLYDLGEFNQKGTVRTKYGTKAELERAIRSLKANGIQVYGDVVMNHKGGADFTERVQAVEVNPQNRNQEVPGTYQIEAWTGFNFPGRGNQHSSFKWRWYHFDGTDWDQSRQLANRIYKFRGDGKAWDWEVDTENGNYDYLMYADVDMDHPEVINELNRWGVWYANTLNLDGFRLDAVKHIKFSFMRDWLGHVRGQTGKNLFAVAEYWKNDLGALENYLSKTNWTMSAFDVPLHYNLYQASNSSGNYDMRNLLNGTLVQRHPSHAVTFVDNHDTQPGEALESFVQGWFKPLAYATILTREQGYPQVFYGDYYGIPSDGVPSYRQQIDPLLKARQQYAYGRQHDYFDHWDVIGWTREGNASHPNSGLATIMSDGPGGSKWMYVGRQKAGEVWHDMTGNRSGTVTINQDGWGHFFVNGGSVSVWVKR

SEQ ID NO: 44968 - protein, 480 aa, Bacillus sp.
NGTIMQYFEWNVPNDGQHWNRLHNNAQNLKNAGITAIWIPPAWKGTSQNDVGYGAYDLYDLGEFNQKGTVRTKYGTKAELERAIRSLKANGIQVYGDVVMNHKGGADFTERIQAVEVNPQNRNQEVSGTYQIEAWTGFNFPGRGNQHSSFKWRWYHFDGTDWDQSRQLANRIYKFRGDGKAWDWEVDTENGNYDYLMYADVDMDHPEVINELNRWGVWYANTLNLDGFRLDAVKHIKFSFMRDWLGHVRGQTGKNLFAVAEYWKNDLGALENYLSKTNWTMSAFDVPLHYNLYQASNSSGNYDMRNLLNGTLVQRHPSHAVTFVDNHDTQPGEALESFVQGWFKPLAYATILTREQGYPQVFYGDYYGIPSDGVPSYRQQIDPLLKARQQYAYGRQHDYFDHWDVIGWTREGNASHPNSGLATIMSDGPGGSKWMYVGRQKAGEVWHDMTGNRSGTVTINQDGWGHFFVNGGSVSVWVKR

SEQ ID NO: 44969 - protein, 480 aa, Bacillus sp.
NGTIMQYFEWNVPNDGQHWNRLHNNAQNLKNAGITAIWIPPAWKGTSQNDMGYGAYDLYDLGEFNQKGTVRTKYGTKAELERAIRSLKANGIQVYGDVVMNHKGGADFTERVQAVEVNPQNRNQEVSGTYQIEAWTGFNFPGRGNQHSSFKWRWYHFDGTDWDQSRQLANRIYKFRGDGKAWDWEVDTENGNYDYLMYADVDMDHPEVINELNRWGVWYANTLNLDGFRLDAVKHIKFSFMRDWLGHVRGQTGKNLFAVAEYWKNDLGALENYLSKTNWTMSAFDVPLHYNLYQASNSSGNYDMRNLLNGTLVQRHPSHAVTFVDNHDTQPGEALESFVQGWFKPLAYATILTREQGYPQVFYGDYYGIPSDGVPSYRQQIDPLLKARQQYAYGRQHDYFDHWDVIGWTREGNASHPNSGLATIMSDGPGGSKWMYVGRQKAGEVWHDMTGNRSGTVTINQDGWGHFFVNGGSVSVWVKR

SEQ ID NO: 44970 - protein, 480 aa, Bacillus sp.
NGTIMQYFEWNVPNDGQHWNRLHNNAQNLKNAGITAIWIPPAWKGTSQNDVGYGAYDLYDLGEFNQKGTVRTKYGTKAELERAIRSLKANGIQVYGDVVMNHKGGADFTERVQAVEVNPQNRNQEVSGTYQIEAWTGFNFPGRGNQHSSFKWRWYHFDGTDWDQSRQLANRIYKFRGDGKAWDWEVDTENGNYDYLMYADVDMDHPEVINELNRWGVWYANTLNLDGFRLDAVKHIKFSFMRDWLGHVRGQTGKNLFAVAEYWKNDLGALENYLSKTNWTMSAFDVPLHYNLYQASNSSGNYDMRNLLNGTLVQRHPSHAVTFVDNHDTQPGEALESFVQGWFKPLAYATILTREQGYPQVFYGDYYGIPSDGVPSYRQQIDPLLKARQQYCYGRQHDYFDHWDVIGWTREGNASHPNSGLATIMSDGPGGSKWMYVGRQKAGEVWHDMTGNRSGTVTINQDGWGHFFVNGGSVSVWVKR

SEQ ID NO: 44971 - protein, 480 aa, Bacillus sp.
NGTIMQYFEWNVPNDGQHWNRLHNNAQNLKNAGITAIWIPPAWKGTSQNDVGYGAYDLYDLGEFNQKGTVRTKYGTKAELERAIRSLKANGIQVYGDVVMNHKGGADFTERVQAVEVNPQNRNQEVSGTYQIEAWTGFNFPGRGNQHSSFKWRWYHFDGTDWDQSRQLANRIYKFRGDGKAWDWEVDTENGNYDYLMYADVDMDHPEVINELNRWGVWYANTLNLDGFRLDAVKHIKFSFMRDWLGHVRGQTGKNLFAVAEYWKNDLGALENYLSKTNWTMSAFDVPLHYNLYQASNSSGNYDMRNLLNGTLVQRHPSHAVTFVDNHDTQPGEALESFVQGWFKPLAYATILTREQGYPQVFYGDYYGIPSDGVPSYRQQIDPLLKARQQYAYGRQHDYFDHWDVLGWTREGNASHPNSGLATIMSDGPGGSKWMYVGRQKAGEVWHDMTGNRSGTVTINQDGWGHFFVNGGSVSVWVKR

SEQ ID NO: 44972 - protein, 480 aa, Bacillus sp.
NGTIMQYFEWNVPNDGQHWNRLHNNAQNLKNAGITAIWIPPAWKGTTQNDVGYGAYDLYDLGEFNQKGTVRTKYGTKAELERAIRSLKANGIQVYGDVVMNHKGGADFTERVQAVEVNPQNRNQEVSGTYQIEAWTGFNFPGRGNQHSSFKWRWYHFDGTDWDQSRQLANRIYKFRGDGKAWDWEVDTENGNYDYLMYADVDMDHPEVINELNRWGVWYANTLNLDGFRLDAVKHIKFSFMRDWLGHVRGQTGKNLFAVAEYWKNDLGALENYLSKTNWTMSAFDVPLHYNLYQASNSSGNYDMRNLLNGTLVQRHPSHAVTFVDNHDTQPGEALESFVQGWFKPLAYATILTREQGYPQVFYGDYYGIPSDGVPSYRQQIDPLLKARQQYAYGRQHDYFDHWDVIGWTREGNASHPNSGLATIMSDGPGGSKWMYVGRQKAGEVWHDMTGNRSGTVTINQDGWGHFFVNGGSVSVWVKR

SEQ ID NO: 44973 - protein, 480 aa, Bacillus sp.
NGTIMQYFEWNVPNDGQHWNRLHNNAQNLKNAGITAIWIPPAWKGTSQNDVGYGAYDLYDLGEFNQKGTVRTKYGTKAELERAIRSLKANGIQVYGDVVMNHKGGADFTERVQAVEVNPQNRNQEVSGTYQIEAWTGFNFPGRGNQHSSFQWRWYHFDGTDWDQSRQLANRIYKFRGDGKAWDWEVDTENGNYDYLMYADVDMDHPEVINELNRWGVWYANTLNLDGFRLDAVKHIKFSFMRDWLGHVRGQTGKNLFAVAEYWKNDLGALENYLSKTNWTMSAFDVPLHYNLYQASNSSGNYDMRNLLNGTLVQRHPSHAVTFVDNHDTQPGEALESFVQGWFKPLAYATILTREQGYPQVFYGDYYGIPSDGVPSYRQQIDPLLKARQQYAYGRQHDYFDHWDVIGWTREGNASHPNSGLATIMSDGPGGSKWMYVGRQKAGEVWHDMTGNRSGTVTINQDGWGHFFVNGGSVSVWVKR

SEQ ID NO: 44974 - protein, 480 aa, Bacillus sp.
NGTIMQYFEWNVPNDGQHWNRLHNNAQNLKNAGITAIWIPPAWKGTNQNDVGYGAYDLYDLGEFNQKGTVRTKYGTKAELERAIRSLKANGIQVYGDVVMNHKGGADFTERVQAVEVNPQNRNQEVSGTYQIEAWTGFNFPGRGNQHSSFKWRWYHFDGTDWDQSRQLANRIYKFRGDGKAWDWEVDTENGNYDYLMYADVDMDHPEVINELNRWGVWYANTLNLDGFRLDAVKHIKFSFMRDWLGHVRGQTGKNLFAVAEYWKNDLGALENYLSKTNWTMSAFDVPLHYNLYQASNSSGNYDMRNLLNGTLVQRHPSHAVTFVDNHDTQPGEALESFVQGWFKPLAYATILTREQGYPQVFYGDYYGIPSDGVPSYRQQIDPLLKARQQYAYGRQHDYFDHWDVIGWTREGNASHPNSGLATIMSDGPGGSKWMYVGRQKAGEVWHDMTGNRSGTVTINQDGWGHFFVNGGSVSVWVKR

SEQ ID NO: 44975 - protein, 480 aa, Bacillus sp.
NGTIMQYFEWNVPNDGQHWNRLHNNAQNLKNAGITAIWIPPAWKGTSQNDVGYGAYDLYDLGEFNQKGTVRSKYGTKAELERAIRSLKANGIQVYGDVVMNHKGGADFTERVQAVEVNPQNRNQEVSGTYQIEAWTGFNFPGRGNQHSSFKWRWYHFDGTDWDQSRQLANRIYKFRGDGKAWDWEVDTENGNYDYLMYADVDMDHPEVINELNRWGVWYANTLNLDGFRLDAVKHIKFSFMRDWLGHVRGQTGKNLFAVAEYWKNDLGALENYLSKTNWTMSAFDVPLHYNLYQASNSSGNYDMRNLLNGTLVQRHPSHAVTFVDNHDTQPGEALESFVQGWFKPLAYATILTREQGYPQVFYGDYYGIPSDGVPSYRQQIDPLLKARQQYAYGRQHDYFDHWDVIGWTREGNASHPNSGLATIMSDGPGGSKWMYVGRQKAGEVWHDMTGNRSGTVTINQDGWGHFFVNGGSVSVWVKR

SEQ ID NO: 44976 - protein, 480 aa, Bacillus sp.
NGTIMQYFEWNVPNDGQHWNRLHNNAQNLKNAGLTAIWIPPAWKGTSQNDVGYGAYDLYDLGEFNQKGTVRTKYGTKAELERAIRSLKANGIQVYGDVVMNHKGGADFTERVQAVEVNPQNRNQEVSGTYQIEAWTGFNFPGRGNQHSSFKWRWYHFDGTDWDQSRQLANRIYKFRGDGKAWDWEVDTENGNYDYLMYADVDMDHPEVINELNRWGVWYANTLNLDGFRLDAVKHIKFSFMRDWLGHVRGQTGKNLFAVAEYWKNDLGALENYLSKTNWTMSAFDVPLHYNLYQASNSSGNYDMRNLLNGTLVQRHPSHAVTFVDNHDTQPGEALESFVQGWFKPLAYATILTREQGYPQVFYGDYYGIPSDGVPSYRQQIDPLLKARQQYAYGRQHDYFDHWDVIGWTREGNASHPNSGLATIMSDGPGGSKWMYVGRQKAGEVWHDMTGNRSGTVTINQDGWGHFFVNGGSVSVWVKR

SEQ ID NO: 44977 - protein, 480 aa, Bacillus sp.
NGTIMQYFEWNVPNDGQHWNRLHNNAQNLKNAGITAIWIPPAWKGTSQNDVGYGAYDLYDLGEFNQKGTVRTKYGTKAELERAIRSLKANGIQVYGDVVMNHKGGADFTERVQAVEVNPQNRNQEVSGTYQIEAWTGFNFPGRGNQHSSFKWRWYHFDGTDWDQSRQLANRIYKFRGDGKAWDWEVDTENGNWDYLMYADVDMDHPEVINELNRWGVWYANTLNLDGFRLDAVKHIKFSFMRDWLGHVRGQTGKNLFAVAEYWKNDLGALENYLSKTNWTMSAFDVPLHYNLYQASNSSGNYDMRNLLNGTLVQRHPSHAVTFVDNHDTQPGEALESFVQGWFKPLAYATILTREQGYPQVFYGDYYGIPSDGVPSYRQQIDPLLKARQQYAYGRQHDYFDHWDVIGWTREGNASHPNSGLATIMSDGPGGSKWMYVGRQKAGEVWHDMTGNRSGTVTINQDGWGHFFVNGGSVSVWVKR

SEQ ID NO: 44978 - protein, 480 aa, Bacillus sp.
NGTIMQYFEWNVPNDGQHWNRLHNNAQNLKNAGITAIWIPPAWKGTSQNDVGYGAYDLYDLGEFNQKGTVRTKYGTKAELERAIRSLKANGIQVYGDVVMNHKGGADFTERVQAVDVNPQNRNQEVSGTYQIEAWTGFNFPGRGNQHSSFKWRWYHFDGTDWDQSRQLANRIYKFRGDGKAWDWEVDTENGNYDYLMYADVDMDHPEVINELNRWGVWYANTLNLDGFRLDAVKHIKFSFMRDWLGHVRGQTGKNLFAVAEYWKNDLGALENYLSKTNWTMSAFDVPLHYNLYQASNSSGNYDMRNLLNGTLVQRHPSHAVTFVDNHDTQPGEALESFVQGWFKPLAYATILTREQGYPQVFYGDYYGIPSDGVPSYRQQIDPLLKARQQYAYGRQHDYFDHWDVIGWTREGNASHPNSGLATIMSDGPGGSKWMYVGRQKAGEVWHDMTGNRSGTVTINQDGWGHFFVNGGSVSVWVKR

SEQ ID NO: 44979 - protein, 480 aa, Bacillus sp.
NGTIMQYFEWNVPNDGQHWNRLHNNAQNLKNAGITAIWIPPAWKGTSQNDVGYGAYDLYDLGEFNQKGTVRTKYGTKAELERAIRSLKANGIQVYGDVVMNHKGGADFTERVQAVEVNPQNRNQEVSGTYQIEAWTGFNFPGRGNQHSSFKWRWYHFDGTDWDQTRQLANRIYKFRGDGKAWDWEVDTENGNYDYLMYADVDMDHPEVINELNRWGVWYANTLNLDGFRLDAVKHIKFSFMRDWLGHVRGQTGKNLFAVAEYWKNDLGALENYLSKTNWTMSAFDVPLHYNLYQASNSSGNYDMRNLLNGTLVQRHPSHAVTFVDNHDTQPGEALESFVQGWFKPLAYATILTREQGYPQVFYGDYYGIPSDGVPSYRQQIDPLLKARQQYAYGRQHDYFDHWDVIGWTREGNASHPNSGLATIMSDGPGGSKWMYVGRQKAGEVWHDMTGNRSGTVTINQDGWGHFFVNGGSVSVWVKR

SEQ ID NO: 44980 - protein, 480 aa, Bacillus sp.
NGTIMQYFEWNVPNDGQHWNRLHNNAQNLKNAGITAIWIPPAWKGTSQNDVGYGAFDLYDLGEFNQKGTVRTKYGTKAELERAIRSLKANGIQVYGDVVMNHKGGADFTERVQAVEVNPQNRNQEVSGTYQIEAWTGFNFPGRGNQHSSFKWRWYHFDGTDWDQSRQLANRIYKFRGDGKAWDWEVDTENGNYDYLMYADVDMDHPEVINELNRWGVWYANTLNLDGFRLDAVKHIKFSFMRDWLGHVRGQTGKNLFAVAEYWKNDLGALENYLSKTNWTMSAFDVPLHYNLYQASNSSGNYDMRNLLNGTLVQRHPSHAVTFVDNHDTQPGEALESFVQGWFKPLAYATILTREQGYPQVFYGDYYGIPSDGVPSYRQQIDPLLKARQQYAYGRQHDYFDHWDVIGWTREGNASHPNSGLATIMSDGPGGSKWMYVGRQKAGEVWHDMTGNRSGTVTINQDGWGHFFVNGGSVSVWVKR

SEQ ID NO: 44981 - protein, 480 aa, Bacillus sp.
NGSIMQYFEWNVPNDGQHWNRLHNNAQNLKNAGITAIWIPPAWKGTSQNDVGYGAYDLYDLGEFNQKGTVRTKYGTKAELERAIRSLKANGIQVYGDVVMNHKGGADFTERVQAVEVNPQNRNQEVSGTYQIEAWTGFNFPGRGNQHSSFKWRWYHFDGTDWDQSRQLANRIYKFRGDGKAWDWEVDTENGNYDYLMYADVDMDHPEVINELNRWGVWYANTLNLDGFRLDAVKHIKFSFMRDWLGHVRGQTGKNLFAVAEYWKNDLGALENYLSKTNWTMSAFDVPLHYNLYQASNSSGNYDMRNLLNGTLVQRHPSHAVTFVDNHDTQPGEALESFVQGWFKPLAYATILTREQGYPQVFYGDYYGIPSDGVPSYRQQIDPLLKARQQYAYGRQHDYFDHWDVIGWTREGNASHPNSGLATIMSDGPGGSKWMYVGRQKAGEVWHDMTGNRSGTVTINQDGWGHFFVNGGSVSVWVKR

SEQ ID NO: 44982 - protein, 480 aa, Bacillus sp.
NGTIMQYFEWNVPNDGQHWNRLHNNAQNLKNAGITAIWIPPAWKGTSQNDVGYGAYDLYDLGEFNQKGTVRTKYGTKAELERAIRSLKANGIQVYGDVVMNHKGGADFTERVQAVEVNPQNRNQEVSGTYQIEAWTGFNFPGRGNQHSSFKWRWYHFDGTDWDQSRQLANRIYKFRGDGKAWDWEVDTENGNYDYLMHADVDMDHPEVINELNRWGVWYANTLNLDGFRLDAVKHIKFSFMRDWLGHVRGQTGKNLFAVAEYWKNDLGALENYLSKTNWTMSAFDVPLHYNLYQASNSSGNYDMRNLLNGTLVQRHPSHAVTFVDNHDTQPGEALESFVQGWFKPLAYATILTREQGYPQVFYGDYYGIPSDGVPSYRQQIDPLLKARQQYAYGRQHDYFDHWDVIGWTREGNASHPNSGLATIMSDGPGGSKWMYVGRQKAGEVWHDMTGNRSGTVTINQDGWGHFFVNGGSVSVWVKR

SEQ ID NO: 44983 - protein, 480 aa, Bacillus sp.
NGTIMQYFEWNVPNDGQHWNRLHNNAQNLKNAGITAIWIPPAWKGTSQNDVGYGAYDLYDLGEFNQKGTVRTKYGTKAELERAIRSLKANGIQVYGDVVMNHKGGADFTERVQAVEVNPQNRNQEVSGTYQIEAWTGFNFPGRGNQHSSFKWRWYHFDGTDWDQGRQLANRIYKFRGDGKAWDWEVDTENGNYDYLMYADVDMDHPEVINELNRWGVWYANTLNLDGFRLDAVKHIKFSFMRDWLGHVRGQTGKNLFAVAEYWKNDLGALENYLSKTNWTMSAFDVPLHYNLYQASNSSGNYDMRNLLNGTLVQRHPSHAVTFVDNHDTQPGEALESFVQGWFKPLAYATILTREQGYPQVFYGDYYGIPSDGVPSYRQQIDPLLKARQQYAYGRQHDYFDHWDVIGWTREGNASHPNSGLATIMSDGPGGSKWMYVGRQKAGEVWHDMTGNRSGTVTINQDGWGHFFVNGGSVSVWVKR

SEQ ID NO: 44984 - protein, 480 aa, Bacillus sp.
NGTIMQYFEWNVPNDGQHWNRLHNNAQNLKNAGITAIWIPPAWKGTSQNDVGYGAYDLYDLGEFNQKGTVRTKYGTKAELERAIRSLKANGIQVYGDVVMNHKGGADFTERVQAVEVNPQNRNQEVSGTYQIEAWTGFNFPGRGNQHSSFKWRWYHFDGTDWDQSRQLANRIYKFRGDGKAWDWEVDTENGNYDYLMYADVDMDHPEVINELNRWGVWYANTLNLDGFRLDAVKHIKFSFMRDWLGHVRGQTGKNLFAVAEYWKNDLGALENYLSKTNWTMSAFDVPLHYNLYQASNSSGNYDMRNLLNGTLVQRHPSHAVTFVDNHDTQPGEALESFVQGWFKPLAYATILTREQGYPQVFYGDYYGIPSDGVPSYRQQIDPLLKARQQYSYGRQHDYFDHWDVIGWTREGNASHPNSGLATIMSDGPGGSKWMYVGRQKAGEVWHDMTGNRSGTVTINQDGWGHFFVNGGSVSVWVKR

SEQ ID NO: 44985 - protein, 480 aa, Bacillus sp.
NGTIMQYFEWNVPNDGQHWNRLHNNAQNLKNAGITAIWIPPAWKGTSQNDVGYGAYDLYDLGEFNQKGTVRTKYGTKAELERAIRSLKANGIHVYGDVVMNHKGGADFTERVQAVEVNPQNRNQEVSGTYQIEAWTGFNFPGRGNQHSSFKWRWYHFDGTDWDQSRQLANRIYKFRGDGKAWDWEVDTENGNYDYLMYADVDMDHPEVINELNRWGVWYANTLNLDGFRLDAVKHIKFSFMRDWLGHVRGQTGKNLFAVAEYWKNDLGALENYLSKTNWTMSAFDVPLHYNLYQASNSSGNYDMRNLLNGTLVQRHPSHAVTFVDNHDTQPGEALESFVQGWFKPLAYATILTREQGYPQVFYGDYYGIPSDGVPSYRQQIDPLLKARQQYAYGRQHDYFDHWDVIGWTREGNASHPNSGLATIMSDGPGGSKWMYVGRQKAGEVWHDMTGNRSGTVTINQDGWGHFFVNGGSVSVWVKR

SEQ ID NO: 44986 - protein, 480 aa, Bacillus sp.
NGTIMQYFEWNVPNDGQHWNRLHNNAQNLKNAGITAIWIPPAWKGTSQNDVGYGAYDLYDLGEFNQKGTVRTKYGTKAELERAIRSLKANGIQVYGDVVMNHKGGADFTERVQAVEVNPQNRNQEVSGTYQIEAWTGFNFPGRGNQHSSFKWRWYHFDGTDWDQSRQLANRIYKFRGDGKAWDWEVDTENGNYDYLMYADVDMDHPEVINELNRWGVWYANTLNLDGFRLDAVKHIKFSFMRDWLGHVRGQTGKNLFAVAEYWKNDLGALENYLSKTNWTMSAFDVPLHYNLYQASNSSGNYDMRNLLNGTLVQRHPSHAVTFVDNHDTQPGEALESFVQGWFKPLAYATILTREQGYPQLFYGDYYGIPSDGVPSYRQQIDPLLKARQQYAYGRQHDYFDHWDVIGWTREGNASHPNSGLATIMSDGPGGSKWMYVGRQKAGEVWHDMTGNRSGTVTINQDGWGHFFVNGGSVSVWVKR

SEQ ID NO: 44987 - protein, 480 aa, Bacillus sp.
NGTIMQYFEWNVPNDGQHWNRLHNNAQNLKNAGITAIWIPPAWKGTSQNDVGYGAYDLYDLGEFNQKGTVRTKYGTKAELERAIRSLKANGIQVYGDVVMNHKGGADFTERVQAVEVNPQNRNQEVSGTYQIEAWTGFNFPGRGNQHSSFKWRWYHFDGTDWDQSRQLANRIYKFRGDGKAWDWEVDTENGNYDYLMYADVDMDHPEVINELNRWGVWYANTLNLDGFRLDAVKHIKFSFMRDWLGHVRGQTGKNLFAVAEYWKNDLGALENYLSKTNWTMSAFDVPLHYNLYQASNSSGNYDMRNLLNGTLVQRHPSHAVTFIDNHDTQPGEALESFVQGWFKPLAYATILTREQGYPQVFYGDYYGIPSDGVPSYRQQIDPLLKARQQYAYGRQHDYFDHWDVIGWTREGNASHPNSGLATIMSDGPGGSKWMYVGRQKAGEVWHDMTGNRSGTVTINQDGWGHFFVNGGSVSVWVKR

SEQ ID NO: 44988 - protein, 480 aa, Bacillus sp.
NGAIMQYFEWNVPNDGQHWNRLHNNAQNLKNAGITAIWIPPAWKGTSQNDVGYGAYDLYDLGEFNQKGTVRTKYGTKAELERAIRSLKANGIQVYGDVVMNHKGGADFTERVQAVEVNPQNRNQEVSGTYQIEAWTGFNFPGRGNQHSSFKWRWYHFDGTDWDQSRQLANRIYKFRGDGKAWDWEVDTENGNYDYLMYADVDMDHPEVINELNRWGVWYANTLNLDGFRLDAVKHIKFSFMRDWLGHVRGQTGKNLFAVAEYWKNDLGALENYLSKTNWTMSAFDVPLHYNLYQASNSSGNYDMRNLLNGTLVQRHPSHAVTFVDNHDTQPGEALESFVQGWFKPLAYATILTREQGYPQVFYGDYYGIPSDGVPSYRQQIDPLLKARQQYAYGRQHDYFDHWDVIGWTREGNASHPNSGLATIMSDGPGGSKWMYVGRQKAGEVWHDMTGNRSGTVTINQDGWGHFFVNGGSVSVWVKR

SEQ ID NO: 44989 - protein, 480 aa, Bacillus sp.
NGTIMQYFEWNVPNDGQHWNRLHNNAQNLKNAGITAIWIPPAWKGTSQNDVGYGAYDLYDLGEFNQKGTVRTKYGTKAELERAIRSLKANGIQVYGDVVMNHKGGADFTERVQAVEFNPQNRNQEVSGTYQIEAWTGFNFPGRGNQHSSFKWRWYHFDGTDWDQSRQLANRIYKFRGDGKAWDWEVDTENGNYDYLMYADVDMDHPEVINELNRWGVWYANTLNLDGFRLDAVKHIKFSFMRDWLGHVRGQTGKNLFAVAEYWKNDLGALENYLSKTNWTMSAFDVPLHYNLYQASNSSGNYDMRNLLNGTLVQRHPSHAVTFVDNHDTQPGEALESFVQGWFKPLAYATILTREQGYPQVFYGDYYGIPSDGVPSYRQQIDPLLKARQQYAYGRQHDYFDHWDVIGWTREGNASHPNSGLATIMSDGPGGSKWMYVGRQKAGEVWHDMTGNRSGTVTINQDGWGHFFVNGGSVSVWVKR

SEQ ID NO: 44990 - protein, 480 aa, Bacillus sp.
NGTIMQYFEWNVPNDGQHWNRLHNNAQNLKNAGITAIWIPPAWKGTSQNDVGYGAYDLYDLGEFNQKGTVRTKYGTKAELERAIRSLKANGIQVYGDVVMNHKGGADFTERVQAVEVNPQNRNQEVSGTYQIEAWTGFNFPGRGNQHSSFKWRWYHFDGTDWDQSRQLANRIYKFRGDGKAWDWEVDTENGNYDYLMYADVDMEHPEVINELNRWGVWYANTLNLDGFRLDAVKHIKFSFMRDWLGHVRGQTGKNLFAVAEYWKNDLGALENYLSKTNWTMSAFDVPLHYNLYQASNSSGNYDMRNLLNGTLVQRHPSHAVTFVDNHDTQPGEALESFVQGWFKPLAYATILTREQGYPQVFYGDYYGIPSDGVPSYRQQIDPLLKARQQYAYGRQHDYFDHWDVIGWTREGNASHPNSGLATIMSDGPGGSKWMYVGRQKAGEVWHDMTGNRSGTVTINQDGWGHFFVNGGSVSVWVKR

SEQ ID NO: 44991 - protein, 480 aa, Bacillus sp.
NGTIMQYFEWNVPNDGQHWNRLHNNAQNLKNAGITAIWIPPAWKGTSQNDVGYGAYDLYDLGEFNQKGTVRTKYGTKAELERAIRSLKANGIQVYGDVVMNHKGGADFTERVQAVEVNPQNRNQEVSGTFQIEAWTGFNFPGRGNQHSSFKWRWYHFDGTDWDQSRQLANRIYKFRGDGKAWDWEVDTENGNYDYLMYADVDMDHPEVINELNRWGVWYANTLNLDGFRLDAVKHIKFSFMRDWLGHVRGQTGKNLFAVAEYWKNDLGALENYLSKTNWTMSAFDVPLHYNLYQASNSSGNYDMRNLLNGTLVQRHPSHAVTFVDNHDTQPGEALESFVQGWFKPLAYATILTREQGYPQVFYGDYYGIPSDGVPSYRQQIDPLLKARQQYAYGRQHDYFDHWDVIGWTREGNASHPNSGLATIMSDGPGGSKWMYVGRQKAGEVWHDMTGNRSGTVTINQDGWGHFFVNGGSVSVWVKR

SEQ ID NO: 44992 - protein, 480 aa, Bacillus sp.
NGTIMQYFEWNVPNDGQHWNRLHNNAQNLKNAGITAIWIPPAWKGTSQNDVGYGAYDLYDLGEFNQKGTVRTKYGTKAELERAIRSLKANGIQVYGDVVMNHKGGADFTERVQAVEVNPQNRNQEVSGTYQIEAWTGFNFPGRGNQHSSFKWRWYHFDGTDWDQSRQLANRIYKFRGDGKAWDWEVDTENGNYDYLMYADVDMDHPEVINELNRWGVWYANTLNLDGFRLDAAKHIKFSFMRDWLGHVRGQTGKNLFAVAEYWKNDLGALENYLSKTNWTMSAFDVPLHYNLYQASNSSGNYDMRNLLNGTLVQRHPSHAVTFVDNHDTQPGEALESFVQGWFKPLAYATILTREQGYPQVFYGDYYGIPSDGVPSYRQQIDPLLKARQQYAYGRQHDYFDHWDVIGWTREGNASHPNSGLATIMSDGPGGSKWMYVGRQKAGEVWHDMTGNRSGTVTINQDGWGHFFVNGGSVSVWVKR

SEQ ID NO: 44993 - protein, 480 aa, Bacillus sp.
NGTIMQYFEWNVPNDGQHWNRLHNNAQNLKNAGITAIWIPPAWKGTSQNDVGYGAYDLYDLGEFNQKGTVRTKYGTKAELERAIRSLKANGIQVYGDVVMNHKGGADFTERVQAVEVNPQNRNQEVSGTYQIEAWTGFNFPGRGNQHSSFKWRWYHFDGTDWDQSRQLANRIYKFRGDGKAWDWEVDTENGNYDYLMYADVDMDHPEVINELNRWGVWYANTLNLDGFRLDAVKHIKFSFMRDWLGHVRGQTGKNLFAVAEYWKNDLGALENYLSKTNWTMSAFDVPLHYNLYQASNSSGNYDMRNLLNGTLVQRHPSHAVTFVDNHDTQPGEALESFVQGWFKPLAYATILTREQGYPQVFYGDYYGIPSDGVPSYRQQIDPLLKARQQYAYGRQHDYFDHWDVIGWTREGNASHPNSGLATIMSDGPGGSKWMYVGRQKAGETWHDMTGNRSGTVTINQDGWGHFFVNGGSVSVWVKR

SEQ ID NO: 44994 - protein, 480 aa, Bacillus sp.
NGTIMQYFEWNVPNDGQHWNRLHNNAQNLKNAGITAIWIPPAWKGTSQNDVGYGAYDLYDLGEFNQKGTVRTKYGTKAELERAIRSLKANGIQVYGDVVMNHKGGADFTERVQAVEVNPQNRNQEVSGTYQIEAWTGFNFPGRGNQHSSFKWRWYHFDGTDWDQSRQMANRIYKFRGDGKAWDWEVDTENGNYDYLMYADVDMDHPEVINELNRWGVWYANTLNLDGFRLDAVKHIKFSFMRDWLGHVRGQTGKNLFAVAEYWKNDLGALENYLSKTNWTMSAFDVPLHYNLYQASNSSGNYDMRNLLNGTLVQRHPSHAVTFVDNHDTQPGEALESFVQGWFKPLAYATILTREQGYPQVFYGDYYGIPSDGVPSYRQQIDPLLKARQQYAYGRQHDYFDHWDVIGWTREGNASHPNSGLATIMSDGPGGSKWMYVGRQKAGEVWHDMTGNRSGTVTINQDGWGHFFVNGGSVSVWVKR

SEQ ID NO: 44995 - protein, 480 aa, Bacillus sp.
NGTIMQYFEWNVPNDGQHWNRLHNNAQNLKNAGITAIWIPPAWKGTSQNDVGYGAYDLYDLGEFNQKGTVRTKYGTKVELERAIRSLKANGIQVYGDVVMNHKGGADFTERVQAVEVNPQNRNQEVSGTYQIEAWTGFNFPGRGNQHSSFKWRWYHFDGTDWDQSRQLANRIYKFRGDGKAWDWEVDTENGNYDYLMYADVDMDHPEVINELNRWGVWYANTLNLDGFRLDAVKHIKFSFMRDWLGHVRGQTGKNLFAVAEYWKNDLGALENYLSKTNWTMSAFDVPLHYNLYQASNSSGNYDMRNLLNGTLVQRHPSHAVTFVDNHDTQPGEALESFVQGWFKPLAYATILTREQGYPQVFYGDYYGIPSDGVPSYRQQIDPLLKARQQYAYGRQHDYFDHWDVIGWTREGNASHPNSGLATIMSDGPGGSKWMYVGRQKAGEVWHDMTGNRSGTVTINQDGWGHFFVNGGSVSVWVKR

SEQ ID NO: 44996 - protein, 480 aa, Bacillus sp.
NGTIMQYFEWNVPNDGQHWNRLHNNAQNLKNAGITAIWIPPAWKGTSQNDVGYGAYDLYDLGEFNQKGTVRTKYGTKAELERAIRSLKANGIQVYGDVVMNHKGGADFTERVQAVEVNPQNRNQEVSGTYQIEAWTGFNFPGRGNQHSSFKWRWYHFDGTDWDQSRQLANRIYKFRGDGKAWDWEVDTENGNYDYLMYADVDMDHPEVINELNRWGVWYANTLNLDGFRLDAVKHIKFSFMRDWLGHVRGQTGKNLFAVAEYWKNDLGALENYLSKTNWTMSAFDVPLHYNLYQASNSSGNYDMRNLLNGTLVQRHPSHAVTFVDNHDTQPGEALESFVQGWFKPLAYATILTREQGYPQVFYGDYYGIPSDGVPSYRQQIDPLLKARQQYGYGRQHDYFDHWDVIGWTREGNASHPNSGLATIMSDGPGGSKWMYVGRQKAGEVWHDMTGNRSGTVTINQDGWGHFFVNGGSVSVWVKR

SEQ ID NO: 44997 - protein, 480 aa, Bacillus sp.
NGTIMQYFEWNVPNDGQHWNRLHNNAQNLKNAGITAIWIPPAWKGTSQNDVGYGAYDLYDLGEFNQKGTVRTKYGTKAELERAIRSLKANGIQVYGDVVMNHKGGADFTERVQAVEVNPQNRNQEVSGTYQIEAWTGFNFPGRGNQHGSFKWRWYHFDGTDWDQSRQLANRIYKFRGDGKAWDWEVDTENGNYDYLMYADVDMDHPEVINELNRWGVWYANTLNLDGFRLDAVKHIKFSFMRDWLGHVRGQTGKNLFAVAEYWKNDLGALENYLSKTNWTMSAFDVPLHYNLYQASNSSGNYDMRNLLNGTLVQRHPSHAVTFVDNHDTQPGEALESFVQGWFKPLAYATILTREQGYPQVFYGDYYGIPSDGVPSYRQQIDPLLKARQQYAYGRQHDYFDHWDVIGWTREGNASHPNSGLATIMSDGPGGSKWMYVGRQKAGEVWHDMTGNRSGTVTINQDGWGHFFVNGGSVSVWVKR

SEQ ID NO: 44998 - protein, 480 aa, Bacillus sp.
NGTIMQYFEWNVPNDGQHWNRLHNNAQNLKNAGITAIWIPPAWKGTSQNDVGYGAYDLYDLGEFNQKGTVRTKYGTKAELERAIRSLKANGIQVYGDVVMNHKGGADFTERVQAVEVNPQNRNQEVSGTYQIEAWTGFNFPGRGNQHSSFKWRWYHFDGTDWDQSRQLANRIYKFRGDGKAWDWEVDTENGNYDYLMYPDVDMDHPEVINELNRWGVWYANTLNLDGFRLDAVKHIKFSFMRDWLGHVRGQTGKNLFAVAEYWKNDLGALENYLSKTNWTMSAFDVPLHYNLYQASNSSGNYDMRNLLNGTLVQRHPSHAVTFVDNHDTQPGEALESFVQGWFKPLAYATILTREQGYPQVFYGDYYGIPSDGVPSYRQQIDPLLKARQQYAYGRQHDYFDHWDVIGWTREGNASHPNSGLATIMSDGPGGSKWMYVGRQKAGEVWHDMTGNRSGTVTINQDGWGHFFVNGGSVSVWVKR

SEQ ID NO: 44999 - protein, 480 aa, Bacillus sp.
NGTIMQYFEWNVPNDGQHWNRLHNNAQNLKNAGITAIWIPPAWKGTSQNDVGYGAYDLYDLGEFNQKGTVRTKYGTKAELERAIRSLKANGIQVYGDVVMNHKGGADFTERVQAVEVNPQNRNQEVSGTYQIEAWTGFNFPGRGNQHSSFKWRWYHFDGTDWDQSRQLANRIYKFRGDGKTWDWEVDTENGNYDYLMYADVDMDHPEVINELNRWGVWYANTLNLDGFRLDAVKHIKFSFMRDWLGHVRGQTGKNLFAVAEYWKNDLGALENYLSKTNWTMSAFDVPLHYNLYQASNSSGNYDMRNLLNGTLVQRHPSHAVTFVDNHDTQPGEALESFVQGWFKPLAYATILTREQGYPQVFYGDYYGIPSDGVPSYRQQIDPLLKARQQYAYGRQHDYFDHWDVIGWTREGNASHPNSGLATIMSDGPGGSKWMYVGRQKAGEVWHDMTGNRSGTVTINQDGWGHFFVNGGSVSVWVKR

SEQ ID NO: 45000 - protein, 480 aa, Bacillus sp.
NGTIMQYFEWNVPNDGQHWNRLHNNAQNLKNAGITAIWIPPAWKGTSQNDVGYGAYDLYDLGEFNQKGTVRTKYGTKAELERAIRSLKANGIQVYGDVVMNHKGGADFTERVQAVEVNPQNRNQEVSGTYQIEAWTGFNFPGRGNQHSSFKWRWYHFDGTDWDQSRQLANRIYKFRGDGKAWDWEVDTENGNYDYLMYADVDMDHPEVINELNRWGVWYANTLNLDGFRLDAVKHIKFSFMRDWLGHVRGQTGKNLFAVAEYWKNDLGALENYLSKTNWTMSAFDVPLHYNLYQASNSSGNYDMRNLLNGTLVQRHPSHAVTFVDNHDTQPGEALESFVQGWFKPLAYATILTREQGYPQVFYGDYYGIPSDGVPSYRQQIDPLLKARQQYAYGRQHDYFDHWDVIGWTREGNASHPNSGLATIMSDGPGGSKWMYVGRRKAGEVWHDMTGNRSGTVTINQDGWGHFFVNGGSVSVWVKR

SEQ ID NO: 45001 - protein, 480 aa, Bacillus sp.
NGTIMQYFEWNVPNDGQHWNRLHNNAQNLKNAGITAIWIPPAWKGTSQNDVGYGAYDLYDLGEFNQKGTVRTKYGTKAELERAIRSLKANGIQVYGDVVMNHKGGADFTERVQAVEVNPQNRNQEVSGTYQIEAWTGFNFPGRGNQHSSFKWRWYHFDGTDWDQSRQLANRIYKFRGDGKVWDWEVDTENGNYDYLMYADVDMDHPEVINELNRWGVWYANTLNLDGFRLDAVKHIKFSFMRDWLGHVRGQTGKNLFAVAEYWKNDLGALENYLSKTNWTMSAFDVPLHYNLYQASNSSGNYDMRNLLNGTLVQRHPSHAVTFVDNHDTQPGEALESFVQGWFKPLAYATILTREQGYPQVFYGDYYGIPSDGVPSYRQQIDPLLKARQQYAYGRQHDYFDHWDVIGWTREGNASHPNSGLATIMSDGPGGSKWMYVGRQKAGEVWHDMTGNRSGTVTINQDGWGHFFVNGGSVSVWVKR

SEQ ID NO: 45002 - protein, 480 aa, Bacillus sp.
NGTIMQYFEWNVPNDGQHWNRLHNNAQNLKNAGITAIWIPPAWKGTSQNDVGYGAYDLYDLGEFNQKGTVRTKYGTKAELERAIRSLKANGIQVYGDVVMNHKGGADFTERVQAVEVNPQNRNQEVSGTYQIEAWTGFNFPGRGNQHSSFKWRWYHFDGTDWDQSKQLANRIYKFRGDGKAWDWEVDTENGNYDYLMYADVDMDHPEVINELNRWGVWYANTLNLDGFRLDAVKHIKFSFMRDWLGHVRGQTGKNLFAVAEYWKNDLGALENYLSKTNWTMSAFDVPLHYNLYQASNSSGNYDMRNLLNGTLVQRHPSHAVTFVDNHDTQPGEALESFVQGWFKPLAYATILTREQGYPQVFYGDYYGIPSDGVPSYRQQIDPLLKARQQYAYGRQHDYFDHWDVIGWTREGNASHPNSGLATIMSDGPGGSKWMYVGRQKAGEVWHDMTGNRSGTVTINQDGWGHFFVNGGSVSVWVKR

SEQ ID NO: 45003 - protein, 480 aa, Bacillus sp.
NGTIMQYFEWNVPNDGQHWNRLHNNAQNLKNAGITAIWIPPAWKGTSQNDVGYGAYDLYDLGEFNEKGTVRTKYGTKAELERAIRSLKANGIQVYGDVVMNHKGGADFTERVQAVEVNPQNRNQEVSGTYQIEAWTGFNFPGRGNQHSSFKWRWYHFDGTDWDQSRQLANRIYKFRGDGKAWDWEVDTENGNYDYLMYADVDMDHPEVINELNRWGVWYANTLNLDGFRLDAVKHIKFSFMRDWLGHVRGQTGKNLFAVAEYWKNDLGALENYLSKTNWTMSAFDVPLHYNLYQASNSSGNYDMRNLLNGTLVQRHPSHAVTFVDNHDTQPGEALESFVQGWFKPLAYATILTREQGYPQVFYGDYYGIPSDGVPSYRQQIDPLLKARQQYAYGRQHDYFDHWDVIGWTREGNASHPNSGLATIMSDGPGGSKWMYVGRQKAGEVWHDMTGNRSGTVTINQDGWGHFFVNGGSVSVWVKR

SEQ ID NO: 45004 - protein, 480 aa, Bacillus sp.
NGTIMQYFEWNVPNDGQHWNRLHNNAQNLKNAGITAIWIPPAWKGTSQNDVGYGAYDLYDLGEFNQKGTVRTKYGTKAELERAIRSLKANGIQVYGDVVMNHKGGADFTERVQAVEVNPQNRNQEVSGTYQIEAWTGFNFPGRGNQHSSFKWRWYHFDGTDWDQSRQLANRIYKFRGDGKAWDWEVDTENGNYDYLMYADVDMDHPEVINELNRWGVWYANTLNLDGFRLDAVKHIKFSFMRDWLGHVRGQTGKNLFAVAEYWKNDLGALENYLSKTNWTMSAFDVPLHYNLYQASNSSGNYDMRNLLNGTLVQRHPSHSVTFVDNHDTQPGEALESFVQGWFKPLAYATILTREQGYPQVFYGDYYGIPSDGVPSYRQQIDPLLKARQQYAYGRQHDYFDHWDVIGWTREGNASHPNSGLATIMSDGPGGSKWMYVGRQKAGEVWHDMTGNRSGTVTINQDGWGHFFVNGGSVSVWVKR

SEQ ID NO: 45005 - protein, 480 aa, Bacillus sp.
NGTIMQYFEWNVPNDGQHWNRLHNNAQNLKNAGITAIWIPPAWKGTDQNDVGYGAYDLYDLGEFNQKGTVRTKYGTKAELERAIRSLKANGIQVYGDVVMNHKGGADFTERVQAVEVNPQNRNQEVSGTYQIEAWTGFNFPGRGNQHSSFKWRWYHFDGTDWDQSRQLANRIYKFRGDGKAWDWEVDTENGNYDYLMYADVDMDHPEVINELNRWGVWYANTLNLDGFRLDAVKHIKFSFMRDWLGHVRGQTGKNLFAVAEYWKNDLGALENYLSKTNWTMSAFDVPLHYNLYQASNSSGNYDMRNLLNGTLVQRHPSHAVTFVDNHDTQPGEALESFVQGWFKPLAYATILTREQGYPQVFYGDYYGIPSDGVPSYRQQIDPLLKARQQYAYGRQHDYFDHWDVIGWTREGNASHPNSGLATIMSDGPGGSKWMYVGRQKAGEVWHDMTGNRSGTVTINQDGWGHFFVNGGSVSVWVKR

SEQ ID NO: 45006 - protein, 480 aa, Bacillus sp.
NGTIMQYFEWNVPNDGQHWNRLHNNAQNLKNAGITAIWIPPAWKGTSQNDVGYGAYDLYDLGEFNQKGTVRTKYGTKAELERAIRSLKANGIQVYGDVVMNHKGGADFTERVQAVEVNPQNRNQEVSGTYQIEAWTGFNFPGRGNQHSSFKWRWYHFDGTDWDQSRQLANRIYKFRGDGKAWDWEVDTENGNYDYLMYADVDMDHPEVINELNRWGVWYANTLNLDGFRLDAVKHIKFSFMRDWLGHVRGQTGKNLFAVAEYWKNDLGALENYLSKTNWTMSAFDVPTHYNLYQASNSSGNYDMRNLLNGTLVQRHPSHAVTFVDNHDTQPGEALESFVQGWFKPLAYATILTREQGYPQVFYGDYYGIPSDGVPSYRQQIDPLLKARQQYAYGRQHDYFDHWDVIGWTREGNASHPNSGLATIMSDGPGGSKWMYVGRQKAGEVWHDMTGNRSGTVTINQDGWGHFFVNGGSVSVWVKR

SEQ ID NO: 45007 - protein, 480 aa, Bacillus sp.
NGTIMQYFEWNVPNDGQHWNRLHNNAQNLKNAGITAIWIPPAWKGTSQNDVGYGAYDLYDLGEFNQKGTVRTKYGTKAELERAIRSLKANGIQVYGDVVMNHKGGADFTERVQAVEVNPQNRNQEVAGTYQIEAWTGFNFPGRGNQHSSFKWRWYHFDGTDWDQSRQLANRIYKFRGDGKAWDWEVDTENGNYDYLMYADVDMDHPEVINELNRWGVWYANTLNLDGFRLDAVKHIKFSFMRDWLGHVRGQTGKNLFAVAEYWKNDLGALENYLSKTNWTMSAFDVPLHYNLYQASNSSGNYDMRNLLNGTLVQRHPSHAVTFVDNHDTQPGEALESFVQGWFKPLAYATILTREQGYPQVFYGDYYGIPSDGVPSYRQQIDPLLKARQQYAYGRQHDYFDHWDVIGWTREGNASHPNSGLATIMSDGPGGSKWMYVGRQKAGEVWHDMTGNRSGTVTINQDGWGHFFVNGGSVSVWVKR

SEQ ID NO: 45008 - protein, 480 aa, Bacillus sp.
NGTIMQYFEWNVPNDGQHWNRLHNNAQNLKNAGITAIWIPPAWKGTSQNDVGYGAYDLYDLGEFNQKGTVRTKYGTKAELERAIRSLKANGIQVYGDVVMNHKGGADFTERVQAVEVNPQNRNQEVSGTYQIEAWTGFNFPGRGNQHSSFKWRWYHFDGTDWDQSRQLANRIYKFRGDGKAWDWEVDTENGNYDYLMYADVDMDHPEVINELNRWGVWYANTLNLDGFRLDAVKHIKFSFMRDWLGHVRGQTGKNLFAVAEYWKNDLGALENYLSKTNWTLSAFDVPLHYNLYQASNSSGNYDMRNLLNGTLVQRHPSHAVTFVDNHDTQPGEALESFVQGWFKPLAYATILTREQGYPQVFYGDYYGIPSDGVPSYRQQIDPLLKARQQYAYGRQHDYFDHWDVIGWTREGNASHPNSGLATIMSDGPGGSKWMYVGRQKAGEVWHDMTGNRSGTVTINQDGWGHFFVNGGSVSVWVKR

SEQ ID NO: 45009 - protein, 480 aa, Bacillus sp.
NGTIMQYFEWNVPNDGQHWNRLHNNAQNLKNAGITAIWIPPAWKGTSQNDVGYGAYDLYDLGEFNQKGTVRTKYGTKAELERAIRSLKANGIQVYGDVVMNHKGGADFTERVQAVEVNPQNRNQEVSGTYQIEAWTGFNFPGRGNQHSSFKWRWYHFDGTDWDQSRQLANRIYKFRGDGKAWDWEVDTENGNYDYLMYADVDMDHPEVINELNRWGVWYANTLNLDGFRLDAVKHIKFSFMRDWLGHVRGQTGKNLFAVAEYWKNDLGALENYLSKTNWTMSAFDVPLHYNLYQASNSSGNYDMRNLLNGTLVQRHPSHAVTFVDNHDTQPGEALESFVQGWFKPLAYATILTREQGYPQVFYGDYYGIPSDGVPSYRQQIDPLLKARQQYAYGRQHDYFDHWDVIGWTREGNASHPNSGLATIMSDGPGGSKWMYVGREKAGEVWHDMTGNRSGTVTINQDGWGHFFVNGGSVSVWVKR

SEQ ID NO: 45010 - protein, 480 aa, Bacillus sp.
NGTIMQYFEWNVPNDGQHWNRLHNNAQNLKNAGITAIWIPPAWKGTSQNDVGYGAYDLYDLGEFNQKGTVRTKYGTKAELERAIRSLKANGIQVYGDVVMNHKGGADFTERVQAVEVNPQNRNQEVSGTYQIEAWTGFNFPGRGNQHSSFKWRWYHFDGTDWDQSRQLANRIYKFRGDGKAWDWEVDTENGNYDYLMYADVDMDHPEVINELNRWGVWYANTLNLDGFRLDAVKHIKFSFMRDWLGHVRGQTGKNLFAVAEYWKNELGALENYLSKTNWTMSAFDVPLHYNLYQASNSSGNYDMRNLLNGTLVQRHPSHAVTFVDNHDTQPGEALESFVQGWFKPLAYATILTREQGYPQVFYGDYYGIPSDGVPSYRQQIDPLLKARQQYAYGRQHDYFDHWDVIGWTREGNASHPNSGLATIMSDGPGGSKWMYVGRQKAGEVWHDMTGNRSGTVTINQDGWGHFFVNGGSVSVWVKR

SEQ ID NO: 45011 - protein, 480 aa, Bacillus sp.
NGTIMQYFEWNVPNDGQHWNRLHNNVQNLKNAGITAIWIPPAWKGTSQNDVGYGAYDLYDLGEFNQKGTVRTKYGTKAELERAIRSLKANGIQVYGDVVMNHKGGADFTERVQAVEVNPQNRNQEVSGTYQIEAWTGFNFPGRGNQHSSFKWRWYHFDGTDWDQSRQLANRIYKFRGDGKAWDWEVDTENGNYDYLMYADVDMDHPEVINELNRWGVWYANTLNLDGFRLDAVKHIKFSFMRDWLGHVRGQTGKNLFAVAEYWKNDLGALENYLSKTNWTMSAFDVPLHYNLYQASNSSGNYDMRNLLNGTLVQRHPSHAVTFVDNHDTQPGEALESFVQGWFKPLAYATILTREQGYPQVFYGDYYGIPSDGVPSYRQQIDPLLKARQQYAYGRQHDYFDHWDVIGWTREGNASHPNSGLATIMSDGPGGSKWMYVGRQKAGEVWHDMTGNRSGTVTINQDGWGHFFVNGGSVSVWVKR

SEQ ID NO: 45012 - protein, 480 aa, Bacillus sp.
NGTIMQYFEWNVPNDGQHWNRLHNNAQNLKNAGITAIWIPPAWQGTSQNDVGYGAYDLYDLGEFNQKGTVRTKYGTKAELERAIRSLKANGIQVYGDVVMNHKGGADFTERVQAVEVNPQNRNQEVSGTYQIEAWTGFNFPGRGNQHSSFKWRWYHFDGTDWDQSRQLANRIYKFRGDGKAWDWEVDTENGNYDYLMYADVDMDHPEVINELNRWGVWYANTLNLDGFRLDAVKHIKFSFMRDWLGHVRGQTGKNLFAVAEYWKNDLGALENYLSKTNWTMSAFDVPLHYNLYQASNSSGNYDMRNLLNGTLVQRHPSHAVTFVDNHDTQPGEALESFVQGWFKPLAYATILTREQGYPQVFYGDYYGIPSDGVPSYRQQIDPLLKARQQYAYGRQHDYFDHWDVIGWTREGNASHPNSGLATIMSDGPGGSKWMYVGRQKAGEVWHDMTGNRSGTVTINQDGWGHFFVNGGSVSVWVKR

SEQ ID NO: 45013 - protein, 480 aa, Bacillus sp.
NGTIMQYFEWNVPNDGQHWNRLHNNAQNLKNAGITAIWIPPAWKGTSQNDVGYGAYDLYDLGEFNQKGTVRTKYGTKAELERAIRSLKANGIQVYGDVVMNHKGGADFTERVQAVEVNPQNRNQEVSGTYQIEAWTGFNFPGRGNQHSSFKWRWYHFDGTDWDQSRQLANRIYKFRGDGKAWDWEVDTENGNYDYLMYADVDMDHPEVINELNRWGVWYANTLNLDGFRLDAVKHIKFSFMRDWLGHVRGQTGKNLFAVAEYWKNDLGALENYLSKTNWTMSAFDVPLHYNLYQASNSSGNYDMRNLLNGTLVQRHPSHAVTFVDNHDTQPGEALESFVQGWFKPLAYATILTREQGYPQVFYGDYYGIPSDGVPSYRQQIDPLLKARQQYAYGRQHDYFDHWDVIGWTREGNASHPNSGLATIMSDGPGGSKWMYVGRQKTGEVWHDMTGNRSGTVTINQDGWGHFFVNGGSVSVWVKR

SEQ ID NO: 45014 - protein, 480 aa, Bacillus sp.
NGTIMQYFEWNVPNDGQHWNRLHNNAQNLKNAGITAIWIPPAWKGTSQNDVGYGAYDLYDLGEFNQKGTVRTKYGTKAELERAIRSLKANGIQVYGDVVMNHKGGADFTERVQAVEVNPQNRNQEVSGTYQIEAWTGFNFPGRGNQHSSFKWRWYHFDGTDWDQSRQLANRIYKFRGDGKEWDWEVDTENGNYDYLMYADVDMDHPEVINELNRWGVWYANTLNLDGFRLDAVKHIKFSFMRDWLGHVRGQTGKNLFAVAEYWKNDLGALENYLSKTNWTMSAFDVPLHYNLYQASNSSGNYDMRNLLNGTLVQRHPSHAVTFVDNHDTQPGEALESFVQGWFKPLAYATILTREQGYPQVFYGDYYGIPSDGVPSYRQQIDPLLKARQQYAYGRQHDYFDHWDVIGWTREGNASHPNSGLATIMSDGPGGSKWMYVGRQKAGEVWHDMTGNRSGTVTINQDGWGHFFVNGGSVSVWVKR

SEQ ID NO: 45015 - protein, 480 aa, Bacillus sp.
NGTIMQYFEWNVPNDGQHWNRLHNNAQNLKNAGITAIWIPPAWKGTSQNDVGYGAYDLYDLGEFNQKGTVRTKYGTKAELERAIRSLKANGIQVYGDVVMNHKGGADFTERVQAVEVNPQNRNQEVSGTYQIEAWTGFNFPGRGNQHSSFKWRWYHFDGTDWDQSRQLANRIYKFRGDGKAWDWEVDTENGNYDYLMYADVDMDHPEVINELNRWGVWYANTLNLDGFRLDAVKHIQFSFMRDWLGHVRGQTGKNLFAVAEYWKNDLGALENYLSKTNWTMSAFDVPLHYNLYQASNSSGNYDMRNLLNGTLVQRHPSHAVTFVDNHDTQPGEALESFVQGWFKPLAYATILTREQGYPQVFYGDYYGIPSDGVPSYRQQIDPLLKARQQYAYGRQHDYFDHWDVIGWTREGNASHPNSGLATIMSDGPGGSKWMYVGRQKAGEVWHDMTGNRSGTVTINQDGWGHFFVNGGSVSVWVKR

SEQ ID NO: 45016 - protein, 480 aa, Bacillus sp.
NGTIMQYFEWNVPNDGQHWNRLHNNAQNLKNAGITAIWIPPAWKGTSQNDVGYGAYDLYDLGEFNQKGTVRTKYGTKAELERAIRSLKANGIQVYGDVVMNHKGGADFTERVQAVEVNPQNRNQEVSGTYQIEAWTGFNFPGRGNQHSSFKWRWYHFDGTDWDQSRQLANRIYKFRGDGKAWDWEVDTENGNYDYLMYADVDMDHPEVINELNRWGVWYANTLNLDGFRLDAVKHIEFSFMRDWLGHVRGQTGKNLFAVAEYWKNDLGALENYLSKTNWTMSAFDVPLHYNLYQASNSSGNYDMRNLLNGTLVQRHPSHAVTFVDNHDTQPGEALESFVQGWFKPLAYATILTREQGYPQVFYGDYYGIPSDGVPSYRQQIDPLLKARQQYAYGRQHDYFDHWDVIGWTREGNASHPNSGLATIMSDGPGGSKWMYVGRQKAGEVWHDMTGNRSGTVTINQDGWGHFFVNGGSVSVWVKR

SEQ ID NO: 45017 - protein, 480 aa, Bacillus sp.
NGTIMQYFEWNVPNDGQHWNRLHNNAQNLKNAGITAIWIPPAWKGTSQNDVGYGAYDLYDLGEFNQKGTVRTKYGTKAELERAIRSLKANGIQVYGDVVMNHKGGADFTERVQAVEINPQNRNQEVSGTYQIEAWTGFNFPGRGNQHSSFKWRWYHFDGTDWDQSRQLANRIYKFRGDGKAWDWEVDTENGNYDYLMYADVDMDHPEVINELNRWGVWYANTLNLDGFRLDAVKHIKFSFMRDWLGHVRGQTGKNLFAVAEYWKNDLGALENYLSKTNWTMSAFDVPLHYNLYQASNSSGNYDMRNLLNGTLVQRHPSHAVTFVDNHDTQPGEALESFVQGWFKPLAYATILTREQGYPQVFYGDYYGIPSDGVPSYRQQIDPLLKARQQYAYGRQHDYFDHWDVIGWTREGNASHPNSGLATIMSDGPGGSKWMYVGRQKAGEVWHDMTGNRSGTVTINQDGWGHFFVNGGSVSVWVKR

SEQ ID NO: 45018 - protein, 480 aa, Bacillus sp.
NGTIMQYFEWNVPNDGQHWNRLHNNAQNLKNAGITAIWIPPAWKGTSQNDVGYGAYDLYDLGEFNQKGTVRTKYGTKAELERAIRSLKANGIQVWGDVVMNHKGGADFTERVQAVEVNPQNRNQEVSGTYQIEAWTGFNFPGRGNQHSSFKWRWYHFDGTDWDQSRQLANRIYKFRGDGKAWDWEVDTENGNYDYLMYADVDMDHPEVINELNRWGVWYANTLNLDGFRLDAVKHIKFSFMRDWLGHVRGQTGKNLFAVAEYWKNDLGALENYLSKTNWTMSAFDVPLHYNLYQASNSSGNYDMRNLLNGTLVQRHPSHAVTFVDNHDTQPGEALESFVQGWFKPLAYATILTREQGYPQVFYGDYYGIPSDGVPSYRQQIDPLLKARQQYAYGRQHDYFDHWDVIGWTREGNASHPNSGLATIMSDGPGGSKWMYVGRQKAGEVWHDMTGNRSGTVTINQDGWGHFFVNGGSVSVWVKR

SEQ ID NO: 45019 - protein, 480 aa, Bacillus sp.
NGTIMQYFEWNVPNDGQHWNRLHNNAQNLKNAGITAIWIPPAWKGTSQNDVGYGAYDLYDLGEFNQKGTVRTKYGTKSELERAIRSLKANGIQVYGDVVMNHKGGADFTERVQAVEVNPQNRNQEVSGTYQIEAWTGFNFPGRGNQHSSFKWRWYHFDGTDWDQSRQLANRIYKFRGDGKAWDWEVDTENGNYDYLMYADVDMDHPEVINELNRWGVWYANTLNLDGFRLDAVKHIKFSFMRDWLGHVRGQTGKNLFAVAEYWKNDLGALENYLSKTNWTMSAFDVPLHYNLYQASNSSGNYDMRNLLNGTLVQRHPSHAVTFVDNHDTQPGEALESFVQGWFKPLAYATILTREQGYPQVFYGDYYGIPSDGVPSYRQQIDPLLKARQQYAYGRQHDYFDHWDVIGWTREGNASHPNSGLATIMSDGPGGSKWMYVGRQKAGEVWHDMTGNRSGTVTINQDGWGHFFVNGGSVSVWVKR

SEQ ID NO: 45020 - protein, 480 aa, Bacillus sp.
NGTIMQYFEWNVPNDGQHWNRLHNNAQNLKNAGITAIWIPPAWKGTSQNDVGYGAYDLYDLGEFNQKGTVRTKYGTKAELERAIRSLKANGIQVYGDVVMNHKGGADFTERVQAVEVNPQNRNQEVSGTYQIEAWTGFNFPGRGNQHSSFKWRWYHFDGTDWDQSRQLANRIYKFKGDGKAWDWEVDTENGNYDYLMYADVDMDHPEVINELNRWGVWYANTLNLDGFRLDAVKHIKFSFMRDWLGHVRGQTGKNLFAVAEYWKNDLGALENYLSKTNWTMSAFDVPLHYNLYQASNSSGNYDMRNLLNGTLVQRHPSHAVTFVDNHDTQPGEALESFVQGWFKPLAYATILTREQGYPQVFYGDYYGIPSDGVPSYRQQIDPLLKARQQYAYGRQHDYFDHWDVIGWTREGNASHPNSGLATIMSDGPGGSKWMYVGRQKAGEVWHDMTGNRSGTVTINQDGWGHFFVNGGSVSVWVKR

SEQ ID NO: 45021 - protein, 480 aa, Bacillus sp. (in: firmicutes)
NGTIMQYFEWNVPNDGQHWNRLHNNAQNLKNAGITAIWIPPAWKGTSQNDVGYGAYDLYDLGEFNQKGTVRTKYGTKAELERAIRSLKANGIQVYGDVVMNHKGGADFTERVQAVEVNPQNRNQEVSGTYQIEAWTGFNFPGRGNQHSSFKWRWYHFDGTDWDQSRQLANRIYKFRGDGKAWDWEVDTENGNYDYLMYADVDMDHPEVINELNRWGVWYANTLNLDGFRLDAVKHIKFQFMRDWLGHVRGQTGKNLFAVAEYWKNDLGALENYLSKTNWTMSAFDVPLHYNLYQASNSSGNYDMRNLLNGTLVQRHPSHAVTFVDNHDTQPGEALESFVQGWFKPLAYATILTREQGYPQVFYGDYYGIPSDGVPSYRQQIDPLLKARQQYAYGRQHDYFDHWDVIGWTREGNASHPNSGLATIMSDGPGGSKWMYVGRQKAGEVWHDMTGNRSGTVTINQDGWGHFFVNGGSVSVWVKR

SEQ ID NO: 45022 - protein, 480 aa, Bacillus sp.
NGTIMQYFEWNVPNDGQHWNRLHNNAQNLKNAGITAIWIPPAWKGTSQNDVGYGAYDLYDLGEFNQKGTVRTKYGTKAELERAIRSLKANGIQVYGDVVMNHKGGADFTERVQAVEVNPQNRNQEVSGTYQIEAWTGFNFPGRGNQHSSFKWRWYHFDGTDWDQSRQLANRIYKFRGDGKAWDWEVDTENGNYDYLMYADVDMDHPEVINELNRWGVWYANTLNLDGFRLDAVKHIKFSFMRDWLGHVRGQTGKNLFAVAEYWKNDLGALENYLSKTNWTMSAFDVPLHYNLYQASNSSGNYDMRNLLNGTLVQRHPSHAVTFVDNHDTQPGEALESFVQGWFKPLAYATILTREQGYPQVFYGDYYGIPSDGVPSYRQQIDPLLKARQQYAYGRQHDYFDHWDVIGWTREGNASHPNSGLATIMSDGPGGSKWMYVGRQKAGEVWHDMTGNRTGTVTINQDGWGHFFVNGGSVSVWVKR

SEQ ID NO: 45023 - protein, 480 aa, Bacillus sp.
NGTIMQYFEWNVPNDGQHWNRLHNNAQNLKNAGITAIWIPPAWKGTSQNDVGYGAYDLYDLGEFNQKGTVRTKYGTKAELERAIRSLKANGIQVYGDVVMNHKGGADFTERVQAVEVNPQNRNQEVSGTYQIEAWTGFNFPGRGNQHSSFKWRWYHFDGTDWDQSRQLANRIYKFRGDGKAWDWEVDTENGNYDYLMYCDVDMDHPEVINELNRWGVWYANTLNLDGFRLDAVKHIKFSFMRDWLGHVRGQTGKNLFAVAEYWKNDLGALENYLSKTNWTMSAFDVPLHYNLYQASNSSGNYDMRNLLNGTLVQRHPSHAVTFVDNHDTQPGEALESFVQGWFKPLAYATILTREQGYPQVFYGDYYGIPSDGVPSYRQQIDPLLKARQQYAYGRQHDYFDHWDVIGWTREGNASHPNSGLATIMSDGPGGSKWMYVGRQKAGEVWHDMTGNRSGTVTINQDGWGHFFVNGGSVSVWVKR

SEQ ID NO: 45024 - protein, 480 aa, Bacillus sp.
NGTIMQYFEWNVPNDGQHWNRLHNNAQNLKNAGITAIWIPPAWKGTSQNDVGYGAYDLYDLGEFNQKGTVRTKYGTKAELERAIRSLKANGIQVYGDVVMNHKGGADFTERVQAVEVNPQNRNQEVSGTYQIEAWTGFNFPGRGNQHSSFKWRWYHFDGTDWDQSRQLANRIYKFRGDGKAWDWEVDTENGNYDYLMWADVDMDHPEVINELNRWGVWYANTLNLDGFRLDAVKHIKFSFMRDWLGHVRGQTGKNLFAVAEYWKNDLGALENYLSKTNWTMSAFDVPLHYNLYQASNSSGNYDMRNLLNGTLVQRHPSHAVTFVDNHDTQPGEALESFVQGWFKPLAYATILTREQGYPQVFYGDYYGIPSDGVPSYRQQIDPLLKARQQYAYGRQHDYFDHWDVIGWTREGNASHPNSGLATIMSDGPGGSKWMYVGRQKAGEVWHDMTGNRSGTVTINQDGWGHFFVNGGSVSVWVKR

SEQ ID NO: 45025 - protein, 480 aa, Bacillus sp.
NGTIMQYFEWNVPNDGQHWNRLHNNAQNLKNAGITAIWIPPAWKGTSQNDVGYGAYDLYDLGEFNQKGTVRTKYGTKAELERAIRSLKANGIQVYGDVVMNHKGGADFTERVQAVEVNPQNRNQEVSGTYQIEAWTGFNFPGRGNQHSSFKWRWYHFDGTDWDQSRQLANRIYKFRGDGKAWDWEVDVENGNYDYLMYADVDMDHPEVINELNRWGVWYANTLNLDGFRLDAVKHIKFSFMRDWLGHVRGQTGKNLFAVAEYWKNDLGALENYLSKTNWTMSAFDVPLHYNLYQASNSSGNYDMRNLLNGTLVQRHPSHAVTFVDNHDTQPGEALESFVQGWFKPLAYATILTREQGYPQVFYGDYYGIPSDGVPSYRQQIDPLLKARQQYAYGRQHDYFDHWDVIGWTREGNASHPNSGLATIMSDGPGGSKWMYVGRQKAGEVWHDMTGNRSGTVTINQDGWGHFFVNGGSVSVWVKR

SEQ ID NO: 45026 - protein, 480 aa, Bacillus sp.
NGTIMQYFEWNVPNDGQHWNRLHNNAQNLKNAGITAIWIPPAWKGTSQNDVGYGAYDVYDLGEFNQKGTVRTKYGTKAELERAIRSLKANGIQVYGDVVMNHKGGADFTERVQAVEVNPQNRNQEVSGTYQIEAWTGFNFPGRGNQHSSFKWRWYHFDGTDWDQSRQLANRIYKFRGDGKAWDWEVDTENGNYDYLMYADVDMDHPEVINELNRWGVWYANTLNLDGFRLDAVKHIKFSFMRDWLGHVRGQTGKNLFAVAEYWKNDLGALENYLSKTNWTMSAFDVPLHYNLYQASNSSGNYDMRNLLNGTLVQRHPSHAVTFVDNHDTQPGEALESFVQGWFKPLAYATILTREQGYPQVFYGDYYGIPSDGVPSYRQQIDPLLKARQQYAYGRQHDYFDHWDVIGWTREGNASHPNSGLATIMSDGPGGSKWMYVGRQKAGEVWHDMTGNRSGTVTINQDGWGHFFVNGGSVSVWVKR

SEQ ID NO: 45027 - protein, 480 aa, Bacillus sp.
NGTIMQYFEWNVPNDGQHWNRLHNNAQNLKNAGITAIWIPPAWKGTSQNDVGYGAYDLYDLGEFNQKGTVRTKYGTKAELERAIRSLKANGIQVYGDVVMNHKGGADFTERVQAVEVNPQNRNQEVSGTYQIEAWTGFNFPGRGNQHSSFKWRWYHFDGTDWDQSRQLANRIYKFRGDGKAWDWEVDTENGNYDYLMYADVDMDHPEMINELNRWGVWYANTLNLDGFRLDAVKHIKFSFMRDWLGHVRGQTGKNLFAVAEYWKNDLGALENYLSKTNWTMSAFDVPLHYNLYQASNSSGNYDMRNLLNGTLVQRHPSHAVTFVDNHDTQPGEALESFVQGWFKPLAYATILTREQGYPQVFYGDYYGIPSDGVPSYRQQIDPLLKARQQYAYGRQHDYFDHWDVIGWTREGNASHPNSGLATIMSDGPGGSKWMYVGRQKAGEVWHDMTGNRSGTVTINQDGWGHFFVNGGSVSVWVKR

SEQ ID NO: 45028 - protein, 480 aa, Bacillus sp.
NGTIMQYFEWNVPNDGQHWNRLHNNAQNLKNAGITAIWIPPAWKGTSQNDVGYGAYDLYDLGEFNQKGTVRTKYGTKAELERAIRSLKANGIQVYGDVVMNHKGGADFTERVQAVEVNPQNRNQEVSGTYQIEAWTGFNFPGRGNQHSSFKWRWYHFDGTDWDQSRQLANRIYKFRGDGKAWDWEVDTENGNYDYLMYADVDMDHPEVINELNRWGVWYANTLNLDGFRLDAVKHIKFSFMRDWLGHVRGQTGKNLFAVAEYWKNDLGALENYLSKTNWTMSAFDVPLHYNLYQASNSSGNYDMRNLLNGTLVQRHPSHAVTFVDNHDTQPGEALESFVQGWFKPMAYATILTREQGYPQVFYGDYYGIPSDGVPSYRQQIDPLLKARQQYAYGRQHDYFDHWDVIGWTREGNASHPNSGLATIMSDGPGGSKWMYVGRQKAGEVWHDMTGNRSGTVTINQDGWGHFFVNGGSVSVWVKR

SEQ ID NO: 45029 - protein, 480 aa, Bacillus sp. (in: firmicutes)
NGTIMQYFEWNVPNDGQHWNRLHNNAQNLKNAGITAIWIPPAWKGTSQNDVGYGAYDLYDLGEFNQKGTVRTKYGTKAELERAIRSLKANGIQVYGDVVMNHKGGADFTERVQAVEVNPQNRNQEVSGTYQIEAWTGFNFPGRGNQHSSFKWRWYHFDGTDWDQSRQLANRIYKFRGDGKAWDWEVDTENGNYDYLMYADVDMDHPEVINELNRWGVWYANTLNLDGFRLDAVKHIKFHFMRDWLGHVRGQTGKNLFAVAEYWKNDLGALENYLSKTNWTMSAFDVPLHYNLYQASNSSGNYDMRNLLNGTLVQRHPSHAVTFVDNHDTQPGEALESFVQGWFKPLAYATILTREQGYPQVFYGDYYGIPSDGVPSYRQQIDPLLKARQQYAYGRQHDYFDHWDVIGWTREGNASHPNSGLATIMSDGPGGSKWMYVGRQKAGEVWHDMTGNRSGTVTINQDGWGHFFVNGGSVSVWVKR

SEQ ID NO: 45030 - protein, 480 aa, Bacillus sp.
NGTIMQYFEWNVPNDGQHWNRLHNNAQNLKNAGITAIWIPPAWKGTSQNDVGYGAYDLYDLGEFNQKGTVRTKYGTKAELERAIRSLKANGIQVYGDVVMNHKGGADFTERVQAVEVNPQNRNQEVSGTYQIEAWTGFNFPGRGNQHSSFKWRWYHFDGTDWDQSRQLANRIYKFRGDGKAWDWEVDTENGNYDYLMYADVDMDHPKVINELNRWGVWYANTLNLDGFRLDAVKHIKFSFMRDWLGHVRGQTGKNLFAVAEYWKNDLGALENYLSKTNWTMSAFDVPLHYNLYQASNSSGNYDMRNLLNGTLVQRHPSHAVTFVDNHDTQPGEALESFVQGWFKPLAYATILTREQGYPQVFYGDYYGIPSDGVPSYRQQIDPLLKARQQYAYGRQHDYFDHWDVIGWTREGNASHPNSGLATIMSDGPGGSKWMYVGRQKAGEVWHDMTGNRSGTVTINQDGWGHFFVNGGSVSVWVKR

SEQ ID NO: 45031 - protein, 480 aa, Bacillus sp.
NGTIMQYFEWNVPNDGQHWNRLHNNAQNLKNAGITAIWIPPAWKGTSQNDVGYGAYDLYDLGEFNQKGTVRTKYGTKAELERAIRSLKANGIQVYGDVVMNHKGGADFTERVQAVEVNPQNRNQEVSGTYQIEAWTGFNFPGRGNQHTSFKWRWYHFDGTDWDQSRQLANRIYKFRGDGKAWDWEVDTENGNYDYLMYADVDMDHPEVINELNRWGVWYANTLNLDGFRLDAVKHIKFSFMRDWLGHVRGQTGKNLFAVAEYWKNDLGALENYLSKTNWTMSAFDVPLHYNLYQASNSSGNYDMRNLLNGTLVQRHPSHAVTFVDNHDTQPGEALESFVQGWFKPLAYATILTREQGYPQVFYGDYYGIPSDGVPSYRQQIDPLLKARQQYAYGRQHDYFDHWDVIGWTREGNASHPNSGLATIMSDGPGGSKWMYVGRQKAGEVWHDMTGNRSGTVTINQDGWGHFFVNGGSVSVWVKR

SEQ ID NO: 45032 - protein, 480 aa, Bacillus sp.
NGTIMQYFEWNVPNDGQHWNRLHNNAQNLKNAGITAIWIPPAWKGTSQNDVGYGAYDLYDLGEFNQKGTVRTKYGTKAELERAIRSLKANGIQVYGDVVMNHKGGADFTERVQAVEVNPQNRNQEVSGTYQIEAWTGFNFPGRGNQHSSFKWRWYHFDGTDWDQSRQLANRIYKFRGDGKAWDWEVDTENGNYDYLMYADVDMDHPEVINELNRWGVWYANTLNLDGFRLDAVKHIKFSFMRDWLGHVRGQTGKNLFALAEYWKNDLGALENYLSKTNWTMSAFDVPLHYNLYQASNSSGNYDMRNLLNGTLVQRHPSHAVTFVDNHDTQPGEALESFVQGWFKPLAYATILTREQGYPQVFYGDYYGIPSDGVPSYRQQIDPLLKARQQYAYGRQHDYFDHWDVIGWTREGNASHPNSGLATIMSDGPGGSKWMYVGRQKAGEVWHDMTGNRSGTVTINQDGWGHFFVNGGSVSVWVKR

SEQ ID NO: 45033 - protein, 480 aa, Bacillus sp.
NGTIMQYFEWNVPNDGQHWNRLHNNAQNLKNAGITAIWIPPAWKGTSQNDVGYGAYDLYDLGEFNQKGTVRTKYGTKAELERGIRSLKANGIQVYGDVVMNHKGGADFTERVQAVEVNPQNRNQEVSGTYQIEAWTGFNFPGRGNQHSSFKWRWYHFDGTDWDQSRQLANRIYKFRGDGKAWDWEVDTENGNYDYLMYADVDMDHPEVINELNRWGVWYANTLNLDGFRLDAVKHIKFSFMRDWLGHVRGQTGKNLFAVAEYWKNDLGALENYLSKTNWTMSAFDVPLHYNLYQASNSSGNYDMRNLLNGTLVQRHPSHAVTFVDNHDTQPGEALESFVQGWFKPLAYATILTREQGYPQVFYGDYYGIPSDGVPSYRQQIDPLLKARQQYAYGRQHDYFDHWDVIGWTREGNASHPNSGLATIMSDGPGGSKWMYVGRQKAGEVWHDMTGNRSGTVTINQDGWGHFFVNGGSVSVWVKR

SEQ ID NO: 45034 - protein, 480 aa, Bacillus sp.
NGTIMQYFEWNVPNDGQHWNRLHNNAQNLKNAGITAIWIPPAWKGTSQNDVGYGAYDLYDLGEFNQKGTVRTKYGTKAELERAIRSLKANGIQVYGDVVMNHKGGADFTERVQAVEVNPQNRNQEVSGTYQIEAWTGFNFPGRGNQHSSFKWRWYHFDGTDWDQSRQLANRIYKFRGDGKAWDWEVDTENGNYDYLLYADVDMDHPEVINELNRWGVWYANTLNLDGFRLDAVKHIKFSFMRDWLGHVRGQTGKNLFAVAEYWKNDLGALENYLSKTNWTMSAFDVPLHYNLYQASNSSGNYDMRNLLNGTLVQRHPSHAVTFVDNHDTQPGEALESFVQGWFKPLAYATILTREQGYPQVFYGDYYGIPSDGVPSYRQQIDPLLKARQQYAYGRQHDYFDHWDVIGWTREGNASHPNSGLATIMSDGPGGSKWMYVGRQKAGEVWHDMTGNRSGTVTINQDGWGHFFVNGGSVSVWVKR

SEQ ID NO: 45035 - protein, 480 aa, Bacillus sp.
NGTIMQYYEWNVPNDGQHWNRLHNNAQNLKNAGITAIWIPPAWKGTSQNDVGYGAYDLYDLGEFNQKGTVRTKYGTKAELERAIRSLKANGIQVYGDVVMNHKGGADFTERVQAVEVNPQNRNQEVSGTYQIEAWTGFNFPGRGNQHSSFKWRWYHFDGTDWDQSRQLANRIYKFRGDGKAWDWEVDTENGNYDYLMYADVDMDHPEVINELNRWGVWYANTLNLDGFRLDAVKHIKFSFMRDWLGHVRGQTGKNLFAVAEYWKNDLGALENYLSKTNWTMSAFDVPLHYNLYQASNSSGNYDMRNLLNGTLVQRHPSHAVTFVDNHDTQPGEALESFVQGWFKPLAYATILTREQGYPQVFYGDYYGIPSDGVPSYRQQIDPLLKARQQYAYGRQHDYFDHWDVIGWTREGNASHPNSGLATIMSDGPGGSKWMYVGRQKAGEVWHDMTGNRSGTVTINQDGWGHFFVNGGSVSVWVKR

SEQ ID NO: 45036 - protein, 480 aa, Bacillus sp.
NGTIMQYFEWNVPNDGQHWNRLHNNAQNLKNAGITAIWIPPAWKGTSQNDVGYGAYDLYDLGEFNQKGTVRTKYGTKAELERAIRSLKANGIQVYGDVVMNHKGGADFTERVQAVEVNPQNRNQEVSGTYQIEAWTGFNFPGRGNQHSSFKWRWYHFDGTDWDQSRQLANRIYEFRGDGKAWDWEVDTENGNYDYLMYADVDMDHPEVINELNRWGVWYANTLNLDGFRLDAVKHIKFSFMRDWLGHVRGQTGKNLFAVAEYWKNDLGALENYLSKTNWTMSAFDVPLHYNLYQASNSSGNYDMRNLLNGTLVQRHPSHAVTFVDNHDTQPGEALESFVQGWFKPLAYATILTREQGYPQVFYGDYYGIPSDGVPSYRQQIDPLLKARQQYAYGRQHDYFDHWDVIGWTREGNASHPNSGLATIMSDGPGGSKWMYVGRQKAGEVWHDMTGNRSGTVTINQDGWGHFFVNGGSVSVWVKR

SEQ ID NO: 45037 - protein, 480 aa, Bacillus sp.
NGTIMQYFEWNVPNDGQHWNRLHNNAQNLKNAGITAIWIPPAWKGTSQNDVGYGAYDLYDLGEFNQKGTVRTKYGTKAELERAIRSLKANGIQVYGDVVMNHKGGADFTERVQAVEVNPQNRNQEVSGTYQIEAWTGFNFPGRGNQHSSFKWRWYHFDGTDWDQSRQLANRIYKFRGDGKAWDWEVDTENGNYDYLMYADVDMDHPEVINELNRWGVWYANTLNLDGFRLDAVKHIKFSFMRDWLGHVRGQTGKNLFAVAEYWKNDLGALENYLSKTNWTMSAFDVPLHYNLYQASNSSGNYDMRNLLNGTLVQRHPSHAVTFVDNHDTQPGEALESFVQGWFKPLAYATILSREQGYPQVFYGDYYGIPSDGVPSYRQQIDPLLKARQQYAYGRQHDYFDHWDVIGWTREGNASHPNSGLATIMSDGPGGSKWMYVGRQKAGEVWHDMTGNRSGTVTINQDGWGHFFVNGGSVSVWVKR

SEQ ID NO: 45038 - protein, 480 aa, Bacillus sp.
NGTIMQYFEWNVPNDGQHWNRLHNNAQNLKNAGITAIWIPPAWKGTSQNDVGYGAYDLYDLGEFNQKGTVRTKYGTKAELERAIRSLKANGIQVYGDVVMNHKGGADFTERVQAVEVNPQNRNQEVSGTYQIEAWTGFNFPGRGNQHSSFKWRWYHFDGTDWDQSRQLANRIYKFRGDGKSWDWEVDTENGNYDYLMYADVDMDHPEVINELNRWGVWYANTLNLDGFRLDAVKHIKFSFMRDWLGHVRGQTGKNLFAVAEYWKNDLGALENYLSKTNWTMSAFDVPLHYNLYQASNSSGNYDMRNLLNGTLVQRHPSHAVTFVDNHDTQPGEALESFVQGWFKPLAYATILTREQGYPQVFYGDYYGIPSDGVPSYRQQIDPLLKARQQYAYGRQHDYFDHWDVIGWTREGNASHPNSGLATIMSDGPGGSKWMYVGRQKAGEVWHDMTGNRSGTVTINQDGWGHFFVNGGSVSVWVKR

SEQ ID NO: 45039 - protein, 480 aa, Bacillus sp.
NGTIMQYFEWNVPNDGQHWNRLHNNAQNLKNAGITAIWIPPAWKGTSQNDVGYGAYDLYDLGEFNQKGTVRTKYGTKAELERAIRSLKANGIQVYGDVVMNHKGGADFTERVQAVEVNPQNRNQEVSGTYQIEAWTGFNFPGRGNQHSSFKWRWYHFDGTDWDQSRQLANRIYKFRGDGKAWDWEVDTENGNYDYLMYADVDMDHPEVINELNRWGVWYANTLNLDGFRLDAVKHIKFSFMRDWLGHVRGQTGKNLFAVAEYWKNDLGALENYLSKTNWTMSAFDVPLHYNLYQASNSSGNYDMRNLLNGTLVQRHPSHAVTFVDNHDTQPGEALESFVQGWFKPLAYATILTREQGYPQVFYGDYYGIPSDGVPSYRQQIDPLLKARQQYAYGRQHDYFDHWDVIGWTREGNASHPNSGLATIMSDGPGGSKWMYVGRQKAGEVWHDMTGNRQGTVTINQDGWGHFFVNGGSVSVWVKR

SEQ ID NO: 45040 - protein, 480 aa, Bacillus sp.
NGTIMQYFEWNVPNDGQHWNRLHNNAQNLKNAGITAIWIPPAWKGTSQNDVGYGAYDLYDLGEFNQKGTVRTKYGTKAELERAIRSLKANGIQVYGDVVMNHKGGADFTERVQAVEVNPQNRNQEVSGTYQIEAWTGFNFPGRGNQHSSFKWRWYHFDGTDWDQSRQLANRIYKFRGDGKAWDWEVDTENGNYDYLMYADVDMDHPEVINELNRWGVWYANTLNLDGFRLDAVKHIKFSFMRDWLGHVRGQTGKNLFAVAEYWKNDLGALENYLSKTNWTMSAFDVPLHYNLYQASNSSGNYDMRNLLNGTLVQRHPSHAVTFVDNHDTQPGEALESFVQGWFKPLAYATILTREQGYPQVFYGDYYGIPSDGVPNYRQQIDPLLKARQQYAYGRQHDYFDHWDVIGWTREGNASHPNSGLATIMSDGPGGSKWMYVGRQKAGEVWHDMTGNRSGTVTINQDGWGHFFVNGGSVSVWVKR

SEQ ID NO: 45041 - protein, 482 aa, Aspergillus thermomutatus
AYALTPAEWRSQSIYFLLTDRFGREDNSTTAACDVTQRVCALSSSFGHIANLDYIQGMGFTAIWITPVTEQFYQDTGDGTSYHGYWQQNIYEVNSNYGAAQDLKNLADALHARGMYLMVDVVANHMGYDGAGSSVDYSVFSPFDSSSYFHPYCLISDYSNQSNVEDCWLGDTTVSLPDLDTTDTAVRTIWYDWVQELVANYSIDGLRIDTVKHVEKDFWPGYNDAAGVYCVGEVFSGDPTYTCPYQNYLDGVLNYPIYYQLLYAFESTSGSISGLYNMISSVASDCADPTLLGNFIENHDNPRFASYTSDYSQAKNVISFMFFSDGIPIVYAGQEQHYSGGADPANREAVWLSGYSTSATLYSWIASTNKIRKLAISKDSGYVTSKNNPFYYDSNTLAMRKGSTTGAQVITVLSNKGSSGSSYTLSLSGMGYSAGATLVEMYTCTTLTVDSSGNLAVPMASGLPRVLVPSSWVSGSGLCGSS

SEQ ID NO: 45042 - protein, 390 aa, Talaromyces pinophilus; identical to SEQ ID NO: 69

SEQ ID NO: 45043 - protein, 317 aa, Fusarium solani; identical to SEQ ID NO: 70

SEQ ID NO: 45044 - protein, 296 aa, Fusarium solani
KPATAARATGLADFKPGVQWEICIHHPIKHDSAADLIPTKAKVWDIDMGHAQEFPNMIPMLKSAGKFVICYFNAGALQDWDDDKSKFPKEVIGHSLSYPYDSEEWYLDIRDSRVLELQTARLDIAAKIGCDAVDPDNVDAWQQDDEDPTGFKLKSSDYTNYLKNLAKYAHSIKTKDGQPLLVGQKNAPEIAEDLVSTLDFAVLESCRGNSDPNEESWPFCEDFQTYIDAGKPVLQIEYPPSVEKTGKVSASDNKYYCTAEDEDKGFSKIIKWASAQLDGWGQYCGEEPFRTPAAKY

SEQ ID NO: 45045 - protein, 248 aa, Ostropa barbara; identical to SEQ ID NO: 71

SEQ ID NO: 45046 - protein, 272 aa, Stenocarpella maydis; identical to SEQ ID NO: 72

SEQ ID NO: 45047 - protein, 297 aa, Urnula craterium; identical to SEQ ID NO: 73

SEQ ID NO: 45048 - protein, 279 aa, Urnula craterium
ATTICSTKCPYTNLGSSDAVTKSDWWKPALGATWQVVLTPADDDAGPQLTDDYEVYDLDVFDVDASVFKSLQAKDKKVICYFSAGSYEDWREDCGCFKSSDLGSDLDGWEGEAWLNTDSQNVRNIMAARLDVAVEKGCNGVDPDNVDGYDNDNGLGLSESTAKSYLQFLSDEAHSRGLAIGLKNAGSIAADVVDSMEWEVNEECIAQENCEDYKTFVDAGKPVFNIEYPPEDHIDDAWTEAEIEERCAQKADASNGATKFSTVLKNHENVDEWIRTCSE

SEQ ID NO: 45049 - protein, 267 aa, Bjerkandera fumosa; identical to SEQ ID NO: 74

SEQ ID NO: 45050 - protein, 251 aa, unidentified; identical to SEQ ID NO: 75

SEQ ID NO: 45051 - protein, 296 aa, Fusarium euwallaceae
KPTTTVRATGLADFKPGVQWEICIHHPIKHDSAADLIPTKAQVWDIDMGHAREFPNMIPMLKSAGKFVICYFNAGALQDWDDDKSKFPQEVIGHSLSYPYDDEEWYLDIRDSRVLELQKARLDVAAQIGCDAVDPDNVDAWQQDDEDPTGFKLKSSDYTNYLKNLAKYAHSIKTKDGQPLLVGQKNAPEIAEDLVSTLDFAVLESCRGNSDPNEESWPFCEDFQTYIDAGKPVLQIEYPPSVEKTGKLSASDEKYYCTAEDEDKGFSKIIKWASAQLDGWGQYCGEDPFRTPAAKY

SEQ ID NO: 45052 - protein, 300 aa, Fusarium acuminatum
EPKPAAKASSPSSFGLSDFKPGVQWEIVIHEPIKHDSAADLIPSKAKVWDIDMGHARRYPEIVPLLKSAGKFVICYFNAGAVQAWDDDKDKFPKAVIGHSLAYPYDSEEWYLDIRDSTVLKLQKARLDVASKIGCDAVDPDNVDAWQQDEEDPTGFKLKSSDYTKYLKSLAQYAHSIKTKDGNPLLVGQKNAPEIADDLVSSLDFAVLESCRGTTDPEEENWPFCEDFQTYIDAGKPVLQIEYPPSVEKTGKLSSSDKTYYCTPKEEDKGFSKIIKWASAQLDGWGQYCGEEPFRTPVIK

SEQ ID NO: 45053 - protein, 296 aa, Fusarium lateritium
AATASSPSSFGLSDFKPGVQWEIVIHEPIKHDGTADLIPSKAKVWDIDMGHARDYPKMIPLLKSAGKFVICYFNAGAVQAWDEDKNQFPKAVIGHSLAYPYDSEEWYLDIRDSTVLKLQKARLDVAAKIGCDAVDPDNVDAWQQDEEDPTGFKLKSSDYTKYLKSLAEYAHSIKTKDGNPLLVGQKNAPEIAEDLVSSLDFAVLESCRGTTDPKEENWPFCEDFQTYIDAGKPVLQIEYPPSVEKTGKLSSSDKTYYCTSKEEDKGFSKIIKWASAQLDGWGQYCGEEPFRTPVIK

SEQ ID NO: 45054 - protein, 294 aa, Fusarium oxysporum
KPAAAASSTLFELSDFKPGVEWEIVLHQPIKHDTVADLIPSKAKVWDIDMGHGRDYPEMIPLLKGAGKFVICYFNAGALQSWDKDIKQFPKAVIGHSLAYPYDSEEWYLDIRDSTVLKLQKARLDVAAKIGCDAVDPDNVDAWQQDGEDPTGFKLKPSDYTKYLKNLAEYAHSIKTKDGNRLLVGQKNAPEISEDLVSTLDFAVLESCRGTTDPDEENWPFCEDFQTYIDAGKPVLQIEYPPSVEKTGKLSSSDNTYYCTPKDEDKGFSKILKWASAQLDGWGQFCGEDPFRTP

SEQ ID NO: 45055 - protein, 300 aa, Fusarium sambucinum
EPEPAAAASSPSSFSLSDFKPGVQWEIVIHEPIKHDGTADLIPSKAKVWDIDMGHARDYPKMIPLLKSAGKFVICYFNAGAVQAWDEDKNQFPKAVIGHSLAYPYDSEEWYLDIRDSTVLKLQKARLDVAAKIGCDAVDPDNVDAWQQDEEDPTGFKLKSSDYTKYLKSLAEYAHSIKTKDGNPLLVGQKNAPEIAEDLVSSLDFAVLESCRGTTDPKEENWPFCEDFQTYIDAGKPVLQIEYPPSVEKTGKLSSSDKTYYCTPKEEDKGFSKVIKWASAQLDGWGQYCGEEPFRTPVIK

SEQ ID NO: 45056 - protein, 300 aa, Fusarium avenaceum
EPKPAATASSPSSFGLSDFKPGVQWEIVIHEPIKHDSAANLIPLKAKVWDVDMRHARRYPEMIPLLKSAGKFVICYLNAGAVQAWDDDKDKFPKAVIGYSLAYPYDSEEWYLDIRDSTVLKLQKARLDVAAKIGCDAVDPDNVDAWQQDEEDPTGFNLKSSDYTKYLKSLAQYAHSIKTKDGNPLLVGQKNAPEIADDLVSSLDFAVLESCRGTTDPEEENWPFCEDFQTYIDAGKPVLQIEYPPSVEKTGKLSSSDKTYYCTPKEEDKGFSKIIKWASAQLDGWGQYCGEEPFRTPVIK

SEQ ID NO: 45057 - protein, 294 aa, Fusarium verticillioides
KPAAAASSALFELSDFKPGVEWEIVLHQPIKHDTIADLIPSKAKVWDIDMGHGRDYPEMIPLLKGAGKFVICYFNAGALQSWDKDIKQFPKAVIGHSLAYPYDSEEWYLDIRDSTVLKLQKARLDVAAKIGCDAVDPDNVDAWQQDGEDPTGFKLKPSDYTKYLKNLAEYAHSIKTKDGNRLLVGQKNSPEIAEDLVSTLDFAVLESCRGTTDPDEENWPFCEDFQTYIDAGKPVLQIEYPPSVEKTGKLSSSDNAYYCTPKGEDKGFSKILKWASAQLDGWGQFCGDDPFRTP

SEQ ID NO: 45058 - protein, 294 aa, Fusarium proliferatum
KPAAAASSAFFELSDFKPGVEWEIVLHQPIKHDTVADLIPSKAKVWDIDMGHGRDYPEMIPLLKGAGKFVICYFNAGALQSWDKDIKQFPDAVIGHSLAYPYDSEEWYLDIRDSTVLKLQKARLDVAAKIGCDAVDPDNVDAWQQDGEDPTGFKLKPSDYTKYLKNLAEYAHSIKTKDGNRLLVGQKNAPEVAEDLVSTLDFAVLESCRGTTDPDEENWPFCEDFQTYIDAGKPVLQIEYPPSVEKTGKLSSSDNAYYCTPKGEDKGFSKILKWASAQLDGWGQFCGEDPFHTP

SEQ ID NO: 45059 - protein, 294 aa, Fusarium temperatum
KPAAAVSSALFELSDFKPGVEWEIVLHQPIKHDTVADLIPSKAKVWDIDMGHGRDYPEMIPLLKGAGKFVICYFNAGALQSWDQDIKQFPKAVIGHSLAYPYDSEEWYLDIRDSTVLELQKARLDVAAKIGCDAVDPDNVDAWQQDGEDPTGFELKPSDYTKYLKNLADYAHSIKTMDGNRLLVGQKNAPEIAEALVSALDFAVLESCRGTTDPDEENWPFCEDFQTYVDAGKPVLQIEYPPSVEKTGKLSPSDNTYYCTPKGEDKGFSKILKWASAQLDGWGQFCGDDPFRTP

SEQ ID NO: 45060 - protein, 300 aa, Fusarium compactum
TAKAKQTTPSASPFELSDFKPGVEWEIVLHQPIKHESAADLIPTTAKVWDIDMGHARDYPEMIPLLKSAGKFIVCYFNAGAVQSWDEDKDQFPEAAVGHSLAYPYDSEEWYLDIRDPTVLRVQRARLDVAAKVGCDAVDPDNVDAWQQNEEDPTGFKLKPSDYATYLKDLAEYTHSIKTKDGNPLLIGQKNAPEIAEDLVSTLDFAVLESCRGTTNPEEESWPFCEDFQIYVDAGKPVLQIEYPPSVEKTGKLSSSDKTFYCTPKDEDQGFSKIIKWASAQLDGWGQYCGGEPFRTPVIK

SEQ ID NO: 45061 - protein, 267 aa, Diaporthe phaseolorum
MHLRSFYSAVLAAATASATKILLPLYIYPIPLDRWGSIYDAIATHPSIDFQIVINPSSGPGGSTPGYNNHWISAVSKLHAYDNVDTLGYVRVGYGAKALNDITTDITNWNGWNHYTAADITIDGIFFDETPNWQGTKGANDVSFMQQLAELADHGGYSKVFNLGQASNHDEYFSIADTVVIFENTAEWYNDTVLATAAADGVADKSAVLIHHFATSGLTSGFAVRWVVDMVRKGLGSFAIINSDWNNANSNVAPMGIGILADMLESV

SEQ ID NO: 45062 - protein, 305 aa, Neonectria candida
TTTQAVATNTGISTSVAAVSNFKPGVTWDICIHYPIKHDSVDDLIPAEATVWDIDLTHAHEFPNMIPMLKKAGKFVICYFNAGARQTFDDDKDLFPTEVIGKSLSYPYDDEEAYVDIRDDRVLDIMKARLDSAVEVGCDAVDPDNVDAWAQDGTDPTGFSLKSSDYVTYLKNLAAYAHSVKTQEGQPLLVGQKNAPEIAADLVSTLDFAVLEQCRGSSDSSEESYAFCSDFQTYIDAGKPVLQIEYPPSVSESDGTLSSSDESFYCNAEDDDKGFSKVLKWASAQLDGWGQYCGGKSFRTVEAEY

SEQ ID NO: 45063 - protein, 576 aa, unidentified; identical to SEQ ID NO: 54

SEQ ID NO: 45064 - protein, 576 aa, Chaetomium gracile
IRQRAGNHTVCNSQLCTWWHDNGEINTASMVQLGNVRQSHKYLVQVSIAGVNDFYDSFAYESIPRNGRGRIYSPWDPPNSDTLGSDVDDGITIETSAGINMAWSQFEYSTGVDVKILTRDGSRLPDPSGVKIRPTAISYDIRSSSDGGIVIRVPHDPNGRRFSVEFDNDLYTYRSDGSRYVSSGGSIVGVEPRNALVIFASPFLPDNMVPRIDGPDTKVMTPGPINQGDWGSSGILYFPPGVYWMNSNQQGQTPKIGENHIRLHPNTYWAYLAPGAYVKGAIEYSTKSDFYATGHGVLSGEHYVYQANPATYYQALKSDATSLRMWWHNNLGGGQTWYCQGPTINAPPFNTMDFHGSSDITTRISDYKQVGAFFFQTEGPQMYPNSQVHDVFYHVNDDAIKTYYSGVTVTRATIWKAHNDPIIQMGWDTRDVTGVTLQDLYIIHTRYIKSETYVPSAIIGASPFYMPGRSVDPAKSISMTISNLVCEGLCPALMRITPLQNYRDFRIQNVAFPDGLQANSIGTGKSIVPASSGLKFGVAISNWTVGGEQVTMSNFQSDSLGQLDIDVSYWGQWVIR

SEQ ID NO: 45065 - protein, 575 aa, Acremonium thermophilum
IPPRDGNHTVCNSQLCTWWHDNGEINTDSMVQLGNVRQSRKYLVQVSIAGANDFYDSFAYESIPRNGRGRIYSPWDAPDSNTLGSDVDDGITIEPSLGINMAWSQFEYSTGVDVKIRTRDGSSLPGPSGVKIRPTAISYDIRSSGDGGIIIHVPHDPNGRRFSVEFDSDLYTYRSDGSHYVQSGGSVVGVEPRNALLIFASPFLPADMVPRIDGPDTKVMTPGPINQGDWGSSGILYFPPGVYWMNSNPQGQAPKIGENHIRLHPNTYWVYLAPGAYVKGAIEYSTKSNFYATGHGVLSGEHYVYQANPATYYQALKSDATSLRMWGHNSLGGGQTWFCQGPTINAPPFNTMDFHGSSDITTRISDYKQVGAFFFQTDGPQMYPNSQVHDVFYHVNDDAIKTYYSGVTVTRATIWKGHNDPIVQMGWDTRDVSGVALRDIHVIHTRYIKSETYVPSAIIGASPFYMSGRSVDPSKSISMTISGLVCEGLCPALMRITPLQNYRDFRIENVAFPDGLQTNSIGTGRSIVPASSGLRFGVTISNWTVGGQRVTMSNFQTNSLGQLDIDVSYWGQWAI

SEQ ID NO: 45066 - protein, 575 aa, Acrophialophora fusispora
IPPRNGNHTVCNNQLCTWWHDNGEINTNSMVQLGNVRQSRKYLVQVSIAGADNFYDSFAYESIPRNGRGRIYSPWDAPDSNTLASDVDDGITIEPNVGINMAWSQFEYSTGVEVKIRTLDGSSLPGPSGVKIRPTAISYGIRSSGDGGIIIHVPHDPNGRRFSVEFDNDLYTYRSDGLHYVPSGGSVVGVEPKNALLIFASPFLPADMVPRIDGPDTKVMTPGPINQGDWGSSSILYFPPGVYWMNSNPQGQTPKIGENHIRLHPNTYWVYLAPGAYVKGAIEYSTKSNFYATGHGVLSGEHYVYQANPATYYQALKSDATSLRMWGHNNLGGGQTWFCQGPTINAPPFNTMDFHGSSDITTRISDYKQVGAFFFQTDGPQMYPNSQVHDVFYHVNDDAIKTYYSGVTVTRATIWKGHNDPIVQMGWDTRDVSGVTLQDIHVIHTRYIKSETYVPSAIIGASPFYMSGRSVDPSKTISMTISGLVCEGLCPALMRITPLQNYRDFRIENVAFPDGLQTNSIGTGRSIVPASSGLRFGVTISNWTVGGHRVTMSNFQSDSLGQLDIDVSYWGQWAI

SEQ ID NO: 45067 - protein, 569 aa, Penicillium minioluteum
NNTHCGADFCTWWHDSGEINTQTPVQPGNVRQSHKYSVQVSLAGTNNFHDSFVYESIPRNGNGRIYAPTDPPNSNTLDSSVDDGISIEPSIGLNMAWSQFEYSHDVDVKILATDGSSLGSPSDVVIRPVSISYAISQSDDGGIVIRVPADANGRKFSVEFKTDLYTFLSDGNEYVTSGGSVVGVEPTNALVIFASPFLPSGMIPHMTPDNTQTMTPGPINNGDWGAKSILYFPPGVYWMNQDQSGNSGKLGSNHIRLNSNTYWVYLAPGAYVKGAIEYFTKQNFYATGHGILSGENYVYQANAGDNYIAVKSDSTSLRMWWHNNLGGGQTWYCVGPTINAPPFNTMDFNGNSGISSQISDYKQVGAFFFQTDGPEIYPNSVVHDVFWHVNDDAIKIYYSGASVSRATIWKCHNDPIIQMGWTSRDISGVTIDTLNVIHTRYIKSETVVPSAIIGASPFYASGMSPDSRKSISMTVSNVVCEGLCPSLFRITPLQNYKNFVVKNVAFPDGLQTNSIGTGESIIPAASGLTMGLNISNWTVGGQKVTMENFQANSLGQFNIDGSYWGEWQI

SEQ ID NO: 45068 - protein, 569 aa, Talaromyces aculeatus
NNTHCGADFCTWWHDSGEINTQTPVQPGNVRQSHKYSVQVSLAGANNFQDSFVYESIPRNGNGRIYAPTDPPNSNTLDSSVDDGISIEHSIGLNMAWSQFEYSQDVDIKILAADGSSLGSPSDVVIRPVSISYAISQSDDGGIVIRVPADANGRKFSVEFKNDPYTFLSDGNEYVTSGGSVVGVEPTNALVIFASPFLPSGMIPHMTPDNTQTMTPGPINNGDWGSKSILYFPPGVYWMNQDQSGNSGKLGSNHIRLNSNTYWVYFAPGAYVKGAIEYFTKQNFYATGHGVLSGENYVYQANAGENYVAVKSDSTSLRMWWHNNLGGGQTWYCVGPTINAPPFNTMDFNGNSGISSQISDYKQVGAFFFQTDGPEIYPNSVVHDVFWHVNDDAIKIYYSGASVSRATIWKCHNDPIIQMGWTSRDISGVTIDTLNVIHTRYIKSETVVPSAIIGASPFYASGMSPDSSKSISMTVSNVVCEGLCPSLFRITPLQNYKNFVVKNVAFPDGLQTNSIGTGESIIPAASGLTMGLDISNWSVGGQKVTMQNFQANSLGQFDIDGSYWGEWQI

SEQ ID NO: 45069 - protein, 568 aa, Talaromyces funiculosus
NNTHCGADFCTWWHDSGEINTQTPVQPGNVRQSHKYSVQVSLAGTNNFHDSFVYESIPRNGNGRIYAPTDPSNSNTLDSSVDDGISIEPSIGLNMAWSQFEYSQDVDIKILATDGSSLGSPSDVVIRPVSISYAISQSNDGGIVIRVPADANGRKFSVEFKNDLYTFLSDGNEYVTSGGSVVGVEPTNALVIFASPFLPSGMIPHMKPHNTQTMTPGPINNGDWGAKSILYFPPGVYWMNQDQSGNSGKLGSNHIRLNSNTYWVYLAPGAYVKGAIEYFTKQNFYATGHGVLSGENYVYQANAGDNYVAVKSDSTSLRMWWHNNLGGGQTWYCVGPTINAPPFNTMDFNGNSGISQISDYKQVGAFFFQTDGPEIYPNSVVHDVFWHVNDDAIKIYYSGASVSRATIWKCHNDPIIQMGWTSRDISGVTIDTLNVIHTRYIKSETVVPSAIIGASPFYASGMSPDSSKSISMTVSNVVCEGLCPSLFRITPLQNYKNFVVKNVAFPDGLQTNSIGTGESIIPAASGLTMGLNISSWTVGGQKVTMENFQANSLGQFNIDGSYWGEWQI

SEQ ID NO: 45070 - protein, 568 aa, Lipomyces starkeyi
NRTVCGSQLCTWWHDSGEINTGTPVQAGNVRQSRKYSVHVSLADRNQFYDSFVYESIPRNGNGRIYSPTDPPNSNTLNSSIDDGISIEPSLGINMAWSQFEYRRDVDIKITTIDGSILDGPLDIVIRPTSVKYSVKRCVGGIIIRVPYDPNGRKFSVELKSDLYSYLSDGSQYVTSGGSVVGVEPKNALVIFASPFLPRDMVPHMTPHDTQTMKPGPINNGDWGSKPILYFPPGVYWMNEDTSGNPGKLGSNHMRLDPNTYWVHLAPGAYVKGAIEYFTKQNFYATGHGVLSGENYVYQANAADNYYAVKSDGTSLRMWWHNNLGGGQTWFCMGPTINAPPFNTMDFNGNSNISSRISDYKQVGAYFFQTDGPEIYEDSVVHDVFWHVNDDAIKTYYSGASISRATIWKCHNDPIIQMGWTSRNLTGISIDNLHVIHTRYFKSETVVPSAIIGASPFYASGMTVDPSESISMTISNVVCEGLCPSLFRITPLQSYNNLVVKNVAFPDGLQTNPIGIGESIIPAASGCTMDLEITNWTVKGQKVTMQNFQSGSLGQFDIDGSYWGQWSI

SEQ ID NO: 45071 - protein, 568 aa, Lipomyces starkeyi
NRTVCGSQLCTWWHDSGEINTGTPVQAGNVRQSRKYSVHVSLADRNQFYDSFVYESIPRNGNGRIYSPTDPPNSNTLNSSIDDGISIEPSLGINMAWSQFEYRRDVDIKITTIDGSILDGPLDIVIRPTSVKYSVKRCVGGIIIRVPYDPNGRKFSVELKSDLYSYLSDGSQYVTSGGSVVGVEPKNALVIFASPFLPRDMVPHMTPHDTQTMKPGPINNGDWGSKPILYFPPGVYWMNEDTSGNPGKLGSNHMRLDPNTYWVHLAPGAYVKGAIEYFTKQNFYATGHGVLSGENYVYQANAADNYYAVKSDGTSLRMWWHNNLGGGQTWFCMGPTINAPPFNTMDFNGNSNISSRISDYKQVGAYFFQTDGPEIYEDSVVHDVFWHVNDDAIKTYYSGASISRATIWRCHNDPIIQMGWTSRNLTGISIDNLHVIHTRYFKSETVVPSAIIGASPFYASGMTVDPSESISMTISNVVCEGLCPSLFRITPLQSYNNLVVKNVAFPDGLQTNPIGIGESIIPAASGCTMDLEITNWTVKGQKVTMQNFQSGSLGQFDIDGSYWGQWSI

SEQ ID NO: 45072 - protein, 685 aa, Geobacillus stearothermophilus
SSSASVKGDVIYQIIIDRFYDGDTTNNNPAKSYGLYDPTKSKWKMYWGGDLEGVRQKLPYLKQLGVTTIWLSPVLDNLDTLAGTDNTGYHGYWTRDFKQIEEHFGNWTTFDTLVNDAHQNGIKVIVDFVPNHSTPFKANDSTFAEGGALYNNGTYMGNYFDDATKGYFHHNGDISNWDDRYEAQWKNFTDAGFSLADLSQENGTIAQYLTDAAVQLVAHGADGLRIDAVKHFNSGFSKSLADKLYQKKDIFLVGEWYGDDPGTANHLEKVRYANNSGVNVLDFDLNTVIRNVFGTFTQTMYDLNNMVNQTGNEYKYKENLITFIDNHDMSRFLSVNSNKANLHQALAFILTSRGTPSIYYGTEQYMAGGNDPYNRGMMPAFDTTTTAFKEVSTLAGLRRNNAAIQYGTTTQRWINNDVYIYERKFFNDVVLVAINRNTQSSYSISGLQTALPNGSYADYLSGLLGGNGISVSNGSVASFTLAPGAVSVWQYSTSASAPQIGSVAPNMGIPGNVVTIDGKGFGTTQGTVTFGGVTATVKSWTSNRIEVYVPNMAAGLTDVKVTAGGVSSNLYSYNILSGTQTSVVFTVKSAPPTNLGDKIYLTGNIPELGNWSTDTSGAVNNAQGPLLAPNYPDWFYVFSVPAGKTIQFKFFIKRADGTIQWENGSNHVATTPTGATGNITVTWQN

SEQ ID NO: 45073 - protein, 686 aa, Geobacillus stearothermophilus; identical to SEQ ID NO: 78

SEQ ID NO: 45074 - protein, 686 aa, Geobacillus stearothermophilus
SSSASVKGDVIYQIIIDRFYDGDTTNNNPAKSYGLYDPTKSKWKMYWGGDLEGVRQKLPYLKQLGVTTIWLSPVLDNLDTLAGTDNTGYHGYWTRDFKQIEEHFGNWTTFDTLVNDAHQNGIKVIVDFVPNHSTPFKANDSTFAEGGALYNNGTYMGNYFDDATKGYFHHNGDISNWDDRYEAQWKNFTDPAGFSLADLSQENGTIAQYLTDAAVQLVAHGADGLRIDAVKHFNSGFSKSLADKLYQKKDIFLVGEWYGDDPGTANHLEKVRYANNSGVNVLDFDLNTVIRNVFGTFTQTMYDLNNMVNQTGNEYKYKENLITFIDNHDISRFLSVNSNKANLHQALAFILTSRGTPSIYYGTEQYMAGGNDPYNRGMMPAFDTTTTAFKEVSTLAGLRRNNAAIQYGTTTQRWINNDVYIYERKFFNDVVLVAINRNTQSSYSISGLQTALPNGSYADYLSGLLGGNGISVSNGSVASFTLAPGAVSVWQYSTSASAPQIGSVAPNMGIPGNVVTIDGKGFGTTQGTVTFGGVTATVKSWTSNRIEVYVPNMAAGLTDVKVTAGGVSSNLYSYNILSGTQTSVVFTVKSAPPTNLGDKIYLTGNIPELGNWSTDTSGAVNNAQGPLLAPNYPDWFYVFSVPAGKTIQFKFFIKRADGTIQWENGSNHVATTPTGATGNITVTWQN

SEQ ID NO: 45075 - protein, 686 aa, Geobacillus stearothermophilus
SSSASVKGDVIYQIIIDRFYDGDTTNNNPAKSYGLYDPTKSKWKMYWGGDLEGVRQKLPYLKQLGVTTIWLSPVLDNLDTLAGTDNTGYHGYWTRDFKQIEEHFGNWTTFDTLVNDAHQNGIKVIVDFVPNHSTPFKANDSTFAEGGALYNNGTYMGNYFDDATKGYFHHNGDISNWDDRYEAQWKNFTDPAGFSLADLSQENGTIAQYLTDAAVQLVAHGADGLRIDAVKHFNSGFSKSLADKLYQKKDIFLVGEWYGDDPGTANHLEKVRYANNSGVNVLDFDLNXVIRNVFGTFTQTMYDLNNMVNQTGNEYKYKENLITFIDNHDMSRFLSVNSNKANLHQALAFILTSRGTPSIYYGTEQYMAGGNDPYNRGMMPAFDTTTTAFKEVSTLAGLRRNNAAIQYGTTTQRWINNDVYIYERKFFNDVVLVAINRNTQSSYSISGLQTALPNGSYADYLSGLLGGNGISVSNGSVASFTLAPGAVSVWQYSTSASAPQIGSVAPNMGIPGNVVTIDGKGFGTTQGTVTFGGVTATVKSWTSNRIEVYVPNMAAGLTDVKVTAGGVSSNLYSYNILSGTQTSVVFTVKSAPPTNLGDKIYLTGNIPELGNWSTDTSGAVNNAQGPLLAPNYPDWFYVFSVPAGKTIQFKFFIKRADGTIQWENGSNHVATTPTGATGNITVTWQN

SEQ ID NO: 45076 - protein, 686 aa, Geobacillus stearothermophilus
SSSASVKGDVIYQIIIDRFYDGDTTNNNPAKSYGLYDPTKSKWKMYWGGDLEGVRQKLPYLKQLGVTTIWLSPVLDNLDTLAGTDNTGYHGYWTRDFKQIEEHFGNWTTFDTLVNDAHQNGIKVIVDFVPNHSTPFKANDSTFAEGGALYNNGTYMGNYFDDATKGYFHHNGDISNWDDRYEAQWKNFTDPAGFSLADLSQENGTIAQYLTDAAVQLVAHGADGLRIDAVKHFNSGFSKSLADKLYQKKDIFLVGEWYGDDPGTANHLEKVRYANNSGVNVLDFDLNTVIRNVFGTFTQTMYDLNNMVNQTGNEYKYKENLITFIDNHDMSRFLSVNSNKANLHQALAFILTSRGTPSIYYGTEQYMAGGNDPYNRGMMPAFDTTTTAFKEVSTLAGLRRNNAAIQYGTTTQRWINNDVYIYERKFFNDVVLVAINRNTQSSYSISGLQTALPNGSYADYLSGLLGGNAISVSNGSVASFTLAPGAVSVWQYSTSASAPQIGSVAPNMGIPGNVVTIDGKGFGTTQGTVTFGGVTATVKSWTSNRIEVYVPNMAAGLTDVKVTAGGVSSNLYSYNILSGTQTSVVFTVKSAPPTNLGDKIYLTGNIPELGNWSTDTSGAVNNAQGPLLAPNYPDWFYVFSVPAGKTIQFKFFIKRADGTIQWENGSNHVATTPTGATGNITVTWQN

SEQ ID NO: 45077 - protein, 686 aa, Geobacillus stearothermophilus
SSSASVKGDVIYQIIIDRFYDGDTTNNNPAKSYGLYDPTKSKWKMYWGGDLEGVRQKLPYLKQLGVTTIWLSPVLDNLDTLAGTDNTGYHGYWTRDFKQIEEHFGNWTTFDTLVNDAHQNGIKVIVDFVPNHSTPFKANDSTFAEGGALYNNGTYMGNYFDDATKGYFHHNGDISNWDDRYEAQWKNFTDPAGFSLADLSQENGTIAQYLTDAAVQLVAHGADGLRIDAVKHFNSGFSKSLADKLYQKKDIFLVGEWYGDDPGTANHLEKVRYANNSGVNVLDFDLNTVIRNVFGTFTQTMYDLNNMVNQTGNEYKYKENLITFIDNHDMSRFLSVNSNKANLHQALAFILTSRGTPSIYYGTEQYMAGGRDPYNRGMMPAFDTTTTAFKEVSTLAGLRRNNAAIQYGTTTQRWINNDVYIYERKFFNDVVLVAINRNTQSSYSISGLQTALPNGSYADYLSGLLGGNGISVSNGSVASFTLAPGAVSVWQYSTSASAPQIGSVAPNMGIPGNVVTIDGKGFGTTQGTVTFGGVTATVKSWTSNRIEVYVPNMAAGLTDVKVTAGGVSSNLYSYNILSGTQTSVVFTVKSAPPTNLGDKIYLTGNIPELGNWSTDTSGAVNNAQGPLLAPNYPDWFYVFSVPAGKTIQFKFFIKRADGTIQWENGSNHVATTPTGATGNITVTWQN

SEQ ID NO: 45078 - protein, 686 aa, Geobacillus stearothermophilus
SSSASVKGDVIYQIIIDRFYDGDTTNNNPAKSYGLYDPTKSKWKMYWGGDLEGVRQKLPYLKQLGVTTIWLSPVLDNLDTLAGTDNTGYHGYWTRDFKQIEEHFGNWTTFDTLVNDAHQNGIKVIVDFVPNHSTPFKANDSTFAEGGALYNNGTYMGNYFDDATKGYFHHNGDISNWDDRYEAQWKNFTGPAGFSLADLSQENGTIAQYLTDAAVQLVAHGADGLRIDAVKHFNSGFSKSLADKLYQKKDIFLVGEWYGDDPGTANHLEKVRYANNSGVNVLDFDLNTVIRNVFGTFTQTMYDLNNMVNQTGNEYKYKENLITFIDNHDMSRFLSVNSNKANLHQALAFILTSRGTPSIYYGTEQYMAGGNDPYNRGMMPAFDTTTTAFKEVSTLAGLRRNNAAIQYGTTTQRWINNDVYIYERKFFNDVVLVAINRNTQSSYSISGLQTALPNGSYADYLSGLLGGNGISVSNGSVASFTLAPGAVSVWQYSTSASAPQIGSVAPNMGIPGNVVTIDGKGFGTTQGTVTFGGVTATVKSWTSNRIEVYVPNMAAGLTDVKVTAGGVSSNLYSYNILSGTQTSVVFTVKSAPPTNLGDKIYLTGNIPELGNWSTDTSGAVNNAQGPLLAPNYPDWFYVFSVPAGKTIQFKFFIKRADGTIQWENGSNHVATTPTGATGNITVTWQN

SEQ ID NO: 45079 - protein, 686 aa, Geobacillus stearothermophilus
SSSASVKGDVIYQIIIDRFYDGDTTNNNPAKSYGLYDPTKSKWKMYWGGDLEGVRQKLPYLKQLGVTTIWLSPVLDNLDTLAGTDNTGYHGYWTRDFKQIEEHFGNWTTFDTLVNDAHQNGIKVIVDFVPNHSTPFKANDSTFAEGGALYNNGTYMGNYFDDATKGYFHHNGDISNWDDRYEAQWKNFTDPAGFSLADLSQENGTIAQYLTDAAVQLVAHGADGLRIDAVKHFNSGFSKSLADKLYQKKDIFLVGEWYGDDPGTANHLEKVRYANNSGVNVLDFDLNTVIRNVFGTFTQTMYDLNNMVNQTGNEYKYKENLITFIDNHDMSRFLSVNSNKANLHQALAFILTSRGTPSIYYGTEQYMAGGNAPYNRGMMPAFDTTTTAFKEVSTLAGLRRNNAAIQYGTTTQRWINNDVYIYERKFFNDVVLVAINRNTQSSYSISGLQTALPNGSYADYLSGLLGGNGISVSNGSVASFTLAPGAVSVWQYSTSASAPQIGSVAPNMGIPGNVVTIDGKGFGTTQGTVTFGGVTATVKSWTSNRIEVYVPNMAAGLTDVKVTAGGVSSNLYSYNILSGTQTSVVFTVKSAPPTNLGDKIYLTGNIPELGNWSTDTSGAVNNAQGPLLAPNYPDWFYVFSVPAGKTIQFKFFIKRADGTIQWENGSNHVATTPTGATGNITVTWQN

SEQ ID NO: 45080 - protein, 686 aa, Geobacillus stearothermophilus
SSSASVKGDVIYQIIIDRFYDGDTTNNNPAKSYGLYDPTKSKWKMYWGGDLEGVRQKLPYLKQLGVTTIWLSPVLDNLDTLAGTDNTGYHGYWTRDFKQIEEHFGNWTTFDTLVNDAHQNGIKVIVDFVPNHSTPFKANDSTFAEGGALYNNGTYMGNYFDDATKGYFHHNGDISNWDDRYEAQWKNLTDPAGFSLADLSQENGTIAQYLTDAAVQLVAHGADGLRIDAVKHFNSGFSKSLADKLYQKKDIFLVGEWYGDDPGTANHLEKVRYANNSGVNVLDFDLNTVIRNVFGTFTQTMYDLNNMVNQTGNEYKYKENLITFIDNHDMSRFLSVNSNKANLHQALAFILTSRGTPSIYYGTEQYMAGGNDPYNRGMMPAFDTTTTAFKEVSTLAGLRRNNAAIQYGTTTQRWINNDVYIYERKFFNDVVLVAINRNTQSSYSISGLQTALPNGSYADYLSGLLGGNGISVSNGSVASFTLAPGAVSVWQYSTSASAPQIGSVAPNMGIPGNVVTIDGKGFGTTQGTVTFGGVTATVKSWTSNRIEVYVPNMAAGLTDVKVTAGGVSSNLYSYNILSGTQTSVVFTVKSAPPTNLGDKIYLTGNIPELGNWSTDTSGAVNNAQGPLLAPNYPDWFYVFSVPAGKTIQFKFFIKRADGTIQWENGSNHVATTPTGATGNITVTWQN

SEQ ID NO: 45081 - protein, 686 aa, Geobacillus stearothermophilus
SSSASVKGDVIYQIIIDRFYDGDTTNNNPAKSYGLYDPTKSKWKMYWGGDLEGVRQKLPYLKQLGVTTIWLSPVLDNLDTLAGTDNQGYHGYWTRDFKQIEEHFGNWTTFDTLVNDAHQNGIKVIVDFVPNHSTPFKANDSTFAEGGALYNNGTYMGNYFDDATKGYFHHNGDISNWDDRYEAQWKNFTDPAGFSLADLSQENGTIAQYLTDAAVQLVAHGADGLRIDAVKHFNSGFSKSLADKLYQKKDIFLVGEWYGDDPGTANHLEKVRYANNSGVNVLDFDLNTVIRNVFGTFTQTMYDLNNMVNQTGNEYKYKENLITFIDNHDMSRFLSVNSNKANLHQALAFILTSRGTPSIYYGTEQYMAGGNDPYNRGMMPAFDTTTTAFKEVSTLAGLRRNNAAIQYGTTTQRWINNDVYIYERKFFNDVVLVAINRNTQSSYSISGLQTALPNGSYADYLSGLLGGNGISVSNGSVASFTLAPGAVSVWQYSTSASAPQIGSVAPNMGIPGNVVTIDGKGFGTTQGTVTFGGVTATVKSWTSNRIEVYVPNMAAGLTDVKVTAGGVSSNLYSYNILSGTQTSVVFTVKSAPPTNLGDKIYLTGNIPELGNWSTDTSGAVNNAQGPLLAPNYPDWFYVFSVPAGKTIQFKFFIKRADGTIQWENGSNHVATTPTGATGNITVTWQN

SEQ ID NO: 45082 - protein, 686 aa, Geobacillus stearothermophilus
SSSASVKGDVIYQIIIDRFYDGDTTNNNPAKSYGLYDPTKSKWKMYWGGDLEGVRQKLPYLKQLGVTTIWLSPVLDNLDTLAGTDNTGYHGYWTRDFKQIEEHFGNWTTFDTLVNDAHQNGIKVIVDFVPNHSTPFKANDSTFAEGGALYNNGTYMGNYFDDATKGYFHHNGDISNWDDRYEAQWKNFTDPAGFSLADLSQENGTIAQYLTDAAVQLVAHGADGLRIDAVKHFNSGFSKSLADKLYQKKDIFLVGEWYGDDPGTANHLEKVRYANNSGVNVLDFDLNTVIRNVFGTFTQTMYDLNNMVNQTGNEYKYKENLITFIDNHDMSRFLSVNSNKANLHQALAFILTSRGTPSIYYGTEQYMAGGNDPYNRGMMPAFDTTTTAFKEVSTLAGLRRNNAAIQYGTTTQRWINNDVYIYERKFFNDVVLVAINRNTQSSYSISGLQTALPNGSYADYLSGLLGGNGISVSNGSVASFTLAPGAVSVWQYSTSASAPQIGSVAPNMGIPGNVVTIDGKGFGTTQGTVTFGGVTATVKSWTSNRIEVYVPNMAAGLTDVKVTAGGVSSNLYSYNILSGTQTSVVFTVKSAPPTNLGDKIYLTGNIPELGNWSTDTSGAVNNAQGPLLAPNYPDWFYVFSVQAGKTIQFKFFIKRADGTIQWENGSNHVATTPTGATGNITVTWQN

SEQ ID NO: 45083 - protein, 686 aa, Geobacillus stearothermophilus
SSSASVKGDVIYQIIIDRFYDGDTTNNNPAKSYGLYDPTKSKWKMYWGGDLEGVRQKLPYLKQLGVTTIWLSPVLDNLDTLAGTDNTGYHGYWTRDFKQIEEHFGNWTTFDTLVNDAHQNGIKVIVDFVPNHSTPFKANDSTFAEGGALYNNGTYMGNYFDDATKGYFHHNGDISNWDDRYEAQWKNFTDPAGFSLADLSQENGTIAQYLTDAAVQLVAHGADGLRIDAVKHFNSGFSKSLADKLYQKKDIFLVGEWYGDDPGTANHLEKVRYANNSGVNVLDFDLNTVIRNVFGTFTQTMYDLNNMVNQTGNEYKYKENLITFIDNHDMSRFLSVNSNKANLHQALAFILTSRGTPSIYYGTEQYMAGGNSPYNRGMMPAFDTTTTAFKEVSTLAGLRRNNAAIQYGTTTQRWINNDVYIYERKFFNDVVLVAINRNTQSSYSISGLQTALPNGSYADYLSGLLGGNGISVSNGSVASFTLAPGAVSVWQYSTSASAPQIGSVAPNMGIPGNVVTIDGKGFGTTQGTVTFGGVTATVKSWTSNRIEVYVPNMAAGLTDVKVTAGGVSSNLYSYNILSGTQTSVVFTVKSAPPTNLGDKIYLTGNIPELGNWSTDTSGAVNNAQGPLLAPNYPDWFYVFSVPAGKTIQFKFFIKRADGTIQWENGSNHVATTPTGATGNITVTWQN

SEQ ID NO: 45084 - protein, 686 aa, Geobacillus stearothermophilus
SSSASVKGDVIYQIIIDRFYDGDTTNNNPAKSYGLYDPTKSKWKMYWGGDLEGVRQKLPYLKQLGVTTIWLSPVLDNLDTLAGTDNTGYHGYWTRDFKQIEEHFGNWTTFDTLVNDAHQNGIKVIVDFVPNHSTPFKANDSTFAEGGALYNNGTYMGNYFDDATKGYFHHNGDISNWDDRYEAQWKNFTDPAGFSFADLSQENGTIAQYLTDAAVQLVAHGADGLRIDAVKHFNSGFSKSLADKLYQKKDIFLVGEWYGDDPGTANHLEKVRYANNSGVNVLDFDLNTVIRNVFGTFTQTMYDLNNMVNQTGNEYKYKENLITFIDNHDMSRFLSVNSNKANLHQALAFILTSRGTPSIYYGTEQYMAGGNDPYNRGMMPAFDTTTTAFKEVSTLAGLRRNNAAIQYGTTTQRWINNDVYIYERKFFNDVVLVAINRNTQSSYSISGLQTALPNGSYADYLSGLLGGNGISVSNGSVASFTLAPGAVSVWQYSTSASAPQIGSVAPNMGIPGNVVTIDGKGFGTTQGTVTFGGVTATVKSWTSNRIEVYVPNMAAGLTDVKVTAGGVSSNLYSYNILSGTQTSVVFTVKSAPPTNLGDKIYLTGNIPELGNWSTDTSGAVNNAQGPLLAPNYPDWFYVFSVPAGKTIQFKFFIKRADGTIQWENGSNHVATTPTGATGNITVTWQN

SEQ ID NO: 45085 - protein, 686 aa, Geobacillus stearothermophilus
SSSASVKGDVIYQIIIDRFYDGDTTNNNPAKSYGLYDPTKSKWKMYWGGDLEGVRQKLPYLKQLGVTTIWLSPVLDNLDTLAGTDNTGYHGYWTRDFKQIEEHFGNWTTFDTLVNDAHQNGIKVIVDFVPNHSTPFKANDSTFAEGGALYNNGTYMGNYFDDATKGYFHHNGDISNWDDRYEAQWKNFTDPAGFSLADLSQENGTIAQYLTDAAVQLVAHGADGLRIDAVKHFNSGFSKSLADKLYQKKDIFLVGEWYGDDPGTANHLEKVRYANNSGVNVLDFDLNTVIRNVFGTFTQTMYDLNNMVNQTGNEYKYKENLITFIDNHDMSRFLSVNSNKANLHQALAFILTSRGTPSIYYGTEQYMAGGNVPYNRGMMPAFDTTTTAFKEVSTLAGLRRNNAAIQYGTTTQRWINNDVYIYERKFFNDVVLVAINRNTQSSYSISGLQTALPNGSYADYLSGLLGGNGISVSNGSVASFTLAPGAVSVWQYSTSASAPQIGSVAPNMGIPGNVVTIDGKGFGTTQGTVTFGGVTATVKSWTSNRIEVYVPNMAAGLTDVKVTAGGVSSNLYSYNILSGTQTSVVFTVKSAPPTNLGDKIYLTGNIPELGNWSTDTSGAVNNAQGPLLAPNYPDWFYVFSVPAGKTIQFKFFIKRADGTIQWENGSNHVATTPTGATGNITVTWQN

SEQ ID NO: 45086 - protein, 686 aa, Geobacillus stearothermophilus
SSSASVKGDVIYQIIIDRFYDGDTTNNNPAKSYGLYDPTKSKWKMYWGGDLEGVRQKLPYLKQLGVTTIWLSPVLDNLDTLAGTDNTGYHGYWTRDFKQIEEHFGNWTTFDTLVNDAHQNGIKVIVDFVPNHSTPFKANDSTFAEGGALYNNGTYMGNYFDDATKGYFHHNGDISNWDDRYEAQWKNFTDPAGFSLADLSQENGTIAQYLTDAAVQLVAHGADGLRIDAVKYFNSGFSKSLADKLYQKKDIFLVGEWYGDDPGTANHLEKVRYANNSGVNVLDFDLNTVIRNVFGTFTQTMYDLNNMVNQTGNEYKYKENLITFIDNHDMSRFLSVNSNKANLHQALAFILTSRGTPSIYYGTEQYMAGGNDPYNRGMMPAFDTTTTAFKEVSTLAGLRRNNAAIQYGTTTQRWINNDVYIYERKFFNDVVLVAINRNTQSSYSISGLQTALPNGSYADYLSGLLGGNGISVSNGSVASFTLAPGAVSVWQYSTSASAPQIGSVAPNMGIPGNVVTIDGKGFGTTQGTVTFGGVTATVKSWTSNRIEVYVPNMAAGLTDVKVTAGGVSSNLYSYNILSGTQTSVVFTVKSAPPTNLGDKIYLTGNIPELGNWSTDTSGAVNNAQGPLLAPNYPDWFYVFSVPAGKTIQFKFFIKRADGTIQWENGSNHVATTPTGATGNITVTWQN

SEQ ID NO: 45087 - protein, 686 aa, Geobacillus stearothermophilus
SSSASVKGDVIYQIIIDRFYDGDTTNNNPAKSYGLYDPTKSKWKMYWGGDLEGVRQKLPYLKQLGVTTIWLSPVLDNLDTLAGTDKTGYHGYWTRDFKQIEEHFGNWTTFDTLVNDAHQNGIKVIVDFVPNHSTPFKANDSTFAEGGALYNNGTYMGNYFDDATKGYFHHNGDISNWDDRYEAQWKNFTDPAGFSLADLSQENGTIAQYLTDAAVQLVAHGADGLRIDAVKHFNSGFSKSLADKLYQKKDIFLVGEWYGDDPGTANHLEKVRYANNSGVNVLDFDLNTVIRNVFGTFTQTMYDLNNMVNQTGNEYKYKENLITFIDNHDMSRFLSVNSNKANLHQALAFILTSRGTPSIYYGTEQYMAGGNDPYNRGMMPAFDTTTTAFKEVSTLAGLRRNNAAIQYGTTTQRWINNDVYIYERKFFNDVVLVAINRNTQSSYSISGLQTALPNGSYADYLSGLLGGNGISVSNGSVASFTLAPGAVSVWQYSTSASAPQIGSVAPNMGIPGNVVTIDGKGFGTTQGTVTFGGVTATVKSWTSNRIEVYVPNMAAGLTDVKVTAGGVSSNLYSYNILSGTQTSVVFTVKSAPPTNLGDKIYLTGNIPELGNWSTDTSGAVNNAQGPLLAPNYPDWFYVFSVPAGKTIQFKFFIKRADGTIQWENGSNHVATTPTGATGNITVTWQN

SEQ ID NO: 45088 - protein, 686 aa, Geobacillus stearothermophilus
SSSASVKGDVIYQIIIDRFYDGDTTNNNPAKSYGLYDPTKSKWKMYWGGDLEGVRQKLPYLKQLGVTTIWLSPVLDNLDTLAGTDNTGYWGYWTRDFKQIEEHFGNWTTFDTLVNDAHQNGIKVIVDFVPNHSTPFKANDSTFAEGGALYNNGTYMGNYFDDATKGYFHHNGDISNWDDRYEAQWKNFTDPAGFSLADLSQENGTIAQYLTDAAVQLVAHGADGLRIDAVKHFNSGFSKSLADKLYQKKDIFLVGEWYGDDPGTANHLEKVRYANNSGVNVLDFDLNTVIRNVFGTFTQTMYDLNNMVNQTGNEYKYKENLITFIDNHDMSRFLSVNSNKANLHQALAFILTSRGTPSIYYGTEQYMAGGNDPYNRGMMPAFDTTTTAFKEVSTLAGLRRNNAAIQYGTTTQRWINNDVYIYERKFFNDVVLVAINRNTQSSYSISGLQTALPNGSYADYLSGLLGGNGISVSNGSVASFTLAPGAVSVWQYSTSASAPQIGSVAPNMGIPGNVVTIDGKGFGTTQGTVTFGGVTATVKSWTSNRIEVYVPNMAAGLTDVKVTAGGVSSNLYSYNILSGTQTSVVFTVKSAPPTNLGDKIYLTGNIPELGNWSTDTSGAVNNAQGPLLAPNYPDWFYVFSVPAGKTIQFKFFIKRADGTIQWENGSNHVATTPTGATGNITVTWQN

SEQ ID NO: 45089 - protein, 686 aa, Geobacillus stearothermophilus
SSSASVKGDVIYQIIIDRFYDGDTTNNNPAKSYGLYDPTKSKWKMYWGGDLEGVRQKLPYLKQLGVTTIWLSPVLDNLDTLAGTDNTGYHGYWTRDFKQIEEHFGNWTTFDTLVNDAHQNGIKVIVDFVPNHSTPFKANDSTFAEGGALYNNGTYMGNYFDDATKGYFHHNGDISNWXDRYEAQWKNFTDPAGFSLADLSQENGTIAQYLTDAAVQLVAHGADGLRIDAVKHFNSGFSKSLADKLYQKKDIFLVGEWYGDDPGTANHLEKVRYANNSGVNVLDFDLNTVIRNVFGTFTQTMYDLNNMVNQTGNEYKYKENLITFIDNHDMSRFLSVNSNKANLHQALAFILTSRGTPSIYYGTEQYMAGGNDPYNRGMMPAFDTTTTAFKEVSTLAGLRRNNAAIQYGTTTQRWINNDVYIYERKFFNDVVLVAINRNTQSSYSISGLQTALPNGSYADYLSGLLGGNGISVSNGSVASFTLAPGAVSVWQYSTSASAPQIGSVAPNMGIPGNVVTIDGKGFGTTQGTVTFGGVTATVKSWTSNRIEVYVPNMAAGLTDVKVTAGGVSSNLYSYNILSGTQTSVVFTVKSAPPTNLGDKIYLTGNIPELGNWSTDTSGAVNNAQGPLLAPNYPDWFYVFSVPAGKTIQFKFFIKRADGTIQWENGSNHVATTPTGATGNITVTWQN

SEQ ID NO: 45090 - protein, 686 aa, Geobacillus stearothermophilus
SSSASVKGDVIYQIIIDRFYDGDTTNNNPAKSYGLYDPTKSKWKMYWGGDLEGVRQKLPYLKQLGVTTIWLSPVLDNLDTLAGTDNTGYHGYWTRDFKQIEEHFGNWTTFDTLVNDAHQNGIKVIVDFVPNHSTPFKANDSTFAEGGALYNNGTYMGNYFDDATKGYFHHNGDISNWDDRYEAQWKNFTDPAGLSLADLSQENGTIAQYLTDAAVQLVAHGADGLRIDAVKHFNSGFSKSLADKLYQKKDIFLVGEWYGDDPGTANHLEKVRYANNSGVNVLDFDLNTVIRNVFGTFTQTMYDLNNMVNQTGNEYKYKENLITFIDNHDMSRFLSVNSNKANLHQALAFILTSRGTPSIYYGTEQYMAGGNDPYNRGMMPAFDTTTTAFKEVSTLAGLRRNNAAIQYGTTTQRWINNDVYIYERKFFNDVVLVAINRNTQSSYSISGLQTALPNGSYADYLSGLLGGNGISVSNGSVASFTLAPGAVSVWQYSTSASAPQIGSVAPNMGIPGNVVTIDGKGFGTTQGTVTFGGVTATVKSWTSNRIEVYVPNMAAGLTDVKVTAGGVSSNLYSYNILSGTQTSVVFTVKSAPPTNLGDKIYLTGNIPELGNWSTDTSGAVNNAQGPLLAPNYPDWFYVFSVPAGKTIQFKFFIKRADGTIQWENGSNHVATTPTGATGNITVTWQN

SEQ ID NO: 45091 - protein, 686 aa, Geobacillus stearothermophilus
SSSASVKGDVIYQIIIDRFYDGDTTNNNPAKSYGLYDPTKSKWKMYWGGDLEGVRQKLPYLKQLGVTTIWLSPVLDNLDTLAGTDNTGYHGYWTRDFKQIEEHFGNWTTFDTLVNDAHQNGIKVIVDFVPNHSTPFKANDSTFAEGGALYNNGTYMGNYFDDATKGYFHHNGDISNWDDRYEAQWKNFTDPQGFSLADLSQENGTIAQYLTDAAVQLVAHGADGLRIDAVKHFNSGFSKSLADKLYQKKDIFLVGEWYGDDPGTANHLEKVRYANNSGVNVLDFDLNTVIRNVFGTFTQTMYDLNNMVNQTGNEYKYKENLITFIDNHDMSRFLSVNSNKANLHQALAFILTSRGTPSIYYGTEQYMAGGNDPYNRGMMPAFDTTTTAFKEVSTLAGLRRNNAAIQYGTTTQRWINNDVYIYERKFFNDVVLVAINRNTQSSYSISGLQTALPNGSYADYLSGLLGGNGISVSNGSVASFTLAPGAVSVWQYSTSASAPQIGSVAPNMGIPGNVVTIDGKGFGTTQGTVTFGGVTATVKSWTSNRIEVYVPNMAAGLTDVKVTAGGVSSNLYSYNILSGTQTSVVFTVKSAPPTNLGDKIYLTGNIPELGNWSTDTSGAVNNAQGPLLAPNYPDWFYVFSVPAGKTIQFKFFIKRADGTIQWENGSNHVATTPTGATGNITVTWQN

SEQ ID NO: 45092 - protein, 686 aa, Geobacillus stearothermophilus
SSSASVKGDVIYQIIIDRFYDGDTTNNNPAKSYGLYDPTKSKWKMYWGGDLEGVRQKLPYLKQLGVTTIWLSPVLDNLDTLAGTDNTGYHGYWTRDFKQIEEHFGNWTTFDTLVNDAHQNGIKVIVDFVPNHSTPFKANDSTFAEGGALYNNGTYMGNYFDDATKGYFHHNGDISNWDDRYEAQWKNVTDPAGFSLADLSQENGTIAQYLTDAAVQLVAHGADGLRIDAVKHFNSGFSKSLADKLYQKKDIFLVGEWYGDDPGTANHLEKVRYANNSGVNVLDFDLNTVIRNVFGTFTQTMYDLNNMVNQTGNEYKYKENLITFIDNHDMSRFLSVNSNKANLHQALAFILTSRGTPSIYYGTEQYMAGGNDPYNRGMMPAFDTTTTAFKEVSTLAGLRRNNAAIQYGTTTQRWINNDVYIYERKFFNDVVLVAINRNTQSSYSISGLQTALPNGSYADYLSGLLGGNGISVSNGSVASFTLAPGAVSVWQYSTSASAPQIGSVAPNMGIPGNVVTIDGKGFGTTQGTVTFGGVTATVKSWTSNRIEVYVPNMAAGLTDVKVTAGGVSSNLYSYNILSGTQTSVVFTVKSAPPTNLGDKIYLTGNIPELGNWSTDTSGAVNNAQGPLLAPNYPDWFYVFSVPAGKTIQFKFFIKRADGTIQWENGSNHVATTPTGATGNITVTWQN

SEQ ID NO: 45093 - protein, 686 aa, Geobacillus stearothermophilus
SSSASVKGDVIYQIIIDRFYDGDTTNNNPAKSYGLYDPTKSKWKMYWGGDLEGVRQKLPYLKQLGVTTIWLSPVLDNLDTLAGTDNTGYHGYWTRDFKQIEEHFGNWTTFDTLVNDAHQNGIKVIVDFVPNHSTPFKANDSTFAEGGALYNNGTYMGNYFDDATKGYFHHNGDISNWDDRYEAQWKNFTDPAGFSLADLSQENGTIAQYLTDAAVQLVAHGADGLRIDAVKHFNSGFSKSLADKLYQKKDILLVGEWYGDDPGTANHLEKVRYANNSGVNVLDFDLNTVIRNVFGTFTQTMYDLNNMVNQTGNEYKYKENLITFIDNHDMSRFLSVNSNKANLHQALAFILTSRGTPSIYYGTEQYMAGGNDPYNRGMMPAFDTTTTAFKEVSTLAGLRRNNAAIQYGTTTQRWINNDVYIYERKFFNDVVLVAINRNTQSSYSISGLQTALPNGSYADYLSGLLGGNGISVSNGSVASFTLAPGAVSVWQYSTSASAPQIGSVAPNMGIPGNVVTIDGKGFGTTQGTVTFGGVTATVKSWTSNRIEVYVPNMAAGLTDVKVTAGGVSSNLYSYNILSGTQTSVVFTVKSAPPTNLGDKIYLTGNIPELGNWSTDTSGAVNNAQGPLLAPNYPDWFYVFSVPAGKTIQFKFFIKRADGTIQWENGSNHVATTPTGATGNITVTWQN

SEQ ID NO: 45094 - protein, 686 aa, Geobacillus stearothermophilus
SSSASVKGDVIYQIIIDRFYDGDTTNNNPAKSYGLYDPTKSKWKMYWGGDLEGVRQKLPYLKQLGVTTIWLSPVLDNLDTLAGTDNTGYHGYWTRDFKQIEEHFGNWTTFDTLVNDAHQNGIKVIVDFVPNHSTPFKANDSTFAEGGALYNNGTYMGNYFDDATKGYFHHNGDISNWDDRYEAQWKNFTDPAGFSLADLSQENGTIAQYLTDAAVQLVAHGADGLRIDAVKHFNSGFSKSLADKLYQKKDIFLVGEWYGDDPGTANHLEKVRYANNSGVNVLDFDLNPVIRNVFGTFTQTMYDLNNMVNQTGNEYKYKENLITFIDNHDMSRFLSVNSNKANLHQALAFILTSRGTPSIYYGTEQYMAGGNDPYNRGMMPAFDTTTTAFKEVSTLAGLRRNNAAIQYGTTTQRWINNDVYIYERKFFNDVVLVAINRNTQSSYSISGLQTALPNGSYADYLSGLLGGNGISVSNGSVASFTLAPGAVSVWQYSTSASAPQIGSVAPNMGIPGNVVTIDGKGFGTTQGTVTFGGVTATVKSWTSNRIEVYVPNMAAGLTDVKVTAGGVSSNLYSYNILSGTQTSVVFTVKSAPPTNLGDKIYLTGNIPELGNWSTDTSGAVNNAQGPLLAPNYPDWFYVFSVPAGKTIQFKFFIKRADGTIQWENGSNHVATTPTGATGNITVTWQN

SEQ ID NO: 45095 - protein, 686 aa, Geobacillus stearothermophilus
SSSASVKGDVIYQIIIDRFYDGDTTNNNPAKSYGLYDPTKSKWKMYWGGDLEGVRQKLPYLKQLGVTTIWLSPVLDNLDTLAGTDNTGYHGYWTRDFKQIEEHFGNWTTFDTLVNDAHQNGIKVIVDFVPNHSTPFKANDSTFAEGGALYNNGTYMGNYFDDATKGYFHHNGDISNWDDRYEAQWKNFTDPAGFSLADLSQENGTIAQYLTDAAVQLVAHGADGLRIDAVKHFNSGFSKSLADKLYQKKDIFLVGEWYXDDPGTANHLEKVRYANNSGVNVLDFDLNTVIRNVFGTFTQTMYDLNNMVNQTGNEYKYKENLITFIDNHDMSRFLSVNSNKANLHQALAFILTSRGTPSIYYGTEQYMAGGNDPYNRGMMPAFDTTTTAFKEVSTLAGLRRNNAAIQYGTTTQRWINNDVYIYERKFFNDVVLVAINRNTQSSYSISGLQTALPNGSYADYLSGLLGGNGISVSNGSVASFTLAPGAVSVWQYSTSASAPQIGSVAPNMGIPGNVVTIDGKGFGTTQGTVTFGGVTATVKSWTSNRIEVYVPNMAAGLTDVKVTAGGVSSNLYSYNILSGTQTSVVFTVKSAPPTNLGDKIYLTGNIPELGNWSTDTSGAVNNAQGPLLAPNYPDWFYVFSVPAGKTIQFKFFIKRADGTIQWENGSNHVATTPTGATGNITVTWQN

SEQ ID NO: 45096 - protein, 686 aa, Geobacillus stearothermophilus
SSSASVKGDVIYQIIIDRFYDGDTTNNNPAKSYGLYDPTKSKWKMYWGGDLEGVRQKLPYLKQLGVTTIWLSPVLDNLDTLAGTDNTGYMGYWTRDFKQIEEHFGNWTTFDTLVNDAHQNGIKVIVDFVPNHSTPFKANDSTFAEGGALYNNGTYMGNYFDDATKGYFHHNGDISNWDDRYEAQWKNFTDPAGFSLADLSQENGTIAQYLTDAAVQLVAHGADGLRIDAVKHFNSGFSKSLADKLYQKKDIFLVGEWYGDDPGTANHLEKVRYANNSGVNVLDFDLNTVIRNVFGTFTQTMYDLNNMVNQTGNEYKYKENLITFIDNHDMSRFLSVNSNKANLHQALAFILTSRGTPSIYYGTEQYMAGGNDPYNRGMMPAFDTTTTAFKEVSTLAGLRRNNAAIQYGTTTQRWINNDVYIYERKFFNDVVLVAINRNTQSSYSISGLQTALPNGSYADYLSGLLGGNGISVSNGSVASFTLAPGAVSVWQYSTSASAPQIGSVAPNMGIPGNVVTIDGKGFGTTQGTVTFGGVTATVKSWTSNRIEVYVPNMAAGLTDVKVTAGGVSSNLYSYNILSGTQTSVVFTVKSAPPTNLGDKIYLTGNIPELGNWSTDTSGAVNNAQGPLLAPNYPDWFYVFSVPAGKTIQFKFFIKRADGTIQWENGSNHVATTPTGATGNITVTWQN

SEQ ID NO: 45097 - protein, 686 aa, Geobacillus stearothermophilus
SSSASVKGDVIYQIIIDRFYDGDTTNNNPAKSYGLYDPTKSKWKMYWGGDLEGVRQKLPYLKQLGVTTIWLSPVLDNLDTLAGTDNTGYHGYWTRDFKQIEEHFGNWTTFDTLVNDAHQNGIKVIVDFVPNHSTPFKANDSTFAEGGALYNNGTYMGNYFDDATKGYFHHNGDISLWDDRYEAQWKNFTDPAGFSLADLSQENGTIAQYLTDAAVQLVAHGADGLRIDAVKHFNSGFSKSLADKLYQKKDIFLVGEWYGDDPGTANHLEKVRYANNSGVNVLDFDLNTVIRNVFGTFTQTMYDLNNMVNQTGNEYKYKENLITFIDNHDMSRFLSVNSNKANLHQALAFILTSRGTPSIYYGTEQYMAGGNDPYNRGMMPAFDTTTTAFKEVSTLAGLRRNNAAIQYGTTTQRWINNDVYIYERKFFNDVVLVAINRNTQSSYSISGLQTALPNGSYADYLSGLLGGNGISVSNGSVASFTLAPGAVSVWQYSTSASAPQIGSVAPNMGIPGNVVTIDGKGFGTTQGTVTFGGVTATVKSWTSNRIEVYVPNMAAGLTDVKVTAGGVSSNLYSYNILSGTQTSVVFTVKSAPPTNLGDKIYLTGNIPELGNWSTDTSGAVNNAQGPLLAPNYPDWFYVFSVPAGKTIQFKFFIKRADGTIQWENGSNHVATTPTGATGNITVTWQN

SEQ ID NO: 45098 - protein, 686 aa, Geobacillus stearothermophilus
SSSASVKGDVIYQIIIDRFYDGDTTNNNPAKSYGLYDPTKSKWKMYWGGDLEGVRQKLPYLKQLGVTTIWLSPVLDNLDTLAGTDNTGYHGYWTRDFKQIEEHFGNWTTFDTLVNDAHQNGIKVIVDFVPNHSTPFKANDSTFAEGGALYNNGTYMGNYFDDATKGYFHHNGDISNWDDRYEAQWKNFTDPAGFSLADLSQENGTIAQYLTDAAVQLVAHGADGLRIDAVKHFNSGFSKSLADKLYQKKDIFLVGEWYGDDPGTANHLEKVRYANNSGVNVLDFDLNTVIRNVFGTFTQTMYDLNNMVNQTGNEYKYKENLITFIDNHDMSRFLSVNSNKANLHQALAFILTSRGTPSIYYGTEQYMAGGNQPYNRGMMPAFDTTTTAFKEVSTLAGLRRNNAAIQYGTTTQRWINNDVYIYERKFFNDVVLVAINRNTQSSYSISGLQTALPNGSYADYLSGLLGGNGISVSNGSVASFTLAPGAVSVWQYSTSASAPQIGSVAPNMGIPGNVVTIDGKGFGTTQGTVTFGGVTATVKSWTSNRIEVYVPNMAAGLTDVKVTAGGVSSNLYSYNILSGTQTSVVFTVKSAPPTNLGDKIYLTGNIPELGNWSTDTSGAVNNAQGPLLAPNYPDWFYVFSVPAGKTIQFKFFIKRADGTIQWENGSNHVATTPTGATGNITVTWQN

SEQ ID NO: 45099 - protein, 686 aa, Geobacillus stearothermophilus
SSSASVKGDVIYQIIIDRFYDGDTTNNNPAKSYGLYDPTKSKWKMYWGGDLEGVRQKLPYLKQLGVTTIWLSPVLDNLDTLAGTDNTGYHGYWTRDFKQIEEHFGNWTTFDTLVNDAHQNGIKVIVDFVPNHSTPFKANDSTFAEGGALYNNGTYMGNYFDDATKGYFHHNGDISNWDDRYEAQWKNXTDPAGFSLADLSQENGTIAQYLTDAAVQLVAHGADGLRIDAVKHFNSGFSKSLADKLYQKKDIFLVGEWYGDDPGTANHLEKVRYANNSGVNVLDFDLNTVIRNVFGTFTQTMYDLNNMVNQTGNEYKYKENLITFIDNHDMSRFLSVNSNKANLHQALAFILTSRGTPSIYYGTEQYMAGGNDPYNRGMMPAFDTTTTAFKEVSTLAGLRRNNAAIQYGTTTQRWINNDVYIYERKFFNDVVLVAINRNTQSSYSISGLQTALPNGSYADYLSGLLGGNGISVSNGSVASFTLAPGAVSVWQYSTSASAPQIGSVAPNMGIPGNVVTIDGKGFGTTQGTVTFGGVTATVKSWTSNRIEVYVPNMAAGLTDVKVTAGGVSSNLYSYNILSGTQTSVVFTVKSAPPTNLGDKIYLTGNIPELGNWSTDTSGAVNNAQGPLLAPNYPDWFYVFSVPAGKTIQFKFFIKRADGTIQWENGSNHVATTPTGATGNITVTWQN

SEQ ID NO: 45100 - protein, 687 aa, Geobacillus stearothermophilus
SSSASVKGDVIYQIIIDRFYDGDTTNNNPAKSYGLYDPTKSKWKMYWGGDLEGVRQKLPYLKQLGVTTIWLSPVLDNLDTLAGTDVGTGYHGYWTRDFKQIEEHFGNWTTFDTLVNDAHQNGIKVIVDFVPNHSTPFKANDSTFAEGGALYNNGTYMGNYFDDATKGYFHHNGDISNWDDRYEAQWKNFTDPAGFSLADLSQENGTIAQYLTDAAVQLVAHGADGLRIDAVKHFNSGFSKSLADKLYQKKDIFLVGEWYGDDPGTANHLEKVRYANNSGVNVLDFDLNTVIRNVFGTFTQTMYDLNNMVNQTGNEYKYKENLITFIDNHDMSRFLSVNSNKANLHQALAFILTSRGTPSIYYGTEQYMAGGNDPYNRGMMPAFDTTTTAFKEVSTLAGLRRNNAAIQYGTTTQRWINNDVYIYERKFFNDVVLVAINRNTQSSYSISGLQTALPNGSYADYLSGLLGGNGISVSNGSVASFTLAPGAVSVWQYSTSASAPQIGSVAPNMGIPGNVVTIDGKGFGTTQGTVTFGGVTATVKSWTSNRIEVYVPNMAAGLTDVKVTAGGVSSNLYSYNILSGTQTSVVFTVKSAPPTNLGDKIYLTGNIPELGNWSTDTSGAVNNAQGPLLAPNYPDWFYVFSVPAGKTIQFKFFIKRADGTIQWENGSNHVATTPTGATGNITVTWQN

SEQ ID NO: 45101 - protein, 686 aa, Geobacillus stearothermophilus
SSSASVKGDVIYQIIIDRFYDGDTTNNNPAKSYGLYDPTKSKWKMYWGGDLEGVRQKLPYLKQLGVTTIWLSPVLDNLDTLAGTDNTGYHGYWTRDFKQIEEHFGNWTTFDTLVNDAHQNGIKVIVDFVPNHSTPFKANDSTFAEGGALYNNGTYMGNYFDDATKGYFHHNGDISNWDDRYEAQWKNFMDPAGFSLADLSQENGTIAQYLTDAAVQLVAHGADGLRIDAVKHFNSGFSKSLADKLYQKKDIFLVGEWYGDDPGTANHLEKVRYANNSGVNVLDFDLNTVIRNVFGTFTQTMYDLNNMVNQTGNEYKYKENLITFIDNHDMSRFLSVNSNKANLHQALAFILTSRGTPSIYYGTEQYMAGGNDPYNRGMMPAFDTTTTAFKEVSTLAGLRRNNAAIQYGTTTQRWINNDVYIYERKFFNDVVLVAINRNTQSSYSISGLQTALPNGSYADYLSGLLGGNGISVSNGSVASFTLAPGAVSVWQYSTSASAPQIGSVAPNMGIPGNVVTIDGKGFGTTQGTVTFGGVTATVKSWTSNRIEVYVPNMAAGLTDVKVTAGGVSSNLYSYNILSGTQTSVVFTVKSAPPTNLGDKIYLTGNIPELGNWSTDTSGAVNNAQGPLLAPNYPDWFYVFSVPAGKTIQFKFFIKRADGTIQWENGSNHVATTPTGATGNITVTWQN

SEQ ID NO: 45102 - protein, 686 aa, Geobacillus stearothermophilus
SSSASVKGDVIYQIIIDRFYDGDTTNNNPAKSYGLYDPTKSKWKMYWGGDLEGVRQKLPYLKQLGVTTIWLSPVLDNLDTLAGTDNTGYHGYWTRDFKQIEEHFGNWTTFDTLVNDAHQNGIKVIVDFVPNHSTPFKANDSTFAEGGALYNNGTYMGNYFDDATKGYFHHNGDISNWDDRYEAQWKNFTDPAGFSLADLSQENGTIAQYLTDAAVQLVAHGADGLRIDAVKHFNSGFSKSLADKLYQKKDIFLVGEWYGDDPGTANHLEKVRYANNSGVNVLDFDLNTVVRNVFGTFTQTMYDLNNMVNQTGNEYKYKENLITFIDNHDMSRFLSVNSNKANLHQALAFILTSRGTPSIYYGTEQYMAGGNDPYNRGMMPAFDTTTTAFKEVSTLAGLRRNNAAIQYGTTTQRWINNDVYIYERKFFNDVVLVAINRNTQSSYSISGLQTALPNGSYADYLSGLLGGNGISVSNGSVASFTLAPGAVSVWQYSTSASAPQIGSVAPNMGIPGNVVTIDGKGFGTTQGTVTFGGVTATVKSWTSNRIEVYVPNMAAGLTDVKVTAGGVSSNLYSYNILSGTQTSVVFTVKSAPPTNLGDKIYLTGNIPELGNWSTDTSGAVNNAQGPLLAPNYPDWFYVFSVPAGKTIQFKFFIKRADGTIQWENGSNHVATTPTGATGNITVTWQN

SEQ ID NO: 45103 - protein, 686 aa, Geobacillus stearothermophilus
SSSASVKGDVIYQIIIDRFYDGDTTNNNPAKSYGLYDPTKSKWKMYWGGDLEGVRQKLPYLKQLGVTTIWLSPVLDNLDTLAGTDNTGYHGYWTRDFKQIEEHFGNWTTFDTLVNDAHQNGIKVIVDFVPNHSTPFKANDSTFAEGGALYNNGTYMGNYFDDATKGYFHHNGDISNWDDRYEAQWKNFTDPAGYSLADLSQENGTIAQYLTDAAVQLVAHGADGLRIDAVKHFNSGFSKSLADKLYQKKDIFLVGEWYGDDPGTANHLEKVRYANNSGVNVLDFDLNTVIRNVFGTFTQTMYDLNNMVNQTGNEYKYKENLITFIDNHDMSRFLSVNSNKANLHQALAFILTSRGTPSIYYGTEQYMAGGNDPYNRGMMPAFDTTTTAFKEVSTLAGLRRNNAAIQYGTTTQRWINNDVYIYERKFFNDVVLVAINRNTQSSYSISGLQTALPNGSYADYLSGLLGGNGISVSNGSVASFTLAPGAVSVWQYSTSASAPQIGSVAPNMGIPGNVVTIDGKGFGTTQGTVTFGGVTATVKSWTSNRIEVYVPNMAAGLTDVKVTAGGVSSNLYSYNILSGTQTSVVFTVKSAPPTNLGDKIYLTGNIPELGNWSTDTSGAVNNAQGPLLAPNYPDWFYVFSVPAGKTIQFKFFIKRADGTIQWENGSNHVATTPTGATGNITVTWQN

SEQ ID NO: 45104 - protein, 686 aa, Geobacillus stearothermophilus
SSSASVKGDVIYQIIIDRFYDGDTTNNNPAKSYGLYDPTKSKWKMYWGGDLEGVRQKLPYLKQLGVTTIWLSPVLDNLDTLAGTDNTGYHGYWTRDFKQIEEHFGNWTTFDTLVNDAHQNGIKVIVDFVPNHSTPFKANDSTFAEGGALYNNGTYMGNYFDDATKGYFHHNGDISNWDDRYEAQWKNFTDPAGFSLADLSQENGTIAQYLTDAAVQLVAHGADGLRIDAVKHFNSGFSKSLADKLYQKKDIFLVGEWYGDDPGTANHLEKVRYANNSGVNVLDFDLNTVIRNVFGTFTQTMYDLNNMVNQTGNEYKYKENLITFIDNHDMSRFLSVNSNKANLHQALAFILTSRGTPSIYYGTEQYMAGGKDPYNRGMMPAFDTTTTAFKEVSTLAGLRRNNAAIQYGTTTQRWINNDVYIYERKFFNDVVLVAINRNTQSSYSISGLQTALPNGSYADYLSGLLGGNGISVSNGSVASFTLAPGAVSVWQYSTSASAPQIGSVAPNMGIPGNVVTIDGKGFGTTQGTVTFGGVTATVKSWTSNRIEVYVPNMAAGLTDVKVTAGGVSSNLYSYNILSGTQTSVVFTVKSAPPTNLGDKIYLTGNIPELGNWSTDTSGAVNNAQGPLLAPNYPDWFYVFSVPAGKTIQFKFFIKRADGTIQWENGSNHVATTPTGATGNITVTWQN

SEQ ID NO: 45105 - protein, 686 aa, Geobacillus stearothermophilus
SSSASVKGDVIYQIIIDRFYDGDTTNNNPAKSYGLYDPTKSKWKMYWGGDLEGVRQKLPYLKQLGVTTIWLSPVLDNLDTLAGTDNTGYHGYWTRDFKQIEEHFGNWTTFDTLVNDAHQNGIKVIVDFVPNHSTPFKANDSTFAEGGALYNNGTYMGNYFDDATKGYFHHNVDISNWDDRYEAQWKNFTDPAGFSLADLSQENGTIAQYLTDAAVQLVAHGADGLRIDAVKHFNSGFSKSLADKLYQKKDIFLVGEWYGDDPGTANHLEKVRYANNSGVNVLDFDLNTVIRNVFGTFTQTMYDLNNMVNQTGNEYKYKENLITFIDNHDMSRFLSVNSNKANLHQALAFILTSRGTPSIYYGTEQYMAGGNDPYNRGMMPAFDTTTTAFKEVSTLAGLRRNNAAIQYGTTTQRWINNDVYIYERKFFNDVVLVAINRNTQSSYSISGLQTALPNGSYADYLSGLLGGNGISVSNGSVASFTLAPGAVSVWQYSTSASAPQIGSVAPNMGIPGNVVTIDGKGFGTTQGTVTFGGVTATVKSWTSNRIEVYVPNMAAGLTDVKVTAGGVSSNLYSYNILSGTQTSVVFTVKSAPPTNLGDKIYLTGNIPELGNWSTDTSGAVNNAQGPLLAPNYPDWFYVFSVPAGKTIQFKFFIKRADGTIQWENGSNHVATTPTGATGNITVTWQN

SEQ ID NO: 45106 - protein, 686 aa, Geobacillus stearothermophilus
SSSASVKGDVIYQIIIDRFYDGDTTNNNPAKSYGLYDPTKSKWKMYWGGDLEGVRQKLPYLKQLGVTTIWLSPVLDNLDTLAGTDNTGYHGYWTRDFKQIEEHFGNWTTFDTLVNDAHQNGIKVIVDFVPNHSTPFKANDSTFAEGGALYNNGTYMGNYFDDATKGYFHHNGDISNWDDRYEAQWKNFTDPAGFSLADLSQENGTIAQYLTDAAVQLVAHGADGLRIDAVKHFNSGFSKSLADKLYQKKDIFLVGEWWGDDPGTANHLEKVRYANNSGVNVLDFDLNTVIRNVFGTFTQTMYDLNNMVNQTGNEYKYKENLITFIDNHDMSRFLSVNSNKANLHQALAFILTSRGTPSIYYGTEQYMAGGNDPYNRGMMPAFDTTTTAFKEVSTLAGLRRNNAAIQYGTTTQRWINNDVYIYERKFFNDVVLVAINRNTQSSYSISGLQTALPNGSYADYLSGLLGGNGISVSNGSVASFTLAPGAVSVWQYSTSASAPQIGSVAPNMGIPGNVVTIDGKGFGTTQGTVTFGGVTATVKSWTSNRIEVYVPNMAAGLTDVKVTAGGVSSNLYSYNILSGTQTSVVFTVKSAPPTNLGDKIYLTGNIPELGNWSTDTSGAVNNAQGPLLAPNYPDWFYVFSVPAGKTIQFKFFIKRADGTIQWENGSNHVATTPTGATGNITVTWQN

SEQ ID NO: 45107 - protein, 686 aa, Geobacillus stearothermophilus
SSSASVKGDVIYQIIIDRFYDGDTTNNNPAKSYGLYDPTKSKWKMYWGGDLEGVRQKLPYLKQLGVTTIWLSPVLDNLDTLAGTDNTGYHGYWTRDFKQIEEHFGNWTTFDTLVNDAHQNGIKVIVDFVPNHSTPFKANDSTFAEGGALYNNGTYMGNYFDDATKGYFHHNGDISNWDDRYEAQWKNFTDPAGFSLADLSQENGTIAQYLTDAAVQLVAHGADGLRIDAVKHFNSGFSKSLADKLYQKKDIFLVGEWYGDDPGTANHLEKVRYANNSGVNVLDFDLNTVIRNVFGTFTQTMYDLNNMVNQTGNEYKYKENLITFIDNHDMSRFLSVNSNKANLHQALAFILTSRGTPSIYYGTEQYMAGGFDPYNRGMMPAFDTTTTAFKEVSTLAGLRRNNAAIQYGTTTQRWINNDVYIYERKFFNDVVLVAINRNTQSSYSISGLQTALPNGSYADYLSGLLGGNGISVSNGSVASFTLAPGAVSVWQYSTSASAPQIGSVAPNMGIPGNVVTIDGKGFGTTQGTVTFGGVTATVKSWTSNRIEVYVPNMAAGLTDVKVTAGGVSSNLYSYNILSGTQTSVVFTVKSAPPTNLGDKIYLTGNIPELGNWSTDTSGAVNNAQGPLLAPNYPDWFYVFSVPAGKTIQFKFFIKRADGTIQWENGSNHVATTPTGATGNITVTWQN

SEQ ID NO: 45108 - protein, 686 aa, Geobacillus stearothermophilus
SSSASVKGDVIYQIIIDRFYDGDTTNNNPAKSYGLYDPTKSKWKMYWGGDLEGVRQKLPYLKQLGVTTIWLSPVLDNLDTLAGTDNTGYHGYWTRDFKQIEEHFGNWTTFDTLVNDAHQNGIKVIVDFVPNHSTPFKANDSTFAEGGALYNNGTYMGNYFDDATKGYFHHNGDISNWDDRYEAQWKNGTDPAGFSLADLSQENGTIAQYLTDAAVQLVAHGADGLRIDAVKHFNSGFSKSLADKLYQKKDIFLVGEWYGDDPGTANHLEKVRYANNSGVNVLDFDLNTVIRNVFGTFTQTMYDLNNMVNQTGNEYKYKENLITFIDNHDMSRFLSVNSNKANLHQALAFILTSRGTPSIYYGTEQYMAGGNDPYNRGMMPAFDTTTTAFKEVSTLAGLRRNNAAIQYGTTTQRWINNDVYIYERKFFNDVVLVAINRNTQSSYSISGLQTALPNGSYADYLSGLLGGNGISVSNGSVASFTLAPGAVSVWQYSTSASAPQIGSVAPNMGIPGNVVTIDGKGFGTTQGTVTFGGVTATVKSWTSNRIEVYVPNMAAGLTDVKVTAGGVSSNLYSYNILSGTQTSVVFTVKSAPPTNLGDKIYLTGNIPELGNWSTDTSGAVNNAQGPLLAPNYPDWFYVFSVPAGKTIQFKFFIKRADGTIQWENGSNHVATTPTGATGNITVTWQN

SEQ ID NO: 45109 - protein, 686 aa, Geobacillus stearothermophilus
SSSASVKGDVIYQIIIDRFYDGDTTNNNPAKSYGLYDPTKSKWKMYWGGDLEGVRQKLPYLKQLGVTTIWLSPVLDNLDTLAGTDNTGYHGYWTRDFKQIEEHFGNWTTFDTLVNDAHQNGIKVIVDFVPNHSTPFKANDSTFAEGGALYNNGTYMGNYFDDATKGYFHHNGDISNWDDRYEAQWKNFTDPAGFSLADLSQENGTIAQYLTDAAVQLVAHGADGLRIDAVKHSNSGFSKSLADKLYQKKDIFLVGEWYGDDPGTANHLEKVRYANNSGVNVLDFDLNTVIRNVFGTFTQTMYDLNNMVNQTGNEYKYKENLITFIDNHDMSRFLSVNSNKANLHQALAFILTSRGTPSIYYGTEQYMAGGNDPYNRGMMPAFDTTTTAFKEVSTLAGLRRNNAAIQYGTTTQRWINNDVYIYERKFFNDVVLVAINRNTQSSYSISGLQTALPNGSYADYLSGLLGGNGISVSNGSVASFTLAPGAVSVWQYSTSASAPQIGSVAPNMGIPGNVVTIDGKGFGTTQGTVTFGGVTATVKSWTSNRIEVYVPNMAAGLTDVKVTAGGVSSNLYSYNILSGTQTSVVFTVKSAPPTNLGDKIYLTGNIPELGNWSTDTSGAVNNAQGPLLAPNYPDWFYVFSVPAGKTIQFKFFIKRADGTIQWENGSNHVATTPTGATGNITVTWQN

SEQ ID NO: 45110 - protein, 686 aa, Geobacillus stearothermophilus
SSSASVKGDVIYQIIIDRFYDGDTTNNNPAKSYGLYDPTKSKWKMYWGGDLEGVRQKLPYLKQLGVTTIWLSPVLDNLDTLAGTDNTGYHGYWTRDFKQIEEHFGNWTTFDTLVNDAHQNGIKVIVDFVPNHSTPFKANDSTFAEGGALYNNGTYMGNYFDDATKGYFHHNGDISNWDDRYEAQWKNFTDPAGFSLAGLSQENGTIAQYLTDAAVQLVAHGADGLRIDAVKHFNSGFSKSLADKLYQKKDIFLVGEWYGDDPGTANHLEKVRYANNSGVNVLDFDLNTVIRNVFGTFTQTMYDLNNMVNQTGNEYKYKENLITFIDNHDMSRFLSVNSNKANLHQALAFILTSRGTPSIYYGTEQYMAGGNDPYNRGMMPAFDTTTTAFKEVSTLAGLRRNNAAIQYGTTTQRWINNDVYIYERKFFNDVVLVAINRNTQSSYSISGLQTALPNGSYADYLSGLLGGNGISVSNGSVASFTLAPGAVSVWQYSTSASAPQIGSVAPNMGIPGNVVTIDGKGFGTTQGTVTFGGVTATVKSWTSNRIEVYVPNMAAGLTDVKVTAGGVSSNLYSYNILSGTQTSVVFTVKSAPPTNLGDKIYLTGNIPELGNWSTDTSGAVNNAQGPLLAPNYPDWFYVFSVPAGKTIQFKFFIKRADGTIQWENGSNHVATTPTGATGNITVTWQN

SEQ ID NO: 45111 - protein, 686 aa, Geobacillus stearothermophilus
SSSASVKGDVIYQIIIDRFYDGDTTNNNPAKSYGLYDPTKSKWKMYWGGDLEGVRQKLPYLKQLGVTTIWLSPVLDNLDTLAGTDNTGYHGYWTRDFKQIEEHFGNWTTFDTLVNDAHQNGIKVIVDFVPNHSTPFKANDSTFAEGGALYNNGTYMGNYFDDATKGYFHHNGDISNWDDRYEAQWKNFTDPRGFSLADLSQENGTIAQYLTDAAVQLVAHGADGLRIDAVKHFNSGFSKSLADKLYQKKDIFLVGEWYGDDPGTANHLEKVRYANNSGVNVLDFDLNTVIRNVFGTFTQTMYDLNNMVNQTGNEYKYKENLITFIDNHDMSRFLSVNSNKANLHQALAFILTSRGTPSIYYGTEQYMAGGNDPYNRGMMPAFDTTTTAFKEVSTLAGLRRNNAAIQYGTTTQRWINNDVYIYERKFFNDVVLVAINRNTQSSYSISGLQTALPNGSYADYLSGLLGGNGISVSNGSVASFTLAPGAVSVWQYSTSASAPQIGSVAPNMGIPGNVVTIDGKGFGTTQGTVTFGGVTATVKSWTSNRIEVYVPNMAAGLTDVKVTAGGVSSNLYSYNILSGTQTSVVFTVKSAPPTNLGDKIYLTGNIPELGNWSTDTSGAVNNAQGPLLAPNYPDWFYVFSVPAGKTIQFKFFIKRADGTIQWENGSNHVATTPTGATGNITVTWQN

SEQ ID NO: 45112 - protein, 686 aa, Geobacillus stearothermophilus
SSSASVKGDVIYQIIIDRFYDGDTTNNNPAKSYGLYDPTKSKWKMYWGGDLEGVRQKLPYLKQLGVTTIWLSPVLDNLDTLAGTDNTGYHGYWTRDFKQIEEHFGNWTTFDTLVNDAHQNGIKVIVDFVPNHSTPFKANDSTFAEGGALYNNGTYMGNYFDDATKGYFHHNGDISNWDDRYEAQWKNITDPAGFSLADLSQENGTIAQYLTDAAVQLVAHGADGLRIDAVKHFNSGFSKSLADKLYQKKDIFLVGEWYGDDPGTANHLEKVRYANNSGVNVLDFDLNTVIRNVFGTFTQTMYDLNNMVNQTGNEYKYKENLITFIDNHDMSRFLSVNSNKANLHQALAFILTSRGTPSIYYGTEQYMAGGNDPYNRGMMPAFDTTTTAFKEVSTLAGLRRNNAAIQYGTTTQRWINNDVYIYERKFFNDVVLVAINRNTQSSYSISGLQTALPNGSYADYLSGLLGGNGISVSNGSVASFTLAPGAVSVWQYSTSASAPQIGSVAPNMGIPGNVVTIDGKGFGTTQGTVTFGGVTATVKSWTSNRIEVYVPNMAAGLTDVKVTAGGVSSNLYSYNILSGTQTSVVFTVKSAPPTNLGDKIYLTGNIPELGNWSTDTSGAVNNAQGPLLAPNYPDWFYVFSVPAGKTIQFKFFIKRADGTIQWENGSNHVATTPTGATGNITVTWQN

SEQ ID NO: 45113 - protein, 686 aa, Geobacillus stearothermophilus
SSSASVKGDVIYQIIIDRFYDGDTTNNNPAKSYGLYDPTKSKWKMYWGGDLEGVRQKLPYLKQLGVTTIWLSPVLDNLDTLAGTDNTGYHGYWTRDFKQIEEHFGNWTTFDTLVNDAHQNGIKVIVDFVPNHSTPFKANDSTFAEGGALYNNGTYMGNYFDDATKGYFHHNGDISNWDDRYEAQWKNTTDPAGFSLADLSQENGTIAQYLTDAAVQLVAHGADGLRIDAVKHFNSGFSKSLADKLYQKKDIFLVGEWYGDDPGTANHLEKVRYANNSGVNVLDFDLNTVIRNVFGTFTQTMYDLNNMVNQTGNEYKYKENLITFIDNHDMSRFLSVNSNKANLHQALAFILTSRGTPSIYYGTEQYMAGGNDPYNRGMMPAFDTTTTAFKEVSTLAGLRRNNAAIQYGTTTQRWINNDVYIYERKFFNDVVLVAINRNTQSSYSISGLQTALPNGSYADYLSGLLGGNGISVSNGSVASFTLAPGAVSVWQYSTSASAPQIGSVAPNMGIPGNVVTIDGKGFGTTQGTVTFGGVTATVKSWTSNRIEVYVPNMAAGLTDVKVTAGGVSSNLYSYNILSGTQTSVVFTVKSAPPTNLGDKIYLTGNIPELGNWSTDTSGAVNNAQGPLLAPNYPDWFYVFSVPAGKTIQFKFFIKRADGTIQWENGSNHVATTPTGATGNITVTWQN

SEQ ID NO: 45114 - protein, 686 aa, Geobacillus stearothermophilus
SSSASVKGDVIYQIIIDRFYDGDTTNNNPAKSYGLYDPTKSKWKMYWGGDLEGVRQKLPYLKQLGVTTIWLSPVLDNLDTLAGTDNTGYHGYWTRDFKQIEEHFGNWTTFDTLVNDAHQNGIKVIVDFVPNHSTPFKANDSTFAEGGALYNNGTYMGNYFDDATKGYFHHNGDISNWDDRYEAQWKNFTDPAGFSLADLSQENGTIAQYLTDAAVQLVAHGADGLRIDAVKXFNSGFSKSLADKLYQKKDIFLVGEWYGDDPGTANHLEKVRYANNSGVNVLDFDLNTVIRNVFGTFTQTMYDLNNMVNQTGNEYKYKENLITFIDNHDMSRFLSVNSNKANLHQALAFILTSRGTPSIYYGTEQYMAGGNDPYNRGMMPAFDTTTTAFKEVSTLAGLRRNNAAIQYGTTTQRWINNDVYIYERKFFNDVVLVAINRNTQSSYSISGLQTALPNGSYADYLSGLLGGNGISVSNGSVASFTLAPGAVSVWQYSTSASAPQIGSVAPNMGIPGNVVTIDGKGFGTTQGTVTFGGVTATVKSWTSNRIEVYVPNMAAGLTDVKVTAGGVSSNLYSYNILSGTQTSVVFTVKSAPPTNLGDKIYLTGNIPELGNWSTDTSGAVNNAQGPLLAPNYPDWFYVFSVPAGKTIQFKFFIKRADGTIQWENGSNHVATTPTGATGNITVTWQN

SEQ ID NO: 45115 - protein, 686 aa, Bacillus sp.
SSSASVKGDVIYQIIIDRFYDGDTTNNNPAKSYGLYDPTKSKWKMYWGGDLEGVRQKLPYLKQLGVTTIWLSPVLDNLDTLAGTDNTGYHGYWTRDFKQIEEHFGNWTTFDTLVNDAHQNGIKVIVDFVPNHSTPFKANDSTFAEGGALYNNGTYMGNYFDDATKGYFHHNGDISNWDDRYEAQWKNFTDPAGFSLADLSQENGTIAQYLTDAAVQLVAHGADGLRIDVVKHFNSGFSKSLADKLYQKKDIFLVGEWYGDDPGTANHLEKVRYANNSGVNVLDFDLNTVIRNVFGTFTQTMYDLNNMVNQTGNEYKYKENLITFIDNHDMSRFLSVNSNKANLHQALAFILTSRGTPSIYYGTEQYMAGGNDPYNRGMMPAFDTTTTAFKEVSTLAGLRRNNAAIQYGTTTQRWINNDVYIYERKFFNDVVLVAINRNTQSSYSISGLQTALPNGSYADYLSGLLGGNGISVSNGSVASFTLAPGAVSVWQYSTSASAPQIGSVAPNMGIPGNVVTIDGKGFGTTQGTVTFGGVTATVKSWTSNRIEVYVPNMAAGLTDVKVTAGGVSSNLYSYNILSGTQTSVVFTVKSAPPTNLGDKIYLTGNIPELGNWSTDTSGAVNNAQGPLLAPNYPDWFYVFSVPAGKTIQFKFFIKRADGTIQWENGSNHVATTPTGATGNITVTWQN

SEQ ID NO: 45116 - protein, 686 aa, Geobacillus stearothermophilus
SSSASVKGDVIYQIIIDRFYDGDTTNNNPAKSYGLYDPTKSKWKMYWGGDLEGVRQKLPYLKQLGVTTIWLSPVLDNLDTLAGTDNTGYHGYWTRDFKQIEEHFGNWTTFDTLVNDAHQNGIKVIVDFVPNHSTPFKANDSTFAEGGALYNNGTYMGNYFDDATKGYFHHNGDISNWDDRYEAQWKNFTDPAGFSLADLSQENGTIAQYLTDAAVQLVAHGADGLRIDAVKHFNSGFSKSLADKLYQKKDIFLVGEWYGDDPGTAYHLEKVRYANNSGVNVLDFDLNTVIRNVFGTFTQTMYDLNNMVNQTGNEYKYKENLITFIDNHDMSRFLSVNSNKANLHQALAFILTSRGTPSIYYGTEQYMAGGNDPYNRGMMPAFDTTTTAFKEVSTLAGLRRNNAAIQYGTTTQRWINNDVYIYERKFFNDVVLVAINRNTQSSYSISGLQTALPNGSYADYLSGLLGGNGISVSNGSVASFTLAPGAVSVWQYSTSASAPQIGSVAPNMGIPGNVVTIDGKGFGTTQGTVTFGGVTATVKSWTSNRIEVYVPNMAAGLTDVKVTAGGVSSNLYSYNILSGTQTSVVFTVKSAPPTNLGDKIYLTGNIPELGNWSTDTSGAVNNAQGPLLAPNYPDWFYVFSVPAGKTIQFKFFIKRADGTIQWENGSNHVATTPTGATGNITVTWQN

SEQ ID NO: 45117 - protein, 686 aa, Geobacillus stearothermophilus
SSSASVKGDVIYQIIIDRFYDGDTTNNNPAKSYGLYDPTKSKWKMYWGGDLEGVRQKLPYLKQLGVTTIWLSPVLDNLDTLAGTDNTGYHGYWTRDFKQIEEHFGNWTTFDTLVNDAHQNGIKVIVDFVPNHSTPFKANDSTFAEGGALYNNGTYMGNYFDDATKGYFHHNGDISNWDDRYEAQWKNFTDPAGFSLADLSQENGTIAQYLTDAAVQLVAHGADGLRIDAVKHFNSGFSKSLADKLYQKKDIFLVGEWXGDDPGTANHLEKVRYANNSGVNVLDFDLNTVIRNVFGTFTQTMYDLNNMVNQTGNEYKYKENLITFIDNHDMSRFLSVNSNKANLHQALAFILTSRGTPSIYYGTEQYMAGGNDPYNRGMMPAFDTTTTAFKEVSTLAGLRRNNAAIQYGTTTQRWINNDVYIYERKFFNDVVLVAINRNTQSSYSISGLQTALPNGSYADYLSGLLGGNGISVSNGSVASFTLAPGAVSVWQYSTSASAPQIGSVAPNMGIPGNVVTIDGKGFGTTQGTVTFGGVTATVKSWTSNRIEVYVPNMAAGLTDVKVTAGGVSSNLYSYNILSGTQTSVVFTVKSAPPTNLGDKIYLTGNIPELGNWSTDTSGAVNNAQGPLLAPNYPDWFYVFSVPAGKTIQFKFFIKRADGTIQWENGSNHVATTPTGATGNITVTWQN

SEQ ID NO: 45118 - protein, 686 aa, Geobacillus stearothermophilus
SSSASVKGDVIYQIIIDRFYDGDTTNNNPAKSYGLYDPTKSKWKMYWGGDLEGVRQKLPYLKQLGVTTIWLSPVLDNLDTLAGTDNTGYHGYWTRDFKQIEEHFGNWTTFDTLVNDAHQNGIKVIVDFVPNHSTPFKANDSTFAEGGALYNNGTYMGNYFDDATKGYFHHNGDISNWDDRYEAQWKNFTDPAGFSLADLSQENGTIAQYLTDAAVQLVAHGADGLRIDAVKHFNSGFSKSLADKLYQKKDIFLVGEWYGDDPGTANHLEKVRYANNSGVNVLDFDLNTVIRNVFGTFTQTMYDLNNMVNQTGNEYKYKENLITFIDNHDMSRFLSVNSNKANLHQALAFILTSRGTPSIYYGTEQYMAGGQDPYNRGMMPAFDTTTTAFKEVSTLAGLRRNNAAIQYGTTTQRWINNDVYIYERKFFNDVVLVAINRNTQSSYSISGLQTALPNGSYADYLSGLLGGNGISVSNGSVASFTLAPGAVSVWQYSTSASAPQIGSVAPNMGIPGNVVTIDGKGFGTTQGTVTFGGVTATVKSWTSNRIEVYVPNMAAGLTDVKVTAGGVSSNLYSYNILSGTQTSVVFTVKSAPPTNLGDKIYLTGNIPELGNWSTDTSGAVNNAQGPLLAPNYPDWFYVFSVPAGKTIQFKFFIKRADGTIQWENGSNHVATTPTGATGNITVTWQN

SEQ ID NO: 45119 - protein, 686 aa, Geobacillus stearothermophilus
SSSASVKGDVIYQIIIDRFYDGDTTNNNPAKSYGLYDPTKSKWKMYWGGDLEGVRQKLPYLKQLGVTTIWLSPVLDNLDTLAGTDNTGYHGYWTRDFKQIEEHFGNWTTFDTLVNDAHQNGIKVIVDFVPNHSTPFKANDSTFAEGGALYNNGTYMGNYFDDATKGYFHHNGDISNWDDRYEAQWKNFTDPAGFSLADLSQENGTIAQYLTDAAVQLVAHGADGLRIDAVKHFNSGFSKSLADKLYQKKDIFLVGEWYGDDPGTANHLEKVRYANNSGVNVLDFDLNTVIRNVFGTFTQTMYDLNNMVNQTGNEYKYKENLITFIDNHDMSRFLSVNSNKANLHQALAFILTSRGTPSIYYGTEQYMAGGNDPYNRGMMPAFDTTTTAFKEVSTLAGLRRNNAAIQYGTTTQRWINNDVYIYERKFFNDVVLVAINRNTQSSYSIAGLQTALPNGSYADYLSGLLGGNGISVSNGSVASFTLAPGAVSVWQYSTSASAPQIGSVAPNMGIPGNVVTIDGKGFGTTQGTVTFGGVTATVKSWTSNRIEVYVPNMAAGLTDVKVTAGGVSSNLYSYNILSGTQTSVVFTVKSAPPTNLGDKIYLTGNIPELGNWSTDTSGAVNNAQGPLLAPNYPDWFYVFSVPAGKTIQFKFFIKRADGTIQWENGSNHVATTPTGATGNITVTWQN

SEQ ID NO: 45120 - protein, 686 aa, Geobacillus stearothermophilus
SSSASVKGDVIYQIIIDRFYDGDTTNNNPAKSYGLYDPTKSKWKMYWGGDLEGVRQKLPYLKQLGVTTIWLSPVLDNLDTLAGTDNTGYHGYWTRDFKQIEEHFGNWTTFDTLVNDAHQNGIKVIVDFVPNHSTPFKANDSTFAEGGALYNNGTYMGNYFDDATKGYFHHNGDISNWDDRYEAQWKNFTDPAGSSLADLSQENGTIAQYLTDAAVQLVAHGADGLRIDAVKHFNSGFSKSLADKLYQKKDIFLVGEWYGDDPGTANHLEKVRYANNSGVNVLDFDLNTVIRNVFGTFTQTMYDLNNMVNQTGNEYKYKENLITFIDNHDMSRFLSVNSNKANLHQALAFILTSRGTPSIYYGTEQYMAGGNDPYNRGMMPAFDTTTTAFKEVSTLAGLRRNNAAIQYGTTTQRWINNDVYIYERKFFNDVVLVAINRNTQSSYSISGLQTALPNGSYADYLSGLLGGNGISVSNGSVASFTLAPGAVSVWQYSTSASAPQIGSVAPNMGIPGNVVTIDGKGFGTTQGTVTFGGVTATVKSWTSNRIEVYVPNMAAGLTDVKVTAGGVSSNLYSYNILSGTQTSVVFTVKSAPPTNLGDKIYLTGNIPELGNWSTDTSGAVNNAQGPLLAPNYPDWFYVFSVPAGKTIQFKFFIKRADGTIQWENGSNHVATTPTGATGNITVTWQN

SEQ ID NO: 45121 - protein, 686 aa, Geobacillus stearothermophilus
SSSASVKGDVIYQIIIDRFYDGDTTNNNPAKSYGLYDPTKSKWKMYWGGDLEGVRQKLPYLKQLGVTTIWLSPVLDNLDTLAGTDNTGYFGYWTRDFKQIEEHFGNWTTFDTLVNDAHQNGIKVIVDFVPNHSTPFKANDSTFAEGGALYNNGTYMGNYFDDATKGYFHHNGDISNWDDRYEAQWKNFTDPAGFSLADLSQENGTIAQYLTDAAVQLVAHGADGLRIDAVKHFNSGFSKSLADKLYQKKDIFLVGEWYGDDPGTANHLEKVRYANNSGVNVLDFDLNTVIRNVFGTFTQTMYDLNNMVNQTGNEYKYKENLITFIDNHDMSRFLSVNSNKANLHQALAFILTSRGTPSIYYGTEQYMAGGNDPYNRGMMPAFDTTTTAFKEVSTLAGLRRNNAAIQYGTTTQRWINNDVYIYERKFFNDVVLVAINRNTQSSYSISGLQTALPNGSYADYLSGLLGGNGISVSNGSVASFTLAPGAVSVWQYSTSASAPQIGSVAPNMGIPGNVVTIDGKGFGTTQGTVTFGGVTATVKSWTSNRIEVYVPNMAAGLTDVKVTAGGVSSNLYSYNILSGTQTSVVFTVKSAPPTNLGDKIYLTGNIPELGNWSTDTSGAVNNAQGPLLAPNYPDWFYVFSVPAGKTIQFKFFIKRADGTIQWENGSNHVATTPTGATGNITVTWQN

SEQ ID NO: 45122 - protein, 686 aa, Geobacillus stearothermophilus
SSSASVKGDVIYQIIIDRFYDGDTTNNNPAKSYGLYDPTKSKWKMYWGGDLEGVRQKLPYLKQLGVTTIWLSPVLDNLDTLAGTDNTGYHGYWTRDFKQIEEHFGNWTTFDTLVNDAHQNGIKVIVDFVPNHSTPFKANDSTFAEGGALYNNGTYMGNYFDDATKGYFHHNGDISNWDDRYEAQWKNFTDPAGFSLADLSQENGTIAQYLTDAAVQLVAHGADGLRIDAVKHFNSGFSKSLADKLYQKKDIFLVGEWYGDGPGTANHLEKVRYANNSGVNVLDFDLNTVIRNVFGTFTQTMYDLNNMVNQTGNEYKYKENLITFIDNHDMSRFLSVNSNKANLHQALAFILTSRGTPSIYYGTEQYMAGGNDPYNRGMMPAFDTTTTAFKEVSTLAGLRRNNAAIQYGTTTQRWINNDVYIYERKFFNDVVLVAINRNTQSSYSISGLQTALPNGSYADYLSGLLGGNGISVSNGSVASFTLAPGAVSVWQYSTSASAPQIGSVAPNMGIPGNVVTIDGKGFGTTQGTVTFGGVTATVKSWTSNRIEVYVPNMAAGLTDVKVTAGGVSSNLYSYNILSGTQTSVVFTVKSAPPTNLGDKIYLTGNIPELGNWSTDTSGAVNNAQGPLLAPNYPDWFYVFSVPAGKTIQFKFFIKRADGTIQWENGSNHVATTPTGATGNITVTWQN

SEQ ID NO: 45123 - protein, 686 aa, Geobacillus stearothermophilus
SSSASVKGDVIYQIIIDRFYDGDTTNNNPAKSYGLYDPTKSKWKMYWGGDLEGVRQKLPYLKQLGVTTIWLSPVLDNLDTLAGTDNTGYHGYWTRDFKQIEEHFGNWTTFDTLVNDAHQNGIKVIVDFVPNHSAPFKANDSTFAEGGALYNNGTYMGNYFDDATKGYFHHNGDISNWDDRYEAQWKNFTDPAGFSLADLSQENGTIAQYLTDAAVQLVAHGADGLRIDAVKHFNSGFSKSLADKLYQKKDIFLVGEWYGDDPGTANHLEKVRYANNSGVNVLDFDLNTVIRNVFGTFTQTMYDLNNMVNQTGNEYKYKENLITFIDNHDMSRFLSVNSNKANLHQALAFILTSRGTPSIYYGTEQYMAGGNDPYNRGMMPAFDTTTTAFKEVSTLAGLRRNNAAIQYGTTTQRWINNDVYIYERKFFNDVVLVAINRNTQSSYSISGLQTALPNGSYADYLSGLLGGNGISVSNGSVASFTLAPGAVSVWQYSTSASAPQIGSVAPNMGIPGNVVTIDGKGFGTTQGTVTFGGVTATVKSWTSNRIEVYVPNMAAGLTDVKVTAGGVSSNLYSYNILSGTQTSVVFTVKSAPPTNLGDKIYLTGNIPELGNWSTDTSGAVNNAQGPLLAPNYPDWFYVFSVPAGKTIQFKFFIKRADGTIQWENGSNHVATTPTGATGNITVTWQN

SEQ ID NO: 45124 - protein, 686 aa, Geobacillus stearothermophilus
SSSASVKGDVIYQIIIDRFYDGDTTNNNPAKSYGLYDPTKSKWKMYWGGDLEGVRQKLPYLKQLGVTTIWLSPVLDNLDTLAGTDNTGYHGYWTRDFKQIEEHFGNWTTFDTLVNDAHQNGIKVIVDFVPNHSTPFKANDSTFAEGGALYNNGTYMGNYFDDATKGYFHHNGDISNWDDRYEAQWKNFTDPAGFSLADLSQENGTIAQYLTDAAVQLVAHGADGLRIDAVRHFNSGFSKSLADKLYQKKDIFLVGEWYGDDPGTANHLEKVRYANNSGVNVLDFDLNTVIRNVFGTFTQTMYDLNNMVNQTGNEYKYKENLITFIDNHDMSRFLSVNSNKANLHQALAFILTSRGTPSIYYGTEQYMAGGNDPYNRGMMPAFDTTTTAFKEVSTLAGLRRNNAAIQYGTTTQRWINNDVYIYERKFFNDVVLVAINRNTQSSYSISGLQTALPNGSYADYLSGLLGGNGISVSNGSVASFTLAPGAVSVWQYSTSASAPQIGSVAPNMGIPGNVVTIDGKGFGTTQGTVTFGGVTATVKSWTSNRIEVYVPNMAAGLTDVKVTAGGVSSNLYSYNILSGTQTSVVFTVKSAPPTNLGDKIYLTGNIPELGNWSTDTSGAVNNAQGPLLAPNYPDWFYVFSVPAGKTIQFKFFIKRADGTIQWENGSNHVATTPTGATGNITVTWQN

SEQ ID NO: 45125 - protein, 686 aa, Geobacillus stearothermophilus
SSSASVKGDVIYQIIIDRFYDGDTTNNNPAKSYGLYDPTKSKWKMYWGGDLEGVRQKLPYLKQLGVTTIWLSPVLDNLDTLAGTDNTGYHGYXTRDFKQIEEHFGNWTTFDTLVNDAHQNGIKVIVDFVPNHSTPFKANDSTFAEGGALYNNGTYMGNYFDDATKGYFHHNGDISNWDDRYEAQWKNFTDPAGFSLADLSQENGTIAQYLTDAAVQLVAHGADGLRIDAVKHFNSGFSKSLADKLYQKKDIFLVGEWYGDDPGTANHLEKVRYANNSGVNVLDFDLNTVIRNVFGTFTQTMYDLNNMVNQTGNEYKYKENLITFIDNHDMSRFLSVNSNKANLHQALAFILTSRGTPSIYYGTEQYMAGGNDPYNRGMMPAFDTTTTAFKEVSTLAGLRRNNAAIQYGTTTQRWINNDVYIYERKFFNDVVLVAINRNTQSSYSISGLQTALPNGSYADYLSGLLGGNGISVSNGSVASFTLAPGAVSVWQYSTSASAPQIGSVAPNMGIPGNVVTIDGKGFGTTQGTVTFGGVTATVKSWTSNRIEVYVPNMAAGLTDVKVTAGGVSSNLYSYNILSGTQTSVVFTVKSAPPTNLGDKIYLTGNIPELGNWSTDTSGAVNNAQGPLLAPNYPDWFYVFSVPAGKTIQFKFFIKRADGTIQWENGSNHVATTPTGATGNITVTWQN

SEQ ID NO: 45126 - protein, 686 aa, Geobacillus stearothermophilus
SSSASVKGDVIYQIIIDRFYDGDTTNNNPAKSYGLYDPTKSKWKMYWGGDLEGVRQKLPYLKQLGVTTIWLSPVLDNLDTLAGTDNTGYRGYWTRDFKQIEEHFGNWTTFDTLVNDAHQNGIKVIVDFVPNHSTPFKANDSTFAEGGALYNNGTYMGNYFDDATKGYFHHNGDISNWDDRYEAQWKNFTDPAGFSLADLSQENGTIAQYLTDAAVQLVAHGADGLRIDAVKHFNSGFSKSLADKLYQKKDIFLVGEWYGDDPGTANHLEKVRYANNSGVNVLDFDLNTVIRNVFGTFTQTMYDLNNMVNQTGNEYKYKENLITFIDNHDMSRFLSVNSNKANLHQALAFILTSRGTPSIYYGTEQYMAGGNDPYNRGMMPAFDTTTTAFKEVSTLAGLRRNNAAIQYGTTTQRWINNDVYIYERKFFNDVVLVAINRNTQSSYSISGLQTALPNGSYADYLSGLLGGNGISVSNGSVASFTLAPGAVSVWQYSTSASAPQIGSVAPNMGIPGNVVTIDGKGFGTTQGTVTFGGVTATVKSWTSNRIEVYVPNMAAGLTDVKVTAGGVSSNLYSYNILSGTQTSVVFTVKSAPPTNLGDKIYLTGNIPELGNWSTDTSGAVNNAQGPLLAPNYPDWFYVFSVPAGKTIQFKFFIKRADGTIQWENGSNHVATTPTGATGNITVTWQN

SEQ ID NO: 45127 - protein, 686 aa, Geobacillus stearothermophilus
SSSASVKGDVIYQIIIDRFYDGDTTNNNPAKSYGLYDPTKSKWKMYWGGDLEGVRQKLPYLKQLGVTTIWLSPVLDNLDTLAGTDNTGYHGYWTRDFKQIEEHFGNWTTFDTLVNDAHQNGIKVIVDFVPNHSTPFKANDSTFAEGGALYNNGTYMGNYFDDATKGYFHHNGDISNWDDRYEAQWKNFTDPAGFSLADLSQENGTIAQYLTDAAVQLVAHGADGLRIDAGKHFNSGFSKSLADKLYQKKDIFLVGEWYGDDPGTANHLEKVRYANNSGVNVLDFDLNTVIRNVFGTFTQTMYDLNNMVNQTGNEYKYKENLITFIDNHDMSRFLSVNSNKANLHQALAFILTSRGTPSIYYGTEQYMAGGNDPYNRGMMPAFDTTTTAFKEVSTLAGLRRNNAAIQYGTTTQRWINNDVYIYERKFFNDVVLVAINRNTQSSYSISGLQTALPNGSYADYLSGLLGGNGISVSNGSVASFTLAPGAVSVWQYSTSASAPQIGSVAPNMGIPGNVVTIDGKGFGTTQGTVTFGGVTATVKSWTSNRIEVYVPNMAAGLTDVKVTAGGVSSNLYSYNILSGTQTSVVFTVKSAPPTNLGDKIYLTGNIPELGNWSTDTSGAVNNAQGPLLAPNYPDWFYVFSVPAGKTIQFKFFIKRADGTIQWENGSNHVATTPTGATGNITVTWQN

SEQ ID NO: 45128 - protein, 686 aa, Geobacillus stearothermophilus
SSSASVKGDVIYQIIIDRFYDGDTTNNNPAKSYGLYDPTKSKWKMYWGGDLEGVRQKLPYLKQLGVTTIWLSPVLDNLDTLAGTDNTGYHGYWTRDFKQIEEHFGNWTTFDTLVNDAHQNGIKVIVDFVPNHSTPFKANDSTFAEGGALYNNGTYMGNYFDDATKGYFHHNGDISNWDDRYEAQWKNFTDPAGFSLADLSQENGTIAQYLTDAAVQLVAHGADGLRIDAVKHFNSGFSKSLADKLYQKKDIFLVGEWYGDDPGTANHLEKVRYANNSGVNVLDFDLNTVIRNVFGTFTQTMYDLNNMVNQTGNEYKYKENLITFIDNHDMSRFLSVNSNKANLHQALAFILTSRGTPSIYYGTEQYMAGGYDPYNRGMMPAFDTTTTAFKEVSTLAGLRRNNAAIQYGTTTQRWINNDVYIYERKFFNDVVLVAINRNTQSSYSISGLQTALPNGSYADYLSGLLGGNGISVSNGSVASFTLAPGAVSVWQYSTSASAPQIGSVAPNMGIPGNVVTIDGKGFGTTQGTVTFGGVTATVKSWTSNRIEVYVPNMAAGLTDVKVTAGGVSSNLYSYNILSGTQTSVVFTVKSAPPTNLGDKIYLTGNIPELGNWSTDTSGAVNNAQGPLLAPNYPDWFYVFSVPAGKTIQFKFFIKRADGTIQWENGSNHVATTPTGATGNITVTWQN

SEQ ID NO: 45129 - protein, 686 aa, Geobacillus stearothermophilus
SSSASVKGDVIYQIIIDRFYDGDTTNNNPAKSYGLYDPTKSKWKMYWGGDLEGVRQKLPYLKQLGVTTIWLSPVLDNLDTLAGTDNTGYHGYWTRDFKQIEEHFGNWTTFDTLVNDAHQNGIKVIVDFVPNHSTPFKANDSTFAEGGALYNNGTYMGNYFDDATKGYFHHNGDISNWDDRYEAQWKNFTDPAGFSLADLSQENGTIAQYLTDAAVQLVAHGADGLRIDAVKHFNSGFSKSLADKLYQKKDIFLVGEWYGDDPGTANHLEKVRYANNSGVNVLDFDLNTVIRNVFGTFTQTMYDLNNMVNQTGNEYKYKENLITFIDNHDMSRFLSVNSNKANLHQALAFILTSRGTPSIYYGTEQYMAGGNEPYNRGMMPAFDTTTTAFKEVSTLAGLRRNNAAIQYGTTTQRWINNDVYIYERKFFNDVVLVAINRNTQSSYSISGLQTALPNGSYADYLSGLLGGNGISVSNGSVASFTLAPGAVSVWQYSTSASAPQIGSVAPNMGIPGNVVTIDGKGFGTTQGTVTFGGVTATVKSWTSNRIEVYVPNMAAGLTDVKVTAGGVSSNLYSYNILSGTQTSVVFTVKSAPPTNLGDKIYLTGNIPELGNWSTDTSGAVNNAQGPLLAPNYPDWFYVFSVPAGKTIQFKFFIKRADGTIQWENGSNHVATTPTGATGNITVTWQN

SEQ ID NO: 45130 - protein, 686 aa, Geobacillus stearothermophilus
SSSASVKGDVIYQIIIDRFYDGDTTNNNPAKSYGLYDPTKSKWKMYWGGDLEGVRQKLPYLKQLGVTTIWLSPVLDNLDTLAGTDNTGYHGYWTRDFKQIEEHFGNWTTFDTLVNDAHQNGIKVIVDFVPNHSTPFKANDSTFAEGGALYNNGTYMGNYFDDATKGYFHHNGDISNWDDRYEAQWKNFTDPAGFSLADLSQENGTIAQYLTDAAVQLVAHGADGLRIDAVKHFNSGFSKSLADKLYQKKDIFLVGEWYGDDPGXANHLEKVRYANNSGVNVLDFDLNTVIRNVFGTFTQTMYDLNNMVNQTGNEYKYKENLITFIDNHDMSRFLSVNSNKANLHQALAFILTSRGTPSIYYGTEQYMAGGNDPYNRGMMPAFDTTTTAFKEVSTLAGLRRNNAAIQYGTTTQRWINNDVYIYERKFFNDVVLVAINRNTQSSYSISGLQTALPNGSYADYLSGLLGGNGISVSNGSVASFTLAPGAVSVWQYSTSASAPQIGSVAPNMGIPGNVVTIDGKGFGTTQGTVTFGGVTATVKSWTSNRIEVYVPNMAAGLTDVKVTAGGVSSNLYSYNILSGTQTSVVFTVKSAPPTNLGDKIYLTGNIPELGNWSTDTSGAVNNAQGPLLAPNYPDWFYVFSVPAGKTIQFKFFIKRADGTIQWENGSNHVATTPTGATGNITVTWQN

SEQ ID NO: 45131 - protein, 686 aa, Geobacillus stearothermophilus
SSSASVKGDVIYQIIIDRFYDGDTTNNNPAKSYGLYDPTKSKWKMYWGGDLEGVRQKLPYLKQLGVTTIWLSPVLDNLDTLAGTDNTGYHGYWTRDFKQIEEHFGNWTTFDTLVNDAHQNGIKVIVDFVPNHSTPFKANDSTFAEGGALYNNGTYMGNYFDDATKGYFHHNGDISNWDDRYEAQWKNFTDPAGFSLADLSQENGTIAQYLTDAAVQLVAHGADGLRIDAVKHFNSGFSKSLADKLYQKKDIFLVGEWYGXDPGTANHLEKVRYANNSGVNVLDFDLNTVIRNVFGTFTQTMYDLNNMVNQTGNEYKYKENLITFIDNHDMSRFLSVNSNKANLHQALAFILTSRGTPSIYYGTEQYMAGGNDPYNRGMMPAFDTTTTAFKEVSTLAGLRRNNAAIQYGTTTQRWINNDVYIYERKFFNDVVLVAINRNTQSSYSISGLQTALPNGSYADYLSGLLGGNGISVSNGSVASFTLAPGAVSVWQYSTSASAPQIGSVAPNMGIPGNVVTIDGKGFGTTQGTVTFGGVTATVKSWTSNRIEVYVPNMAAGLTDVKVTAGGVSSNLYSYNILSGTQTSVVFTVKSAPPTNLGDKIYLTGNIPELGNWSTDTSGAVNNAQGPLLAPNYPDWFYVFSVPAGKTIQFKFFIKRADGTIQWENGSNHVATTPTGATGNITVTWQN

SEQ ID NO: 45132 - protein, 686 aa, Geobacillus stearothermophilus
SSSASVKGDVIYQIIIDRFYDGDTTNNNPAKSYGLYDPTKSKWKMYWGGDLEGVRQKLPYLKQLGVTTIWLSPVLDNLDTLAGTDNNGYHGYWTRDFKQIEEHFGNWTTFDTLVNDAHQNGIKVIVDFVPNHSTPFKANDSTFAEGGALYNNGTYMGNYFDDATKGYFHHNGDISNWDDRYEAQWKNFTDPAGFSLADLSQENGTIAQYLTDAAVQLVAHGADGLRIDAVKHFNSGFSKSLADKLYQKKDIFLVGEWYGDDPGTANHLEKVRYANNSGVNVLDFDLNTVIRNVFGTFTQTMYDLNNMVNQTGNEYKYKENLITFIDNHDMSRFLSVNSNKANLHQALAFILTSRGTPSIYYGTEQYMAGGNDPYNRGMMPAFDTTTTAFKEVSTLAGLRRNNAAIQYGTTTQRWINNDVYIYERKFFNDVVLVAINRNTQSSYSISGLQTALPNGSYADYLSGLLGGNGISVSNGSVASFTLAPGAVSVWQYSTSASAPQIGSVAPNMGIPGNVVTIDGKGFGTTQGTVTFGGVTATVKSWTSNRIEVYVPNMAAGLTDVKVTAGGVSSNLYSYNILSGTQTSVVFTVKSAPPTNLGDKIYLTGNIPELGNWSTDTSGAVNNAQGPLLAPNYPDWFYVFSVPAGKTIQFKFFIKRADGTIQWENGSNHVATTPTGATGNITVTWQN

SEQ ID NO: 45133 - protein, 686 aa, Geobacillus stearothermophilus
SSSASVKGDVIYQIIIDRFYDGDTTNNNPAKSYGLYDPTKSKWKMYWGGDLEGVRQKLPYLKQLGVTTIWLSPVLDNLDTLAGTDNTGYHGYWTRDFKQIEEHFGNWTTFDTLVNDAHQNGIKVIVDFVPNHSTPFKANDSTFAEGGALYNNGTYMGNYFDDATKGYFHHNGDISNWDDRYEAQWKNFTDPGGFSLADLSQENGTIAQYLTDAAVQLVAHGADGLRIDAVKHFNSGFSKSLADKLYQKKDIFLVGEWYGDDPGTANHLEKVRYANNSGVNVLDFDLNTVIRNVFGTFTQTMYDLNNMVNQTGNEYKYKENLITFIDNHDMSRFLSVNSNKANLHQALAFILTSRGTPSIYYGTEQYMAGGNDPYNRGMMPAFDTTTTAFKEVSTLAGLRRNNAAIQYGTTTQRWINNDVYIYERKFFNDVVLVAINRNTQSSYSISGLQTALPNGSYADYLSGLLGGNGISVSNGSVASFTLAPGAVSVWQYSTSASAPQIGSVAPNMGIPGNVVTIDGKGFGTTQGTVTFGGVTATVKSWTSNRIEVYVPNMAAGLTDVKVTAGGVSSNLYSYNILSGTQTSVVFTVKSAPPTNLGDKIYLTGNIPELGNWSTDTSGAVNNAQGPLLAPNYPDWFYVFSVPAGKTIQFKFFIKRADGTIQWENGSNHVATTPTGATGNITVTWQN

SEQ ID NO: 45134 - protein, 686 aa, Geobacillus stearothermophilus
SSSASVKGDVIYQIIIDRFYDGDTTNNNPAKSYGLYDPTKSKWKMYWGGDLEGVRQKLPYLKQLGVTTIWLSPVLDNLDTLAGTDNTGYHGYWTRDFKQIEEHFGNWTTFDTLVNDAHQNGIKVIVDFVPNHSTPFKANDSTFAEGGALYNNGTYMGNYFDDATKGYFHHNGDISNWDDRYEAQWKNFTDPAGFSLADLSQENGTIAQYLTDAAVQLVAHGADGSRIDAVKHFNSGFSKSLADKLYQKKDIFLVGEWYGDDPGTANHLEKVRYANNSGVNVLDFDLNTVIRNVFGTFTQTMYDLNNMVNQTGNEYKYKENLITFIDNHDMSRFLSVNSNKANLHQALAFILTSRGTPSIYYGTEQYMAGGNDPYNRGMMPAFDTTTTAFKEVSTLAGLRRNNAAIQYGTTTQRWINNDVYIYERKFFNDVVLVAINRNTQSSYSISGLQTALPNGSYADYLSGLLGGNGISVSNGSVASFTLAPGAVSVWQYSTSASAPQIGSVAPNMGIPGNVVTIDGKGFGTTQGTVTFGGVTATVKSWTSNRIEVYVPNMAAGLTDVKVTAGGVSSNLYSYNILSGTQTSVVFTVKSAPPTNLGDKIYLTGNIPELGNWSTDTSGAVNNAQGPLLAPNYPDWFYVFSVPAGKTIQFKFFIKRADGTIQWENGSNHVATTPTGATGNITVTWQN

SEQ ID NO: 45135 - protein, 686 aa, Geobacillus stearothermophilus
SSSASVKGDVIYQIIIDRFYDGDTTNNNPAKSYGLYDPTKSKWKMYWGGDLEGVRQKLPYLKQLGVTTIWLSPVLDNLDTLAGTDNTGYYGYWTRDFKQIEEHFGNWTTFDTLVNDAHQNGIKVIVDFVPNHSTPFKANDSTFAEGGALYNNGTYMGNYFDDATKGYFHHNGDISNWDDRYEAQWKNFTDPAGFSLADLSQENGTIAQYLTDAAVQLVAHGADGLRIDAVKHFNSGFSKSLADKLYQKKDIFLVGEWYGDDPGTANHLEKVRYANNSGVNVLDFDLNTVIRNVFGTFTQTMYDLNNMVNQTGNEYKYKENLITFIDNHDMSRFLSVNSNKANLHQALAFILTSRGTPSIYYGTEQYMAGGNDPYNRGMMPAFDTTTTAFKEVSTLAGLRRNNAAIQYGTTTQRWINNDVYIYERKFFNDVVLVAINRNTQSSYSISGLQTALPNGSYADYLSGLLGGNGISVSNGSVASFTLAPGAVSVWQYSTSASAPQIGSVAPNMGIPGNVVTIDGKGFGTTQGTVTFGGVTATVKSWTSNRIEVYVPNMAAGLTDVKVTAGGVSSNLYSYNILSGTQTSVVFTVKSAPPTNLGDKIYLTGNIPELGNWSTDTSGAVNNAQGPLLAPNYPDWFYVFSVPAGKTIQFKFFIKRADGTIQWENGSNHVATTPTGATGNITVTWQN

SEQ ID NO: 45136 - protein, 686 aa, Geobacillus stearothermophilus
SSSASVKGDVIYQIIIDRFYDGDTTNNNPAKSYGLYDPTKSKWKMYWGGDLEGVRQKLPYLKQLGVTTIWLSPVLDNLDTLAGTDNTGYHGYWTRDFKQIEEHFGNWTTFDTLVNDAHQNGIKVIVDFVPNHSTPFKANDSTFAEGGALYNNGTYMGNYFDDATKGYFHHNGDISNWDDRYEAQWKNFTDPAGFSLADLSQENGTIAQYLTDAAVQLVAHGADGLRIDAVKHFNSGFSKSLADKLYQKKDIFLVGEWYGDDPGTANHLEKVRYANNSGVNVLDFDLNTVIRNVFGTFTQTMYDLNNMVNQTGNEYKYKENLITFIDNHDMSRFLSVNSNKANLHQALAFILTSRGTPSIYYGTEQYMAGGNTPYNRGMMPAFDTTTTAFKEVSTLAGLRRNNAAIQYGTTTQRWINNDVYIYERKFFNDVVLVAINRNTQSSYSISGLQTALPNGSYADYLSGLLGGNGISVSNGSVASFTLAPGAVSVWQYSTSASAPQIGSVAPNMGIPGNVVTIDGKGFGTTQGTVTFGGVTATVKSWTSNRIEVYVPNMAAGLTDVKVTAGGVSSNLYSYNILSGTQTSVVFTVKSAPPTNLGDKIYLTGNIPELGNWSTDTSGAVNNAQGPLLAPNYPDWFYVFSVPAGKTIQFKFFIKRADGTIQWENGSNHVATTPTGATGNITVTWQN

SEQ ID NO: 45137 - protein, 686 aa, Geobacillus stearothermophilus
SSSASVKGDVIYQIIIDRFYDGDTTNNNPAKSYGLYDPTKSKWKMYWGGDLEGVRQKLPYLKQLGVTTIWLSPVLDNLDTLAGTDNTGYHGYWTRDFKQIEEHFGNWTTFDTLVNDAHQNGIKVIVDFVPNHSTPFKANDSTFAEGGALYNNGTYMGNYFDDATKGYFHHNGDISNWDDRYEAQWKNFTDPAGFSLADLSQENGTIAQYLTDAAVQLVAHGADGLRIDAVKHFNSGFSKSLADKLYQKKDIFLVGEWYGDDPGTANHLEKVRYANNSGVNVLDYDLNTVIRNVFGTFTQTMYDLNNMVNQTGNEYKYKENLITFIDNHDMSRFLSVNSNKANLHQALAFILTSRGTPSIYYGTEQYMAGGNDPYNRGMMPAFDTTTTAFKEVSTLAGLRRNNAAIQYGTTTQRWINNDVYIYERKFFNDVVLVAINRNTQSSYSISGLQTALPNGSYADYLSGLLGGNGISVSNGSVASFTLAPGAVSVWQYSTSASAPQIGSVAPNMGIPGNVVTIDGKGFGTTQGTVTFGGVTATVKSWTSNRIEVYVPNMAAGLTDVKVTAGGVSSNLYSYNILSGTQTSVVFTVKSAPPTNLGDKIYLTGNIPELGNWSTDTSGAVNNAQGPLLAPNYPDWFYVFSVPAGKTIQFKFFIKRADGTIQWENGSNHVATTPTGATGNITVTWQN

SEQ ID NO: 45138 - protein, 686 aa, Geobacillus stearothermophilus
SSSASVKGDVIYQIIIDRFYDGDTTNNNPAKSYGLYDPTKSKWKMYWGGDLEGVRQKLPYLKQLGVTTIWLSPVLDNLDTLAGTDTTGYHGYWTRDFKQIEEHFGNWTTFDTLVNDAHQNGIKVIVDFVPNHSTPFKANDSTFAEGGALYNNGTYMGNYFDDATKGYFHHNGDISNWDDRYEAQWKNFTDPAGFSLADLSQENGTIAQYLTDAAVQLVAHGADGLRIDAVKHFNSGFSKSLADKLYQKKDIFLVGEWYGDDPGTANHLEKVRYANNSGVNVLDFDLNTVIRNVFGTFTQTMYDLNNMVNQTGNEYKYKENLITFIDNHDMSRFLSVNSNKANLHQALAFILTSRGTPSIYYGTEQYMAGGNDPYNRGMMPAFDTTTTAFKEVSTLAGLRRNNAAIQYGTTTQRWINNDVYIYERKFFNDVVLVAINRNTQSSYSISGLQTALPNGSYADYLSGLLGGNGISVSNGSVASFTLAPGAVSVWQYSTSASAPQIGSVAPNMGIPGNVVTIDGKGFGTTQGTVTFGGVTATVKSWTSNRIEVYVPNMAAGLTDVKVTAGGVSSNLYSYNILSGTQTSVVFTVKSAPPTNLGDKIYLTGNIPELGNWSTDTSGAVNNAQGPLLAPNYPDWFYVFSVPAGKTIQFKFFIKRADGTIQWENGSNHVATTPTGATGNITVTWQN

SEQ ID NO: 45139 - protein, 686 aa, Geobacillus stearothermophilus
SSSASVKGDVIYQIIIDRFYDGDTTNNNPAKSYGLYDPTKSKWKMYWGGDLEGVRQKLPYLKQLGVTTIWLSPVLDNLDTLAGTDNTGYHGYWTRDFKQIEEHFGNWTTFDTLVNDAHQNGIKVIVDFVPNHSTPFKANDSTFAEGGALYNNGTYMGNYFDDATKGYFHHNGDISNWDDRYEAQWKNFTDPAGFSLADLSQENGTIAQYLTDAAVQLVAHGADGLRIDAVXHFNSGFSKSLADKLYQKKDIFLVGEWYGDDPGTANHLEKVRYANNSGVNVLDFDLNTVIRNVFGTFTQTMYDLNNMVNQTGNEYKYKENLITFIDNHDMSRFLSVNSNKANLHQALAFILTSRGTPSIYYGTEQYMAGGNDPYNRGMMPAFDTTTTAFKEVSTLAGLRRNNAAIQYGTTTQRWINNDVYIYERKFFNDVVLVAINRNTQSSYSISGLQTALPNGSYADYLSGLLGGNGISVSNGSVASFTLAPGAVSVWQYSTSASAPQIGSVAPNMGIPGNVVTIDGKGFGTTQGTVTFGGVTATVKSWTSNRIEVYVPNMAAGLTDVKVTAGGVSSNLYSYNILSGTQTSVVFTVKSAPPTNLGDKIYLTGNIPELGNWSTDTSGAVNNAQGPLLAPNYPDWFYVFSVPAGKTIQFKFFIKRADGTIQWENGSNHVATTPTGATGNITVTWQN

SEQ ID NO: 45140 - protein, 686 aa, Geobacillus stearothermophilus
SSSASVKGDVIYQIIIDRFYDGDTTNNNPAKSYGLYDPTKSKWKMYWGGDLEGVRQKLPYLKQLGVTTIWLSPVLDNLDTLAGTDNTGYHGYWTRDFKQIEEHFGNWTTFDTLVNDAHQNGIKVIVDFVPNHSTPFKANDSTFAEGGALYNNGTYMGNYFDDATKGYFHHNGDISNWDDRYEAQWKNFTDPAGFSLADLSQENGTIAQYLTDAAVQLVAHGADGLRIDAVKHFNSGFSKSLADKLYQKKDIFLVGEWYGDDPGTANHLEKVRYANNSGVNVLDFDLNTVIRNVFGTFTQTMYDLNNMVNQTGNEYKYKENLITFIDNHDMSRFLSVNSNKANLHQALAFILTSRGTPSIYYGTEQYMAGGNDPYNRGMMPAFDTTTTAFKEVSTLAGLRRNNAAIQYGTTTQRWINNDVYIYERKFFNDVVLVAINRNTQSSYSISGLQTALPNGSYADYLSGLLGGNGISVSNGSVASFTLAPGAVSVWQYSTSASAPQIGSVAPNMGIPGNVVTIDGKGFGTTQGTVTFGGVTATVKSWTSNRIEVYVPNMAAGLTDVKVTAGGVSSNLYSYNILGGTQTSVVFTVKSAPPTNLGDKIYLTGNIPELGNWSTDTSGAVNNAQGPLLAPNYPDWFYVFSVPAGKTIQFKFFIKRADGTIQWENGSNHVATTPTGATGNITVTWQN

SEQ ID NO: 45141 - protein, 686 aa, Geobacillus stearothermophilus
SSSASVKGDVIYQIIIDRFYDGDTTNNNPAKSYGLYDPTKSKWKMYWGGDLEGVRQKLPYLKQLGVTTIWLSPVLDNLDTLAGTDNTGYHGYWTRDFKQIEEHFGNWTTFDTLVNDAHQNGIKVIVDFVPNHSTPFKANDSTFAEGGALYNNGTYMGNYFDDATKGYFHHNGDISNWDDRYEAQWKNFTDPAGFSLADLSQENGTIAQYLTDAAVQLVAHGADGLRVDAVKHFNSGFSKSLADKLYQKKDIFLVGEWYGDDPGTANHLEKVRYANNSGVNVLDFDLNTVIRNVFGTFTQTMYDLNNMVNQTGNEYKYKENLITFIDNHDMSRFLSVNSNKANLHQALAFILTSRGTPSIYYGTEQYMAGGNDPYNRGMMPAFDTTTTAFKEVSTLAGLRRNNAAIQYGTTTQRWINNDVYIYERKFFNDVVLVAINRNTQSSYSISGLQTALPNGSYADYLSGLLGGNGISVSNGSVASFTLAPGAVSVWQYSTSASAPQIGSVAPNMGIPGNVVTIDGKGFGTTQGTVTFGGVTATVKSWTSNRIEVYVPNMAAGLTDVKVTAGGVSSNLYSYNILSGTQTSVVFTVKSAPPTNLGDKIYLTGNIPELGNWSTDTSGAVNNAQGPLLAPNYPDWFYVFSVPAGKTIQFKFFIKRADGTIQWENGSNHVATTPTGATGNITVTWQN

SEQ ID NO: 45142 - protein, 686 aa, Geobacillus stearothermophilus
SSSASVKGDVIYQIIIDRFYDGDTTNNNPAKSYGLYDPTKSKWKMYWGGDLEGVRQKLPYLKQLGVTTIWLSPVLDNLDTLAGTDNTGYHGYWTRDFKQIEEHFGNWTTFDTLVNDAHQNGIKVIVDFVPNHSTPFKANDSTFAEGGALYNNGTYMGNYFDDATKGYFHHNGDISNWDDRYEAQWKNFTDPAGFSLADLSQENGTIAQYLTDAAVQLVAHGADGLRIDAVKHFNSGFSKSLADKLYQKKDIFLVGEWYGDDPGTANHLEKVRYANNSGVNVLDFDLNTVIRNVFGTFTQTMYDLNNMVNQTGNEYKYKENLITFIDNHDMSRFLSVNSNKANLHQALAFILTSRGTPSIYYGTEQYMAGGNDPYSRGMMPAFDTTTTAFKEVSTLAGLRRNNAAIQYGTTTQRWINNDVYIYERKFFNDVVLVAINRNTQSSYSISGLQTALPNGSYADYLSGLLGGNGISVSNGSVASFTLAPGAVSVWQYSTSASAPQIGSVAPNMGIPGNVVTIDGKGFGTTQGTVTFGGVTATVKSWTSNRIEVYVPNMAAGLTDVKVTAGGVSSNLYSYNILSGTQTSVVFTVKSAPPTNLGDKIYLTGNIPELGNWSTDTSGAVNNAQGPLLAPNYPDWFYVFSVPAGKTIQFKFFIKRADGTIQWENGSNHVATTPTGATGNITVTWQN

SEQ ID NO: 45143 - protein, 686 aa, Bacillus sp.
SSSASVKGDVIYQIIIDRFYDGDTTNNNPAKSYGLYDPTKSKWKMYWGGDLEGVRQKLPYLKQLGVTTIWLSPVLDNLDTLAGTDNTGYHGYWTRDFKQIEEHFGNWTTFDTLVNDAHQNGIKVIVDFVPNHSTPFKANDSTFAEGGALYNNGTYMGNYFDDATKGYFHHNGDISNWDDRYEAQWKNFTDPAGFSLADLSQENGTIAQYLTDAAVQLVAHGADGLRIDVVKHFNSGFSKSLADKLYQKKDIFLVGEWXGDDPGTANHLEKVRYANNSGVNVLDFDLNTVIRNVFGTFTQTMYDLNNMVNQTGNEYKYKENLITFIDNHDMSRFLSVNSNKANLHQALAFILTSRGTPSIYYGTEQYMAGGNDPYNRGMMPAFDTTTTAFKEVSTLAGLRRNNAAIQYGTTTQRWINNDVYIYERKFFNDVVLVAINRNTQSSYSISGLQTALPNGSYADYLSGLLGGNGISVSNGSVASFTLAPGAVSVWQYSTSASAPQIGSVAPNMGIPGNVVTIDGKGFGTTQGTVTFGGVTATVKSWTSNRIEVYVPNMAAGLTDVKVTAGGVSSNLYSYNILSGTQTSVVFTVKSAPPTNLGDKIYLTGNIPELGNWSTDTSGAVNNAQGPLLAPNYPDWFYVFSVPAGKTIQFKFFIKRADGTIQWENGSNHVATTPTGATGNITVTWQN

SEQ ID NO: 45144 - protein, 686 aa, Bacillus sp.
SSSASVKGDVIYQIILDRFYDGDTTNNNPAKSYGLYDPTKSKWKMYWGGDLEGVRQKLPYLKQLGVTTIWLSPVLDNLDTLAGTDNTGYHGYWTRDFKQIEEHFGNWTTFDTLVNDAHQNGIKVIVDFVPNHSTPFKANDSTFAEGGALYNNGTYMGNYFDDATKGYFHHNGDISNWDDRYEAQWKNFTDPAGFSLADLSQENGTIAQYLTDAAVQLVAHGADGLRIDVVKHFNSGFSKSLADKLYQKKDIFLVGEWYGDDPGTANHLEKVRYANNSGVNVLDFDLNTVIRNVFGTFTQTMYDLNNMVNQTGNEYKYKENLITFIDNHDMSRFLSVNSNKANLHQALAFILTSRGTPSIYYGTEQYMAGGNDPYNRGMMPAFDTTTTAFKEVSTLAGLRRNNAAIQYGTTTQRWINNDVYIYERKFFNDVVLVAINRNTQSSYSISGLQTALPNGSYADYLSGLLGGNGISVSNGSVASFTLAPGAVSVWQYSTSASAPQIGSVAPNMGIPGNVVTIDGKGFGTTQGTVTFGGVTATVKSWTSNRIEVYVPNMAAGLTDVKVTAGGVSSNLYSYNILSGTQTSVVFTVKSAPPTNLGDKIYLTGNIPELGNWSTDTSGAVNNAQGPLLAPNYPDWFYVFSVPAGKTIQFKFFIKRADGTIQWENGSNHVATTPTGATGNITVTWQN

SEQ ID NO: 45145 - protein, 686 aa, Bacillus sp.
SSSASVKGDVIYQIIIDRFYDGDTTNNNPAKSYGLYDPTKSKWKMYWGGDLEGVRQKLPYLKQLGVTTIWLSPVLDNLDTLAGTDNTGYHGYWTRDFKQIEEHFGNWTTFDTLVNDAHQNGIKVIVDFVPNHSTPFKANDSTFAEGGALYNNGTYMGNYFDDATKGYFHHNGDISNWDDRYEAQWKNFTDPAGFSLADLSQENGTIAQYLTDAAVQLVAHGADGLRIDVVKHFNSGFSKSLADTLYQKKDIFLVGEWYGDDPGTANHLEKVRYANNSGVNVLDFDLNTVIRNVFGTFTQTMYDLNNMVNQTGNEYKYKENLITFIDNHDMSRFLSVNSNKANLHQALAFILTSRGTPSIYYGTEQYMAGGNDPYNRGMMPAFDTTTTAFKEVSTLAGLRRNNAAIQYGTTTQRWINNDVYIYERKFFNDVVLVAINRNTQSSYSISGLQTALPNGSYADYLSGLLGGNGISVSNGSVASFTLAPGAVSVWQYSTSASAPQIGSVAPNMGIPGNVVTIDGKGFGTTQGTVTFGGVTATVKSWTSNRIEVYVPNMAAGLTDVKVTAGGVSSNLYSYNILSGTQTSVVFTVKSAPPTNLGDKIYLTGNIPELGNWSTDTSGAVNNAQGPLLAPNYPDWFYVFSVPAGKTIQFKFFIKRADGTIQWENGSNHVATTPTGATGNITVTWQN

SEQ ID NO: 45146 - protein, 686 aa, Geobacillus stearothermophilus
SSSASVKGDVIYQIIIDRFYDGDTTNNNPAKSYGLYDPTKSKWKMYWGGDLEGVRQKLPYLKQLGVTTIWLSPVLDNLDTLAGTDNTGYHGYXTRDFKQIEEHFGNWTTFDTLVNDAHQNGIKVIVDFVPNHSTPFKANDSTFAEGGALYNNGTYMGNYFDDATKGYFHHNGDISNWDDRYEAQWKNXTDPAGFSLADLSQENGTIAQYLTDAAVQLVAHGADGLRIDAVKHFNSGFSKSLADKLYQKKDIFLVGEWYGDDPGTANHLEKVRYANNSGVNVLDFDLNTVIRNVFGTFTQTMYDLNNMVNQTGNEYKYKENLITFIDNHDMSRFLSVNSNKANLHQALAFILTSRGTPSIYYGTEQYMAGGNDPYNRGMMPAFDTTTTAFKEVSTLAGLRRNNAAIQYGTTTQRWINNDVYIYERKFFNDVVLVAINRNTQSSYSISGLQTALPNGSYADYLSGLLGGNGISVSNGSVASFTLAPGAVSVWQYSTSASAPQIGSVAPNMGIPGNVVTIDGKGFGTTQGTVTFGGVTATVKSWTSNRIEVYVPNMAAGLTDVKVTAGGVSSNLYSYNILSGTQTSVVFTVKSAPPTNLGDKIYLTGNIPELGNWSTDTSGAVNNAQGPLLAPNYPDWFYVFSVPAGKTIQFKFFIKRADGTIQWENGSNHVATTPTGATGNITVTWQN

SEQ ID NO: 45147 - protein, 686 aa, Geobacillus stearothermophilus
SSSASVKGDVIYQIIIDRFYDGDTTNNNPAKSYGLYDPTKSKWKMYWGGDLEGVRQKLPYLKQLGVTTIWLSPVLDNLDTLAGTDNTGYHGYWTRDFKQIEEHFGNWTTFDTLVNDAHQNGIKVIVDFVPNHSTPFKANDSTFAEGGALYNNGTYMGNYFDDATKGYFHHNGDISNWDDRYEAQWKNLTDPAGFSLADLNQENGTIAQYLTDAAVQLVAHGADGLRIDAVKHFNSGFSKSLADKLYQKKDIFLVGEWYGDGPGTANHLEKVRYANNSGVNVLDFDLNTVIRNVFGTFTQTMYDLNNMVNQTGNEYKYKENLITFIDNHDMSRFLSVNSNKANLHQALAFILTSRGTPSIYYGTEQYMAGGNDPYNRGMMPAFDTTTTAFKEVSTLAGLRRNNAAIQYGTTTQRWINNDVYIYERKFFNDVVLVAINRNTQSSYSISGLQTALPNGSYADYLSGLLGGNGISVSNGSVASFTLAPGAVSVWQYSTSASAPQIGSVAPNMGIPGNVVTIDGKGFGTTQGTVTFGGVTATVKSWTSNRIEVYVPNMAAGLTDVKVTAGGVSSNLYSYNILSGTQTSVVFTVKSAPPTNLGDKIYLTGNIPELGNWSTDTSGAVNNAQGPLLAPNYPDWFYVFSVPAGKTIQFKFFIKRADGTIQWENGSNHVATTPTGATGNITVTWQN

SEQ ID NO: 45148 - protein, 686 aa, unidentified
SSSASVKGDVIYQIIIDRFYDGDTTNNNPAKSYGLYDPTKSKWKMYWGGDLEGVRQKLPYLKQLGVTTIWLSPVLDNLDTLAGTDNTGYHGYWTRDFKQIEEHFGNWTTFDTLVNDAHQNGIKVIVDFVPNHSTPFKANDSTFAEGGALYNNGTYMGNYFDDATKGYFHHNGDISNWDDRYEAQWKNLTDPAGFSLADLSQENGTIAQYLTDAAVQLVAHGADGLRIDAVKHFNSGFSKSLADKLYQKKDIFLVGEWYGDGPGTANHLEKVRYANNSGVNVLDFDLNPVIRNVFGTFTQTMYDLNNMVNQTGNEYKYKENLITFIDNHDMSRFLSVNSNKANLHQALAFILTSRGTPSIYYGTEQYMAGGNDPYNRGMMPAFDTTTTAFKEVSTLAGLRRNNAAIQYGTTTQRWINNDVYIYERKFFNDVVLVAINRNTQSSYSISGLQTALPNGSYADYLSGLLGGNGISVSNGSVASFTLAPGAVSVWQYSTSASAPQIGSVAPNMGIPGNVVTIDGKGFGTTQGTVTFGGVTATVKSWTSNRIEVYVPNMAAGLTDVKVTAGGVSSNLYSYNILSGTQTSVVFTVKSAPPTNLGDKIYLTGNIPELGNWSTDTSGAVNNAQGPLLAPNYPDWFYVFSVPAGKTIQFKFFIKRADGTIQWENGSNHVATTPTGATGNITVTWQN

SEQ ID NO: 45149 - protein, 686 aa, Geobacillus stearothermophilus
SSSASVKGDVIYQIIIDRFYDGDTTNNNPAKSYGLYDPTKSKWKMYWGGDLEGVRQKLPYLKQLGVTTIWLSPVLDNLDTLAGTDNTGYHGYWTRDFKQIEEHFGNWTTFDTLVNDAHQNGIKVIVDFVPNHSTPFKANDSTFAEGGALYNNGTYMGNYFDDATKGYFHHNGDISNWDDRYEAQWKNITDPAGFSLADLNQENGTIAQYLTDAAVQLVAHGADGLRIDAVKHFNSGFSKSLADKLYQKKDIFLVGEWYGDGPGTANHLEKVRYANNSGVNVLDFDLNPVIRNVFGTFTQTMYDLNNMVNQTGNEYKYKENLITFIDNHDMSRFLSVNSNKANLHQALAFILTSRGTPSIYYGTEQYMAGGNDPYNRGMMPAFDTTTTAFKEVSTLAGLRRNNAAIQYGTTTQRWINNDVYIYERKFFNDVVLVAINRNTQSSYSISGLQTALPNGSYADYLSGLLGGNGISVSNGSVASFTLAPGAVSVWQYSTSASAPQIGSVAPNMGIPGNVVTIDGKGFGTTQGTVTFGGVTATVKSWTSNRIEVYVPNMAAGLTDVKVTAGGVSSNLYSYNILSGTQTSVVFTVKSAPPTNLGDKIYLTGNIPELGNWSTDTSGAVNNAQGPLLAPNYPDWFYVFSVPAGKTIQFKFFIKRADGTIQWENGSNHVATTPTGATGNITVTWQN

SEQ ID NO: 45150 - protein, 686 aa, Geobacillus stearothermophilus
SSSASVKGDVIYQIIIDRFYDGDTTNNNPAKSYGLYDPTKSKWKMYWGGDLEGVRQKLPYLKQLGVTTIWLSPVLDNLDTLAGTDNTGYHGYWTRDFKQIEEHFGNWTTFDTLVNDAHQNGIKVIVDFVPNHSTPFKANDSTFAEGGALYNNGTYMGNYFDDATKGYFHHNGDISNWDDRYEAQWKNLTDPAGFSLADLNQENGTIAQYLTDAAVQLVAHGADGLRIDAVKHFNSGFSKSLADKLYQKKDIFLVGEWYGDGPGTANHLEKVRYANNSGVNVLDFDLNPVIRNVFGTFTQTMYDLNNMVNQTGNEYKYKENLITFIDNHDMSRFLSVNSNKANLHQALAFILTSRGTPSIYYGTEQYMAGGNDPYNRGMMPAFDTTTTAFKEVSTLAGLRRNNAAIQYGTTTQRWINNDVYIYERKFFNDVVLVAINRNTQSSYSISGLQTALPNGSYADYLSGLLGGNGISVSNGSVASFTLAPGAVSVWQYSTSASAPQIGSVAPNMGIPGNVVTIDGKGFGTTQGTVTFGGVTATVKSWTSNRIEVYVPNMAAGLTDVKVTAGGVSSNLYSYNILSGTQTSVVFTVKSAPPTNLGDKIYLTGNIPELGNWSTDTSGAVNNAQGPLLAPNYPDWFYVFSVPAGKTIQFKFFIKRADGTIQWENGSNHVATTPTGATGNITVTWQN

SEQ ID NO: 45151 - protein, 686 aa, Geobacillus stearothermophilus
SSSASVKGDVIYQIIIDRFYDGDTTNNNPAKSYGLYDPTKSKWKMYWGGDLEGVRQKLPYLKQLGVTTIWLSPVLDNLDTLAGTDNTGFHGYWTRDFKQIEEHFGNWTTFDTLVNDAHQNGIKVIVDFVPNHSTPFKANDSTFAEGGALYNNGTYMGNYFDDATKGYFHHNGDISNWDDRYEAQWKNFTDSAGFSLADLSQENGTIAQYLTDAAVQLVAHGADGLRIDAVKHFNSGFSKSLADKLYQKKDIFLVGEWYGDGPGTANHLEKVRYANNSGVNVLDFDLNPVIRNVFGTFTQTMYDLNNMVNQTGNEYKYKENLITFIDNHDMSRFLSVNSNKANLHQALAFILTSRGTPSIYYGTEQYMAGGNDPYNRGMMPAFDTTTTAFKEVSTLAGLRRNNAAIQYGTTTQRWINNDVYIYERKFFNDVVLVAINRNTQSSYSISGLQTALPNGSYADYLSGLLGGNGISVSNGSVASFTLAPGAVSVWQYSTSASAPQIGSVAPNMGIPGNVVTIDGKGFGTTQGTVTFGGVTATVKSWTSNRIEVYVPNMAAGLTDVKVTAGGVSSNLYSYNILSGTQTSVVFTVKSAPPTNLGDKIYLTGNIPELGNWSTDTSGAVNNAQGPLLAPNYPDWFYVFSVPAGKTIQFKFFIKRADGTIQWENGSNHVATTPTGATGNITVTWQN

SEQ ID NO: 45152 - protein, 686 aa, Bacillus sp.
SSSASVKGDVIYQIIIDRFYDGDTTNNNPAKSYGLYDPTKSKWKMYWGGDLEGVRQKLPYLKQLGVTTIWLSPVLDNLDTLAGTDNTGYHGYWTRDFKQIEEHFGNWTTFDTLVNDAHQNGIKVIVDFVPNHSTPFKANDSTFAEGGALYNNGTYMGNYFDDATKGYFHHNGDISNWDDRYEAQWKNLTDPAGFSLADLSQENGTIAQYLTDAAVQLVAHGADGLRIDAVKHFNSGFSKSLADKLYQKKDIFLVGEWYGDGPGTANHLEKVRYANNSGVNVLDFDLNPVIRNVFGTFTQTMYDLNNMVNQTGNEYKYKENLITFIDNHDMSRFLSVNSNKANLHQALAFILTSRGTPSIYYGTEQYMAGGNDPYNRGMMPAFDTTTTAFKEVSTLAGLRRNNAAIQYGTTTQRWINNDVYIYERKFFNDVVLVAINRNTQSSYSISGLRTALPNGSYADYLSGLLGGNGISVSNGSVASFTLAPGAVSVWQYSTSASAPQIGSVAPNMGIPGNVVTIDGKGFGTTQGTVTFGGVTATVKSWTSNRIEVYVPNMAAGLTDVKVTAGGVSSNLYSYNILSGTQTSVVFTVKSAPPTNLGDKIYLTGNIPELGNWSTDTSGAVNNAQGPLLAPNYPDWFYVFSVPAGKTIQFKFFIKRADGTIQWENGSNHVATTPTGATGNITVTWQN

SEQ ID NO: 45153 - protein, 686 aa, Effusibacillus pohliae
SSSASVKGDVIYQIIIDRFYDGDTTNNNPAKSYGLYDPTKSKWKMYWGGDLEGVRQKLPYLKQLGVTTIWLSPVLDNLDTLAGTDNTGYHGYWTRDFKQIEEHFGNWTTFDTLVNDAHQNGIKVIVDFVPNHSTPFKANDSTFAEGGALYDNGTYMGNYFDDATKGYFHHNGDISNWDDRYEAQWKNFTDPAGFSLADLSQENGTIAQYLTDAAVQLVAHGADGLRIDAVKHFNSGFSKSLADKLYQKKDIFLVGEWYGDDPGAANHLEKVRYANNSGVNVLDFDLNTVIRNVFGTFTQTMYDLNNMVNQTGNEYKYKENLITFIDNHDMSRFLTVNSNKANLHQALAFILTSRGTPSIYYGTEQYMAGGNDPYNRGMMPAFDTTTTAFKEVSTLAGLRRNNAAIQYGTTTQRWINNDVYIYERKFFNDVVLVAINRNTQSSYSISGLQTALPNGNYADYLSGLLGGNGISVSNGSVASFTLAPGAVSVWQYSTSASAPQIGSVAPNMGIPGNVVTIDGKGFGTTQGTVTFGGVTATVKSWTSNRIEVYVPNMAAGLTDVKVTAGGVSSNLYSYNILSGTQTSVVFTVKSAPPTNLGDKIYLTGNIPELGNWSTDTSGAVNNAQGPLLAPNYPDWFYVFSVPAGKTIQFKFFIKRADGTIQWENGSNHVATTPTGATGNITVTWQN

SEQ ID NO: 45154 - protein, 686 aa, Bacillus sp.
SSSASVKGDVIYQIIIDRFYDGDTTNNNPAKSYGLYDPTKSKWKMYWGGDLEGVRQKLPYLKQLGVTTIWLSPVLDNLDTLAGTDNTGYHGYWTRDFKQIEEHFGNWTTFDTLVNDAHQNGIKVIVDFVPNHSTPFKANDSTFAEGGALYNNGTYMGNYFDDATKGYFHHNGDISNWDDRYEAQWKNFTDPAGFSLPDLSQENGTIAQYLTDAAVQLVAHGADGLRIDAVKHFNSGFSKSLADKLYQKKDIFLVGEWYGDGPGTANHLEKVRYANNSGVNVLDFDLNPVIRNVFGTFTQTMYDLNNMVNQTGNEYKYKENLITFIDNHDMSRFLSVNSNKASLHQALAFILTSRGTPSIYYGTEQYMAGGNDPYNRGMMPAFDTTTTAFKEVSTLAGLRRNNAAIQYGTTTQRWINNDVYIYERKFFNDVVLVAINRNTQSSYSISGLQTALPNGSYADYLSGLLGGNGISVSNGSVASFTLAPGAVSVWQYSTSASAPQIGSVAPNMGIPGNVVTIDGKGFGTTQGTVTFGGVTATVKSWTSNRIEVYVPNMAAGLTDVKVTAGGVSSNLYSYNILSGTQTSVVFTVKSAPPTNLGDKIYLTGNIPELGNWSTDTSGAVNNAQGPLLAPNYPDWFYVFSVPAGKTIQFKFFIKRADGTIQWENGSNHVATTPTGATGNITVTWQN

SEQ ID NO: 45155 - protein, 686 aa, Geobacillus stearothermophilus
SSSASVKGDVIYQIIIDRFYDGDTTNNNPAKSYGLYDPTKSKWKMYWGGDLEGVRQKLPYLKQLGVTTIWLSPVLDNLDTLAGTDNTGYHGYWTRDFKQIEEHFGNWTTFDTLVNDAHQNGIKVIVDFVPNHSTPFKANDSTFAEGGALYNNGTYMGNYFDDATKGYFHHNGDISNWDDRYEAQWKNFTDPAGYSLADLSQENGTIAQYLTDAAVQLVAHGADGLRIDAVKHFNSGFSKSLADKLYQKKDIFLVGEWYGDGPGTANHLEKVRYANNSGVNVLDFDLNPVIRNVFGTFTQTMYDLNNMVNQTGNEYKYKENLITFIDNHDMSRFLSVNSNKANLHQALAFILTSRGTPSIYYGTEQYMAGGNDPYSRGMMPAFDTTTTAFKEVSTLAGLRRNNAAIQYGTTTQRWINNDVYIYERKFFNDVVLVAINRNTQSSYSISGLQTALPNGSYADYLSGLLGGNGISVSNGSVASFTLAPGAVSVWQYSTSASAPQIGSVAPNMGIPGNVVTIDGKGFGTTQGTVTFGGVTATVKSWTSNRIEVYVPNMAAGLTDVKVTAGGVSSNLYSYNILSGTQTSVVFTVKSAPPTNLGDKIYLTGNIPELGNWSTDTSGAVNNAQGPLLAPNYPDWFYVFSVPAGKTIQFKFFIKRADGTIQWENGSNHVATTPTGATGNITVTWQN

SEQ ID NO: 45156 - protein, 686 aa, Geobacillus stearothermophilus
SSSASVKGDVIYQIIIDRFYDGDTTNNNPAKSYGLYDPTKSKWKMYWGGDLEGVRQKLPYLKQLGVTTIWLSPVLDNLDTLAGTDNTGFHGYWTRDFKQIEEHFGNWTTFDTLVNDAHQNGIKVIVDFVPNHSTPFKANDSTFAEGGALYNNGTYMGNYFDDATKGYFHHNGDISNWDDRYEAQWKNFTDPAGFSLADLSQENGTIAQYLTDAAVQLVAHGADGLRIDAVKHFNSGFSKSLADKLYQKKDIFLVGEWYGDGPGTANHLEKVRYANNSGVNVLDFDLNPVIRNVFGTFTQTMYDLNNMVNQTGNEYKYKENLITFIDNHDMSRFLSVNSNKANLHQALAFILTSRGTPSIYYGTEQYMAGGNDPYSRGMMPAFDTTTTAFKEVSTLAGLRRNNAAIQYGTTTQRWINNDVYIYERKFFNDVVLVAINRNTQSSYSISGLQTALPNGSYADYLSGLLGGNGISVSNGSVASFTLAPGAVSVWQYSTSASAPQIGSVAPNMGIPGNVVTIDGKGFGTTQGTVTFGGVTATVKSWTSNRIEVYVPNMAAGLTDVKVTAGGVSSNLYSYNILSGTQTSVVFTVKSAPPTNLGDKIYLTGNIPELGNWSTDTSGAVNNAQGPLLAPNYPDWFYVFSVPAGKTIQFKFFIKRADGTIQWENGSNHVATTPTGATGNITVTWQN

SEQ ID NO: 45157 - protein, 686 aa, Alicyclobacillus
SSSASVKGDVIYQIIIDRFYDGDTTNNNPAKSYGLYDPTKSKWKMYWGGDLEGVRQKLPYLKQLGVTTIWLSPVLDNLDTLAGTDNTGYHGYWTRDFKQIEEHFGNWTTFDTLVNDAHQNGIKVIVDFVPNHSTPFKANDSTFAEGGALYDNGTYMGNYFDDATKGYFHHNGDISNWDDRYEAQWKNFTDPAGFSLADLSQENGTIAQYLTDAAVQLVAHGADGLRIDAVKHFNSGFSKSLADKLYQKKDIFLVGEWYGDDPGSANHLEKVRYANNSGVNVLDFDLNTVIRNVFGTFTQTMYDLNNMVNQTGNEYKYKENLITFIDNHDMSRFLTVNSNKANLHQALAFILTSRGTPSIYYGTEQYMAGGNDPYNRGMMPAFDTTTTAFKEVSTLAGLRRNNAAIQYGTTTQRWINNDVYIYERKFFNDVVLVAINRNTQSSYSISGLQTALPNGNYADYLSGLLGGNGISVSNGSVASFTLAPGAVSVWQYSTSASAPQIGSVAPNMGIPGNVVTIDGKGFGTTQGTVTFGGVTATVKSWTSNRIEVYVPNMAAGLTDVKVTAGGVSSNLYSYNILSGTQTSVVFTVKSAPPTNLGDKIYLTGNIPELGNWSTDTSGAVNNAQGPLLAPNYPDWFYVFSVPAGKTIQFKFFIKRADGTIQWENGSNHVATTPTGATGNITVTWQN

SEQ ID NO: 45158 - protein, 686 aa, Bacillus sp.
SSSASVKGDVIYQIIIDRFYDGDTTNNNPAKSYGLYDPTKSKWKMYWGGDLEGVRQKLPYLKQLGVTTIWLSPVLDNLDTLAGTDNTGYHGYWTRDFKQIEEHFGNWTTFDTLVNDAHQNGIKVIVDFVPNHSTPFKANDSTFAEGGALYNNGTYMGNYFDDATKGYFHHNGDISNWDDRYEAQWKNLTDPAGFSLADLSQENGTIAQYLTDAAVQLVAHGADGLRIDAVKHFNSGFSKSLADKLYQKKDIFLVGEWYGDGPGTANHLEKVRYANNSGVNVLDFDLNPVIRNVFGTFTQTMYDLNNMVNQTGNEYKYKENLITFIDNHDMSRFLSVNSNKANLHQALAFILTSRGTPSIYYGTEQYMAGGNDPYNRGMMPAFDTTTTAFKEVSTLAGLRRNNAAIQYGTTTQRWINNDVYIYERKFFNDVVLVAINRNTQSSYSISGLQTALPNGSYADYLSGLLGGNGISVSNGSVASFTLTPGAVSVWQYSTSASAPQIGSVAPNMGIPGNVVTIDGKGFGTTQGTVTFGGVTATVKSWTSNRIEVYVPNMAAGLTDVKVTAGGVSSNLYSYNILSGTQTSVVFTVKSAPPTNLGDKIYLTGNIPELGNWSTDTSGAVNNAQGPLLAPNYPDWFYVFSVPAGKTIQFKFFIKRADGTIQWENGSNHVATTPTGATGNITVTWQN

SEQ ID NO: 45159 - protein, 686 aa, Bacillus sp.
SSSASVKGDVIYQIIIDRFYDGDTTNNNPAKSYGLYDPTKSKWKMYWGGDLEGVRQKLPYLKQLGVTTIWLSPVLDNLDTLAGTDNTGYHGYWTRDFKQIEEHFGNWTTFDTLVNDAHQNGIKVIVDFVPNHSTPFKANDSAFAEGGALYNNGTYMGNYFDDATKGYFHHNGDISNWDDRYEAQWKNFTDPAGFSLADLSQENGTIAQYLTDAAVQLVAHGADGLRIDAVKHFNSGFSKSLADKLYQKKDIFLVGEWYGDGPGTANHLEKVRYANNSGVNVLDFDLNPVIRNVFGTFTQTMYDLNNMVNQTGNEYKYKENLITFIDNHDMSRFLSVNSNKANLHQALAFILTSRGTPSIYYGTEQYMAGGNDPYNRGMMPAFDTTTTAFKEVSTLAGLRRNNAAIQYGTTTQRWINNDVYIYERKFFNDVVLVAINRNTQSSYSISGLRTALPNGSYADYLSGLLGGNGISVSNGSVASFTLAPGAVSVWQYSTSASAPQIGSVAPNMGIPGNVVTIDGKGFGTTQGTVTFGGVTATVKSWTSNRIEVYVPNMAAGLTDVKVTAGGVSSNLYSYNILSGTQTSVVFTVKSAPPTNLGDKIYLTGNIPELGNWSTDTSGAVNNAQGPLLAPNYPDWFYVFSVPAGKTIQFKFFIKRADGTIQWENGSNHVATTPTGATGNITVTWQN

SEQ ID NO: 45160 - protein, 686 aa, Geobacillus stearothermophilus
SSSASVKGDVIYQIIIDRFYDGDTTNNNPAKSYGLYDPTKSKWKMYWGGDLEGVRQKLPYLKQLGVTTIWLSPVLDNLDTLAGTDNTGFHGYWTRDFKQIEEHFGNWTTFDTLVNDAHQNGIKVIVDFVPNHSTPFKANDSTFAEGGALYNNGTYMGNYFDDATKGYFHHNGDISNWDDRYEAQWKNFTDPAGYSLADLSQENGTIAQYLTDAAVQLVAHGADGLRIDAVKHFNSGFSKSLADKLYQKKDIFLVGEWYGDGPGTANHLEKVRYANNSGVNVLDFDLNPVIRNVFGTFTQTMYDLNNMVNQTGNEYKYKENLITFIDNHDMSRFLSVNSNKANLHQALAFILTSRGTPSIYYGTEQYMAGGNDPYNRGMMPAFDTTTTAFKEVSTLAGLRRNNAAIQYGTTTQRWINNDVYIYERKFFNDVVLVAINRNTQSSYSISGLQTALPNGSYADYLSGLLGGNGISVSNGSVASFTLAPGAVSVWQYSTSASAPQIGSVAPNMGIPGNVVTIDGKGFGTTQGTVTFGGVTATVKSWTSNRIEVYVPNMAAGLTDVKVTAGGVSSNLYSYNILSGTQTSVVFTVKSAPPTNLGDKIYLTGNIPELGNWSTDTSGAVNNAQGPLLAPNYPDWFYVFSVPAGKTIQFKFFIKRADGTIQWENGSNHVATTPTGATGNITVTWQN

SEQ ID NO: 45161 - protein, 686 aa, Alicyclobacillus
SSSASVKGDVIYQIIIDRFYDGDTTNNNPAKSYGLYDPTKSKWKMYWGGDLEGVRQKLPYLKQLGVTTIWLSPVLDNLDTLAGTDNTGYHGYWTRDFKQIEEHFGNWTTFDTLVNDAHQNGIKVIVDFVPNHSTPFKANDSTFAEGGALYDNGTYMGNYFDDATKGYFHHNGDISNWDDRYEAQWKNFTDPAGFSLADLSQENGTIAQYLTDAAVQLVDHGADGLRIDAVKHFNSGFSKSLADKLYQKKDIFLVGEWYGDDPGAANHLEKVRYANNSGVNVLDFDLNTVIRNVFGTFTQTMYDLNNMVNQTGNEYKYKENLITFIDNHDMSRFLTVNSNKANLHQALAFILTSRGTPSIYYGTEQYMAGGNDPYNRGMMPAFDTTTTAFKEVSTLAGLRRNNAAIQYGTTTQRWINNDVYIYERKFFNDVVLVAINRNTQSSYSISGLQTALPNGNYADYLSGLLGGNGISVSNGSVASFTLAPGAVSVWQYSTSASAPQIGSVAPNMGIPGNVVTIDGKGFGTTQGTVTFGGVTATVKSWTSNRIEVYVPNMAAGLTDVKVTAGGVSSNLYSYNILSGTQTSVVFTVKSAPPTNLGDKIYLTGNIPELGNWSTDTSGAVNNAQGPLLAPNYPDWFYVFSVPAGKTIQFKFFIKRADGTIQWENGSNHVATTPTGATGNITVTWQN

SEQ ID NO: 45162 - protein, 686 aa, Alicyclobacillus
SSSASVKGDVIYQIIIDRFYDGDTTNNNPAKSYGLYDPTKSKWKMYWGGDLEGVRQKLPYLKQLGVTTIWLSPVLDNLDTLAGTDNTGYHGYWTRDFKQIEEHFGNWTTFDTLVNDAHQNGIKVIVDFVPNHSTPFKANDSTFAEGGALYDNGTYMGNYFDDATKGYFHHNGDISNWDDRYEAQWKNFTDPAGFSLADLSQENGTIAQYLTDAAVQLVAHGVDGLRIDAVKHFNSGFSKSLADKLYQKKDIFLVGEWYGDDPGAANHLEKVRYANNSGVNVLDFDLNTVIRNVFGTFTQTMYDLNNMVNQTGNEYKYKENLITFIDNHDMSRFLTVNSNKANLHQALAFILTSRGTPSIYYGTEQYMAGGNDPYNRGMMPAFDTTTTAFKEVSTLAGLRRNNAAIQYGTTTQRWINNDVYIYERKFFNDVVLVAINRNTQSSYSISGLQTALPNGNYADYLSGLLGGNGISVSNGSVASFTLAPGAVSVWQYSTSASAPQIGSVAPNMGIPGNVVTIDGKGFGTTQGTVTFGGVTATVKSWTSNRIEVYVPNMAAGLTDVKVTAGGVSSNLYSYNILSGTQTSVVFTVKSAPPTNLGDKIYLTGNIPELGNWSTDTSGAVNNAQGPLLAPNYPDWFYVFSVPAGKTIQFKFFIKRADGTIQWENGSNHVATTPTGATGNITVTWQN

SEQ ID NO: 45163 - protein, 686 aa, Alicyclobacillus
SSSASVKGDVIYQIIIDRFYDGDTTNNNPAKSYGLYDPTKSKWKMYWGGDLEGVRQKLPYLKQLGVTTIWLSPVLDNLDTLAGTDNTGYHGYWTRDFKQIEEHFGNWTTFDTLVNDAHQNGIKVIVDFVPNHSTPFKANDSTFAEGGALYDNGTYMGNYFDDATKGYFHHNGDISNWDDRYEAQWKNFTDPAGFSLADLSQENGTIAQYLTDAAVQLVAHGADGLRIDAVKHFNSGFSKSLADKLYQKKDIFLVGEWYGDDPGAANHLEKVRYANNSGVNVLDFDLNTVIRNVFGTFTQTMYDLNNMVNQTGNEYKYKENLITFIDNHDMSRFLTVNSNKANLHQALAFILTSRGTPSIYYGTEQYMAGGNDPYNRGMMPAFDTTTTAFKEVSTLAGLRRNNAAIQYGTTTQRWINNDVYIYERKFFNDVVLVAINRNTQSSYSISGLQTALPNGNYADYLSGLLGGNGISVSNGSVASFTLAPGAVSVWQYSTSASAPQIGSVAPNMGIPGNVVTIDGKGFGTTQGTVTFGGVTATVKSWTSNRIEVYVPNMAAGLTDVKVTAGGVSSNLYSYNILSGTQTSVVFTVKSAPPTNLGDKIYLTGNIPELGNWSTDTSGAVNNAQGPLLAPNYPDWFYVFSVPAGKTIEFKFFIKRADGTIQWENGSNHVATTPTGATGNITVTWQN

SEQ ID NO: 45164 - protein, 686 aa, Alicyclobacillus
SSSASVKGDVIYQIIIDRFYDGDTTNNNPAKSYGLYDPTKSKWKMYWGGDLEGVRQKLPYLKQLGVTTLWLSPVLDNLDTLAGTDNTGYHGYWTRDFKQIEEHFGNWTTFDTLVNDAHQNGIKVIVDFVPNHSTPFKANDSTFAEGGALYDNGTYMGNYFDDATKGYFHHNGDISNWDDRYEAQWKNFTDPAGFSLADLSQENGTIAQYLTDAAVQLVAHGADGLRIDAVKHFNSGFSKSLADKLYQKKDIFLVGEWYGDDPGAANHLEKVRYANNSGVNVLDFDLNTVIRNVFGTFTQTMYDLNNMVNQTGNEYKYKENLITFIDNHDMSRFLTVNSNKANLHQALAFILTSRGTPSIYYGTEQYMAGGNDPYNRGMMPAFDTTTTAFKEVSTLAGLRRNNAAIQYGTTTQRWINNDVYIYERKFFNDVVLVAINRNTQSSYSISGLQTALPNGNYADYLSGLLGGNGISVSNGSVASFTLAPGAVSVWQYSTSASAPQIGSVAPNMGIPGNVVTIDGKGFGTTQGTVTFGGVTATVKSWTSNRIEVYVPNMAAGLTDVKVTAGGVSSNLYSYNILSGTQTSVVFTVKSAPPTNLGDKIYLTGNIPELGNWSTDTSGAVNNAQGPLLAPNYPDWFYVFSVPAGKTIQFKFFIKRADGTIQWENGSNHVATTPTGATGNITVTWQN

SEQ ID NO: 45165 - protein, 686 aa, Effusibacillus pohliae
SSSASVKGDVIYQIIIDRFYDGDTTNNNPAKSYGLYDPTKSKWKMYWGGDLEGVRQKLPYLKQLGVTTIWLSPVLDNLDTLAGTDNTGYHGYWTRDFKQIEEHFGNWTTFDTLVNDAHQNGIKVIVDFVPNHSTPFKANDSTFAEGGALYDNGTYMGNYFDDATKGYFHHNGDISNWDDRYEAQWKNFTDPAGFSLADLSQENGTIAQYLTDAAVQLVAHGADGLRIDAVKHFNSGFSKSLADKLYQKKDIFLVGEWYGDDPGAANHLEKVRYANNSGVNVIDFDLNTVIRNVFGTFTQTMYDLNNMVNQTGNEYKYKENLITFIDNHDMSRFLTVNSNKANLHQALAFILTSRGTPSIYYGTEQYMAGGNDPYNRGMMPAFDTTTTAFKEVSTLAGLRRNNAAIQYGTTTQRWINNDVYIYERKFFNDVVLVAINRNTQSSYSISGLQTALPNGNYADYLSGLLGGNGISVSNGSVASFTLAPGAVSVWQYSTSASAPQIGSVAPNMGIPGNVVTIDGKGFGTTQGTVTFGGVTATVKSWTSNRIEVYVPNMAAGLTDVKVTAGGVSSNLYSYNILSGTQTSVVFTVKSAPPTNLGDKIYLTGNIPELGNWSTDTSGAVNNAQGPLLAPNYPDWFYVFSVPAGKTIQFKFFIKRADGTIQWENGSNHVATTPTGATGNITVTWQN

SEQ ID NO: 45166 - protein, 686 aa, Alicyclobacillus
SSSASVKGDVIYQIIIDRFYDGDTTNNNPAKSYGLYDPTKSKWKMYWGGDLEGVRQKLPYLKQLGVTTIWLSPVLDNLDTLAGTDNTGYHGYWTRDFKQIEEHFGNWTTFDTLVNDAHQNGIKVIVDFVPNHSTPFKANDSTFAEGGALYDNGTYMGNYFDDATKGYFHHNGDISNWDDRYEAQWKNFTDPAGFSLADLSQENGTIAQYLTDAAVQLVAHGADGLRIDAVKHFNSGFSKSLADKLYQKKDIFLVGEWYGDDPAAANHLEKVRYANNSGVNVLDFDLNTVIRNVFGTFTQTMYDLNNMVNQTGNEYKYKENLITFIDNHDMSRFLTVNSNKANLHQALAFILTSRGTPSIYYGTEQYMAGGNDPYNRGMMPAFDTTTTAFKEVSTLAGLRRNNAAIQYGTTTQRWINNDVYIYERKFFNDVVLVAINRNTQSSYSISGLQTALPNGNYADYLSGLLGGNGISVSNGSVASFTLAPGAVSVWQYSTSASAPQIGSVAPNMGIPGNVVTIDGKGFGTTQGTVTFGGVTATVKSWTSNRIEVYVPNMAAGLTDVKVTAGGVSSNLYSYNILSGTQTSVVFTVKSAPPTNLGDKIYLTGNIPELGNWSTDTSGAVNNAQGPLLAPNYPDWFYVFSVPAGKTIQFKFFIKRADGTIQWENGSNHVATTPTGATGNITVTWQN

SEQ ID NO: 45167 - protein, 686 aa, Geobacillus stearothermophilus
SSSASVKGDVIYQIIIDRFYDGDTTNNNPAKSYGLYDPTKSKWKMYWGGDLEGVRQKLPYLKQLGVTTIWLSPVLDNLDTLAGTDNTGFHGYYTRDFKQIEEHFGNWTTFDTLVNDAHQNGIKVIVDFVPNHSTPFKANDSTFAEGGALYNNGTYMGNYFDDATKGYFHHNGDISNWDDRYEAQWKNFTDSAGFSLADLSQENGTIAQYLTDAAVQLVAHGADGLRIDAVKHFNSGFSKSLADKLYQKKDIFLVGEWYGDGPGTANHLEKVRYANNSGVNVLDFDLNPVIRNVFGTFTQTMYDLNNMVNQTGNEYKYKENLITFIDNHDMSRFLSVNSNKANLHQALAFILTSRGTPSIYYGTEQYMAGGNDPYNRGMMPAFDTTTTAFKEVSTLAGLRRNNAAIQYGTTTQRWINNDVYIYERKFFNDVVLVAINRNTQSSYSISGLQTALPNGSYADYLSGLLGGNGISVSNGSVASFTLAPGAVSVWQYSTSASAPQIGSVAPNMGIPGNVVTIDGKGFGTTQGTVTFGGVTATVKSWTSNRIEVYVPNMAAGLTDVKVTAGGVSSNLYSYNILSGTQTSVVFTVKSAPPTNLGDKIYLTGNIPELGNWSTDTSGAVNNAQGPLLAPNYPDWFYVFSVPAGKTIQFKFFIKRADGTIQWENGSNHVATTPTGATGNITVTWQN

SEQ ID NO: 45168 - protein, 686 aa, Alicyclobacillus
SSSASVKGDVIYQIIIDRFYDGDTTNNNPAKSYGLYDPTKSKWKMYWGGDLEGVRQKLPYLKQLGVTTIWLSPVLDNLDTLAGTDNTGYHGYWTRDFKQIEEHFGNWTTFDTLVNDAHQNGIKVIVDFVPNHSTPFKANDSTFAEGGALYDNGTYMGNYFDDATKGYFHHNGDISNWNDRYEAQWKNFTDPAGFSLADLSQENGTIAQYLTDAAVQLVAHGADGLRIDAVKHFNSGFSKSLADKLYQKKDIFLVGEWYGDDPGAANHLEKVRYANNSGVNVLDFDLNTVIRNVFGTFTQTMYDLNNMVNQTGNEYKYKENLITFIDNHDMSRFLTVNSNKANLHQALAFILTSRGTPSIYYGTEQYMAGGNDPYNRGMMPAFDTTTTAFKEVSTLAGLRRNNAAIQYGTTTQRWINNDVYIYERKFFNDVVLVAINRNTQSSYSISGLQTALPNGNYADYLSGLLGGNGISVSNGSVASFTLAPGAVSVWQYSTSASAPQIGSVAPNMGIPGNVVTIDGKGFGTTQGTVTFGGVTATVKSWTSNRIEVYVPNMAAGLTDVKVTAGGVSSNLYSYNILSGTQTSVVFTVKSAPPTNLGDKIYLTGNIPELGNWSTDTSGAVNNAQGPLLAPNYPDWFYVFSVPAGKTIQFKFFIKRADGTIQWENGSNHVATTPTGATGNITVTWQN

SEQ ID NO: 45169 - protein, 686 aa, Alicyclobacillus
SSSASVKGDVIYQIIIDRFYDGDTTNNNPAKSYGLYDPTKSKWKMYWGGDLEGVRQKLPYLKQLGVTTIWLSPVLDNLDTLAGTDNTGYHGYWTRDFKQIEEHFGNWTTFDTLVNDAHQNGIKVIVDFVPNHSTPFKANDSTFAEGGALYDNGTYMGNYFDDATKGYFHHNGDISNWDDRYEAQWKNFTDPAGFSLADLSQENGTIAQYLTDAAVQLVAHGADGLRIDAVKHFNSGFSKSLADKLYQKKDIFLVGEWYGDDPGAANHLEKVRYANNSGVNVLDFDLNTVIRNVFGTFTSTMYDLNNMVNQTGNEYKYKENLITFIDNHDMSRFLTVNSNKANLHQALAFILTSRGTPSIYYGTEQYMAGGNDPYNRGMMPAFDTTTTAFKEVSTLAGLRRNNAAIQYGTTTQRWINNDVYIYERKFFNDVVLVAINRNTQSSYSISGLQTALPNGNYADYLSGLLGGNGISVSNGSVASFTLAPGAVSVWQYSTSASAPQIGSVAPNMGIPGNVVTIDGKGFGTTQGTVTFGGVTATVKSWTSNRIEVYVPNMAAGLTDVKVTAGGVSSNLYSYNILSGTQTSVVFTVKSAPPTNLGDKIYLTGNIPELGNWSTDTSGAVNNAQGPLLAPNYPDWFYVFSVPAGKTIQFKFFIKRADGTIQWENGSNHVATTPTGATGNITVTWQN

SEQ ID NO: 45170 - protein, 686 aa, Alicyclobacillus
SSSASVKGDVIYQIIIDRFYDGDTTNNNPAKSYGLYDPTKSKWKMYWGGDLEGVRQKLPYLKQLGVTAIWLSPVLDNLDTLAGTDNTGYHGYWTRDFKQIEEHFGNWTTFDTLVNDAHQNGIKVIVDFVPNHSTPFKANDSTFAEGGALYDNGTYMGNYFDDATKGYFHHNGDISNWDDRYEAQWKNFTDPAGFSLADLSQENGTIAQYLTDAAVQLVAHGADGLRIDAVKHFNSGFSKSLADKLYQKKDIFLVGEWYGDDPGAANHLEKVRYANNSGVNVLDFDLNTVIRNVFGTFTQTMYDLNNMVNQTGNEYKYKENLITFIDNHDMSRFLTVNSNKANLHQALAFILTSRGTPSIYYGTEQYMAGGNDPYNRGMMPAFDTTTTAFKEVSTLAGLRRNNAAIQYGTTTQRWINNDVYIYERKFFNDVVLVAINRNTQSSYSISGLQTALPNGNYADYLSGLLGGNGISVSNGSVASFTLAPGAVSVWQYSTSASAPQIGSVAPNMGIPGNVVTIDGKGFGTTQGTVTFGGVTATVKSWTSNRIEVYVPNMAAGLTDVKVTAGGVSSNLYSYNILSGTQTSVVFTVKSAPPTNLGDKIYLTGNIPELGNWSTDTSGAVNNAQGPLLAPNYPDWFYVFSVPAGKTIQFKFFIKRADGTIQWENGSNHVATTPTGATGNITVTWQN

SEQ ID NO: 45171 - protein, 686 aa, Alicyclobacillus
SSSASVKGDVIYQIIIDRFYDGDTTNNNPAKSYGLYDPTKSKWKMYWGGDLEGVRQKLPYLKQLGVTTIWLSPVLDNLDTLAGTDNTGYHGYWTRDFKQIEEHFGNWTTFDTLVNDAHQNGIKVIVDFVPNHSTPFKANDSTFAEGGALYDNGTYMGNYFDDATKGYFHHNGDISNWDDRYEAQWKNFTDPAGFSLADLSQENGTIAQYLTDAAVQLVAHGADGLRIDAVKHFNSGFSKSLADKLYQKKDIFLVGEWYGDDPGAANHLEKVRYANNSGVNVMDFDLNTVIRNVFGTFTQTMYDLNNMVNQTGNEYKYKENLITFIDNHDMSRFLTVNSNKANLHQALAFILTSRGTPSIYYGTEQYMAGGNDPYNRGMMPAFDTTTTAFKEVSTLAGLRRNNAAIQYGTTTQRWINNDVYIYERKFFNDVVLVAINRNTQSSYSISGLQTALPNGNYADYLSGLLGGNGISVSNGSVASFTLAPGAVSVWQYSTSASAPQIGSVAPNMGIPGNVVTIDGKGFGTTQGTVTFGGVTATVKSWTSNRIEVYVPNMAAGLTDVKVTAGGVSSNLYSYNILSGTQTSVVFTVKSAPPTNLGDKIYLTGNIPELGNWSTDTSGAVNNAQGPLLAPNYPDWFYVFSVPAGKTIQFKFFIKRADGTIQWENGSNHVATTPTGATGNITVTWQN

SEQ ID NO: 45172 - protein, 686 aa, Alicyclobacillus
SSSASVKGDVIYQIIIDRFYDGDTTNNNPAKSYGLYDPTKSKWKMYWGGDLEGVRQKLPYLKQLGVTTIWLSPVLDNLDTLAGTDNTGYHGYWTRDFKQIEEHFGNWTTFDTLVNDAHQNGIKVIVDFVPNHSTPFKANDSTFAEGGALYDNGTYMGNYFDDATKGYFHHNGDISNWDDRYEAQWKNFTDPAGFSLADLSQENGTIAQYLTDAAVQLVAHGADGLRIDAVKHFNSGFSKSLADKLYQKKDIFLVGEWYGDDPGAANHLEKVRYANNSGVNVLDFDLNTVIRNVFGTFTQTMYDLNNMVNQTGNEYKYKENLITFIDNHDMSRFKTVNSNKANLHQALAFILTSRGTPSIYYGTEQYMAGGNDPYNRGMMPAFDTTTTAFKEVSTLAGLRRNNAAIQYGTTTQRWINNDVYIYERKFFNDVVLVAINRNTQSSYSISGLQTALPNGNYADYLSGLLGGNGISVSNGSVASFTLAPGAVSVWQYSTSASAPQIGSVAPNMGIPGNVVTIDGKGFGTTQGTVTFGGVTATVKSWTSNRIEVYVPNMAAGLTDVKVTAGGVSSNLYSYNILSGTQTSVVFTVKSAPPTNLGDKIYLTGNIPELGNWSTDTSGAVNNAQGPLLAPNYPDWFYVFSVPAGKTIQFKFFIKRADGTIQWENGSNHVATTPTGATGNITVTWQN

SEQ ID NO: 45173 - protein, 686 aa, Bacillus sp.
SSSASVKGDVIYQIIIDRFYDGDTTNNNPAKSYGLYDPTKSKWKMYWGGDLEGVRQKLPYLKQLGVTTIWLSPVLDNLDTLAGTDNTGYHGYWTRDFKQIEEHFGNWTTFDTLVNDAHQNGIKVIVDFVPNHSTPFKANDSTFAEGGALYNNGTYMGNYFDDATKGYFHHNGDISNWDDRYEAQWKNLTDPAGFSLADLSQENGTIAQYLTDAAVQLVAHGADGLRIDAVKHFNSGFSKSLADKLYQKKDIFLVGEWYGDGPGTANHLEKVRYANNSGVNVLDFDLNPVIRNVFGTFTQTMYDLNNMVNQTGNEYKYKENLITFIDNHDMSRFLSVNSNKANLHQALAFILTSRGTPSIYYGTEQYMAGGNDPYNRGMMPAFDTTTTAFKEVSTLAGLRRNNAAIQYGTTTQRWINNDVYIYERKFFNDVVLVAINRNTQSSYSISGLQTALPNGSYADYLSGLLGGNGISVSNGSVASFTLAPGAVSVWQYSTSASAPQIGSVAPNMGIPGNVVTIDGKGFGTTQGTVTFGGVTATVKSWTSNRIEVYVPNMAAGLTDVKVTAGGVSSNLYSYNILSGTQTSVVFTVKSAPPANLGDKVYLTGNIPELGNWSTDTSGAVNNAQGPLLAPNYPDWFYVFSVPAGKTIQFKFFIKRADGTIQWENGSNHVATTPTGATGNITVTWQN

SEQ ID NO: 45174 - protein, 686 aa, Alicyclobacillus
SSSASVKGDVIYQIIIDRFYDGDTTNNNPAKSYGLYDPTKSKWKMYWGGDLEGVRQKLPYLKQLGVTTIWLSPVLDNLDTLAGTDNTGYHGYWTRDFKQIEEHFGNWTTFDTLVNDAHQNGIKVIVDFVPNHSTPFKANDSTFAEGGALYDNGTYMGNYFDDATKGYFHHNGDISNWDDRYEAQWKNFTDPAGFSLADLSQENGTIAQYLTDAAVQLVAHGADGLRIDAVKHFNSGFSKSLADKLYQKKDIFLVGEWYGDDPGAANHLEKVRYANNSGVNVLDIDLNTVIRNVFGTFTQTMYDLNNMVNQTGNEYKYKENLITFIDNHDMSRFLTVNSNKANLHQALAFILTSRGTPSIYYGTEQYMAGGNDPYNRGMMPAFDTTTTAFKEVSTLAGLRRNNAAIQYGTTTQRWINNDVYIYERKFFNDVVLVAINRNTQSSYSISGLQTALPNGNYADYLSGLLGGNGISVSNGSVASFTLAPGAVSVWQYSTSASAPQIGSVAPNMGIPGNVVTIDGKGFGTTQGTVTFGGVTATVKSWTSNRIEVYVPNMAAGLTDVKVTAGGVSSNLYSYNILSGTQTSVVFTVKSAPPTNLGDKIYLTGNIPELGNWSTDTSGAVNNAQGPLLAPNYPDWFYVFSVPAGKTIQFKFFIKRADGTIQWENGSNHVATTPTGATGNITVTWQN

SEQ ID NO: 45175 - protein, 686 aa, Alicyclobacillus
SSSASVKGDVIYQIIIDRFYDGDTTNNNPAKSYGLYDPTKSKWKMYWGGDLEGVRQKLPYLKQLGVTTIWLSPVLDNLDTLAGTDNTGYHGYWTRDFKQIEEHFGNWTTFDTLVNDAHQNGIKVIVDFVPNHSTPFKANDSTFAEGGALYDNGTYMGNYFDDATKGYFHHNGDISNWDDRYEAQWKNFTDPAGFSLADLSQENGTIAQYLTDAAVQYVAHGADGLRIDAVKHFNSGFSKSLADKLYQKKDIFLVGEWYGDDPGAANHLEKVRYANNSGVNVLDFDLNTVIRNVFGTFTQTMYDLNNMVNQTGNEYKYKENLITFIDNHDMSRFLTVNSNKANLHQALAFILTSRGTPSIYYGTEQYMAGGNDPYNRGMMPAFDTTTTAFKEVSTLAGLRRNNAAIQYGTTTQRWINNDVYIYERKFFNDVVLVAINRNTQSSYSISGLQTALPNGNYADYLSGLLGGNGISVSNGSVASFTLAPGAVSVWQYSTSASAPQIGSVAPNMGIPGNVVTIDGKGFGTTQGTVTFGGVTATVKSWTSNRIEVYVPNMAAGLTDVKVTAGGVSSNLYSYNILSGTQTSVVFTVKSAPPTNLGDKIYLTGNIPELGNWSTDTSGAVNNAQGPLLAPNYPDWFYVFSVPAGKTIQFKFFIKRADGTIQWENGSNHVATTPTGATGNITVTWQN

SEQ ID NO: 45176 - protein, 686 aa, Alicyclobacillus
SSSASVKGDVIYQIIIDRFYDGDTTNNNPAKSYGLYDPTKSKWKMYWGGDLEGVRQKLPYLKQLGVTTIWLSPVLDNLDTLAGTDNTGYHGYWTRDFKQIEEHFGNWTTFDTLVNDAHQNGIKVIVDFVPNHSTPFKANDSTFAEGGALYDNGTYMGNYFDDATKGYFHHNGDISNWDDRYEAQWKNFTDPAGFSLADLSQENGTIAQYLTDAAVQLVAHGADGLRIDAVKHFNSGFSKSLADKLYQKKDIFLVGEWYGDDPGAANHLEKVRYANNSGVNVLDFDLNTVIRNVFGTFTQTMYDLNNMVNQTGNEYKYKENLITFIDNHDMSRFLTVNSNKANLHQALAFILTSRGTPSIYYGTEQYMAGGNDPYNRGMMPAFDTTTTAFKEVSTLAGLRRNNAAIQYGTTTQRWINNDVYVYERKFFNDVVLVAINRNTQSSYSISGLQTALPNGNYADYLSGLLGGNGISVSNGSVASFTLAPGAVSVWQYSTSASAPQIGSVAPNMGIPGNVVTIDGKGFGTTQGTVTFGGVTATVKSWTSNRIEVYVPNMAAGLTDVKVTAGGVSSNLYSYNILSGTQTSVVFTVKSAPPTNLGDKIYLTGNIPELGNWSTDTSGAVNNAQGPLLAPNYPDWFYVFSVPAGKTIQFKFFIKRADGTIQWENGSNHVATTPTGATGNITVTWQN

SEQ ID NO: 45177 - protein, 686 aa, Alicyclobacillus
SSSASVKGDVIYQIIIDRFYDGDTTNNNPAKSYGLYDPTKSKWKMYWGGDLEGIRQKLPYLKQLGVTTIWLSPVLDNLDTLAGTDNTGYHGYWTRDFKQIEEHFGNWTTFDTLVNDAHQNGIKVIVDFVPNHSTPFKANDSTFAEGGALYDNGTYMGNYFDDATKGYFHHNGDISNWDDRYEAQWKNFTDPAGFSLADLSQENGTIAQYLTDAAVQLVAHGADGLRIDAVKHFNSGFSKSLADKLYQKKDIFLVGEWYGDDPGAANHLEKVRYANNSGVNVLDFDLNTVIRNVFGTFTQTMYDLNNMVNQTGNEYKYKENLITFIDNHDMSRFLTVNSNKANLHQALAFILTSRGTPSIYYGTEQYMAGGNDPYNRGMMPAFDTTTTAFKEVSTLAGLRRNNAAIQYGTTTQRWINNDVYIYERKFFNDVVLVAINRNTQSSYSISGLQTALPNGNYADYLSGLLGGNGISVSNGSVASFTLAPGAVSVWQYSTSASAPQIGSVAPNMGIPGNVVTIDGKGFGTTQGTVTFGGVTATVKSWTSNRIEVYVPNMAAGLTDVKVTAGGVSSNLYSYNILSGTQTSVVFTVKSAPPTNLGDKIYLTGNIPELGNWSTDTSGAVNNAQGPLLAPNYPDWFYVFSVPAGKTIQFKFFIKRADGTIQWENGSNHVATTPTGATGNITVTWQN

SEQ ID NO: 45178 - protein, 686 aa, Alicyclobacillus
SSSASVKGDVIYQIIIDRFYDGDTTNNNPAKSYGLYDPTKSKWKMYWGGDLEGVRQKLPYLKQLGVTTIWLSPVLDNLDTLAGTDNTGYHGYWTRDFKQIEEHFGNWTTFDTLVNDAHQNGIKVIVDFVPNHSTPFKANDSTFAEGGALYDNGTYMGNYFDDATKGYFHHNGDISNWDDRYEAQWKNFTDPAGFSLADLSQENGTIAQYLTDAAVQLVAHGADGLRIDAVKHFNSGFSKSLADKLYQKKDIFLVGEWYGDDPGAANHLEKVRYANNSGVNVLDFDLNTVIRNVFGTFTQTMYDLNNMVNQTGNEYKYKENLITFIDNHDMSRFLTVNSNKANLHQALAFILTSRGTPSIYYGTEQYMAGGNDPYNRGMMPAFDTTTTLFKEVSTLAGLRRNNAAIQYGTTTQRWINNDVYIYERKFFNDVVLVAINRNTQSSYSISGLQTALPNGNYADYLSGLLGGNGISVSNGSVASFTLAPGAVSVWQYSTSASAPQIGSVAPNMGIPGNVVTIDGKGFGTTQGTVTFGGVTATVKSWTSNRIEVYVPNMAAGLTDVKVTAGGVSSNLYSYNILSGTQTSVVFTVKSAPPTNLGDKIYLTGNIPELGNWSTDTSGAVNNAQGPLLAPNYPDWFYVFSVPAGKTIQFKFFIKRADGTIQWENGSNHVATTPTGATGNITVTWQN

SEQ ID NO: 45179 - protein, 686 aa, Alicyclobacillus
SSSASVKGDVIYQIIIDRFYDGDTTNNNPAKSYGLYDPTKSKWKMYWGGDLEGVRQKLPYLKQLGVTTIWLSPVLDNLDTLAGTDNTGYHGYWTRDFKQIEEHFGNWTTFDTLVNDAHQNGIKVIVDFVPNHSTPFKANDSTFAEGGALYDNGTYMGNYFDDATKGYFHHNGDISNWDDRYEAQWKNFTDPAGFSLADFSQENGTIAQYLTDAAVQLVAHGADGLRIDAVKHFNSGFSKSLADKLYQKKDIFLVGEWYGDDPGAANHLEKVRYANNSGVNVLDFDLNTVIRNVFGTFTQTMYDLNNMVNQTGNEYKYKENLITFIDNHDMSRFLTVNSNKANLHQALAFILTSRGTPSIYYGTEQYMAGGNDPYNRGMMPAFDTTTTAFKEVSTLAGLRRNNAAIQYGTTTQRWINNDVYIYERKFFNDVVLVAINRNTQSSYSISGLQTALPNGNYADYLSGLLGGNGISVSNGSVASFTLAPGAVSVWQYSTSASAPQIGSVAPNMGIPGNVVTIDGKGFGTTQGTVTFGGVTATVKSWTSNRIEVYVPNMAAGLTDVKVTAGGVSSNLYSYNILSGTQTSVVFTVKSAPPTNLGDKIYLTGNIPELGNWSTDTSGAVNNAQGPLLAPNYPDWFYVFSVPAGKTIQFKFFIKRADGTIQWENGSNHVATTPTGATGNITVTWQN

SEQ ID NO: 45180 - protein, 686 aa, Alicyclobacillus
SSSASFKGDVIYQIIIDRFYDGDTTNNNPAKSYGLYDPTKSKWKMYWGGDLEGVRQKLPYLKQLGVTTIWLSPVLDNLDTLAGTDNTGYHGYWTRDFKQIEEHFGNWTTFDTLVNDAHQNGIKVIVDFVPNHSTPFKANDSTFAEGGALYDNGTYMGNYFDDATKGYFHHNGDISNWDDRYEAQWKNFTDPAGFSLADLSQENGTIAQYLTDAAVQLVAHGADGLRIDAVKHFNSGFSKSLADKLYQKKDIFLVGEWYGDDPGAANHLEKVRYANNSGVNVLDFDLNTVIRNVFGTFTQTMYDLNNMVNQTGNEYKYKENLITFIDNHDMSRFLTVNSNKANLHQALAFILTSRGTPSIYYGTEQYMAGGNDPYNRGMMPAFDTTTTAFKEVSTLAGLRRNNAAIQYGTTTQRWINNDVYIYERKFFNDVVLVAINRNTQSSYSISGLQTALPNGNYADYLSGLLGGNGISVSNGSVASFTLAPGAVSVWQYSTSASAPQIGSVAPNMGIPGNVVTIDGKGFGTTQGTVTFGGVTATVKSWTSNRIEVYVPNMAAGLTDVKVTAGGVSSNLYSYNILSGTQTSVVFTVKSAPPTNLGDKIYLTGNIPELGNWSTDTSGAVNNAQGPLLAPNYPDWFYVFSVPAGKTIQFKFFIKRADGTIQWENGSNHVATTPTGATGNITVTWQN

SEQ ID NO: 45181 - protein, 686 aa, Alicyclobacillus
SSSASVKGDVIYQIIIDRFYDGDTTNNNPAKSYGLYDPTKSKWKMYWGGDLEGVRQKLPYLKQLGVTTIWLSPVLDNLDTLAGTDNTGYHGYWTRDFKQIEEHFGNWTTFDTLVNDAHQNGIKVIVDFVPNHSTPFKANDSTFAEGGALYDNGTYMGNYFDDATKGYFHHNGDISNWDDRYEAQWKNFTDPAGFSLADLSQENGTIAQYLTDAAVQLVAHGADGLRIDAVKHFNSGFSKSLADKLYQKKDILLVGEWYGDDPGAANHLEKVRYANNSGVNVLDFDLNTVIRNVFGTFTQTMYDLNNMVNQTGNEYKYKENLITFIDNHDMSRFLTVNSNKANLHQALAFILTSRGTPSIYYGTEQYMAGGNDPYNRGMMPAFDTTTTAFKEVSTLAGLRRNNAAIQYGTTTQRWINNDVYIYERKFFNDVVLVAINRNTQSSYSISGLQTALPNGNYADYLSGLLGGNGISVSNGSVASFTLAPGAVSVWQYSTSASAPQIGSVAPNMGIPGNVVTIDGKGFGTTQGTVTFGGVTATVKSWTSNRIEVYVPNMAAGLTDVKVTAGGVSSNLYSYNILSGTQTSVVFTVKSAPPTNLGDKIYLTGNIPELGNWSTDTSGAVNNAQGPLLAPNYPDWFYVFSVPAGKTIQFKFFIKRADGTIQWENGSNHVATTPTGATGNITVTWQN

SEQ ID NO: 45182 - protein, 686 aa, Alicyclobacillus
SSSASVKGDVIYQIIIDRFYDGDTTNNNPAKSYGLYDPTKSKWKMYWGGDLEGVRQKLPYLKQLGVTTIWLSPVLDNLDTLAGTDNTGYHGYWTRDFKQIEEHFGNWTTFDTLVNDAHQNGIKVIVDFVPNHSTPFKANDSTFAEGGALYDNGTYMGNYFDDATKGYYHHNGDISNWDDRYEAQWKNFTDPAGFSLADLSQENGTIAQYLTDAAVQLVAHGADGLRIDAVKHFNSGFSKSLADKLYQKKDIFLVGEWYGDDPGAANHLEKVRYANNSGVNVLDFDLNTVIRNVFGTFTQTMYDLNNMVNQTGNEYKYKENLITFIDNHDMSRFLTVNSNKANLHQALAFILTSRGTPSIYYGTEQYMAGGNDPYNRGMMPAFDTTTTAFKEVSTLAGLRRNNAAIQYGTTTQRWINNDVYIYERKFFNDVVLVAINRNTQSSYSISGLQTALPNGNYADYLSGLLGGNGISVSNGSVASFTLAPGAVSVWQYSTSASAPQIGSVAPNMGIPGNVVTIDGKGFGTTQGTVTFGGVTATVKSWTSNRIEVYVPNMAAGLTDVKVTAGGVSSNLYSYNILSGTQTSVVFTVKSAPPTNLGDKIYLTGNIPELGNWSTDTSGAVNNAQGPLLAPNYPDWFYVFSVPAGKTIQFKFFIKRADGTIQWENGSNHVATTPTGATGNITVTWQN

SEQ ID NO: 45183 - protein, 686 aa, Alicyclobacillus
SSSASVKGDVIYQIIIDRFYDGDTTNNNPAKSYGLYDPTKSKWKMYWGGDLEGVRQKLPYLKQLGVTTIWLSPVLDNLDTLAGTDNTGYHGYWTRDFKQIEEHFGNWTTFDTLVNDAHQNGIKVIVDFVPNHSTPFKANDSTYAEGGALYDNGTYMGNYFDDATKGYFHHNGDISNWDDRYEAQWKNFTDPAGFSLADLSQENGTIAQYLTDAAVQLVAHGADGLRIDAVKHFNSGFSKSLADKLYQKKDIFLVGEWYGDDPGAANHLEKVRYANNSGVNVLDFDLNTVIRNVFGTFTQTMYDLNNMVNQTGNEYKYKENLITFIDNHDMSRFLTVNSNKANLHQALAFILTSRGTPSIYYGTEQYMAGGNDPYNRGMMPAFDTTTTAFKEVSTLAGLRRNNAAIQYGTTTQRWINNDVYIYERKFFNDVVLVAINRNTQSSYSISGLQTALPNGNYADYLSGLLGGNGISVSNGSVASFTLAPGAVSVWQYSTSASAPQIGSVAPNMGIPGNVVTIDGKGFGTTQGTVTFGGVTATVKSWTSNRIEVYVPNMAAGLTDVKVTAGGVSSNLYSYNILSGTQTSVVFTVKSAPPTNLGDKIYLTGNIPELGNWSTDTSGAVNNAQGPLLAPNYPDWFYVFSVPAGKTIQFKFFIKRADGTIQWENGSNHVATTPTGATGNITVTWQN

SEQ ID NO: 45184 - protein, 686 aa, Effusibacillus pohliae
SSSASVKGDVIYQIVIDRFYDGDTTNNNPAKSYGLYDPTKSKWKMYWGGDLEGVRQKLPYLKQLGVTTIWLSPVLDNLDTLAGTDNTGYHGYWTRDFKQIEEHFGNWTTFDTLVNDAHQNGIKVIVDFVPNHSTPFKANDSTFAEGGALYDNGTYMGNYFDDATKGYFHHNGDISNWDDRYEAQWKNFTDPAGFSLADLSQENGTIAQYLTDAAVQLVAHGADGLRIDAVKHFNSGFSKSLADKLYQKKDIFLVGEWYGDDPGAANHLEKVRYANNSGVNVLDFDLNTVIRNVFGTFTQTMYDLNNMVNQTGNEYKYKENLITFIDNHDMSRFLTVNSNKANLHQALAFILTSRGTPSIYYGTEQYMAGGNDPYNRGMMPAFDTTTTAFKEVSTLAGLRRNNAAIQYGTTTQRWINNDVYIYERKFFNDVVLVAINRNTQSSYSISGLQTALPNGNYADYLSGLLGGNGISVSNGSVASFTLAPGAVSVWQYSTSASAPQIGSVAPNMGIPGNVVTIDGKGFGTTQGTVTFGGVTATVKSWTSNRIEVYVPNMAAGLTDVKVTAGGVSSNLYSYNILSGTQTSVVFTVKSAPPTNLGDKIYLTGNIPELGNWSTDTSGAVNNAQGPLLAPNYPDWFYVFSVPAGKTIQFKFFIKRADGTIQWENGSNHVATTPTGATGNITVTWQN

SEQ ID NO: 45185 - protein, 686 aa, Alicyclobacillus
SSSASVKGDVIYQIIIDRFYDGDTTNNNPAKSYGLYDPTKSKWKMYWGGDLEGVRQKLPYLKQLGVTTIWLSPVLDNLDTLAGTDNTGYHGYWTRDFKQIEEHFGNWTTFDTLVNDAHQNGIKVIVDFVPNHSTPFKANDSTFAEGGALYDNGTYMGNYFDDATKGYFHHNGDISNWDDRYEAQWKNFTDPAGFSLADLSQENGTIAQYLTDAAVQLVAHGADGLRIDAVKHFNSGFSKSLADKLYQKKDIFLVGEWYGDDPGAANNLEKVRYANNSGVNVLDFDLNTVIRNVFGTFTQTMYDLNNMVNQTGNEYKYKENLITFIDNHDMSRFLTVNSNKANLHQALAFILTSRGTPSIYYGTEQYMAGGNDPYNRGMMPAFDTTTTAFKEVSTLAGLRRNNAAIQYGTTTQRWINNDVYIYERKFFNDVVLVAINRNTQSSYSISGLQTALPNGNYADYLSGLLGGNGISVSNGSVASFTLAPGAVSVWQYSTSASAPQIGSVAPNMGIPGNVVTIDGKGFGTTQGTVTFGGVTATVKSWTSNRIEVYVPNMAAGLTDVKVTAGGVSSNLYSYNILSGTQTSVVFTVKSAPPTNLGDKIYLTGNIPELGNWSTDTSGAVNNAQGPLLAPNYPDWFYVFSVPAGKTIQFKFFIKRADGTIQWENGSNHVATTPTGATGNITVTWQN

SEQ ID NO: 45186 - protein, 686 aa, Alicyclobacillus
SSSASVKGDVIYQIIIDRFYDGDTTNNNPAKSYGLYDPTKSKWKMYWGGDLEGVRQKLPYLKQLGVTTIWLSPVLDNLDTLAGTDNTGYHGYWTRDFKQIEEHFGNWTTFDTLVNDAHQNGIKVIVDFVPNHSTPFKANDSTFAEGGALYDNGTYMGNYFDDATKGYFHHNGDISNWDDRYEAQWKNFTDPAGFSLADLSQENGTIAQYLTDAAVQLVAHGADGLRIDAVKHFNSGFSKSLADKLYQKKDIFLVGEWYGDDPGAANHLEKVRFANNSGVNVLDFDLNTVIRNVFGTFTQTMYDLNNMVNQTGNEYKYKENLITFIDNHDMSRFLTVNSNKANLHQALAFILTSRGTPSIYYGTEQYMAGGNDPYNRGMMPAFDTTTTAFKEVSTLAGLRRNNAAIQYGTTTQRWINNDVYIYERKFFNDVVLVAINRNTQSSYSISGLQTALPNGNYADYLSGLLGGNGISVSNGSVASFTLAPGAVSVWQYSTSASAPQIGSVAPNMGIPGNVVTIDGKGFGTTQGTVTFGGVTATVKSWTSNRIEVYVPNMAAGLTDVKVTAGGVSSNLYSYNILSGTQTSVVFTVKSAPPTNLGDKIYLTGNIPELGNWSTDTSGAVNNAQGPLLAPNYPDWFYVFSVPAGKTIQFKFFIKRADGTIQWENGSNHVATTPTGATGNITVTWQN

SEQ ID NO: 45187 - protein, 686 aa, Alicyclobacillus
SSSASVKGDVIYQIIIDRFYDGDTTNNNPAKSYGLYDPTKSKWKMYWGGDLEGVRQKLPYLKQLGVTTIWLSPVLDNLDTLAGTDNTGYHGYWTRDFKQIEEHFGNWTTFDTLVNDAHQNGIKVIVDFVPNHSTPFKANDSTFAEGGALYDNGTYMGNYFDDATKGYFHHNGDISNWDDRYEAQWKNFTDPAGFSLADLSQENGTIAQYLTDAAVQLVAHGADGLRIDAVKHFNSGFSKSLADKLYQKKDIFLFGEWYGDDPGAANHLEKVRYANNSGVNVLDFDLNTVIRNVFGTFTQTMYDLNNMVNQTGNEYKYKENLITFIDNHDMSRFLTVNSNKANLHQALAFILTSRGTPSIYYGTEQYMAGGNDPYNRGMMPAFDTTTTAFKEVSTLAGLRRNNAAIQYGTTTQRWINNDVYIYERKFFNDVVLVAINRNTQSSYSISGLQTALPNGNYADYLSGLLGGNGISVSNGSVASFTLAPGAVSVWQYSTSASAPQIGSVAPNMGIPGNVVTIDGKGFGTTQGTVTFGGVTATVKSWTSNRIEVYVPNMAAGLTDVKVTAGGVSSNLYSYNILSGTQTSVVFTVKSAPPTNLGDKIYLTGNIPELGNWSTDTSGAVNNAQGPLLAPNYPDWFYVFSVPAGKTIQFKFFIKRADGTIQWENGSNHVATTPTGATGNITVTWQN

SEQ ID NO: 45188 - protein, 686 aa, Alicyclobacillus
SSSASVKGDVIYQIIIDRFYDGDTTNNNPAKSYGLYDPTKSKWKMYWGGDLEGVRQKLPYLKQLGVTTIWLSPVLDNLDTLAGTDNTGYHGYWTRDFKQIEEHFGNWTTFDTLVNDAHQNGIKVIVDFVPNHSTPFKANDSTFAEGGALYDNGTYMGNYFDDATKGYFHHNGDISNWDDRYEAQWKNFTDPAGFSLADLSQENGTIAQYLTDAAVQLVAHGADGLRIDAVKHFNSGFSKSLADKLYQKKDIFLVGEWYGDDPGAANHLEKIRYANNSGVNVLDFDLNTVIRNVFGTFTQTMYDLNNMVNQTGNEYKYKENLITFIDNHDMSRFLTVNSNKANLHQALAFILTSRGTPSIYYGTEQYMAGGNDPYNRGMMPAFDTTTTAFKEVSTLAGLRRNNAAIQYGTTTQRWINNDVYIYERKFFNDVVLVAINRNTQSSYSISGLQTALPNGNYADYLSGLLGGNGISVSNGSVASFTLAPGAVSVWQYSTSASAPQIGSVAPNMGIPGNVVTIDGKGFGTTQGTVTFGGVTATVKSWTSNRIEVYVPNMAAGLTDVKVTAGGVSSNLYSYNILSGTQTSVVFTVKSAPPTNLGDKIYLTGNIPELGNWSTDTSGAVNNAQGPLLAPNYPDWFYVFSVPAGKTIQFKFFIKRADGTIQWENGSNHVATTPTGATGNITVTWQN

SEQ ID NO: 45189 - protein, 686 aa, Alicyclobacillus
SSSASVKGDVIYQIIIDRFYDGDTTNNNPAKSYGLYDPTKSKWKMYWGGDLEGVRQKLPYLKQLGVTTIWLSPVLDNLDALAGTDNTGYHGYWTRDFKQIEEHFGNWTTFDTLVNDAHQNGIKVIVDFVPNHSTPFKANDSTFAEGGALYDNGTYMGNYFDDATKGYFHHNGDISNWDDRYEAQWKNFTDPAGFSLADLSQENGTIAQYLTDAAVQLVAHGADGLRIDAVKHFNSGFSKSLADKLYQKKDIFLVGEWYGDDPGAANHLEKVRYANNSGVNVLDFDLNTVIRNVFGTFTQTMYDLNNMVNQTGNEYKYKENLITFIDNHDMSRFLTVNSNKANLHQALAFILTSRGTPSIYYGTEQYMAGGNDPYNRGMMPAFDTTTTAFKEVSTLAGLRRNNAAIQYGTTTQRWINNDVYIYERKFFNDVVLVAINRNTQSSYSISGLQTALPNGNYADYLSGLLGGNGISVSNGSVASFTLAPGAVSVWQYSTSASAPQIGSVAPNMGIPGNVVTIDGKGFGTTQGTVTFGGVTATVKSWTSNRIEVYVPNMAAGLTDVKVTAGGVSSNLYSYNILSGTQTSVVFTVKSAPPTNLGDKIYLTGNIPELGNWSTDTSGAVNNAQGPLLAPNYPDWFYVFSVPAGKTIQFKFFIKRADGTIQWENGSNHVATTPTGATGNITVTWQN

SEQ ID NO: 45190 - protein, 686 aa, Alicyclobacillus
SSSASVKGDVIYQIIIDRFYDGDTTNNNPAKSYGLYDPTKSKWKMYWGGDLEGVRQKLPYLKQLGVTTIWLSPVLDNLDTLAGTDNTGYHGYWTRDFKQIEEHFGNWTTFDTLVNDAHQNGIKVIVDFVVNHSTPFKANDSTFAEGGALYDNGTYMGNYFDDATKGYFHHNGDISNWDDRYEAQWKNFTDPAGFSLADLSQENGTIAQYLTDAAVQLVAHGADGLRIDAVKHFNSGFSKSLADKLYQKKDIFLVGEWYGDDPGAANHLEKVRYANNSGVNVLDFDLNTVIRNVFGTFTQTMYDLNNMVNQTGNEYKYKENLITFIDNHDMSRFLTVNSNKANLHQALAFILTSRGTPSIYYGTEQYMAGGNDPYNRGMMPAFDTTTTAFKEVSTLAGLRRNNAAIQYGTTTQRWINNDVYIYERKFFNDVVLVAINRNTQSSYSISGLQTALPNGNYADYLSGLLGGNGISVSNGSVASFTLAPGAVSVWQYSTSASAPQIGSVAPNMGIPGNVVTIDGKGFGTTQGTVTFGGVTATVKSWTSNRIEVYVPNMAAGLTDVKVTAGGVSSNLYSYNILSGTQTSVVFTVKSAPPTNLGDKIYLTGNIPELGNWSTDTSGAVNNAQGPLLAPNYPDWFYVFSVPAGKTIQFKFFIKRADGTIQWENGSNHVATTPTGATGNITVTWQN

SEQ ID NO: 45191 - protein, 686 aa, Alicyclobacillus
SSSASVKGDVIYQIIIDRFYDGDTTNNNPAKSYGLYDPTKSKWKMYWGGDLEGVRQKLPYLKQLGVTTIWLSPVLDNLDTLAGTDNTGYHGYWTKDFKQIEEHFGNWTTFDTLVNDAHQNGIKVIVDFVPNHSTPFKANDSTFAEGGALYDNGTYMGNYFDDATKGYFHHNGDISNWDDRYEAQWKNFTDPAGFSLADLSQENGTIAQYLTDAAVQLVAHGADGLRIDAVKHFNSGFSKSLADKLYQKKDIFLVGEWYGDDPGAANHLEKVRYANNSGVNVLDFDLNTVIRNVFGTFTQTMYDLNNMVNQTGNEYKYKENLITFIDNHDMSRFLTVNSNKANLHQALAFILTSRGTPSIYYGTEQYMAGGNDPYNRGMMPAFDTTTTAFKEVSTLAGLRRNNAAIQYGTTTQRWINNDVYIYERKFFNDVVLVAINRNTQSSYSISGLQTALPNGNYADYLSGLLGGNGISVSNGSVASFTLAPGAVSVWQYSTSASAPQIGSVAPNMGIPGNVVTIDGKGFGTTQGTVTFGGVTATVKSWTSNRIEVYVPNMAAGLTDVKVTAGGVSSNLYSYNILSGTQTSVVFTVKSAPPTNLGDKIYLTGNIPELGNWSTDTSGAVNNAQGPLLAPNYPDWFYVFSVPAGKTIQFKFFIKRADGTIQWENGSNHVATTPTGATGNITVTWQN

SEQ ID NO: 45192 - protein, 686 aa, Alicyclobacillus
SSSASVKGDVIYQIIIDRFYDGDTTNNNPAKSYGLYDPTKSKWKMYFGGDLEGVRQKLPYLKQLGVTTIWLSPVLDNLDTLAGTDNTGYHGYWTRDFKQIEEHFGNWTTFDTLVNDAHQNGIKVIVDFVPNHSTPFKANDSTFAEGGALYDNGTYMGNYFDDATKGYFHHNGDISNWDDRYEAQWKNFTDPAGFSLADLSQENGTIAQYLTDAAVQLVAHGADGLRIDAVKHFNSGFSKSLADKLYQKKDIFLVGEWYGDDPGAANHLEKVRYANNSGVNVLDFDLNTVIRNVFGTFTQTMYDLNNMVNQTGNEYKYKENLITFIDNHDMSRFLTVNSNKANLHQALAFILTSRGTPSIYYGTEQYMAGGNDPYNRGMMPAFDTTTTAFKEVSTLAGLRRNNAAIQYGTTTQRWINNDVYIYERKFFNDVVLVAINRNTQSSYSISGLQTALPNGNYADYLSGLLGGNGISVSNGSVASFTLAPGAVSVWQYSTSASAPQIGSVAPNMGIPGNVVTIDGKGFGTTQGTVTFGGVTATVKSWTSNRIEVYVPNMAAGLTDVKVTAGGVSSNLYSYNILSGTQTSVVFTVKSAPPTNLGDKIYLTGNIPELGNWSTDTSGAVNNAQGPLLAPNYPDWFYVFSVPAGKTIQFKFFIKRADGTIQWENGSNHVATTPTGATGNITVTWQN

SEQ ID NO: 45193 - protein, 686 aa, Alicyclobacillus
SSSASVKGDVIYQIIIDRFYDGDTTNNNPAKSYGLYDPTKSKWKMYWGGDLEGVRQKLPYLKQLGVTTIWLSPVLDNLDTLAGTDNTGYHGYWTRDFKQIEEHFGNWTTFDTLVNDAHQNGIKVIVDFVPNHSTPFKANDSTFAEGGALYDNGTYMGNYFDDATKGYFHHNGDISNWDDRYEAQWKNFTDPAGFSLADLSQENGTIAQYFTDAAVQLVAHGADGLRIDAVKHFNSGFSKSLADKLYQKKDIFLVGEWYGDDPGAANHLEKVRYANNSGVNVLDFDLNTVIRNVFGTFTQTMYDLNNMVNQTGNEYKYKENLITFIDNHDMSRFLTVNSNKANLHQALAFILTSRGTPSIYYGTEQYMAGGNDPYNRGMMPAFDTTTTAFKEVSTLAGLRRNNAAIQYGTTTQRWINNDVYIYERKFFNDVVLVAINRNTQSSYSISGLQTALPNGNYADYLSGLLGGNGISVSNGSVASFTLAPGAVSVWQYSTSASAPQIGSVAPNMGIPGNVVTIDGKGFGTTQGTVTFGGVTATVKSWTSNRIEVYVPNMAAGLTDVKVTAGGVSSNLYSYNILSGTQTSVVFTVKSAPPTNLGDKIYLTGNIPELGNWSTDTSGAVNNAQGPLLAPNYPDWFYVFSVPAGKTIQFKFFIKRADGTIQWENGSNHVATTPTGATGNITVTWQN

SEQ ID NO: 45194 - protein, 686 aa, Alicyclobacillus
SSSASVKGDVIYQIIIDRFYDGDTTNNNPAKSYGLYDPTKSKWKMYWGGDLEGVRQKLPYLKQLGVTTIWLSPVLDNLDTLAGTDNTGYHGYWTRDFKQIEEHFGNWTTFDTLVNDAHQNGIKVIVDFVPNHSTPFKANDSTFAEGGALYDNGTYMGNYFDDATKGYFHHNGDLSNWDDRYEAQWKNFTDPAGFSLADLSQENGTIAQYLTDAAVQLVAHGADGLRIDAVKHFNSGFSKSLADKLYQKKDIFLVGEWYGDDPGAANHLEKVRYANNSGVNVLDFDLNTVIRNVFGTFTQTMYDLNNMVNQTGNEYKYKENLITFIDNHDMSRFLTVNSNKANLHQALAFILTSRGTPSIYYGTEQYMAGGNDPYNRGMMPAFDTTTTAFKEVSTLAGLRRNNAAIQYGTTTQRWINNDVYIYERKFFNDVVLVAINRNTQSSYSISGLQTALPNGNYADYLSGLLGGNGISVSNGSVASFTLAPGAVSVWQYSTSASAPQIGSVAPNMGIPGNVVTIDGKGFGTTQGTVTFGGVTATVKSWTSNRIEVYVPNMAAGLTDVKVTAGGVSSNLYSYNILSGTQTSVVFTVKSAPPTNLGDKIYLTGNIPELGNWSTDTSGAVNNAQGPLLAPNYPDWFYVFSVPAGKTIQFKFFIKRADGTIQWENGSNHVATTPTGATGNITVTWQN

SEQ ID NO: 45195 - protein, 686 aa, Alicyclobacillus
SSSASVKGDVIYQIIIDRFYDGDTTNNNPAKSYGLYDPTKSKWKMYWGGDLEGVRQKLPYLKQLGVTTIWLSPVLDNLDTLAGTDNTGYHGYWTRDFKQIEEHFGNWTTFDTLVNDAHQNGIKVIVDFVPNHTTPFKANDSTFAEGGALYDNGTYMGNYFDDATKGYFHHNGDISNWDDRYEAQWKNFTDPAGFSLADLSQENGTIAQYLTDAAVQLVAHGADGLRIDAVKHFNSGFSKSLADKLYQKKDIFLVGEWYGDDPGAANHLEKVRYANNSGVNVLDFDLNTVIRNVFGTFTQTMYDLNNMVNQTGNEYKYKENLITFIDNHDMSRFLTVNSNKANLHQALAFILTSRGTPSIYYGTEQYMAGGNDPYNRGMMPAFDTTTTAFKEVSTLAGLRRNNAAIQYGTTTQRWINNDVYIYERKFFNDVVLVAINRNTQSSYSISGLQTALPNGNYADYLSGLLGGNGISVSNGSVASFTLAPGAVSVWQYSTSASAPQIGSVAPNMGIPGNVVTIDGKGFGTTQGTVTFGGVTATVKSWTSNRIEVYVPNMAAGLTDVKVTAGGVSSNLYSYNILSGTQTSVVFTVKSAPPTNLGDKIYLTGNIPELGNWSTDTSGAVNNAQGPLLAPNYPDWFYVFSVPAGKTIQFKFFIKRADGTIQWENGSNHVATTPTGATGNITVTWQN

SEQ ID NO: 45196 - protein, 686 aa, Alicyclobacillus
SSSASVKGDVIYQIIIDRFYDGDTTNNNPAKSYGLYDPTKSKWKMYWGGDLEGVRQKLPYLKQLGVTTIWLSPVLDNLDTLAGTDNTGYHGYWTRDFKQIEEHFGNWTTFDTLVNDAHQNGIKVIVDFVPNHSTPFKANDSTFAEGGALYDNGTYMGNYFDDATKGYFHHNGDISNWDDRYEAQWKNFTDPAGFSLADLSQENGTIAQYLTDAAVQLVAHGADGLRVDAVKHFNSGFSKSLADKLYQKKDIFLVGEWYGDDPGAANHLEKVRYANNSGVNVLDFDLNTVIRNVFGTFTQTMYDLNNMVNQTGNEYKYKENLITFIDNHDMSRFLTVNSNKANLHQALAFILTSRGTPSIYYGTEQYMAGGNDPYNRGMMPAFDTTTTAFKEVSTLAGLRRNNAAIQYGTTTQRWINNDVYIYERKFFNDVVLVAINRNTQSSYSISGLQTALPNGNYADYLSGLLGGNGISVSNGSVASFTLAPGAVSVWQYSTSASAPQIGSVAPNMGIPGNVVTIDGKGFGTTQGTVTFGGVTATVKSWTSNRIEVYVPNMAAGLTDVKVTAGGVSSNLYSYNILSGTQTSVVFTVKSAPPTNLGDKIYLTGNIPELGNWSTDTSGAVNNAQGPLLAPNYPDWFYVFSVPAGKTIQFKFFIKRADGTIQWENGSNHVATTPTGATGNITVTWQN

SEQ ID NO: 45197 - protein, 686 aa, Alicyclobacillus
SSSASVKGDVIYQIIIDRFYDGDTTNNNPAKSYGLYDPTKSKWKMYWGGDLEGVRQKLPYLKQLGVTTIWLSPVLDNLDTLAGTDNTGYHGYWTRDFKQIEEHFGNWTTFDTLVNDAHQNGIKVIVDFVPNHSTPFKANDSTFAEGGALYDNGTYMGNYFDDATKGYFHHNGDISNFDDRYEAQWKNFTDPAGFSLADLSQENGTIAQYLTDAAVQLVAHGADGLRIDAVKHFNSGFSKSLADKLYQKKDIFLVGEWYGDDPGAANHLEKVRYANNSGVNVLDFDLNTVIRNVFGTFTQTMYDLNNMVNQTGNEYKYKENLITFIDNHDMSRFLTVNSNKANLHQALAFILTSRGTPSIYYGTEQYMAGGNDPYNRGMMPAFDTTTTAFKEVSTLAGLRRNNAAIQYGTTTQRWINNDVYIYERKFFNDVVLVAINRNTQSSYSISGLQTALPNGNYADYLSGLLGGNGISVSNGSVASFTLAPGAVSVWQYSTSASAPQIGSVAPNMGIPGNVVTIDGKGFGTTQGTVTFGGVTATVKSWTSNRIEVYVPNMAAGLTDVKVTAGGVSSNLYSYNILSGTQTSVVFTVKSAPPTNLGDKIYLTGNIPELGNWSTDTSGAVNNAQGPLLAPNYPDWFYVFSVPAGKTIQFKFFIKRADGTIQWENGSNHVATTPTGATGNITVTWQN

SEQ ID NO: 45198 - protein, 686 aa, Geobacillus stearothermophilus
SSSASVKGDVIYQIIIDRFYDGDTTNNNPAKSYGLYDPTKSKWKMYWGGDLEGVRQKLPYLKQLGVTTIWLSPVLDNLDTLAGTDNTGFHGYWTRDFKQIEEHFGNWTTFDTLVNDAHQNGIKVIVDFVPNHSTPFKANDSTFAEGGALYNNGTYMGNYFDDATKGYFHHNGDISNWDDRYEAQWKNFTDSAGYSLADLSQENGTIAQYLTDAAVQLVAHGADGLRIDAVKHFNSGFSKSLADKLYQKKDIFLVGEWYGDGPGTANHLEKVRYANNSGVNVLDFDLNPVIRNVFGTFTQTMYDLNNMVNQTGNEYKYKENLITFIDNHDMSRFLSVNSNKANLHQALAFILTSRGTPSIYYGTEQYMAGGNDPYNRGMMPAFDTTTTAFKEVSTLAGLRRNNAAIQYGTTTQRWINNDVYIYERKFFNDVVLVAINRNTQSSYSISGLQTALPNGSYADYLSGLLGGNGISVSNGSVASFTLAPGAVSVWQYSTSASAPQIGSVAPNMGIPGNVVTIDGKGFGTTQGTVTFGGVTATVKSWTSNRIEVYVPNMAAGLTDVKVTAGGVSSNLYSYNILSGTQTSVVFTVKSAPPTNLGDKIYLTGNIPELGNWSTDTSGAVNNAQGPLLAPNYPDWFYVFSVPAGKTIQFKFFIKRADGTIQWENGSNHVATTPTGATGNITVTWQN

SEQ ID NO: 45199 - protein, 686 aa, Alicyclobacillus
SSSASVKGDVIYQIIIDRFYDGDTTNNNPAKSYGLYDPTKSKWKMYWGGDLEGVRQKLPYLKQLGVTTIWLSPVVDNLDTLAGTDNTGYHGYWTRDFKQIEEHFGNWTTFDTLVNDAHQNGIKVIVDFVPNHSTPFKANDSTFAEGGALYDNGTYMGNYFDDATKGYFHHNGDISNWDDRYEAQWKNFTDPAGFSLADLSQENGTIAQYLTDAAVQLVAHGADGLRIDAVKHFNSGFSKSLADKLYQKKDIFLVGEWYGDDPGAANHLEKVRYANNSGVNVLDFDLNTVIRNVFGTFTQTMYDLNNMVNQTGNEYKYKENLITFIDNHDMSRFLTVNSNKANLHQALAFILTSRGTPSIYYGTEQYMAGGNDPYNRGMMPAFDTTTTAFKEVSTLAGLRRNNAAIQYGTTTQRWINNDVYIYERKFFNDVVLVAINRNTQSSYSISGLQTALPNGNYADYLSGLLGGNGISVSNGSVASFTLAPGAVSVWQYSTSASAPQIGSVAPNMGIPGNVVTIDGKGFGTTQGTVTFGGVTATVKSWTSNRIEVYVPNMAAGLTDVKVTAGGVSSNLYSYNILSGTQTSVVFTVKSAPPTNLGDKIYLTGNIPELGNWSTDTSGAVNNAQGPLLAPNYPDWFYVFSVPAGKTIQFKFFIKRADGTIQWENGSNHVATTPTGATGNITVTWQN

SEQ ID NO: 45200 - protein, 686 aa, Alicyclobacillus
SSSASVKGDVIYQIIIDRFYDGDTTNNNPAKSYGLYDPTKSKWKMYWGGDLEGVRQKLPYLKQLGVTTIWLSPVLDNLDTLAGTDNTGYHGYWTRDFKQIEEHFGNWTTFDTLVNDAHQNGIKVIVDFVPNHSTPFKANDSTFAEGGALYDNGTYMGNYFDDATKGYFHHNGDISNWDDRYEAQWKNFTDPAGFSLADLSQENGTIAQYLTDAAVQLVAHGADGLRIDAVKHFNSGFSKSLADKLYQKKDIFLVGEWYGDGPGAANHLEKVRYANNSGVNVLDFDLNTVIRNVFGTFTQTMYDLNNMVNQTGNEYKYKENLITFIDNHDMSRFLTVNSNKANLHQALAFILTSRGTPSIYYGTEQYMAGGNDPYNRGMMPAFDTTTTAFKEVSTLAGLRRNNAAIQYGTTTQRWINNDVYIYERKFFNDVVLVAINRNTQSSYSISGLQTALPNGNYADYLSGLLGGNGISVSNGSVASFTLAPGAVSVWQYSTSASAPQIGSVAPNMGIPGNVVTIDGKGFGTTQGTVTFGGVTATVKSWTSNRIEVYVPNMAAGLTDVKVTAGGVSSNLYSYNILSGTQTSVVFTVKSAPPTNLGDKIYLTGNIPELGNWSTDTSGAVNNAQGPLLAPNYPDWFYVFSVPAGKTIQFKFFIKRADGTIQWENGSNHVATTPTGATGNITVTWQN

SEQ ID NO: 45201 - protein, 686 aa, Alicyclobacillus
SSSASVKGDVIYQIIIDRFYDGDTTNNNPAKSYGLYDPTKSKWKMYWGGDLEGVRQKLPYLKQLGVTTIWLSPVLDNLDTLAGTDNTGYHGYWTRDFKQIEEHFGNWTTFDTLVNDAHQNGIKVIVDFVPNHSTPFKANDSTFAENGALYDNGTYMGNYFDDATKGYFHHNGDISNWDDRYEAQWKNFTDPAGFSLADLSQENGTIAQYLTDAAVQLVAHGADGLRIDAVKHFNSGFSKSLADKLYQKKDIFLVGEWYGDDPGAANHLEKVRYANNSGVNVLDFDLNTVIRNVFGTFTQTMYDLNNMVNQTGNEYKYKENLITFIDNHDMSRFLTVNSNKANLHQALAFILTSRGTPSIYYGTEQYMAGGNDPYNRGMMPAFDTTTTAFKEVSTLAGLRRNNAAIQYGTTTQRWINNDVYIYERKFFNDVVLVAINRNTQSSYSISGLQTALPNGNYADYLSGLLGGNGISVSNGSVASFTLAPGAVSVWQYSTSASAPQIGSVAPNMGIPGNVVTIDGKGFGTTQGTVTFGGVTATVKSWTSNRIEVYVPNMAAGLTDVKVTAGGVSSNLYSYNILSGTQTSVVFTVKSAPPTNLGDKIYLTGNIPELGNWSTDTSGAVNNAQGPLLAPNYPDWFYVFSVPAGKTIQFKFFIKRADGTIQWENGSNHVATTPTGATGNITVTWQN

SEQ ID NO: 45202 - protein, 686 aa, Alicyclobacillus
SSSASVKGDVIYQIIIDRFYDGDTTNNNPAKSYGLYDPTKSKWKMYWGGDLEGVRQKLPYLKQLGVTTIWLSPVLDNLDTLAGTDNTGYHGYWTRDFKQIEEHFGNWTTFDTLVNDAHQNGIKVIVDFVPNHSTPFKANDSTFAEGGALYDNGTYMGNYFDDATKGYFHHNGDISNWDDRYEAQWKNFTDPAGFSLADLSQENGTIAQYLTDAAVQLVAHGADGLRIDAVKHFNSGFSKSLADKLYQKKDIFLVGEWYGDDPGAANHLEKVRYANNSGVNVLDFDLNTVIRNVFGTFTQTMYDLNNMVNQTGNEYKYKENLITFIDNHDMSRFLTVNSNKANLHQALAFILTSRGTPSIYYGTEQYMAGGNDPYNRGMMPAFDTTTTAFKEVSTLAGLRRNNAAIQYGTTTQRWINNDVYIYERKFFNDVVLVAINRNTQSSYSISGLQTALPNGNYADYLSGLLGGNGISVSNGSVASFTLAPGAVSVWQYSTSASAPQIGSVAPNMGIPGNVVTIDGKGFGTTQGTVTFGGVTATVKSWTSNRIEVYVPNMAAGLTDVKVTAGGVSSNLYSYNILSGTQTSVVFTVKSAPPTNLGDKIYLTGNIPELGNWSTDTSGAVNNAQGPLLAPNYPDWFYVFSVPAGKTIQFKFIIKRADGTIQWENGSNHVATTPTGATGNITVTWQN

SEQ ID NO: 45203 - protein, 686 aa, Alicyclobacillus
SSSASVKGDVIYQIIIDRFYDGDTTNNNPAKSYGLYDPTKSKWKMYWGGDLEGVRQKLPYLKQLGVTTIWLSPVLDNLDTLAGTDNTGYHGYWTRDFKQIEEHFGNWTTFDTLVNDAHQNGIKVIVDFVPNHSTPFKANDSTFAEGGALYDNGTYMGNYFDDATKGYFHHNGDISNWDDRYEAQWKNFTDPAGFSLADLSQENGTIAQYLTDAAVQLVAHGADGLRIDAVKHFNSGFSKSLADKLYQKKDIFLVGEWYGDDPGAANHLEKVRYANNSGVNVTDFDLNTVIRNVFGTFTQTMYDLNNMVNQTGNEYKYKENLITFIDNHDMSRFLTVNSNKANLHQALAFILTSRGTPSIYYGTEQYMAGGNDPYNRGMMPAFDTTTTAFKEVSTLAGLRRNNAAIQYGTTTQRWINNDVYIYERKFFNDVVLVAINRNTQSSYSISGLQTALPNGNYADYLSGLLGGNGISVSNGSVASFTLAPGAVSVWQYSTSASAPQIGSVAPNMGIPGNVVTIDGKGFGTTQGTVTFGGVTATVKSWTSNRIEVYVPNMAAGLTDVKVTAGGVSSNLYSYNILSGTQTSVVFTVKSAPPTNLGDKIYLTGNIPELGNWSTDTSGAVNNAQGPLLAPNYPDWFYVFSVPAGKTIQFKFFIKRADGTIQWENGSNHVATTPTGATGNITVTWQN

SEQ ID NO: 45204 - protein, 686 aa, Alicyclobacillus
SSSASVKGDVIYQIIIDRFYDGDTTNNNPAKSYGLYDPTKSKWKMYWGGDLEGVRQKLPYLKQLGVTTIWLSPVLDNLDTLAGTDNTGYHGYWTRDFKQIEEHFGNWTTFDTLVNDAHQNGIKVIVDFVPNHSTPFKANDSTFAEGGALYDNGTYMGNYFDDATKGYFHHNGDISNWDDRYEAQWKNFTDPAGFSLADLSQENGTIAQYLTDAAVQLVAHGADGLRIDAVKHFNSGFSKSLADKLYQKKDIFLVGEWYGDDPGAANHLEKVRYANNSGVNVLSFDLNTVIRNVFGTFTQTMYDLNNMVNQTGNEYKYKENLITFIDNHDMSRFLTVNSNKANLHQALAFILTSRGTPSIYYGTEQYMAGGNDPYNRGMMPAFDTTTTAFKEVSTLAGLRRNNAAIQYGTTTQRWINNDVYIYERKFFNDVVLVAINRNTQSSYSISGLQTALPNGNYADYLSGLLGGNGISVSNGSVASFTLAPGAVSVWQYSTSASAPQIGSVAPNMGIPGNVVTIDGKGFGTTQGTVTFGGVTATVKSWTSNRIEVYVPNMAAGLTDVKVTAGGVSSNLYSYNILSGTQTSVVFTVKSAPPTNLGDKIYLTGNIPELGNWSTDTSGAVNNAQGPLLAPNYPDWFYVFSVPAGKTIQFKFFIKRADGTIQWENGSNHVATTPTGATGNITVTWQN

SEQ ID NO: 45205 - protein, 686 aa, Geobacillus stearothermophilus
SSSASVKGDVIYQIIIDRFYDGDTTNNNPAKSYGLYDPTKSKWKMYWGGDLEGVRQKLPYLKQLGVTTIWLSPVLDNLDTLAGTDNTGFHGYWTRDFKQIEEHFGNWTTFDTLVNDAHQNGIKVIVDFVPNHSTPFKANDSTFAEGGALYNNGTYMGNYFDDATKGYFHHNGDISNWDDRYEAQWKNFTDSAGFSLADLSQENGTIAQYLTDAAVQLVAHGADGLRIDAVKHFNSGFSKSLADKLYQKKDIFLVGEWYGDGPGTANHLEKVRYANNSGVNVLDFDLNPVIRNVFGTFTQTMYDLNNMVNQTGNEYKYKENLITFIDNHDMSRFLSVNSNKANLHQALAFILTSRGTPSIYYGTEQYMAGGNDPYSRGMMPAFDTTTTAFKEVSTLAGLRRNNAAIQYGTTTQRWINNDVYIYERKFFNDVVLVAINRNTQSSYSISGLQTALPNGSYADYLSGLLGGNGISVSNGSVASFTLAPGAVSVWQYSTSASAPQIGSVAPNMGIPGNVVTIDGKGFGTTQGTVTFGGVTATVKSWTSNRIEVYVPNMAAGLTDVKVTAGGVSSNLYSYNILSGTQTSVVFTVKSAPPTNLGDKIYLTGNIPELGNWSTDTSGAVNNAQGPLLAPNYPDWFYVFSVPAGKTIQFKFFIKRADGTIQWENGSNHVATTPTGATGNITVTWQN

SEQ ID NO: 45206 - protein, 686 aa, Alicyclobacillus
SSSASVKGDVIYQIIIDRFYDGDTTNNNPAKSYGLYDPTKSKWKMYWGGDLEGVRQKLPYLKQLGVTTIWLSPVLDNLDTLAGTDNTGYHGYWTRDFKQIEEHFGNWTTFDTLVNDAHQNGIKVIVDFVPNHSTPFKANDSTFAEGGALYDNGTYMGNYFDDATKGYFHHNGDISNWDDRYEAQWKNFTDPAGFSLADLSQENGTIAQYLTDAAVQLVAHGADGLRIDAVKHFNSGFSKSLADKLYQKKDIFLVGEWYGDDPGAANHLEKVRYANNSGVNVLDFDLNTVIRNVFGTFTQTMYDLNNMVNQTGNEYKYKENLITFIDNHDMSRFLTVNSNKANLHQALAFILTSRGTPSIYYGTEQYMAGGNDPYNRGMMPAFDTTTTAFKEVSTLAGLRRNNAAIQYGTTTQRWINNDVYIYERKFFNDVVLVAINRNTQSSYSISGLQTALPNGNYADYLSGLLGGNGISVSNGSVASFTLAPGAVSVWQYSTSASAPQIGSVAPNMGIPGNVVTIDGKGFGTTQGTVTFGGVTATVKSWTSNRIEVYVPNMGAGLTDVKVTAGGVSSNLYSYNILSGTQTSVVFTVKSAPPTNLGDKIYLTGNIPELGNWSTDTSGAVNNAQGPLLAPNYPDWFYVFSVPAGKTIQFKFFIKRADGTIQWENGSNHVATTPTGATGNITVTWQN

SEQ ID NO: 45207 - protein, 686 aa, Alicyclobacillus
SSSASVKGDVIYQIIIDRFYDGDTTNNNPAKSYGLYDPTKSKWKMYWGGDLEGVRQKLPYLKQLGVTTIWLSPVLDNLDTLAGTDNTGYHGYWTRDFKQIEEHFGNWTTFDTLVNDAHQNGIKVIVDFVPNHSTPFKANDSTFAEGGALYDNGTYMGNYFDDATKGYFHHNGDISNWDDRYEAQWKNFTDPAGFSLADLSQENGTIAQYLTDAAVQLVAHGADGWRIDAVKHFNSGFSKSLADKLYQKKDIFLVGEWYGDDPGAANHLEKVRYANNSGVNVLDFDLNTVIRNVFGTFTQTMYDLNNMVNQTGNEYKYKENLITFIDNHDMSRFLTVNSNKANLHQALAFILTSRGTPSIYYGTEQYMAGGNDPYNRGMMPAFDTTTTAFKEVSTLAGLRRNNAAIQYGTTTQRWINNDVYIYERKFFNDVVLVAINRNTQSSYSISGLQTALPNGNYADYLSGLLGGNGISVSNGSVASFTLAPGAVSVWQYSTSASAPQIGSVAPNMGIPGNVVTIDGKGFGTTQGTVTFGGVTATVKSWTSNRIEVYVPNMAAGLTDVKVTAGGVSSNLYSYNILSGTQTSVVFTVKSAPPTNLGDKIYLTGNIPELGNWSTDTSGAVNNAQGPLLAPNYPDWFYVFSVPAGKTIQFKFFIKRADGTIQWENGSNHVATTPTGATGNITVTWQN

SEQ ID NO: 45208 - protein, 686 aa, Alicyclobacillus
SSSASVKGDVIYQIIIDRFYDGDTTNNNPAKSYGLYDPTKSKWKMYWGGDLEGVRQKLPYLKQLGVTTIWLSPVLDNLDTLAGTDNTGYHGYWTRDFKQIEEHFGNWTTFDTLVNDAHQNGIKVIVDFVPNHSTPFKANDSTFAEGGALYDNGTYMGNYFDDATKGYFHHNGDISNWDDRYEAQWKNFTDPAGFSLADLSQENGTIAQYLTDAAVQLVAHGADGLRIDAVKHFNSGFSKSLADKLYQKKDIFLVGEWYGDDPGAANHLEKVRYANNSGVNVLDFDLNTVIRNVFGTFTQTMYDLNNMVNQTGNEYKYKENLITFIDNHDMSRFLTVNSNKANLHQALAFILTSRGTPSIYYGTEQYMAGGNDPYNRGMMPAFDTTTTAFKVVSTLAGLRRNNAAIQYGTTTQRWINNDVYIYERKFFNDVVLVAINRNTQSSYSISGLQTALPNGNYADYLSGLLGGNGISVSNGSVASFTLAPGAVSVWQYSTSASAPQIGSVAPNMGIPGNVVTIDGKGFGTTQGTVTFGGVTATVKSWTSNRIEVYVPNMAAGLTDVKVTAGGVSSNLYSYNILSGTQTSVVFTVKSAPPTNLGDKIYLTGNIPELGNWSTDTSGAVNNAQGPLLAPNYPDWFYVFSVPAGKTIQFKFFIKRADGTIQWENGSNHVATTPTGATGNITVTWQN

SEQ ID NO: 45209 - protein, 686 aa, Alicyclobacillus
SSSASVKGDVIYQIIIDRFYDGDTTNNNPAKSYGLYDPTKSKWKMYWGGDLEGVRQKLPYLKQLGVTTIWLSPVLDNLDTLAGTDNTGYHGYWTRDFKQIEEHFGNWTTFDTLVNDAHQNGIKVIVDFVPNHSTPFKANDSTFAEGGALYDNGTYMGNYFDDATKGYFHHNGDISNWDDRYEAQWKNFYDPAGFSLADLSQENGTIAQYLTDAAVQLVAHGADGLRIDAVKHFNSGFSKSLADKLYQKKDIFLVGEWYGDDPGAANHLEKVRYANNSGVNVLDFDLNTVIRNVFGTFTQTMYDLNNMVNQTGNEYKYKENLITFIDNHDMSRFLTVNSNKANLHQALAFILTSRGTPSIYYGTEQYMAGGNDPYNRGMMPAFDTTTTAFKEVSTLAGLRRNNAAIQYGTTTQRWINNDVYIYERKFFNDVVLVAINRNTQSSYSISGLQTALPNGNYADYLSGLLGGNGISVSNGSVASFTLAPGAVSVWQYSTSASAPQIGSVAPNMGIPGNVVTIDGKGFGTTQGTVTFGGVTATVKSWTSNRIEVYVPNMAAGLTDVKVTAGGVSSNLYSYNILSGTQTSVVFTVKSAPPTNLGDKIYLTGNIPELGNWSTDTSGAVNNAQGPLLAPNYPDWFYVFSVPAGKTIQFKFFIKRADGTIQWENGSNHVATTPTGATGNITVTWQN

SEQ ID NO: 45210 - protein, 686 aa, Alicyclobacillus
SSSASVKGDVIYQIIIDRFYDGDTTNNNPAKSYGLYDPTKSKWKMYWGGDLEGVRQKLPYLKQLGVTTIWLSPVLDNLDTLAGTDNTGYHGYWTRDFKQIEEHFGNWTTFDTLVNDAHQNGIKVIVDFVPNHSTPFKANDSTFAEGGALYDNGTYMGNYFDDATKGYFHHNGDISNWDDRYEAQWKNFTDPAGFSLADLSQENGTIAQYLTDAAVQLVAHGADGLRIDAVKHFNSGFSKSLADKLYQKKDIFLVGEWYGDDPGAANHLEKVRYANNSGVNVLDFDLNTVIRNVFGTFTQTMYDLNNMVNQTGNEYKYKENLITFIDNHDMSRFLTVNSNKANLHQALAFILTSRGTPSIYYGTEQYMAGGNDPYNRGMMPAFDTTTTAFKEVSTLAGLRRNNAAIQYGTTTQRWINNDVYIFERKFFNDVVLVAINRNTQSSYSISGLQTALPNGNYADYLSGLLGGNGISVSNGSVASFTLAPGAVSVWQYSTSASAPQIGSVAPNMGIPGNVVTIDGKGFGTTQGTVTFGGVTATVKSWTSNRIEVYVPNMAAGLTDVKVTAGGVSSNLYSYNILSGTQTSVVFTVKSAPPTNLGDKIYLTGNIPELGNWSTDTSGAVNNAQGPLLAPNYPDWFYVFSVPAGKTIQFKFFIKRADGTIQWENGSNHVATTPTGATGNITVTWQN

SEQ ID NO: 45211 - protein, 686 aa, Alicyclobacillus
SSSASVKGDVIYQIIIDRFYDGDTTNNNPAKSYGLYDPTKSKWKMYWGGDLEGVRQKLPYLKQLGVTTIWLSPVLDNLDTLAGTDNTGYHGYWTRDFKQIEEHFGNWTTFDTLVNDAHQNGIKVIVDYVPNHSTPFKANDSTFAEGGALYDNGTYMGNYFDDATKGYFHHNGDISNWDDRYEAQWKNFTDPAGFSLADLSQENGTIAQYLTDAAVQLVAHGADGLRIDAVKHFNSGFSKSLADKLYQKKDIFLVGEWYGDDPGAANHLEKVRYANNSGVNVLDFDLNTVIRNVFGTFTQTMYDLNNMVNQTGNEYKYKENLITFIDNHDMSRFLTVNSNKANLHQALAFILTSRGTPSIYYGTEQYMAGGNDPYNRGMMPAFDTTTTAFKEVSTLAGLRRNNAAIQYGTTTQRWINNDVYIYERKFFNDVVLVAINRNTQSSYSISGLQTALPNGNYADYLSGLLGGNGISVSNGSVASFTLAPGAVSVWQYSTSASAPQIGSVAPNMGIPGNVVTIDGKGFGTTQGTVTFGGVTATVKSWTSNRIEVYVPNMAAGLTDVKVTAGGVSSNLYSYNILSGTQTSVVFTVKSAPPTNLGDKIYLTGNIPELGNWSTDTSGAVNNAQGPLLAPNYPDWFYVFSVPAGKTIQFKFFIKRADGTIQWENGSNHVATTPTGATGNITVTWQN

SEQ ID NO: 45212 - protein, 686 aa, Alicyclobacillus
SSSASVKGDVIYQIIIDRFYDGDTTNNNPAKSYGLYDPTKSKWKMYWGGDLEGVRQKLPYLKQLGVTTIWLSPVLDNLDTLAGTDNTGYHGYWTRDFKQIEEHFGNWTTFDTLVNDAHQNGIKVIVDFVPNHSTPFKANDSTFAEGGALYDNGTYMGNYFDDATKGYFHHNGDISNWDDRYEAQWKNFTDPAGFSLADLSQENGTIAQYLTDAAVQLVAHGADGLRIDAVKHFNSGFSKSLADKLYQKKDIFLVGEWYGDDPGAANHLEKVRYANNSGVNVLDFDLNTVIRNVFGTFTQTMYDLNNMVNQTGNEYKYKENLPTFIDNHDMSRFLTVNSNKANLHQALAFILTSRGTPSIYYGTEQYMAGGNDPYNRGMMPAFDTTTTAFKEVSTLAGLRRNNAAIQYGTTTQRWINNDVYIYERKFFNDVVLVAINRNTQSSYSISGLQTALPNGNYADYLSGLLGGNGISVSNGSVASFTLAPGAVSVWQYSTSASAPQIGSVAPNMGIPGNVVTIDGKGFGTTQGTVTFGGVTATVKSWTSNRIEVYVPNMAAGLTDVKVTAGGVSSNLYSYNILSGTQTSVVFTVKSAPPTNLGDKIYLTGNIPELGNWSTDTSGAVNNAQGPLLAPNYPDWFYVFSVPAGKTIQFKFFIKRADGTIQWENGSNHVATTPTGATGNITVTWQN

SEQ ID NO: 45213 - protein, 686 aa, Alicyclobacillus
SSSASVKGDVIYQIIIDRFYDGDTTNNNPAKSYGLYDPTKSKWKMYWGGDLEGVRQKLPYLKQLGVTTIWLSPVLDNLDTLAGTDNTGYHGYWTRDFKQIEEHFGNWTTFDTLVNDAHQNGIKVIVDFVPNHSTPFKANDSTFAEGGALYDNGTYMGNYFDDATKGYFHHNGDISNWDDRYEAQWKNFTDPAGFSLADLSQENGTIAQYLTDAAVQLVAHGADGLRIDAVKHFNSGFSKSLADKLYQKKDVFLVGEWYGDDPGAANHLEKVRYANNSGVNVLDFDLNTVIRNVFGTFTQTMYDLNNMVNQTGNEYKYKENLITFIDNHDMSRFLTVNSNKANLHQALAFILTSRGTPSIYYGTEQYMAGGNDPYNRGMMPAFDTTTTAFKEVSTLAGLRRNNAAIQYGTTTQRWINNDVYIYERKFFNDVVLVAINRNTQSSYSISGLQTALPNGNYADYLSGLLGGNGISVSNGSVASFTLAPGAVSVWQYSTSASAPQIGSVAPNMGIPGNVVTIDGKGFGTTQGTVTFGGVTATVKSWTSNRIEVYVPNMAAGLTDVKVTAGGVSSNLYSYNILSGTQTSVVFTVKSAPPTNLGDKIYLTGNIPELGNWSTDTSGAVNNAQGPLLAPNYPDWFYVFSVPAGKTIQFKFFIKRADGTIQWENGSNHVATTPTGATGNITVTWQN

SEQ ID NO: 45214 - protein, 686 aa, Alicyclobacillus
SSSASVKGDVIYQIIIDRFYDGDTTNNNPAKSYGLYDPTKSKWKMYWGGDLEGVRQKLPYLKQLGVTTIWLSPVLDNLDTLAGTDNTGYHGYWTRDFKQIEEHFGNWTTFDTLVNDAHQNGIKVIVDFVPNHSTPFKANDSTFAEGGALYDNGTYMGNYFDDATKGYFHHNGDVSNWDDRYEAQWKNFTDPAGFSLADLSQENGTIAQYLTDAAVQLVAHGADGLRIDAVKHFNSGFSKSLADKLYQKKDIFLVGEWYGDDPGAANHLEKVRYANNSGVNVLDFDLNTVIRNVFGTFTQTMYDLNNMVNQTGNEYKYKENLITFIDNHDMSRFLTVNSNKANLHQALAFILTSRGTPSIYYGTEQYMAGGNDPYNRGMMPAFDTTTTAFKEVSTLAGLRRNNAAIQYGTTTQRWINNDVYIYERKFFNDVVLVAINRNTQSSYSISGLQTALPNGNYADYLSGLLGGNGISVSNGSVASFTLAPGAVSVWQYSTSASAPQIGSVAPNMGIPGNVVTIDGKGFGTTQGTVTFGGVTATVKSWTSNRIEVYVPNMAAGLTDVKVTAGGVSSNLYSYNILSGTQTSVVFTVKSAPPTNLGDKIYLTGNIPELGNWSTDTSGAVNNAQGPLLAPNYPDWFYVFSVPAGKTIQFKFFIKRADGTIQWENGSNHVATTPTGATGNITVTWQN

SEQ ID NO: 45215 - protein, 686 aa, Alicyclobacillus
SSSASVKGDVIYQIIIDRFYDGDTTNNNPAKSYGLYDPTKSKWKMYWGGDLEGVRQKLPYLKQLGVTTIWLSPVLDNLDTLAGTDNTGYHGYWTRDFKQIEEHFGNWTTFDTLVNDAHQNGIKVIVDFVPNHSTPFKANDSTFAEGGALYDNGTYMGNYFDDATKGYFHHNGDISNWDDRYEAQWKNFTDPAGFSLADLSQENGTIAQYLTDAAVQLVAHGADGIRIDAVKHFNSGFSKSLADKLYQKKDIFLVGEWYGDDPGAANHLEKVRYANNSGVNVLDFDLNTVIRNVFGTFTQTMYDLNNMVNQTGNEYKYKENLITFIDNHDMSRFLTVNSNKANLHQALAFILTSRGTPSIYYGTEQYMAGGNDPYNRGMMPAFDTTTTAFKEVSTLAGLRRNNAAIQYGTTTQRWINNDVYIYERKFFNDVVLVAINRNTQSSYSISGLQTALPNGNYADYLSGLLGGNGISVSNGSVASFTLAPGAVSVWQYSTSASAPQIGSVAPNMGIPGNVVTIDGKGFGTTQGTVTFGGVTATVKSWTSNRIEVYVPNMAAGLTDVKVTAGGVSSNLYSYNILSGTQTSVVFTVKSAPPTNLGDKIYLTGNIPELGNWSTDTSGAVNNAQGPLLAPNYPDWFYVFSVPAGKTIQFKFFIKRADGTIQWENGSNHVATTPTGATGNITVTWQN

SEQ ID NO: 45216 - protein, 686 aa, Geobacillus stearothermophilus
SSSASVKGDVIYQIIIDRFYDGDTTNNNPAKSYGLYDPTKSKWKMYWGGDLEGVRQKLPYLKQLGVTTIWLSPVLDNLDTLAGTDNTGFHGYWTRDFKQIEEHFGNWTTFDTLVNDAHQNGIKVIVDFVPNHSTPFKANDSTFAEGGALYNNGTYMGNYFDDATKGYFHHNGDISNWDDRYEAQWKNFTDPAGFSLADLSQENGTIAQYLTDAAVQLVAHGADGLRIDAVKHFNSGFSKSLADKLYQKKDIFLVGEWYGDGPGTANHLEKVRYANNSGVNVLDFDLNPVVRNVFGTFTQTMYDLNNMVNQTGNEYKYKENLITFIDNHDMSRFLSVNSNKANLHQALAFILTSRGTPSIYYGTEQYMAGGNDPYSRGMMPAFDTTTTAFKEVSTLAGLRRNNAAIQYGTTTQRWINNDVYIYERKFFNDVVLVAINRNTQSSYSISGLQTALPNGSYADYLSGLLGGNGISVSNGSVASFTLAPGAVSVWQYSTSASAPQIGSVAPNMGIPGNVVTIDGKGFGTTQGTVTFGGVTATVKSWTSNRIEVYVPNMAAGLTDVKVTAGGVSSNLYSYNILSGTQTSVVFTVKSAPPTNLGDKIYLTGNIPELGNWSTDTSGAVNNAQGPLLAPNYPDWFYVFSVPAGKTIQFKFFIKRADGTIQWENGSNHVATTPTGATGNITVTWQN

SEQ ID NO: 45217 - protein, 686 aa, Alicyclobacillus
SSSASVKGDVIYQIIIDRFYDGDTTNNNPAKSYGLYDPTKSKWKMYWGGDLEGVRQKLPYLKQLGVTTIWLSPVLDNLDTLAGTDNTGYHGYWTRDFKQIEEHFGNWTTFDTLVNDAHQNGIKVIVDFVPNHSTPFKANDSTFAEGGALYDNGTYMGNYFDDATKGYFHHNGDISNWDDRYEAQWKNFTDPAGFSLADLSQENGTIAQYLTDAAVQLVAHGADGLRIDAVKHFNSGFSKSLADKLYQKKDIFLVGEWYGDDPGAANHLEKVRYANNSGVNVLDFDLNTVIRNVFGTFTQTMYDLNNMVNQTGNEYKYKENLINFIDNHDMSRFLTVNSNKANLHQALAFILTSRGTPSIYYGTEQYMAGGNDPYNRGMMPAFDTTTTAFKEVSTLAGLRRNNAAIQYGTTTQRWINNDVYIYERKFFNDVVLVAINRNTQSSYSISGLQTALPNGNYADYLSGLLGGNGISVSNGSVASFTLAPGAVSVWQYSTSASAPQIGSVAPNMGIPGNVVTIDGKGFGTTQGTVTFGGVTATVKSWTSNRIEVYVPNMAAGLTDVKVTAGGVSSNLYSYNILSGTQTSVVFTVKSAPPTNLGDKIYLTGNIPELGNWSTDTSGAVNNAQGPLLAPNYPDWFYVFSVPAGKTIQFKFFIKRADGTIQWENGSNHVATTPTGATGNITVTWQN

SEQ ID NO: 45218 - protein, 686 aa, Alicyclobacillus
SSSASVKGDVIYQIIIDRFYDGDTTNNNPAKSYGLYDPTKSKWKMYWGGDLEGVRQKLPYLKQLGVTTIWLSPVLDNLDTLAGTDNTGYHGYWTRDFKQIEEHFGNWTTFDTLVNDAHQNGIKVIVDFVPNHSTPAKANDSTFAEGGALYDNGTYMGNYFDDATKGYFHHNGDISNWDDRYEAQWKNFTDPAGFSLADLSQENGTIAQYLTDAAVQLVAHGADGLRIDAVKHFNSGFSKSLADKLYQKKDIFLVGEWYGDDPGAANHLEKVRYANNSGVNVLDFDLNTVIRNVFGTFTQTMYDLNNMVNQTGNEYKYKENLITFIDNHDMSRFLTVNSNKANLHQALAFILTSRGTPSIYYGTEQYMAGGNDPYNRGMMPAFDTTTTAFKEVSTLAGLRRNNAAIQYGTTTQRWINNDVYIYERKFFNDVVLVAINRNTQSSYSISGLQTALPNGNYADYLSGLLGGNGISVSNGSVASFTLAPGAVSVWQYSTSASAPQIGSVAPNMGIPGNVVTIDGKGFGTTQGTVTFGGVTATVKSWTSNRIEVYVPNMAAGLTDVKVTAGGVSSNLYSYNILSGTQTSVVFTVKSAPPTNLGDKIYLTGNIPELGNWSTDTSGAVNNAQGPLLAPNYPDWFYVFSVPAGKTIQFKFFIKRADGTIQWENGSNHVATTPTGATGNITVTWQN

SEQ ID NO: 45219 - protein, 686 aa, Alicyclobacillus
SSSASVKGDVIYQIIIDRFYDGDTTNNNPAKSYGLYDPTKSKWKMYWGGDLEGVRQKLPYLKQLGVTTIWLSPVLDNLDTLAGTDNTGYHGYWTRDFKQIEEHFGNWTTFDTLVNDAHQNGIKVIVDFVPNHSTPFKANDSTFAEGGALYDNGTYMGNYFDDATKGYFHHNGDISNWDDRYEAQWKNFTDPAGFNLADLSQENGTIAQYLTDAAVQLVAHGADGLRIDAVKHFNSGFSKSLADKLYQKKDIFLVGEWYGDDPGAANHLEKVRYANNSGVNVLDFDLNTVIRNVFGTFTQTMYDLNNMVNQTGNEYKYKENLITFIDNHDMSRFLTVNSNKANLHQALAFILTSRGTPSIYYGTEQYMAGGNDPYNRGMMPAFDTTTTAFKEVSTLAGLRRNNAAIQYGTTTQRWINNDVYIYERKFFNDVVLVAINRNTQSSYSISGLQTALPNGNYADYLSGLLGGNGISVSNGSVASFTLAPGAVSVWQYSTSASAPQIGSVAPNMGIPGNVVTIDGKGFGTTQGTVTFGGVTATVKSWTSNRIEVYVPNMAAGLTDVKVTAGGVSSNLYSYNILSGTQTSVVFTVKSAPPTNLGDKIYLTGNIPELGNWSTDTSGAVNNAQGPLLAPNYPDWFYVFSVPAGKTIQFKFFIKRADGTIQWENGSNHVATTPTGATGNITVTWQN

SEQ ID NO: 45220 - protein, 686 aa, Alicyclobacillus
SSSASVKGDVIYQIIIDRFYDGDTTNNNPAKSYGLYDPTKSKWKLYWGGDLEGVRQKLPYLKQLGVTTIWLSPVLDNLDTLAGTDNTGYHGYWTRDFKQIEEHFGNWTTFDTLVNDAHQNGIKVIVDFVPNHSTPFKANDSTFAEGGALYDNGTYMGNYFDDATKGYFHHNGDISNWDDRYEAQWKNFTDPAGFSLADLSQENGTIAQYLTDAAVQLVAHGADGLRIDAVKHFNSGFSKSLADKLYQKKDIFLVGEWYGDDPGAANHLEKVRYANNSGVNVLDFDLNTVIRNVFGTFTQTMYDLNNMVNQTGNEYKYKENLITFIDNHDMSRFLTVNSNKANLHQALAFILTSRGTPSIYYGTEQYMAGGNDPYNRGMMPAFDTTTTAFKEVSTLAGLRRNNAAIQYGTTTQRWINNDVYIYERKFFNDVVLVAINRNTQSSYSISGLQTALPNGNYADYLSGLLGGNGISVSNGSVASFTLAPGAVSVWQYSTSASAPQIGSVAPNMGIPGNVVTIDGKGFGTTQGTVTFGGVTATVKSWTSNRIEVYVPNMAAGLTDVKVTAGGVSSNLYSYNILSGTQTSVVFTVKSAPPTNLGDKIYLTGNIPELGNWSTDTSGAVNNAQGPLLAPNYPDWFYVFSVPAGKTIQFKFFIKRADGTIQWENGSNHVATTPTGATGNITVTWQN

SEQ ID NO: 45221 - protein, 686 aa, Alicyclobacillus
SSSASVKGDVIYQVIIDRFYDGDTTNNNPAKSYGLYDPTKSKWKMYWGGDLEGVRQKLPYLKQLGVTTIWLSPVLDNLDTLAGTDNTGYHGYWTRDFKQIEEHFGNWTTFDTLVNDAHQNGIKVIVDFVPNHSTPFKANDSTFAEGGALYDNGTYMGNYFDDATKGYFHHNGDISNWDDRYEAQWKNFTDPAGFSLADLSQENGTIAQYLTDAAVQLVAHGADGLRIDAVKHFNSGFSKSLADKLYQKKDIFLVGEWYGDDPGAANHLEKVRYANNSGVNVLDFDLNTVIRNVFGTFTQTMYDLNNMVNQTGNEYKYKENLITFIDNHDMSRFLTVNSNKANLHQALAFILTSRGTPSIYYGTEQYMAGGNDPYNRGMMPAFDTTTTAFKEVSTLAGLRRNNAAIQYGTTTQRWINNDVYIYERKFFNDVVLVAINRNTQSSYSISGLQTALPNGNYADYLSGLLGGNGISVSNGSVASFTLAPGAVSVWQYSTSASAPQIGSVAPNMGIPGNVVTIDGKGFGTTQGTVTFGGVTATVKSWTSNRIEVYVPNMAAGLTDVKVTAGGVSSNLYSYNILSGTQTSVVFTVKSAPPTNLGDKIYLTGNIPELGNWSTDTSGAVNNAQGPLLAPNYPDWFYVFSVPAGKTIQFKFFIKRADGTIQWENGSNHVATTPTGATGNITVTWQN

SEQ ID NO: 45222 - protein, 686 aa, Alicyclobacillus
SSSASVKGDVIYQIIIDRFYDGDTTNNNPAKSYGLYDPTKSKWKMYWGGDLEGVRQKLPYLKQLGVTTIWLSPVLDNLDTLAGTDNTGYHGYWTRDFKQIEEHFGNWTTFDTLVNDAHQNGIKVIVDFVPNHSTPFKANDSTFAEGGALYDNGTYMGNYFDDATKGYFHHNGDISNWDDRYEAQWKNFTDPAGFSLADLSQENGTIAQYLTDAAVQLVAHGADGLRIDAVKHFNSGFSKSLADKLYQKKDIFLVGEWYGDDPGAANHLEKVRYANNSGVNVLDFDLNTVIRNVFGTFTQTMYDLNNMVNQTGNEYKYKENLITFIDNHDMSRFLTVNSNKANLHQALAFILTSRGTPSIYYGTEQYMAGGNDPYNRGMMPAFDTTTTAFKEVSTLAGLRRNNAAIQYGTTTQRYINNDVYIYERKFFNDVVLVAINRNTQSSYSISGLQTALPNGNYADYLSGLLGGNGISVSNGSVASFTLAPGAVSVWQYSTSASAPQIGSVAPNMGIPGNVVTIDGKGFGTTQGTVTFGGVTATVKSWTSNRIEVYVPNMAAGLTDVKVTAGGVSSNLYSYNILSGTQTSVVFTVKSAPPTNLGDKIYLTGNIPELGNWSTDTSGAVNNAQGPLLAPNYPDWFYVFSVPAGKTIQFKFFIKRADGTIQWENGSNHVATTPTGATGNITVTWQN

SEQ ID NO: 45223 - protein, 686 aa, Alicyclobacillus
SSSASVKGDVIYQIIIDRFYDGDTTNNNPAKSYGLYDPTKSKWKMYWGGDLEGVRQKLPYLKQLGVTTIWLSPVLDNLDTLAGTDNTGYHGYWTRDFKQIEEHFGNWTTFDTLVNDAHQNGIKVIVDFVPNHSTPFKANDSTFAEGGALYDNGTYMGNYFDDATKGYFHHNGDISNWDDRYEAQWRNFTDPAGFSLADLSQENGTIAQYLTDAAVQLVAHGADGLRIDAVKHFNSGFSKSLADKLYQKKDIFLVGEWYGDDPGAANHLEKVRYANNSGVNVLDFDLNTVIRNVFGTFTQTMYDLNNMVNQTGNEYKYKENLITFIDNHDMSRFLTVNSNKANLHQALAFILTSRGTPSIYYGTEQYMAGGNDPYNRGMMPAFDTTTTAFKEVSTLAGLRRNNAAIQYGTTTQRWINNDVYIYERKFFNDVVLVAINRNTQSSYSISGLQTALPNGNYADYLSGLLGGNGISVSNGSVASFTLAPGAVSVWQYSTSASAPQIGSVAPNMGIPGNVVTIDGKGFGTTQGTVTFGGVTATVKSWTSNRIEVYVPNMAAGLTDVKVTAGGVSSNLYSYNILSGTQTSVVFTVKSAPPTNLGDKIYLTGNIPELGNWSTDTSGAVNNAQGPLLAPNYPDWFYVFSVPAGKTIQFKFFIKRADGTIQWENGSNHVATTPTGATGNITVTWQN

SEQ ID NO: 45224 - protein, 686 aa, Alicyclobacillus
SSSASVKGDVIYQIIIDRFYDGDTTNNNPAKSYGLYDPTKSKWKMYWGGDLEGVRQKLPYLKQLGVTTIWLTPVLDNLDTLAGTDNTGYHGYWTRDFKQIEEHFGNWTTFDTLVNDAHQNGIKVIVDFVPNHSTPFKANDSTFAEGGALYDNGTYMGNYFDDATKGYFHHNGDISNWDDRYEAQWKNFTDPAGFSLADLSQENGTIAQYLTDAAVQLVAHGADGLRIDAVKHFNSGFSKSLADKLYQKKDIFLVGEWYGDDPGAANHLEKVRYANNSGVNVLDFDLNTVIRNVFGTFTQTMYDLNNMVNQTGNEYKYKENLITFIDNHDMSRFLTVNSNKANLHQALAFILTSRGTPSIYYGTEQYMAGGNDPYNRGMMPAFDTTTTAFKEVSTLAGLRRNNAAIQYGTTTQRWINNDVYIYERKFFNDVVLVAINRNTQSSYSISGLQTALPNGNYADYLSGLLGGNGISVSNGSVASFTLAPGAVSVWQYSTSASAPQIGSVAPNMGIPGNVVTIDGKGFGTTQGTVTFGGVTATVKSWTSNRIEVYVPNMAAGLTDVKVTAGGVSSNLYSYNILSGTQTSVVFTVKSAPPTNLGDKIYLTGNIPELGNWSTDTSGAVNNAQGPLLAPNYPDWFYVFSVPAGKTIQFKFFIKRADGTIQWENGSNHVATTPTGATGNITVTWQN

SEQ ID NO: 45225 - protein, 686 aa, Alicyclobacillus
SSSASVKGDVIYQIIIDRFYDGDTTNNNPAKSYGLYDPTKSKWKMYWGGDLEGVRQKLPYLKQLGVTTIWLSPVLDNLDTLAGTDNTGYHGYWTRDFKQIEEHFGNWTTFDTLVNDAHQNGIKVIVDLVPNHSTPFKANDSTFAEGGALYDNGTYMGNYFDDATKGYFHHNGDISNWDDRYEAQWKNFTDPAGFSLADLSQENGTIAQYLTDAAVQLVAHGADGLRIDAVKHFNSGFSKSLADKLYQKKDIFLVGEWYGDDPGAANHLEKVRYANNSGVNVLDFDLNTVIRNVFGTFTQTMYDLNNMVNQTGNEYKYKENLITFIDNHDMSRFLTVNSNKANLHQALAFILTSRGTPSIYYGTEQYMAGGNDPYNRGMMPAFDTTTTAFKEVSTLAGLRRNNAAIQYGTTTQRWINNDVYIYERKFFNDVVLVAINRNTQSSYSISGLQTALPNGNYADYLSGLLGGNGISVSNGSVASFTLAPGAVSVWQYSTSASAPQIGSVAPNMGIPGNVVTIDGKGFGTTQGTVTFGGVTATVKSWTSNRIEVYVPNMAAGLTDVKVTAGGVSSNLYSYNILSGTQTSVVFTVKSAPPTNLGDKIYLTGNIPELGNWSTDTSGAVNNAQGPLLAPNYPDWFYVFSVPAGKTIQFKFFIKRADGTIQWENGSNHVATTPTGATGNITVTWQN

SEQ ID NO: 45226 - protein, 686 aa, Alicyclobacillus
SSSASVKGDVIYQIIIDRFYDGDTTNNNPAKSYGLYDPTKSKWKMYWGGDLEGVRQKLPYLKQLGVTTIWLSPVLDNLDTLAGTDNTGYHGYWTRDFKQIEEHFGNWTTFDTLVNDAHQNGIKVIVDFVPNHSTPFKANDSTFAEGGALYDNGTYMGNYFDDATKGYFHHNGDISNWDDRYEAQWKNFTDPAGFSLADLSQENGTIAQYLTDAAVQLVAHGADGLRIDAVKHFNSGFSKSLADKLYQKKDIFLVGEWYGDDPGAANHLEKVRYANNSGVNVLDFDLNTVIRNVFGTFTQTMYDLNNMVNQTGNEYKYKENLITFIDSHDMSRFLTVNSNKANLHQALAFILTSRGTPSIYYGTEQYMAGGNDPYNRGMMPAFDTTTTAFKEVSTLAGLRRNNAAIQYGTTTQRWINNDVYIYERKFFNDVVLVAINRNTQSSYSISGLQTALPNGNYADYLSGLLGGNGISVSNGSVASFTLAPGAVSVWQYSTSASAPQIGSVAPNMGIPGNVVTIDGKGFGTTQGTVTFGGVTATVKSWTSNRIEVYVPNMAAGLTDVKVTAGGVSSNLYSYNILSGTQTSVVFTVKSAPPTNLGDKIYLTGNIPELGNWSTDTSGAVNNAQGPLLAPNYPDWFYVFSVPAGKTIQFKFFIKRADGTIQWENGSNHVATTPTGATGNITVTWQN

SEQ ID NO: 45227 - protein, 686 aa, Alicyclobacillus
SSSASVKGDVIYQIIIDRFYDGDTTNNNPAKSYGLYDPTKSKWKMYWGGDLEGVRQKLPYLKQLGVTTIWISPVLDNLDTLAGTDNTGYHGYWTRDFKQIEEHFGNWTTFDTLVNDAHQNGIKVIVDFVPNHSTPFKANDSTFAEGGALYDNGTYMGNYFDDATKGYFHHNGDISNWDDRYEAQWKNFTDPAGFSLADLSQENGTIAQYLTDAAVQLVAHGADGLRIDAVKHFNSGFSKSLADKLYQKKDIFLVGEWYGDDPGAANHLEKVRYANNSGVNVLDFDLNTVIRNVFGTFTQTMYDLNNMVNQTGNEYKYKENLITFIDNHDMSRFLTVNSNKANLHQALAFILTSRGTPSIYYGTEQYMAGGNDPYNRGMMPAFDTTTTAFKEVSTLAGLRRNNAAIQYGTTTQRWINNDVYIYERKFFNDVVLVAINRNTQSSYSISGLQTALPNGNYADYLSGLLGGNGISVSNGSVASFTLAPGAVSVWQYSTSASAPQIGSVAPNMGIPGNVVTIDGKGFGTTQGTVTFGGVTATVKSWTSNRIEVYVPNMAAGLTDVKVTAGGVSSNLYSYNILSGTQTSVVFTVKSAPPTNLGDKIYLTGNIPELGNWSTDTSGAVNNAQGPLLAPNYPDWFYVFSVPAGKTIQFKFFIKRADGTIQWENGSNHVATTPTGATGNITVTWQN

SEQ ID NO: 45228 - protein, 686 aa, Alicyclobacillus
SSSASVKGDVIYQIIIDRFYDGDTTNNNPAKSYGLYDPTKSKWKMYWGGDLEGVRQKLPYLKQLGVTTIWLSPVLDNLDTLAGTDNTGYHGYWTRDFKQIEEHFGNWTTFDTLVNDAHQNGIKVIVDFVPNHSTPFKANDSTFAEGGALYDNGTYMGNYFDDATKGYFHHNGDISNWDDRYEAQWKNFTDPAGFSLADLSQENGTIAQYLTDAAVQLVAHGADGLRIDAVKHFNSGFSKSLADKLYQKKDIFLVGEWYLDDPGAANHLEKVRYANNSGVNVLDFDLNTVIRNVFGTFTQTMYDLNNMVNQTGNEYKYKENLITFIDNHDMSRFLTVNSNKANLHQALAFILTSRGTPSIYYGTEQYMAGGNDPYNRGMMPAFDTTTTAFKEVSTLAGLRRNNAAIQYGTTTQRWINNDVYIYERKFFNDVVLVAINRNTQSSYSISGLQTALPNGNYADYLSGLLGGNGISVSNGSVASFTLAPGAVSVWQYSTSASAPQIGSVAPNMGIPGNVVTIDGKGFGTTQGTVTFGGVTATVKSWTSNRIEVYVPNMAAGLTDVKVTAGGVSSNLYSYNILSGTQTSVVFTVKSAPPTNLGDKIYLTGNIPELGNWSTDTSGAVNNAQGPLLAPNYPDWFYVFSVPAGKTIQFKFFIKRADGTIQWENGSNHVATTPTGATGNITVTWQN

SEQ ID NO: 45229 - protein, 686 aa, Alicyclobacillus
SSSASVKGDVIYQIIIDRFYDGDTTNNNPAKSYGLYDPTKSKWKMYWGGDLEGVRQKLPYLKQLGVTTIWLSPVLDNLDTLAGTDNTGYHGYWTRDFKQIEEHFGNWTTFDTLVNDAHQNGIKVIVDFVPNHSTPFKANDSTFAEGGALYDNGTYMGNYFDDATKGYFHHNGDISNWDDRYEAQWKNFTDPAGFSLADLSQENGTIAQYLTDAAVQLVAHGADGLRIDAVKHFNSGFSKSLADKLYQKKDIFLVGEWYGDDPGAANHLEKVRYANNSGVNVLDFDLNTVIRNVFGTFTQTMYDLNNMVNQTGNEYKYKENLITFIDNHDMSRFLTVNSNKANLHQALAFILTSRGTPSIYYGTEQYMAGGNDPYNRGKMPAFDTTTTAFKEVSTLAGLRRNNAAIQYGTTTQRWINNDVYIYERKFFNDVVLVAINRNTQSSYSISGLQTALPNGNYADYLSGLLGGNGISVSNGSVASFTLAPGAVSVWQYSTSASAPQIGSVAPNMGIPGNVVTIDGKGFGTTQGTVTFGGVTATVKSWTSNRIEVYVPNMAAGLTDVKVTAGGVSSNLYSYNILSGTQTSVVFTVKSAPPTNLGDKIYLTGNIPELGNWSTDTSGAVNNAQGPLLAPNYPDWFYVFSVPAGKTIQFKFFIKRADGTIQWENGSNHVATTPTGATGNITVTWQN

SEQ ID NO: 45230 - protein, 686 aa, Alicyclobacillus
SSSASVKGDVIYQIIIDRFYDGDTTNNNPAKSYGLYDPTKSKWKMYWGGDLEGVRQKLPYLKQLGVTTIWLSPVLDNLDTLAGTDNTGYHGYWTRDFKQIEEHFGNWTTFDTLVNDAHQNGIKVIVDFVPNHSTPFKANDSTFAEGGALYDNGTYMGNYFDDATKGYFHHNGDISNWDDRYEAQWKNFTDPAGFSLADLSQENGTIAQYLTDAAVQLVAHGADGLRIDAVKHFNSGFSKSLADKLYQKKDIFLVGEWYGDDPGAANHLEKVRYANNSGVNVLDMDLNTVIRNVFGTFTQTMYDLNNMVNQTGNEYKYKENLITFIDNHDMSRFLTVNSNKANLHQALAFILTSRGTPSIYYGTEQYMAGGNDPYNRGMMPAFDTTTTAFKEVSTLAGLRRNNAAIQYGTTTQRWINNDVYIYERKFFNDVVLVAINRNTQSSYSISGLQTALPNGNYADYLSGLLGGNGISVSNGSVASFTLAPGAVSVWQYSTSASAPQIGSVAPNMGIPGNVVTIDGKGFGTTQGTVTFGGVTATVKSWTSNRIEVYVPNMAAGLTDVKVTAGGVSSNLYSYNILSGTQTSVVFTVKSAPPTNLGDKIYLTGNIPELGNWSTDTSGAVNNAQGPLLAPNYPDWFYVFSVPAGKTIQFKFFIKRADGTIQWENGSNHVATTPTGATGNITVTWQN

SEQ ID NO: 45231 - protein, 686 aa, Alicyclobacillus
SSSASVKGDVIYQIIIDRFYDGDTTNNNPAKSYGLYDPTKSKWKMYWGGDLEGVRQKLPYLKQLGVTTIWLSPVLDNLDTLAGTDNTGYHGYWTRDFKQIEEHFGNWTTFDTLVNDAHQNGIKVIVDFVPNHSTPFKANDSTFAEGGALYDNGTYMGNYFDDATKGYFHHNGDISNWDDRYEAQWKNFTDPAGFSLADLSQENGTIAQYLTDAAVQLVAHGADGLRIDAVKHFNSGFSKSLADKLYQKKDIFLVGEWYGDDPGAANHLEKVRYANNSGVNVLDFDLNTVIRNVFGTFTQTMYDLNNMVNQTGNEYKYKENLITFIDNHDMSRFLTVNSNKANLHQALAFILTSRGTPSIYYGTEQYMAGGNDPYNRGMMPAFDTTTTAFKEVSTLAGLRRNNAAIQYGTTTQRWINNDVYIYERKFFNDVVLVAINRNTQSSYSISGLQTALPNGNYADYLSGLLGGNGISVSNGSVASFTLAPGAVSVWQYSTSASAPQIGSVAPNMGIPGNVVTIDGKGFGTTQGTVTFGGVTATVKSWTSNRIEVYVPNMAAGLTDVKVTAGGVSSNLYSYNILSGTQTSVVFTVKSAPPTNLGDKIYLTGNIPELGNWSTDTSGAVNNAQGPLLAPNYPDWFFVFSVPAGKTIQFKFFIKRADGTIQWENGSNHVATTPTGATGNITVTWQN

SEQ ID NO: 45232 - protein, 686 aa, Alicyclobacillus
SSSASVKGDVIYQIIIDRFYDGDTTNNNPAKSYGLYDPTKSKWKMYWGGDLEGVRQKLPYLKQLGVTTIWLSPVLDNLDTLAGTDNTGYHGYWTRDFKQIEEHFGNWTTFDTLVNDAHQNGIKVIVDFVPNHSTPFKANDSTFAEGGALYDNGTYMGNYFDDATKGYFHHNGDISNWDDRYEAQWKNFTDPAGFSLADLSQENGTIAQYLTDAAVQLVAHGADGLRIDAVKHFNSGFSKSLADKLYQKKDIFLVGEWYGDDSGAANHLEKVRYANNSGVNVLDFDLNTVIRNVFGTFTQTMYDLNNMVNQTGNEYKYKENLITFIDNHDMSRFLTVNSNKANLHQALAFILTSRGTPSIYYGTEQYMAGGNDPYNRGMMPAFDTTTTAFKEVSTLAGLRRNNAAIQYGTTTQRWINNDVYIYERKFFNDVVLVAINRNTQSSYSISGLQTALPNGNYADYLSGLLGGNGISVSNGSVASFTLAPGAVSVWQYSTSASAPQIGSVAPNMGIPGNVVTIDGKGFGTTQGTVTFGGVTATVKSWTSNRIEVYVPNMAAGLTDVKVTAGGVSSNLYSYNILSGTQTSVVFTVKSAPPTNLGDKIYLTGNIPELGNWSTDTSGAVNNAQGPLLAPNYPDWFYVFSVPAGKTIQFKFFIKRADGTIQWENGSNHVATTPTGATGNITVTWQN

SEQ ID NO: 45233 - protein, 686 aa, Alicyclobacillus
SSSASVKGDVIYQIIIDRFYDGDTTNNNPAKSYGLYDPTKSKWKMYWGGDLEGVRQKLPYLKQLGVTTIWLSPVLDNLDTLAGTDNTGYHGYWTRDFKQIEEHFGNWTTFDTLVNDAHQNGIKVIVDFVPNHSTPFKANDSTFAEGGALYDNGTYMGNYFDDATKGYFHHNGDISNWDDRYEAQWKNFTDPAGFSLADLSQENGTIAQYLTDAAVQLVAHGADGLRIDAVKHFNSGFSKSLADKLYQKKDIFLVGEWYGDDPGAANHLEKVRYANNSGVNVLDFDLNTVIRNVFGTFTQTMYDLNNMVNQTGNEYKYKENLITFIDNHDMSRFLTVNSNKANLHQALAFILTSRGTPSIYYGTEQYMAGGNDPYNRGMMPAFDTTTTAFKEVSTLAGLRRNNAAIQYGTTTQRWINNDVYIYERKFFNDVVLVAINRNTQSSYSISGLQSALPNGNYADYLSGLLGGNGISVSNGSVASFTLAPGAVSVWQYSTSASAPQIGSVAPNMGIPGNVVTIDGKGFGTTQGTVTFGGVTATVKSWTSNRIEVYVPNMAAGLTDVKVTAGGVSSNLYSYNILSGTQTSVVFTVKSAPPTNLGDKIYLTGNIPELGNWSTDTSGAVNNAQGPLLAPNYPDWFYVFSVPAGKTIQFKFFIKRADGTIQWENGSNHVATTPTGATGNITVTWQN

SEQ ID NO: 45234 - protein, 686 aa, Alicyclobacillus
SSSASVKGDVIYQIIIDRFYDGDTTNNNPAKSYGLYDPTKSKWKMYWGGDLEGVRQKLPYLKQLGVTTIWLSPVLDNLDTLAGTDNTGYHGYWTRDFKQIEEHFGNWTTFDTLVNDAHQNGIKVIVDFVPNHSTPFKANDSTFAEGGALYDNGTYMGNYFDDATKGYFHHNGDISNWDDRYEAQWKNFTDPAGFSLADLSQENGTIAQYLTDAAVQLVAHGADGLRIDAVKHFNSGFSKSLADKLYQKKDIFLVGEWYGDDPGAANHLEKVRYANNSGVNVLDFDLNTVIRNVFGTFTQTMYDLNNMVNQTGNEYKYKENLITFIDNHDMSRFLTVNSNKANLHQALAFILTSRGTPSIYYGTEQYLAGGNDPYNRGMMPAFDTTTTAFKEVSTLAGLRRNNAAIQYGTTTQRWINNDVYIYERKFFNDVVLVAINRNTQSSYSISGLQTALPNGNYADYLSGLLGGNGISVSNGSVASFTLAPGAVSVWQYSTSASAPQIGSVAPNMGIPGNVVTIDGKGFGTTQGTVTFGGVTATVKSWTSNRIEVYVPNMAAGLTDVKVTAGGVSSNLYSYNILSGTQTSVVFTVKSAPPTNLGDKIYLTGNIPELGNWSTDTSGAVNNAQGPLLAPNYPDWFYVFSVPAGKTIQFKFFIKRADGTIQWENGSNHVATTPTGATGNITVTWQN

SEQ ID NO: 45235 - protein, 686 aa, Alicyclobacillus
SSSASVKGDVIYQIIIDRFYDGDTTNNNPAKSYGLYDPTKSKWKMYWGGDLEGVRQKLPYLKQLGVTTIWLSPVLDNLDTLAGTDNTGYHGYWTRDFKQIEEHFGNWTTFDTLVNDAHQNGIKVIVDFVPNHSTPFKANDSTFAEGGALYDNGTYMGNYFDDATKGYFHHNGDISNWDDRYEAQWKNFTDPAGFSLADLSQENGTIAQYLTDAAVQLVAHGADGLRIDAVKHFPSGFSKSLADKLYQKKDIFLVGEWYGDDPGAANHLEKVRYANNSGVNVLDFDLNTVIRNVFGTFTQTMYDLNNMVNQTGNEYKYKENLITFIDNHDMSRFLTVNSNKANLHQALAFILTSRGTPSIYYGTEQYMAGGNDPYNRGMMPAFDTTTTAFKEVSTLAGLRRNNAAIQYGTTTQRWINNDVYIYERKFFNDVVLVAINRNTQSSYSISGLQTALPNGNYADYLSGLLGGNGISVSNGSVASFTLAPGAVSVWQYSTSASAPQIGSVAPNMGIPGNVVTIDGKGFGTTQGTVTFGGVTATVKSWTSNRIEVYVPNMAAGLTDVKVTAGGVSSNLYSYNILSGTQTSVVFTVKSAPPTNLGDKIYLTGNIPELGNWSTDTSGAVNNAQGPLLAPNYPDWFYVFSVPAGKTIQFKFFIKRADGTIQWENGSNHVATTPTGATGNITVTWQN

SEQ ID NO: 45236 - protein, 686 aa, Alicyclobacillus
SSSASVKGDVIYQIIIDRFYDGDTTNNNPAKSYGLYDPTKSKWKMYWGGDLEGVRQKLPYLKQLGVTTIWLSPVLDNLDTLAGTDNTGYHGYWTRDFKQIEEHFGNWTTFDTLVNDAHQNGIKVIVDFVPNHSTPFKANDSTFAEGGALYDNGTYMGNYFDDATKGYFHHNGDISNWDDRYEAQWKNFTDPAGFSLADLSHENGTIAQYLTDAAVQLVAHGADGLRIDAVKHFNSGFSKSLADKLYQKKDIFLVGEWYGDDPGAANHLEKVRYANNSGVNVLDFDLNTVIRNVFGTFTQTMYDLNNMVNQTGNEYKYKENLITFIDNHDMSRFLTVNSNKANLHQALAFILTSRGTPSIYYGTEQYMAGGNDPYNRGMMPAFDTTTTAFKEVSTLAGLRRNNAAIQYGTTTQRWINNDVYIYERKFFNDVVLVAINRNTQSSYSISGLQTALPNGNYADYLSGLLGGNGISVSNGSVASFTLAPGAVSVWQYSTSASAPQIGSVAPNMGIPGNVVTIDGKGFGTTQGTVTFGGVTATVKSWTSNRIEVYVPNMAAGLTDVKVTAGGVSSNLYSYNILSGTQTSVVFTVKSAPPTNLGDKIYLTGNIPELGNWSTDTSGAVNNAQGPLLAPNYPDWFYVFSVPAGKTIQFKFFIKRADGTIQWENGSNHVATTPTGATGNITVTWQN

SEQ ID NO: 45237 - protein, 686 aa, Alicyclobacillus
SSSASVKGDVIYQIIIDRFYDGDTTNNNPAKSYGLYDPTKSKWKMYWGGDLEGVRQKLPYLKQLGVTTIWLSQVLDNLDTLAGTDNTGYHGYWTRDFKQIEEHFGNWTTFDTLVNDAHQNGIKVIVDFVPNHSTPFKANDSTFAEGGALYDNGTYMGNYFDDATKGYFHHNGDISNWDDRYEAQWKNFTDPAGFSLADLSQENGTIAQYLTDAAVQLVAHGADGLRIDAVKHFNSGFSKSLADKLYQKKDIFLVGEWYGDDPGAANHLEKVRYANNSGVNVLDFDLNTVIRNVFGTFTQTMYDLNNMVNQTGNEYKYKENLITFIDNHDMSRFLTVNSNKANLHQALAFILTSRGTPSIYYGTEQYMAGGNDPYNRGMMPAFDTTTTAFKEVSTLAGLRRNNAAIQYGTTTQRWINNDVYIYERKFFNDVVLVAINRNTQSSYSISGLQTALPNGNYADYLSGLLGGNGISVSNGSVASFTLAPGAVSVWQYSTSASAPQIGSVAPNMGIPGNVVTIDGKGFGTTQGTVTFGGVTATVKSWTSNRIEVYVPNMAAGLTDVKVTAGGVSSNLYSYNILSGTQTSVVFTVKSAPPTNLGDKIYLTGNIPELGNWSTDTSGAVNNAQGPLLAPNYPDWFYVFSVPAGKTIQFKFFIKRADGTIQWENGSNHVATTPTGATGNITVTWQN

SEQ ID NO: 45238 - protein, 686 aa, Alicyclobacillus
SSSASVKGDVIYQIIIDRFYDGDTTNNNPAKSYGLYDPTKSKWKMYWGGDLEGLRQKLPYLKQLGVTTIWLSPVLDNLDTLAGTDNTGYHGYWTRDFKQIEEHFGNWTTFDTLVNDAHQNGIKVIVDFVPNHSTPFKANDSTFAEGGALYDNGTYMGNYFDDATKGYFHHNGDISNWDDRYEAQWKNFTDPAGFSLADLSQENGTIAQYLTDAAVQLVAHGADGLRIDAVKHFNSGFSKSLADKLYQKKDIFLVGEWYGDDPGAANHLEKVRYANNSGVNVLDFDLNTVIRNVFGTFTQTMYDLNNMVNQTGNEYKYKENLITFIDNHDMSRFLTVNSNKANLHQALAFILTSRGTPSIYYGTEQYMAGGNDPYNRGMMPAFDTTTTAFKEVSTLAGLRRNNAAIQYGTTTQRWINNDVYIYERKFFNDVVLVAINRNTQSSYSISGLQTALPNGNYADYLSGLLGGNGISVSNGSVASFTLAPGAVSVWQYSTSASAPQIGSVAPNMGIPGNVVTIDGKGFGTTQGTVTFGGVTATVKSWTSNRIEVYVPNMAAGLTDVKVTAGGVSSNLYSYNILSGTQTSVVFTVKSAPPTNLGDKIYLTGNIPELGNWSTDTSGAVNNAQGPLLAPNYPDWFYVFSVPAGKTIQFKFFIKRADGTIQWENGSNHVATTPTGATGNITVTWQN

SEQ ID NO: 45239 - protein, 686 aa, Alicyclobacillus
SSSASVKGDVIYQIIIDRFYDGDTTNNNPAKSYGLYDPTKSKWKMYWGGDLEGVRQKLPYLKQLGVTTIWLSPVLDNLDTLAGTDNTGYHGYWTRDFKQIEEHFGNWTTFDTLVNDAHQNGIKVIVDFVPNHSTPFKANDSTFAEGGALYDNGTYMGNYFDDATKGYFHHNGDISNWDDRYEAQWKNFTDPAGFSLADLSQENGTIAQYLTDAAVQLVAHGADGLRIDAVKHFNSGFSKSLADKLYQKKDIFLVGEWYGDDPGAANHLEKVRYANNSGVNVLDFDLNTVIRNVFGTFTQTMYDLNNMVNQTGNEYKYKENLITFIDNHDMSRFLTVNSNKANLHQALAFILTSRGTPSIYYGTEQYMAGGNDPYNRGMMPAFDTTTTAFKEVSTLAGLRRNNAAIQYGTTTQRWINNDVYIYERKFFNDVVLVAINRNTQSSYSISGLQTALPNGNYADYLSGLLGGNGISVSNGSVASFTLAPGAVSVWQYSTSASAPQIGSVAPNMGIPGNVVTIDGKGFGTTQGTVTFGGVTATVKSWTSNRIEVYVPNMAAGLTDVKVTAGGVSSNLYSYNILSGTQTSVVFTVKSAPPTNLGDKIYLTGNIPELGNWSTDTSGAVNNAQGPLLAPNYPDWFIVFSVPAGKTIQFKFFIKRADGTIQWENGSNHVATTPTGATGNITVTWQN

SEQ ID NO: 45240 - protein, 686 aa, Alicyclobacillus
SSSASVKGDVIYQIIIDRFYDGDTTNNNPAKSYGLYDPTKSKWKMYWGGDLEGVRQKLPYLKQLGVTTIWLSPVLDNLDTLAGTDNTGYHGYWTRDFKQIEEHFGNWTTFDTLVNDAHQNGIKVIVDFVPNHSTPFKANDSTFAEGGALYDNGTYMGNYFDDATKGYFHHNGDISNWDDRYEAQWKNFTDPAGFSLADLSQENGTIAQYLTDAAVQLVAHGADGLRIDAVKHYNSGFSKSLADKLYQKKDIFLVGEWYGDDPGAANHLEKVRYANNSGVNVLDFDLNTVIRNVFGTFTQTMYDLNNMVNQTGNEYKYKENLITFIDNHDMSRFLTVNSNKANLHQALAFILTSRGTPSIYYGTEQYMAGGNDPYNRGMMPAFDTTTTAFKEVSTLAGLRRNNAAIQYGTTTQRWINNDVYIYERKFFNDVVLVAINRNTQSSYSISGLQTALPNGNYADYLSGLLGGNGISVSNGSVASFTLAPGAVSVWQYSTSASAPQIGSVAPNMGIPGNVVTIDGKGFGTTQGTVTFGGVTATVKSWTSNRIEVYVPNMAAGLTDVKVTAGGVSSNLYSYNILSGTQTSVVFTVKSAPPTNLGDKIYLTGNIPELGNWSTDTSGAVNNAQGPLLAPNYPDWFYVFSVPAGKTIQFKFFIKRADGTIQWENGSNHVATTPTGATGNITVTWQN

SEQ ID NO: 45241 - protein, 686 aa, Alicyclobacillus
SSSASVKGDVIYQIIIDRFYDGDTTNNNPAKSYGLYDPTKSKWKMYWGGDWEGVRQKLPYLKQLGVTTIWLSPVLDNLDTLAGTDNTGYHGYWTRDFKQIEEHFGNWTTFDTLVNDAHQNGIKVIVDFVPNHSTPFKANDSTFAEGGALYDNGTYMGNYFDDATKGYFHHNGDISNWDDRYEAQWKNFTDPAGFSLADLSQENGTIAQYLTDAAVQLVAHGADGLRIDAVKHFNSGFSKSLADKLYQKKDIFLVGEWYGDDPGAANHLEKVRYANNSGVNVLDFDLNTVIRNVFGTFTQTMYDLNNMVNQTGNEYKYKENLITFIDNHDMSRFLTVNSNKANLHQALAFILTSRGTPSIYYGTEQYMAGGNDPYNRGMMPAFDTTTTAFKEVSTLAGLRRNNAAIQYGTTTQRWINNDVYIYERKFFNDVVLVAINRNTQSSYSISGLQTALPNGNYADYLSGLLGGNGISVSNGSVASFTLAPGAVSVWQYSTSASAPQIGSVAPNMGIPGNVVTIDGKGFGTTQGTVTFGGVTATVKSWTSNRIEVYVPNMAAGLTDVKVTAGGVSSNLYSYNILSGTQTSVVFTVKSAPPTNLGDKIYLTGNIPELGNWSTDTSGAVNNAQGPLLAPNYPDWFYVFSVPAGKTIQFKFFIKRADGTIQWENGSNHVATTPTGATGNITVTWQN

SEQ ID NO: 45242 - protein, 686 aa, Effusibacillus pohliae
SSSASVKGDVIYQIIIDRFYDGDTTNNNPAKSYGLYDPTKSKWKMYWGGDLEGVRQKLPYLKQLGVTTIYLSPVLDNLDTLAGTDNTGYHGYWTRDFKQIEEHFGNWTTFDTLVNDAHQNGIKVIVDFVPNHSTPFKANDSTFAEGGALYDNGTYMGNYFDDATKGYFHHNGDISNWDDRYEAQWKNFTDPAGFSLADLSQENGTIAQYLTDAAVQLVAHGADGLRIDAVKHFNSGFSKSLADKLYQKKDIFLVGEWYGDDPGAANHLEKVRYANNSGVNVLDFDLNTVIRNVFGTFTQTMYDLNNMVNQTGNEYKYKENLITFIDNHDMSRFLTVNSNKANLHQALAFILTSRGTPSIYYGTEQYMAGGNDPYNRGMMPAFDTTTTAFKEVSTLAGLRRNNAAIQYGTTTQRWINNDVYIYERKFFNDVVLVAINRNTQSSYSISGLQTALPNGNYADYLSGLLGGNGISVSNGSVASFTLAPGAVSVWQYSTSASAPQIGSVAPNMGIPGNVVTIDGKGFGTTQGTVTFGGVTATVKSWTSNRIEVYVPNMAAGLTDVKVTAGGVSSNLYSYNILSGTQTSVVFTVKSAPPTNLGDKIYLTGNIPELGNWSTDTSGAVNNAQGPLLAPNYPDWFYVFSVPAGKTIQFKFFIKRADGTIQWENGSNHVATTPTGATGNITVTWQN

SEQ ID NO: 45243 - protein, 686 aa, Alicyclobacillus
SSSASVKGDVIYQIIIDRFYDGDTTNNNPAKSYGLYDPTKSKWKMYWGGDLEGVRQKLPYLKQLGVTTIWLSPVLDNLDTLAGTDNTGYHGYWTRDFKQIEEHFGNWTTFDTLVNDAHQNGIKVIVDFVPNHSTPFKANDSTFAEGGALYDNGTYMGNYFDDATKGYFHHNGDISNWDDRYEAQWKNFTDPAGFSLADLSQENGTIAQYLTDAAVQLVAHGADGLRIDAVKHFNSGFSKSLADKLYQKKDIFLVGEWYGDDPGAANHLEKVRYANNSGVNVLDFDLNTVIRNVFGTFTQTMYDLNNMVNQTGNEYKYKENLITFIDNHDMSRFLTVNSNKANLHQALAFILTSRGTPSIYYGTEQYMAGGNDPDNRGMMPAFDTTTTAFKEVSTLAGLRRNNAAIQYGTTTQRWINNDVYIYERKFFNDVVLVAINRNTQSSYSISGLQTALPNGNYADYLSGLLGGNGISVSNGSVASFTLAPGAVSVWQYSTSASAPQIGSVAPNMGIPGNVVTIDGKGFGTTQGTVTFGGVTATVKSWTSNRIEVYVPNMAAGLTDVKVTAGGVSSNLYSYNILSGTQTSVVFTVKSAPPTNLGDKIYLTGNIPELGNWSTDTSGAVNNAQGPLLAPNYPDWFYVFSVPAGKTIQFKFFIKRADGTIQWENGSNHVATTPTGATGNITVTWQN

SEQ ID NO: 45244 - protein, 686 aa, Alicyclobacillus
SSSASVKGDVIYQIIIDRFYDGDTTNNNPAKSYGLYDPTKSKWKMYWGGDLEGVRQKLPYLKQLGVTTIWLSPVLDNLDTLAGTDNTGYHGYWTRDFKQIEEHFGNWTTFDTLVNDAHQNGIKVIVDFVPNHSTPFKANDSTFAEGGALYDNGTYMGNYFDDATKGYFHHNGDISNWDDRYEAQWKNFTDPAGFSLADLSQENGTIAQYLTDAAVQLVAHGADGLRIDAVKHFNSGFSKSLADKLYQKKDIFLVGEWYGGDPGAANHLEKVRYANNSGVNVLDFDLNTVIRNVFGTFTQTMYDLNNMVNQTGNEYKYKENLITFIDNHDMSRFLTVNSNKANLHQALAFILTSRGTPSIYYGTEQYMAGGNDPYNRGMMPAFDTTTTAFKEVSTLAGLRRNNAAIQYGTTTQRWINNDVYIYERKFFNDVVLVAINRNTQSSYSISGLQTALPNGNYADYLSGLLGGNGISVSNGSVASFTLAPGAVSVWQYSTSASAPQIGSVAPNMGIPGNVVTIDGKGFGTTQGTVTFGGVTATVKSWTSNRIEVYVPNMAAGLTDVKVTAGGVSSNLYSYNILSGTQTSVVFTVKSAPPTNLGDKIYLTGNIPELGNWSTDTSGAVNNAQGPLLAPNYPDWFYVFSVPAGKTIQFKFFIKRADGTIQWENGSNHVATTPTGATGNITVTWQN

SEQ ID NO: 45245 - protein, 686 aa, Alicyclobacillus
SSSASVKGDVIYQIIIDRFYDGDTTNNNPAKSYGLYDPTKSKWKMYWGGDLEGVRQKLPYLKQLGVTTIWLSPVLDNLDTLAGTDNTAYHGYWTRDFKQIEEHFGNWTTFDTLVNDAHQNGIKVIVDFVPNHSTPFKANDSTFAEGGALYDNGTYMGNYFDDATKGYFHHNGDISNWDDRYEAQWKNFTDPAGFSLADLSQENGTIAQYLTDAAVQLVAHGADGLRIDAVKHFNSGFSKSLADKLYQKKDIFLVGEWYGDDPGAANHLEKVRYANNSGVNVLDFDLNTVIRNVFGTFTQTMYDLNNMVNQTGNEYKYKENLITFIDNHDMSRFLTVNSNKANLHQALAFILTSRGTPSIYYGTEQYMAGGNDPYNRGMMPAFDTTTTAFKEVSTLAGLRRNNAAIQYGTTTQRWINNDVYIYERKFFNDVVLVAINRNTQSSYSISGLQTALPNGNYADYLSGLLGGNGISVSNGSVASFTLAPGAVSVWQYSTSASAPQIGSVAPNMGIPGNVVTIDGKGFGTTQGTVTFGGVTATVKSWTSNRIEVYVPNMAAGLTDVKVTAGGVSSNLYSYNILSGTQTSVVFTVKSAPPTNLGDKIYLTGNIPELGNWSTDTSGAVNNAQGPLLAPNYPDWFYVFSVPAGKTIQFKFFIKRADGTIQWENGSNHVATTPTGATGNITVTWQN

SEQ ID NO: 45246 - protein, 686 aa, Alicyclobacillus
SSSASVKGDVIYQIIIDRFVDGDTTNNNPAKSYGLYDPTKSKWKMYWGGDLEGVRQKLPYLKQLGVTTIWLSPVLDNLDTLAGTDNTGYHGYWTRDFKQIEEHFGNWTTFDTLVNDAHQNGIKVIVDFVPNHSTPFKANDSTFAEGGALYDNGTYMGNYFDDATKGYFHHNGDISNWDDRYEAQWKNFTDPAGFSLADLSQENGTIAQYLTDAAVQLVAHGADGLRIDAVKHFNSGFSKSLADKLYQKKDIFLVGEWYGDDPGAANHLEKVRYANNSGVNVLDFDLNTVIRNVFGTFTQTMYDLNNMVNQTGNEYKYKENLITFIDNHDMSRFLTVNSNKANLHQALAFILTSRGTPSIYYGTEQYMAGGNDPYNRGMMPAFDTTTTAFKEVSTLAGLRRNNAAIQYGTTTQRWINNDVYIYERKFFNDVVLVAINRNTQSSYSISGLQTALPNGNYADYLSGLLGGNGISVSNGSVASFTLAPGAVSVWQYSTSASAPQIGSVAPNMGIPGNVVTIDGKGFGTTQGTVTFGGVTATVKSWTSNRIEVYVPNMAAGLTDVKVTAGGVSSNLYSYNILSGTQTSVVFTVKSAPPTNLGDKIYLTGNIPELGNWSTDTSGAVNNAQGPLLAPNYPDWFYVFSVPAGKTIQFKFFIKRADGTIQWENGSNHVATTPTGATGNITVTWQN

SEQ ID NO: 45247 - protein, 686 aa, Alicyclobacillus
SSSASVKGDVIYQIIIDRFYDGDTTNNNPAKSYGLYDPTKSKWKMYWGGDLEGVRQKLPYFKQLGVTTIWLSPVLDNLDTLAGTDNTGYHGYWTRDFKQIEEHFGNWTTFDTLVNDAHQNGIKVIVDFVPNHSTPFKANDSTFAEGGALYDNGTYMGNYFDDATKGYFHHNGDISNWDDRYEAQWKNFTDPAGFSLADLSQENGTIAQYLTDAAVQLVAHGADGLRIDAVKHFNSGFSKSLADKLYQKKDIFLVGEWYGDDPGAANHLEKVRYANNSGVNVLDFDLNTVIRNVFGTFTQTMYDLNNMVNQTGNEYKYKENLITFIDNHDMSRFLTVNSNKANLHQALAFILTSRGTPSIYYGTEQYMAGGNDPYNRGMMPAFDTTTTAFKEVSTLAGLRRNNAAIQYGTTTQRWINNDVYIYERKFFNDVVLVAINRNTQSSYSISGLQTALPNGNYADYLSGLLGGNGISVSNGSVASFTLAPGAVSVWQYSTSASAPQIGSVAPNMGIPGNVVTIDGKGFGTTQGTVTFGGVTATVKSWTSNRIEVYVPNMAAGLTDVKVTAGGVSSNLYSYNILSGTQTSVVFTVKSAPPTNLGDKIYLTGNIPELGNWSTDTSGAVNNAQGPLLAPNYPDWFYVFSVPAGKTIQFKFFIKRADGTIQWENGSNHVATTPTGATGNITVTWQN

SEQ ID NO: 45248 - protein, 686 aa, Alicyclobacillus
SSSASVKGDVIYQIIIDRFYDGDTTNNNPAKSYGLYDPTKSKWKMYWGGDLEGVRQKLPYLKQLGVTTIWLSPVLDNLDTLAGTDNTGYHGYWTRDFKQIEEHFGNWTTFDTLVNDAHQNGIKVIVDFVPNHSTPFKANDSTFAEGGALYDNGTYMGNYFDDATKGYFHHNGDISNWDDRYEAQWKNFTDPAGFSLADLSQENGTIAQYLTDAAVQLVAHGADGLRIDAVKHFNSGFSKSLADKLYQKKDIFLVGEWYGDDPGAANHLEKVRYANNSGVNVLDFDFNTVIRNVFGTFTQTMYDLNNMVNQTGNEYKYKENLITFIDNHDMSRFLTVNSNKANLHQALAFILTSRGTPSIYYGTEQYMAGGNDPYNRGMMPAFDTTTTAFKEVSTLAGLRRNNAAIQYGTTTQRWINNDVYIYERKFFNDVVLVAINRNTQSSYSISGLQTALPNGNYADYLSGLLGGNGISVSNGSVASFTLAPGAVSVWQYSTSASAPQIGSVAPNMGIPGNVVTIDGKGFGTTQGTVTFGGVTATVKSWTSNRIEVYVPNMAAGLTDVKVTAGGVSSNLYSYNILSGTQTSVVFTVKSAPPTNLGDKIYLTGNIPELGNWSTDTSGAVNNAQGPLLAPNYPDWFYVFSVPAGKTIQFKFFIKRADGTIQWENGSNHVATTPTGATGNITVTWQN

SEQ ID NO: 45249 - protein, 686 aa, Alicyclobacillus
SSSASVKGDVIYQIIIDRFYDGDTTNNNPAKSYGLYDPTKSKWKMYWGGDLEGVRQKLPYLKQLGVTTIWLSPVLDNLDTLAGTDNTGYHGYWTRDFKQIEEHFGNWTTFDTLVNDAHQNGIKVIVDFVPNHSTPFKANDSTFAEGGALYDNGTYMGNYFDDATKGYFHHNGDISNWDDRYEAQWKNFTDPAGFSLADLSQENGTIAQYLTDAAVQLVAHGADGLRIDAVKHFNSGFSKSLADKLYQKKDIFLVGEWYGDDPGAANHLEKVRYANNSGVNVLDFDLNTVIRNVFGTFTQTMYDLNNMVNQTGNEYKYKENLITFIDNHDMSRFLTVNSNKANLHQALAFILTSRGTPSIYYGTEQYMAGGNDPYNRGMMPAFDTTTTSFKEVSTLAGLRRNNAAIQYGTTTQRWINNDVYIYERKFFNDVVLVAINRNTQSSYSISGLQTALPNGNYADYLSGLLGGNGISVSNGSVASFTLAPGAVSVWQYSTSASAPQIGSVAPNMGIPGNVVTIDGKGFGTTQGTVTFGGVTATVKSWTSNRIEVYVPNMAAGLTDVKVTAGGVSSNLYSYNILSGTQTSVVFTVKSAPPTNLGDKIYLTGNIPELGNWSTDTSGAVNNAQGPLLAPNYPDWFYVFSVPAGKTIQFKFFIKRADGTIQWENGSNHVATTPTGATGNITVTWQN

SEQ ID NO: 45250 - protein, 686 aa, Alicyclobacillus
SSSASVKGDVIYQIIIDRFYDGDTTNNNPAKSYGLYDPTKSKWKMYWGGDLEGVRQKLPYLKQLGVTTIWLSPVLDNLDTLAGTDNTGYHGYWTRDFKQIEEHFGNWTTFDTLVNDAHQNGIKVIVDFVPNHSTPFKANDSTFAEGGALYDNGTYMGNYFDDATKGYFHHNGDISNWDDRYEAQWKNFTDPAGFSLADLSQENGTIAQYLTDAAVQLVAHGADGLRIDAVKHFNSGFSKSLADKLYQKKDIFLVGEWYGDDPGAANHLEKVRYANNSGVNVLDFDLNTVIRNVFGTFTQTMYDLNNMVNQTGNEYKYKENLITFIDNHDMSRFLTVNSNKANLHQALAFILTSRGVPSIYYGTEQYMAGGNDPYNRGMMPAFDTTTTAFKEVSTLAGLRRNNAAIQYGTTTQRWINNDVYIYERKFFNDVVLVAINRNTQSSYSISGLQTALPNGNYADYLSGLLGGNGISVSNGSVASFTLAPGAVSVWQYSTSASAPQIGSVAPNMGIPGNVVTIDGKGFGTTQGTVTFGGVTATVKSWTSNRIEVYVPNMAAGLTDVKVTAGGVSSNLYSYNILSGTQTSVVFTVKSAPPTNLGDKIYLTGNIPELGNWSTDTSGAVNNAQGPLLAPNYPDWFYVFSVPAGKTIQFKFFIKRADGTIQWENGSNHVATTPTGATGNITVTWQN

SEQ ID NO: 45251 - protein, 686 aa, Alicyclobacillus
SSSASVKGDVIYQIIIDRFYDGDTTNNNPAKSYGLYDPTKSKWKMYWGGDLEGVRQKLPYLKQLGVTTIWLSPVLDNLDTLAGTDNTGYHGYWTRDFKQIEEHFGNWTTFDTLVNDCHQNGIKVIVDFVPNHSTPFKANDSTFAEGGALYDNGTYMGNYFDDATKGYFHHNGDISNWDDRYEAQWKNFTDPAGFSLADLSQENGTIAQYLTDAAVQLVAHGADGLRIDAVKHFNSGFSKSLADKLYQKKDIFLVGEWYGDDPGAANHLEKVRYANNSGVNVLDFDLNTVIRNVFGTFTQTMYDLNNMVNQTGNEYKYKENLITFIDNHDMSRFLTVNSNKANLHQALAFILTSRGTPSIYYGTEQYMAGGNDPYNRGMMPAFDTTTTAFKEVSTLAGLRRNNAAIQYGTTTQRWINNDVYIYERKFFNDVVLVAINRNTQSSYSISGLQTALPNGNYADYLSGLLGGNGISVSNGSVASFTLAPGAVSVWQYSTSASAPQIGSVAPNMGIPGNVVTIDGKGFGTTQGTVTFGGVTATVKSWTSNRIEVYVPNMAAGLTDVKVTAGGVSSNLYSYNILSGTQTSVVFTVKSAPPTNLGDKIYLTGNIPELGNWSTDTSGAVNNAQGPLLAPNYPDWFYVFSVPAGKTIQFKFFIKRADGTIQWENGSNHVATTPTGATGNITVTWQN

SEQ ID NO: 45252 - protein, 686 aa, Alicyclobacillus
SSSASVKGDVIYQIIIDRFYDGDTTNNNPAKSYGLYDPTKSKWKMYWGGDLEGVRQKLPYLKQLGVTTIWLSPVLDNLDTLAGTDNTGYHGYWTRDFKQIEEHFGNWTTFDTLVNDAHQNGIKVIVDFVPNHSTPFKANDSTFAEGGALYDNGTYMGNYFDDATKGYFHHNGDISNWDDRYEAQWKNFTNPAGFSLADLSQENGTIAQYLTDAAVQLVAHGADGLRIDAVKHFNSGFSKSLADKLYQKKDIFLVGEWYGDDPGAANHLEKVRYANNSGVNVLDFDLNTVIRNVFGTFTQTMYDLNNMVNQTGNEYKYKENLITFIDNHDMSRFLTVNSNKANLHQALAFILTSRGTPSIYYGTEQYMAGGNDPYNRGMMPAFDTTTTAFKEVSTLAGLRRNNAAIQYGTTTQRWINNDVYIYERKFFNDVVLVAINRNTQSSYSISGLQTALPNGNYADYLSGLLGGNGISVSNGSVASFTLAPGAVSVWQYSTSASAPQIGSVAPNMGIPGNVVTIDGKGFGTTQGTVTFGGVTATVKSWTSNRIEVYVPNMAAGLTDVKVTAGGVSSNLYSYNILSGTQTSVVFTVKSAPPTNLGDKIYLTGNIPELGNWSTDTSGAVNNAQGPLLAPNYPDWFYVFSVPAGKTIQFKFFIKRADGTIQWENGSNHVATTPTGATGNITVTWQN

SEQ ID NO: 45253 - protein, 686 aa, Alicyclobacillus
SSSASVKGDVIYQIIIDRFYDGDTTNNNPAKSYGLYDPTKSKWKMYWGGDLEGVRQKLPYLKQLGVTTIWLSPPLDNLDTLAGTDNTGYHGYWTRDFKQIEEHFGNWTTFDTLVNDAHQNGIKVIVDFVPNHSTPFKANDSTFAEGGALYDNGTYMGNYFDDATKGYFHHNGDISNWDDRYEAQWKNFTDPAGFSLADLSQENGTIAQYLTDAAVQLVAHGADGLRIDAVKHFNSGFSKSLADKLYQKKDIFLVGEWYGDDPGAANHLEKVRYANNSGVNVLDFDLNTVIRNVFGTFTQTMYDLNNMVNQTGNEYKYKENLITFIDNHDMSRFLTVNSNKANLHQALAFILTSRGTPSIYYGTEQYMAGGNDPYNRGMMPAFDTTTTAFKEVSTLAGLRRNNAAIQYGTTTQRWINNDVYIYERKFFNDVVLVAINRNTQSSYSISGLQTALPNGNYADYLSGLLGGNGISVSNGSVASFTLAPGAVSVWQYSTSASAPQIGSVAPNMGIPGNVVTIDGKGFGTTQGTVTFGGVTATVKSWTSNRIEVYVPNMAAGLTDVKVTAGGVSSNLYSYNILSGTQTSVVFTVKSAPPTNLGDKIYLTGNIPELGNWSTDTSGAVNNAQGPLLAPNYPDWFYVFSVPAGKTIQFKFFIKRADGTIQWENGSNHVATTPTGATGNITVTWQN

SEQ ID NO: 45254 - protein, 686 aa, Alicyclobacillus
SSSASVKGDVIYQIITDRFYDGDTTNNNPAKSYGLYDPTKSKWKMYWGGDLEGVRQKLPYLKQLGVTTIWLSPVLDNLDTLAGTDNTGYHGYWTRDFKQIEEHFGNWTTFDTLVNDAHQNGIKVIVDFVPNHSTPFKANDSTFAEGGALYDNGTYMGNYFDDATKGYFHHNGDISNWDDRYEAQWKNFTDPAGFSLADLSQENGTIAQYLTDAAVQLVAHGADGLRIDAVKHFNSGFSKSLADKLYQKKDIFLVGEWYGDDPGAANHLEKVRYANNSGVNVLDFDLNTVIRNVFGTFTQTMYDLNNMVNQTGNEYKYKENLITFIDNHDMSRFLTVNSNKANLHQALAFILTSRGTPSIYYGTEQYMAGGNDPYNRGMMPAFDTTTTAFKEVSTLAGLRRNNAAIQYGTTTQRWINNDVYIYERKFFNDVVLVAINRNTQSSYSISGLQTALPNGNYADYLSGLLGGNGISVSNGSVASFTLAPGAVSVWQYSTSASAPQIGSVAPNMGIPGNVVTIDGKGFGTTQGTVTFGGVTATVKSWTSNRIEVYVPNMAAGLTDVKVTAGGVSSNLYSYNILSGTQTSVVFTVKSAPPTNLGDKIYLTGNIPELGNWSTDTSGAVNNAQGPLLAPNYPDWFYVFSVPAGKTIQFKFFIKRADGTIQWENGSNHVATTPTGATGNITVTWQN

SEQ ID NO: 45255 - protein, 686 aa, Alicyclobacillus
SSSASVKGDVIYQIIIDRFYDGDTTNNNPAKSYGLYDPTKSKWKMYWGGDLEGVRQKLPYLKQLGVTTIWLSPVLDNLDTLAGTDNTGYHGYWTRDFKQIEEHFGNWTTFDTLVNDAHQNGIKVIVDFVPNHSTPFKANDSTFAEGGALYDNGTYMGNYFDDATKGYFHHNGDISNWDDRYEAQWKNFTDPAGFSLADLSQENGTIAQYLTDAAVQLVAHGADGLRIDAVKHFNSGFSKSLADKLYQKKDIFLVGEWYGDDPGAANHLEKVRYANNSGVNVLDFDLNQVIRNVFGTFTQTMYDLNNMVNQTGNEYKYKENLITFIDNHDMSRFLTVNSNKANLHQALAFILTSRGTPSIYYGTEQYMAGGNDPYNRGMMPAFDTTTTAFKEVSTLAGLRRNNAAIQYGTTTQRWINNDVYIYERKFFNDVVLVAINRNTQSSYSISGLQTALPNGNYADYLSGLLGGNGISVSNGSVASFTLAPGAVSVWQYSTSASAPQIGSVAPNMGIPGNVVTIDGKGFGTTQGTVTFGGVTATVKSWTSNRIEVYVPNMAAGLTDVKVTAGGVSSNLYSYNILSGTQTSVVFTVKSAPPTNLGDKIYLTGNIPELGNWSTDTSGAVNNAQGPLLAPNYPDWFYVFSVPAGKTIQFKFFIKRADGTIQWENGSNHVATTPTGATGNITVTWQN

SEQ ID NO: 45256 - protein, 686 aa, Alicyclobacillus
SSSASVKGDVIYQIIIDRFYDGDTTNNNPAKSYGLYDPTKSKWKMYWGGDLEGVRQKLPYLKQLGVTTIWLSPVLDNLDTLAGTDNTGYHGYWTRDFKQIEEHFGNWTTFDTLVNDAHQNGIKVIVDFVPNHSTPFKANDSTFAEGGALYDNGTYMGNYFDDATKGYFHHNGDISNWDDRYEAQWKNFTDPAGFSLADLSQENGTIAQYLTDAAVQLVAHGADGLRIDAVKHFNSGFSKSLADKLYQKKDIFLVGEWYGDDPGAANHLEKVRYANNSGVNVLDFDLNTVIRNVFGTFTQTMYDLNNMVNQTGNEYKYKENLITFFDNHDMSRFLTVNSNKANLHQALAFILTSRGTPSIYYGTEQYMAGGNDPYNRGMMPAFDTTTTAFKEVSTLAGLRRNNAAIQYGTTTQRWINNDVYIYERKFFNDVVLVAINRNTQSSYSISGLQTALPNGNYADYLSGLLGGNGISVSNGSVASFTLAPGAVSVWQYSTSASAPQIGSVAPNMGIPGNVVTIDGKGFGTTQGTVTFGGVTATVKSWTSNRIEVYVPNMAAGLTDVKVTAGGVSSNLYSYNILSGTQTSVVFTVKSAPPTNLGDKIYLTGNIPELGNWSTDTSGAVNNAQGPLLAPNYPDWFYVFSVPAGKTIQFKFFIKRADGTIQWENGSNHVATTPTGATGNITVTWQN

SEQ ID NO: 45257 - protein, 686 aa, Alicyclobacillus
SSSASVKGDVIYQIIIDRFYDGDTTNNNPAKSYGLYDPTKSKWKMYWGGDLEGVRQKLPYLKQLGVTTIWLSPVLDNLDTLAGTDNTGYHGYWTRDFKQIEEHFGNWTTFDTLVNDAHQNGIKVIVDFVPNHSTPFKANDSTFAEGGALYDNGTYMGNYFDDATKGYFHHNGDISNWDDRYEAQWKNFTDPAGFSLADLSQENGTIAQYLTDAAVQLVAHGADGLRIDAVKHFNLGFSKSLADKLYQKKDIFLVGEWYGDDPGAANHLEKVRYANNSGVNVLDFDLNTVIRNVFGTFTQTMYDLNNMVNQTGNEYKYKENLITFIDNHDMSRFLTVNSNKANLHQALAFILTSRGTPSIYYGTEQYMAGGNDPYNRGMMPAFDTTTTAFKEVSTLAGLRRNNAAIQYGTTTQRWINNDVYIYERKFFNDVVLVAINRNTQSSYSISGLQTALPNGNYADYLSGLLGGNGISVSNGSVASFTLAPGAVSVWQYSTSASAPQIGSVAPNMGIPGNVVTIDGKGFGTTQGTVTFGGVTATVKSWTSNRIEVYVPNMAAGLTDVKVTAGGVSSNLYSYNILSGTQTSVVFTVKSAPPTNLGDKIYLTGNIPELGNWSTDTSGAVNNAQGPLLAPNYPDWFYVFSVPAGKTIQFKFFIKRADGTIQWENGSNHVATTPTGATGNITVTWQN

SEQ ID NO: 45258 - protein, 686 aa, Alicyclobacillus
SSSASVKGDVIYQIIIDRFYDGDTTNNNPAKSYGLYDPTKSKWKMYWGGDLEGVRQKLPYLKQLGVTTIWLSPVLDNLDTLAGTDNTGYHGYWTRDFKQIEEYFGNWTTFDTLVNDAHQNGIKVIVDFVPNHSTPFKANDSTFAEGGALYDNGTYMGNYFDDATKGYFHHNGDISNWDDRYEAQWKNFTDPAGFSLADLSQENGTIAQYLTDAAVQLVAHGADGLRIDAVKHFNSGFSKSLADKLYQKKDIFLVGEWYGDDPGAANHLEKVRYANNSGVNVLDFDLNTVIRNVFGTFTQTMYDLNNMVNQTGNEYKYKENLITFIDNHDMSRFLTVNSNKANLHQALAFILTSRGTPSIYYGTEQYMAGGNDPYNRGMMPAFDTTTTAFKEVSTLAGLRRNNAAIQYGTTTQRWINNDVYIYERKFFNDVVLVAINRNTQSSYSISGLQTALPNGNYADYLSGLLGGNGISVSNGSVASFTLAPGAVSVWQYSTSASAPQIGSVAPNMGIPGNVVTIDGKGFGTTQGTVTFGGVTATVKSWTSNRIEVYVPNMAAGLTDVKVTAGGVSSNLYSYNILSGTQTSVVFTVKSAPPTNLGDKIYLTGNIPELGNWSTDTSGAVNNAQGPLLAPNYPDWFYVFSVPAGKTIQFKFFIKRADGTIQWENGSNHVATTPTGATGNITVTWQN

SEQ ID NO: 45259 - protein, 686 aa, Alicyclobacillus
SSSASVKGDVIYQIIIDRFYDGDTTNNNPAKSYGLYDPTKSKWKMYWGGDLEGVRQKLPYLKQLGVTTIWLSPVLDNLDTLAGTDNTGYHGYWTRDFKQIEEHFGNWTTFDTLVNDAHQNGIKVIVDFVPNHSTPFKANDSTFAEGGALYDNGTYMGNYFDDATKGYFHHNGDISNWDDRYEAQWKNFTDPAGFSLADLSQENGTIAQYLTDAAVQLVAHGADGLRIDAVKHFNSGFSKSLADKLYQKKDIFLVGEWYGDDPGAANHLEKVRYANNSGVNVLDFDLNTVIRNVFGTFTQTMYDLNNMVNQTGNEYKYKENLITFIDNHDMSRFLTVNSNKANLHQALAFILTSRGTPSIYYGTEQYMAGGGDPYNRGMMPAFDTTTTAFKEVSTLAGLRRNNAAIQYGTTTQRWINNDVYIYERKFFNDVVLVAINRNTQSSYSISGLQTALPNGNYADYLSGLLGGNGISVSNGSVASFTLAPGAVSVWQYSTSASAPQIGSVAPNMGIPGNVVTIDGKGFGTTQGTVTFGGVTATVKSWTSNRIEVYVPNMAAGLTDVKVTAGGVSSNLYSYNILSGTQTSVVFTVKSAPPTNLGDKIYLTGNIPELGNWSTDTSGAVNNAQGPLLAPNYPDWFYVFSVPAGKTIQFKFFIKRADGTIQWENGSNHVATTPTGATGNITVTWQN

SEQ ID NO: 45260 - protein, 686 aa, Effusibacillus pohliae
SSSASVKGDVIYQIIIDRFYDGDTTNNNPAKSYGLYDPTKSKWKMYWGGDLEGVRQKLPYLKQLGVTTIWLSPVLDNLDTLAGTDNTGYHGYWTRDFKQIEEHFGNWTTFDTLVNDAHQNGIKIIVDFVPNHSTPFKANDSTFAEGGALYDNGTYMGNYFDDATKGYFHHNGDISNWDDRYEAQWKNFTDPAGFSLADLSQENGTIAQYLTDAAVQLVAHGADGLRIDAVKHFNSGFSKSLADKLYQKKDIFLVGEWYGDDPGAANHLEKVRYANNSGVNVLDFDLNTVIRNVFGTFTQTMYDLNNMVNQTGNEYKYKENLITFIDNHDMSRFLTVNSNKANLHQALAFILTSRGTPSIYYGTEQYMAGGNDPYNRGMMPAFDTTTTAFKEVSTLAGLRRNNAAIQYGTTTQRWINNDVYIYERKFFNDVVLVAINRNTQSSYSISGLQTALPNGNYADYLSGLLGGNGISVSNGSVASFTLAPGAVSVWQYSTSASAPQIGSVAPNMGIPGNVVTIDGKGFGTTQGTVTFGGVTATVKSWTSNRIEVYVPNMAAGLTDVKVTAGGVSSNLYSYNILSGTQTSVVFTVKSAPPTNLGDKIYLTGNIPELGNWSTDTSGAVNNAQGPLLAPNYPDWFYVFSVPAGKTIQFKFFIKRADGTIQWENGSNHVATTPTGATGNITVTWQN

SEQ ID NO: 45261 - protein, 686 aa, Alicyclobacillus
SSSASVKGDVIYQIIIDRFYDGDTTNNNPAKSYGLYDPTKSKWKMYWGGDLEGVRQKLPYLKQLGVTTIWLSPVLDNLDTLAGTDNVGYHGYWTRDFKQIEEHFGNWTTFDTLVNDAHQNGIKVIVDFVPNHSTPFKANDSTFAEGGALYDNGTYMGNYFDDATKGYFHHNGDISNWDDRYEAQWKNFTDPAGFSLADLSQENGTIAQYLTDAAVQLVAHGADGLRIDAVKHFNSGFSKSLADKLYQKKDIFLVGEWYGDDPGAANHLEKVRYANNSGVNVLDFDLNTVIRNVFGTFTQTMYDLNNMVNQTGNEYKYKENLITFIDNHDMSRFLTVNSNKANLHQALAFILTSRGTPSIYYGTEQYMAGGNDPYNRGMMPAFDTTTTAFKEVSTLAGLRRNNAAIQYGTTTQRWINNDVYIYERKFFNDVVLVAINRNTQSSYSISGLQTALPNGNYADYLSGLLGGNGISVSNGSVASFTLAPGAVSVWQYSTSASAPQIGSVAPNMGIPGNVVTIDGKGFGTTQGTVTFGGVTATVKSWTSNRIEVYVPNMAAGLTDVKVTAGGVSSNLYSYNILSGTQTSVVFTVKSAPPTNLGDKIYLTGNIPELGNWSTDTSGAVNNAQGPLLAPNYPDWFYVFSVPAGKTIQFKFFIKRADGTIQWENGSNHVATTPTGATGNITVTWQN

SEQ ID NO: 45262 - protein, 686 aa, Alicyclobacillus
SSSASVKGDVIYQIIIDRFYDGDTTNNNPAKSYGLYDPTKSKWKMYWGGDLEGVRQKLPYLKQLGVTTIWLSPVLDNLDTLAGTDNTGYHGYWTRDFKQIEEHFGNWTTFDTLVNDAHQNGIKVIVDFVPNHSTPFKANDSTFAEGGALYDNGTYMGNYFDDATKGYFHHNGDISNWDDRYEAQWKNFTDPAGFSLADLSQENGTIAQYLTDAAVQWVAHGADGLRIDAVKHFNSGFSKSLADKLYQKKDIFLVGEWYGDDPGAANHLEKVRYANNSGVNVLDFDLNTVIRNVFGTFTQTMYDLNNMVNQTGNEYKYKENLITFIDNHDMSRFLTVNSNKANLHQALAFILTSRGTPSIYYGTEQYMAGGNDPYNRGMMPAFDTTTTAFKEVSTLAGLRRNNAAIQYGTTTQRWINNDVYIYERKFFNDVVLVAINRNTQSSYSISGLQTALPNGNYADYLSGLLGGNGISVSNGSVASFTLAPGAVSVWQYSTSASAPQIGSVAPNMGIPGNVVTIDGKGFGTTQGTVTFGGVTATVKSWTSNRIEVYVPNMAAGLTDVKVTAGGVSSNLYSYNILSGTQTSVVFTVKSAPPTNLGDKIYLTGNIPELGNWSTDTSGAVNNAQGPLLAPNYPDWFYVFSVPAGKTIQFKFFIKRADGTIQWENGSNHVATTPTGATGNITVTWQN

SEQ ID NO: 45263 - protein, 686 aa, Alicyclobacillus
SSSASVKGDVIYQIIIDRFYDGDTTNNNPAKSYGLYDPTKSKWKMYWGGDLEGVRQKLPYLKQLGVTTIWLSPVLDNLDTLAGTDNTGYHGYWTRDFKQIEEHFGNWTTFDTLVNDAHQNGIKVIVDFVPNHSTPFKANDSTFAEGGALYDNGTYMGNYFDDATKGYFHHNGDISNWDDRYEAQWKNFTDPAGFSLADLSQENGTIAQYLTDAAVQLVAHGADGLRIDAVKHFNSGFSKSLADKLYQKKDIFLVGEWYGDDPGAANHLEKVRYANNSGVNVLDFDLNNVIRNVFGTFTQTMYDLNNMVNQTGNEYKYKENLITFIDNHDMSRFLTVNSNKANLHQALAFILTSRGTPSIYYGTEQYMAGGNDPYNRGMMPAFDTTTTAFKEVSTLAGLRRNNAAIQYGTTTQRWINNDVYIYERKFFNDVVLVAINRNTQSSYSISGLQTALPNGNYADYLSGLLGGNGISVSNGSVASFTLAPGAVSVWQYSTSASAPQIGSVAPNMGIPGNVVTIDGKGFGTTQGTVTFGGVTATVKSWTSNRIEVYVPNMAAGLTDVKVTAGGVSSNLYSYNILSGTQTSVVFTVKSAPPTNLGDKIYLTGNIPELGNWSTDTSGAVNNAQGPLLAPNYPDWFYVFSVPAGKTIQFKFFIKRADGTIQWENGSNHVATTPTGATGNITVTWQN

SEQ ID NO: 45264 - protein, 686 aa, Alicyclobacillus
SSSASVKGDVIYQIIIDRFYDGDTTNNNPAKSYGLYDPTKSKWKMYWGGDLEGVRQKLPYLKQLGVTTIWLSPVLDNLDTLAGTDNTGYHGYWTRDFKQIEEHFGNWTTFDTLVNDAHQNGIKVIVDFVPNHSTPFKANDSTFAEGGALYDNGTYMGNYFDDATKGYFHHNGDISNWDDRYEAQWKNFTDPAGFSLADLSQENGTIAQYLTDAAVQLVAHGADGLRIDAVKHFNSGFSKSLADKLYQKKDIFLVGEWYGDDPGAANHLEKVRYANNSGVNVWDFDLNTVIRNVFGTFTQTMYDLNNMVNQTGNEYKYKENLITFIDNHDMSRFLTVNSNKANLHQALAFILTSRGTPSIYYGTEQYMAGGNDPYNRGMMPAFDTTTTAFKEVSTLAGLRRNNAAIQYGTTTQRWINNDVYIYERKFFNDVVLVAINRNTQSSYSISGLQTALPNGNYADYLSGLLGGNGISVSNGSVASFTLAPGAVSVWQYSTSASAPQIGSVAPNMGIPGNVVTIDGKGFGTTQGTVTFGGVTATVKSWTSNRIEVYVPNMAAGLTDVKVTAGGVSSNLYSYNILSGTQTSVVFTVKSAPPTNLGDKIYLTGNIPELGNWSTDTSGAVNNAQGPLLAPNYPDWFYVFSVPAGKTIQFKFFIKRADGTIQWENGSNHVATTPTGATGNITVTWQN

SEQ ID NO: 45265 - protein, 686 aa, Alicyclobacillus
SSSASVKGDVIYQIIIDRFYDGDTTNNNPAKSYGLYDPTKSKWKMYWGGDLEGVRQKLPYLKQLGVTTIWLSPVLDNLDTLAGTDNTGYHGYWTRDFKQIEEHFGNWTTFDTLVNDAHQNGIKVVVDFVPNHSTPFKANDSTFAEGGALYDNGTYMGNYFDDATKGYFHHNGDISNWDDRYEAQWKNFTDPAGFSLADLSQENGTIAQYLTDAAVQLVAHGADGLRIDAVKHFNSGFSKSLADKLYQKKDIFLVGEWYGDDPGAANHLEKVRYANNSGVNVLDFDLNTVIRNVFGTFTQTMYDLNNMVNQTGNEYKYKENLITFIDNHDMSRFLTVNSNKANLHQALAFILTSRGTPSIYYGTEQYMAGGNDPYNRGMMPAFDTTTTAFKEVSTLAGLRRNNAAIQYGTTTQRWINNDVYIYERKFFNDVVLVAINRNTQSSYSISGLQTALPNGNYADYLSGLLGGNGISVSNGSVASFTLAPGAVSVWQYSTSASAPQIGSVAPNMGIPGNVVTIDGKGFGTTQGTVTFGGVTATVKSWTSNRIEVYVPNMAAGLTDVKVTAGGVSSNLYSYNILSGTQTSVVFTVKSAPPTNLGDKIYLTGNIPELGNWSTDTSGAVNNAQGPLLAPNYPDWFYVFSVPAGKTIQFKFFIKRADGTIQWENGSNHVATTPTGATGNITVTWQN

SEQ ID NO: 45266 - protein, 686 aa, Alicyclobacillus
SSSASVKGDVIYQIIIDRFYDGDTTNNNPAKSYGLYDPTKSKWKMYWGGDLEGVRQKLPYLKQLGVTTIWLSPVLDNLDTLAGTDNTGYHGYWTRDFKQIEEHFGNWTTFDTLVNDAHQNGIKVIVDFVPNHSTPFKANDSTFAEGGALYDNGTYMGNYFDDATKGYFHHNGDISNWDDRYEAQWKNFTDPAGFSLADLSQENGTIAQYLTDAAVQLVAHGADGLRIDAVKHFNSGFSKSLADKLYQKKDIFLVGEWYGDDPGAANHLEKVRYANNSGVNVLDFDLNTVIRNVFGTFTQTMYDLNNMVNQTGNEYKYKENLITFIDNHDMSRFQTVNSNKANLHQALAFILTSRGTPSIYYGTEQYMAGGNDPYNRGMMPAFDTTTTAFKEVSTLAGLRRNNAAIQYGTTTQRWINNDVYIYERKFFNDVVLVAINRNTQSSYSISGLQTALPNGNYADYLSGLLGGNGISVSNGSVASFTLAPGAVSVWQYSTSASAPQIGSVAPNMGIPGNVVTIDGKGFGTTQGTVTFGGVTATVKSWTSNRIEVYVPNMAAGLTDVKVTAGGVSSNLYSYNILSGTQTSVVFTVKSAPPTNLGDKIYLTGNIPELGNWSTDTSGAVNNAQGPLLAPNYPDWFYVFSVPAGKTIQFKFFIKRADGTIQWENGSNHVATTPTGATGNITVTWQN

SEQ ID NO: 45267 - protein, 686 aa, Alicyclobacillus
SSSASVKGDVIYQIIIDRFYDGDTTNNNPAKSYGLYDPTKSKWKMYWGGDLEGVRQKLPYLKQLGVTTIWLSPVLDNLDTLAGTDNTGYHGYWTRDFKQIEEHFGNWTTFDTLVNDAHQNGIKVIVDFVPNHSTPFKANDSTFAEGGALYDNGTYMGNYFDDATKGYFHHNGDISNWDDRYEAQWKNFTDPAGYSLADLSQENGTIAQYLTDAAVQLVAHGADGLRIDAVKHFNSGFSKSLADKLYQKKDIFLVGEWYGDDPGAANHLEKVRYANNSGVNVLDFDLNTVIRNVFGTFTQTMYDLNNMVNQTGNEYKYKENLITFIDNHDMSRFLTVNSNKANLHQALAFILTSRGTPSIYYGTEQYMAGGNDPYNRGMMPAFDTTTTAFKEVSTLAGLRRNNAAIQYGTTTQRWINNDVYIYERKFFNDVVLVAINRNTQSSYSISGLQTALPNGNYADYLSGLLGGNGISVSNGSVASFTLAPGAVSVWQYSTSASAPQIGSVAPNMGIPGNVVTIDGKGFGTTQGTVTFGGVTATVKSWTSNRIEVYVPNMAAGLTDVKVTAGGVSSNLYSYNILSGTQTSVVFTVKSAPPTNLGDKIYLTGNIPELGNWSTDTSGAVNNAQGPLLAPNYPDWFYVFSVPAGKTIQFKFFIKRADGTIQWENGSNHVATTPTGATGNITVTWQN

SEQ ID NO: 45268 - protein, 686 aa, Alicyclobacillus
SSSASVKGDVIYQIIIDRFYDGDTTNNNPAKSYGLYDPTKSKWKMYWGGDLEGVRQKLPYLKQLGVTTIWLSPVLDNLDTLAGTDNTGYHGYWTRDFKQIEEHFGNWTTFDTLVNDAHQNGIKVIVDFVPNHSTPFKANDSTFAEGGALYDNGTYMGNYFDDATKGYFHHNGDISNWDDRYEAQWKNFTDPAGFSLADLSQENGTIAQYLTDAAVQLVAHGADGLRIDAVKHMNSGFSKSLADKLYQKKDIFLVGEWYGDDPGAANHLEKVRYANNSGVNVLDFDLNTVIRNVFGTFTQTMYDLNNMVNQTGNEYKYKENLITFIDNHDMSRFLTVNSNKANLHQALAFILTSRGTPSIYYGTEQYMAGGNDPYNRGMMPAFDTTTTAFKEVSTLAGLRRNNAAIQYGTTTQRWINNDVYIYERKFFNDVVLVAINRNTQSSYSISGLQTALPNGNYADYLSGLLGGNGISVSNGSVASFTLAPGAVSVWQYSTSASAPQIGSVAPNMGIPGNVVTIDGKGFGTTQGTVTFGGVTATVKSWTSNRIEVYVPNMAAGLTDVKVTAGGVSSNLYSYNILSGTQTSVVFTVKSAPPTNLGDKIYLTGNIPELGNWSTDTSGAVNNAQGPLLAPNYPDWFYVFSVPAGKTIQFKFFIKRADGTIQWENGSNHVATTPTGATGNITVTWQN

SEQ ID NO: 45269 - protein, 686 aa, Alicyclobacillus
SSSASVKGDVIYQIIIDRFYDGDTTNNNPAKSYGLYDPTKSKWKMYWGGDLEGVRQKLPYLKQLGVTTIWLSPVLDNLDTLAGTDNTGYHGYWTRDFKQIEEHFGNWTTFDTLVNDAHQNGIKVIVDFVPNHSTPFKANDSTFAEGGALYDNGTYMGNYFDDATKGYFHHNGDISNWDDRYEAQWKNFTDPAGFSLADLSQENGTIAQYLTDAAVQLVAHGADGLRIDAVKHFNSGFSKSLADKLYQKKDIFLVGEWYGDDPGAANHLEKVRYANNSGVNVLDFDLNTVIRNVFGTFTQTMYDLNNMVNQTGNEYKYKENLITFIDNHDMDRFLTVNSNKANLHQALAFILTSRGTPSIYYGTEQYMAGGNDPYNRGMMPAFDTTTTAFKEVSTLAGLRRNNAAIQYGTTTQRWINNDVYIYERKFFNDVVLVAINRNTQSSYSISGLQTALPNGNYADYLSGLLGGNGISVSNGSVASFTLAPGAVSVWQYSTSASAPQIGSVAPNMGIPGNVVTIDGKGFGTTQGTVTFGGVTATVKSWTSNRIEVYVPNMAAGLTDVKVTAGGVSSNLYSYNILSGTQTSVVFTVKSAPPTNLGDKIYLTGNIPELGNWSTDTSGAVNNAQGPLLAPNYPDWFYVFSVPAGKTIQFKFFIKRADGTIQWENGSNHVATTPTGATGNITVTWQN

SEQ ID NO: 45270 - protein, 686 aa, Alicyclobacillus
SSSASVKGDVIYQIIIDRFYDGDTTNNNPAKSYGLYDPTKSKWKMYWGGDLEGVRQKLPYLKQLGVTTIWLSPVLDNVDTLAGTDNTGYHGYWTRDFKQIEEHFGNWTTFDTLVNDAHQNGIKVIVDFVPNHSTPFKANDSTFAEGGALYDNGTYMGNYFDDATKGYFHHNGDISNWDDRYEAQWKNFTDPAGFSLADLSQENGTIAQYLTDAAVQLVAHGADGLRIDAVKHFNSGFSKSLADKLYQKKDIFLVGEWYGDDPGAANHLEKVRYANNSGVNVLDFDLNTVIRNVFGTFTQTMYDLNNMVNQTGNEYKYKENLITFIDNHDMSRFLTVNSNKANLHQALAFILTSRGTPSIYYGTEQYMAGGNDPYNRGMMPAFDTTTTAFKEVSTLAGLRRNNAAIQYGTTTQRWINNDVYIYERKFFNDVVLVAINRNTQSSYSISGLQTALPNGNYADYLSGLLGGNGISVSNGSVASFTLAPGAVSVWQYSTSASAPQIGSVAPNMGIPGNVVTIDGKGFGTTQGTVTFGGVTATVKSWTSNRIEVYVPNMAAGLTDVKVTAGGVSSNLYSYNILSGTQTSVVFTVKSAPPTNLGDKIYLTGNIPELGNWSTDTSGAVNNAQGPLLAPNYPDWFYVFSVPAGKTIQFKFFIKRADGTIQWENGSNHVATTPTGATGNITVTWQN

SEQ ID NO: 45271 - protein, 686 aa, Alicyclobacillus
SSSASVKGDVIYQIIIDRFYDGDTTNNNPAKSYGLYDPTKSKWKMYWGGDLEGVRQKLPYLKQLGVTTIWLSPVLDNLDTLAGTDNTGYHGYWTRDFKQIEEHFGNWTTFDTLVNDAHQNGIKVIVDFVPNHSTPFKANDSTFAEGGALYDNGTYMGNYFDDATKGYFHHNGDISNWDDRYEAQWKNFTDPAGFSLADLSQENGTIAQYLTDAAVQLVAHGADGLRIDAVKHFNSGFSKSLADKLYQKKDIFLVGEWYGDDPGAANHLEKVRYANNSGVNVLDWDLNTVIRNVFGTFTQTMYDLNNMVNQTGNEYKYKENLITFIDNHDMSRFLTVNSNKANLHQALAFILTSRGTPSIYYGTEQYMAGGNDPYNRGMMPAFDTTTTAFKEVSTLAGLRRNNAAIQYGTTTQRWINNDVYIYERKFFNDVVLVAINRNTQSSYSISGLQTALPNGNYADYLSGLLGGNGISVSNGSVASFTLAPGAVSVWQYSTSASAPQIGSVAPNMGIPGNVVTIDGKGFGTTQGTVTFGGVTATVKSWTSNRIEVYVPNMAAGLTDVKVTAGGVSSNLYSYNILSGTQTSVVFTVKSAPPTNLGDKIYLTGNIPELGNWSTDTSGAVNNAQGPLLAPNYPDWFYVFSVPAGKTIQFKFFIKRADGTIQWENGSNHVATTPTGATGNITVTWQN

SEQ ID NO: 45272 - protein, 686 aa, Alicyclobacillus
SSSASVKGDVIYQIIIDRFYDGDTTNNNPAKSYGLYDPTKSKWKMYWGGDLEGVRQKLPYLKQLGVTTIWLSPVLDNLDTLAGTDNTGYHGYWTRDFKQIEEHFGNWTTFDTLVNDAHQNGIKVIVDFVPNHSTPFKANDSTFAEGGALYDNGTYMGNYFDDATKGYFHHNGDISNWDDRYEAQWKNFTDPAGFSLADLSQENGTIAQYLTDAAVQLVAHGADGLRIDAVKHFNSGFSKSLADKLYQKKDIFLVGEWYGDDPGAANHLEKVRYANNSGVNVLDFDLNTVIRNVFGTFTQTMYDLNNMVNQTGNEYKYKENLITFIDNHDMSRFLTVNSNKANLHQALAFILTSRGTPSIYYGTEQYMAGGNDPYNRGMMPAFDTTTTAFKEVSTLAGLRRNNAAIQYGTTTQRWINNDVYIYERKFFNDVVLVAINRNTQSSYSISGLQTALPNGNYADYLSGLLGGNGISVSNGSVASFTLAPGAVSVWQYSTSASAPQIGSVAPNMGIPGNVVTIDGKGFGTTQGTVTFGGVTATVKSWTSNRIEVYVPNMAAGLTDVKVTAGGVSSNLYSYNILSGTQTSVVFTVKSAPPTNLGDKIYLTGNIPELGNWSTDTSGAVNNAQGPLLAPNYPDWFYVFSVPAGKTIQFKFFIKRADGTVQWENGSNHVATTPTGATGNITVTWQN

SEQ ID NO: 45273 - protein, 686 aa, Alicyclobacillus
SSSASVKGDVIYQIIIDRFYDGDTTNNNPAKSYGLYDPTKSKWKMYWGGDLEGVRQKLPYLKQLGVTTIWLSPVLDNLDTLAGTDNTGYHGYWTRDFKQIEEHFGNWTTFDTLVNDAHQNGIKVIVDFVPNHSTPFKANDSTFAEGGALYDNGTYMGNYFDDATKGYFHHNGDISNWDDRYEAQWKNFTDPAGFSLADLSQENGTIAQYLTDAAVQLVAHGADGLRIDAVKHFNSGFSKSLADKLYQKKDIFLVGEWYGDDPGAANHLEKVRYANNSGVNVLDFDLNSVIRNVFGTFTQTMYDLNNMVNQTGNEYKYKENLITFIDNHDMSRFLTVNSNKANLHQALAFILTSRGTPSIYYGTEQYMAGGNDPYNRGMMPAFDTTTTAFKEVSTLAGLRRNNAAIQYGTTTQRWINNDVYIYERKFFNDVVLVAINRNTQSSYSISGLQTALPNGNYADYLSGLLGGNGISVSNGSVASFTLAPGAVSVWQYSTSASAPQIGSVAPNMGIPGNVVTIDGKGFGTTQGTVTFGGVTATVKSWTSNRIEVYVPNMAAGLTDVKVTAGGVSSNLYSYNILSGTQTSVVFTVKSAPPTNLGDKIYLTGNIPELGNWSTDTSGAVNNAQGPLLAPNYPDWFYVFSVPAGKTIQFKFFIKRADGTIQWENGSNHVATTPTGATGNITVTWQN

SEQ ID NO: 45274 - protein, 686 aa, Alicyclobacillus
SSSASVKGDVIYQIIIDRFYDGDTTNNNPAKSYGLYDPTKSKWKMYWGGDLEGVRQKLPYLKQLGVTTIWLSPVLDNLDTLAGTDNTGYHGYWTRDFKQIEEHFGNWTTFDTLVNDAHQNGIKVIVDFVPNHSTPFKANDSTFAEGGALYDNGTYMGNYFDDATKGYFHHNGDISNWDDRYEAQWQNFTDPAGFSLADLSQENGTIAQYLTDAAVQLVAHGADGLRIDAVKHFNSGFSKSLADKLYQKKDIFLVGEWYGDDPGAANHLEKVRYANNSGVNVLDFDLNTVIRNVFGTFTQTMYDLNNMVNQTGNEYKYKENLITFIDNHDMSRFLTVNSNKANLHQALAFILTSRGTPSIYYGTEQYMAGGNDPYNRGMMPAFDTTTTAFKEVSTLAGLRRNNAAIQYGTTTQRWINNDVYIYERKFFNDVVLVAINRNTQSSYSISGLQTALPNGNYADYLSGLLGGNGISVSNGSVASFTLAPGAVSVWQYSTSASAPQIGSVAPNMGIPGNVVTIDGKGFGTTQGTVTFGGVTATVKSWTSNRIEVYVPNMAAGLTDVKVTAGGVSSNLYSYNILSGTQTSVVFTVKSAPPTNLGDKIYLTGNIPELGNWSTDTSGAVNNAQGPLLAPNYPDWFYVFSVPAGKTIQFKFFIKRADGTIQWENGSNHVATTPTGATGNITVTWQN

SEQ ID NO: 45275 - protein, 686 aa, Alicyclobacillus
SSSASVKGDVIYQIIIDRFYDGDTTNNNPAKSYGLYDPTKSKWKMYWGGDLEGVRQKLPYLKQLGVTTIWLSPVLDNLDTLAGTDNTGYHGYWTRDFKQIEEHFGNWTTFDTLVNDAHQNGIKVIVDFVPNHSSPFKANDSTFAEGGALYDNGTYMGNYFDDATKGYFHHNGDISNWDDRYEAQWKNFTDPAGFSLADLSQENGTIAQYLTDAAVQLVAHGADGLRIDAVKHFNSGFSKSLADKLYQKKDIFLVGEWYGDDPGAANHLEKVRYANNSGVNVLDFDLNTVIRNVFGTFTQTMYDLNNMVNQTGNEYKYKENLITFIDNHDMSRFLTVNSNKANLHQALAFILTSRGTPSIYYGTEQYMAGGNDPYNRGMMPAFDTTTTAFKEVSTLAGLRRNNAAIQYGTTTQRWINNDVYIYERKFFNDVVLVAINRNTQSSYSISGLQTALPNGNYADYLSGLLGGNGISVSNGSVASFTLAPGAVSVWQYSTSASAPQIGSVAPNMGIPGNVVTIDGKGFGTTQGTVTFGGVTATVKSWTSNRIEVYVPNMAAGLTDVKVTAGGVSSNLYSYNILSGTQTSVVFTVKSAPPTNLGDKIYLTGNIPELGNWSTDTSGAVNNAQGPLLAPNYPDWFYVFSVPAGKTIQFKFFIKRADGTIQWENGSNHVATTPTGATGNITVTWQN

SEQ ID NO: 45276 - protein, 686 aa, Alicyclobacillus
SSSASVKGDVIYEIIIDRFYDGDTTNNNPAKSYGLYDPTKSKWKMYWGGDLEGVRQKLPYLKQLGVTTIWLSPVLDNLDTLAGTDNTGYHGYWTRDFKQIEEHFGNWTTFDTLVNDAHQNGIKVIVDFVPNHSTPFKANDSTFAEGGALYDNGTYMGNYFDDATKGYFHHNGDISNWDDRYEAQWKNFTDPAGFSLADLSQENGTIAQYLTDAAVQLVAHGADGLRIDAVKHFNSGFSKSLADKLYQKKDIFLVGEWYGDDPGAANHLEKVRYANNSGVNVLDFDLNTVIRNVFGTFTQTMYDLNNMVNQTGNEYKYKENLITFIDNHDMSRFLTVNSNKANLHQALAFILTSRGTPSIYYGTEQYMAGGNDPYNRGMMPAFDTTTTAFKEVSTLAGLRRNNAAIQYGTTTQRWINNDVYIYERKFFNDVVLVAINRNTQSSYSISGLQTALPNGNYADYLSGLLGGNGISVSNGSVASFTLAPGAVSVWQYSTSASAPQIGSVAPNMGIPGNVVTIDGKGFGTTQGTVTFGGVTATVKSWTSNRIEVYVPNMAAGLTDVKVTAGGVSSNLYSYNILSGTQTSVVFTVKSAPPTNLGDKIYLTGNIPELGNWSTDTSGAVNNAQGPLLAPNYPDWFYVFSVPAGKTIQFKFFIKRADGTIQWENGSNHVATTPTGATGNITVTWQN

SEQ ID NO: 45277 - protein, 686 aa, Alicyclobacillus
SSSASVKGDVIYQIFIDRFYDGDTTNNNPAKSYGLYDPTKSKWKMYWGGDLEGVRQKLPYLKQLGVTTIWLSPVLDNLDTLAGTDNTGYHGYWTRDFKQIEEHFGNWTTFDTLVNDAHQNGIKVIVDFVPNHSTPFKANDSTFAEGGALYDNGTYMGNYFDDATKGYFHHNGDISNWDDRYEAQWKNFTDPAGFSLADLSQENGTIAQYLTDAAVQLVAHGADGLRIDAVKHFNSGFSKSLADKLYQKKDIFLVGEWYGDDPGAANHLEKVRYANNSGVNVLDFDLNTVIRNVFGTFTQTMYDLNNMVNQTGNEYKYKENLITFIDNHDMSRFLTVNSNKANLHQALAFILTSRGTPSIYYGTEQYMAGGNDPYNRGMMPAFDTTTTAFKEVSTLAGLRRNNAAIQYGTTTQRWINNDVYIYERKFFNDVVLVAINRNTQSSYSISGLQTALPNGNYADYLSGLLGGNGISVSNGSVASFTLAPGAVSVWQYSTSASAPQIGSVAPNMGIPGNVVTIDGKGFGTTQGTVTFGGVTATVKSWTSNRIEVYVPNMAAGLTDVKVTAGGVSSNLYSYNILSGTQTSVVFTVKSAPPTNLGDKIYLTGNIPELGNWSTDTSGAVNNAQGPLLAPNYPDWFYVFSVPAGKTIQFKFFIKRADGTIQWENGSNHVATTPTGATGNITVTWQN

SEQ ID NO: 45278 - protein, 686 aa, Alicyclobacillus
SSSASVKGDVIYQIIIDRFLDGDTTNNNPAKSYGLYDPTKSKWKMYWGGDLEGVRQKLPYLKQLGVTTIWLSPVLDNLDTLAGTDNTGYHGYWTRDFKQIEEHFGNWTTFDTLVNDAHQNGIKVIVDFVPNHSTPFKANDSTFAEGGALYDNGTYMGNYFDDATKGYFHHNGDISNWDDRYEAQWKNFTDPAGFSLADLSQENGTIAQYLTDAAVQLVAHGADGLRIDAVKHFNSGFSKSLADKLYQKKDIFLVGEWYGDDPGAANHLEKVRYANNSGVNVLDFDLNTVIRNVFGTFTQTMYDLNNMVNQTGNEYKYKENLITFIDNHDMSRFLTVNSNKANLHQALAFILTSRGTPSIYYGTEQYMAGGNDPYNRGMMPAFDTTTTAFKEVSTLAGLRRNNAAIQYGTTTQRWINNDVYIYERKFFNDVVLVAINRNTQSSYSISGLQTALPNGNYADYLSGLLGGNGISVSNGSVASFTLAPGAVSVWQYSTSASAPQIGSVAPNMGIPGNVVTIDGKGFGTTQGTVTFGGVTATVKSWTSNRIEVYVPNMAAGLTDVKVTAGGVSSNLYSYNILSGTQTSVVFTVKSAPPTNLGDKIYLTGNIPELGNWSTDTSGAVNNAQGPLLAPNYPDWFYVFSVPAGKTIQFKFFIKRADGTIQWENGSNHVATTPTGATGNITVTWQN

SEQ ID NO: 45279 - protein, 686 aa, Geobacillus stearothermophilus
SSSASVKGDVIYQIIIDRFYDGDTTNNNPAKSYGLYDPTKSKWKMYWGGDLEGVRQKLPYLKQLGVTTIWLSPVLDNLDTLAGTDNTGFHGYWTRDFKQIEEHFGNWTTFDTLVNDAHQNGIKVIVDFVPNHSTPFKANDSTFAEGGALYNNGTYMGNYFDDATKGYFHHNGDISNWDDRYEAQWKNFTDSAGFSLADLSQENGTIAQYLTDAAVQLVAHGADGLRIDAVKHFNSGFSKSLADKLYQKKDIFLVGEWYGDGPGTANHLEKVRYANNSGVNVLDFDLNPVIRNVFGTFTQTMYDLNNMVNQTGNEYKYKENLITFIDNHDMSRFLSVNSNKANLHQALAFILTSRGTPSINYGTEQYMAGGNDPYNRGMMPAFDTTTTAFKEVSTLAGLRRNNAAIQYGTTTQRWINNDVYIYERKFFNDVVLVAINRNTQSSYSISGLQTALPNGSYADYLSGLLGGNGISVSNGSVASFTLAPGAVSVWQYSTSASAPQIGSVAPNMGIPGNVVTIDGKGFGTTQGTVTFGGVTATVKSWTSNRIEVYVPNMAAGLTDVKVTAGGVSSNLYSYNILSGTQTSVVFTVKSAPPTNLGDKIYLTGNIPELGNWSTDTSGAVNNAQGPLLAPNYPDWFYVFSVPAGKTIQFKFFIKRADGTIQWENGSNHVATTPTGATGNITVTWQN

SEQ ID NO: 45280 - protein, 686 aa, Alicyclobacillus
SSSASVKGDVIYQIIIDRFYDGDTTNNNPAKSYGLYDPTKSKWKMYWGGDLEGVRQKLPYLKQLGVTTIWLSPVLDNLDTLAGTDNTGYHGYWTRDFKQIEEHFGNWTTFDTLVNDAHQNGIKVIVDFVPNHSTPFKANDSTFAEGGALYDNGTYMGNYFDDATKGYFHHNGDISNWDDRYEAQWKNFTDPAGFSLADLSQENGTIAQYLTDAAVQLVAHGADGLRIDAVKHFNSGFSKSLADKLYQKKDIFLVGEWYGDDPGAANHLEKVRYANNSGVNVLDFDLNTVIRNVFGTFTQTMYDLNNMVNQTGNEYKYKENLITFIDNHDMSRFLTVNSNKANLHQALAFILTSRGTPSIYYGTEQYMAGNNDPYNRGMMPAFDTTTTAFKEVSTLAGLRRNNAAIQYGTTTQRWINNDVYIYERKFFNDVVLVAINRNTQSSYSISGLQTALPNGNYADYLSGLLGGNGISVSNGSVASFTLAPGAVSVWQYSTSASAPQIGSVAPNMGIPGNVVTIDGKGFGTTQGTVTFGGVTATVKSWTSNRIEVYVPNMAAGLTDVKVTAGGVSSNLYSYNILSGTQTSVVFTVKSAPPTNLGDKIYLTGNIPELGNWSTDTSGAVNNAQGPLLAPNYPDWFYVFSVPAGKTIQFKFFIKRADGTIQWENGSNHVATTPTGATGNITVTWQN

SEQ ID NO: 45281 - protein, 686 aa, Alicyclobacillus
SSSASVKGDVIYQIIIDRFYDGDTTNNNPAKSYGLYDPTKSKWKMYWGGDLEGVRQKLPYLKQLGVTTIWLSPVLDNLDTLAGTDNTGYHGYWTRDFKQIEEHFGNWTTFDTLVNDAHQNGIKVIVDFVPNHSTPFKANDSTFAEGGALYDNGTYMGNYFDDATKGYFHHNGDISNWDDRYEAQWKNFTDPAGFSLADLSQENGTIAQYLTDAAVQLVAHGADGLRIDAVKHFNSGFSKSLADKLYQKKDIFLVGEWYGDDPGAANHLEKVRYANNSGVNVLDFDLNTVIRNVFGTFTQTMYDLNNMVNQTGNEYKYKENLITFIDNHDMSRFLTVNSNKANLHQALAFTLTSRGTPSIYYGTEQYMAGGNDPYNRGMMPAFDTTTTAFKEVSTLAGLRRNNAAIQYGTTTQRWINNDVYIYERKFFNDVVLVAINRNTQSSYSISGLQTALPNGNYADYLSGLLGGNGISVSNGSVASFTLAPGAVSVWQYSTSASAPQIGSVAPNMGIPGNVVTIDGKGFGTTQGTVTFGGVTATVKSWTSNRIEVYVPNMAAGLTDVKVTAGGVSSNLYSYNILSGTQTSVVFTVKSAPPTNLGDKIYLTGNIPELGNWSTDTSGAVNNAQGPLLAPNYPDWFYVFSVPAGKTIQFKFFIKRADGTIQWENGSNHVATTPTGATGNITVTWQN

SEQ ID NO: 45282 - protein, 686 aa, Alicyclobacillus
SSSASVKGDVIYQIIIDRFYDGDTTNNNPAKSYGLYDPTKSKWKMYWGGDLEGVRQKLPYLKQLGVTTIWLSPVLDNLDTLAGTDNTGYHGYWTRDFKQIEEHFGNWTTFDTLVNDAHQNGIKVIVDFVPNHSTPFKANDSTFAEGGALYDNGTYMGNYFDDATKGYFHHNGDISNWDDRYEAQWKNFTDPAGFSLADLSQENGTIAQYLTDAIVQLVAHGADGLRIDAVKHFNSGFSKSLADKLYQKKDIFLVGEWYGDDPGAANHLEKVRYANNSGVNVLDFDLNTVIRNVFGTFTQTMYDLNNMVNQTGNEYKYKENLITFIDNHDMSRFLTVNSNKANLHQALAFILTSRGTPSIYYGTEQYMAGGNDPYNRGMMPAFDTTTTAFKEVSTLAGLRRNNAAIQYGTTTQRWINNDVYIYERKFFNDVVLVAINRNTQSSYSISGLQTALPNGNYADYLSGLLGGNGISVSNGSVASFTLAPGAVSVWQYSTSASAPQIGSVAPNMGIPGNVVTIDGKGFGTTQGTVTFGGVTATVKSWTSNRIEVYVPNMAAGLTDVKVTAGGVSSNLYSYNILSGTQTSVVFTVKSAPPTNLGDKIYLTGNIPELGNWSTDTSGAVNNAQGPLLAPNYPDWFYVFSVPAGKTIQFKFFIKRADGTIQWENGSNHVATTPTGATGNITVTWQN

SEQ ID NO: 45283 - protein, 686 aa, Alicyclobacillus
SSSASVKGDVIYQIIIDRFYDGDTTNNNPAKSYGLYDPTKSKWKMYWGGDLEGVRQKLPYLKQLGVTTIWLSPVLDNLDTLAGTDNTGYHGYWTRDFKQIEEHFGNWTTFDTLVNDAHQNGIKVIVDFVPNHSTPFKANDSTFAEGGALYDNGTYMGNYFDDATKGYFHHNGDISNWDDRYEAQWKNFTDPAGFSLADLSQENGTIAQYLTDAAVQLVAHGADGLRIDAVKHFNSGFSKSLADKLYQKKDIFLVGEWYGDDPGAANHLEKVRYANNSGMNVLDFDLNTVIRNVFGTFTQTMYDLNNMVNQTGNEYKYKENLITFIDNHDMSRFLTVNSNKANLHQALAFILTSRGTPSIYYGTEQYMAGGNDPYNRGMMPAFDTTTTAFKEVSTLAGLRRNNAAIQYGTTTQRWINNDVYIYERKFFNDVVLVAINRNTQSSYSISGLQTALPNGNYADYLSGLLGGNGISVSNGSVASFTLAPGAVSVWQYSTSASAPQIGSVAPNMGIPGNVVTIDGKGFGTTQGTVTFGGVTATVKSWTSNRIEVYVPNMAAGLTDVKVTAGGVSSNLYSYNILSGTQTSVVFTVKSAPPTNLGDKIYLTGNIPELGNWSTDTSGAVNNAQGPLLAPNYPDWFYVFSVPAGKTIQFKFFIKRADGTIQWENGSNHVATTPTGATGNITVTWQN

SEQ ID NO: 45284 - protein, 686 aa, Alicyclobacillus
SSSASVKGDVIYQIIIDRFYDGDTTNNNPAKSYGLYDPTKSKWKMYWGGDLEGVRQKLPYLKQLGVTTIWLSPVLDNLDTLAGTDNTGYHGYWTRDFKQIEEHFGNWTTFDTLVNDAHQNGIKVIVDFVPNHSTPFKANDSTFAEGGALYDNGTYMGNYFDDATKGYFHHNGDISNWDDRYEAQWKNFTDPAGFSLADLSQENGTIAQYLTDAAVQLVAHGADGLRIDAVKHFNSGFSKSLADKLYQKKDIFLVGEWYGDDPGAANHLEKTRYANNSGVNVLDFDLNTVIRNVFGTFTQTMYDLNNMVNQTGNEYKYKENLITFIDNHDMSRFLTVNSNKANLHQALAFILTSRGTPSIYYGTEQYMAGGNDPYNRGMMPAFDTTTTAFKEVSTLAGLRRNNAAIQYGTTTQRWINNDVYIYERKFFNDVVLVAINRNTQSSYSISGLQTALPNGNYADYLSGLLGGNGISVSNGSVASFTLAPGAVSVWQYSTSASAPQIGSVAPNMGIPGNVVTIDGKGFGTTQGTVTFGGVTATVKSWTSNRIEVYVPNMAAGLTDVKVTAGGVSSNLYSYNILSGTQTSVVFTVKSAPPTNLGDKIYLTGNIPELGNWSTDTSGAVNNAQGPLLAPNYPDWFYVFSVPAGKTIQFKFFIKRADGTIQWENGSNHVATTPTGATGNITVTWQN

SEQ ID NO: 45285 - protein, 686 aa, Alicyclobacillus
SSSASVKGDVIYQIIIDRFYDGDTTNNNPAKSYGLYDPTKSKWKMYWGGDLEGVRQKLPYLKQLGVTTIWLSPVLDNLDTLAGTDNTGYHGYWTRDFKQIEEHFGNWTTFDTLVNDAHQNGIKVIVDFVPNHSTPFKANDSTFAEGGALYDNGTYMGNYFDDATKGYFHHNGDISNWDDRYEAQWKNFTDPAGFSLADLSQENGTIAQYLTDAAVQLVAHGADGLRIDAVKHFNSGFSKSLADKLYQKKDIFLVGEWYGDDPGAANHLEKVRYANNSGVNVLDFDLNTVIRNVFGTFTQTMYDLNNMVNQTGNEYKYKENLITFIDNHDMSRFLTVNSNKANLHQALAFILTSRGTPSIYYGTEQYMAGGNDPYNRGMMPAFDTTTTAFKEVSTLAGLRRNNAAIQYGTTTQRWINNDVYIYERKFFNDVVLVAINRNTQSSYSVSGLQTALPNGNYADYLSGLLGGNGISVSNGSVASFTLAPGAVSVWQYSTSASAPQIGSVAPNMGIPGNVVTIDGKGFGTTQGTVTFGGVTATVKSWTSNRIEVYVPNMAAGLTDVKVTAGGVSSNLYSYNILSGTQTSVVFTVKSAPPTNLGDKIYLTGNIPELGNWSTDTSGAVNNAQGPLLAPNYPDWFYVFSVPAGKTIQFKFFIKRADGTIQWENGSNHVATTPTGATGNITVTWQN

SEQ ID NO: 45286 - protein, 686 aa, Alicyclobacillus
SSSASVKGDVIYQIIIDRFYDGDTTNNNPAKSYGLYDPTKSKWKMYWGGDLEGVRQKLPYLKQLGVTTIWLSPVLDNLDTLAGTDNTGYHGYWTRDFKQIEEHFGNWTTFDTLVNDAHQNGIKVIVDFVPNHSTPFKANDSTFAEGGALYDNGTYMGNYFDDATKGYFHHNGDISNWDDRYEAQWKNFTDPAGFSLADLSQENGTIAQYLTDAAVQLVAHGADGLRIDAVKHFNSGFSKSLADKLYQKKDIFLVGEWYGDDPGAANHLEKVRYANNSGVNVLDFDLNTVIRNVFGTFTQTMYDLNNMVNQTGNEYKYKENLITFIDNHDMSRFYTVNSNKANLHQALAFILTSRGTPSIYYGTEQYMAGGNDPYNRGMMPAFDTTTTAFKEVSTLAGLRRNNAAIQYGTTTQRWINNDVYIYERKFFNDVVLVAINRNTQSSYSISGLQTALPNGNYADYLSGLLGGNGISVSNGSVASFTLAPGAVSVWQYSTSASAPQIGSVAPNMGIPGNVVTIDGKGFGTTQGTVTFGGVTATVKSWTSNRIEVYVPNMAAGLTDVKVTAGGVSSNLYSYNILSGTQTSVVFTVKSAPPTNLGDKIYLTGNIPELGNWSTDTSGAVNNAQGPLLAPNYPDWFYVFSVPAGKTIQFKFFIKRADGTIQWENGSNHVATTPTGATGNITVTWQN

SEQ ID NO: 45287 - protein, 686 aa, Alicyclobacillus
SSSASVKGDVIYQIIIDRFYDGDTTNNNPAKSYGLYDPTKSKWKMYWGGDLEGVRQKLPYLKQLGVTTIWLSPVLDNLDTLAGTDNTGYHGYWTRDFKQTEEHFGNWTTFDTLVNDAHQNGIKVIVDFVPNHSTPFKANDSTFAEGGALYDNGTYMGNYFDDATKGYFHHNGDISNWDDRYEAQWKNFTDPAGFSLADLSQENGTIAQYLTDAAVQLVAHGADGLRIDAVKHFNSGFSKSLADKLYQKKDIFLVGEWYGDDPGAANHLEKVRYANNSGVNVLDFDLNTVIRNVFGTFTQTMYDLNNMVNQTGNEYKYKENLITFIDNHDMSRFLTVNSNKANLHQALAFILTSRGTPSIYYGTEQYMAGGNDPYNRGMMPAFDTTTTAFKEVSTLAGLRRNNAAIQYGTTTQRWINNDVYIYERKFFNDVVLVAINRNTQSSYSISGLQTALPNGNYADYLSGLLGGNGISVSNGSVASFTLAPGAVSVWQYSTSASAPQIGSVAPNMGIPGNVVTIDGKGFGTTQGTVTFGGVTATVKSWTSNRIEVYVPNMAAGLTDVKVTAGGVSSNLYSYNILSGTQTSVVFTVKSAPPTNLGDKIYLTGNIPELGNWSTDTSGAVNNAQGPLLAPNYPDWFYVFSVPAGKTIQFKFFIKRADGTIQWENGSNHVATTPTGATGNITVTWQN

SEQ ID NO: 45288 - protein, 686 aa, Alicyclobacillus
SSSASVKGDVIYQIIIDRFYDGDTTNNNPAKSYGLYDPTKSKWKMYWGGDLEGVRQKLPYLKQLGVTTIWLSPVLDNIDTLAGTDNTGYHGYWTRDFKQIEEHFGNWTTFDTLVNDAHQNGIKVIVDFVPNHSTPFKANDSTFAEGGALYDNGTYMGNYFDDATKGYFHHNGDISNWDDRYEAQWKNFTDPAGFSLADLSQENGTIAQYLTDAAVQLVAHGADGLRIDAVKHFNSGFSKSLADKLYQKKDIFLVGEWYGDDPGAANHLEKVRYANNSGVNVLDFDLNTVIRNVFGTFTQTMYDLNNMVNQTGNEYKYKENLITFIDNHDMSRFLTVNSNKANLHQALAFILTSRGTPSIYYGTEQYMAGGNDPYNRGMMPAFDTTTTAFKEVSTLAGLRRNNAAIQYGTTTQRWINNDVYIYERKFFNDVVLVAINRNTQSSYSISGLQTALPNGNYADYLSGLLGGNGISVSNGSVASFTLAPGAVSVWQYSTSASAPQIGSVAPNMGIPGNVVTIDGKGFGTTQGTVTFGGVTATVKSWTSNRIEVYVPNMAAGLTDVKVTAGGVSSNLYSYNILSGTQTSVVFTVKSAPPTNLGDKIYLTGNIPELGNWSTDTSGAVNNAQGPLLAPNYPDWFYVFSVPAGKTIQFKFFIKRADGTIQWENGSNHVATTPTGATGNITVTWQN

SEQ ID NO: 45289 - protein, 686 aa, Alicyclobacillus
SSSASVKGDVIYQIIIDRFYDGDTTNNNPAKSYGLYDPTKSKWKMYWGGDLEGVRQKLPYLKQLGVTTIWLSPVLDNLDTLAGTDNTGYHGYWTRDFKQIEEHFGNWTTFDTLVNDAHQNGIKVIVDFVPNHSTPFKANDSTFAEGGALYDNGTYMGNYFDDATKGYFHHNGDISNWDDRYEAQWKNFTDPAGFTLADLSQENGTIAQYLTDAAVQLVAHGADGLRIDAVKHFNSGFSKSLADKLYQKKDIFLVGEWYGDDPGAANHLEKVRYANNSGVNVLDFDLNTVIRNVFGTFTQTMYDLNNMVNQTGNEYKYKENLITFIDNHDMSRFLTVNSNKANLHQALAFILTSRGTPSIYYGTEQYMAGGNDPYNRGMMPAFDTTTTAFKEVSTLAGLRRNNAAIQYGTTTQRWINNDVYIYERKFFNDVVLVAINRNTQSSYSISGLQTALPNGNYADYLSGLLGGNGISVSNGSVASFTLAPGAVSVWQYSTSASAPQIGSVAPNMGIPGNVVTIDGKGFGTTQGTVTFGGVTATVKSWTSNRIEVYVPNMAAGLTDVKVTAGGVSSNLYSYNILSGTQTSVVFTVKSAPPTNLGDKIYLTGNIPELGNWSTDTSGAVNNAQGPLLAPNYPDWFYVFSVPAGKTIQFKFFIKRADGTIQWENGSNHVATTPTGATGNITVTWQN

SEQ ID NO: 45290 - protein, 686 aa, Alicyclobacillus
SSSASVKGDVIYQIIIDRFYDGDTTNNNPAKSYGLYDPTKSKWKMYWGGDLEGVRQKLPYLKQLGVTSIWLSPVLDNLDTLAGTDNTGYHGYWTRDFKQIEEHFGNWTTFDTLVNDAHQNGIKVIVDFVPNHSTPFKANDSTFAEGGALYDNGTYMGNYFDDATKGYFHHNGDISNWDDRYEAQWKNFTDPAGFSLADLSQENGTIAQYLTDAAVQLVAHGADGLRIDAVKHFNSGFSKSLADKLYQKKDIFLVGEWYGDDPGAANHLEKVRYANNSGVNVLDFDLNTVIRNVFGTFTQTMYDLNNMVNQTGNEYKYKENLITFIDNHDMSRFLTVNSNKANLHQALAFILTSRGTPSIYYGTEQYMAGGNDPYNRGMMPAFDTTTTAFKEVSTLAGLRRNNAAIQYGTTTQRWINNDVYIYERKFFNDVVLVAINRNTQSSYSISGLQTALPNGNYADYLSGLLGGNGISVSNGSVASFTLAPGAVSVWQYSTSASAPQIGSVAPNMGIPGNVVTIDGKGFGTTQGTVTFGGVTATVKSWTSNRIEVYVPNMAAGLTDVKVTAGGVSSNLYSYNILSGTQTSVVFTVKSAPPTNLGDKIYLTGNIPELGNWSTDTSGAVNNAQGPLLAPNYPDWFYVFSVPAGKTIQFKFFIKRADGTIQWENGSNHVATTPTGATGNITVTWQN

SEQ ID NO: 45291 - protein, 686 aa, Alicyclobacillus
SSSASVKGDVIYQIIIDRFYDGDTTNNNPAKSYGLYDPTKSKWKMYWGGDLEGVRQKLPYLKQLGVTTIWLSPVFDNLDTLAGTDNTGYHGYWTRDFKQIEEHFGNWTTFDTLVNDAHQNGIKVIVDFVPNHSTPFKANDSTFAEGGALYDNGTYMGNYFDDATKGYFHHNGDISNWDDRYEAQWKNFTDPAGFSLADLSQENGTIAQYLTDAAVQLVAHGADGLRIDAVKHFNSGFSKSLADKLYQKKDIFLVGEWYGDDPGAANHLEKVRYANNSGVNVLDFDLNTVIRNVFGTFTQTMYDLNNMVNQTGNEYKYKENLITFIDNHDMSRFLTVNSNKANLHQALAFILTSRGTPSIYYGTEQYMAGGNDPYNRGMMPAFDTTTTAFKEVSTLAGLRRNNAAIQYGTTTQRWINNDVYIYERKFFNDVVLVAINRNTQSSYSISGLQTALPNGNYADYLSGLLGGNGISVSNGSVASFTLAPGAVSVWQYSTSASAPQIGSVAPNMGIPGNVVTIDGKGFGTTQGTVTFGGVTATVKSWTSNRIEVYVPNMAAGLTDVKVTAGGVSSNLYSYNILSGTQTSVVFTVKSAPPTNLGDKIYLTGNIPELGNWSTDTSGAVNNAQGPLLAPNYPDWFYVFSVPAGKTIQFKFFIKRADGTIQWENGSNHVATTPTGATGNITVTWQN

SEQ ID NO: 45292 - protein, 686 aa, Alicyclobacillus
SSSASVKGDVIYQIIIDRFYDGDTTNNNPAKSYGLYDPTKSKWKMYWGGDLEGVRQKLPYLKQLGVTTIWLSPVLDNLDTLAGTDNTGYHGYWTRDFKQIEEHFGNWTTFDTLVNDAHQNGIKVIVDFVPNHSTPFKANDSTFAEGGALYDNGTYMGNYFDDATKGYFHHNGDISNWDDRYEAQWKNITDPAGFSLADLSQENGTIAQYLTDAAVQLVAHGADGLRIDAVKHFNSGFSKSLADKLYQKKDIFLVGEWYGDDPGAANHLEKVRYANNSGVNVLDFDLNTVIRNVFGTFTQTMYDLNNMVNQTGNEYKYKENLITFIDNHDMSRFLTVNSNKANLHQALAFILTSRGTPSIYYGTEQYMAGGNDPYNRGMMPAFDTTTTAFKEVSTLAGLRRNNAAIQYGTTTQRWINNDVYIYERKFFNDVVLVAINRNTQSSYSISGLQTALPNGNYADYLSGLLGGNGISVSNGSVASFTLAPGAVSVWQYSTSASAPQIGSVAPNMGIPGNVVTIDGKGFGTTQGTVTFGGVTATVKSWTSNRIEVYVPNMAAGLTDVKVTAGGVSSNLYSYNILSGTQTSVVFTVKSAPPTNLGDKIYLTGNIPELGNWSTDTSGAVNNAQGPLLAPNYPDWFYVFSVPAGKTIQFKFFIKRADGTIQWENGSNHVATTPTGATGNITVTWQN

SEQ ID NO: 45293 - protein, 686 aa, Geobacillus stearothermophilus
SSSASVKGDVIYQITIDRFYDGDTTNNNPAKSYGLYDPTKSKWKMYWGGDLEGVRQKLPYLKQLGVTTIWLSPVLDNLDTLAGTDNTGFHGYWTRDFKQIEEHFGNWTTFDTLVNDAHQNGIKVIVDFVPNHSTPFKANDSTFAEGGALYNNGTYMGNYFDDATKGYFHHNGDISNWDDRYEAQWKNFTDSAGFSLADLSQENGTIAQYLTDAAVQLVAHGADGLRIDAVKHFNSGFSKSLADKLYQKKDIFLVGEWYGDGPGTANHLEKVRYANNSGVNVLDFDLNPVIRNVFGTFTQTMYDLNNMVNQTGNEYKYKENLITFIDNHDMSRFLSVNSNKANLHQALAFILTSRGTPSIYYGTEQYMAGGNDPYNRGMMPAFDTTTTAFKEVSTLAGLRRNNAAIQYGTTTQRWINNDVYIYERKFFNDVVLVAINRNTQSSYSISGLQTALPNGSYADYLSGLLGGNGISVSNGSVASFTLAPGAVSVWQYSTSASAPQIGSVAPNMGIPGNVVTIDGKGFGTTQGTVTFGGVTATVKSWTSNRIEVYVPNMAAGLTDVKVTAGGVSSNLYSYNILSGTQTSVVFTVKSAPPTNLGDKIYLTGNIPELGNWSTDTSGAVNNAQGPLLAPNYPDWFYVFSVPAGKTIQFKFFIKRADGTIQWENGSNHVATTPTGATGNITVTWQN

SEQ ID NO: 45294 - protein, 686 aa, Alicyclobacillus
SSSASVKGDVIYQIIIDRFYDGDTTNNNPAKSYGLYDPTKSKWKMYWGGDLEGVRQKLPYLKQLGVTTIWLSPVLDNLDTLAGTDNTGYHGYWTRDFKQIEEHFGNWTTFDTLVNDAHQNGIKVIVDFTPNHSTPFKANDSTFAEGGALYDNGTYMGNYFDDATKGYFHHNGDISNWDDRYEAQWKNFTDPAGFSLADLSQENGTIAQYLTDAAVQLVAHGADGLRIDAVKHFNSGFSKSLADKLYQKKDIFLVGEWYGDDPGAANHLEKVRYANNSGVNVLDFDLNTVIRNVFGTFTQTMYDLNNMVNQTGNEYKYKENLITFIDNHDMSRFLTVNSNKANLHQALAFILTSRGTPSIYYGTEQYMAGGNDPYNRGMMPAFDTTTTAFKEVSTLAGLRRNNAAIQYGTTTQRWINNDVYIYERKFFNDVVLVAINRNTQSSYSISGLQTALPNGNYADYLSGLLGGNGISVSNGSVASFTLAPGAVSVWQYSTSASAPQIGSVAPNMGIPGNVVTIDGKGFGTTQGTVTFGGVTATVKSWTSNRIEVYVPNMAAGLTDVKVTAGGVSSNLYSYNILSGTQTSVVFTVKSAPPTNLGDKIYLTGNIPELGNWSTDTSGAVNNAQGPLLAPNYPDWFYVFSVPAGKTIQFKFFIKRADGTIQWENGSNHVATTPTGATGNITVTWQN

SEQ ID NO: 45295 - protein, 686 aa, Alicyclobacillus
SSSASVKGDVIYQIIIDRFYDGDTTNNNPAKSYGLYDPTKSKWKMYWGGDLEGVRQKLPYLKQLGVTTIWLSPVLDNLDTLAGTDNTGYHGYWTRDFKQIEEHFGNWTTFDTLVNDAHQNGIKVIVDFVPNHSTPFKANDSTFAEGGALYDNGTYMGNYFDDATKGYFHHNGDISNWDDRYEAQWKNFTDPAGFSLADLSQENGTIAQYLTDAAVQLVAHGADGLRIDAVKHFNSGFSKSLADKLYQKKDIFLVGEWYGDDPGAANHLEKVRYANNSGVNVLDFDLNTVIRNVFGTFTQTMYDLNNMVNQTGNEYKYKENLFTFIDNHDMSRFLTVNSNKANLHQALAFILTSRGTPSIYYGTEQYMAGGNDPYNRGMMPAFDTTTTAFKEVSTLAGLRRNNAAIQYGTTTQRWINNDVYIYERKFFNDVVLVAINRNTQSSYSISGLQTALPNGNYADYLSGLLGGNGISVSNGSVASFTLAPGAVSVWQYSTSASAPQIGSVAPNMGIPGNVVTIDGKGFGTTQGTVTFGGVTATVKSWTSNRIEVYVPNMAAGLTDVKVTAGGVSSNLYSYNILSGTQTSVVFTVKSAPPTNLGDKIYLTGNIPELGNWSTDTSGAVNNAQGPLLAPNYPDWFYVFSVPAGKTIQFKFFIKRADGTIQWENGSNHVATTPTGATGNITVTWQN

SEQ ID NO: 45296 - protein, 686 aa, Alicyclobacillus
SSSASVKGDVIYQIIIDRFYDGDTTNNNPAKSYGLYDPTKSKWKMYWGGDLEGVRQKLPYLKQLGVTTIWLSPVLDNLDTLAGTDNTGYHGYWTRDFKQIEEHFGNWTTFDTLVNDAHQNGIKVIVDFVPNHSTPFKANDSTFAEGGALYDNGTYMGNYFDDATKGYFHHNGDISNWDDRYEAQWKNFTDPAGFSLADLSQENGTIAQYLTDAAVQLVAHGADGLRIDAVKHFNSGFSKSLADKLYQKKDIFLVGEWYGDDPGAANHLEKVRYANNSGVNVLDFDLNTVIRNVFGTFTQTMYDLNNMVNQTGNEYKYKENLITFIDNQDMSRFLTVNSNKANLHQALAFILTSRGTPSIYYGTEQYMAGGNDPYNRGMMPAFDTTTTAFKEVSTLAGLRRNNAAIQYGTTTQRWINNDVYIYERKFFNDVVLVAINRNTQSSYSISGLQTALPNGNYADYLSGLLGGNGISVSNGSVASFTLAPGAVSVWQYSTSASAPQIGSVAPNMGIPGNVVTIDGKGFGTTQGTVTFGGVTATVKSWTSNRIEVYVPNMAAGLTDVKVTAGGVSSNLYSYNILSGTQTSVVFTVKSAPPTNLGDKIYLTGNIPELGNWSTDTSGAVNNAQGPLLAPNYPDWFYVFSVPAGKTIQFKFFIKRADGTIQWENGSNHVATTPTGATGNITVTWQN

SEQ ID NO: 45297 - protein, 686 aa, Geobacillus stearothermophilus
SSSASVKGDVIYQIIIDRFYDGDTTNNNPAKSYGLYDPTKSKWKMYWGGDLEGVRQKLPYLKQLGVTTIWLSPVLDNLDTLAGTDNTGFHGYWTRDFKQIEEHFGNWTTFDTLVNDAHQNGIKVIVDFVPNHSTPFKANDSTFAEGGALYNNGTYMGNYFDDATKGYFHHNGDISNWDDRYEAQWKNFTDSAGFSLADLSQENGTIAQYLTDAAVQLVAHGADGLRIDAVKHFNSGFSKSLADKLYQKKDIFLVGEWYGDGPGTANHLEKVRYANNSGVNVLDFDLNPVIRNVFGTFTQTMYDLNNMVNQTGNEYKYKENLITFIDNHDMSRFLSVNSNKANLHQALAFILTSRGTPSIFYGTEQYMAGGNDPYNRGMMPAFDTTTTAFKEVSTLAGLRRNNAAIQYGTTTQRWINNDVYIYERKFFNDVVLVAINRNTQSSYSISGLQTALPNGSYADYLSGLLGGNGISVSNGSVASFTLAPGAVSVWQYSTSASAPQIGSVAPNMGIPGNVVTIDGKGFGTTQGTVTFGGVTATVKSWTSNRIEVYVPNMAAGLTDVKVTAGGVSSNLYSYNILSGTQTSVVFTVKSAPPTNLGDKIYLTGNIPELGNWSTDTSGAVNNAQGPLLAPNYPDWFYVFSVPAGKTIQFKFFIKRADGTIQWENGSNHVATTPTGATGNITVTWQN

SEQ ID NO: 45298 - protein, 686 aa, Alicyclobacillus
SSSASVKGDVIYQIIIDRFYDGDTTNNNPAKSYGLYDPTKSKWKMYWGGDLEGVRQKLPYLKQLGVTTIWLSPVLDNLDTLAGTDNTGYHGYWTRDFKQIEEHFGNWTTFDTLVNDAHQNGIKVIVDFVPNHSTPFKANDSTFAEGGALYDNGTYMGNYFDDATKGYFHHNGDISNWDDRYEAQWKNFTDPAGFSLADLNQENGTIAQYLTDAAVQLVAHGADGLRIDAVKHFNSGFSKSLADKLYQKKDIFLVGEWYGDDPGAANHLEKVRYANNSGVNVLDFDLNTVIRNVFGTFTQTMYDLNNMVNQTGNEYKYKENLITFIDNHDMSRFLTVNSNKANLHQALAFILTSRGTPSIYYGTEQYMAGGNDPYNRGMMPAFDTTTTAFKEVSTLAGLRRNNAAIQYGTTTQRWINNDVYIYERKFFNDVVLVAINRNTQSSYSISGLQTALPNGNYADYLSGLLGGNGISVSNGSVASFTLAPGAVSVWQYSTSASAPQIGSVAPNMGIPGNVVTIDGKGFGTTQGTVTFGGVTATVKSWTSNRIEVYVPNMAAGLTDVKVTAGGVSSNLYSYNILSGTQTSVVFTVKSAPPTNLGDKIYLTGNIPELGNWSTDTSGAVNNAQGPLLAPNYPDWFYVFSVPAGKTIQFKFFIKRADGTIQWENGSNHVATTPTGATGNITVTWQN

SEQ ID NO: 45299 - protein, 686 aa, Alicyclobacillus
SSSASVKGDVIYQIIIDRFYDGDTTNNNPAKSYGLYDPTKSKWKMYWGGDLEGVRQKLPYLKQLGVTTIWLSPVLDNLDTLAGTDNTGYHGYWTRDFKQIEEHFGNWTTFDTLVNDAHQNGIKVIVDFVPNHSTPFKANDSTFAEGGALYDNGTYMGNYFDDATKGYFHHNGDISNWDDRYEAQWKNFTDPAGFSLADLSQENGTIAQYLTDAAVQLVAHGADGLRIDAVKHFNSGFSKSLADKLYQKKDIFLVGEWYGDDPGAANHLEKVRYANNSGVNVLDFDLNTVIRNVFGTFTQTMYDLNNMVNQTGNEYKYKENLITFIDNHDMSRFLTVNSNKANLHQALAFILTSRGTPSIYYGTEQYMAGGNDPYNRGMMPAFDTTTTAFKEVSTLAGLRRNNAAIQYGTTTQRWINNDVYIYERKFFNDVVLVAINRNTQSSYSISGLQTALPNGNYADYLSGLLGGNGISVSNGSVASFTLAPGAVSVWQYSTSASAPQIGSVAPNMGIPGNVVTIDGKGFGTTQGTVTFGGVTATVKSWTSNRIEVYVPNMAAGLTDVKVTAGGVSSNLYSYNILSGTQTSVVFTVKSAPPTNLGDKIYLVGNIPELGNWSTDTSGAVNNAQGPLLAPNYPDWFYVFSVPAGKTIQFKFFIKRADGTIQWENGSNHVATTPTGATGNITVTWQN

SEQ ID NO: 45300 - protein, 686 aa, Alicyclobacillus
SSSASVKGDVIYQIIIDRFYDGDTTNNNPAKSYGLYDPTKSKWKMYWGGDLEGVRQKLPYLKQLGVTTIWLSPVLDNLDTLAGTDNTGYHGYWTRDFKQIEEHFGNWTTFDTLVNDAHQNGIKVIVDFVPNHSTPFKANDSTFAEGGALYDNGTYMGNYFDDATKGYFHHNGDISNWDDRYEAQWKNFTDPAGFSLADLSQENGTIAQYLTDAAVQLVAHGADGLRIDAVKHFNSGFSKSLADKLYQKKDIFLVGEWYGDDPGAANHLEKVRYANNSGVNVLDYDLNTVIRNVFGTFTQTMYDLNNMVNQTGNEYKYKENLITFIDNHDMSRFLTVNSNKANLHQALAFILTSRGTPSIYYGTEQYMAGGNDPYNRGMMPAFDTTTTAFKEVSTLAGLRRNNAAIQYGTTTQRWINNDVYIYERKFFNDVVLVAINRNTQSSYSISGLQTALPNGNYADYLSGLLGGNGISVSNGSVASFTLAPGAVSVWQYSTSASAPQIGSVAPNMGIPGNVVTIDGKGFGTTQGTVTFGGVTATVKSWTSNRIEVYVPNMAAGLTDVKVTAGGVSSNLYSYNILSGTQTSVVFTVKSAPPTNLGDKIYLTGNIPELGNWSTDTSGAVNNAQGPLLAPNYPDWFYVFSVPAGKTIQFKFFIKRADGTIQWENGSNHVATTPTGATGNITVTWQN

SEQ ID NO: 45301 - protein, 686 aa, Alicyclobacillus
SSSASVKGDVIYQIIIDRFYDGDTTNNNPAKSYGLYDPTKSKWKMYWGGDLEGVRQKLPYLKQLGVTTIWLSPVLDNLDTLAGTDNTGYHGYWTRDFKQIEEHFGNWTTFDTLVNDAHQNGIKVIVDFVPNHSTPFKANDSTFAEGGALYDNGTYMGNYFDDATKGYFHHNGDISNWDDRYEAQWKNFTDPAGFSLADLSQENGTIAQYLTDAAVQLVAHGADGLRIDAVKHFNSGFSKSLADKLYQKKDIFLVGEWYGDDPGAANHLDKVRYANNSGVNVLDFDLNTVIRNVFGTFTQTMYDLNNMVNQTGNEYKYKENLITFIDNHDMSRFLTVNSNKANLHQALAFILTSRGTPSIYYGTEQYMAGGNDPYNRGMMPAFDTTTTAFKEVSTLAGLRRNNAAIQYGTTTQRWINNDVYIYERKFFNDVVLVAINRNTQSSYSISGLQTALPNGNYADYLSGLLGGNGISVSNGSVASFTLAPGAVSVWQYSTSASAPQIGSVAPNMGIPGNVVTIDGKGFGTTQGTVTFGGVTATVKSWTSNRIEVYVPNMAAGLTDVKVTAGGVSSNLYSYNILSGTQTSVVFTVKSAPPTNLGDKIYLTGNIPELGNWSTDTSGAVNNAQGPLLAPNYPDWFYVFSVPAGKTIQFKFFIKRADGTIQWENGSNHVATTPTGATGNITVTWQN

SEQ ID NO: 45302 - protein, 686 aa, Alicyclobacillus
SSSASVKGDVIYQIIIDRFYDGDTTNNNPAKSYGLYDPTKSKWKMYWGGDLEGVRQKLPYLKQLGVTTIWLSPVLDNLDTLAGTDNTGYHGYWTRDFKQIEEHFGNWTTFDTLVNDAHQNGIKVIVDFVPNHSTPFKANDSTFAEGGALYDNGTYMGNYFDDATKGYFHHNGDISNWDDRYESQWKNFTDPAGFSLADLSQENGTIAQYLTDAAVQLVAHGADGLRIDAVKHFNSGFSKSLADKLYQKKDIFLVGEWYGDDPGAANHLEKVRYANNSGVNVLDFDLNTVIRNVFGTFTQTMYDLNNMVNQTGNEYKYKENLITFIDNHDMSRFLTVNSNKANLHQALAFILTSRGTPSIYYGTEQYMAGGNDPYNRGMMPAFDTTTTAFKEVSTLAGLRRNNAAIQYGTTTQRWINNDVYIYERKFFNDVVLVAINRNTQSSYSISGLQTALPNGNYADYLSGLLGGNGISVSNGSVASFTLAPGAVSVWQYSTSASAPQIGSVAPNMGIPGNVVTIDGKGFGTTQGTVTFGGVTATVKSWTSNRIEVYVPNMAAGLTDVKVTAGGVSSNLYSYNILSGTQTSVVFTVKSAPPTNLGDKIYLTGNIPELGNWSTDTSGAVNNAQGPLLAPNYPDWFYVFSVPAGKTIQFKFFIKRADGTIQWENGSNHVATTPTGATGNITVTWQN

SEQ ID NO: 45303 - protein, 686 aa, Alicyclobacillus
SSSASVKGDVIYQIIIDRFYDGDTTNNNPAKSYGLYDPTKSKWKMYWGGDLEGVRQKLPYLKQLGVTTIWLSPVLDNLDTLAGTDNTSYHGYWTRDFKQIEEHFGNWTTFDTLVNDAHQNGIKVIVDFVPNHSTPFKANDSTFAEGGALYDNGTYMGNYFDDATKGYFHHNGDISNWDDRYEAQWKNFTDPAGFSLADLSQENGTIAQYLTDAAVQLVAHGADGLRIDAVKHFNSGFSKSLADKLYQKKDIFLVGEWYGDDPGAANHLEKVRYANNSGVNVLDFDLNTVIRNVFGTFTQTMYDLNNMVNQTGNEYKYKENLITFIDNHDMSRFLTVNSNKANLHQALAFILTSRGTPSIYYGTEQYMAGGNDPYNRGMMPAFDTTTTAFKEVSTLAGLRRNNAAIQYGTTTQRWINNDVYIYERKFFNDVVLVAINRNTQSSYSISGLQTALPNGNYADYLSGLLGGNGISVSNGSVASFTLAPGAVSVWQYSTSASAPQIGSVAPNMGIPGNVVTIDGKGFGTTQGTVTFGGVTATVKSWTSNRIEVYVPNMAAGLTDVKVTAGGVSSNLYSYNILSGTQTSVVFTVKSAPPTNLGDKIYLTGNIPELGNWSTDTSGAVNNAQGPLLAPNYPDWFYVFSVPAGKTIQFKFFIKRADGTIQWENGSNHVATTPTGATGNITVTWQN

SEQ ID NO: 45304 - protein, 686 aa, Alicyclobacillus
SSSASVKGDVIYQIIIDRFYDGDTTNNNPAKSYGLYDPTKSKWKMYWGGDLEGVRQKLPYLKQLGVTTIWLSPVLDNLDTLAGTDNTGYHGYWTRDFKQIEEHFGNWTTFDTLVNDAHQNGIKVIVDFVPNHSTPFKANDSTFAEGGALYDNGTYMGNYFDDATKGYFHHNGDISNWDDRYEAQWKNFTDPAGFSLADLSQENGTIAQYLTDAAVQLVAHGADGLRIDAVKHFNSGFSKSLADKLYQKKDIFLVGEWYGDDPGAANHLEKVRYANNSGVNLLDFDLNTVIRNVFGTFTQTMYDLNNMVNQTGNEYKYKENLITFIDNHDMSRFLTVNSNKANLHQALAFILTSRGTPSIYYGTEQYMAGGNDPYNRGMMPAFDTTTTAFKEVSTLAGLRRNNAAIQYGTTTQRWINNDVYIYERKFFNDVVLVAINRNTQSSYSISGLQTALPNGNYADYLSGLLGGNGISVSNGSVASFTLAPGAVSVWQYSTSASAPQIGSVAPNMGIPGNVVTIDGKGFGTTQGTVTFGGVTATVKSWTSNRIEVYVPNMAAGLTDVKVTAGGVSSNLYSYNILSGTQTSVVFTVKSAPPTNLGDKIYLTGNIPELGNWSTDTSGAVNNAQGPLLAPNYPDWFYVFSVPAGKTIQFKFFIKRADGTIQWENGSNHVATTPTGATGNITVTWQN

SEQ ID NO: 45305 - protein, 686 aa, Alicyclobacillus
SSSASVKGDVIYQIIIDRFYDGDTTNNNPAKSYGLYDPTKSKWKMYWGGDLEGVRQKLPYLKQLGVTTIWLSPVLDNLDTLAGTDNTGYHGYWTRDFKQIEEHFGNWTTFDTLVNDAHQNGIKVIVDFVPNHSTPFKANDSTFAEGGALYDNGTYMGNYFDDATKGYFHHNGDISNWDDRYEAQWKNFTDPAGFSLADLSQENGTIAQYLTDAAVQLVAHGIDGLRIDAVKHFNSGFSKSLADKLYQKKDIFLVGEWYGDDPGAANHLEKVRYANNSGVNVLDFDLNTVIRNVFGTFTQTMYDLNNMVNQTGNEYKYKENLITFIDNHDMSRFLTVNSNKANLHQALAFILTSRGTPSIYYGTEQYMAGGNDPYNRGMMPAFDTTTTAFKEVSTLAGLRRNNAAIQYGTTTQRWINNDVYIYERKFFNDVVLVAINRNTQSSYSISGLQTALPNGNYADYLSGLLGGNGISVSNGSVASFTLAPGAVSVWQYSTSASAPQIGSVAPNMGIPGNVVTIDGKGFGTTQGTVTFGGVTATVKSWTSNRIEVYVPNMAAGLTDVKVTAGGVSSNLYSYNILSGTQTSVVFTVKSAPPTNLGDKIYLTGNIPELGNWSTDTSGAVNNAQGPLLAPNYPDWFYVFSVPAGKTIQFKFFIKRADGTIQWENGSNHVATTPTGATGNITVTWQN

SEQ ID NO: 45306 - protein, 686 aa, Alicyclobacillus
SSSASVKGDVIYQIIIDRFYDGDTTNNNPAKSYGLYDPTKSKWKMYWGGDLEGVRQKLPYLKQLGVTTIWLSPVLDNLDTLAGTDNTGYHGYWTRDFKQIEEHFGNWTTFDTLVNDAHQNGIKVIVDFVPNHSTPFKANDSTFAEGGALYDNGTYMGNYFDDATKGYFHHNGDISNWDDRYEAQWKNFTDPAGFSLADLSQENGTIAQYLTDAAVQLVAHGADGFRIDAVKHFNSGFSKSLADKLYQKKDIFLVGEWYGDDPGAANHLEKVRYANNSGVNVLDFDLNTVIRNVFGTFTQTMYDLNNMVNQTGNEYKYKENLITFIDNHDMSRFLTVNSNKANLHQALAFILTSRGTPSIYYGTEQYMAGGNDPYNRGMMPAFDTTTTAFKEVSTLAGLRRNNAAIQYGTTTQRWINNDVYIYERKFFNDVVLVAINRNTQSSYSISGLQTALPNGNYADYLSGLLGGNGISVSNGSVASFTLAPGAVSVWQYSTSASAPQIGSVAPNMGIPGNVVTIDGKGFGTTQGTVTFGGVTATVKSWTSNRIEVYVPNMAAGLTDVKVTAGGVSSNLYSYNILSGTQTSVVFTVKSAPPTNLGDKIYLTGNIPELGNWSTDTSGAVNNAQGPLLAPNYPDWFYVFSVPAGKTIQFKFFIKRADGTIQWENGSNHVATTPTGATGNITVTWQN

SEQ ID NO: 45307 - protein, 686 aa, Alicyclobacillus
SSSASVKGDVIYQIIIDRFYDGDTTNNNPAKSYGLYDPTKSKWKMYWGGDLEGVRQKLPYLKQLGVTTIWLSPVLDNLDTLAGTDNTGYHGYWTRDFKQIEEHFGNWTTFDTLVNDAHQNGIKVIVDFVPNHSTPFKANDSTFAEGGALYDNGTYMGNYFDDATKGYFHHNGDISNWDDRYEAQWKNFTDPAGFSLADLSQENGTIAQYLTDAAVQLVAHGADGLRIDAVKHFNSGFSKSLADKLYQKKDIFLVGEWYGDDPGAANHLEKVRYANNSGVNVLDFDLNTVIRNVFGTFTQTMYDLNNMVNQTGNEYKYKENLVTFIDNHDMSRFLTVNSNKANLHQALAFILTSRGTPSIYYGTEQYMAGGNDPYNRGMMPAFDTTTTAFKEVSTLAGLRRNNAAIQYGTTTQRWINNDVYIYERKFFNDVVLVAINRNTQSSYSISGLQTALPNGNYADYLSGLLGGNGISVSNGSVASFTLAPGAVSVWQYSTSASAPQIGSVAPNMGIPGNVVTIDGKGFGTTQGTVTFGGVTATVKSWTSNRIEVYVPNMAAGLTDVKVTAGGVSSNLYSYNILSGTQTSVVFTVKSAPPTNLGDKIYLTGNIPELGNWSTDTSGAVNNAQGPLLAPNYPDWFYVFSVPAGKTIQFKFFIKRADGTIQWENGSNHVATTPTGATGNITVTWQN

SEQ ID NO: 45308 - protein, 686 aa, Alicyclobacillus
SSSASVKGDVIYQIIIDRFYDGDTTNNNPAKSYGLYDPTKSKWKMYWGGDLEGVRQKLPYLKQLGVTTIWLSPVLDNLDTLAGTDNTGYHGYWTRDFKQIEEHFGNWTTFDTLVNDAHQNGIKVIVDFVPNHSTPFKANDSTFAEGGALYDNGTYMGNYFDDATKGYFHHNGDISNWDDRYEAQWKNFTDPAGFSLADLSQENGTIAQYLTDAAVQLVAHGADGLRIDAVKHFNSGFSKSLADKLYQKKDIFLVGEWYGDDPGAANHLEKVRYANNSGVNVLDLDLNTVIRNVFGTFTQTMYDLNNMVNQTGNEYKYKENLITFIDNHDMSRFLTVNSNKANLHQALAFILTSRGTPSIYYGTEQYMAGGNDPYNRGMMPAFDTTTTAFKEVSTLAGLRRNNAAIQYGTTTQRWINNDVYIYERKFFNDVVLVAINRNTQSSYSISGLQTALPNGNYADYLSGLLGGNGISVSNGSVASFTLAPGAVSVWQYSTSASAPQIGSVAPNMGIPGNVVTIDGKGFGTTQGTVTFGGVTATVKSWTSNRIEVYVPNMAAGLTDVKVTAGGVSSNLYSYNILSGTQTSVVFTVKSAPPTNLGDKIYLTGNIPELGNWSTDTSGAVNNAQGPLLAPNYPDWFYVFSVPAGKTIQFKFFIKRADGTIQWENGSNHVATTPTGATGNITVTWQN

SEQ ID NO: 45309 - protein, 686 aa, Alicyclobacillus
SSSASVKGDVIYQIIIDRFYDGDTTNNNPAKSYGLYDPTKSKWKMYWGGDLEGVRQKLPYLKQLGVTTIWLSPVLDNLDTLAGTDNTGYHGYWTRDFKQIEEHFGNWTTFDTLVNDAHQNGIKVIVDFVPNHSTPFKANDSTFAEGGALYDNGTYMGNYFDDATKGYFHHNGDISNWDDRYEAQWKNFTDPAGFALADLSQENGTIAQYLTDAAVQLVAHGADGLRIDAVKHFNSGFSKSLADKLYQKKDIFLVGEWYGDDPGAANHLEKVRYANNSGVNVLDFDLNTVIRNVFGTFTQTMYDLNNMVNQTGNEYKYKENLITFIDNHDMSRFLTVNSNKANLHQALAFILTSRGTPSIYYGTEQYMAGGNDPYNRGMMPAFDTTTTAFKEVSTLAGLRRNNAAIQYGTTTQRWINNDVYIYERKFFNDVVLVAINRNTQSSYSISGLQTALPNGNYADYLSGLLGGNGISVSNGSVASFTLAPGAVSVWQYSTSASAPQIGSVAPNMGIPGNVVTIDGKGFGTTQGTVTFGGVTATVKSWTSNRIEVYVPNMAAGLTDVKVTAGGVSSNLYSYNILSGTQTSVVFTVKSAPPTNLGDKIYLTGNIPELGNWSTDTSGAVNNAQGPLLAPNYPDWFYVFSVPAGKTIQFKFFIKRADGTIQWENGSNHVATTPTGATGNITVTWQN

SEQ ID NO: 45310 - protein, 686 aa, Alicyclobacillus
SSSASVKGDVIYQIIIDRFYDGDTTNNNPAKSYGLYDPTKSKWKMYWGGDLEGVRQKLPYLKQLGVTTIWLSPVLDNLDTLAGTDNTGYHGYWTRDFKQIEEHFGNWTTFDTLVNDAHQNGIKVIVDFVPNHLTPFKANDSTFAEGGALYDNGTYMGNYFDDATKGYFHHNGDISNWDDRYEAQWKNFTDPAGFSLADLSQENGTIAQYLTDAAVQLVAHGADGLRIDAVKHFNSGFSKSLADKLYQKKDIFLVGEWYGDDPGAANHLEKVRYANNSGVNVLDFDLNTVIRNVFGTFTQTMYDLNNMVNQTGNEYKYKENLITFIDNHDMSRFLTVNSNKANLHQALAFILTSRGTPSIYYGTEQYMAGGNDPYNRGMMPAFDTTTTAFKEVSTLAGLRRNNAAIQYGTTTQRWINNDVYIYERKFFNDVVLVAINRNTQSSYSISGLQTALPNGNYADYLSGLLGGNGISVSNGSVASFTLAPGAVSVWQYSTSASAPQIGSVAPNMGIPGNVVTIDGKGFGTTQGTVTFGGVTATVKSWTSNRIEVYVPNMAAGLTDVKVTAGGVSSNLYSYNILSGTQTSVVFTVKSAPPTNLGDKIYLTGNIPELGNWSTDTSGAVNNAQGPLLAPNYPDWFYVFSVPAGKTIQFKFFIKRADGTIQWENGSNHVATTPTGATGNITVTWQN

SEQ ID NO: 45311 - protein, 686 aa, Alicyclobacillus
SSSASVKGDVIYQIIIDRFYDGDTTNNNPAKSYGLYDPTKSKWKMYWGGDLEGVRQKLPYLKQLGVTTIWLSPVLDNLDTLAGTDNTGYHGYWTRDFKQIEEHFGNWTTFDTLVNDAHQNGIKVIVDFVPNHSTPFKANDSTFAEGGALYDNGTYMGNYFDDATKGYFHHNGDISNWDDRYEAQWKNFTDPAGFSLADLSQENGTIAQYLTDAAVQLVAHGADGLRIDAVKHFNSGFSKSLADKLYQKKDIYLVGEWYGDDPGAANHLEKVRYANNSGVNVLDFDLNTVIRNVFGTFTQTMYDLNNMVNQTGNEYKYKENLITFIDNHDMSRFLTVNSNKANLHQALAFILTSRGTPSIYYGTEQYMAGGNDPYNRGMMPAFDTTTTAFKEVSTLAGLRRNNAAIQYGTTTQRWINNDVYIYERKFFNDVVLVAINRNTQSSYSISGLQTALPNGNYADYLSGLLGGNGISVSNGSVASFTLAPGAVSVWQYSTSASAPQIGSVAPNMGIPGNVVTIDGKGFGTTQGTVTFGGVTATVKSWTSNRIEVYVPNMAAGLTDVKVTAGGVSSNLYSYNILSGTQTSVVFTVKSAPPTNLGDKIYLTGNIPELGNWSTDTSGAVNNAQGPLLAPNYPDWFYVFSVPAGKTIQFKFFIKRADGTIQWENGSNHVATTPTGATGNITVTWQN

SEQ ID NO: 45312 - protein, 686 aa, Alicyclobacillus
SSSASVKGDVIYQIIIDRFYDGDTTNNNPAKSYGLYDPTKSKWKMYWGGDLEGVRQKLPYLKQLGVTTIWLSPVLDNLDTLAGTDNTGYHGYWTRDFKQIEEHFGNWTTFDTLVNDAHQNGIKVIVDFVPNHSTPFKANDSTFAEGGALYDNGTYMGNYFDDATKGYFHHNGDISNWDDRYEAQWKNFTDPAGFSLADLSQENGTIAQYLTDAAVQLVAHGADGLRIDAVKHFNSGFSKSLADKLYQKKDIFLVGEWYGDDPGAANHLEKVRYANNSGVNVLNFDLNTVIRNVFGTFTQTMYDLNNMVNQTGNEYKYKENLITFIDNHDMSRFLTVNSNKANLHQALAFILTSRGTPSIYYGTEQYMAGGNDPYNRGMMPAFDTTTTAFKEVSTLAGLRRNNAAIQYGTTTQRWINNDVYIYERKFFNDVVLVAINRNTQSSYSISGLQTALPNGNYADYLSGLLGGNGISVSNGSVASFTLAPGAVSVWQYSTSASAPQIGSVAPNMGIPGNVVTIDGKGFGTTQGTVTFGGVTATVKSWTSNRIEVYVPNMAAGLTDVKVTAGGVSSNLYSYNILSGTQTSVVFTVKSAPPTNLGDKIYLTGNIPELGNWSTDTSGAVNNAQGPLLAPNYPDWFYVFSVPAGKTIQFKFFIKRADGTIQWENGSNHVATTPTGATGNITVTWQN

SEQ ID NO: 45313 - protein, 686 aa, Alicyclobacillus
SSSASVKGDVIYQIIIDRFYDGDTTNNNPAKSYGLYDPTKSKWKMYWGGDLEGVRQKLPYLKQLGVTTIWLSPVLDNLDTLAGTDNTGYHGYWTRDFKQIEEHFGNWTTFDTLVNDAHQNGIKVIVDFVPNHSTPFKANDSTFAEGGALYDNGTYMGNYFDDATKGYFHHNGDISNWDDRYEAQWKNFTDPAGFSLADLSQENGTIAQYLTDAAVQLVAHGADGLRIDAVKHFNSGFSKSLADKLYQKKDIFLVGEWYGDDPGAANHLEKVRYANNSGVNVLDFDLNTVIRNVFGTFTQTMYDLNNMVNQTGNEYKYKENLITFIDNHDMSRFLTVNSNKANLHQALAFILTSRGTPAIYYGTEQYMAGGNDPYNRGMMPAFDTTTTAFKEVSTLAGLRRNNAAIQYGTTTQRWINNDVYIYERKFFNDVVLVAINRNTQSSYSISGLQTALPNGNYADYLSGLLGGNGISVSNGSVASFTLAPGAVSVWQYSTSASAPQIGSVAPNMGIPGNVVTIDGKGFGTTQGTVTFGGVTATVKSWTSNRIEVYVPNMAAGLTDVKVTAGGVSSNLYSYNILSGTQTSVVFTVKSAPPTNLGDKIYLTGNIPELGNWSTDTSGAVNNAQGPLLAPNYPDWFYVFSVPAGKTIQFKFFIKRADGTIQWENGSNHVATTPTGATGNITVTWQN

SEQ ID NO: 45314 - protein, 686 aa, Alicyclobacillus
SSSASVKGDVIYQIIIDRFYDGDTTNNNPAKSYGLYDPTKSKWKMYWGGDLEGVRQKLPYLKQLGVTTIWLSPVLDNLDTLAGTDNTGYHGYWTRDFKQIEEHFGNWTTFDTLVNDAHQNGIKVIIDFVPNHSTPFKANDSTFAEGGALYDNGTYMGNYFDDATKGYFHHNGDISNWDDRYEAQWKNFTDPAGFSLADLSQENGTIAQYLTDAAVQLVAHGADGLRIDAVKHFNSGFSKSLADKLYQKKDIFLVGEWYGDDPGAANHLEKVRYANNSGVNVLDFDLNTVIRNVFGTFTQTMYDLNNMVNQTGNEYKYKENLITFIDNHDMSRFLTVNSNKANLHQALAFILTSRGTPSIYYGTEQYMAGGNDPYNRGMMPAFDTTTTAFKEVSTLAGLRRNNAAIQYGTTTQRWINNDVYIYERKFFNDVVLVAINRNTQSSYSISGLQTALPNGNYADYLSGLLGGNGISVSNGSVASFTLAPGAVSVWQYSTSASAPQIGSVAPNMGIPGNVVTIDGKGFGTTQGTVTFGGVTATVKSWTSNRIEVYVPNMAAGLTDVKVTAGGVSSNLYSYNILSGTQTSVVFTVKSAPPTNLGDKIYLTGNIPELGNWSTDTSGAVNNAQGPLLAPNYPDWFYVFSVPAGKTIQFKFFIKRADGTIQWENGSNHVATTPTGATGNITVTWQN

SEQ ID NO: 45315 - protein, 686 aa, Alicyclobacillus
SSSASVKGDVIYQIIIDRFYDGDTTNNNPAKSYGLYDPTKSKWKMYWGGDLEGVRQKLPYLKQLGVTTIWLSPVLDNLDTLAGTDNTGYHGYWTRDFKQIEEHFGNWTTFDTLVNDAHQNGIKVIVDFVPNHSTPFKANDSTFAEGGALYDNGTYMGNYFDDATKGYFHHNGDISNWDDRYEAQWKNFTDPAGFSLADLSQENGTIAQYLTDAAVQLVAHGADGLRIDAVKHFNSGFSKSLADKLYQKKDIFLVGEWYGDDPGAASHLEKVRYANNSGVNVLDFDLNTVIRNVFGTFTQTMYDLNNMVNQTGNEYKYKENLITFIDNHDMSRFLTVNSNKANLHQALAFILTSRGTPSIYYGTEQYMAGGNDPYNRGMMPAFDTTTTAFKEVSTLAGLRRNNAAIQYGTTTQRWINNDVYIYERKFFNDVVLVAINRNTQSSYSISGLQTALPNGNYADYLSGLLGGNGISVSNGSVASFTLAPGAVSVWQYSTSASAPQIGSVAPNMGIPGNVVTIDGKGFGTTQGTVTFGGVTATVKSWTSNRIEVYVPNMAAGLTDVKVTAGGVSSNLYSYNILSGTQTSVVFTVKSAPPTNLGDKIYLTGNIPELGNWSTDTSGAVNNAQGPLLAPNYPDWFYVFSVPAGKTIQFKFFIKRADGTIQWENGSNHVATTPTGATGNITVTWQN

SEQ ID NO: 45316 - protein, 686 aa, Alicyclobacillus
SSSASVKGDVIYQIIIDRFYDGDTTNNNPAKSYGLYDPTKSKWKMYWGGDLEGVRQKLPYLKQLGVTTIWLSPVLDNLDTLAGTDNTGYHGYWTRDFKQIEEHYGNWTTFDTLVNDAHQNGIKVIVDFVPNHSTPFKANDSTFAEGGALYDNGTYMGNYFDDATKGYFHHNGDISNWDDRYEAQWKNFTDPAGFSLADLSQENGTIAQYLTDAAVQLVAHGADGLRIDAVKHFNSGFSKSLADKLYQKKDIFLVGEWYGDDPGAANHLEKVRYANNSGVNVLDFDLNTVIRNVFGTFTQTMYDLNNMVNQTGNEYKYKENLITFIDNHDMSRFLTVNSNKANLHQALAFILTSRGTPSIYYGTEQYMAGGNDPYNRGMMPAFDTTTTAFKEVSTLAGLRRNNAAIQYGTTTQRWINNDVYIYERKFFNDVVLVAINRNTQSSYSISGLQTALPNGNYADYLSGLLGGNGISVSNGSVASFTLAPGAVSVWQYSTSASAPQIGSVAPNMGIPGNVVTIDGKGFGTTQGTVTFGGVTATVKSWTSNRIEVYVPNMAAGLTDVKVTAGGVSSNLYSYNILSGTQTSVVFTVKSAPPTNLGDKIYLTGNIPELGNWSTDTSGAVNNAQGPLLAPNYPDWFYVFSVPAGKTIQFKFFIKRADGTIQWENGSNHVATTPTGATGNITVTWQN

SEQ ID NO: 45317 - protein, 686 aa, Geobacillus stearothermophilus
SSSASVKGDVIYQIIIDRFYDGDTTNNNPAKSYGLYDPTKSKWKMYWGGDLEGVRQKLPYLKQLGVTTIWLSPVLDNLDTLAGTDNTGFHGYFTRDFKQIEEHFGNWTTFDTLVNDAHQNGIKVIVDFVPNHSTPFKANDSTFAEGGALYNNGTYMGNYFDDATKGYFHHNGDISNWDDRYEAQWKNFTDSAGFSLADLSQENGTIAQYLTDAAVQLVAHGADGLRIDAVKHFNSGFSKSLADKLYQKKDIFLVGEWYGDGPGTANHLEKVRYANNSGVNVLDFDLNPVIRNVFGTFTQTMYDLNNMVNQTGNEYKYKENLITFIDNHDMSRFLSVNSNKANLHQALAFILTSRGTPSIYYGTEQYMAGGNDPYNRGMMPAFDTTTTAFKEVSTLAGLRRNNAAIQYGTTTQRWINNDVYIYERKFFNDVVLVAINRNTQSSYSISGLQTALPNGSYADYLSGLLGGNGISVSNGSVASFTLAPGAVSVWQYSTSASAPQIGSVAPNMGIPGNVVTIDGKGFGTTQGTVTFGGVTATVKSWTSNRIEVYVPNMAAGLTDVKVTAGGVSSNLYSYNILSGTQTSVVFTVKSAPPTNLGDKIYLTGNIPELGNWSTDTSGAVNNAQGPLLAPNYPDWFYVFSVPAGKTIQFKFFIKRADGTIQWENGSNHVATTPTGATGNITVTWQN

SEQ ID NO: 45318 - protein, 686 aa, Alicyclobacillus
SSSASVKGDVIYQIIIDRFYDGDTTNNNPAKSYGLYDPTKSKWKMYWGGDLEGVRQKLPYLKQLGVTTIWLSPVLDNLDTLAGTDNTGYHGYWTRDFKQIEEHFGNWTTFDTLVNDVHQNGIKVIVDFVPNHSTPFKANDSTFAEGGALYDNGTYMGNYFDDATKGYFHHNGDISNWDDRYEAQWKNFTDPAGFSLADLSQENGTIAQYLTDAAVQLVAHGADGLRIDAVKHFNSGFSKSLADKLYQKKDIFLVGEWYGDDPGAANHLEKVRYANNSGVNVLDFDLNTVIRNVFGTFTQTMYDLNNMVNQTGNEYKYKENLITFIDNHDMSRFLTVNSNKANLHQALAFILTSRGTPSIYYGTEQYMAGGNDPYNRGMMPAFDTTTTAFKEVSTLAGLRRNNAAIQYGTTTQRWINNDVYIYERKFFNDVVLVAINRNTQSSYSISGLQTALPNGNYADYLSGLLGGNGISVSNGSVASFTLAPGAVSVWQYSTSASAPQIGSVAPNMGIPGNVVTIDGKGFGTTQGTVTFGGVTATVKSWTSNRIEVYVPNMAAGLTDVKVTAGGVSSNLYSYNILSGTQTSVVFTVKSAPPTNLGDKIYLTGNIPELGNWSTDTSGAVNNAQGPLLAPNYPDWFYVFSVPAGKTIQFKFFIKRADGTIQWENGSNHVATTPTGATGNITVTWQN

SEQ ID NO: 45319 - protein, 686 aa, Alicyclobacillus
SSSASVKGDVIYQIIIDRFYDGDTTNNNPAKSYGLYDPTKSKWKMYWGGDLEGVRQKLPYLKQLGVTTIWLSPVLDNLDTLAGTDNTGYHGYWTRDFKQIEEHFGNWTTFDTLVNDAHQNGIKVIVDFVPNHSTPFKANDSTFAEGGALYDNGTYMGNYFDDATKGYFHHNGDISNWDDRYEAQWKNFTDPAGFSLADLSQENGTIAQYLTDAAVQLVAHGADGLRIDAVKHFNSGFSKSLADKLYQKKDIFLVGEWFGDDPGAANHLEKVRYANNSGVNVLDFDLNTVIRNVFGTFTQTMYDLNNMVNQTGNEYKYKENLITFIDNHDMSRFLTVNSNKANLHQALAFILTSRGTPSIYYGTEQYMAGGNDPYNRGMMPAFDTTTTAFKEVSTLAGLRRNNAAIQYGTTTQRWINNDVYIYERKFFNDVVLVAINRNTQSSYSISGLQTALPNGNYADYLSGLLGGNGISVSNGSVASFTLAPGAVSVWQYSTSASAPQIGSVAPNMGIPGNVVTIDGKGFGTTQGTVTFGGVTATVKSWTSNRIEVYVPNMAAGLTDVKVTAGGVSSNLYSYNILSGTQTSVVFTVKSAPPTNLGDKIYLTGNIPELGNWSTDTSGAVNNAQGPLLAPNYPDWFYVFSVPAGKTIQFKFFIKRADGTIQWENGSNHVATTPTGATGNITVTWQN

SEQ ID NO: 45320 - protein, 686 aa, Alicyclobacillus
SSSASVKGDVIYQIIIDRFYDGDTTNNNPAKSYGLYDPTKSKWKMYWGGDLEGVRQKLPYLKQLGVTTIWLSPVLDNLDTLAGTDNTGYHGYWTRDFKQIEEHFGNWTTFDTLVNDAHQNGIKVIVDFVPNHSTPFKANDSTFAEGGALYDNGTYMGNYFDDATKGYFHHNGDISNWDDRYEAQWKNFTDPAGFSLADLSQENGTIAQYLTDAAVQLVAHGADGLRIDAVKHFNSGFSKSLADKLYQKKDIFLVGEWYGDDPGAANHLEKVRYANNSGVNVLDFDLNTVIRNVFGTFTQTMYDLNNMVNQTGNEYKYKENLITFIDNHDMSRFLTVNSNKANLHQALAFILTSRGTPSIYYGTEQYMAGGNDPYNRAMMPAFDTTTTAFKEVSTLAGLRRNNAAIQYGTTTQRWINNDVYIYERKFFNDVVLVAINRNTQSSYSISGLQTALPNGNYADYLSGLLGGNGISVSNGSVASFTLAPGAVSVWQYSTSASAPQIGSVAPNMGIPGNVVTIDGKGFGTTQGTVTFGGVTATVKSWTSNRIEVYVPNMAAGLTDVKVTAGGVSSNLYSYNILSGTQTSVVFTVKSAPPTNLGDKIYLTGNIPELGNWSTDTSGAVNNAQGPLLAPNYPDWFYVFSVPAGKTIQFKFFIKRADGTIQWENGSNHVATTPTGATGNITVTWQN

SEQ ID NO: 45321 - protein, 686 aa, Alicyclobacillus
SSSASVKGDVIYQIIIDRFYDGDTTNNNPAKSYGLYDPTKSKWKMYWGGDLEGVRQKLPYLKQLGVTTIWLSPVLDNLDTLAGTDNTGYHGYWTRDFKQIEEHFGNWTTFDTLVNDAHQNGIKVIVDFAPNHSTPFKANDSTFAEGGALYDNGTYMGNYFDDATKGYFHHNGDISNWDDRYEAQWKNFTDPAGFSLADLSQENGTIAQYLTDAAVQLVAHGADGLRIDAVKHFNSGFSKSLADKLYQKKDIFLVGEWYGDDPGAANHLEKVRYANNSGVNVLDFDLNTVIRNVFGTFTQTMYDLNNMVNQTGNEYKYKENLITFIDNHDMSRFLTVNSNKANLHQALAFILTSRGTPSIYYGTEQYMAGGNDPYNRGMMPAFDTTTTAFKEVSTLAGLRRNNAAIQYGTTTQRWINNDVYIYERKFFNDVVLVAINRNTQSSYSISGLQTALPNGNYADYLSGLLGGNGISVSNGSVASFTLAPGAVSVWQYSTSASAPQIGSVAPNMGIPGNVVTIDGKGFGTTQGTVTFGGVTATVKSWTSNRIEVYVPNMAAGLTDVKVTAGGVSSNLYSYNILSGTQTSVVFTVKSAPPTNLGDKIYLTGNIPELGNWSTDTSGAVNNAQGPLLAPNYPDWFYVFSVPAGKTIQFKFFIKRADGTIQWENGSNHVATTPTGATGNITVTWQN

SEQ ID NO: 45322 - protein, 686 aa, Alicyclobacillus
SSSASVKGDVIYQIIIDRFYDGDTTNNNPAKSYGLYDPTKSKWKMYWGGDLEGVRQKLPYLKQLGVTTIWLSPVLDNLDTLAGTDNTGYHGYWPRDFKQIEEHFGNWTTFDTLVNDAHQNGIKVIVDFVPNHSTPFKANDSTFAEGGALYDNGTYMGNYFDDATKGYFHHNGDISNWDDRYEAQWKNFTDPAGFSLADLSQENGTIAQYLTDAAVQLVAHGADGLRIDAVKHFNSGFSKSLADKLYQKKDIFLVGEWYGDDPGAANHLEKVRYANNSGVNVLDFDLNTVIRNVFGTFTQTMYDLNNMVNQTGNEYKYKENLITFIDNHDMSRFLTVNSNKANLHQALAFILTSRGTPSIYYGTEQYMAGGNDPYNRGMMPAFDTTTTAFKEVSTLAGLRRNNAAIQYGTTTQRWINNDVYIYERKFFNDVVLVAINRNTQSSYSISGLQTALPNGNYADYLSGLLGGNGISVSNGSVASFTLAPGAVSVWQYSTSASAPQIGSVAPNMGIPGNVVTIDGKGFGTTQGTVTFGGVTATVKSWTSNRIEVYVPNMAAGLTDVKVTAGGVSSNLYSYNILSGTQTSVVFTVKSAPPTNLGDKIYLTGNIPELGNWSTDTSGAVNNAQGPLLAPNYPDWFYVFSVPAGKTIQFKFFIKRADGTIQWENGSNHVATTPTGATGNITVTWQN

SEQ ID NO: 45323 - protein, 686 aa, Alicyclobacillus
SSSASVKGDVIYQIIIDRFYDGDTTNNNPAKSYGLYDPTKSKWKMYWGGDLEGVRQKLPYLKQLGVTTIWLSPVLDNLDTLAGTDNTGYHGYWTRDFKQIEEHFGNWTTFDTLVNDAHQNGIKVIVDIVPNHSTPFKANDSTFAEGGALYDNGTYMGNYFDDATKGYFHHNGDISNWDDRYEAQWKNFTDPAGFSLADLSQENGTIAQYLTDAAVQLVAHGADGLRIDAVKHFNSGFSKSLADKLYQKKDIFLVGEWYGDDPGAANHLEKVRYANNSGVNVLDFDLNTVIRNVFGTFTQTMYDLNNMVNQTGNEYKYKENLITFIDNHDMSRFLTVNSNKANLHQALAFILTSRGTPSIYYGTEQYMAGGNDPYNRGMMPAFDTTTTAFKEVSTLAGLRRNNAAIQYGTTTQRWINNDVYIYERKFFNDVVLVAINRNTQSSYSISGLQTALPNGNYADYLSGLLGGNGISVSNGSVASFTLAPGAVSVWQYSTSASAPQIGSVAPNMGIPGNVVTIDGKGFGTTQGTVTFGGVTATVKSWTSNRIEVYVPNMAAGLTDVKVTAGGVSSNLYSYNILSGTQTSVVFTVKSAPPTNLGDKIYLTGNIPELGNWSTDTSGAVNNAQGPLLAPNYPDWFYVFSVPAGKTIQFKFFIKRADGTIQWENGSNHVATTPTGATGNITVTWQN

SEQ ID NO: 45324 - protein, 686 aa, Alicyclobacillus
SSSASVKGDVIYQIIIDRFYDGDTTNNNPAKSYGLYDPTKSKWKMYWGGDLEGVRQKLPYLKQLGVTTIWLSPVLDNLDTLAGTDNTGYHGYWTRDFKQIEEHFGNWTTFDTLVNDAHQNGIKVIVDFVPNHSTPFKANDSTFAEGGALYDNGTYMGNYFDDATKGYFHHNGDISNWDDRYEAQWKNFTDPAGFSLADLSQENGTIAQYLTDAAVQLVAHGADGLRIDAVKHFNSGFSKSLADKLYQKKDIFLVGEWYGDDPGAANHLEKVRYANNSGVNVFDFDLNTVIRNVFGTFTQTMYDLNNMVNQTGNEYKYKENLITFIDNHDMSRFLTVNSNKANLHQALAFILTSRGTPSIYYGTEQYMAGGNDPYNRGMMPAFDTTTTAFKEVSTLAGLRRNNAAIQYGTTTQRWINNDVYIYERKFFNDVVLVAINRNTQSSYSISGLQTALPNGNYADYLSGLLGGNGISVSNGSVASFTLAPGAVSVWQYSTSASAPQIGSVAPNMGIPGNVVTIDGKGFGTTQGTVTFGGVTATVKSWTSNRIEVYVPNMAAGLTDVKVTAGGVSSNLYSYNILSGTQTSVVFTVKSAPPTNLGDKIYLTGNIPELGNWSTDTSGAVNNAQGPLLAPNYPDWFYVFSVPAGKTIQFKFFIKRADGTIQWENGSNHVATTPTGATGNITVTWQN

SEQ ID NO: 45325 - protein, 686 aa, Alicyclobacillus
SSSASVKGDVIYQIIIDRFYDGDTTNNNPAKSYGLYDPTKSKWKMYWGGDLEGVRQKLPYLKQLGVTTIWLSPVLDNLDTLAGTDNTGYHGYWTRDFKQIEEHFGNWTTFDTLVNDAHQNGIKVIVDFVPNHSTPFKANDSTFAEGGALYDNGTYMGNYFDDATKGYFHHNGDISNWDDRYEAQWKNFTDPAGFSLADLSQENGTIAQYLTDAAVQLVAHGADGLRIDAVKHFNSGFSKSLADKLYQKKDIFLVGEWYGDDPGAANHLEKVRYANNSGVNVLDFDLNTVIRNVFGTFTQTMYDLNNMVNQTGNEYKYKENLITFIDNHDMSRFLTVNSNKANLHQALAFILTSRGTPSIYYGTEQYMAGGNDPYNRGMMPAFDTTTTAFKEVSTLAGLRRNNAAIQYGTTTQRWINNDVYIYERKFFNDVVLVAINRNTQSSYSISGLQTALPNGNYADYLSGLLGGNGISVSNGSVASFTLAPGAVSVWQYSTSASAPQIGSVAPNMGIPGNVVTIDGKGFGTTQGTVTFGGVTATVKSWTSNRIEVYVPNMAAGLTDVKVTAGGVSSNLYSYNILSGTQTSVVFTVKSAPPTNLGDKIYLSGNIPELGNWSTDTSGAVNNAQGPLLAPNYPDWFYVFSVPAGKTIQFKFFIKRADGTIQWENGSNHVATTPTGATGNITVTWQN

SEQ ID NO: 45326 - protein, 686 aa, Alicyclobacillus
SSSASVKGDVIYQIIIDRFYDGDTTNNNPAKSYGLYDPTKSKWKMYWGGDLEGVRQKLPYLKQLGVTGIWLSPVLDNLDTLAGTDNTGYHGYWTRDFKQIEEHFGNWTTFDTLVNDAHQNGIKVIVDFVPNHSTPFKANDSTFAEGGALYDNGTYMGNYFDDATKGYFHHNGDISNWDDRYEAQWKNFTDPAGFSLADLSQENGTIAQYLTDAAVQLVAHGADGLRIDAVKHFNSGFSKSLADKLYQKKDIFLVGEWYGDDPGAANHLEKVRYANNSGVNVLDFDLNTVIRNVFGTFTQTMYDLNNMVNQTGNEYKYKENLITFIDNHDMSRFLTVNSNKANLHQALAFILTSRGTPSIYYGTEQYMAGGNDPYNRGMMPAFDTTTTAFKEVSTLAGLRRNNAAIQYGTTTQRWINNDVYIYERKFFNDVVLVAINRNTQSSYSISGLQTALPNGNYADYLSGLLGGNGISVSNGSVASFTLAPGAVSVWQYSTSASAPQIGSVAPNMGIPGNVVTIDGKGFGTTQGTVTFGGVTATVKSWTSNRIEVYVPNMAAGLTDVKVTAGGVSSNLYSYNILSGTQTSVVFTVKSAPPTNLGDKIYLTGNIPELGNWSTDTSGAVNNAQGPLLAPNYPDWFYVFSVPAGKTIQFKFFIKRADGTIQWENGSNHVATTPTGATGNITVTWQN

SEQ ID NO: 45327 - protein, 686 aa, Alicyclobacillus
SSSASVKGDVIYQIIIDRFYDGDTTNNNPAKSYGLYDPTKSKWKMYWGGDLEGVRQKLPYLKQLGVTTIWLSPVLDNLDTLAGTDNTGYHGYWARDFKQIEEHFGNWTTFDTLVNDAHQNGIKVIVDFVPNHSTPFKANDSTFAEGGALYDNGTYMGNYFDDATKGYFHHNGDISNWDDRYEAQWKNFTDPAGFSLADLSQENGTIAQYLTDAAVQLVAHGADGLRIDAVKHFNSGFSKSLADKLYQKKDIFLVGEWYGDDPGAANHLEKVRYANNSGVNVLDFDLNTVIRNVFGTFTQTMYDLNNMVNQTGNEYKYKENLITFIDNHDMSRFLTVNSNKANLHQALAFILTSRGTPSIYYGTEQYMAGGNDPYNRGMMPAFDTTTTAFKEVSTLAGLRRNNAAIQYGTTTQRWINNDVYIYERKFFNDVVLVAINRNTQSSYSISGLQTALPNGNYADYLSGLLGGNGISVSNGSVASFTLAPGAVSVWQYSTSASAPQIGSVAPNMGIPGNVVTIDGKGFGTTQGTVTFGGVTATVKSWTSNRIEVYVPNMAAGLTDVKVTAGGVSSNLYSYNILSGTQTSVVFTVKSAPPTNLGDKIYLTGNIPELGNWSTDTSGAVNNAQGPLLAPNYPDWFYVFSVPAGKTIQFKFFIKRADGTIQWENGSNHVATTPTGATGNITVTWQN

SEQ ID NO: 45328 - protein, 686 aa, Alicyclobacillus
SSSASVKGDVIYQIIIDRFYDGDTTNNNPAKSYGLYDPTKSKWKMYWGGDLEGVRQKLPYLKQLGVTTIWLSPVLDNLDTLAGTDNTGYHGYWTRDFKQIEEHFGNWTTFDTLVNDAHQNGIKVIVDFVPNHSTPFKANDSTFAEGGALYDNGTYMGNYFDDATKGYFHHNGDISNWDDRYEAQWKNFTDPAGFSLADLSQENGTIAQYLTDAAVQLVAHGADGLRIDAVKHFNSGFSKSLADKLYQKKDIFLVGEWYGDDPGAANHLEKVRYANNSGVNVLDFDLNTVIRNVFGTFTQTMYDLNNMVNQTGNEYKYKENLITFIDNHDMSRFHTVNSNKANLHQALAFILTSRGTPSIYYGTEQYMAGGNDPYNRGMMPAFDTTTTAFKEVSTLAGLRRNNAAIQYGTTTQRWINNDVYIYERKFFNDVVLVAINRNTQSSYSISGLQTALPNGNYADYLSGLLGGNGISVSNGSVASFTLAPGAVSVWQYSTSASAPQIGSVAPNMGIPGNVVTIDGKGFGTTQGTVTFGGVTATVKSWTSNRIEVYVPNMAAGLTDVKVTAGGVSSNLYSYNILSGTQTSVVFTVKSAPPTNLGDKIYLTGNIPELGNWSTDTSGAVNNAQGPLLAPNYPDWFYVFSVPAGKTIQFKFFIKRADGTIQWENGSNHVATTPTGATGNITVTWQN

SEQ ID NO: 45329 - protein, 686 aa, Alicyclobacillus
SSSASVKGDVIYQIIIDRFYDGDTTNNNPAKSYGLYDPTKSKWKMYWGGDLEGVRQKLPYLKQLGVTTIWLSPVLDNLDTLAGTDNTGYHGYWTRDFKQIEEHFGNWTTFDTLVNDAHQNGIKVIVDFVPNHSTPFKANDSTFAEGGALYDNGTYMGNYFDDATKGYFHHNGDISNWDDRYEAQWKNFTDPAGFSLADLSQENGTICQYLTDAAVQLVAHGADGLRIDAVKHFNSGFSKSLADKLYQKKDIFLVGEWYGDDPGAANHLEKVRYANNSGVNVLDFDLNTVIRNVFGTFTQTMYDLNNMVNQTGNEYKYKENLITFIDNHDMSRFLTVNSNKANLHQALAFILTSRGTPSIYYGTEQYMAGGNDPYNRGMMPAFDTTTTAFKEVSTLAGLRRNNAAIQYGTTTQRWINNDVYIYERKFFNDVVLVAINRNTQSSYSISGLQTALPNGNYADYLSGLLGGNGISVSNGSVASFTLAPGAVSVWQYSTSASAPQIGSVAPNMGIPGNVVTIDGKGFGTTQGTVTFGGVTATVKSWTSNRIEVYVPNMAAGLTDVKVTAGGVSSNLYSYNILSGTQTSVVFTVKSAPPTNLGDKIYLTGNIPELGNWSTDTSGAVNNAQGPLLAPNYPDWFYVFSVPAGKTIQFKFFIKRADGTIQWENGSNHVATTPTGCTGNITVTWQN

SEQ ID NO: 45330 - protein, 686 aa, Geobacillus stearothermophilus
SSSASVKGDVIYQITIDRFYDGDTTNNNPAKSYGLYDPTKSKWKMYWGGDLEGVRQKLPYLKQLGVTTIWLSPVLDNLDTLAGTDNTGYHGYWTRDFKQIEEHFGNWTTFDTLVNDAHQNGIKVIVDFVPNHSTPFKANDSTFAEGGALYNNGTYMGNYFDDATKGYFHHNGDISNWDDRYEAQWKNFTDSAGFSLADLSQENGTIAQYLTDAAVQLVAHGADGLRIDAVKHFNSGFSKSLADKLYQKKDIFLVGEWYGDGPGTANHLEKVRYANNSGVNVLDFDLNPVIRNVFGTFTQTMYDLNNMVNQTGNEYKYKENLITFIDNHDMSRFLSVNSNKANLHQALAFILTSRGTPSIYYGTEQYMAGGNDPYSRGMMPAFDTTTTAFKEVSTLAGLRRNNAAIQYGTTTQRWINNDVYIYERKFFNDVVLVAINRNTQSSYSISGLQTALPNGSYADYLSGLLGGNGISVSNGSVASFTLAPGAVSVWQYSTSASAPQIGSVAPNMGIPGNVVTIDGKGFGTTQGTVTFGGVTATVKSWTSNRIEVYVPNMAAGLTDVKVTAGGVSSNLYSYNILSGTQTSVVFTVKSAPPTNLGDKIYLTGNIPELGNWSTDTSGAVNNAQGPLLAPNYPDWFYVFIVPAGKTIQFKFFIKRADGTIQWENGSNHVATTPTGATGNITVTWQN

SEQ ID NO: 45331 - protein, 686 aa, Effusibacillus pohliae
SSSASVKGDVIYQIIIDRFYDGDTTNNNPAKSYGLYDPTKSKWKMYWGGDLEGVRQKLPYLKQLGVTTIYLSPVLDNLDTLAGTDNTGYHGYWTRDFKQIEEHFGNWTTFDTLVNDAHQNGIKVIVDFVPNHTTPFKANDSTFAEGGALYDNGTYMGNYFDDATKGYFHHNGDISNWDDRYEAQWKNFTDPAGFSLADLSQENGTIAQYLTDAAVQLVAHGADGLRIDAVKHFNSGFSKSLADKLYQKKDIFLVGEWYGDDPGAANHLEKVRYANNSGVNVLDFDLNTVIRNVFGTFTQTMYDLNNMVNQTGNEYKYKENLITFIDNHDMSRFLTVNSNKANLHQALAFILTSRGTPSIYYGTEQYMAGGNDPYNRGMMPAFDTTTTAFKEVSTLAGLRRNNAAIQYGTTTQRWINNDVYIYERKFFNDVVLVAINRNTQSSYSISGLQTALPNGNYADYLSGLLGGNGISVSNGSVASFTLAPGAVSVWQYSTSASAPQIGSVAPNMGIPGNVVTIDGKGFGTTQGTVTFGGVTATVKSWTSNRIEVYVPNMAAGLTDVKVTAGGVSSNLYSYNILSGTQTSVVFTVKSAPPTNLGDKIYLTGNIPELGNWSTDTSGAVNNAQGPLLAPNYPDWFYVFSVPAGKTIQFKFFIKRADGTIQWENGSNHVATTPTGATGNITVTWQN

SEQ ID NO: 45332 - protein, 686 aa, Effusibacillus pohliae
SSSASVKGDVIYQIIIDRFYDGDTTNNNPAKSYGLYDPTKSKWKMYWGGDLEGVRQKLPYLKQLGVTTIYLSPVLDNLDTLAGTDNTGYHGYWTRDFKQIEEHFGNWTTFDTLVNDAHQNGIKVIVDFVPNHSTPFKANDSTFAEGGALYDNGTYMGNYFDDATKGYFHHNGDISNWDDRYEAQWKNFTDPAGFSLADLSQENGTIAQYLTDAAVQLVAHGADGLRIDAVKHFNSGFSKSLADKLYQKKDIFLVGEWYGDDPGAANHLEKVRYANNSGVNVLDFDLNTVIRNVFGTFTQTMYDLNNMVNQTGNEYKYKENLITFIDNHDMSRFLTVNSNKANLHQALAFILTSRGTPAIYYGTEQYMAGGNDPYNRGMMPAFDTTTTAFKEVSTLAGLRRNNAAIQYGTTTQRWINNDVYIYERKFFNDVVLVAINRNTQSSYSISGLQTALPNGNYADYLSGLLGGNGISVSNGSVASFTLAPGAVSVWQYSTSASAPQIGSVAPNMGIPGNVVTIDGKGFGTTQGTVTFGGVTATVKSWTSNRIEVYVPNMAAGLTDVKVTAGGVSSNLYSYNILSGTQTSVVFTVKSAPPTNLGDKIYLTGNIPELGNWSTDTSGAVNNAQGPLLAPNYPDWFYVFSVPAGKTIQFKFFIKRADGTIQWENGSNHVATTPTGATGNITVTWQN

SEQ ID NO: 45333 - protein, 686 aa, Alicyclobacillus
SSSCSVKGDVIYQIIIDRFYDGDTTNNNPAKSYGLYDPTKSKWKMYWGGDLEGVRQKLPYLKQLGVTTIWLSPVLDNLDTLAGTDNTGYHGYWTRDFKQIEEHFGNWTTFDTLVNDAHQNGIKVIVDFVPNHSTPFKANDSTFAEGGALYDNGTYMGNYFDDATKGYFHHNGDISNWDDRYEAQWKNFTDPAGFSLADLSQENGTIAQYLTDAAVQLVAHGADGLRIDAVKHFNSGFSKSLADKLYQKKDIFLVGEWYGDDPGAANHLEKVRYANNSGVNVLDFDLNTVIRNVFGTFTQTMYDLNNMVNQTGNEYKYKENLITFIDNHDMSRFLTVNSNKANLHQALAFILTSRGTPSIYYGTEQYMAGGNDPYNRGMMPAFDTTTTAFKEVSTLAGLRRNNAAIQYGTTTQRWINNDVYIYERKFFNDVVLVAINRNTQSSYSISGLQTALPNGNYADYLSGLLGGNGISVSNGSVASFTLAPGAVSVWQYSTSASAPQIGSVCPNMGIPGNVVTIDGKGFGTTQGTVTFGGVTATVKSWTSNRIEVYVPNMAAGLTDVKVTAGGVSSNLYSYNILSGTQTSVVFTVKSAPPTNLGDKIYLTGNIPELGNWSTDTSGAVNNAQGPLLAPNYPDWFYVFSVPAGKTIQFKFFIKRADGTIQWENGSNHVATTPTGATGNITVTWQN

SEQ ID NO: 45334 - protein, 686 aa, Effusibacillus pohliae
SSSASVKGDVIYQIIIDRFYDGDTTNNNPAKSYGLYDPTKSKWKMYWGGDLEGVRQKLPYLKQLGVTTIYLSPVLDNLDTLAGTDNTGYHGYWTRDFKQIEEHFGNWTTFDTLVNDAHQNGIKVIVDFVPNHSTPFKANDSTFAEGGALYDNGTYMGNYFDDATKGYFHHNGDISNWDDRYEAQWKNFTDPAGFSLADLNQENGTIAQYLTDAAVQLVAHGADGLRIDAVKHFNSGFSKSLADKLYQKKDIFLVGEWYGDDPGAANHLEKVRYANNSGVNVLDFDLNTVIRNVFGTFTQTMYDLNNMVNQTGNEYKYKENLITFIDNHDMSRFLTVNSNKANLHQALAFILTSRGTPSIYYGTEQYMAGGNDPYNRGMMPAFDTTTTAFKEVSTLAGLRRNNAAIQYGTTTQRWINNDVYIYERKFFNDVVLVAINRNTQSSYSISGLQTALPNGNYADYLSGLLGGNGISVSNGSVASFTLAPGAVSVWQYSTSASAPQIGSVAPNMGIPGNVVTIDGKGFGTTQGTVTFGGVTATVKSWTSNRIEVYVPNMAAGLTDVKVTAGGVSSNLYSYNILSGTQTSVVFTVKSAPPTNLGDKIYLTGNIPELGNWSTDTSGAVNNAQGPLLAPNYPDWFYVFSVPAGKTIQFKFFIKRADGTIQWENGSNHVATTPTGATGNITVTWQN

SEQ ID NO: 45335 - protein, 686 aa, Alicyclobacillus
SSSASVKGDVIYQIIIDRFYDGDTTNNNPAKSYGLYDPTKSKWKMYWGGDLEGVRQKLPYLKQLGVTTIWLSPVLDNCDTLAGTDNTGYHGYWTRDFKQIEEHFGNWTTFDTLVNDAHQNGIKVIVDFVPNHSCPFKANDSTFAEGGALYDNGTYMGNYFDDATKGYFHHNGDISNWDDRYEAQWKNFTDPAGFSLADLSQENGTIAQYLTDAAVQLVAHGADGLRIDAVKHFNSGFSKSLADKLYQKKDIFLVGEWYGDDPGAANHLEKVRYANNSGVNVLDFDLNTVIRNVFGTFTQTMYDLNNMVNQTGNEYKYKENLITFIDNHDMSRFLTVNSNKANLHQALAFILTSRGTPSIYYGTEQYMAGGNDPYNRGMMPAFDTTTTAFKEVSTLAGLRRNNAAIQYGTTTQRWINNDVYIYERKFFNDVVLVAINRNTQSSYSISGLQTALPNGNYADYLSGLLGGNGISVSNGSVASFTLAPGAVSVWQYSTSASAPQIGSVAPNMGIPGNVVTIDGKGFGTTQGTVTFGGVTATVKSWTSNRIEVYVPNMAAGLTDVKVTAGGVSSNLYSYNILSGTQTSVVFTVKSAPPTNLGDKIYLTGNIPELGNWSTDTSGAVNNAQGPLLAPNYPDWFYVFSVPAGKTIQFKFFIKRADGTIQWENGSNHVATTPTGATGNITVTWQN

SEQ ID NO: 45336 - protein, 686 aa, Alicyclobacillus
SSSASVKGDVIYQIIIDRFYDGDTTNNNPAKSYGLYDPTKSKWKMYWGGDLEGVRQKLPYLKQLGVTTIWLSPVLDNLDTLAGTDNTGYHGYWTRDFKQIEEHFGNWTTFDTLVNDAHQNGIKVIVDFVPNHSTPFKANDSTFAEGGALYDNGTYMGNYFDDATKGYFHHNGDISNWDDRYEAQWKNFTDPAGFSLADLSQENGTIAQYLTDAAVQLVAHGADGLRIDAVKHFNSGFSKSLADKLYQKKDIFLVGEWYGDDPGAANHLEKVRYANNSGVNVLDFDLNTVIRNVFGTFTQTMYDLNNMVNQTGNEYKYKENLITFIDNHDMSRFLTVNSNKANLHQALAFILTSRGTPSIYYGTEQYMAGGNDPYNRGMMPAFDTTTTAFKEVSTLAGLRRNNAAIQYGTTTQRWINNDVYIYERKFFNDVVLVAINRNTQSSYSISGLQTALPNGNYADYLSGLLGGNGISVSNGSVASFTLAPGAVSVWQYSTSASAPQIGSVAPNMGIPGNVVTIDGKGFGTTQGTVTFGGVTATVKSWTSNRIEVYVPNMAAGLTDVKVTAGGVSSNLYSYNILSGTQTSVVFTCKSAPPTNLGDKIYLTGNIPELGNWSTDTSGAVNNAQGPLLAPNYPDWFYVFSVPAGKTIQFKCFIKRADGTIQWENGSNHVATTPTGATGNITVTWQN

SEQ ID NO: 45337 - protein, 686 aa, Effusibacillus pohliae
SSSASVKGDVIYQIVIDRFYDGDTTNNNPAKSYGLYDPTKSKWKMYWGGDLEGVRQKLPYLKQLGVTTIWLSPVLDNLDTLAGTDNTGYHGYWTRDFKQIEEHFGNWTTFDTLVNDAHQNGIKVIVDFVPNHSTPFKANDSTFAEGGALYDNGTYMGNYFDDATKGYFHHNGDISNWDDRYEAQWKNFTDPAGFSLADLSQENGTIAQYLTDAAVQLVAHGADGFRIDAVKHFNSGFSKSLADKLYQKKDIFLVGEWYGDDPGAANHLEKVRYANNSGVNVLDFDLNTVIRNVFGTFTQTMYDLNNMVNQTGNEYKYKENLITFIDNHDMSRFLTVNSNKANLHQALAFILTSRGTPSIYYGTEQYMAGGNDPYNRGMMPAFDTTTTAFKEVSTLAGLRRNNAAIQYGTTTQRWINNDVYIYERKFFNDVVLVAINRNTQSSYSISGLQTALPNGNYADYLSGLLGGNGISVSNGSVASFTLAPGAVSVWQYSTSASAPQIGSVAPNMGIPGNVVTIDGKGFGTTQGTVTFGGVTATVKSWTSNRIEVYVPNMAAGLTDVKVTAGGVSSNLYSYNILSGTQTSVVFTVKSAPPTNLGDKIYLTGNIPELGNWSTDTSGAVNNAQGPLLAPNYPDWFYVFSVPAGKTIQFKFFIKRADGTIQWENGSNHVATTPTGATGNITVTWQN

SEQ ID NO: 45338 - protein, 686 aa, Alicyclobacillus
SSSASVKGDVIYQIIIDRFYDGDTTNNNPAKSYGLYDPTKSKWKMYWGGDLEGVRQKLPYLKQLGVTTIWLSPVLDNLDTLAGTDNTGYHGYWTRDFKQIEEHFGNWTTFDTLVNDAHQNGIKVIVDFVPNHSTPFKANDSTFAEGGALYDNGTYMGNYFDDATKGYFHHNGDISNWDDRYEAQWKNFTDPAGFSLADLSQENCTIAQYLTDAAVQLVAHGADGLRIDAVKHFNSGFSKSLADKLYQKKDIFLVGEWYGDDPGAANHLEKVRYANNSGVNVLDFDLNTVIRNVFGTFTQTMYDLNNMVNQTGNEYKYKENLITFIDNHDMSRFLTVNSNKANLHQALAFILTSRGTPSIYYGTEQYMAGGNDPYNRGMMPAFDTTTTAFKEVSTLAGLRRNNAAIQYGTTTQRWINNDVYIYERKFFNDVVLVAINRNTQSSYSISGLQTALPNGNYADYLSGLLGGNGISVSNGSVASFTLAPGAVSVWQYSTSASAPQIGSVAPNMGIPGNVVTIDGKGFGTTQGTVTFGGVTATVKSWTSNRIEVYVPNMAAGLTDVKVTAGGVSSNLYSYNILSGTQTSVVFTVKSAPPTNLGDKIYLTGNIPELGNWSTDTSGAVNNAQGPLLAPNYPDWFYVFSVPAGKTIQFKFFIKRADGTIQWENGSNHVATTPTGACGNITVTWQN

SEQ ID NO: 45339 - protein, 686 aa, Effusibacillus pohliae
SSSASVKGDVIYQIIIDRFYDGDTTNNNPAKSYGLYDPTKSKWKMYWGGDLEGVRQKLPYLKQLGVTTIWLSPVLDNLDTLAGTDNTGYHGYWTRDFKQIEEHFGNWTTFDTLVNDAHQNGIKVIVDFVPNHSTPFKANDSTFAEGGALYDNGTYMGNYFDDATKGYFHHNGDISNWDDRYEAQWKNFTDPAGFSLADLSQENGTIAQYLTDAAVQLVAHGADGFRIDAVKHFNSGFSKSLADKLYQKKDIFLVGEWYGDDPGAANHLEKVRYANNSGVNVLDFDLNTVIRNVFGTFTQTMYDLNNMVNQTGNEYKYKENLITFIDNHDMSRFLTVNSNKANLHQALAFILTSRGTPAIYYGTEQYMAGGNDPYNRGMMPAFDTTTTAFKEVSTLAGLRRNNAAIQYGTTTQRWINNDVYIYERKFFNDVVLVAINRNTQSSYSISGLQTALPNGNYADYLSGLLGGNGISVSNGSVASFTLAPGAVSVWQYSTSASAPQIGSVAPNMGIPGNVVTIDGKGFGTTQGTVTFGGVTATVKSWTSNRIEVYVPNMAAGLTDVKVTAGGVSSNLYSYNILSGTQTSVVFTVKSAPPTNLGDKIYLTGNIPELGNWSTDTSGAVNNAQGPLLAPNYPDWFYVFSVPAGKTIQFKFFIKRADGTIQWENGSNHVATTPTGATGNITVTWQN

SEQ ID NO: 45340 - protein, 686 aa, Effusibacillus pohliae
SSSASVKGDVIYQIIIDRFYDGDTTNNNPAKSYGLYDPTKSKWKMYWGGDLEGVRQKLPYLKQLGVTTIYLSPVLDNLDTLAGTDNTGYHGYWTRDFKQIEEHFGNWTTFDTLVNDAHQNGIKVIVDFVPNHSTPFKANDSTFAEGGALYDNGTYMGNYFDDATKGYFHHNGDISNWDDRYEAQWKNFTDPAGFSLADLSQENGTIAQYLTDAAVQLVAHGADGFRIDAVKHFNSGFSKSLADKLYQKKDIFLVGEWYGDDPGAANHLEKVRYANNSGVNVLDFDLNTVIRNVFGTFTQTMYDLNNMVNQTGNEYKYKENLITFIDNHDMSRFLTVNSNKANLHQALAFILTSRGTPSIYYGTEQYMAGGNDPYNRGMMPAFDTTTTAFKEVSTLAGLRRNNAAIQYGTTTQRWINNDVYIYERKFFNDVVLVAINRNTQSSYSISGLQTALPNGNYADYLSGLLGGNGISVSNGSVASFTLAPGAVSVWQYSTSASAPQIGSVAPNMGIPGNVVTIDGKGFGTTQGTVTFGGVTATVKSWTSNRIEVYVPNMAAGLTDVKVTAGGVSSNLYSYNILSGTQTSVVFTVKSAPPTNLGDKIYLTGNIPELGNWSTDTSGAVNNAQGPLLAPNYPDWFYVFSVPAGKTIQFKFFIKRADGTIQWENGSNHVATTPTGATGNITVTWQN

SEQ ID NO: 45341 - protein, 686 aa, Alicyclobacillus
SSSASVKGDVIYQIIIDRFYDGDTTNNNPAKSYGLYDPTKSKWKMYWGGDLEGVRQKLPYLKQLGVTTIWLSPVLDNLDTLAGTDNTGYHGYWTRDFKQIEEHFGNWTTFDTLVNDAHQNGIKVIVDFVPNHSTPFKANDSTFAEGGALYDNGTYMGNYFDDATKGYFHHNGDISNWDDRYEAQWKNFTDPAGFSLADLSQENGTICQYLTDAAVQLVAHGADGLRIDAVKHFNSGFSKSLADKLYQKKDIFLVGEWYGDDPGAANHLEKVRYANNSGVNVLDFDLNTVIRNVFGTFTQTMYDLNNMVNQTGNEYKYKENLITFIDNHDMSRFLTVNSNKANLHQALAFILTSRGTPSIYYGTEQYMAGGNDPYNRGMMPAFDTTTTAFKEVSTLAGLRRNNAAIQYGTTTQRWINNDVYIYERKFFNDVVLVAINRNTQSSYSISGLQTALPNGNYADYLSGLLGGNGISVSNGSVASFTLAPGAVSVWQYSTSASAPQIGSVAPNMGIPGNVVTIDGKGFGTTQGTVTFGGVTATVKSWTSNRIEVYVPNMAAGLTDVKVTAGGVSSNLYSYNILSGTQTSVVFTVKSAPPTNLGDKIYLTGNIPELGNWSTDTSGAVNNAQGPLLAPNYPDWFYVFSVPAGKTIQFKFFIKRADGTIQWENGSNHVATTPTGACGNITVTWQN

SEQ ID NO: 45342 - protein, 686 aa, Bacillus sp.
SSSASVKGDVIYQIIIDRFYDGDTTSNNPAKSYGLYDPTKSKWKMYWGGDLEGVRQKLPYLKQLGVTTIWLSPVLDNLDALAGTDNTGYHGYWTRDFKQIEEHFGNWTTFDTLVNDAHQNGIKVIVDFVPNHSTPFKANDSTFAEGGALYNNGTYMGNYFDDATKGYFHHNGDISNWDDRYEAQWKNLTDPAGFSLADLSQENGTIAQYLTDAAVQLVAHGADGLRIDAVKHFNSGFSKSLADKLYQKKDIFLVGEWYGDGPGTANHLEKVRYANNSGVNVLDFDLNPVILNVFGTFTQTMYDLNNMVNQTGNEYKYKENLITFIDNHDMSRFLSVNSNKANLHQALAFILTSRGTPSIYYGTEQYMAGGNDPYNRGMMPAFDTTTTAFKEVSTLAGLRRNNAAIQYGTTTQRWINNDVYIYERKFFNDVVLVAINRNTQSSYSISGLQTALPNGSYADYLSGLLGGNGISVSNGSVASFTLAPGAVSVWQYSTSASAPQIGSVAPNMGIPGNVVTIDGKGFGTTQGTVTFGGVTATVKSWTSNRIEVYVPNMAAGLTDVKVTAGGVSSNLYSYNILSGTQTSVVFTVKSAPPTNLGDKIYLTGNIPELGNWSTDTSGAVNNAQGPLLAPNYPDWFYVFSVPAGKTIQFKFFIKRADGTIQWENGSNHVATTPTGATGNITVTWQN

SEQ ID NO: 45343 - protein, 686 aa, Alicyclobacillus
SSSASVKGDVIYQIIIDRFYDGDTTNNNPAKSYGLYDPTKSKWKMYWGGDLEGVRQKLPYLKQLGVTTIWLSPVLDCLDTLAGTDNTCYHGYWTRDFKQIEEHFGNWTTFDTLVNDAHQNGIKVIVDFVPNHSTPFKANDSTFAEGGALYDNGTYMGNYFDDATKGYFHHNGDISNWDDRYEAQWKNFTDPAGFSLADLSQENGTIAQYLTDAAVQLVAHGADGLRIDAVKHFNSGFSKSLADKLYQKKDIFLVGEWYGDDPGAANHLEKVRYANNSGVNVLDFDLNTVIRNVFGTFTQTMYDLNNMVNQTGNEYKYKENLITFIDNHDMSRFLTVNSNKANLHQALAFILTSRGTPSIYYGTEQYMAGGNDPYNRGMMPAFDTTTTAFKEVSTLAGLRRNNAAIQYGTTTQRWINNDVYIYERKFFNDVVLVAINRNTQSSYSISGLQTALPNGNYADYLSGLLGGNGISVSNGSVASFTLAPGAVSVWQYSTSASAPQIGSVAPNMGIPGNVVTIDGKGFGTTQGTVTFGGVTATVKSWTSNRIEVYVPNMAAGLTDVKVTAGGVSSNLYSYNILSGTQTSVVFTVKSAPPTNLGDKIYLTGNIPELGNWSTDTSGAVNNAQGPLLAPNYPDWFYVFSVPAGKTIQFKFFIKRADGTIQWENGSNHVATTPTGATGNITVTWQN

SEQ ID NO: 45344 - protein, 686 aa, Alicyclobacillus
SSSASVKGDVIYQIIIDRFYDGDTTNNNPAKSYGLYDPTKSKWKMYWGGDLEGVRQKLPYLKQLGVTTIWLSPVLDNLDTLCGTDNTGYHGYWTRDFKQIEEHFGNWTTFDTLVNDAHQNGIKVIVDFVPNHSTPFKANDSTFCEGGALYDNGTYMGNYFDDATKGYFHHNGDISNWDDRYEAQWKNFTDPAGFSLADLSQENGTIAQYLTDAAVQLVAHGADGLRIDAVKHFNSGFSKSLADKLYQKKDIFLVGEWYGDDPGAANHLEKVRYANNSGVNVLDFDLNTVIRNVFGTFTQTMYDLNNMVNQTGNEYKYKENLITFIDNHDMSRFLTVNSNKANLHQALAFILTSRGTPSIYYGTEQYMAGGNDPYNRGMMPAFDTTTTAFKEVSTLAGLRRNNAAIQYGTTTQRWINNDVYIYERKFFNDVVLVAINRNTQSSYSISGLQTALPNGNYADYLSGLLGGNGISVSNGSVASFTLAPGAVSVWQYSTSASAPQIGSVAPNMGIPGNVVTIDGKGFGTTQGTVTFGGVTATVKSWTSNRIEVYVPNMAAGLTDVKVTAGGVSSNLYSYNILSGTQTSVVFTVKSAPPTNLGDKIYLTGNIPELGNWSTDTSGAVNNAQGPLLAPNYPDWFYVFSVPAGKTIQFKFFIKRADGTIQWENGSNHVATTPTGATGNITVTWQN

SEQ ID NO: 45345 - protein, 686 aa, Effusibacillus pohliae
SSSASVKGDVIYQIIIDRFYDGDTTNNNPAKSYGLYDPTKSKWKMYWGGDLEGVRQKLPYLKQLGVTTIYLSPVLDNLDTLAGTDNTGYHGYWTRDFKQIEEHFGNWTTFDTLVNDAHQNGIKVIVDFVPNHSTPFKANDSTFAEGGALYDNGTYMGNYFDDATKGYFHHNGDISNWDDRYEAQWKNFTDPAGFSLADLSQENGTIAQYLTDAAVQLVAHGADGLRIDAVKHFNSGFSKSLADKLYQKKDIFLVGEWYGDDPGAANHLEKVRYANNSGVNVIDFDLNTVIRNVFGTFTQTMYDLNNMVNQTGNEYKYKENLITFIDNHDMSRFLTVNSNKANLHQALAFILTSRGTPSIYYGTEQYMAGGNDPYNRGMMPAFDTTTTAFKEVSTLAGLRRNNAAIQYGTTTQRWINNDVYIYERKFFNDVVLVAINRNTQSSYSISGLQTALPNGNYADYLSGLLGGNGISVSNGSVASFTLAPGAVSVWQYSTSASAPQIGSVAPNMGIPGNVVTIDGKGFGTTQGTVTFGGVTATVKSWTSNRIEVYVPNMAAGLTDVKVTAGGVSSNLYSYNILSGTQTSVVFTVKSAPPTNLGDKIYLTGNIPELGNWSTDTSGAVNNAQGPLLAPNYPDWFYVFSVPAGKTIQFKFFIKRADGTIQWENGSNHVATTPTGATGNITVTWQN

SEQ ID NO: 45346 - protein, 686 aa, Effusibacillus pohliae
SSSASVKGDVIYQIIIDRFYDGDTTNNNPAKSYGLYDPTKSKWKMYWGGDLEGVRQKLPYLKQLGVTTIYLSPVLDNLDTLAGTDNTGYHGYWTRDFKQIEEHFGNWTTFDTLVNDAHQNGIKIIVDFVPNHSTPFKANDSTFAEGGALYDNGTYMGNYFDDATKGYFHHNGDISNWDDRYEAQWKNFTDPAGFSLADLSQENGTIAQYLTDAAVQLVAHGADGLRIDAVKHFNSGFSKSLADKLYQKKDIFLVGEWYGDDPGAANHLEKVRYANNSGVNVLDFDLNTVIRNVFGTFTQTMYDLNNMVNQTGNEYKYKENLITFIDNHDMSRFLTVNSNKANLHQALAFILTSRGTPSIYYGTEQYMAGGNDPYNRGMMPAFDTTTTAFKEVSTLAGLRRNNAAIQYGTTTQRWINNDVYIYERKFFNDVVLVAINRNTQSSYSISGLQTALPNGNYADYLSGLLGGNGISVSNGSVASFTLAPGAVSVWQYSTSASAPQIGSVAPNMGIPGNVVTIDGKGFGTTQGTVTFGGVTATVKSWTSNRIEVYVPNMAAGLTDVKVTAGGVSSNLYSYNILSGTQTSVVFTVKSAPPTNLGDKIYLTGNIPELGNWSTDTSGAVNNAQGPLLAPNYPDWFYVFSVPAGKTIQFKFFIKRADGTIQWENGSNHVATTPTGATGNITVTWQN

SEQ ID NO: 45347 - protein, 686 aa, Effusibacillus pohliae
SSSASVKGDVIYQIIIDRFYDGDTTNNNPAKSYGLYDPTKSKWKMYWGGDLEGVRQKLPYLKQLGVTTIYLSPVLDNLDTLAGTDNTGYHGYWTRDFKQIEEHFGNWTTFDTLVNDAHQNGIKVIVDFVPNHSTPFKANDSTFAEGGALYDNGTYMGNYFDDATKGYFHHNGDISNWDDRYEAQWKNFTDPAGFSLADLSQENGTIAQYLTDAAVQLVAHGADGLRIDAVKHFNSGFSKSLADKLYQKKDIFLVGEWYGDDPGAANHLEKVRYANNSGVNVFDFDLNTVIRNVFGTFTQTMYDLNNMVNQTGNEYKYKENLITFIDNHDMSRFLTVNSNKANLHQALAFILTSRGTPSIYYGTEQYMAGGNDPYNRGMMPAFDTTTTAFKEVSTLAGLRRNNAAIQYGTTTQRWINNDVYIYERKFFNDVVLVAINRNTQSSYSISGLQTALPNGNYADYLSGLLGGNGISVSNGSVASFTLAPGAVSVWQYSTSASAPQIGSVAPNMGIPGNVVTIDGKGFGTTQGTVTFGGVTATVKSWTSNRIEVYVPNMAAGLTDVKVTAGGVSSNLYSYNILSGTQTSVVFTVKSAPPTNLGDKIYLTGNIPELGNWSTDTSGAVNNAQGPLLAPNYPDWFYVFSVPAGKTIQFKFFIKRADGTIQWENGSNHVATTPTGATGNITVTWQN

SEQ ID NO: 45348 - protein, 686 aa, Alicyclobacillus
SSSASVKGDVIYQIIIDRFYDGDTTNNNPAKSYGLYDPTKSKWKMYWGGDLEGVRQKLPYLKQLGVTTIWLSPVLDNLDTLAGTDNTGYHGYWTRDFKQIEEHFGNWTTFDTLVNDAHQNGIKVIVDFVPNHSTPFKANDSTFAEGGALYDNGTYMGNYFDDATKGYFHHNGDISNWDDRYEAQWKNFTDPAGFSLADLSQENGTIAQYLTDAAVQLVAHGADGLRIDAVKHFNSGFSKCLADKLYQKKDIFLVGEWYGDDPGAANHLEKVRYANNSGVNVLDFDLNTVIRNVFGTFTQTMYDLNNMVNQTGNEYKYKENLITFIDNHDMSRFLTVNSNKANLHQALAFILTSRGTPSIYYGTEQYMAGGNDPYNRGMMPAFDTTTTAFKEVSTLAGLRRNNAAIQYGTTTQRWINNDVYIYERKFFNDVVLVAINRNTQSSYSISGLQTALPNGNYADYLSGLLGGNGISVSNGSVASFTLAPGAVSVWQYSTSASAPQIGSVAPNMGIPGNVVTIDGKGFGTTQGTVTFGGVTATVKSWTSNRIEVYVPNMAAGLTDVKVTAGGVSSNLYSYNILSGTQTCVVFTVKSAPPTNLGDKIYLTGNIPELGNWSTDTSGAVNNAQGPLLAPNYPDWFYVFSVPAGKTIQFKFFIKRADGTIQWENGSNHVATTPTGATGNITVTWQN

SEQ ID NO: 45349 - protein, 686 aa, Effusibacillus pohliae
SSSASVKGDVIYQIIIDRFYDGDTTNNNPAKSYGLYDPTKSKWKMYWGGDLEGVRQKLPYLKQLGVTTIWLSPVLDNLDTLAGTDNTGYHGYWTRDFKQIEEHFGNWTTFDTLVNDAHQNGIKIIVDFVPNHSTPFKANDSTFAEGGALYDNGTYMGNYFDDATKGYFHHNGDISNWDDRYEAQWKNFTDPAGFSLADLSQENGTIAQYLTDAAVQLVAHGADGFRIDAVKHFNSGFSKSLADKLYQKKDIFLVGEWYGDDPGAANHLEKVRYANNSGVNVLDFDLNTVIRNVFGTFTQTMYDLNNMVNQTGNEYKYKENLITFIDNHDMSRFLTVNSNKANLHQALAFILTSRGTPSIYYGTEQYMAGGNDPYNRGMMPAFDTTTTAFKEVSTLAGLRRNNAAIQYGTTTQRWINNDVYIYERKFFNDVVLVAINRNTQSSYSISGLQTALPNGNYADYLSGLLGGNGISVSNGSVASFTLAPGAVSVWQYSTSASAPQIGSVAPNMGIPGNVVTIDGKGFGTTQGTVTFGGVTATVKSWTSNRIEVYVPNMAAGLTDVKVTAGGVSSNLYSYNILSGTQTSVVFTVKSAPPTNLGDKIYLTGNIPELGNWSTDTSGAVNNAQGPLLAPNYPDWFYVFSVPAGKTIQFKFFIKRADGTIQWENGSNHVATTPTGATGNITVTWQN

SEQ ID NO: 45350 - protein, 686 aa, Effusibacillus pohliae
SSSASVKGDVIYQVIIDRFYDGDTTNNNPAKSYGLYDPTKSKWKMYWGGDLEGVRQKLPYLKQLGVTTIYLSPVLDNLDTLAGTDNTGYHGYWTRDFKQIEEHFGNWTTFDTLVNDAHQNGIKVIVDFVPNHSTPFKANDSTFAEGGALYDNGTYMGNYFDDATKGYFHHNGDISNWDDRYEAQWKNFTDPAGFSLADLSQENGTIAQYLTDAAVQLVAHGADGLRIDAVKHFNSGFSKSLADKLYQKKDIFLVGEWYGDDPGAANHLEKVRYANNSGVNVLDFDLNTVIRNVFGTFTQTMYDLNNMVNQTGNEYKYKENLITFIDNHDMSRFLTVNSNKANLHQALAFILTSRGTPSIYYGTEQYMAGGNDPYNRGMMPAFDTTTTAFKEVSTLAGLRRNNAAIQYGTTTQRWINNDVYIYERKFFNDVVLVAINRNTQSSYSISGLQTALPNGNYADYLSGLLGGNGISVSNGSVASFTLAPGAVSVWQYSTSASAPQIGSVAPNMGIPGNVVTIDGKGFGTTQGTVTFGGVTATVKSWTSNRIEVYVPNMAAGLTDVKVTAGGVSSNLYSYNILSGTQTSVVFTVKSAPPTNLGDKIYLTGNIPELGNWSTDTSGAVNNAQGPLLAPNYPDWFYVFSVPAGKTIQFKFFIKRADGTIQWENGSNHVATTPTGATGNITVTWQN

SEQ ID NO: 45351 - protein, 686 aa, Alicyclobacillus
SSSASVKGDVIYQIIIDRFYDGDTTNNNPAKSYGLYDPTKSKWKMYWGGDLEGVRQKLPYLKQLGVTTIWLSPVLDNLDTLAGTDNTGYHGYWTRDFKQIEEHFGNWTTFDTLVNDAHQNGIKVIVDFVPNHSTPFKANDSTFAEGGALYDNGTYMGNYFDDATKGYFHHNGDISNWDDRYEAQWKNFTDPAGFSLADLSQENGTIAQYLTDAAVQLVAHGADGLRIDAVKHFNSGFSKSLADKLYQKKDIFLVGEWYGDDPGAANHLEKVRYANNSGVNVLDFDLNTVIRNVFGTFTQTMYDLNNMVNQTGNEYKYKENLITFIDNHDMSRFLTVNSNKANLHQALAFILTSRGTPSIYYGTEQYMAGGNDPYNRGMMPAFDTTTTAFKEVSTLAGLRRNNAAIQYGTTTQRWINNDVYIYERKFFNDVVLVAINRNTQSSYSISGLQTALPNGNYADYLSGLLGGNGISVSNGSVASFTLAPGAVSVWQYSTSASAPQIGSVAPNMGIPGNVVTIDGKGFGTTQGTVTFGGVTCTVKSWTSNRIECYVPNMAAGLTDVKVTAGGVSSNLYSYNILSGTQTSVVFTVKSAPPTNLGDKIYLTGNIPELGNWSTDTSGAVNNAQGPLLAPNYPDWFYVFSVPAGKTIQFKFFIKRADGTIQWENGSNHVATTPTGATGNITVTWQN

SEQ ID NO: 45352 - protein, 686 aa, Geobacillus stearothermophilus
SSSASVKGDVIYQIIIDRFYDGDTTNNNPAKSYGLYDPTKSKWKMYWGGDLEGVRQKLPYLKQLGVTTIWLSPVLDNLDTLAGTDNTGFHGYWTRDFKQIEEHFGNWTTFDTLVNDAHQNGIKVIVDFVPNHSTPFKANDSTFAEGGALYNNGTYMGNYFDDATKGYFHHNGDISNWDDRYEAQWKNFTDSAGYSLADLSQENGTIAQYLTDAAVQLVAHGADGLRIDAVKHFNSGFSKSLADKLYQKKDIFLVGEWYGDGPGTANHLEKVRYANNSGVNVLDFDLNPVIRNVFGTFTQTMYDLNNMVNQTGNEYKYKENLITFIDNHDMSRFLSVNSNKANLHQALAFILTSRGTPSIYYGTEQYMAGGNDPYSRGMMPAFDTTTTAFKEVSTLAGLRRNNAAIQYGTTTQRWINNDVYIYERKFFNDVVLVAINRNTQSSYSISGLQTALPNGSYADYLSGLLGGNGISVSNGSVASFTLAPGAVSVWQYSTSASAPQIGSVAPNMGIPGNVVTIDGKGFGTTQGTVTFGGVTATVKSWTSNRIEVYVPNMAAGLTDVKVTAGGVSSNLYSYNILSGTQTSVVFTVKSAPPTNLGDKIYLTGNIPELGNWSTDTSGAVNNAQGPLLAPNYPDWFYVFSVPAGKTIQFKFFIKRADGTIQWENGSNHVATTPTGATGNITVTWQN

SEQ ID NO: 45353 - protein, 686 aa, Effusibacillus pohliae
SSSASVKGDVIYQIVIDRFYDGDTTNNNPAKSYGLYDPTKSKWKMYWGGDLEGVRQKLPYLKQLGVTTIYLSPVLDNLDTLAGTDNTGYHGYWTRDFKQIEEHFGNWTTFDTLVNDAHQNGIKVIVDFVPNHSTPFKANDSTFAEGGALYDNGTYMGNYFDDATKGYFHHNGDISNWDDRYEAQWKNFTDPAGFSLADLSQENGTIAQYLTDAAVQLVAHGADGLRIDAVKHFNSGFSKSLADKLYQKKDIFLVGEWYGDDPGAANHLEKVRYANNSGVNVLDFDLNTVIRNVFGTFTQTMYDLNNMVNQTGNEYKYKENLITFIDNHDMSRFLTVNSNKANLHQALAFILTSRGTPSIYYGTEQYMAGGNDPYNRGMMPAFDTTTTAFKEVSTLAGLRRNNAAIQYGTTTQRWINNDVYIYERKFFNDVVLVAINRNTQSSYSISGLQTALPNGNYADYLSGLLGGNGISVSNGSVASFTLAPGAVSVWQYSTSASAPQIGSVAPNMGIPGNVVTIDGKGFGTTQGTVTFGGVTATVKSWTSNRIEVYVPNMAAGLTDVKVTAGGVSSNLYSYNILSGTQTSVVFTVKSAPPTNLGDKIYLTGNIPELGNWSTDTSGAVNNAQGPLLAPNYPDWFYVFSVPAGKTIQFKFFIKRADGTIQWENGSNHVATTPTGATGNITVTWQN

SEQ ID NO: 45354 - protein, 686 aa, Effusibacillus pohliae
SSSASVKGDVIYQVIIDRFYDGDTTNNNPAKSYGLYDPTKSKWKMYWGGDLEGVRQKLPYLKQLGVTTIWLSPVLDNLDTLAGTDNTGYHGYWTRDFKQIEEHFGNWTTFDTLVNDAHQNGIKVIVDFVPNHSTPFKANDSTFAEGGALYDNGTYMGNYFDDATKGYFHHNGDISNWDDRYEAQWKNFTDPAGFSLADLSQENGTIAQYLTDAAVQLVAHGADGFRIDAVKHFNSGFSKSLADKLYQKKDIFLVGEWYGDDPGAANHLEKVRYANNSGVNVLDFDLNTVIRNVFGTFTQTMYDLNNMVNQTGNEYKYKENLITFIDNHDMSRFLTVNSNKANLHQALAFILTSRGTPSIYYGTEQYMAGGNDPYNRGMMPAFDTTTTAFKEVSTLAGLRRNNAAIQYGTTTQRWINNDVYIYERKFFNDVVLVAINRNTQSSYSISGLQTALPNGNYADYLSGLLGGNGISVSNGSVASFTLAPGAVSVWQYSTSASAPQIGSVAPNMGIPGNVVTIDGKGFGTTQGTVTFGGVTATVKSWTSNRIEVYVPNMAAGLTDVKVTAGGVSSNLYSYNILSGTQTSVVFTVKSAPPTNLGDKIYLTGNIPELGNWSTDTSGAVNNAQGPLLAPNYPDWFYVFSVPAGKTIQFKFFIKRADGTIQWENGSNHVATTPTGATGNITVTWQN

SEQ ID NO: 45355 - protein, 686 aa, Alicyclobacillus
SSSASVKGDVIYQIIIDRFYDGDTTNNNPAKSYGLYDPTKSKWKMYWGGDLEGVRQKLPYLKQLGVTTIWLSPVLDNLDTLAGTDNTGYHGYWTRDFKQIEEHFGNWTTFDTLVNDAHQNGIKVIVDFVPNHSTPFKANDSTFAEGGALYDNGTYMGNYFDDATKGYFHHNGDISNWDDRYEAQWKNFTDPAGFSLADLSQENGTIAQYLTDAAVQLVAHGADGLRIDAVKHFNSCFSKSLADKLYQKKDIFLVGEWYGDDPGAANHLEKVRYANNSGVNVLDFDLNTVIRNVFGTFTQTMYDLNNMVNQTGNEYKYKENLITFIDNHDMSRFLTVNSNKANLHQALAFILTSRGTPSIYYGTEQYMAGGNDPYNRGMMPAFDTTTTAFKEVSTLAGLRRNNAAIQYGTTTQRWINNDVYIYERKFFNDVVLVAINRNTQSSYSISGLQTALPNGNYADYLSGLLGGNGISVSNGSVASFTLAPGAVSVWQYSTSASAPQIGSVAPNMGIPGNVVTIDGKGFGTTQGTVTFGGVTATVKSWTSNRIEVYVPNMAAGLTDVKVTAGGVSSNLYSYNILSGTQTCVVFTVKSAPPTNLGDKIYLTGNIPELGNWSTDTSGAVNNAQGPLLAPNYPDWFYVFSVPAGKTIQFKFFIKRADGTIQWENGSNHVATTPTGATGNITVTWQN

SEQ ID NO: 45356 - protein, 686 aa, Alicyclobacillus
SSSASVKGDVIYQIIIDRFYDGDTTNNNPAKSYGLYDPTKSKWKMYWGGDLEGVRQKLPYLKQLGVTTIWLSPVLDNLDTLAGTDNTGYHGYWTRDFKQIEEHFGNWTTFDTLVNDAHQNGIKVIVDFVPNHSTPFKANDSTFAEGGALYDNGTYMGNYFDDATKGYFHHNGDISNWDDRYEAQWKNFTDPAGFSLADLSQENGTIAQYLTDAAVQLVAHGADGLRIDAVKHFNSGFSKSLADKLYQKKDIFLVGEWYGDDPGAANHLEKVRYANNSGVNVLDFDLNTVIRNVFGTFTQTMYDLNNMVNQTGNEYKYKENLITFIDNHDMSRFLTVNSNKANLHQALAFILTSRGTPSIYYGTEQYMAGGNDPYNRGMMPAFDTTTTAFKEVSTLAGLRRNNAAIQYGTTTQRWINNDVYIYERKFFNDVVLVAINRNTQSSYSISGLQTALPNGNYADYLSGLLGCNGISVSNGSVASFTLAPGAVCVWQYSTSASAPQIGSVAPNMGIPGNVVTIDGKGFGTTQGTVTFGGVTATVKSWTSNRIEVYVPNMAAGLTDVKVTAGGVSSNLYSYNILSGTQTSVVFTVKSAPPTNLGDKIYLTGNIPELGNWSTDTSGAVNNAQGPLLAPNYPDWFYVFSVPAGKTIQFKFFIKRADGTIQWENGSNHVATTPTGATGNITVTWQN

SEQ ID NO: 45357 - protein, 684 aa, unidentified
SSSASVKGDVIYQIIIDRFYDGDTTNNNPAKSYGLYDPTKSKWKMYWGGDLEGVRQKLPYLKQLGVTTIWLSPVLNNLDTLAGTDNTGYHGYWTRDFKQIEEHFGNWTTFDTLVNDAHQNGIKVIVDFVPNHSTPFKANDSTFAEGGALYNNGTYMGNYFDDATKGYFHHNGDISNWDDRYEAQWKNFTDPAGFSLADLSQENGTIAQYLTDAAVQLVAHGLRIDAVKHFNSGFSKSLADKLYQKKDIFLVGEWYGDDPGTANHLEKVRYANNSGVNVLDFDLNTVIRNVFGTFTQTMYDLNNMVNQTGNEYKYKENLITFIDNHDMSRFLSVNSKNKANLHQRLLSFSLRGVRPPIYYGTEQYMAGGNDPYNRGMMPAFDTTTTAFKEVSTLAGLRRNNAAIQYGTTTQRWINNDVYIYERKFFNDVVLVAINRNTQSSYSISGLQTALPNGSYADYLSGLLGGNGISVSNGSVASFTLAPGAVSVWQYSTSASAPQIGSVAPNMGIPGNVVTIDGKGFGTTQGTVTFGGVTATVKSWTSNRIEVYVPNMAAGLTDVKVTAGGVSSNLYSYNILSGTQTSVVFTVKSAPPTNLGDKIYLTGNIPELGNWSTDTSGAVNNAQGPLLAPNYPDWFYVFSVPAGKTIQFKFFIKRADGTIQWENGSNHVATTPTGATGNITVTWQN

SEQ ID NO: 45358 - protein, 686 aa, Effusibacillus pohliae
SSSASVKGDVIYQIIIDRFYDGDTTNNNPAKSYGLYDPTKSKWKMYWGGDLEGVRQKLPYLKQLGVTTIYLSPVLDNLDTLAGTDNTGYHGYWTRDFKQIEEHFGNWTTFDTLVNDAHQNGIKVIVDFVPNHSTPFKANDSTFAEGGALYDNGTYMGNYFDDATKGYFHHNGDISNWDDRYEAQWKNFTDPAGFSLADLNQENGTIAQYLTDAAVQLVAHGADGFRIDAVKHFNSGFSKSLADKLYQKKDIFLVGEWYGDDPGAANHLEKVRYANNSGVNVLDFDLNTVIRNVFGTFTQTMYDLNNMVNQTGNEYKYKENLITFIDNHDMSRFLTVNSNKANLHQALAFILTSRGTPSIYYGTEQYMAGGNDPYNRGMMPAFDTTTTAFKEVSTLAGLRRNNAAIQYGTTTQRWINNDVYIYERKFFNDVVLVAINRNTQSSYSISGLQTALPNGNYADYLSGLLGGNGISVSNGSVASFTLAPGAVSVWQYSTSASAPQIGSVAPNMGIPGNVVTIDGKGFGTTQGTVTFGGVTATVKSWTSNRIEVYVPNMAAGLTDVKVTAGGVSSNLYSYNILSGTQTSVVFTVKSAPPTNLGDKIYLTGNIPELGNWSTDTSGAVNNAQGPLLAPNYPDWFYVFSVPAGKTIQFKFFIKRADGTIQWENGSNHVATTPTGATGNITVTWQN

SEQ ID NO: 45359 - protein, 686 aa, Effusibacillus pohliae
SSSASVKGDVIYQIIIDRFYDGDTTNNNPAKSYGLYDPTKSKWKMYWGGDLEGVRQKLPYLKQLGVTTIYLSPVLDNLDTLAGTDNTGYHGYWTRDFKQIEEHFGNWTTFDTLVNDAHQNGIKVIVDFVPNHSTPFKANDSTFAEGGALYDNGTYMGNYFDDATKGYFHHNGDISNWDDRYEAQWKNFTDPAGFSLADLNQENGTIAQYLTDAAVQLVAHGADGLRIDAVKHFNSGFSKSLADKLYQKKDIFLVGEWYGDDPGAANHLEKVRYANNSGVNVLDFDLNTVIRNVFGTFTQTMYDLNNMVNQTGNEYKYKENLITFIDNHDMSRFLTVNSNKANLHQALAFILTSRGTPAIYYGTEQYMAGGNDPYNRGMMPAFDTTTTAFKEVSTLAGLRRNNAAIQYGTTTQRWINNDVYIYERKFFNDVVLVAINRNTQSSYSISGLQTALPNGNYADYLSGLLGGNGISVSNGSVASFTLAPGAVSVWQYSTSASAPQIGSVAPNMGIPGNVVTIDGKGFGTTQGTVTFGGVTATVKSWTSNRIEVYVPNMAAGLTDVKVTAGGVSSNLYSYNILSGTQTSVVFTVKSAPPTNLGDKIYLTGNIPELGNWSTDTSGAVNNAQGPLLAPNYPDWFYVFSVPAGKTIQFKFFIKRADGTIQWENGSNHVATTPTGATGNITVTWQN

SEQ ID NO: 45360 - protein, 686 aa, Effusibacillus pohliae
SSSASVKGDVIYQIIIDRFYDGDTTNNNPAKSYGLYDPTKSKWKMYWGGDLEGVRQKLPYLKQLGVTTIYLSPVLDNLDTLAGTDNTGYHGYWTRDFKQIEEHFGNWTTFDTLVNDAHQNGIKVIVDFVPNHTTPFKANDSTFAEGGALYDNGTYMGNYFDDATKGYFHHNGDISNWDDRYEAQWKNFTDPAGFSLADLSQENGTIAQYLTDAAVQLVAHGADGLRIDAVKHFNSGFSKSLADKLYQKKDIFLVGEWYGDDPGAANHLEKVRYANNSGVNVIDFDLNTVIRNVFGTFTQTMYDLNNMVNQTGNEYKYKENLITFIDNHDMSRFLTVNSNKANLHQALAFILTSRGTPSIYYGTEQYMAGGNDPYNRGMMPAFDTTTTAFKEVSTLAGLRRNNAAIQYGTTTQRWINNDVYIYERKFFNDVVLVAINRNTQSSYSISGLQTALPNGNYADYLSGLLGGNGISVSNGSVASFTLAPGAVSVWQYSTSASAPQIGSVAPNMGIPGNVVTIDGKGFGTTQGTVTFGGVTATVKSWTSNRIEVYVPNMAAGLTDVKVTAGGVSSNLYSYNILSGTQTSVVFTVKSAPPTNLGDKIYLTGNIPELGNWSTDTSGAVNNAQGPLLAPNYPDWFYVFSVPAGKTIQFKFFIKRADGTIQWENGSNHVATTPTGATGNITVTWQN

SEQ ID NO: 45361 - protein, 686 aa, Effusibacillus pohliae
SSSASVKGDVIYQIVIDRFYDGDTTNNNPAKSYGLYDPTKSKWKMYWGGDLEGVRQKLPYLKQLGVTTIWLSPVLDNLDTLAGTDNTGYHGYWTRDFKQIEEHFGNWTTFDTLVNDAHQNGIKIIVDFVPNHSTPFKANDSTFAEGGALYDNGTYMGNYFDDATKGYFHHNGDISNWDDRYEAQWKNFTDPAGFSLADLSQENGTIAQYLTDAAVQLVAHGADGFRIDAVKHFNSGFSKSLADKLYQKKDIFLVGEWYGDDPGAANHLEKVRYANNSGVNVLDFDLNTVIRNVFGTFTQTMYDLNNMVNQTGNEYKYKENLITFIDNHDMSRFLTVNSNKANLHQALAFILTSRGTPSIYYGTEQYMAGGNDPYNRGMMPAFDTTTTAFKEVSTLAGLRRNNAAIQYGTTTQRWINNDVYIYERKFFNDVVLVAINRNTQSSYSISGLQTALPNGNYADYLSGLLGGNGISVSNGSVASFTLAPGAVSVWQYSTSASAPQIGSVAPNMGIPGNVVTIDGKGFGTTQGTVTFGGVTATVKSWTSNRIEVYVPNMAAGLTDVKVTAGGVSSNLYSYNILSGTQTSVVFTVKSAPPTNLGDKIYLTGNIPELGNWSTDTSGAVNNAQGPLLAPNYPDWFYVFSVPAGKTIQFKFFIKRADGTIQWENGSNHVATTPTGATGNITVTWQN

SEQ ID NO: 45362 - protein, 686 aa, Effusibacillus pohliae
SSSASVKGDVIYQIIIDRFYDGDTTNNNPAKSYGLYDPTKSKWKMYWGGDLEGVRQKLPYLKQLGVTTIYLSPVLDNLDTLAGTDNTGYHGYWTRDFKQIEEHFGNWTTFDTLVNDAHQNGIKVIVDFVPNHSTPFKANDSTFAEGGALYDNGTYMGNYFDDATKGYFHHNGDISNWDDRYEAQWKNFTDPAGFSLADLSQENGTIAQYLTDAAVQLVAHGADGLRIDAVKHFNSGFSKSLADKLYQKKDIFLVGEWYGDDPGAANHLEKVRYANNSGVNVIDFDLNTVIRNVFGTFTQTMYDLNNMVNQTGNEYKYKENLITFIDNHDMSRFLTVNSNKANLHQALAFILTSRGTPAIYYGTEQYMAGGNDPYNRGMMPAFDTTTTAFKEVSTLAGLRRNNAAIQYGTTTQRWINNDVYIYERKFFNDVVLVAINRNTQSSYSISGLQTALPNGNYADYLSGLLGGNGISVSNGSVASFTLAPGAVSVWQYSTSASAPQIGSVAPNMGIPGNVVTIDGKGFGTTQGTVTFGGVTATVKSWTSNRIEVYVPNMAAGLTDVKVTAGGVSSNLYSYNILSGTQTSVVFTVKSAPPTNLGDKIYLTGNIPELGNWSTDTSGAVNNAQGPLLAPNYPDWFYVFSVPAGKTIQFKFFIKRADGTIQWENGSNHVATTPTGATGNITVTWQN

SEQ ID NO: 45363 - protein, 686 aa, Effusibacillus pohliae
SSSASVKGDVIYQVIIDRFYDGDTTNNNPAKSYGLYDPTKSKWKMYWGGDLEGVRQKLPYLKQLGVTTIWLSPVLDNLDTLAGTDNTGYHGYWTRDFKQIEEHFGNWTTFDTLVNDAHQNGIKVIVDFVPNHSTPFKANDSTFAEGGALYDNGTYMGNYFDDATKGYFHHNGDISNWDDRYEAQWKNFTDPAGFSLADLNQENGTIAQYLTDAAVQLVAHGADGFRIDAVKHFNSGFSKSLADKLYQKKDIFLVGEWYGDDPGAANHLEKVRYANNSGVNVLDFDLNTVIRNVFGTFTQTMYDLNNMVNQTGNEYKYKENLITFIDNHDMSRFLTVNSNKANLHQALAFILTSRGTPSIYYGTEQYMAGGNDPYNRGMMPAFDTTTTAFKEVSTLAGLRRNNAAIQYGTTTQRWINNDVYIYERKFFNDVVLVAINRNTQSSYSISGLQTALPNGNYADYLSGLLGGNGISVSNGSVASFTLAPGAVSVWQYSTSASAPQIGSVAPNMGIPGNVVTIDGKGFGTTQGTVTFGGVTATVKSWTSNRIEVYVPNMAAGLTDVKVTAGGVSSNLYSYNILSGTQTSVVFTVKSAPPTNLGDKIYLTGNIPELGNWSTDTSGAVNNAQGPLLAPNYPDWFYVFSVPAGKTIQFKFFIKRADGTIQWENGSNHVATTPTGATGNITVTWQN

SEQ ID NO: 45364 - protein, 686 aa, Effusibacillus pohliae
SSSASVKGDVIYQIIIDRFYDGDTTNNNPAKSYGLYDPTKSKWKMYWGGDLEGVRQKLPYLKQLGVTTIYLSPVLDNLDTLAGTDNTGYHGYWTRDFKQIEEHFGNWTTFDTLVNDAHQNGIKVIVDFVPNHSTPFKANDSTFAEGGALYDNGTYMGNYFDDATKGYFHHNGDISNWDDRYEAQWKNFTDPAGFSLADLSQENGTIAQYLTDAAVQLVAHGADGFRIDAVKHFNSGFSKSLADKLYQKKDIFLVGEWYGDDPGAANHLEKVRYANNSGVNVFDFDLNTVIRNVFGTFTQTMYDLNNMVNQTGNEYKYKENLITFIDNHDMSRFLTVNSNKANLHQALAFILTSRGTPSIYYGTEQYMAGGNDPYNRGMMPAFDTTTTAFKEVSTLAGLRRNNAAIQYGTTTQRWINNDVYIYERKFFNDVVLVAINRNTQSSYSISGLQTALPNGNYADYLSGLLGGNGISVSNGSVASFTLAPGAVSVWQYSTSASAPQIGSVAPNMGIPGNVVTIDGKGFGTTQGTVTFGGVTATVKSWTSNRIEVYVPNMAAGLTDVKVTAGGVSSNLYSYNILSGTQTSVVFTVKSAPPTNLGDKIYLTGNIPELGNWSTDTSGAVNNAQGPLLAPNYPDWFYVFSVPAGKTIQFKFFIKRADGTIQWENGSNHVATTPTGATGNITVTWQN

SEQ ID NO: 45365 - protein, 686 aa, Effusibacillus pohliae
SSSASVKGDVIYQIIIDRFYDGDTTNNNPAKSYGLYDPTKSKWKMYWGGDLEGVRQKLPYLKQLGVTTIYLSPVLDNLDTLAGTDNTGYHGYWTRDFKQIEEHFGNWTTFDTLVNDAHQNGIKVIVDFVPNHSTPFKANDSTFAEGGALYDNGTYMGNYFDDATKGYFHHNGDISNWDDRYEAQWKNFTDPAGFSLADLSQENGTIAQYLTDAAVQLVAHGADGLRIDAVKHFNSGFSKSLADKLYQKKDIFLVGEWYGDDPGAANHLEKVRYANNSGVNVFDFDLNTVIRNVFGTFTQTMYDLNNMVNQTGNEYKYKENLITFIDNHDMSRFLTVNSNKANLHQALAFILTSRGTPAIYYGTEQYMAGGNDPYNRGMMPAFDTTTTAFKEVSTLAGLRRNNAAIQYGTTTQRWINNDVYIYERKFFNDVVLVAINRNTQSSYSISGLQTALPNGNYADYLSGLLGGNGISVSNGSVASFTLAPGAVSVWQYSTSASAPQIGSVAPNMGIPGNVVTIDGKGFGTTQGTVTFGGVTATVKSWTSNRIEVYVPNMAAGLTDVKVTAGGVSSNLYSYNILSGTQTSVVFTVKSAPPTNLGDKIYLTGNIPELGNWSTDTSGAVNNAQGPLLAPNYPDWFYVFSVPAGKTIQFKFFIKRADGTIQWENGSNHVATTPTGATGNITVTWQN

SEQ ID NO: 45366 - protein, 686 aa, Effusibacillus pohliae
SSSASVKGDVIYQIIIDRFYDGDTTNNNPAKSYGLYDPTKSKWKMYWGGDLEGVRQKLPYLKQLGVTTIYLSPVLDNLDTLAGTDNTGYHGYWTRDFKQIEEHFGNWTTFDTLVNDAHQNGIKVIVDFVPNHSTPFKANDSTFAEGGALYDNGTYMGNYFDDATKGYFHHNGDISNWDDRYEAQWKNFTDPAGFSLADLSQENGTIAQYLTDAAVQLVAHGADGFRIDAVKHFNSGFSKSLADKLYQKKDIFLVGEWYGDDPGAANHLEKVRYANNSGVNVIDFDLNTVIRNVFGTFTQTMYDLNNMVNQTGNEYKYKENLITFIDNHDMSRFLTVNSNKANLHQALAFILTSRGTPSIYYGTEQYMAGGNDPYNRGMMPAFDTTTTAFKEVSTLAGLRRNNAAIQYGTTTQRWINNDVYIYERKFFNDVVLVAINRNTQSSYSISGLQTALPNGNYADYLSGLLGGNGISVSNGSVASFTLAPGAVSVWQYSTSASAPQIGSVAPNMGIPGNVVTIDGKGFGTTQGTVTFGGVTATVKSWTSNRIEVYVPNMAAGLTDVKVTAGGVSSNLYSYNILSGTQTSVVFTVKSAPPTNLGDKIYLTGNIPELGNWSTDTSGAVNNAQGPLLAPNYPDWFYVFSVPAGKTIQFKFFIKRADGTIQWENGSNHVATTPTGATGNITVTWQN

SEQ ID NO: 45367 - protein, 686 aa, Effusibacillus pohliae
SSSASVKGDVIYQIIIDRFYDGDTTNNNPAKSYGLYDPTKSKWKMYWGGDLEGVRQKLPYLKQLGVTTIWLSPVLDNLDTLAGTDNTGYHGYWTRDFKQIEEHFGNWTTFDTLVNDAHQNGIKVIVDFVPNHSTPFKANDSTFAEGGALYDNGTYMGNYFDDATKGYFHHNGDISNWDDRYEAQWKNFTDPAGFSLADLNQENGTIAQYLTDAAVQLVAHGADGFRIDAVKHFNSGFSKSLADKLYQKKDIFLVGEWYGDDPGAANHLEKVRYANNSGVNVLDFDLNTVIRNVFGTFTQTMYDLNNMVNQTGNEYKYKENLITFIDNHDMSRFLTVNSNKANLHQALAFILTSRGTPAIYYGTEQYMAGGNDPYNRGMMPAFDTTTTAFKEVSTLAGLRRNNAAIQYGTTTQRWINNDVYIYERKFFNDVVLVAINRNTQSSYSISGLQTALPNGNYADYLSGLLGGNGISVSNGSVASFTLAPGAVSVWQYSTSASAPQIGSVAPNMGIPGNVVTIDGKGFGTTQGTVTFGGVTATVKSWTSNRIEVYVPNMAAGLTDVKVTAGGVSSNLYSYNILSGTQTSVVFTVKSAPPTNLGDKIYLTGNIPELGNWSTDTSGAVNNAQGPLLAPNYPDWFYVFSVPAGKTIQFKFFIKRADGTIQWENGSNHVATTPTGATGNITVTWQN

SEQ ID NO: 45368 - protein, 686 aa, Effusibacillus pohliae
SSSASVKGDVIYQIIIDRFYDGDTTNNNPAKSYGLYDPTKSKWKMYWGGDLEGVRQKLPYLKQLGVTTIYLSPVLDNLDTLAGTDNTGYHGYWTRDFKQIEEHFGNWTTFDTLVNDAHQNGIKVIVDFVPNHTTPFKANDSTFAEGGALYDNGTYMGNYFDDATKGYFHHNGDISNWDDRYEAQWKNFTDPAGFSLADLSQENGTIAQYLTDAAVQLVAHGADGLRIDAVKHFNSGFSKSLADKLYQKKDIFLVGEWYGDDPGAANHLEKVRYANNSGVNVFDFDLNTVIRNVFGTFTQTMYDLNNMVNQTGNEYKYKENLITFIDNHDMSRFLTVNSNKANLHQALAFILTSRGTPSIYYGTEQYMAGGNDPYNRGMMPAFDTTTTAFKEVSTLAGLRRNNAAIQYGTTTQRWINNDVYIYERKFFNDVVLVAINRNTQSSYSISGLQTALPNGNYADYLSGLLGGNGISVSNGSVASFTLAPGAVSVWQYSTSASAPQIGSVAPNMGIPGNVVTIDGKGFGTTQGTVTFGGVTATVKSWTSNRIEVYVPNMAAGLTDVKVTAGGVSSNLYSYNILSGTQTSVVFTVKSAPPTNLGDKIYLTGNIPELGNWSTDTSGAVNNAQGPLLAPNYPDWFYVFSVPAGKTIQFKFFIKRADGTIQWENGSNHVATTPTGATGNITVTWQN

SEQ ID NO: 45369 - protein, 686 aa, Effusibacillus pohliae
SSSASVKGDVIYQIVIDRFYDGDTTNNNPAKSYGLYDPTKSKWKMYWGGDLEGVRQKLPYLKQLGVTTIWLSPVLDNLDTLAGTDNTGYHGYWTRDFKQIEEHFGNWTTFDTLVNDAHQNGIKVIVDFVPNHSTPFKANDSTFAEGGALYDNGTYMGNYFDDATKGYFHHNGDISNWDDRYEAQWKNFTDPAGFSLADLNQENGTIAQYLTDAAVQLVAHGADGFRIDAVKHFNSGFSKSLADKLYQKKDIFLVGEWYGDDPGAANHLEKVRYANNSGVNVLDFDLNTVIRNVFGTFTQTMYDLNNMVNQTGNEYKYKENLITFIDNHDMSRFLTVNSNKANLHQALAFILTSRGTPSIYYGTEQYMAGGNDPYNRGMMPAFDTTTTAFKEVSTLAGLRRNNAAIQYGTTTQRWINNDVYIYERKFFNDVVLVAINRNTQSSYSISGLQTALPNGNYADYLSGLLGGNGISVSNGSVASFTLAPGAVSVWQYSTSASAPQIGSVAPNMGIPGNVVTIDGKGFGTTQGTVTFGGVTATVKSWTSNRIEVYVPNMAAGLTDVKVTAGGVSSNLYSYNILSGTQTSVVFTVKSAPPTNLGDKIYLTGNIPELGNWSTDTSGAVNNAQGPLLAPNYPDWFYVFSVPAGKTIQFKFFIKRADGTIQWENGSNHVATTPTGATGNITVTWQN

SEQ ID NO: 45370 - protein, 686 aa, Effusibacillus pohliae
SSSASVKGDVIYQIIIDRFYDGDTTNNNPAKSYGLYDPTKSKWKMYWGGDLEGVRQKLPYLKQLGVTTIYLSPVLDNLDTLAGTDNTGYHGYWTRDFKQIEEHFGNWTTFDTLVNDAHQNGIKIIVDFVPNHSTPFKANDSTFAEGGALYDNGTYMGNYFDDATKGYFHHNGDISNWDDRYEAQWKNFTDPAGFSLADLSQENGTIAQYLTDAAVQLVAHGADGLRIDAVKHFNSGFSKSLADKLYQKKDIFLVGEWYGDDPGAANHLEKVRYANNSGVNVIDFDLNTVIRNVFGTFTQTMYDLNNMVNQTGNEYKYKENLITFIDNHDMSRFLTVNSNKANLHQALAFILTSRGTPSIYYGTEQYMAGGNDPYNRGMMPAFDTTTTAFKEVSTLAGLRRNNAAIQYGTTTQRWINNDVYIYERKFFNDVVLVAINRNTQSSYSISGLQTALPNGNYADYLSGLLGGNGISVSNGSVASFTLAPGAVSVWQYSTSASAPQIGSVAPNMGIPGNVVTIDGKGFGTTQGTVTFGGVTATVKSWTSNRIEVYVPNMAAGLTDVKVTAGGVSSNLYSYNILSGTQTSVVFTVKSAPPTNLGDKIYLTGNIPELGNWSTDTSGAVNNAQGPLLAPNYPDWFYVFSVPAGKTIQFKFFIKRADGTIQWENGSNHVATTPTGATGNITVTWQN

SEQ ID NO: 45371 - protein, 686 aa, Effusibacillus pohliae
SSSASVKGDVIYQIIIDRFYDGDTTNNNPAKSYGLYDPTKSKWKMYWGGDLEGVRQKLPYLKQLGVTTIYLSPVLDNLDTLAGTDNTGYHGYWTRDFKQIEEHFGNWTTFDTLVNDAHQNGIKIIVDFVPNHSTPFKANDSTFAEGGALYDNGTYMGNYFDDATKGYFHHNGDISNWDDRYEAQWKNFTDPAGFSLADLNQENGTIAQYLTDAAVQLVAHGADGLRIDAVKHFNSGFSKSLADKLYQKKDIFLVGEWYGDDPGAANHLEKVRYANNSGVNVLDFDLNTVIRNVFGTFTQTMYDLNNMVNQTGNEYKYKENLITFIDNHDMSRFLTVNSNKANLHQALAFILTSRGTPSIYYGTEQYMAGGNDPYNRGMMPAFDTTTTAFKEVSTLAGLRRNNAAIQYGTTTQRWINNDVYIYERKFFNDVVLVAINRNTQSSYSISGLQTALPNGNYADYLSGLLGGNGISVSNGSVASFTLAPGAVSVWQYSTSASAPQIGSVAPNMGIPGNVVTIDGKGFGTTQGTVTFGGVTATVKSWTSNRIEVYVPNMAAGLTDVKVTAGGVSSNLYSYNILSGTQTSVVFTVKSAPPTNLGDKIYLTGNIPELGNWSTDTSGAVNNAQGPLLAPNYPDWFYVFSVPAGKTIQFKFFIKRADGTIQWENGSNHVATTPTGATGNITVTWQN

SEQ ID NO: 45372 - protein, 686 aa, Effusibacillus pohliae
SSSASVKGDVIYQIIIDRFYDGDTTNNNPAKSYGLYDPTKSKWKMYWGGDLEGVRQKLPYLKQLGVTTIWLSPVLDNLDTLAGTDNTGYHGYWTRDFKQIEEHFGNWTTFDTLVNDAHQNGIKIIVDFVPNHSTPFKANDSTFAEGGALYDNGTYMGNYFDDATKGYFHHNGDISNWDDRYEAQWKNFTDPAGFSLADLNQENGTIAQYLTDAAVQLVAHGADGFRIDAVKHFNSGFSKSLADKLYQKKDIFLVGEWYGDDPGAANHLEKVRYANNSGVNVLDFDLNTVIRNVFGTFTQTMYDLNNMVNQTGNEYKYKENLITFIDNHDMSRFLTVNSNKANLHQALAFILTSRGTPSIYYGTEQYMAGGNDPYNRGMMPAFDTTTTAFKEVSTLAGLRRNNAAIQYGTTTQRWINNDVYIYERKFFNDVVLVAINRNTQSSYSISGLQTALPNGNYADYLSGLLGGNGISVSNGSVASFTLAPGAVSVWQYSTSASAPQIGSVAPNMGIPGNVVTIDGKGFGTTQGTVTFGGVTATVKSWTSNRIEVYVPNMAAGLTDVKVTAGGVSSNLYSYNILSGTQTSVVFTVKSAPPTNLGDKIYLTGNIPELGNWSTDTSGAVNNAQGPLLAPNYPDWFYVFSVPAGKTIQFKFFIKRADGTIQWENGSNHVATTPTGATGNITVTWQN

SEQ ID NO: 45373 - protein, 686 aa, Effusibacillus pohliae
SSSASVKGDVIYQIIIDRFYDGDTTNNNPAKSYGLYDPTKSKWKMYWGGDLEGVRQKLPYLKQLGVTTIYLSPVLDNLDTLAGTDNTGYHGYWTRDFKQIEEHFGNWTTFDTLVNDAHQNGIKVIVDFVPNHTTPFKANDSTFAEGGALYDNGTYMGNYFDDATKGYFHHNGDISNWDDRYEAQWKNFTDPAGFSLADLSQENGTIAQYLTDAAVQLVAHGADGLRIDAVKHFNSGFSKSLADKLYQKKDIFLVGEWYGDDPGAANHLEKVRYANNSGVNVLDFDLNTVIRNVFGTFTQTMYDLNNMVNQTGNEYKYKENLITFIDNHDMSRFLTVNSNKANLHQALAFILTSRGTPAIYYGTEQYMAGGNDPYNRGMMPAFDTTTTAFKEVSTLAGLRRNNAAIQYGTTTQRWINNDVYIYERKFFNDVVLVAINRNTQSSYSISGLQTALPNGNYADYLSGLLGGNGISVSNGSVASFTLAPGAVSVWQYSTSASAPQIGSVAPNMGIPGNVVTIDGKGFGTTQGTVTFGGVTATVKSWTSNRIEVYVPNMAAGLTDVKVTAGGVSSNLYSYNILSGTQTSVVFTVKSAPPTNLGDKIYLTGNIPELGNWSTDTSGAVNNAQGPLLAPNYPDWFYVFSVPAGKTIQFKFFIKRADGTIQWENGSNHVATTPTGATGNITVTWQN

SEQ ID NO: 45374 - protein, 686 aa, Effusibacillus pohliae
SSSASVKGDVIYQIIIDRFYDGDTTNNNPAKSYGLYDPTKSKWKMYWGGDLEGVRQKLPYLKQLGVTTIYLSPVLDNLDTLAGTDNTGYHGYWTRDFKQIEEHFGNWTTFDTLVNDAHQNGIKIIVDFVPNHSTPFKANDSTFAEGGALYDNGTYMGNYFDDATKGYFHHNGDISNWDDRYEAQWKNFTDPAGFSLADLSQENGTIAQYLTDAAVQLVAHGADGLRIDAVKHFNSGFSKSLADKLYQKKDIFLVGEWYGDDPGAANHLEKVRYANNSGVNVFDFDLNTVIRNVFGTFTQTMYDLNNMVNQTGNEYKYKENLITFIDNHDMSRFLTVNSNKANLHQALAFILTSRGTPSIYYGTEQYMAGGNDPYNRGMMPAFDTTTTAFKEVSTLAGLRRNNAAIQYGTTTQRWINNDVYIYERKFFNDVVLVAINRNTQSSYSISGLQTALPNGNYADYLSGLLGGNGISVSNGSVASFTLAPGAVSVWQYSTSASAPQIGSVAPNMGIPGNVVTIDGKGFGTTQGTVTFGGVTATVKSWTSNRIEVYVPNMAAGLTDVKVTAGGVSSNLYSYNILSGTQTSVVFTVKSAPPTNLGDKIYLTGNIPELGNWSTDTSGAVNNAQGPLLAPNYPDWFYVFSVPAGKTIQFKFFIKRADGTIQWENGSNHVATTPTGATGNITVTWQN

SEQ ID NO: 45375 - protein, 686 aa, Effusibacillus pohliae
SSSASVKGDVIYQIIIDRFYDGDTTNNNPAKSYGLYDPTKSKWKMYWGGDLEGVRQKLPYLKQLGVTTIYLSPVLDNLDTLAGTDNTGYHGYWTRDFKQIEEHFGNWTTFDTLVNDAHQNGIKVIVDFVPNHTTPFKANDSTFAEGGALYDNGTYMGNYFDDATKGYFHHNGDISNWDDRYEAQWKNFTDPAGFSLADLNQENGTIAQYLTDAAVQLVAHGADGLRIDAVKHFNSGFSKSLADKLYQKKDIFLVGEWYGDDPGAANHLEKVRYANNSGVNVLDFDLNTVIRNVFGTFTQTMYDLNNMVNQTGNEYKYKENLITFIDNHDMSRFLTVNSNKANLHQALAFILTSRGTPSIYYGTEQYMAGGNDPYNRGMMPAFDTTTTAFKEVSTLAGLRRNNAAIQYGTTTQRWINNDVYIYERKFFNDVVLVAINRNTQSSYSISGLQTALPNGNYADYLSGLLGGNGISVSNGSVASFTLAPGAVSVWQYSTSASAPQIGSVAPNMGIPGNVVTIDGKGFGTTQGTVTFGGVTATVKSWTSNRIEVYVPNMAAGLTDVKVTAGGVSSNLYSYNILSGTQTSVVFTVKSAPPTNLGDKIYLTGNIPELGNWSTDTSGAVNNAQGPLLAPNYPDWFYVFSVPAGKTIQFKFFIKRADGTIQWENGSNHVATTPTGATGNITVTWQN

SEQ ID NO: 45376 - protein, 686 aa, Effusibacillus pohliae
SSSASVKGDVIYQIIIDRFYDGDTTNNNPAKSYGLYDPTKSKWKMYWGGDLEGVRQKLPYLKQLGVTTIYLSPVLDNLDTLAGTDNTGYHGYWTRDFKQIEEHFGNWTTFDTLVNDAHQNGIKVIVDFVPNHTTPFKANDSTFAEGGALYDNGTYMGNYFDDATKGYFHHNGDISNWDDRYEAQWKNFTDPAGFSLADLSQENGTIAQYLTDAAVQLVAHGADGFRIDAVKHFNSGFSKSLADKLYQKKDIFLVGEWYGDDPGAANHLEKVRYANNSGVNVLDFDLNTVIRNVFGTFTQTMYDLNNMVNQTGNEYKYKENLITFIDNHDMSRFLTVNSNKANLHQALAFILTSRGTPSIYYGTEQYMAGGNDPYNRGMMPAFDTTTTAFKEVSTLAGLRRNNAAIQYGTTTQRWINNDVYIYERKFFNDVVLVAINRNTQSSYSISGLQTALPNGNYADYLSGLLGGNGISVSNGSVASFTLAPGAVSVWQYSTSASAPQIGSVAPNMGIPGNVVTIDGKGFGTTQGTVTFGGVTATVKSWTSNRIEVYVPNMAAGLTDVKVTAGGVSSNLYSYNILSGTQTSVVFTVKSAPPTNLGDKIYLTGNIPELGNWSTDTSGAVNNAQGPLLAPNYPDWFYVFSVPAGKTIQFKFFIKRADGTIQWENGSNHVATTPTGATGNITVTWQN

SEQ ID NO: 45377 - protein, 686 aa, Effusibacillus pohliae
SSSASVKGDVIYQVIIDRFYDGDTTNNNPAKSYGLYDPTKSKWKMYWGGDLEGVRQKLPYLKQLGVTTIWLSPVLDNLDTLAGTDNTGYHGYWTRDFKQIEEHFGNWTTFDTLVNDAHQNGIKVIVDFVPNHSTPFKANDSTFAEGGALYDNGTYMGNYFDDATKGYFHHNGDISNWDDRYEAQWKNFTDPAGFSLADLSQENGTIAQYLTDAAVQLVAHGADGFRIDAVKHFNSGFSKSLADKLYQKKDIFLVGEWYGDDPGAANHLEKVRYANNSGVNVLDFDLNTVIRNVFGTFTQTMYDLNNMVNQTGNEYKYKENLITFIDNHDMSRFLTVNSNKANLHQALAFILTSRGTPAIYYGTEQYMAGGNDPYNRGMMPAFDTTTTAFKEVSTLAGLRRNNAAIQYGTTTQRWINNDVYIYERKFFNDVVLVAINRNTQSSYSISGLQTALPNGNYADYLSGLLGGNGISVSNGSVASFTLAPGAVSVWQYSTSASAPQIGSVAPNMGIPGNVVTIDGKGFGTTQGTVTFGGVTATVKSWTSNRIEVYVPNMAAGLTDVKVTAGGVSSNLYSYNILSGTQTSVVFTVKSAPPTNLGDKIYLTGNIPELGNWSTDTSGAVNNAQGPLLAPNYPDWFYVFSVPAGKTIQFKFFIKRADGTIQWENGSNHVATTPTGATGNITVTWQN

SEQ ID NO: 45378 - protein, 686 aa, Effusibacillus pohliae
SSSASVKGDVIYQIIIDRFYDGDTTNNNPAKSYGLYDPTKSKWKMYWGGDLEGVRQKLPYLKQLGVTTIYLSPVLDNLDTLAGTDNTGYHGYWTRDFKQIEEHFGNWTTFDTLVNDAHQNGIKIIVDFVPNHTTPFKANDSTFAEGGALYDNGTYMGNYFDDATKGYFHHNGDISNWDDRYEAQWKNFTDPAGFSLADLSQENGTIAQYLTDAAVQLVAHGADGLRIDAVKHFNSGFSKSLADKLYQKKDIFLVGEWYGDDPGAANHLEKVRYANNSGVNVLDFDLNTVIRNVFGTFTQTMYDLNNMVNQTGNEYKYKENLITFIDNHDMSRFLTVNSNKANLHQALAFILTSRGTPSIYYGTEQYMAGGNDPYNRGMMPAFDTTTTAFKEVSTLAGLRRNNAAIQYGTTTQRWINNDVYIYERKFFNDVVLVAINRNTQSSYSISGLQTALPNGNYADYLSGLLGGNGISVSNGSVASFTLAPGAVSVWQYSTSASAPQIGSVAPNMGIPGNVVTIDGKGFGTTQGTVTFGGVTATVKSWTSNRIEVYVPNMAAGLTDVKVTAGGVSSNLYSYNILSGTQTSVVFTVKSAPPTNLGDKIYLTGNIPELGNWSTDTSGAVNNAQGPLLAPNYPDWFYVFSVPAGKTIQFKFFIKRADGTIQWENGSNHVATTPTGATGNITVTWQN

SEQ ID NO: 45379 - protein, 684 aa, Geobacillus stearothermophilus
SSSASVKGDVIYQIIIDRFYDGDTTNNNPAKSYGLYDPTKSKWKMYWGGDLEGVRQKLPYLKQLGVTTIWLSPVLNNLDTLAGTDNTGYHGYWTRDFKQIEEHFGNWTTFDTLVNDAHQNGIKVIVDFVPNHSTPFKANDSTFAEGGALYNNGTYMGNYFDDATEGYFHHNGDISNWDDRYEAQWKNFTDPAGFSLADLSQENGTIAQYLTDAAVQLVAHGLRIDAVKHFNSGFSKSLADKLYQKKDIFLVGEWYGDDPGTANHLEKVRYANNSGVNVLDFDLNTVIRNVFGTFTQTMYDLNNMVNQTGNEYKYKENLITFIDNHDMSRFLSVNSKNKANLHQRLLSFSLRGVRPPIYYGTEQYMAGGNDPYNRGMMPAFDTTTTAFKEVSTLAGLRRNNAAIQYGTTTQRWINNDVYIYERKFFNDVVLVAINRNTQSSYSISGLQTALPNGSYADYLSGLLGGNGISVSNGSVASFTLAPGAVSVWQYSTSASAPQIGSVAPNMGIPGNVVTIDGKGFGTTQGTVTFGGVTATVKSWTSNRIEVYVPNMAAGLTDVKVTAGGVSSNLYSYNILSGTQTSVVFTVKSAPPTNLGDKIYLTGNIPELGNWSTDTSGAVNNAQGPLLAPNYPDWFYVFSVPAGKTIQFKFFIKRADGTIQWENGSNHVATTPTGATGNITVTWQN

SEQ ID NO: 45380 - protein, 684 aa, Synthetic construct
SSSASVKGDVIYQIIIDRFYDGDTTNNNPAKSYGLYDPTKSKWKMYWGGDLEGVRQKLPYLKQLGVTTIWLSPVLNNLDTLAGTDNTGYHGYWTRDFKQIEEHFGNWTTFDTLVNDAHQNGIKVIVDFVPNHSTPFKANDSTFAEGGALYNNGTYMGNYFDDATKGYFHHNGDISNWDDRYEAQWKNFTDPAGFSLADLSQENGTIAQYLTDAAVQLVAHGLRIDAVKHFNSGFSKSLADKLYQKKDIFLVGEWYGTDPGTANHLEKVRYANNSGVNVLDFDLNTVIRNVFGTFTQTMYDLNNMVNQTGNEYKYKENLITFIDNHDMSRFLSVNSKNKANLHQRLLSFSLRGVRPPIYYGTEQYMAGGNDPYNRGMMPAFDTTTTAFKEVSTLAGLRRNNAAIQYGTTTQRWINNDVYIYERKFFNDVVLVAINRNTQSSYSISGLQTALPNGSYADYLSGLLGGNGISVSNGSVASFTLAPGAVSVWQYSTSASAPQIGSVAPNMGIPGNVVTIDGKGFGTTQGTVTFGGVTATVKSWTSNRIEVYVPNMAAGLTDVKVTAGGVSSNLYSYNILSGTQTSVVFTVKSAPPTNLGDKIYLTGNIPELGNWSTDTSGAVNNAQGPLLAPNYPDWFYVFSVPAGKTIQFKFFIKRADGTIQWENGSNHVATTPTGATGNITVTWQN

SEQ ID NO: 45381 - protein, 684 aa, Geobacillus stearothermophilus
SSSASVKGDVIYQIIIDRFYDGDTTNNNPAKSYGLYDPTKSKWKMYWGGDLEGVRQKLPYLKQLGVTTIWLSPVLNNLDTLAGTDNTGYHGYWTRDFKQIEEHFGNWTTFDTLVNDAHQNGIKVIVDFVPNHSTPFKANDSTFAEGGALYNNGTYMGNYFDDATYGYFHHNGDISNWDDRYEAQWKNFTDPAGFSLADLSQENGTIAQYLTDAAVQLVAHGLRIDAVKHFNSGFSKSLADKLYQKKDIFLVGEWYGDDPGTANHLEKVRYANNSGVNVLDFDLNTVIRNVFGTFTQTMYDLNNMVNQTGNEYKYKENLITFIDNHDMSRFLSVNSKNKANLHQRLLSFSLRGVRPPIYYGTEQYMAGGNDPYNRGMMPAFDTTTTAFKEVSTLAGLRRNNAAIQYGTTTQRWINNDVYIYERKFFNDVVLVAINRNTQSSYSISGLQTALPNGSYADYLSGLLGGNGISVSNGSVASFTLAPGAVSVWQYSTSASAPQIGSVAPNMGIPGNVVTIDGKGFGTTQGTVTFGGVTATVKSWTSNRIEVYVPNMAAGLTDVKVTAGGVSSNLYSYNILSGTQTSVVFTVKSAPPTNLGDKIYLTGNIPELGNWSTDTSGAVNNAQGPLLAPNYPDWFYVFSVPAGKTIQFKFFIKRADGTIQWENGSNHVATTPTGATGNITVTWQN

SEQ ID NO: 45382 - protein, 684 aa, unidentified
SSSASVKGDVIYQIIIDRFYDGDTTNNNPAKSYGLYDPTKSKWKMYWGGDLEGVRQKLPYLKQLGVTTIWLSPVLNNLDTLAGTDNTGYHGYWTRDFKQIEEHFGNWTTFDTLVNDAHQNGIKVIVDFVPNHSTPFKANDSTFAEGGALYNNGTYMGNYFDDATKGYFHHNGDISNFDDRYEAQWKNFTDPAGFSLADLSQENGTIAQYLTDAAVQLVAHGLRIDAVKHFNSGFSKSLADKLYQKKDIFLVGEWYGDDPGTANHLEKVRYANNSGVNVLDFDLNTVIRNVFGTFTQTMYDLNNMVNQTGNEYKYKENLITFIDNHDMSRFLSVNSKNKANLHQRLLSFSLRGVRPPIYYGTEQYMAGGNDPYNRGMMPAFDTTTTAFKEVSTLAGLRRNNAAIQYGTTTQRWINNDVYIYERKFFNDVVLVAINRNTQSSYSISGLQTALPNGSYADYLSGLLGGNGISVSNGSVASFTLAPGAVSVWQYSTSASAPQIGSVAPNMGIPGNVVTIDGKGFGTTQGTVTFGGVTATVKSWTSNRIEVYVPNMAAGLTDVKVTAGGVSSNLYSYNILSGTQTSVVFTVKSAPPTNLGDKIYLTGNIPELGNWSTDTSGAVNNAQGPLLAPNYPDWFYVFSVPAGKTIQFKFFIKRADGTIQWENGSNHVATTPTGATGNITVTWQN

SEQ ID NO: 45383 - protein, 684 aa, Geobacillus stearothermophilus
SSSASVKGDVIYQIIIDRFYDGDTTNNNPAKSYGLYDPTKSKWKMYWGGDLEGVRQKLPYLKQLGVTTIWLSPVLNNLDTLAGTDNTGYHGYWTRDFKQIEEHFGNWTTFDTLVNDAHQNGIKVIVDFVPNHSTPFKANDSTFAEGGALYNNGTYMGNYFDDATKGYFHHNGDISNWDDRYEAQWKNFTDPAGFSLADLSQENGTIAQYLTDAAVQLVAHGLRIDAVKHFNSGFSKSLADKLYQKKDIFLVGEWYGGDPGTANHLEKVRYANNSGVNVLDFDLNTVIRNVFGTFTQTMYDLNNMVNQTGNEYKYKENLITFIDNHDMSRFLSVNSKNKANLHQRLLSFSLRGVRPPIYYGTEQYMAGGNDPYNRGMMPAFDTTTTAFKEVSTLAGLRRNNAAIQYGTTTQRWINNDVYIYERKFFNDVVLVAINRNTQSSYSISGLQTALPNGSYADYLSGLLGGNGISVSNGSVASFTLAPGAVSVWQYSTSASAPQIGSVAPNMGIPGNVVTIDGKGFGTTQGTVTFGGVTATVKSWTSNRIEVYVPNMAAGLTDVKVTAGGVSSNLYSYNILSGTQTSVVFTVKSAPPTNLGDKIYLTGNIPELGNWSTDTSGAVNNAQGPLLAPNYPDWFYVFSVPAGKTIQFKFFIKRADGTIQWENGSNHVATTPTGATGNITVTWQN

SEQ ID NO: 45384 - protein, 686 aa, Effusibacillus pohliae
SSSASVKGDVIYQIIIDRFYDGDTTNNNPAKSYGLYDPTKSKWKMYWGGDLEGVRQKLPYLKQLGVTTIYLSPVLDNLDTLAGTDNTGYHGYWTRDFKQIEEHFGNWTTFDTLVNDAHQNGIKVIVDFVPNHTTPFKANDSTFAEGGALYDNGTYMGNYFDDATKGYFHHNGDISNWDDRYEAQWKNFTDPAGFSLADLSQENGTIAQYLTDAAVQLVAHGADGFRIDAVKHFNSGFSKSLADKLYQKKDIFLVGEWYGDDPGAANHLEKVRYANNSGVNVFDFDLNTVIRNVFGTFTQTMYDLNNMVNQTGNEYKYKENLITFIDNHDMSRFLTVNSNKANLHQALAFILTSRGTPSIYYGTEQYMAGGNDPYNRGMMPAFDTTTTAFKEVSTLAGLRRNNAAIQYGTTTQRWINNDVYIYERKFFNDVVLVAINRNTQSSYSISGLQTALPNGNYADYLSGLLGGNGISVSNGSVASFTLAPGAVSVWQYSTSASAPQIGSVAPNMGIPGNVVTIDGKGFGTTQGTVTFGGVTATVKSWTSNRIEVYVPNMAAGLTDVKVTAGGVSSNLYSYNILSGTQTSVVFTVKSAPPTNLGDKIYLTGNIPELGNWSTDTSGAVNNAQGPLLAPNYPDWFYVFSVPAGKTIQFKFFIKRADGTIQWENGSNHVATTPTGATGNITVTWQN

SEQ ID NO: 45385 - protein, 686 aa, Effusibacillus pohliae
SSSASVKGDVIYQIIIDRFYDGDTTNNNPAKSYGLYDPTKSKWKMYWGGDLEGVRQKLPYLKQLGVTTIWLSPVLDNLDTLAGTDNTGYHGYWTRDFKQIEEHFGNWTTFDTLVNDAHQNGIKVIVDFVPNHTTPFKANDSTFAEGGALYDNGTYMGNYFDDATKGYFHHNGDISNWDDRYEAQWKNFTDPAGFSLADLNQENGTIAQYLTDAAVQLVAHGADGFRIDAVKHFNSGFSKSLADKLYQKKDIFLVGEWYGDDPGAANHLEKVRYANNSGVNVFDFDLNTVIRNVFGTFTQTMYDLNNMVNQTGNEYKYKENLITFIDNHDMSRFLTVNSNKANLHQALAFILTSRGTPSIYYGTEQYMAGGNDPYNRGMMPAFDTTTTAFKEVSTLAGLRRNNAAIQYGTTTQRWINNDVYIYERKFFNDVVLVAINRNTQSSYSISGLQTALPNGNYADYLSGLLGGNGISVSNGSVASFTLAPGAVSVWQYSTSASAPQIGSVAPNMGIPGNVVTIDGKGFGTTQGTVTFGGVTATVKSWTSNRIEVYVPNMAAGLTDVKVTAGGVSSNLYSYNILSGTQTSVVFTVKSAPPTNLGDKIYLTGNIPELGNWSTDTSGAVNNAQGPLLAPNYPDWFYVFSVPAGKTIQFKFFIKRADGTIQWENGSNHVATTPTGATGNITVTWQN

SEQ ID NO: 45386 - protein, 686 aa, Effusibacillus pohliae
SSSASVKGDVIYQIIIDRFYDGDTTNNNPAKSYGLYDPTKSKWKMYWGGDLEGVRQKLPYLKQLGVTTIYLSPVLDNLDTLAGTDNTGYHGYWTRDFKQIEEHFGNWTTFDTLVNDAHQNGIKIIVDFVPNHTTPFKANDSTFAEGGALYDNGTYMGNYFDDATKGYFHHNGDISNWDDRYEAQWKNFTDPAGFSLADLSQENGTIAQYLTDAAVQLVAHGADGLRIDAVKHFNSGFSKSLADKLYQKKDIFLVGEWYGDDPGAANHLEKVRYANNSGVNVFDFDLNTVIRNVFGTFTQTMYDLNNMVNQTGNEYKYKENLITFIDNHDMSRFLTVNSNKANLHQALAFILTSRGTPSIYYGTEQYMAGGNDPYNRGMMPAFDTTTTAFKEVSTLAGLRRNNAAIQYGTTTQRWINNDVYIYERKFFNDVVLVAINRNTQSSYSISGLQTALPNGNYADYLSGLLGGNGISVSNGSVASFTLAPGAVSVWQYSTSASAPQIGSVAPNMGIPGNVVTIDGKGFGTTQGTVTFGGVTATVKSWTSNRIEVYVPNMAAGLTDVKVTAGGVSSNLYSYNILSGTQTSVVFTVKSAPPTNLGDKIYLTGNIPELGNWSTDTSGAVNNAQGPLLAPNYPDWFYVFSVPAGKTIQFKFFIKRADGTIQWENGSNHVATTPTGATGNITVTWQN

SEQ ID NO: 45387 - protein, 686 aa, Effusibacillus pohliae
SSSASVKGDVIYQIIIDRFYDGDTTNNNPAKSYGLYDPTKSKWKMYWGGDLEGVRQKLPYLKQLGVTTIYLSPVLDNLDTLAGTDNTGYHGYWTRDFKQIEEHFGNWTTFDTLVNDAHQNGIKVIVDFVPNHTTPFKANDSTFAEGGALYDNGTYMGNYFDDATKGYFHHNGDISNWDDRYEAQWKNFTDPAGFSLADLNQENGTIAQYLTDAAVQLVAHGADGFRIDAVKHFNSGFSKSLADKLYQKKDIFLVGEWYGDDPGAANHLEKVRYANNSGVNVLDFDLNTVIRNVFGTFTQTMYDLNNMVNQTGNEYKYKENLITFIDNHDMSRFLTVNSNKANLHQALAFILTSRGTPSIYYGTEQYMAGGNDPYNRGMMPAFDTTTTAFKEVSTLAGLRRNNAAIQYGTTTQRWINNDVYIYERKFFNDVVLVAINRNTQSSYSISGLQTALPNGNYADYLSGLLGGNGISVSNGSVASFTLAPGAVSVWQYSTSASAPQIGSVAPNMGIPGNVVTIDGKGFGTTQGTVTFGGVTATVKSWTSNRIEVYVPNMAAGLTDVKVTAGGVSSNLYSYNILSGTQTSVVFTVKSAPPTNLGDKIYLTGNIPELGNWSTDTSGAVNNAQGPLLAPNYPDWFYVFSVPAGKTIQFKFFIKRADGTIQWENGSNHVATTPTGATGNITVTWQN

SEQ ID NO: 45388 - protein, 686 aa, Effusibacillus pohliae
SSSASVKGDVIYQIIIDRFYDGDTTNNNPAKSYGLYDPTKSKWKMYWGGDLEGVRQKLPYLKQLGVTTIWLSPVLDNLDTLAGTDNTGYHGYWTRDFKQIEEHFGNWTTFDTLVNDAHQNGIKVIVDFVPNHTTPFKANDSTFAEGGALYDNGTYMGNYFDDATKGYFHHNGDISNWDDRYEAQWKNFTDPAGFSLADLNQENGTIAQYLTDAAVQLVAHGADGFRIDAVKHFNSGFSKSLADKLYQKKDIFLVGEWYGDDPGAANHLEKVRYANNSGVNVIDFDLNTVIRNVFGTFTQTMYDLNNMVNQTGNEYKYKENLITFIDNHDMSRFLTVNSNKANLHQALAFILTSRGTPSIYYGTEQYMAGGNDPYNRGMMPAFDTTTTAFKEVSTLAGLRRNNAAIQYGTTTQRWINNDVYIYERKFFNDVVLVAINRNTQSSYSISGLQTALPNGNYADYLSGLLGGNGISVSNGSVASFTLAPGAVSVWQYSTSASAPQIGSVAPNMGIPGNVVTIDGKGFGTTQGTVTFGGVTATVKSWTSNRIEVYVPNMAAGLTDVKVTAGGVSSNLYSYNILSGTQTSVVFTVKSAPPTNLGDKIYLTGNIPELGNWSTDTSGAVNNAQGPLLAPNYPDWFYVFSVPAGKTIQFKFFIKRADGTIQWENGSNHVATTPTGATGNITVTWQN

SEQ ID NO: 45389 - protein, 686 aa, Effusibacillus pohliae
SSSASVKGDVIYQIIIDRFYDGDTTNNNPAKSYGLYDPTKSKWKMYWGGDLEGVRQKLPYLKQLGVTTIYLSPVLDNLDTLAGTDNTGYHGYWTRDFKQIEEHFGNWTTFDTLVNDAHQNGIKIIVDFVPNHTTPFKANDSTFAEGGALYDNGTYMGNYFDDATKGYFHHNGDISNWDDRYEAQWKNFTDPAGFSLADLNQENGTIAQYLTDAAVQLVAHGADGLRIDAVKHFNSGFSKSLADKLYQKKDIFLVGEWYGDDPGAANHLEKVRYANNSGVNVLDFDLNTVIRNVFGTFTQTMYDLNNMVNQTGNEYKYKENLITFIDNHDMSRFLTVNSNKANLHQALAFILTSRGTPSIYYGTEQYMAGGNDPYNRGMMPAFDTTTTAFKEVSTLAGLRRNNAAIQYGTTTQRWINNDVYIYERKFFNDVVLVAINRNTQSSYSISGLQTALPNGNYADYLSGLLGGNGISVSNGSVASFTLAPGAVSVWQYSTSASAPQIGSVAPNMGIPGNVVTIDGKGFGTTQGTVTFGGVTATVKSWTSNRIEVYVPNMAAGLTDVKVTAGGVSSNLYSYNILSGTQTSVVFTVKSAPPTNLGDKIYLTGNIPELGNWSTDTSGAVNNAQGPLLAPNYPDWFYVFSVPAGKTIQFKFFIKRADGTIQWENGSNHVATTPTGATGNITVTWQN

SEQ ID NO: 45390 - protein, 686 aa, Effusibacillus pohliae
SSSASVKGDVIYQIIIDRFYDGDTTNNNPAKSYGLYDPTKSKWKMYWGGDLEGVRQKLPYLKQLGVTTIYLSPVLDNLDTLAGTDNTGYHGYWTRDFKQIEEHFGNWTTFDTLVNDAHQNGIKVIVDFVPNHTTPFKANDSTFAEGGALYDNGTYMGNYFDDATKGYFHHNGDISNWDDRYEAQWKNFTDPAGFSLADLNQENGTIAQYLTDAAVQLVAHGADGLRIDAVKHFNSGFSKSLADKLYQKKDIFLVGEWYGDDPGAANHLEKVRYANNSGVNVLDFDLNTVIRNVFGTFTQTMYDLNNMVNQTGNEYKYKENLITFIDNHDMSRFLTVNSNKANLHQALAFILTSRGTPAIYYGTEQYMAGGNDPYNRGMMPAFDTTTTAFKEVSTLAGLRRNNAAIQYGTTTQRWINNDVYIYERKFFNDVVLVAINRNTQSSYSISGLQTALPNGNYADYLSGLLGGNGISVSNGSVASFTLAPGAVSVWQYSTSASAPQIGSVAPNMGIPGNVVTIDGKGFGTTQGTVTFGGVTATVKSWTSNRIEVYVPNMAAGLTDVKVTAGGVSSNLYSYNILSGTQTSVVFTVKSAPPTNLGDKIYLTGNIPELGNWSTDTSGAVNNAQGPLLAPNYPDWFYVFSVPAGKTIQFKFFIKRADGTIQWENGSNHVATTPTGATGNITVTWQN

SEQ ID NO: 45391 - protein, 686 aa, Effusibacillus pohliae
SSSASVKGDVIYQIIIDRFYDGDTTNNNPAKSYGLYDPTKSKWKMYWGGDLEGVRQKLPYLKQLGVTTIYLSPVLDNLDTLAGTDNTGYHGYWTRDFKQIEEHFGNWTTFDTLVNDAHQNGIKVIVDFVPNHTTPFKANDSTFAEGGALYDNGTYMGNYFDDATKGYFHHNGDISNWDDRYEAQWKNFTDPAGFSLADLSQENGTIAQYLTDAAVQLVAHGADGLRIDAVKHFNSGFSKSLADKLYQKKDIFLVGEWYGDDPGAANHLEKVRYANNSGVNVFDFDLNTVIRNVFGTFTQTMYDLNNMVNQTGNEYKYKENLITFIDNHDMSRFLTVNSNKANLHQALAFILTSRGTPAIYYGTEQYMAGGNDPYNRGMMPAFDTTTTAFKEVSTLAGLRRNNAAIQYGTTTQRWINNDVYIYERKFFNDVVLVAINRNTQSSYSISGLQTALPNGNYADYLSGLLGGNGISVSNGSVASFTLAPGAVSVWQYSTSASAPQIGSVAPNMGIPGNVVTIDGKGFGTTQGTVTFGGVTATVKSWTSNRIEVYVPNMAAGLTDVKVTAGGVSSNLYSYNILSGTQTSVVFTVKSAPPTNLGDKIYLTGNIPELGNWSTDTSGAVNNAQGPLLAPNYPDWFYVFSVPAGKTIQFKFFIKRADGTIQWENGSNHVATTPTGATGNITVTWQN

SEQ ID NO: 45392 - protein, 686 aa, Effusibacillus pohliae
SSSASVKGDVIYQIIIDRFYDGDTTNNNPAKSYGLYDPTKSKWKMYWGGDLEGVRQKLPYLKQLGVTTIYLSPVLDNLDTLAGTDNTGYHGYWTRDFKQIEEHFGNWTTFDTLVNDAHQNGIKVIVDFVPNHTTPFKANDSTFAEGGALYDNGTYMGNYFDDATKGYFHHNGDISNWDDRYEAQWKNFTDPAGFSLADLSQENGTIAQYLTDAAVQLVAHGADGFRIDAVKHFNSGFSKSLADKLYQKKDIFLVGEWYGDDPGAANHLEKVRYANNSGVNVIDFDLNTVIRNVFGTFTQTMYDLNNMVNQTGNEYKYKENLITFIDNHDMSRFLTVNSNKANLHQALAFILTSRGTPSIYYGTEQYMAGGNDPYNRGMMPAFDTTTTAFKEVSTLAGLRRNNAAIQYGTTTQRWINNDVYIYERKFFNDVVLVAINRNTQSSYSISGLQTALPNGNYADYLSGLLGGNGISVSNGSVASFTLAPGAVSVWQYSTSASAPQIGSVAPNMGIPGNVVTIDGKGFGTTQGTVTFGGVTATVKSWTSNRIEVYVPNMAAGLTDVKVTAGGVSSNLYSYNILSGTQTSVVFTVKSAPPTNLGDKIYLTGNIPELGNWSTDTSGAVNNAQGPLLAPNYPDWFYVFSVPAGKTIQFKFFIKRADGTIQWENGSNHVATTPTGATGNITVTWQN

SEQ ID NO: 45393 - protein, 686 aa, Effusibacillus pohliae
SSSASVKGDVIYQIVIDRFYDGDTTNNNPAKSYGLYDPTKSKWKMYWGGDLEGVRQKLPYLKQLGVTTIWLSPVLDNLDTLAGTDNTGYHGYWTRDFKQIEEHFGNWTTFDTLVNDAHQNGIKIIVDFVPNHSTPFKANDSTFAEGGALYDNGTYMGNYFDDATKGYFHHNGDISNWDDRYEAQWKNFTDPAGFSLADLNQENGTIAQYLTDAAVQLVAHGADGFRIDAVKHFNSGFSKSLADKLYQKKDIFLVGEWYGDDPGAANHLEKVRYANNSGVNVLDFDLNTVIRNVFGTFTQTMYDLNNMVNQTGNEYKYKENLITFIDNHDMSRFLTVNSNKANLHQALAFILTSRGTPSIYYGTEQYMAGGNDPYNRGMMPAFDTTTTAFKEVSTLAGLRRNNAAIQYGTTTQRWINNDVYIYERKFFNDVVLVAINRNTQSSYSISGLQTALPNGNYADYLSGLLGGNGISVSNGSVASFTLAPGAVSVWQYSTSASAPQIGSVAPNMGIPGNVVTIDGKGFGTTQGTVTFGGVTATVKSWTSNRIEVYVPNMAAGLTDVKVTAGGVSSNLYSYNILSGTQTSVVFTVKSAPPTNLGDKIYLTGNIPELGNWSTDTSGAVNNAQGPLLAPNYPDWFYVFSVPAGKTIQFKFFIKRADGTIQWENGSNHVATTPTGATGNITVTWQN

SEQ ID NO: 45394 - protein, 686 aa, Effusibacillus pohliae
SSSASVKGDVIYQVIIDRFYDGDTTNNNPAKSYGLYDPTKSKWKMYWGGDLEGVRQKLPYLKQLGVTTIWLSPVLDNLDTLAGTDNTGYHGYWTRDFKQIEEHFGNWTTFDTLVNDAHQNGIKVIVDFVPNHSTPFKANDSTFAEGGALYDNGTYMGNYFDDATKGYFHHNGDISNWDDRYEAQWKNFTDPAGFSLADLNQENGTIAQYLTDAAVQLVAHGADGFRIDAVKHFNSGFSKSLADKLYQKKDIFLVGEWYGDDPGAANHLEKVRYANNSGVNVLDFDLNTVIRNVFGTFTQTMYDLNNMVNQTGNEYKYKENLITFIDNHDMSRFLTVNSNKANLHQALAFILTSRGTPAIYYGTEQYMAGGNDPYNRGMMPAFDTTTTAFKEVSTLAGLRRNNAAIQYGTTTQRWINNDVYIYERKFFNDVVLVAINRNTQSSYSISGLQTALPNGNYADYLSGLLGGNGISVSNGSVASFTLAPGAVSVWQYSTSASAPQIGSVAPNMGIPGNVVTIDGKGFGTTQGTVTFGGVTATVKSWTSNRIEVYVPNMAAGLTDVKVTAGGVSSNLYSYNILSGTQTSVVFTVKSAPPTNLGDKIYLTGNIPELGNWSTDTSGAVNNAQGPLLAPNYPDWFYVFSVPAGKTIQFKFFIKRADGTIQWENGSNHVATTPTGATGNITVTWQN

SEQ ID NO: 45395 - protein, 684 aa, Synthetic construct
SSSASVKGDVIYQIIIDRFYDGDTTNNNPAKSYGLYDPTKSKWKMYWGGDLEGVRQKLPYLKQLGVTTIWLSPVLNNLDTLAGTDNTGYHGYWTRDFKQIEEHFGNWTTFDTLVNDAHQNGIKVIVDFVPNHSTPFKANDSTFAEGGALYNNGTYMGNYFDDATEGYFHHNGDISNWDDRYEAQWKNFTDPAGFSLADLSQENGTIAQYLTDAAVQLVAHGLRIDAVKHFNSGFSKSLADKLYQKKDIFLVGEWYGGDPGTANHLEKVRYANNSGVNVLDFDLNTVIRNVFGTFTQTMYDLNNMVNQTGNEYKYKENLITFIDNHDMSRFLSVNSKNKANLHQRLLSFSLRGVRPPIYYGTEQYMAGGNDPYNRGMMPAFDTTTTAFKEVSTLAGLRRNNAAIQYGTTTQRWINNDVYIYERKFFNDVVLVAINRNTQSSYSISGLQTALPNGSYADYLSGLLGGNGISVSNGSVASFTLAPGAVSVWQYSTSASAPQIGSVAPNMGIPGNVVTIDGKGFGTTQGTVTFGGVTATVKSWTSNRIEVYVPNMAAGLTDVKVTAGGVSSNLYSYNILSGTQTSVVFTVKSAPPTNLGDKIYLTGNIPELGNWSTDTSGAVNNAQGPLLAPNYPDWFYVFSVPAGKTIQFKFFIKRADGTIQWENGSNHVATTPTGATGNITVTWQN

SEQ ID NO: 45396 - protein, 684 aa, Geobacillus stearothermophilus
SSSASVKGDVIYQIIIDRFYDGDTTNNNPAKSYGLYDPTKSKWKMYWGGDLEGVRQKLPYLKQLGVTTIWLSPVLNNLDTLVGTDNTGYHGYWTRDFKQIEEHFGNWTTFDTLVNDAHQNGIKVIVDFVPNHSTPFKANDSTFAEGGALYNNGTYMGNYFDDATKGYFHHNGDISNFDDRYEAQWKNFTDPAGFSLADLSQENGTIAQYLTDAAVQLVAHGLRIDAVKHFNSGFSKSLADKLYQKKDIFLVGEWYGDDPGTANHLEKVRYANNSGVNVLDFDLNTVIRNVFGTFTQTMYDLNNMVNQTGNEYKYKENLITFIDNHDMSRFLSVNSKNKANLHQRLLSFSLRGVRPPIYYGTEQYMAGGNDPYNRGMMPAFDTTTTAFKEVSTLAGLRRNNAAIQYGTTTQRWINNDVYIYERKFFNDVVLVAINRNTQSSYSISGLQTALPNGSYADYLSGLLGGNGISVSNGSVASFTLAPGAVSVWQYSTSASAPQIGSVAPNMGIPGNVVTIDGKGFGTTQGTVTFGGVTATVKSWTSNRIEVYVPNMAAGLTDVKVTAGGVSSNLYSYNILSGTQTSVVFTVKSAPPTNLGDKIYLTGNIPELGNWSTDTSGAVNNAQGPLLAPNYPDWFYVFSVPAGKTIQFKFFIKRADGTIQWENGSNHVATTPTGATGNITVTWQN

SEQ ID NO: 45397 - protein, 684 aa, Synthetic construct
SSSASVKGDVIYQIIIDRFYDGDTTNNNPAKSYGLYDPTKSKWKMYWGGDLEGVRQKLPYLKQLGVTTIWLSPVLNNLDTLVGTDNTGYHGYWTRDFKQIEEHFGNWTTFDTLVNDAHQNGIKVIVDFVPNHSTPFKANDSTFAEGGALYNNGTYMGNYFDDATKGYFHHNGDISNWDDRYEAQWKNFTDPAGFSLADLSQENGTIAQYLTDAAVQLVAHGLRIDAVKHFNSGFSKSLADKLYQKKDIFLVGEWQGDDPGTANHLEKVRYANNSGVNVLDFDLNTVIRNVFGTFTQTMYDLNNMVNQTGNEYKYKENLITFIDNHDMSRFLSVNSKNKANLHQRLLSFSLRGVRPPIYYGTEQYMAGGNDPYNRGMMPAFDTTTTAFKEVSTLAGLRRNNAAIQYGTTTQRWINNDVYIYERKFFNDVVLVAINRNTQSSYSISGLQTALPNGSYADYLSGLLGGNGISVSNGSVASFTLAPGAVSVWQYSTSASAPQIGSVAPNMGIPGNVVTIDGKGFGTTQGTVTFGGVTATVKSWTSNRIEVYVPNMAAGLTDVKVTAGGVSSNLYSYNILSGTQTSVVFTVKSAPPTNLGDKIYLTGNIPELGNWSTDTSGAVNNAQGPLLAPNYPDWFYVFSVPAGKTIQFKFFIKRADGTIQWENGSNHVATTPTGATGNITVTWQN

SEQ ID NO: 45398 - protein, 684 aa, Geobacillus stearothermophilus
SSSASVKGDVIYQIIIDRFYDGDTTNNNPAKSYGLYDPTKSKWKMYWGGDLEGVRQKLPYLKQLGVTTIWLSPVLNNLDTLAGTDNTGYHGYWTRDFKQIEEHFGNWTTFDTLVNDAHQNGIKVIVDFVPNHSTPFKANDSTFAEGGALYNNGTYMGNYFDDATEGYFHHNGDISNWDDRYEAQWKNFTDPAGFSLADLSQENGTIAQYLTDAAVQLVAHGLRIDAVKHFNSGFSKSLADKLYQKKDIFLVGEWYGTDPGTANHLEKVRYANNSGVNVLDFDLNTVIRNVFGTFTQTMYDLNNMVNQTGNEYKYKENLITFIDNHDMSRFLSVNSKNKANLHQRLLSFSLRGVRPPIYYGTEQYMAGGNDPYNRGMMPAFDTTTTAFKEVSTLAGLRRNNAAIQYGTTTQRWINNDVYIYERKFFNDVVLVAINRNTQSSYSISGLQTALPNGSYADYLSGLLGGNGISVSNGSVASFTLAPGAVSVWQYSTSASAPQIGSVAPNMGIPGNVVTIDGKGFGTTQGTVTFGGVTATVKSWTSNRIEVYVPNMAAGLTDVKVTAGGVSSNLYSYNILSGTQTSVVFTVKSAPPTNLGDKIYLTGNIPELGNWSTDTSGAVNNAQGPLLAPNYPDWFYVFSVPAGKTIQFKFFIKRADGTIQWENGSNHVATTPTGATGNITVTWQN

SEQ ID NO: 45399 - protein, 684 aa, Geobacillus stearothermophilus
SSSASVKGDVIYQIIIDRFYDGDTTNNNPAKSYGLYDPTKSKWKMYWGGDLEGVRQKLPYLKQLGVTTIWLSPVLNNLDTLAGTDNTGYHGYWTRDFKQIEEHFGNWTTFDTLVNDAHQNGIKVIVDFVPNHSTPFKANDSTFAEGGALYNNGTYMGNYFDDATYGYFHHNGDISNWDDRYEAQWKNFTDPAGFSLADLSQENGTIAQYLTDAAVQLVAHGLRIDAVKHFNSGFSKSLADKLYQKKDIFLVGEWYGTDPGTANHLEKVRYANNSGVNVLDFDLNTVIRNVFGTFTQTMYDLNNMVNQTGNEYKYKENLITFIDNHDMSRFLSVNSKNKANLHQRLLSFSLRGVRPPIYYGTEQYMAGGNDPYNRGMMPAFDTTTTAFKEVSTLAGLRRNNAAIQYGTTTQRWINNDVYIYERKFFNDVVLVAINRNTQSSYSISGLQTALPNGSYADYLSGLLGGNGISVSNGSVASFTLAPGAVSVWQYSTSASAPQIGSVAPNMGIPGNVVTIDGKGFGTTQGTVTFGGVTATVKSWTSNRIEVYVPNMAAGLTDVKVTAGGVSSNLYSYNILSGTQTSVVFTVKSAPPTNLGDKIYLTGNIPELGNWSTDTSGAVNNAQGPLLAPNYPDWFYVFSVPAGKTIQFKFFIKRADGTIQWENGSNHVATTPTGATGNITVTWQN

SEQ ID NO: 45400 - protein, 684 aa, Geobacillus stearothermophilus
SSSASVKGDVIYQIIIDRFYDGDTTNNNPAKSYGLYDPTKSKWKMYWGGDLEGVRQKLPYLKQLGVTTIWLSPVLNNLDTLAGTDNTGYHGYWTRDFKQIEEHFGNWTTFDTLVNDAHQNGIKVIVDFVPNHSTPFKANDSTFAEGGALYNNGTYMGNYFDDATYGYFHHNGDISNWDDRYEAQWKNFTDPAGFSLADLSQENGTIAQYLTDAAVQLVAHGLRIDAVKHFNSGFSKSLADKLYQKKDIFLVGEWYGGDPGTANHLEKVRYANNSGVNVLDFDLNTVIRNVFGTFTQTMYDLNNMVNQTGNEYKYKENLITFIDNHDMSRFLSVNSKNKANLHQRLLSFSLRGVRPPIYYGTEQYMAGGNDPYNRGMMPAFDTTTTAFKEVSTLAGLRRNNAAIQYGTTTQRWINNDVYIYERKFFNDVVLVAINRNTQSSYSISGLQTALPNGSYADYLSGLLGGNGISVSNGSVASFTLAPGAVSVWQYSTSASAPQIGSVAPNMGIPGNVVTIDGKGFGTTQGTVTFGGVTATVKSWTSNRIEVYVPNMAAGLTDVKVTAGGVSSNLYSYNILSGTQTSVVFTVKSAPPTNLGDKIYLTGNIPELGNWSTDTSGAVNNAQGPLLAPNYPDWFYVFSVPAGKTIQFKFFIKRADGTIQWENGSNHVATTPTGATGNITVTWQN

SEQ ID NO: 45401 - protein, 686 aa, Effusibacillus pohliae
SSSASVKGDVIYQIIIDRFYDGDTTNNNPAKSYGLYDPTKSKWKMYWGGDLEGVRQKLPYLKQLGVTTIWLSPVLDNLDTLAGTDNTGYHGYWTRDFKQIEEHFGNWTTFDTLVNDAHQNGIKVIVDFVPNHTTPFKANDSTFAEGGALYDNGTYMGNYFDDATKGYFHHNGDISNWDDRYEAQWKNFTDPAGFSLADLNQENGTIAQYLTDAAVQLVAHGADGFRIDAVKHFNSGFSKSLADKLYQKKDIFLVGEWYGDDPGAANHLEKVRYANNSGVNVFDFDLNTVIRNVFGTFTQTMYDLNNMVNQTGNEYKYKENLITFIDNHDMSRFLTVNSNKANLHQALAFILTSRGTPAIYYGTEQYMAGGNDPYNRGMMPAFDTTTTAFKEVSTLAGLRRNNAAIQYGTTTQRWINNDVYIYERKFFNDVVLVAINRNTQSSYSISGLQTALPNGNYADYLSGLLGGNGISVSNGSVASFTLAPGAVSVWQYSTSASAPQIGSVAPNMGIPGNVVTIDGKGFGTTQGTVTFGGVTATVKSWTSNRIEVYVPNMAAGLTDVKVTAGGVSSNLYSYNILSGTQTSVVFTVKSAPPTNLGDKIYLTGNIPELGNWSTDTSGAVNNAQGPLLAPNYPDWFYVFSVPAGKTIQFKFFIKRADGTIQWENGSNHVATTPTGATGNITVTWQN

SEQ ID NO: 45402 - protein, 686 aa, Effusibacillus pohliae
SSSASVKGDVIYQIIIDRFYDGDTTNNNPAKSYGLYDPTKSKWKMYWGGDLEGVRQKLPYLKQLGVTTIWLSPVLDNLDTLAGTDNTGYHGYWTRDFKQIEEHFGNWTTFDTLVNDAHQNGIKIIVDFVPNHTTPFKANDSTFAEGGALYDNGTYMGNYFDDATKGYFHHNGDISNWDDRYEAQWKNFTDPAGFSLADLNQENGTIAQYLTDAAVQLVAHGADGFRIDAVKHFNSGFSKSLADKLYQKKDIFLVGEWYGDDPGAANHLEKVRYANNSGVNVFDFDLNTVIRNVFGTFTQTMYDLNNMVNQTGNEYKYKENLITFIDNHDMSRFLTVNSNKANLHQALAFILTSRGTPSIYYGTEQYMAGGNDPYNRGMMPAFDTTTTAFKEVSTLAGLRRNNAAIQYGTTTQRWINNDVYIYERKFFNDVVLVAINRNTQSSYSISGLQTALPNGNYADYLSGLLGGNGISVSNGSVASFTLAPGAVSVWQYSTSASAPQIGSVAPNMGIPGNVVTIDGKGFGTTQGTVTFGGVTATVKSWTSNRIEVYVPNMAAGLTDVKVTAGGVSSNLYSYNILSGTQTSVVFTVKSAPPTNLGDKIYLTGNIPELGNWSTDTSGAVNNAQGPLLAPNYPDWFYVFSVPAGKTIQFKFFIKRADGTIQWENGSNHVATTPTGATGNITVTWQN

SEQ ID NO: 45403 - protein, 686 aa, Effusibacillus pohliae
SSSASVKGDVIYQIIIDRFYDGDTTNNNPAKSYGLYDPTKSKWKMYWGGDLEGVRQKLPYLKQLGVTTIWLSPVLDNLDTLAGTDNTGYHGYWTRDFKQIEEHFGNWTTFDTLVNDAHQNGIKIIVDFVPNHTTPFKANDSTFAEGGALYDNGTYMGNYFDDATKGYFHHNGDISNWDDRYEAQWKNFTDPAGFSLADLNQENGTIAQYLTDAAVQLVAHGADGFRIDAVKHFNSGFSKSLADKLYQKKDIFLVGEWYGDDPGAANHLEKVRYANNSGVNVIDFDLNTVIRNVFGTFTQTMYDLNNMVNQTGNEYKYKENLITFIDNHDMSRFLTVNSNKANLHQALAFILTSRGTPSIYYGTEQYMAGGNDPYNRGMMPAFDTTTTAFKEVSTLAGLRRNNAAIQYGTTTQRWINNDVYIYERKFFNDVVLVAINRNTQSSYSISGLQTALPNGNYADYLSGLLGGNGISVSNGSVASFTLAPGAVSVWQYSTSASAPQIGSVAPNMGIPGNVVTIDGKGFGTTQGTVTFGGVTATVKSWTSNRIEVYVPNMAAGLTDVKVTAGGVSSNLYSYNILSGTQTSVVFTVKSAPPTNLGDKIYLTGNIPELGNWSTDTSGAVNNAQGPLLAPNYPDWFYVFSVPAGKTIQFKFFIKRADGTIQWENGSNHVATTPTGATGNITVTWQN

SEQ ID NO: 45404 - protein, 686 aa, Effusibacillus pohliae
SSSASVKGDVIYQIIIDRFYDGDTTNNNPAKSYGLYDPTKSKWKMYWGGDLEGVRQKLPYLKQLGVTTIWLSPVLDNLDTLAGTDNTGYHGYWTRDFKQIEEHFGNWTTFDTLVNDAHQNGIKVIVDFVPNHTTPFKANDSTFAEGGALYDNGTYMGNYFDDATKGYFHHNGDISNWDDRYEAQWKNFTDPAGFSLADLNQENGTIAQYLTDAAVQLVAHGADGFRIDAVKHFNSGFSKSLADKLYQKKDIFLVGEWYGDDPGAANHLEKVRYANNSGVNVIDFDLNTVIRNVFGTFTQTMYDLNNMVNQTGNEYKYKENLITFIDNHDMSRFLTVNSNKANLHQALAFILTSRGTPAIYYGTEQYMAGGNDPYNRGMMPAFDTTTTAFKEVSTLAGLRRNNAAIQYGTTTQRWINNDVYIYERKFFNDVVLVAINRNTQSSYSISGLQTALPNGNYADYLSGLLGGNGISVSNGSVASFTLAPGAVSVWQYSTSASAPQIGSVAPNMGIPGNVVTIDGKGFGTTQGTVTFGGVTATVKSWTSNRIEVYVPNMAAGLTDVKVTAGGVSSNLYSYNILSGTQTSVVFTVKSAPPTNLGDKIYLTGNIPELGNWSTDTSGAVNNAQGPLLAPNYPDWFYVFSVPAGKTIQFKFFIKRADGTIQWENGSNHVATTPTGATGNITVTWQN

SEQ ID NO: 45405 - protein, 682 aa, Geobacillus stearothermophilus
SSSASVSGDVIYQIIIDRFYDGDTTNNNPAKSYGLYDPTKSKWKMYWGGDLEGVRQKLPYLKQLGVTTIWLSPVLDNLDTLAGTDNTGYHGYWTRDFKQIEEHFGNWTTFDTLVNDAHQNGIKVIVDFVPNHSTPFKANDSTFAEGGALYNNGTYMGNYFDDATKGYFHHNGDISNWDDRAEAQWKNFTDPAGFSLADLSQENGTIAQYLTDAAVQLVAHGADGLRIDAVKHFNSGFSKSLADKLYQKKDIFLVGEWYGDDPGTANHLEKVRYANNSGVNVLDFDLNTVIRNVFGTFTQTMYDLNNMVNQTGNEYKYKENLITFIDNHDMSRFLSVNSNKANLHQALAFILTSRGTPSIYYGTEQYMAGGNDPYNRGMMPAFDTTTTAFKEVSTLAGLRRNNAAIQYGTTTQRWINNDVYIYERKFFNDVVLVAINRNTQSSYSISGLQTALPNGSYADYLSGLLGGNGISVSNGSVASFTLAPGAVSVWQYSTSASAPLIGHVGPTMTKAGQTITIDGRGFGTTAGQVLFGTTPATIVSWEDTEVKVKVPALTPGKYNITLKTASGVTSNSYNNINVLTGNQVCVRFVVNNATTVWGENVYLTGNVAELGNWDTSKAIGPMFNQVVYQYPTWYYDVSVPAGTTIEFKFIKKNGSTVTWEGGYNHVYTTPTSGTATVIVDWQ

SEQ ID NO: 45406 - protein, 682 aa, Geobacillus stearothermophilus
SSSASVSGDVIYQIIIDRFYDGDTTNNNPAKSYGLYDPTKSKWKMYWGGDLEGVRQKLPYLKQLGVTTIWLSPVLDNLDTLAGTDNTGYHGYWTRDFKQIEEHFGNWTTFDTLVNDAHQNGIKVIVDFVPNHSTPFKANDSTFAEGGALYNNGTYMGNYFDDATKGYFHHNGDISNWDDRAEAQWKNFTDPAGFSLADLSQENGTIAQYLTDAAVQLVAHGADGLRIDAVKHFNSGFSKSLADKLYQKKDIFLVGEWYGDDPGTANHLEKVRYANNSGVNVLDFDLNTVIRNVFGTFTQTMYDLNNMVNQTGNEYKYKENLITFIDNHDMSRFLSVNSNKANLHQALAFILTSRGTPSIYYGTEQYMAGGNDPYNRGMMPAFDTTTTAFKEVSTLAGLRRNNAAIQYGTTTQRWINNDVYIYERKFFNDVVLVAINRNTQSSYSISGLQTALPNGSYADYLSGLLGGNGISVSNGSVASFTLAPGAVSVWQYSTTTNPPLIGHVGPTMTKAGQTITIDGRGFGTTAGQVLFGTTPATIVSWEDTEVKVKVPALTPGKYNITLKTASGVTSNSYNNINVLTGNQVCVRFVVNNATTVWGENVYLTGNVAELGNWDTSKAIGPMFNQVVYQYPTWYYDVSVPAGTTIEFKFIKKNGSTVTWEGGYNHVYTTPTSGTATVIVDWQ

SEQ ID NO: 45407 - protein, 683 aa, Geobacillus stearothermophilus
SSSASVSGDVIYQIIIDRFYDGDTTNNNPAKSYGLYDPTKSKWKMYWGGDLEGVRQKLPYLKQLGVTTIWLSPVLDNLDTLAGTDNTGYHGYWTRDFKQIEEHFGNWTTFDTLVNDAHQNGIKVIVDFVPNHSTPFKANDSTFAEGGALYNNGTYMGNYFDDATKGYFHHNGDISNWDDRAEAQWKNFTDPAGFSLADLSQENGTIAQYLTDAAVQLVAHGADGLRIDAVKHFNSGFSKSLADKLYQKKDIFLVGEWYGDDPGTANHLEKVRYANNSGVNVLDFDLNTVIRNVFGTFTQTMYDLNNMVNQTGNEYKYKENLITFIDNHDMSRFLSVNSNKANLHQALAFILTSRGTPSIYYGTEQYMAGGNDPYNRGMMPAFDTTTTAFKEVSTLAGLRRNNAAIQYGTTKQRWINNDVYIYERQFGNNVALVAINRNLSTSYYITGLYTALPAGTYSDMLGGLLNGSSITVSSNGSVTPFTLAPGEVAVWQYVSTTNPPLIGHVGPTMTKAGQTITIDGRGFGTTAGQVLFGTTPATIVSWEDTEVKVKVPALTPGKYNITLKTASGVTSNSYNNINVLTGNQVCVRFVVNNATTVWGENVYLTGNVAELGNWDTSKAIGPMFNQVVYQYPTWYYDVSVPAGTTIEFKFIKKNGSTVTWEGGYNHVYTTPTSGTATVIVDWQ

SEQ ID NO: 45408 - protein, 683 aa, Geobacillus stearothermophilus
SSSASVSGDVIYQIIIDRFYDGDTTNNNPAKSYGLYDPTKSKWKMYWGGDLEGVRQKLPYLKQLGVTTIWLSPVLDNLDTLAGTDNTGYHGYWTRDFKQIEEHFGNWTTFDTLVNDAHQNGIKVIVDFVPNHSTPFKANDSTFAEGGALYNNGTYMGNYFDDATKGYFHHNGDISNWDDRAEAQWKNFTDPAGFSLADLSQENGTIAQYLTDAAVQLVAHGADGLRIDAVKHFNSGFSKSLADKLYQKKDIFLVGEWYGDDPGTANHLEKVRYANNSGVNVLDFDLNTVIRNVFGTFTQTMYDLNNMVNQTGNEYKYKENLITFIDNHDMSRFLSVNSNKANLHQALAFILTSRGTPSIYYGTEQYMAGGNDPYNRGMMTSFDTTTTAYNVIKKLAPLRKSNPAIAYGTQKQRWINNDVYIYERQFGNNVALVAINRNLSTSYYITGLYTALPAGTYSDMLGGLLNGSSITVSSNGSVTPFTLAPGEVAVWQYVSTTNPPLIGHVGPTMTKAGQTITIDGRGFGTTAGQVLFGTTPATIVSWEDTEVKVKVPALTPGKYNITLKTASGVTSNSYNNINVLTGNQVCVRFVVNNATTVWGENVYLTGNVAELGNWDTSKAIGPMFNQVVYQYPTWYYDVSVPAGTTIEFKFIKKNGSTVTWEGGYNHVYTTPTSGTATVIVDWQ

SEQ ID NO: 45409 - protein, 359 aa, Aspergillus niger
VGVSGSAEGFAKGVTGGGSATPVYPDTIDELVSYLGDDEARVIVLTKTFDFTDSEGTTTGTGCAPWGTASACQVAIDQDDWCENYEPDAPSVSVEYYNAGTLGITVTSNKSLIGEGSSGAIKGKGLRIVSGAENIIIQNIAVTDINAKYVWGGDAITLDDCDLVWIDHVTTARIGRQHYVLGTSADNRVSLTNNYIDGVSDYSATCDGYHYWAIYLDGDADLVTMKGNYIYHTSGRSPKVQDNTLLHAVNNYWYDISGHAFEIGEGGYVLAEGNVFQNVDTVLETYEGEAFTVPSTTAGEVCSTYLGRDCVINGFGSSGTFSEDSTSFLSDFEGKNIASASAYTSVASSVVANAGQGNL

SEQ ID NO: 45410 - protein, 379 aa, Aspergillus niger; identical to SEQ ID NO: 55

SEQ ID NO: 45411 - protein, 359 aa, Aspergillus niger
VGVSGSAEGFAEGVTGGGSATPVYPDTIDELVSYLGDDEARVIVLTKTFDFTDSEGTTTGTGCAPWGTASACQVAIDQDDWCENYEPDAPSVSVEYYNAGTLGITVTSNKSLIGEGSSGAIKGKGLRIVSGAENIIIQNIAVTDINAKYVWGGDAITLDDCDLVWIDHVTTARIGRQHYVLGTSADNRVSLTNNYIDGVSDYSATCDGYHYWAIYLDGDADLVTMKGNYIYHTSGRSPKVQDNTLLHAVNNYWYDISGHAFEIGEGGYVLAEGNVFQNVDTVLETYEGEAFTVPSTTAGEVCSTYLGRDCVINGFGSSGTFSEDSTSFLSDFEGKNIASASAYTSVASSVVANAGQGNL

SEQ ID NO: 45412 - protein, 359 aa, Aspergillus niger
VGVSGSAEGFAKGVTGGGSATPVYPDTIDELVSYLGDDEARVIVLTKTFDFTDSEGTTTGTGCAPWGTASACQVAIDQDDWCENYEPDAPSVSVEYYNAGTLGITVTSNKSLIGEGSSGAIKGKGLRIVSGAENIIIQNIAVTDINPKYVWGGDAITLDDCDLVWIDHVTTARIGRQHYVLGTSADNRVSLTNNYIDGVSDYSATCDGYHYWAIYLDGDADLVTMKGNYIYHTSGRSPKVQDNTLLHAVNNYWYDISGHAFEIGEGGYVLAEGNVFQNVDTVLETYEGEAFTVPSSTAGEVCSTYLGRDCVINGFGSSGTFSEDSTSFLSDFEGKNIASASAYTSVASRVVANAGQGNL

SEQ ID NO: 45413 - protein, 379 aa, Aspergillus niger
MKYSTIFSAAAAVFAGSAAAVGVSGSAEGFAEGVTGGGDATPVYPDTIDELVSYLGDDEARVIVLTKTFDFTDSEGTTTGTGCAPWGTASACQVAIDQDDWCENYEPDAPSISVEYYNAGVLGITVTSNKSLIGEGSSGAIKGKGLRIVSGAENIIIQNIAVTDINPKYVWGGDAITLDDCDLVWIDHVTTARIGRQHYVLGTSADNRVSLTNNYIDGVSDYSATCDGYHYWGIYLDGDADLVTMKGNYIYHTSGRSPKVQDNTLLHCVNNYFYDISGHAFEIGEGGYVLAEGNVFQNVDTVLETYEGAAFTVPSTTAGEVCSTYLGRDCVINGFGSSGTFSEDSTSFLSDFEGKNIASASAYTSVASSVVANAGQGNL

SEQ ID NO: 45414 - protein, 379 aa, Aspergillus niger
MKYSTIFSAAAAVFAGSAAAVGVSGSAEGFAEGVTGGGDATPVYPDTIDELVSYLGDDEARVIVLTKTFDFTDSEGTTTGTGCAPWGTASACQVAIDQDDWCENYEPDAPSVSVEYYNAGVLGITVTSNKSLIGEGSSGAIKGKGLRIVSGAENIIIQNIAVTDINPKYVWGGDAITLDDCDLVWIDHVTTARIGRQHYVLGTSADNRVSLTNNYIDGVSDYSATCDGYHYWGIYLDGDADLVTMKGNYIYHTSGRSPKVQDNTLLHCVNNYFYDISGHAFEIGEGGYVLAEGNVFQNVDTVLETYEGAAFTVPSTTAGEVCSTYLGRDCVINGFGCSGTFSEDSTSFLSDFEGKNIASASAYTSVASRVVANAGQGNL

SEQ ID NO: 45415 - protein, 359 aa, Aspergillus niger
VGVSGSAEGFAEGVTGGGDATPVYPDTIDELVSYLGDDEARVIVLTKTFDFTDSEGTTTGTGCAPWGTASACQVAIDQDDWCENYEPDAPSVSVEYYNAGVLGITVTSNKSLIGEGSSGAIKGKGLRIVSGAENIIIQNIAVTDINPKYVWGGDAITLDDCDLVWIDHVTTARIGRQHYVLGTSADNRVSLTNNYIDGVSDYSATCDGYHYWGIYLDGDADLVTMKGNYIYHTSGRSPKVQDNTLLHCVNNYFYDISGHAFEIGEGGYVLAEGNVFQNVDTVLETYEGAAFTVPSTTAGEVCSTYLGRDCVINGFGCSGTFSEDSTSFLSDFEGKNIASASAYTSVASRVVANAGQGNL

SEQ ID NO: 45416 - protein, 376 aa, Aspergillus nidulans
MKTTFLVSLATAALSSTAAAVSVSGSAEGFAKGVTGGGSATAVYPDTIDELVSYLGDDEARVIVLSKTFDFTDSEGTTTETGCAPWGTDAACQVAINQNDWCTNYQPDAPSVSVTYDNAGTLGITVNSDKTLIGEGSAGVIKGKGLRLVSGTSNVIIQNIAITDINPKYVWGGDAITLNDVDMVWIDHVTTARIARQHIVLGTEADNRVTISNSFINGESDYSATCDGYHYWGIYLDGSSDMVTMKGNYIYHTSGRSPKVQGNTLLHAVNNYWHDNSDHAFEIGEGAYVLAEGNVFQNIPTVAEDPIEGELFASPSESANEVCSTYLGRVCELNGFGSSGTFNQADTDFLSKFEGKNIASADSYSSVASSVASSAG

SEQ ID NO: 45417 - protein, 378 aa, Aspergillus fischeri
MKYQGLLAIAGCIASASAVSVSGAAEGFAKGVTGGGSATAVYPSTTAELVSYLGDSEARVIVLTKTFDFTGTEGTTTATGCAPWGTASACQLAINQNDWCTNYEPDAPSVSVTYDNAGTLGITVKSNKSLLGSGSSGVIKGKGLRIVSGASNIIIQNIAITDINPKYVWGGDAITINNADMVWIDHVTTARIGRQHLVLGTSASNRVTISNNYFNGVSSYSATCDGYHYWGIYLDGSNDLVTMKGNYIYHFSGRSPKVQGNTLLHAVNNYWYDSSGHAFEIGSGGYVLAEGNVFQNIDTIVESPVDGQLFTSPDSTTNKVCSTYLGHVCQVNGFGSSGTFSQADTGFLSNFAGKNIASASAYTVVQSSVPSSAGQGKI

SEQ ID NO: 45418 - protein, 359 aa, unidentified
GVTGSAEGFAKGVTGGGSATPVYPSTTAELVSYLGDSSARVIVLTKTFDFTGTEGTTTETGCAPWGTASACQVAINKNDWCTNYQPNAPSVSVTYDNAGVLGITVKSNKSLVGEGSSGVIKGKGLRIVSGASNVIIQNIAITDLNPKYVWGGDAITLDNADMVWIDHVTTARIGRQHLVLGTSASNRVTVSNSYFNGVTSYSATCDGYHYWGIYLTGSNDMVTLKGNYIYHMSGRSPKVGGNTLLHAVNNYWYDSSGHAFEIDSGGYVLAEGNVFQNIPTVIEGTVGGQLFTSPDSSTNAICSTYLGHTCQVNGFGSSGTFKQADTAFLVNFQGKNIASASAYTVAQSSVPSNAGQGKL

SEQ ID NO: 45419 - protein, 374 aa, Pseudomyllocerus canescens
FTALIAAFAAHAAAISVSGAAEGFAKGVTGGGSATPVYPSTTSELVSYLGDSQARVIVLTKTFDFRGTEGTTTGTGCAPWGTASACQVAINQNSWCQNYESSAPSVSVSYDNAGTLGITVASHKTILGSGSAGIIKGKGLRIVSGASNIIIQNVAITDINPKYVWGGDAITIDNSDMVWIDHVTTARIGRQHIVLGTEASKRVTISNSFINGASDYSATCDGYHYWGIYLDGSNDYVTMKGNYIYHTSGRAPKVQGSTLLHAVNNYWYDNSGHAFEIGSGGYVLAEGNVFQNIDTVVESPISGQLFTSPSTSANTACSNYLGRVCQINGFGSSGTFSQSDTGFFSKFSGQNIASATAYTSVVSSVNSNAGQGKL

SEQ ID NO: 45420 - protein, 378 aa, Neosartorya
MKYQDLLAIAGCIANAGAVSVSGAAEGFAKGVTGGGSATAVYPSTTAELVSYLGDSEARVIVLTKTFDFTGTEGTTTATGCAPWGTASACQLAINQNNWCTNYEPNAPSVSVTYDNAGILGITVKSNKSLIGSGSSGVIKGKGLRIVSGASNIIIQNIAITDINPKYVWGGDAITIDNADMVWIDHVTTARIGRQHLVLGTSASNRVTISNNYFNGVSSYSATCDGYHYWGIYLDGSNDLVTMKGNYIYHFSGRSPKVQGNTLLHAVNNYWYDSSGHAFEIGSGGYVLAEGNVFQNIDTIVQSPVDGQLFTSPDSNTNKVCSTYLGHVCQVNGFGSSGTFSQADTGFLSNFAGKNIASASAYTAVQSTVPSSAGQGKI

SEQ ID NO: 45421 - protein, 376 aa, unidentified
HAPILSLLAAAASTSAAGVTGSAEGFAKGVTGGGSATPVYPSTTAELVSYLGDSSARVIVLTKTFDFTGTEGTTTETGCAPWGTASACQVAINKNDWCTNYQPNAPSVSVTYDNAGVLGITVKSNKSLVGEGSSGVIKGKGLRIVSGASNVIIQNIAITDLNPKYVWGGDAITLDNADMVWIDHVTTARIGRQHLVLGTSASNRVTVSNSYFNGVTSYSATCDGYHYWGIYLTGSNDMVTLKGNYIYHMSGRSPKVGGNTLLHAVNNYWYDSSGHAFEIDSGGYVLAEGNVFQNIPTVIEGTVGGQLFTSPDSSTNAICSTYLGHTCQVNGFGSSGTFKQADTAFLVNFQGKNIASASAYTVAQSSVPSNAGQGKL

SEQ ID NO: 45422 - protein, 379 aa, Aspergillus aculeatus
MALTTILSLLAVAAQLATAVSVSGAAEGFAKGVTGGGSATPVYPTTTDELVSYLGDSSARVIVLQQTFDFTGTEGTTTATGCAPWTTASGCQLAINQNDWCTNYEPDAPSVSVTYDNAGVLGITVASDKTLIGVGSTGIIKGKGLRIVSGASNIIIQNVAITDINEKYVWGGDAITLDDADMVWIDHVTTARIGRQHVVLGTSADNRVTISNSYFNGVTSYSATCDGYAYWGLYFDGSSDLVTLQKNYIYHFSGRSPKVQGNTLLHAVNNYWYDSDGHSFEIGSGGYVLAEGNVFQNIDTPVESPVSGQLFTSPDSTTNAVCSTYLGRACQINGFGSSGTFSQSDTAFLVNFEGKNIATASAYTAIKTTVPSNAGQGNL

SEQ ID NO: 45423 - protein, 380 aa, Neosartorya
MRYTSLFTAVTAALASTAAAVGVSGAAEGFAKGVTGGGNASPVYPKTNDELVSYLGDSQARVIVLTKTFDFRGTEGTTSGTGCAPWGTNAKCQLAINQNSWCDNYQPNAPKVSVSYDNAGVLGITVNSNKSLIGQGSAGVIKGKGLRIVSGAKNVIIQNIAITDINPKYVWGGDAITINNADLVWIDHVTTARIGRQHIVLGTQADNRITISNCYIDGVTDYSATCNGYHYWGIYLDGSNDMVTMKGNYIYHTSGRSPKVQGNTLLHAVNNYWYDNAGHAFEIGSGAYVVAEGNVFQNVKAVAESPISGKLFSSPDASTNKVCSSYLGHTCQINGFGSSGAFSQADTDILSKFKGKNIASAAAYNTVVSSVTANAGNGKL

SEQ ID NO: 45424 - protein, 378 aa, Aspergillus terreus
MKFPAFITAIISIASLSSAISVSGAAEGFAKGVTGGGSATPVYPSTISELVSYLKDSQPRVVVLTKTFDFRGSEGTTTGTGCAPWGTASNCQLAINKDNWCTNYQPNAPSASVSYDNAGVLGITITSDKTLIGQGSSGVIKGKGIRIVSGAKNVIIQNIAITDINPKYVWGGDAITLNNCDMVWIDHVTTARIGRQHLVLGTSASNRVTVSNSYFNGVSDYSATCNGYHYWGIYFAGSNDMVTLKGNYIYHMSGRSPKVQSNTLLHAVNNYWYDISGHAFEIGAGGYVLAEGNVFQNVPTILEEDDGQLFTSPNSNTNQVCSTYLGHVCQVNGFGSSGTFSSADTGFLVNFQGKNVASASAYTVAQSSVPSNAGQGKL

SEQ ID NO: 45425 - protein, 382 aa, Botrytis sp.
MKSFTLFSAALAAVAQTVSAAVAVNGAAEGFAKGVTGGGSAAAVYPSTTAELVSYLGDSSPRVIVLTKTFDFRGTEGTTTATGCAPWGTASNCQLAIDGANGWCENYEPDAPSASVSYDNAGVLGISVASDKTLIGEGSTGIIQGKGLRMVSGASNIIIQNIKIEEINPKYVWGGDAITINDADMIWIDHVTTYHIARQHIVLGTLASNRITLSNNYINGVSDYSATCDGYHYWGIYLDGSNDMVTMKGNYIYHTSGRSPKVQGNTVLHAVNNYWYDNSGHAFEIGSGAYVVAEGNVFQNIPVVAESPIDGELFTAPSTSANAACSAYLGHTCQVNGFGSSGTFSSSTTSFFSDFSGKNVASASAYSTVVSSVTANAGFGKV

SEQ ID NO: 45426 - protein, 373 aa, Aspergillus niger
MKYAAALTAVAALAARAAAVGVSGTPEGFASSATGGGDATAVYPTTTDELVSYLGDDEARVIVLSKTFDFTDTEGTTTTTGCAPWGTASGCQLAINKDDWCTNYEPDAPTTTVTYNTAGELGITVNSNKSLIGEGTSGVIKGRGLRMVSGVSNIIIQNIAVTDINPEYVWGGDAITLDDADLVWIDHVTTARIGRQHYVLGTEADNRVSITNNYINGESDYSATCDGHHYWNVYLDGASDKVTFKGNYLYKTSGRAPKVQDNTYLHILNNYWENNSGHAFEIGSGGYVLAEGNYFSNVDTVLESDSFEGALFSSDSASSTCESYIGRSCVANVNGGDLTGSSTTVLSNLSSDTLPSADAASTSPASSAGQGNL

SEQ ID NO: 45427 - protein, 379 aa, Aspergillus oryzae
MKFALLSGVAAGLLPVVSAVSVSGAAEGFAKGVTGGGSAAAVYPTTTDELVSYLGDSSPRVIVLDRTFDFTGTEGTTTATGCAPWGTAAACQLAINQNDWCTNYQPDAPSVSVTYDNAGILGITVASDKTILGSGSSGVIKGKGLRIVSGASNIIIQNIAITDLNPKYVWGGDAITLNDADMVWIDHVTTARIGRQHLVLGNDADNRVTVSNSYFNGVSDYSATCDGYAYWGIYFAGSSDLITFKGNYIHHFSGRSPKVQENTLLHAVNNYWYDSTGHAFEIGAGGYVLAEGNVFQNIDTPVQSPIEGQLFTSPDTNTNTVCATYLGRNCEVNGFGSSGTFSQADTAFLVNFEGKNIASASPYADAQSSVPSSAGQGNL

SEQ ID NO: 45428 - protein, 375 aa, Penicillium oxalicum
FTALIAAFAAQAAAISVSGAAEGFAKGVTGGGSASPVYPQTTSELVSYLGDSQPRVIVLTKTFDFRGTEGTAKSSGCSPWGTNPKCQIAINQNNWCKNYEPNAPTVGSISYDKAGVLGITVASRKTLIGQGSAGVIKGKGLRIVSGANNIIIQNVAITDINPQYVWGGDAITIDNSDMVWIDHVTTARIGRQHIVLGTSASKRVTISNSYIDGRSDWSATCNGYHYWGIYLDGSNDYVTLKGNYIYHTSGRSPKVQGNTVLHAVNNYWYDNGGHAFEIGSGGYVLAEGNVFQNVANILDTSMDGKLFTSPSDGANKACSSALGRSCVINGFGSSGKFSSADSSFLSKFKGQNIASAAPYTSVVASVNAKAGQGKL

SEQ ID NO: 45429 - protein, 373 aa, unidentified
MKYAAALTAIAALAARAAAVGVSGTPVGFASSATGGGDATPVYPTTTDELVSYLGDDEARVIVLSKTFDFTDTEGTTTTTGCAPWGTASGCQLAINKDDWCTNYEPDAPTTTVTYNTAGELGITVNSNKSLIGEGTSGVIKGRGLRMVSGVSNIIIQNIAVTDINPEYVWGGDAITLDEADLVWIDHVTTARIGRQHYVLGTDADSRVSITNNYINGESDYSATCDGHHYWNVYLDGSSDKVTFSGNYLYKTSGRAPKVQDNTYLHIYNNYWENNSGHAFEIGSGGYVLAEGNYFSNVDTVLETDTFEGALFSSDSASSTCESYIGRSCVANVNGGDLTGTSTTVLSNLSGDTLPSADAASTSPASNAGQGNL

SEQ ID NO: 45430 - protein, 373 aa, Aspergillus niger
MKYAAALTAVAALAARAAAVGVSGTPVGFASSATGGGDATPVYPTTTDELVSYLGDDEARVIVLSKTFDFTDTEGTTTTTGCAPWGTASGCQLAINKDDWCTNYEPDAPTTTVTYNTAGELGITVNSNKSLIGEGTSGVIKGRGLRMVSGVSNIIIQNIAVTDINPEYVWGGDAITLDEADLVWIDHVTTARIGRQHYVLGTDADSRVSITNNYINGESDYSATCDGHHYWNVYLDGSSDKVTFSGNYLYKTSGRAPKVQDNTYLHIYNNYWENNSGHAFEIGSGGYVLAEGNYFSNVDTVLETDTFEGALFSSDSASSTCESYIGRSCVANVNGGDLTGTSTTVLSNLSGDTLPSADAASTSPASNAGQGNL

SEQ ID NO: 45431 - protein, 375 aa, Neosartorya
MKYAAFLPTIGALVSQAIAIGVQGTAEGFASSVTGGGSATPVYPSTTDELVSYLGDSEARVIVLTKTFDFTGTEGTTTATGCAPWGTASGCQVAINKDNWCTNYQSSAPSVSVTYDNAGSLGITVNSNKSLIGEGTSGVIKGKGLRIVSGAKNIIIQNIAITDINPKYVWGGDAITINQADLVWVDHVTTARIGRQHYVLGTEASNRITLSNNYIDGESDYSATCDNHHYWNIYLDGSSDKVTLKGNYLYKTSGRAPKVQGNTYLHAVNNYWNDNSNHAFEIGDGAYVLAEGNLFSDVTAAVESSSFTGELFGSASASSTCQSYIGRDCVANSFSSSGTLSGSNVDVLSKFKGETVASASAAGTSPASSAGQGHL

SEQ ID NO: 45432 - protein, 373 aa, Aspergillus niger
MKYAAALTAIAALAARAAAVGVSGTPVGFASSATGGGDATPVYPTTTDELVSYLGDDEARVIVLSKTFDFTDTEGTTTTTGCAPWGTASGCQLAINKDDWCTNYEPDAPTTTVTYNTAGELGITVNSNKSLIGEGTSGVIKGRGLRMVSGVSNIIIQNIAVTDINPEYVWGGDAITLDEADLVWIDHVTTARIGRQHYVLGTDADSRVSITNNYINGESDYSATCDGHHYWNVYLDGSSDKVTFSGNYLYKTSGRAPNVQDNTYLHIYNNYWENNSGHAFEIGSGGYVLAEGNYFSNVDTVLETDTFEGALFSSDSASSTCESYIGRSCVANVNGGDLTGTSTTVLSNLSGDTLPSADAASTSPASNAGQGNL

SEQ ID NO: 45433 - protein, 375 aa, unidentified
MKYAAFLPTIGALVSQAIAIGVQGTAEGFASSVTGGGSATLVYPSTTDELVSYLGDSEARVIVLTKTFDFTGTEGTTTATGCAPWGTASGCQVAINKDNWCINYQSSAPSVSVTYDNAGSLGITVNSNKSLIGEGTSGVIKGKGLRIVSGAKNIIIQNIAITDINPKYVWGGDAITINQADLVWVDHVTTARIGRQHYVLGTEASNRITLSNNYIDGESDYSATCDNHHYWNIYLDGSSDKVTLKGNYLYKTSGRAPKVQGNTYLHAVNNYWNDNSNHAFEIGDGAYVLAEGNLFSDVTAAVESSSFTGELFGSASASSTCQSYIGRDCVANSFSSSGTLSGSNVDVLSKFKGETVASASAAGTSPASSAGQGHL

SEQ ID NO: 45434 - protein, 373 aa, Penicillium chrysogenum
MKYAYVLTAIAAIASKVAAVGVSGTPEGFASSATGGGNATPVYPTSTDELVSYLGDDEARVIVLSKTFDFTDTEGSATGTGCTPWGTASNCQVAINKDDWCTNYQPDAATTSVTYNKAGMLGITVGSNKSLIGEGTSGVIKGRGLRIVNGVENVIVQNIAVTDINPQYVWGGDAITINQADLVWLDHITTARIGRQHYVLGTEADNRVSITNNYIDGESDWSATCDGHHYWNVYLDGSSDKVTFKGNYLYKTSGRAPKVQGNTYLHAVNNYWDDNSGHAFEIGSGGYVLAEGNYFANVDTVMEESSFEGALFSSDSASGTCESYIGRSCVANANGGTLAGTSTDVLSNLKGETLAEAAGASTDPAGSAGQGNL

SEQ ID NO: 45435 - protein, 378 aa, Aspergillus clavatus
MKYASFLALVGFITSTSAIGVSGAAEGFAKGVTGGGSATPVYPSTTAELVSYLTDSQPRVIVLTKTFDFTNTEGSTTATGCAPWGTAPGCQLAINQNDWCKNYQSSAPSVSVTYDNAGVLGMTVASDKTLLGSGSSGVIKGKGLRVVSGAKNIIIQNVAITDINPKYVWGGDAITIDNADMVWIDHVTTARIGRQHLVLGTSASNRVTISNSYFNGVSSYSATCDGYHYWGIYLTGSNDLVTMKGNYIHHFSGRSPKIQGNTLLHAVNNYWYDSTGHAFEIGSGGYVLAEGNVFQNIKTIVEPPVGGQLFTSPNSNTNQACSAYLGHVCQVNGFGSSGPFSQADTGLLSKFSGKNVASASAYTVAQSRVPSSAGQGKL

SEQ ID NO: 45436 - protein, 360 aa, unidentified
GVSGSAEGFAKGVTGGGSATPVYPSTTDELVSYLGDSEARVIILTKTFDFTNTEGTETSSGCAPWGTASGCQLAINKDNWCTNYEPNAPTVSSITYNKAGVLGITVNSNKSIVGQGSAGVIKGRGLRIVSGAKNVIIQNIAITDINPKYVWGGDAITLNEADLVWIDHVTTARIARQHIVLGTQADNRVTISNSLIDGRTDYSATCNGHHYWGVYLDGSNDMVTMMGNYFYYTSGRMPKVQGNTLLHAVNNYFHNIEGHAFEIGSGGYVLAEGNAFQNVDAPVESPISGQLFSAPDATTNEQCKSVFGRACQINAFGSSGSFSQADTAVISKFSGKNIATAHLAQNIPKWVMANAGQGKL

SEQ ID NO: 45437 - protein, 328 aa, Aspergillus fumigatus
WLRDSTNQLSGYQALAKKDKALHNLILGAINTQAEFVIQSPYCNAFQPPPPSGLKPTPNGQDDKVHPAYEPSVVFECKYELDSLAHFLALGTQFFENTGSTEFLTERWYMALNTLLSVLDAQSQPTFNEEGQFVTNQYTFQRTTTAGTETLSLGGIGNPLNNGTGLIRSAFRPSDDATILGYFIPPNAMMSVQLKKTADVIKAAGGSADLVKKLRQRGEELDHAVREHGVVHHSKYGDVFAFEVDGYGSRILMDDANIPSLLSLPLLGYVDEKDQVYRNTRKMILDKSGNPYYLTGFAFHGIGGPHSKFISSPSINLSMNKGDANHDS

SEQ ID NO: 45438 - protein, 521 aa, Rasamsonia emersonii CBS 393.64
SAAPKDDPALLRRACPDFTTYAEIPHPPYSGGPLNLPFQRPAVECRTFASPLVERVIDDITSRMVDKDLAQLFRNAFPNTLDTTIAWHTNGSSTDTTTSAKAKSQRDSSQWQGPQTFIVTGDIMAEWLRDSTNQLAPYQALAKKDAALYTLILGAINTQAEFVIQSPYCNAFQPPPPSGLRPSSNGQQDTVHPAYDPSVVFECKYELDSLAHFLALGNQFYEATGSTEFLTSRWYKALKTLLDVLDAESQPTFNDKGQFVTNTYTFQRVTSAGTETLSLGGVGNPLNSGTGLIRSAFRPSDDATIFGFFIPPNAMMSVQLGKTADVIAAAGGDKRLVSDLRQRARNLRNAVLEHGVTNHKKYGDVYAFEVDGYGSRLLMDDANIPSLLSLPLLGFVDQNDVVYQNTRKMILEQAGNPYYLTGSAFQGIGGPHIGLKNAWPMSLLVQALTSDSDAEIAHCIELVRNSSRLGLVHESIDVNNITDYTRSWFAWANSLFAQTILKLAETRPHLVFGKGAGGYRV

SEQ ID NO: 45439 - protein, 517 aa, Aspergillus niger
AAGRDEPSILRRACPDYTSYASTGHAPYSGGPLNLPYQRPAAECRTFVSNAVEQVIDDVTSRMVDKDMAQLFRNAFPNTLDTTIRWHVNSTSTTSSSRKMRRDSSQWQGAQTFVVTGDINAEWLRDSTNQLTGYQTLAKKDPALYNLILGAIHTQAEFVIQSPYCNAFQPPPPSGIQATNNGQQDTVHPAYEPSVVYECKYELDSLANFLALGNEFYENTGSTEFLTSRWYLALDTLLNTTDAQSQPTFNSNRQYVQNQYTFQRQTTLGTETLNLAGIGNPLNGGTGLIRSAFRPSDDATILGFFIPANAMMSVQLKKTADLIRAAGGDSALASNLQTRGENLEQAVRQHGIFNHEKYGEVYAFEVDGYGSRIFMDDANIPSLLALPYLGFVDKSDQVYQNTRKMILDPNGNPYYLTGSDFHGIGGPHIGLENAWPMSLLVQALTTDNVTEITESLNIVRNSSLLGLVHESIDVNNIKSYTRPWFAWANSVFSQTILKVAAEQPEVLFGDGAEPYVI

SEQ ID NO: 45440 - protein, 514 aa, Penicillium sumatraense
RDNPAILKRACPDYTSYASTPHGPYSEGPLKLPFQRPAEACRTFSSSSVEQVIDDMTSRLVDKDLAQLFRNAFPNTLDTTIKWHSNGSSSASSKRHVRRDGADWSGLQTFIVTGDINAEWLRDSTNQLTNYQKLASKDKSLYNLILGAINTQAEFVIQSPYCNAFQPPSISGVKPENSTQQDTVHPTYSKSFVFECKYELDSLAHFLLLGTEFHENTGSTEFITDRWLKALKTVLRVIDAQSQPTFNSKNQFVSNQYTFQRETNIGTETLNLEGVGNPLNEGTGLIRSAFRPSDDATILGFFIPPNAMMSVQLQKIAKIVKKAGGNDDLADELEQRGKKLAEAVKEHGIVNHGKYGDVYAFEVDGYGSRILMDDANIPSLLSLPYLGFVDKSDKVYQNTRKMITEKAGNPYYLEGPAFHGIGGPHIGLENAWPMSLLMQAQTSDNDTEIMESINLVRDSSLLGLVHESVNVTNIKTYTRPWFSWANSVFAQTLLKVAAERPHLIFGEDSEPYVI

SEQ ID NO: 45441 - protein, 512 aa, Talaromyces thermophilus
SNDDPESLSQVCPDYLDYSQVPHPPYSGGPLNLPFQRPVPECRKFVSSAVDKVVDEVSERIEDKDLAQLFRNALPNTLDTTIAWHVNGTDGDTNNNRDDTGAWQGAQTFVVTGDITAEWLRDSTNQLAPYQALARKDKKLYQLILGAINTQAEYVIQFPYCNAFQPPPPSGLDPSSNGQDDVVTPPYDPNLVFECKYELDSLAAFLALGNRFHEATGSTEFVTDRWYKALRTLLRVLDEQALPTFNRHGDFVGNEYTFRRQTDRGTETLNLDGIGNPLNGGTGLIRSAFRPSDDATIFGFFIPPNAMMAVQLSKTAKLLAKAGNKKLSDELDRRADALRRAVLEHGVVHHPRYGKVFAFEVDGYGSTLFMDDANIPSLLSLPYIGFVDAHDPVYRNTRKMITERAGNPYYLTGSDFHGIGGPHVGLQNAWPMSLLVQAITSSDDHEIMTCLELVRNSSLLGLVHESIDVNNIEDYTRPWFAWANSLFGETILKIARERPSLIFGKGAKPYEI

SEQ ID NO: 45442 - protein, 508 aa, Thermomyces lanuginosus
GVNDNPDALSQACPDYLDYSQVPHPPYSGGPLNLPFQRPVPECRKFVSSVVDKVVDEVSERIEDKDLAQLFRNALPNTLDTTIAWHVNGTSNNKGGDSGAWQGAQTFVVTGDITAEWLRDSTNQLAPYQSLARKDKKLYRLILGAINTQAEYVIQFPYCNAFQPPPPSGLDPSSNGQDDVVTPPYDPNLVFECKYELDSLAAFLALGNRFHEETGSTEFVTDRWYKALHTLLRVLDEQARPTFNRQGQFVENEYTFRRRTDRGTETLNLDGIGNPLNGGTGLIRSAFRPSDDASIFGFFIPPNAMMSVQLGKTAKLLTKAGNRKLASELERRANALRRAVFEHGVVHHPRYGRVFAFEVDGYGSALFMDDANIPSLLSLPYIGFIDAHDPIYRNTRKMITERAGNPYYLSGSDFHGIGGPHVGLRNAWPMSLLVQAITSFDDREIMTCLELVRNSSLLGLVHESIDVNNIEDYTRPWFAWANSLFGETILKIARERPSLIFGKGAKPY

SEQ ID NO: 45443 - protein, 208 aa, Unidentified; identical to SEQ ID NO: 56

SEQ ID NO: 45444 - protein, 203 aa, Sodiomyces alcalophilus
RIPGFDISGWQPTTDFARAYANGDRFVYIKATEGTTFKSSAFSRQYTGATQNGFIRGAYHFAQPAASSGAAQARYFASNGGGWSKDGITLPGALDIEYNPNGATCYGLSQSAMVNWIEDFVTTYHGITSRWPVIYTTTDWWTQCTGNSNRFANRCPLWIARYASSVGTLPNGWGFYTFWQYNDKYPQGGDSNWFNGDASRLRA

SEQ ID NO: 45445 - protein, 208 aa, Unidentified
RIPGFDISGWQPTTDFARAYANGDRFVYIKATEGTTFKSSAFSRQYTGATQNGFIRGAYHFAQPAASSGAAQARYFASNGGGWSKDGITLPPALDIEYNPNGATCYGLSQSAMVNWIEDFVTTYHGITSRWPVIYTTTDWWTQCTGNSNRFANRCPLWIARYASSVGTLPNGWGFYTFWQYNDKYPQGGDSNWFNGDASRLRALANGD

SEQ ID NO: 45446 - protein, 208 aa, Unidentified
RIPGFDISGWQPTTDFARAYANGDRFVYIKATEGTTFKSSAFSRQYTGATQNGFIRGAYHFAQPAASSGAAQARYFASNGGGWSKDGITLPGMLDIEYNPNGATCYGLSQSAMVNWIEDFVTTYHGITSRWPVIYTTTDWWTQCTGNSNRFANRCPLWIARYASSVGTLPNGWGFYTFWQYNDKYPQGGDSNWFNGDASRLRALANGD

SEQ ID NO: 45447 - protein, 208 aa, Unidentified
RIPGFDISGWQPTTDFARAYANGDRFVYIKATEGTTFKSSAFSRQYTGATQNGFIRGAYHFAQPAASSGAAQARYFASNGGGWSKDGITLPGALDIAYNPNGATCYGLSQSAMVNWIEDFVTTYHGITSRWPVIYTTTDWWTQCTGNSNRFANRCPLWIARYASSVGTLPNGWGFYTFWQYNDKYPQGGDSNWFNGDASRLRALANGD

SEQ ID NO: 45448 - protein, 208 aa, Unidentified
RIPGFDISGWQPTTDFARAYANGDRFVYIKATEGTTFKSSAFSRQYTGATQNGFIRGAYHFAQPAASSGAAQARYFASNGGGWSKDGITLPGALAIEYNPNGATCYGLSQSAMVNWIEDFVTTYHGITSRWPVIYTTTDWWTQCTGNSNRFANRCPLWIARYASSVGTLPNGWGFYTFWQYNDKYPQGGDSNWFNGDASRLRALANGD

SEQ ID NO: 45449 - protein, 208 aa, Unidentified
RIPGFDISGHQPTTDFARAYANGDRFVYIKATEGTTFKSSAFSRQYTGATQNGFIRGAYHFAQPAASSGAAQARYFASNGGGWSKDGITLPGALDIEYNPNGATCYGLSQSAMVNWIEDFVTTYHGITSRWPVIYTTTDWWTQCTGNSNRFANRCPLWIARYASSVGTLPNGWGFYTFWQYNDKYPQGGDSNWFNGDASRLRALANGD

SEQ ID NO: 45450 - protein, 208 aa, Unidentified
RIPGFDISGWQPTTDFARAYANGDRFVYIKATEGTTFKDSAFSRQYTGATQNGFIRGAYHFAQPAASSGAAQARYFASNGGGWSKDGITLPGALDIEYNPNGATCYGLSQSAMVNWIEDFVTTYHGITSRWPVIYTTTDWWTQCTGNSNRFANRCPLWIARYASSVGTLPNGWGFYTFWQYNDKYPQGGDSNWFNGDASRLRALANGD

SEQ ID NO: 45451 - protein, 208 aa, Unidentified
RIPGFDISGWQPTTDFARAYANGDRFVMIKATEGTTFKSSAFSRQYTGATQNGFIRGAYHFAQPAASSGAAQARYFASNGGGWSKDGITLPGALDIEYNPNGATCYGLSQSAMVNWIEDFVTTYHGITSRWPVIYTTTDWWTQCTGNSNRFANRCPLWIARYASSVGTLPNGWGFYTFWQYNDKYPQGGDSNWFNGDASRLRALANGD

SEQ ID NO: 45452 - protein, 208 aa, Unidentified
RIPGFDISGWQPTTDFARAYANGDRFVYIKATEGTTFKSSAFSRQYTGATQNGFIRGAYHFAQPAASSGAAQARYFASNGGGWSKDGITLPGALDIEYNPNGATCYGLSQSAMVNWIEDFVTTYHGITSRWPMIYTTTDWWTQCTGNSNRFANRCPLWIARYASSVGTLPNGWGFYTFWQYNDKYPQGGDSNWFNGDASRLRALANGD

SEQ ID NO: 45453 - protein, 208 aa, Unidentified
RIPGFDISGWQPTTDFARAYANGDRFVYIKATEGTTFKSSAFSRQYTGATQNGFIRGAYHFAQPAASSGAAQARYFASNGGGWSKDGITLPGALDIEYNPNGATCYGLSQSAMVNWIEDFVTTYHGITSRWPVIYTTTDWWNQCTGNSNRFANRCPLWIARYASSVGTLPNGWGFYTFWQYNDKYPQGGDSNWFNGDASRLRALANGD

SEQ ID NO: 45454 - protein, 208 aa, Unidentified
RIPGFDISGWQPTTDFARAYANGDRFVYIKATEGTTFKSSAFSRQYTGATQNGFIRGAYHFAQPAASSGAAQARYFASNGGGWSKDGITLPGALDIEYNPNGATCYGLSQSAMVNWIEDFVTTYHGITSRWPVIYTTTDWWTQCTGNSNRFANRCPLWIARYASSVGTLPNGWGFYTFWQYNDKYPQGGASNWFNGDASRLRALANGD

SEQ ID NO: 45455 - protein, 208 aa, Unidentified
RIPGFDISGWQPTTDFARAYANGDRFVYIKATEGTTFKSSAFSRQYTGATQNGFIRGAYHFAQPAASSGAAQARYFASNGGGWSKDGITLPGALDIEYNPNGATCYGLSQSAMVNWIEDFVTTYHGITSRWPVIYTTTDWWTQCTGNSNRFANRCPLWIARYASSVGTLPNGWGFYTIWQYNDKYPQGGDSNWFNGDASRLRALANGD

SEQ ID NO: 45456 - protein, 206 aa, Clonostachys rossmaniae
VPGFDISGWQKSTDFAKSYANGDRFVYIKATEGTTFKNPLFSKQYTGATNARLIRGAYHFAQPASSSGASQARFFVANGGGWSNDGITLPGAVDMEYNPSGATCYGLSKTAMVNWIEDFVSTYQALTGRWPVVYTTLDWWTQCTGNSAKFGDRCPLWVARYASAVGQIPAGWSFHTIWQYNAKYPEGGDSDIFNGDETRLKALASG

SEQ ID NO: 45457 - protein, 844 aa, Aspergillus fumigatus
QELAFSPPFYPSPWADGQGEWADAHRRAVEIVSQMTLAEKVNLTTGTGWEMDRCVGQTGSVPRLGINWGLCGQDSPLGIRDSDLNSAFPAGTNVAATWDKTLAYLRGKAMGEEFNDKGVDILLGPAAGPLGKYPDGGRIWEGFSPDPVLTGVLFAETIKGIQDAGVIATAKHYILNEQEHFRQVGEAQGYGYNITETISSNVDDKTMHELYLWPFADAVRAGVGAVMCSYNQINNSYGCQNSQTLNKLLKAELGFQGFVMSDWGAHHSGVGAALAGLDMSMPGDISFDDGLSFWGTNLTVSVLNGTVPAWRVDDMAVRIMTAYYKVGRDRLRIPPNFSSWTRDEYGWEHSAVSEGAWTKVNDFVNVQRSHSQIIREIGAASTVLLKNTGALPLTGKEVKVGVLGEDAGSNPWGANGCPDRGCDNGTLAMAWGSGTAEFPYLVTPEQAIQREVISNGGNVFAVTDNGALSQMADVASQSSVSLVFVNADSGEGYISVDGNEGDRKNLTLWKNGEAVIDTVVSHCNNTIVVIHSVGPVLIDRWYDNPNVTAIIWAGLPGQESGNSLVDVLYGRVNPSAKTPFTWGKTRESYGAPLLTEPNNGNGAPQDDFNEGVFIDYRHFDKRNETPIYEFGHGLSYTTFGYSHLRVQALNSSSSAYVPTSGETKPAPTYGEIGSAADYLYPEGLKRITKFIYPWLNSTDLEDSSDDPNYGWEDSEYIPEGARDGSPQPLLKAGGAPGGNPTLYQDLVRVSATITNTGNVAGYEVPQLYVSLGGPNEPRVVLRKFDRIFLAPGEQKVWTTTLNRRDLANWDVEAQDWVITKYPKKVHVGSSSRKLPLRAPLPRVY

SEQ ID NO: 45458 - protein, 863 aa, Aspergillus fumigatus; identical to SEQ ID NO: 57

SEQ ID NO: 45459 - protein, 863 aa, Aspergillus fumigatus
MRFGWLEVAALTAASVANAQELAFSPPFYPSPWADGQGEWADAHRRAVEIVSQMTLAEKVNLTTGTGWEMDRCVGQTGSVPRLGINWGLCGQDSPLGIRDSDLNSAFPAGTNVAATWDKTLAYLRGKAMGEEFNDKGVDVLLGPAAGPLGKYPDGGRIWEGFSPDPVLTGVLFAETIKGIQDAGVIATAKHYILNEQEHFRQVGEAQGYGYNITETISSNVDDKTMHELYLWPFADAVRAGVGAVMCSYNQINNSYGCQNSQTLNKLLKAELGFQGFVMSDWGAHHSGVGAALAGLDMSMPGDISFDDGLSFWGTNLTVSVLNGTVPAWRVDDMAVRIMTAYYKVGRDRLRIPPNFSSWTRDEYGWEHSAVSEGAWTKVNDFVNVQRSHSQIIREIGAASTVLLKNTGALPLTGKEVKVGVLGEDAGSNPWGANGCPDRGCDNGTLAMAWGSGTAEFPYLVTPEQAIQREVISNGGNVFAVTDNGALSQMADVASQSSVSLVFVNADSGEGYISVDGNEGDRKNLTLWKNGEAVIDTVVSHCNNTIVVIHSVGPVLIDRWYDNPNVTAIIWAGLPGQESGNSLVDVLYGRVNPSAKTPFTWGKTRESYGAPLLTEPNNGNGAPQDDFNEGVFIDYRHFDKRNETPIYEFGHGLSYTTFGYSHLRVQALNSSSSAYVPTSGETKPAPTYGEIGSAADYLYPEGLKRITKFIYPWLNSTDLEDSSDDPNYGWEDSEYIPEGARDGSPQPLLKAGGAPGGNPTLYQDLVRVSATITNTGNVAGYEVPQLYVSLGGPNEPRVVLRKFDRIFLAPGEQKVWTTTLNRRDLANWDVEAQDWVITKYPKKVHVGSSSRKLPLRAPLPRVY

SEQ ID NO: 45460 - protein, 863 aa, Aspergillus fumigatus
MRFGWLEVAALTAASVANAQELAFSPPFYPSPWADGQGEWADAHRRAVEIVSQMTLAEKVNLTTGTGWEMDRCVGQTGSVPRLGINWGMCLQDSPLGIRDSDLNSAFPAGTNVAATWDKTLAYLRGKAMGEEFNDKGVDVLLGPAAGPLGKYPDGGRIWEGFSPDPVLTGVLFAETIKGIQDAGVIATAKHYILNEQEHFRQVGEAQGYGYNITETISSNVDDKTMHELYLWPFADAVRAGVGAVMCSYNQINNSYGCQNSQTLNKLLKAELGFQGFVMSDWGAHHSGVGAALAGLDMSMPGDISFDDGLSFWGTNLTVSVLNGTVPAWRVDDMAVRIMTAYYKVGRDRLRIPPNFSSWTRDEYGWEHSAVSEGAWTKVNDFVNVQRSHSQIIREIGAASTVLLKNTGALPLTGKEVKVGVLGEDAGSNPWGANGCPDRGCDNGTLAMAWGSGTAEFPYLVTPEQAIQREVISNGGNVFAVTDNGALSQMADVASQSSVSLVFVNADSGEGYISVDGNEGDRKNLTLWKNGEAVIDTVVSHCNNTIVVIHSVGPVLIDRWYDNPNVTAIIWAGLPGQESGNSLVDVLYGRVNPSAKTPFTWGKTRESYGAPLLTEPNNGNGAPQDDFNEGVFIDYRHFDKRNETPIYEFGHGLSYTTFGYSHLRVQALNSSSSAYVPTSGETKPAPTYGEIGSAADYLYPEGLKRITKFIYPWLNSTDLEDSSDDPNYGWEDSEYIPEGARDGSPQPLLKAGGAPGGNPTLYQDLVRVSATITNTGNVAGYEVPQLYVSLGGPNEPRVVLRKFDRIFLAPGEQKVWTTTLNRRDLANWDVEAQDWVITKYPKKVHVGSSSRKLPLRAPLPRVY

SEQ ID NO: 45461 - protein, 863 aa, Aspergillus fumigatus
MRFGWLEVAALTAASVANAQELAFSPPFYPSPWADGQGEWADAHRRAVEIVSQMTLAEKVNLTTGTGWEMDRCVGQTGSVPRLGINWGLCGQDSPLGIRFSDLNSAFPAGTNVAATWDKTLAYLRGKAMGEEFNDKGVDILLGPAAGPLGKYPDGGRIWEGFSPDPVLTGVLFAETIKGIQDAGVIATAKHYILNEQEHFRQVGEAQGYGYNITETISSNVDDKTMHELYLWPFADAVRAGVGAVMCSYNQINNSYGCQNSQTLNKLLKAELGFQGFVMSDWSAHHSGVGAALAGLDMSMPGDISFDDGLSFWGTNLTVSVLNGTVPAWRVDDMAVRIMTAYYKVGRDRLRIPPNFSSWTRDEYGWEHSAVSEGAWTKVNDFVNVQRSHSQIIREIGAASTVLLKNTGALPLTGKEVKVGVLGEDAGSNPWGANGCPDRGCDNGTLAMAWGSGTANFPYLVTPEQAIQREVISNGGNVFAVTDNGALSQMADVASQSSVSLVFVNADSGEGYISVDGNEGDRKNLTLWKNGEAVIDTVVSHCNNTIVVIHSVGPVLIDRWYDNPNVTAIIWAGLPGQESGNSLVDVLYGRVNPSAKTPFTWGKTRESYGAPLLTEPNNGNGAPQDDFNEGVFIDYRHFDKRNETPIYEFGHGLSYTTFGYSHLRVQALNSSSSAYVPTSGETKPAPTYGEIGSAADYLYPEGLKRITKFIYPWLNSTDLEDSSDDPNYGWEDSEYIPEGARDGSPQPLLKAGGAPGGNPTLYQDLVRVSATITNTGNVAGYEVPQLYVSLGGPNEPRVVLRKFDRIFLAPGEQKVWTTTLNRRDLANWDVEAQDWVITKYPKKVHVGSSSRKLPLRAPLPRVY

SEQ ID NO: 45462 - protein, 863 aa, Aspergillus fumigatus
MRFGWLEVAALTAASVANAQELAFSPPFYPSPWADGQGEWADAHRRAVEIVSQMTLAEKVNLTTGTGWEMDRCVGQTGSVPRLGINWGLCGQDSPLGIRFSDLNSAFPAGTNVAATWDKTLAYLRGKAMGEEFNDKGVDILLGPAAGPLGKYPDGGRIWEGFSPDPVLTGVLFAETIKGIQDAGVIATAKHYILNEQEHFRQVGEAQGYGYNITETISSNVDDKTMHELYLWPFADAVRAGVGAVMCSYNQINNSYGCQNSQTLNKLLKAELGFQGFVMSDWGAHHSGVGAALAGLDMSMPGDISFDDGLSFWGTNLTVSVLNGTVPAWRVDDMAVRIMTAYYKVGRDRLRIPPNFSSWTRDEYGWEHSAVSEGAWTKVNDFVNVQRSHSQIIREIGAASTVLLKNTGALPLTGKEVKVGVLGEDAGSNPWGANGCPDRGCDNGTLAMAWGSGTANFPYLVTPEQAIQREVISNGGNVFAVTDNGALSQMADVASQSSVSLVFVNADSGEGFISVDGNEGDRKNLTLWKNGEAVIDTVVSHCNNTIVVIHSVGPVLIDRWYDNPNVTAIIWAGLPGQESGNSLVDVLYGRVNPSAKTPFTWGKTRESYGAPLLTEPNNGNGAPQDDFNEGVFIDYRHFDKRNETPIYEFGHGLSYTTFGYSHLRVQALNSSSSAYVPTSGETKPAPTYGEIGSAADYLYPEGLKRITKFIYPWLNSTDLEDSSDDPNYGWEDSEYIPEGARDGSPQPLLKAGGAPGGNPTLYQDLVRVSATITNTGNVAGYEVPQLYVSLGGPNEPRVVLRKFDRIFLAPGEQKVWTTTLNRRDLANWDVEAQDWVITKYPKKVHVGSSSRKLPLRAPLPRVY

SEQ ID NO: 45463 - protein, 863 aa, Aspergillus fumigatus
MRFGWLEVAALTAASVANAQELAFSPPFYPSPWADGQGEWADAHRRAVEIVSQMTLAEKVNLTTGTGWEMDRCVGQTGSVPRLGINWGLCGQDSPLGIRDSDLNSAFPAGTNVAATWDKTLAYLRGKAMGEEFNDKGVDILLGPAAGPLGKYPDGGRIWEGFSPDPVLTGVLFAETIKGIQDAGVIATAKHYILNEQEHFRQVGEAQGYGYNITETISSNVDDKTMHELYLWPFADAVRAGVGAVMCSYNQINNSYGCQNSQTLNKLLKAELGFQGFVMSDWSAHHSGVGAALAGLDMSMPGDISFDDGLSFWGTNLTVSVLNGTVPAWRVDDMAVRIMTAYYKVGRDRLRIPPNFSSWTRDEYGWEHSAVSEGAWTKVNDFVNVQRSHSQIIREIGAASTVLLKNTGALPLTGKEVKVGVLGEDAGSNPWGANGCPDRGCDNGTLAMAWGSGTANFPYLVTPEQAIQREVISNGGNVFAVTDNGALSQMADVASQSSVSLVFVNADSGEGFISVDGNEGDRKNLTLWKNGEAVIDTVVSHCNNTIVVIHSVGPVLIDRWYDNPNVTAIIWAGLPGQESGNSLVDVLYGRVNPSAKTPFTWGKTRESYGAPLLTEPNNGNGAPQDDFNEGVFIDYRHFDKRNETPIYEFGHGLSYTTFGYSHLRVQALNSSSSAYVPTSGETKPAPTYGEIGSAADYLYPEGLKRITKFIYPWLNSTDLEDSSDDPNYGWEDSEYIPEGARDGSPQPLLKAGGAPGGNPTLYQDLVRVSATITNTGNVAGYEVPQLYVSLGGPNEPRVVLRKFDRIFLAPGEQKVWTTTLNRRDLANWDVEAQDWVITKYPKKVHVGSSSRKLPLRAPLPRVY

SEQ ID NO: 45464 - protein, 863 aa, Aspergillus fumigatus
MRFGWLEVAALTAASVANAQELAFSPPFYPSPWADGQGEWADAHRRAVEIVSQMTLAEKVNLTTGTGWEMDRCVGQTGSVPRLGINWGLCGQDSPLGIRFSDLNSAFPAGTNVAATWDKTLAYLRGKAMGEEFNDKGVDILLGPAAGPLGKYPDGGRIWEGFSPDPVLTGVLFAETIKGIQDAGVIATAKHYILNEQEHFRQVGEAQGYGYNITETISSNVDDKTMHELYLWPFADAVRAGVGAVMCSYNQINNSYGCQNSQTLNKLLKAELGFQGFVMSDWSAHHSGVGAALAGLDMSMPGDISFDDGLSFWGTNLTVSVLNGTVPAWRVDDMAVRIMTAYYKVGRDRLRIPPNFSSWTRDEYGWEHSAVSEGAWTKVNDFVNVQRSHSQIIREIGAASTVLLKNTGALPLTGKEVKVGVLGEDAGSNPWGANGCPDRGCDNGTLAMAWGSGTAEFPYLVTPEQAIQREVISNGGNVFAVTDNGALSQMADVASQSSVSLVFVNADSGEGFISVDGNEGDRKNLTLWKNGEAVIDTVVSHCNNTIVVIHSVGPVLIDRWYDNPNVTAIIWAGLPGQESGNSLVDVLYGRVNPSAKTPFTWGKTRESYGAPLLTEPNNGNGAPQDDFNEGVFIDYRHFDKRNETPIYEFGHGLSYTTFGYSHLRVQALNSSSSAYVPTSGETKPAPTYGEIGSAADYLYPEGLKRITKFIYPWLNSTDLEDSSDDPNYGWEDSEYIPEGARDGSPQPLLKAGGAPGGNPTLYQDLVRVSATITNTGNVAGYEVPQLYVSLGGPNEPRVVLRKFDRIFLAPGEQKVWTTTLNRRDLANWDVEAQDWVITKYPKKVHVGSSSRKLPLRAPLPRVY

SEQ ID NO: 45465 - protein, 863 aa, Aspergillus fumigatus
MRFGWLEVAALTAASVANAQELAFSPPFYPSPWADGQGEWADAHRRAVEIVSQMTLAEKVNLTTGTGWEMDRCVGQTGSVPRLGINWGLCGQDSPLGIRFSDLNSAFPAGTNVAATWDKTLAYLRGKAMGEEFNDKGVDILLGPAAGPLGKYPDGGRIWEGFSPDPVLTGVLFAETIKGIQDAGVIATAKHYILNEQEHFRQVGEAQGYGYNITETISSNVDDKTMHELYLWPFADAVRAGVGAVMCSYNQINNSYGCQNSQTLNKLLKAELGFQGFVMSDGGAHHSGVGAALAGLDMSMPGDISFDDGLSFWGTNLTVSVLNGTVPAWRVDDMAVRIMTAYYKVGRDRLRIPPNFSSWTRDEYGWEHSAVSEGAWTKVNDFVNVQRSHSQIIREIGAASTVLLKNTGALPLTGKEVKVGVLGEDAGSNPWGANGCPDRGCDNGTLAMAWGSGTANFPYLVTPEQAIQREVISNGGNVFAVTDNGALSQMADVASQSSVSLVFVNADSGEGFISVDGNEGDRKNLTLWKNGEAVIDTVVSHCNNTIVVIHSVGPVLIDRWYDNPNVTAIIWAGLPGQESGNSLVDVLYGRVNPSAKTPFTWGKTRESYGAPLLTEPNNGNGAPQDDFNEGVFIDYRHFDKRNETPIYEFGHGLSYTTFGYSHLRVQALNSSSSAYVPTSGETKPAPTYGEIGSAADYLYPEGLKRITKFIYPWLNSTDLEDSSDDPNYGWEDSEYIPEGARDGSPQPLLKAGGAPGGNPTLYQDLVRVSATITNTGNVAGYEVPQLYVSLGGPNEPRVVLRKFDRIFLAPGEQKVWTTTLNRRDLANWDVEAQDWVITKYPKKVHVGSSSRKLPLRAPLPRVY

SEQ ID NO: 45466 - protein, 863 aa, Aspergillus fumigatus
MRFGWLEVAALTAASVANAQELAFSPPFYPSPWADGQGEWADAHRRAVEIVSQMTLAEKVNLTTGTGWEMDRCVGQTGSVPRLGINWGMCLQDSPLGIRDSDLNSAFPAGTNVAATWDKTLAYLRGKAMGEEFNDKGVDVLLGPAAGPLGKYPDGGRIWEGFSPDPVLTGVLFAETIKGIQDAGVVATAKHYILNEQEHFRQVGEAQGYGYNITETISSNVDDKTMHELYLWPFADAVRAGVGAVMCSYNQINNSYGCQNSQTLNKLLKAELGFQGFVMSDWGAHHSGVGAALAGLDMSMPGDISFDDGLSFWGTNLTVSVLNGTVPAWRVDDMAVRIMTAYYKVGRDRLRIPPNFSSWTRDEYGWEHSAVSEGAWTKVNDFVNVQRSHSQIIREIGAASTVLLKNTGALPLTGKEVKVGVLGEDAGSNPWGANGCPDRGCDNGTLAMAWGSGTAEFPYLVTPEQAIQREVISNGGNVFAVTDNGALSQMADVASQSSVSLVFVNADSGEGYISVDGNEGDRKNLTLWKNGEAVIDTVVSHCNNTIVVIHSVGPVLIDRWYDNPNVTAIIWAGLPGQESGNSLVDVLYGRVNPSAKTPFTWGKTRESYGAPLLTEPNNGNGAPQDDFNEGVFIDYRHFDKRNETPIYEFGHGLSYTTFGYSHLRVQALNSSSSAYVPTSGETKPAPTYGEIGSAADYLYPEGLKRITKFIYPWLNSTDLEDSSDDPNYGWEDSEYIPEGARDGSPQPLLKAGGAPGGNPTLYQDLVRVSATITNTGNVAGYEVPQLYVSLGGPNEPRVVLRKFDRIFLAPGEQKVWTTTLNRRDLANWDVEAQDWVITKYPKKVHVGSSSRKLPLRAPLPRVY

SEQ ID NO: 45467 - protein, 863 aa, Aspergillus fumigatus
MRFGWLEVAALTAASVANAQELAFSPPFYPSPWADGQGEWADAHRRAVEIVSQMTLAEKVNLTTGTGWEMDRCVGQTGSVPRLGINWGLCGQDSPLGIRFSDLNSAFPAGTNVAATWDKTLAYLRGKAMGEEFNDKGVDILLGPAAGPLGKYPDGGRIWEGFSPDPVLTGVLFAETIKGIQDAGVIATAKHYILNEQEHFRQVGEAQGYGYNITETISSNVDDKTMHELYLWPFADAVRAGVGAVMCSYNQINNSYGCQNSQTLNKLLKAELGFQGFVMSDWSAHHSGVGAALAGLDMSMPGDISFDDGLSFWGTNLTVSVLNGTVPAWRVDDMAVRIMTAYYKVGRDRLRIPPNFSSWTRDEYGWEHSAVSEGAWTKVNDFVNVQRSHSQIIREIGAASTVLLKNTGALPLTGKEVKVGVLGEDAGSNPWGANGCPDRGCDNGTLAMAWGSGTANFPYLVTPEQAIQREVISNGGNVFAVTDNGALSQMADVASQSSVSLVFVNADSGEGFISVDGNEGDRKNLTLWKNGEAVIDTVVSHCNNTIVVIHSVGPVLIDRWYDNPNVTAIIWAGLPGQESGNSLVDVLYGRVNPSAKTPFTWGKTRESYGAPLLTEPNNGNGAPQDDFNEGVFIDYRHFDKRNETPIYEFGHGLSYTTFGYSHLRVQALNSSSSAYVPTSGETKPAPTYGEIGSAADYLYPEGLKRITKFIYPWLNSTDLEDSSDDPNYGWEDSEYIPEGARDGSPQPLLKAGGAPGGNPTLYQDLVRVSATITNTGNVAGYEVPQLYVSLGGPNEPRVVLRKFDRIFLAPGEQKVWTTTLNRRDLANWDVEAQDWVITKYPKKVHVGSSSRKLPLRAPLPRVY

SEQ ID NO: 45468 - protein, 862 aa, Aspergillus fumigatus
MRFGWLEVAALTAASVANAQELAFSPFYPSPWADGQGEWADAHRRAVEIVSQMTLAEKVNLTTGTGWEMDRCVGQTGSVPRLGINWGLCGQDSPLGIRFSDLNSAFPAGTNVAATWDKTLAYLRGKAMGEEFNDKGVDILLGPAAGPLGKYPDGGRIWEGFSPDPVLTGVLFAETIKGIQDAGVIATAKHYILNEQEHFRQVGEAQGYGYNITETISSNVDDKTMHELYLWPFADAVRAGVGAVMCSYNQINNSYGCQNSQTLNKLLKAELGFQGFVMSDWSAHHSGVGAALAGLDMSMPGDISFDDGLSFWGTNLTVSVLNGTVPAWRVDDMAVRIMTAYYKVGRDRLRIPPNFSSWTRDEYGWEHSAVSEGAWTKVNDFVNVQRSHSQIIREIGAASTVLLKNTGALPLTGKEVKVGVLGEDAGSNPWGANGCPDRGCDNGTLAMAWGSGTANFPYLVTPEQAIQREVISNGGNVFAVTDNGALSQMADVASQSSVSLVFVNADSGEGFISVDGNEGDRKNLTLWKNGEAVIDTVVSHCNNTIVVIHSVGPVLIDRWYDNPNVTAIIWAGLPGQESGNSLVDVLYGRVNPSAKTPFTWGKTRESYGAPLLTEPNNGNGAPQDDFNEGVFIDYRHFDKRNETPIYEFGHGLSYTTFGYSHLRVQALNSSSSAYVPTSGETKPAPTYGEIGSAADYLYPEGLKRITKFIYPWLNSTDLEDSSDDPNYGWEDSEYIPEGARDGSPQPLLKAGGAPGGNPTLYQDLVRVSATITNTGNVAGYEVPQLYVSLGGPNEPRVVLRKFDRIFLAPGEQKVWTTTLNRRDLANWDVEAQDWVITKYPKKVHVGSSSRKLPLRAPLPRVY

SEQ ID NO: 45469 - protein, 844 aa, Aspergillus fumigatus
QELAFSPPFYPSPWADGQGEWADAHRRAVEIVSQMTLAEKVNLTTGTGWEMDRCVGQTGSVPRLGINWGLCGQDSPLGIRFSDLNSAFPAGTNVAATWDKTLAYLRGKAMGEEFNDKGVDILLGPAAGPLGKYPDGGRIWEGFSPDPVLTGVLFAETIKGIQDAGVIATAKHYILNEQEHFRQVGEAQGYGYNITETISSNVDDKTMHELYLWPFADAVRAGVGAVMCSYNQINNSYGCQNSQTLNKLLKAELGFQGFVMSDWSAHHSGVGAALAGLDMSMPGDISFDDGLSFWGTNLTVSVLNGTVPAWRVDDMAVRIMTAYYKVGRDRLRIPPNFSSWTRDEYGWEHSAVSEGAWTKVNDFVNVQRSHSQIIREIGAASTVLLKNTGALPLTGKEVKVGVLGEDAGSNPWGANGCPDRGCDNGTLAMAWGSGTANFPYLVTPEQAIQREVISNGGNVFAVTDNGALSQMADVASQSSVSLVFVNADSGEGFISVDGNEGDRKNLTLWKNGEAVIDTVVSHCNNTIVVIHSVGPVLIDRWYDNPNVTAIIWAGLPGQESGNSLVDVLYGRVNPSAKTPFTWGKTRESYGAPLLTEPNNGNGAPQDDFNEGVFIDYRHFDKRNETPIYEFGHGLSYTTFGYSHLRVQALNSSSSAYVPTSGETKPAPTYGEIGSAADYLYPEGLKRITKFIYPWLNSTDLEDSSDDPNYGWEDSEYIPEGARDGSPQPLLKAGGAPGGNPTLYQDLVRVSATITNTGNVAGYEVPQLYVSLGGPNEPRVVLRKFDRIFLAPGEQKVWTTTLNRRDLANWDVEAQDWVITKYPKKVHVGSSSRKLPLRAPLPRVY

SEQ ID NO: 45470 - protein, 863 aa, Aspergillus fumigatus
MRFGWLEVAALTAASVANAQELAFSPPFYPSPWADGQGEWADAHRRAVEIVSQMTLAEKVNLTTGTGWEMDRCVGQTGSVPRLGINWGLCLQDSPLGIRFSDLNSAFPAGTNVAATWDKTLAYLRGKAMGEEFNDKGVDILLGPAAGPLGKYPDGGRIWEGFSPDPVLTGVLFAETIKGIQDAGVIATAKHYILNEQEHFRQVGEAQGYGYNITETISSNVDDKTMHELYLWPFADAVRAGVGAVMCSYNQINNSYGCQNSQTLNKLLKAELGFQGFVMSDWSAHHSGVGAALAGLDMSMPGDISFDDGLSFWGTNLTVSVLNGTVPAWRVDDMAVRIMTAYYKVGRDRLRIPPNFSSWTRDEYGWEHSAVSEGAWTKVNDFVNVQRSHSQIIREIGAASTVLLKNTGALPLTGKEVKVGVLGEDAGSNPWGANGCPDRGCDNGTLAMAWGSGTANFPYLVTPEQAIQREVISNGGNVFAVTDNGALSQMADVASQSSVSLVFVNADSGEGFISVDGNEGDRKNLTLWKNGEAVIDTVVSHCNNTIVVIHSVGPVLIDRWYDNPNVTAIIWAGLPGQESGNSLVDVLYGRVNPSAKTPFTWGKTRESYGAPLLTEPNNGNGAPQDDFNEGVFIDYRHFDKRNETPIYEFGHGLSYTTFGYSHLRVQALNSSSSAYVPTSGETKPAPTYGEIGSAADYLYPEGLKRITKFIYPWLNSTDLEDSSDDPNYGWEDSEYIPEGARDGSPQPLLKAGGAPGGNPTLYQDLVRVSATITNTGNVAGYEVPQLYVSLGGPNEPRVVLRKFDRIFLAPGEQKVWTTTLNRRDLANWDVEAQDWVITKYPKKVHVGSSSRKLPLRAPLPRVY

SEQ ID NO: 45471 - protein, 863 aa, Aspergillus fumigatus
MRFGWLEVAALTAASVANAQELAFSPPFYPSPWADGQGEWADAHRRAVEIVSQMTLAEKVNLTTGTGWEMDRCVGQTGSVPRLGINWGLCGQDSPLGIRFSDLNSAFPAGTNVAATWDKTLAYLRGKAMGEEFNDKGVDVLLGPAAGPLGKYPDGGRIWEGFSPDPVLTGVLFAETIKGIQDAGVIATAKHYILNEQEHFRQVGEAQGYGYNITETISSNVDDKTMHELYLWPFADAVRAGVGAVMCSYNQINNSYGCQNSQTLNKLLKAELGFQGFVMSDWSAHHSGVGAALAGLDMSMPGDISFDDGLSFWGTNLTVSVLNGTVPAWRVDDMAVRIMTAYYKVGRDRLRIPPNFSSWTRDEYGWEHSAVSEGAWTKVNDFVNVQRSHSQIIREIGAASTVLLKNTGALPLTGKEVKVGVLGEDAGSNPWGANGCPDRGCDNGTLAMAWGSGTANFPYLVTPEQAIQREVISNGGNVFAVTDNGALSQMADVASQSSVSLVFVNADSGEGFISVDGNEGDRKNLTLWKNGEAVIDTVVSHCNNTIVVIHSVGPVLIDRWYDNPNVTAIIWAGLPGQESGNSLVDVLYGRVNPSAKTPFTWGKTRESYGAPLLTEPNNGNGAPQDDFNEGVFIDYRHFDKRNETPIYEFGHGLSYTTFGYSHLRVQALNSSSSAYVPTSGETKPAPTYGEIGSAADYLYPEGLKRITKFIYPWLNSTDLEDSSDDPNYGWEDSEYIPEGARDGSPQPLLKAGGAPGGNPTLYQDLVRVSATITNTGNVAGYEVPQLYVSLGGPNEPRVVLRKFDRIFLAPGEQKVWTTTLNRRDLANWDVEAQDWVITKYPKKVHVGSSSRKLPLRAPLPRVY

SEQ ID NO: 45472 - protein, 863 aa, Aspergillus fumigatus
MRFGWLEVAALTAASVANAQELAFSPPFYPSPWADGQGEWADAHRRAVEIVSQMTLAEKVNLTTGTGWEMDRCVGQTGSVPRLGINWGMCGQDSPLGIRFSDLNSAFPAGTNVAATWDKTLAYLRGKAMGEEFNDKGVDILLGPAAGPLGKYPDGGRIWEGFSPDPVLTGVLFAETIKGIQDAGVIATAKHYILNEQEHFRQVGEAQGYGYNITETISSNVDDKTMHELYLWPFADAVRAGVGAVMCSYNQINNSYGCQNSQTLNKLLKAELGFQGFVMSDWSAHHSGVGAALAGLDMSMPGDISFDDGLSFWGTNLTVSVLNGTVPAWRVDDMAVRIMTAYYKVGRDRLRIPPNFSSWTRDEYGWEHSAVSEGAWTKVNDFVNVQRSHSQIIREIGAASTVLLKNTGALPLTGKEVKVGVLGEDAGSNPWGANGCPDRGCDNGTLAMAWGSGTANFPYLVTPEQAIQREVISNGGNVFAVTDNGALSQMADVASQSSVSLVFVNADSGEGFISVDGNEGDRKNLTLWKNGEAVIDTVVSHCNNTIVVIHSVGPVLIDRWYDNPNVTAIIWAGLPGQESGNSLVDVLYGRVNPSAKTPFTWGKTRESYGAPLLTEPNNGNGAPQDDFNEGVFIDYRHFDKRNETPIYEFGHGLSYTTFGYSHLRVQALNSSSSAYVPTSGETKPAPTYGEIGSAADYLYPEGLKRITKFIYPWLNSTDLEDSSDDPNYGWEDSEYIPEGARDGSPQPLLKAGGAPGGNPTLYQDLVRVSATITNTGNVAGYEVPQLYVSLGGPNEPRVVLRKFDRIFLAPGEQKVWTTTLNRRDLANWDVEAQDWVITKYPKKVHVGSSSRKLPLRAPLPRVY

SEQ ID NO: 45473 - protein, 863 aa, Aspergillus fumigatus
MRFGWLEVAALTAASVANAQELAFSPPFYPSPWADGQGEWADAHRRAVEIVSQMTLAEKVNLTTGTGWEMDRCVGQTGSVPRLGINWGLCGQDSPLGIRFSDLNSAFPAGTNVAATWDKTLAYLRGKAMGEEFNDKGVDILLGPAAGPLGKYPDGGRIWEGFSPDPVLTGVLFAETIKGIQDAGVVATAKHYILNEQEHFRQVGEAQGYGYNITETISSNVDDKTMHELYLWPFADAVRAGVGAVMCSYNQINNSYGCQNSQTLNKLLKAELGFQGFVMSDWSAHHSGVGAALAGLDMSMPGDISFDDGLSFWGTNLTVSVLNGTVPAWRVDDMAVRIMTAYYKVGRDRLRIPPNFSSWTRDEYGWEHSAVSEGAWTKVNDFVNVQRSHSQIIREIGAASTVLLKNTGALPLTGKEVKVGVLGEDAGSNPWGANGCPDRGCDNGTLAMAWGSGTANFPYLVTPEQAIQREVISNGGNVFAVTDNGALSQMADVASQSSVSLVFVNADSGEGFISVDGNEGDRKNLTLWKNGEAVIDTVVSHCNNTIVVIHSVGPVLIDRWYDNPNVTAIIWAGLPGQESGNSLVDVLYGRVNPSAKTPFTWGKTRESYGAPLLTEPNNGNGAPQDDFNEGVFIDYRHFDKRNETPIYEFGHGLSYTTFGYSHLRVQALNSSSSAYVPTSGETKPAPTYGEIGSAADYLYPEGLKRITKFIYPWLNSTDLEDSSDDPNYGWEDSEYIPEGARDGSPQPLLKAGGAPGGNPTLYQDLVRVSATITNTGNVAGYEVPQLYVSLGGPNEPRVVLRKFDRIFLAPGEQKVWTTTLNRRDLANWDVEAQDWVITKYPKKVHVGSSSRKLPLRAPLPRVY

SEQ ID NO: 45474 - protein, 873 aa, Neosartorya
MRFGWLEVAALTAASVANAQVFDNSHGNNQELAFSPPFYPSPWADGQGEWADAHRRAVEIVSQMTLAEKVNLTTGTGWEMDRCVGQTGSVPRLGINWGLCGQDSPLGIRFSDLNSAFPAGTNVAATWDKTLAYLRGKAMGEEFNDKGVDILLGPAAGPLGKYPDGGRIWEGFSPDPALTGVLFAETIKGIQDAGVIATAKHYILNEQEHFRQVGEAQGYGYNITETISSNVDDKTMHELYLWPFADAVRAGVGAVMCSYNQINNSYGCQNSQTLNKLLKAELGFQGFVMSDWSAHHSGVGAALAGLDMSMPGDISFDDGLSFWGTNLTVSVLNGTVPAWRVDDMAVRIMTAYYKVGRDRLRIPPNFSSWTRDEYGWEHSAVSEGAWTKVNDFVNVQRSHSQIIREIGAASTVLLKNTGALPLTGKEVKVGVLGEDAGSNPWGANGCPDRGCDNGTLAMAWGSGTANFPYLVTPEQAIQREVISNGGNVFAVTDNGALSQMADVASQSSVSLVFVNADSGEGFISVDGNEGDRKNLTLWKNGEAVIDTVVSHCNNTIVVIHSVGPVLIDRWYDNPNVTAIIWAGLPGQESGNSLVDVLYGRVNPSAKTPFTWGKTRESYGAPLLTEPNNGNGAPQDDFNEGVFIDYRHFDKRNETPIYEFGHGLSYTTFGYSHLRVQALNSSSSAYVPTSGETKPAPTYGEIGSAADYLYPEGLKRITKFIYPWLNSTDLEDSSDDPNYGWEDSEYIPEGARDGSPQPLLKAGGAPGGNPTLYQDLVRVSATITNTGNVAGYEVPQLYVSLGGPNEPRVVLRKFDRIFLAPGEQKVWTTTLNRRDLANWDVEAQDWVITKYPKKVHVGSSSRKLPLRAPLPRVY

SEQ ID NO: 45475 - protein, 870 aa, Aspergillus fumigatus
MRFGWLEVAALTAASVANAQVFDNSHGNNQELAFSPPFYPSPWADGQGEWADAHRRAVEIVSQMTLAEKVNLTTGTGWEMDRCVGQTGSVPRLGINWGLCGQDSPLGIRFSDLNSAFPAGTNVAATWDKTLAYLRGKAMGEEFNDKGVDILLGPAAGPLGKYPDGGRIWEGFSPDPALTGVLFAETIKGIQDAGVIATAKHYILNEQEHFRQVGEAQGYGYNITETISSNVDDKTMHELYLWPFADAVRAGVGAVMCSYNQINNSYGCQNSQTLNKLLKAELGFQGFVMSDWSAHHSGVGAALAGLDMSMPGDISFDDGLSFWGTNLTVSVLNGTVPAWRVDDMAVRIMTAYYKVGRDRLRIPPNFSSWTRDEYGWEHSAVSEGAWTKVNDFVNVQRSHSQIIREIGAASTVLLKNTGALPLTGKEVKVGVLGEDAGSNPWGANGCPDRGCDNGTLAMAWGSGTANFPYLVTPEQAIQREVISNGGNVFAVTDNGALSQMADVASQSSVSLVFVNADSGEGFISVDGNEGDRKNLTLWKNGEAVIDTVVSHCNNTIVVIHSVGPVLIDRWYDNPNVTAIIWAGLPGQESGNSLVDVLYGRVNPSAKTPFTWGKTRESYGAPLLTEPNNGNGAPQDDFNEGVFIDYRHFDKRNETPIYEFGHGLSYTTFGYSHLRVQALNSSSSAYVPTSGETKPAPTYGEIGSAADYLYPEGLKRITKFIYPWLNSTDLEDSSDDPNYGWEDSEYIPEGARDGSPQPLLKAGGAPGGNPTLYQDLVRVSATITNTGNVAGYEVPQLYVSLGGPNEPRVVLRKFDRIFLAPGEQKVWTTTLNRRDLANWDVEAQDWVITKYPKKVHVGSSSRKLPLRAPLP

SEQ ID NO: 45476 - protein, 873 aa, Neosartorya
MRFGWLEVAALTAASVANAQVFDNSHGNNQELAFSPPFYPSPWADGQGEWADAHRRAVEIVSQMTLAEKVNLTTGTGWEMDRCVGQTGSVPRLGINWGLCGQDSPLGIRFSDLNSAFPAGTNVAATWDKTLAYLRGKAMGEEFNDKGVDILLGPAAGPLGKYPDGGRIWEGFSPDPALTGVLFAETIKGIQDAGVIATAKHYILNEQEHFRQVGEAQGYGYNITETISSNVDDKTMHELYLWPFADAVRAGVGAVMCSYNQINNSYGCQNSQTLNKLLKAELGFQGFVMSDWSAHHSGVGAALAGLDMSMPGDISFDDGLSFWGTNLTVSVLNGTVPAWRVDDMAVRIMTAYYKVGRDRLRIPPNFSSWTRDEYGWEHSAVSEGAWTKVNDFVNVQRSHSQIIREIGAASTVLLKNTGALPLTGKEVKVGVLGEDAGSNPWGANGCPDRGCDNGTLAMAWGSGTANFPYLVTPEQAIQREVISNGGNVFAVTDNGALSQMADVASQSSVSLVFVNADSGEGFISVDGNEGDRKNLTLWKNGEAVIDTVVSHCNNTIVVIHSVGPVLIDRWYDNPNVTAIIWAGLPGQESGNSLVDVLYGRVNPSAKTPFTWGKTRESYGAPLLTEPNNGNGAPQDDFNEGVFIDYRHFDKRNETPIYEFGHGLSYTTFGYSHLRVQALNSSSSAYVPTSGETKPAPTYGEIGSAADYLYPEGLKRITKFIYPWLNSTDLEDSSDDPNYGWQDSEYIPEGARDGSPQPLLKAGGAPGGNPTLYQDLVRVSATITNTGNVAGYEVPQLYVSLGGPNEPRVVLRKFDRIFLAPGEQKVWTTTLNRRDLANWDVEAQDWVITKYPKKVHVGSSSRKLPLRAPLPRVY

SEQ ID NO: 45477 - protein, 863 aa, Aspergillus fumigatus
MRFGWLEVAALTAASVANAQELAFSPPFYPSPWADGQGEWADAHRRAVEIVSQMTLAEKVNLTTGTGWEMDRCVGQTGSVPRLGINWGLCGQDSPLGIRFSDLNSAFPAGTNVAATWDKTLAYLRGKAMGEEFNDKGVDVLLGPAAGPLGKYPDGGRIWEGFSPDPVLTGVLFAETIKGIQDAGVVATAKHYILNEQEHFRQVGEAQGYGYNITETISSNVDDKTMHELYLWPFADAVRAGVGAVMCSYNQINNSYGCQNSQTLNKLLKAELGFQGFVMSDWSAHHSGVGAALAGLDMSMPGDISFDDGLSFWGTNLTVSVLNGTVPAWRVDDMAVRIMTAYYKVGRDRLRIPPNFSSWTRDEYGWEHSAVSEGAWTKVNDFVNVQRSHSQIIREIGAASTVLLKNTGALPLTGKEVKVGVLGEDAGSNPWGANGCPDRGCDNGTLAMAWGSGTANFPYLVTPEQAIQREVISNGGNVFAVTDNGALSQMADVASQSSVSLVFVNADSGEGFISVDGNEGDRKNLTLWKNGEAVIDTVVSHCNNTIVVIHSVGPVLIDRWYDNPNVTAIIWAGLPGQESGNSLVDVLYGRVNPSAKTPFTWGKTRESYGAPLLTEPNNGNGAPQDDFNEGVFIDYRHFDKRNETPIYEFGHGLSYTTFGYSHLRVQALNSSSSAYVPTSGETKPAPTYGEIGSAADYLYPEGLKRITKFIYPWLNSTDLEDSSDDPNYGWEDSEYIPEGARDGSPQPLLKAGGAPGGNPTLYQDLVRVSATITNTGNVAGYEVPQLYVSLGGPNEPRVVLRKFDRIFLAPGEQKVWTTTLNRRDLANWDVEAQDWVITKYPKKVHVGSSSRKLPLRAPLPRVY

SEQ ID NO: 45478 - protein, 627 aa, Aspergillus fumigatus
PWADGQGEWADAHRRAVEIVSQMTLAEKVNLTTGTGWEMDRCVGQTGSVPRLGINWGLCGQDSPLGIRFSDLNSAFPAGTNVAATWDKTLAYLRGKAMGEEFNDKGVDILLGPAAGPLGKYPDGGRIWEGFSPDPALTGVLFAETIKGIQDAGVIATAKHYILNEQEHFRQVGEAQGYGYNITETISSNVDDKTMHELYLWPFADAVRAGVGAVMCSYNQINNSYGCQNSQTLNKLLKAELGFQGFVMSDWSAHHSGVGAALAGLDMSMPGDISFDDGLSFWGTNLTVSVLNGTVPAWRVDDMAVRIMTAYYKVGRDRLRIPPNFSSWTRDEYGWEHSAVSEGAWTKVNDFVNVQRSHSQIIREIGAASTVLLKNTGALPLTGKEVKVGVLGEDAGSNPWGANGCPDRGCDNGTLAMAWGSGTANFPYLVTPEQAIQREVISNGGNVFAVTDNGALSQMADVASQSSVSLVFVNADSGEGFISVDGNEGDRKNLTLWKNGEAVIDTVVSHCNNTIVVIHSVGPVLIDRWYDNPNVTAIIWAGLPGQESGNSLVDVLYGRVNPSAKTPFTWGKTRESYGAPLLTEPNNGNGAPQDDFNEGVFIDYRHFDKRNETPIYEFGHGLSYTTF

SEQ ID NO: 45479 - protein, 863 aa, Aspergillus fumigatus
MRFGWLEVAALTAASVANAQELAFSPPFYPSPWADGQGEWADAHRRAVEIVSQMTLAEKVNLTTGTGWEMDRCVGQTGSVPRLGINWGMCLQDSPLGIRFSDLNSAFPAGTNVAATWDKTLAYLRGKAMGEEFNDKGVDVLLGPAAGPLGKYPDGGRIWEGFSPDPVLTGVLFAETIKGIQDAGVVATAKHYILNEQEHFRQVGEAQGYGYNITETISSNVDDKTMHELYLWPFADAVRAGVGAVMCSYNQINNSYGCQNSQTLNKLLKAELGFQGFVMSDWSAHHSGVGAALAGLDMSMPGDISFDDGLSFWGTNLTVSVLNGTVPAWRVDDMAVRIMTAYYKVGRDRLRIPPNFSSWTRDEYGWEHSAVSEGAWTKVNDFVNVQRSHSQIIREIGAASTVLLKNTGALPLTGKEVKVGVLGEDAGSNPWGANGCPDRGCDNGTLAMAWGSGTANFPYLVTPEQAIQREVISNGGNVFAVTDNGALSQMADVASQSSVSLVFVNADSGEGFISVDGNEGDRKNLTLWKNGEAVIDTVVSHCNNTIVVIHSVGPVLIDRWYDNPNVTAIIWAGLPGQESGNSLVDVLYGRVNPSAKTPFTWGKTRESYGAPLLTEPNNGNGAPQDDFNEGVFIDYRHFDKRNETPIYEFGHGLSYTTFGYSHLRVQALNSSSSAYVPTSGETKPAPTYGEIGSAADYLYPEGLKRITKFIYPWLNSTDLEDSSDDPNYGWEDSEYIPEGARDGSPQPLLKAGGAPGGNPTLYQDLVRVSATITNTGNVAGYEVPQLYVSLGGPNEPRVVLRKFDRIFLAPGEQKVWTTTLNRRDLANWDVEAQDWVITKYPKKVHVGSSSRKLPLRAPLPRVY

SEQ ID NO: 45480 - protein, 849 aa, Aspergillus fumigatus
SHGNNQELAFSPPFYPSPWADGQGEWADAHRRAVEIVSQMTLAEKVNLTTGTGWEMDRCVGQTGSVPRLGINWGLCGQDSPLGIRFSDLNSAFPAGTNVAATWDKTLAYLRGKAMGEEFNDKGVDILLGPAAGPLGKYPDGGRIWEGFSPDPALTGVLFAETIKGIQDAGVIATAKHYILNEQEHFRQVGEAQGYGYNITETISSNVDDKTMHELYLWPFADAVRAGVGAVMCSYNQINNSYGCQNSQTLNKLLKAELGFQGFVMSDWSAHHSGVGAALAGLDMSMPGDISFDDGLSFWGTNLTVSVLNGTVPAWRVDDMAVRIMTAYYKVGRDRLRIPPNFSSWTRDEYGWEHSAVSEGAWTKVNDFVNVQRSHSQIIREIGAASTVLLKNTGALPLTGKEVKVGVLGEDAGSNPWGANGCPDRGCDNGTLAMAWGSGTANFPYLVTPEQAIQREVISNGGNVFAVTDNGALSQMADVASQSSVSLVFVNADSGEGFISVDGNEGDRKNLTLWKNGEAVIDTVVSHCNNTIVVIHSVGPVLIDRWYDNPNVTAIIWAGLPGQESGNSLVDVLYGRVNPSAKTPFTWGKTRESYGAPLLTEPNNGNGAPQDDFNEGVFIDYRHFDKRNETPIYEFGHGLSYTTFGYSHLRVQALNSSSSAYVPTSGETKPAPTYGEIGSAADYLYPEGLKRITKFIYPWLNSTDLEDSSDDPNYGWQDSEYIPEGARDGSPQPLLKAGGAPGGNPTLYQDLVRVSATITNTGNVAGYEVPQLYVSLGGPNEPRVVLRKFDRIFLAPGEQKVWTTTLNRRDLANWDVEAQDWVITKYPKKVHVGSSSRKLPLRAPLPRVY

SEQ ID NO: 45481 - protein, 873 aa, Aspergillus fumigatus
MRFGWLEVAALTAASVANAQVFDNSHGNNQELAFSPPFYPSPWADGQGEWADAHRRAVEIVSQMTLAEKVNLTTGTGWEMDRCVGQTGSVPRIGINWGLCGQDSPLGIRFSDLNSAFPAGTNVAATWDKTLAFLRGKAMGEEFNDKGVDILLGPAAGPLGKYPDGGRIWEGFSPDPALTGVLFAETIKGIQDAGVIATAKHYILNEQEHFRQVGEAQGYGYGITETISSNVDDKTMHELYLWPFADAVRAGVGAVMCSYNQINNSYGCQNSQTLNKLLKAELGFQGFVMSDWSAHHSGVGAALAGLDMSMPGDISFDDGLSFWGTNLTVSVLNGTVPAWRVDDMAVRIMTAYYKVGRDRLRIPPNFSSWTRDEYGWEHSAVSEGAWTKVNDFVNVQRSHSQIIREIGAASTVLLKNTGALPLTGKEVKVGVLGEDAGSNPWGANGCPDRGCDNGTLAMAWGSGTANFPYLVTPEQAIQREVISNGGNVFAVTDNGALSQMADVASQSSVSLVFVNADSGEGFISVDGNEGDRKNLTLWKNGEAVIDTVVSHCNNTIVVIHSVGPVLIDRWYDNPNVTALIWAGLPGQESGNSLVDVLYGRVNPSAKTPFTWGKTRESYGAPLLTEPNNGNGAPQDDFNEGVFIDYRHFDKRNETPIYEFGHGLSYTTFGYSHLRVFALNSSSSAYVPTSGETKPAPTYGEIGSAADYLYPEGLKRITKFIYPWLNSTDLEDSSDDPNYGWQDSEYIPEGARDGSPQPLLKAGGAPGGNPTLYQDLVRVSATITNTGNVAGYEVPQLYVSLGGPNEPRVVLRKFDRIFLAPGEQKVWTTTLNRRDLANWDVEAQDWVITKYPKKVHVGSSSRKLPLRAPLPRVY

SEQ ID NO: 45482 - protein, 873 aa, Neosartorya fischeri
MRFGWLEVAALTAASVANAQVFDDSHGNNQELAFSPPFYPSPWADGQGEWADAHRRAVEIVSQMTLAEKVNLTTGTGWEMDRCVGQTGSVPRLGINWGLCGQDSPLGIRFSDLNSAFPAGTNVAATWDKTLAYLRGKAMGEEFNDKGVDILLGPAAGPLGKYPDGGRIWEGFSPDPALTGVLFAETIRGIQDAGVIATAKHYIMNEQEHFRQVSEAQGYGYNITETLSSNVDDKTMHELYLWPFADAVRAGVGAVMCSYNQINNSYGCQNSQTLNKLLKAELGFQGFVMSDWSAHHSGVGSALAGLDMSMPGDISFDDGLSFWGTNLTVSVLNGTVPAWRVDDMAVRIMTAYYKVGRDRLRIPPNFSSWTRDEYGWEHFAVSEGAWTKVNDFVNVQRSHSQIIREIGAASTVLLKNKGALPLTGKEVKVGVLGEDAGSNPWGANGCPDRGCDNGTLAMAWGSGTANFPYLVTPEQAIQREVISNGGNVFAVTDNGALSQMADVASQSSVSLVFVNADSGEGYINVDGNEGDRKNLTLWKNGEAVIDTVVSHCNNTIVVIHSVGPVLIDRWYDNPNVTAIIWAGLPGQESGNSLVDVLYGRVNPSAKTPFTWGKTRKSYGAPLLSEPNNGNGAPQDDFNEGVFIDYRHFDKRNETPIYEFGHGLSYTTFGYSHLRVQALNSSSSAYVPTSGETKPAPTYGEIGSAADYLYPEGLKRITKFIYPLLNSTDLEDSSDDPNYGWEDSEYIPEGARDGSPQPLLKAGGAPGGNPTLYQDLVRVSATITNTGNVAGYEVPQLYVSLGGPNEPRVVLRKFDRIFLAPGEQKVWTTTLNRRDLANWDVEAQDWVITKHPKKVHVGSSSRKLPLRAPLPRVY

SEQ ID NO: 45483 - protein, 859 aa, Aspergillus clavatus
MRFSWLEVAVTAASLANANELVSSPPFYPSPWANGQGEWAEAHQRAVEIVSQMTLTEKVNLTTGTGWMMEECVGQTGSVPRLGINWGLCGQDSPLGIRFSDLNSAFPAGINVAATWDKTLAYLRGKAMGEEFNDKGIDIQLGPAAGPLGKYPDGGRIWEGFSPDPALTGVLFAETIKGIQDAGVIATAKHYILNEQEQFRQVAEAQGYGYNITETLSSNVDDKTMHELYLWPFADAVRAGVGAIMCSYNQINNSYGCQNSQTLNKLLKAELGFQGFVMSDWSAHHSGVGAALAGLDMSMPGDISFDDGLSFWGANMTVGVLNGTIPAWRVDDMAVRIMTAYYKVGRDRLRVPPNFSSWTRDEYGYEHAAVSEGAWKKVNDFVNVQRDHAQLIREVGSASTVLLKNVGALPLTGKERKVGIFGEDAGSNPWGPNGCENRGCDNGTLAMAWGSGTAEFPYLVTPEQAIQSEVIKNGGNVFPVTHNGALTQMANIASQSSVSLVFVNADAGEGFISVDGNIGDRKNLTLWKNGEEVIKTVASHSNNTVVVIHSVGPILVDEWHDNPNITAILWAGLPGQESGNSIADVLYGRVNPSAKTPFTWGKTRESYGAPLVTKPNNGNGAPQDDFSEGVFIDYRYFDKRNETPVYEFGFGLSYTSFGYSHLRVQPLNGSTYVPATGTTGPAPAYGSIGSAADYLFPEGLKRITKFIYPWLNSTDLKASSADPNYGWEDSEYIPEAATDGSPQPILKAGGAPGGNPTLYHDLVKVSATITNTGNVAGYEVPQLYVSLGGPNEPRVVLRKFDRIHLAPGEQKVWTTTLTRRDLANWDVEAQDWVITKYPKRVYVGSSSRKLPLRAPLPRV

SEQ ID NO: 45484 - protein, 866 aa, Aspergillus clavatus
MRFSWLEVAVTAASLANANVCIPLFPWYVSSPPFYPSPWANGQGEWAEAHQRAVEIVSQMTLTEKVNLTTGTGWMMEECVGQTGSVPRLGINWGLCGQDSPLGIRFSDLNSAFPAGINVAATWDKTLAYLRGKAMGEEFNDKGIDIQLGPAAGPLGKYPDGGRIWEGFSPDPALTGVLFAETIKGIQDAGVIATAKHYILNEQEQFRQVAEAQGYGYNITETLSSNVDDKTMHELYLWPFADAVRAGVGAIMCSYNQINNSYGCQNSQTLNKLLKAELGFQGFVMSDWSAHHSGVGAALAGLDMSMPGDISFDDGLSFWGANMTVGVLNGTIPAWRVDDMAVRIMTAYYKVGRDRLRVPPNFSSWTRDEYGYEHAAVSEGAWKKVNDFVNVQRDHAQLIREVGSASTVLLKNVGALPLTGKERKVGIFGEDAGSNPWGPNGCENRGCDNGTLAMAWGSGTAEFPYLVTPEQAIQSEVIKNGGNVFPVTHNGALTQMANIASQSSVSLVFVNADAGEGFISVDGNIGDRKNLTLWKNGEEVIKTVASHSNNTVVVIHSVGPILVDEWHDNPNITAILWAGLPGQESGNSIADVLYGRVNPSAKTPFTWGKTRESYGAPLVTKPNNGNGAPQDDFSEGVFIDYRYFDKRNETPVYEFGFGLSYTSFGYSHLRVQPLNGSTYVPATGTTGPAPAYGSIGSAADYLFPEGLKRITKFIYPWLNSTDLKASSADPNYGWEDSEYIPEAATDGSPQPILKAGGAPGGNPTLYHDLVKVSATITNTGNVAGYEVPQLYVSLGGPNEPRVVLRKFDRIHLAPGEQKVWTTTLTRRDLANWDVEAQDWVITKYPKRVYVGSSSRKLPLRAPLPRV

SEQ ID NO: 45485 - protein, 859 aa, Aspergillus aculeatus
MKLSWLEAAALTAASVVSADELAFSPPFYPSPWANGQGEWAEAYQRAVAIVSQMTLDEKVNLTTGTGWELEKCVGQTGGVPRLNIGGMCLQDSPLGIRDSDYNSAFPAGVNVAATWDKNLAYLRGQAMGQEFSDKGIDVQLGPAAGPLGRSPDGGRNWEGFSPDPALTGVLFAETIKGIQDAGVVATAKHYILNEQEHFRQVAEAAGYGFNISDTISSNVDDKTIHEMYLWPFADAVRAGVGAIMCSYNQINNSYGCQNSYTLNKLLKAELGFQGFVMSDWGAHHSGVGSALAGLDMSMPGDITFDSATSFWGTNLTIAVLNGTVPQWRVDDMAVRIMAAYYKVGRDRLYQPPNFSSWTRDEYGFKYFYPQEGPYEKVNHFVNVQRNHSEVIRKLGADSTVLLKNTGALPLTGKEVKVGVLGEDAGSNPWGANGCPDRGCDNGTLAMAWGSGTAEFPYLVTPEQAIQREVISNGGNVFAVTDNGALSQMADVASQSSVSLVFVNADSGEGYISVDGNEGDRKNLTLWKNGEAVIDTVVSHCNNTIVVIHSVGPVLIDRWYDNPNVTAIIWAGLPGQESGNSLVDVLYGRVNPGAKSPFTWGKTREAYGDYLVRELNNGNGAPQDDFSEGVFIDYRGFDKRNETPIYEFGHGLSYTTFNYSGLHIQVLNASSNAQVATETGAAPTFGQVGNASDYVYPEGLTRISKFIYPWLNSTDLKASSGDPYYGVDTAEHVPEGATDGSPQPVLPAGGGFGGNPRLYDELIRVSVTVKNTGRVAGDAVPQLYVSLGGPNEPKVVLRKFDRLTLKPSEETVWTTTLTRRDLSNWDVAAQDWVITSYPKKVHVGSSSRQLPLHAALPKV

SEQ ID NO: 45486 - protein, 859 aa, Aspergillus fumigatus
MKLSWLEAAALTAASVVSADELAFSPPFYPSPWANGQGEWAEAYQRAVAIVSQMTLDEKVNLTTGTGWELEKCVGQTGGVPRLNIGGMCLQDSPLGIRDSDYNSAFPAGVNVAATWDKNLAYLRGQAMGQEFSDKGIDVQLGPAAGPLGRSPDGGRNWEGFSPDPALTGVLFAETIKGIQDAGVVATAKHYILNEQEHFRQVAEAAGYGFNISDTISSNVDDKTIHEMYLWPFADAVRAGVGAIMCSYNQINNSYGCQNSYTLNKLLKAELGFQGFVMSDWGAHHSGVGSALAGLDMSMPGDITFDSATSFWGTNLTIAVLNGTVPQWRVDDMAVRIMAAYYKVGRDRLYQPPNFSSWTRDEYGFKYFYPQEGPYEKVNHFVNVQRNHSEVIRKLGADSTVLLKNTGALPLTGKEVKVGVLGEDAGSNPWGANGCPDRGCDNGTLAMAWGSGTANFPYLVTPEQAIQREVISNGGNVFAVTDNGALSQMADVASQSSVSLVFVNADSGEGFISVDGNEGDRKNLTLWKNGEAVIDTVVSHCNNTIVVIHSVGPVLIDRWYDNPNVTAIIWAGLPGQESGNSLVDVLYGRVNPGAKSPFTWGKTREAYGDYLVRELNNGNGAPQDDFSEGVFIDYRGFDKRNETPIYEFGHGLSYTTFNYSGLHIQVLNASSNAQVATETGAAPTFGQVGNASDYVYPEGLTRISKFIYPWLNSTDLKASSGDPYYGVDTAEHVPEGATDGSPQPVLPAGGGFGGNPRLYDELIRVSVTVKNTGRVAGDAVPQLYVSLGGPNEPKVVLRKFDRLTLKPSEETVWTTTLTRRDLSNWDVAAQDWVITSYPKKVHVGSSSRQLPLHAALPKV

SEQ ID NO: 45487 - protein, 626 aa, Aspergillus aculeatus
PWANGQGEWAEAYQRAVAIVSQMTLDEKVNLTTGTGWELEKCVGQTGGVPRLNIGGMCLQDSPLGIRDSDYNSAFPAGVNVAATWDKNLAYLRGQAMGQEFSDKGIDVQLGPAAGPLGRSPDGGRNWEGFSPDPALTGVLFAETIKGIQDAGVVATAKHYILNEQEHFRQVAEAAGYGFNISDTISSNVDDKTIHEMYLWPFADAVRAGVGAIMCSYNQINNSYGCQNSYTLNKLLKAELGFQGFVMSDWGAHHSGVGSALAGLDMSMPGDITFDSATSFWGTNLTIAVLNGTVPQWRVDDMAVRIMAAYYKVGRDRLYQPPNFSSWTRDEYGFKYFYPQEGPYEKVNHFVNVQRNHSEVIRKLGADSTVLLKNNNALPLTGKERKVAILGEDAGSNSYGANGCSDRGCDNGTLAMAWGSGTAEFPYLVTPEQAIQAEVLKHKGSVYAITDNWALSQVETLAKQASVSLVFVNSDAGEGYISVDGNEGDRNNLTLWKNGDNLIKAAANNCNNTIVVIHSVGPVLVDEWYDHPNVTAILWAGLPGQESGNSLADVLYGRVNPGAKSPFTWGKTREAYGDYLVRELNNGNGAPQDDFSEGVFIDYRGFDKRNETPIYEFGHGLSYTTF

SEQ ID NO: 45488 - protein, 860 aa, Aspergillus terreus
MKLSILEAAALTAASVASAQDDLAYSPPYYPSPWADGHGEWSNAYKRAVDIVSQMTLTEKVNLTTGTGWELERCVGQTGSVPRLGIPSLCLQDSPLGIRMSDYNSAFPAGINVAATWDKTLAYQRGKAMGEEFSDKGIDVQLGPAAGPLGRSPDGGRNWEGFSPDPALTGVLFAETIKGIQDAGVIATAKHYILNEQEHFRQVGEAQGYGFNITETVSSNVDDKTMHELYLWPFADAVRAGVGAVMCSYNQINNSYGCQNSLTLNKLLKAELGFQGFVMSDWSAHHSGVGAALAGLDMSMPGDISFDSGTSFYGTNLTVGVLNGTIPQWRVDDMAVRIMAAYYKVGRDRLWTPPNFSSWTRDEYGFAHFFPSEGAYERVNEFVNVQRDHAQVIRRIGADSVVLLKNDGALPLTGQEKTVGILGEDAGSNPKGANGCSDRGCDKGTLAMAWGSGTANFPYLVTPEQAIQNEVLKGRGNVFAVTDNYDTQQIAAVASQSTVSLVFVNADAGEGYLNVDGNMGDRKNLTLWQNGEEVIKTVTEHCNNTVVVIHSVGPVLIDEWYAHPNVTGILWAGLPGQESGNAIADVLYGRVNPGGKTPFTWGKTRASYGDYLLTEPNNGNGAPQDNFNEGVFIDYRRFDKYNETPIYEFGHGLSYTTFELSGLQVQLINGSSYVPTTGQTSAAQTFGKVEDASSYLYPEGLKRISKFIYPWLNSTDLKASTGDPDYGEPNFEYIPEGATDGSPQPRLPASGGPGGNPGLYEDLFQVSVTITNTGKVAGDEVPQLYVSLGGPNEPKRVLRKFERLHLAPGQQKVWTTTLNRRDLANWDVVAQDWKITPYAKTIFVGTSSRKLPLAGRLPRV

SEQ ID NO: 45489 - protein, 860 aa, Aspergillus terreus
MKLSILEAAALTAASVASAQDDLAYSPPYYPSPWADGHGEWSNAYKRAVDIVSQMTLTEKVNLTTGTGWELERCVGQTGSVPRLGIPSLCLQDSPLGIRMSDYNSAFPAGINVAATWDKTLAYQRGKAMGEEFSDKGIDVQLGPAAGPLGRSPDGGRNWEGFSPDPALTGVLFAETIKGIQDAGVIATAKHYILNEQEHFRQVGEAQGYGFNITETVSSNVDDKTMHELYLWPFADAVRAGVGAVMCSYNQINNSYGCQNSLTLNKLLKAELGFQGFVMSDWSAHHSGVGAALAGLDMSMPGDISFDSGTSFYGTNLTVGVLNGTIPQWRVDDMAVRIMAAYYKVGRDRLWTPPNFSSWTRDEYGFAHFFPSEGAYERVNEFVNVQRDHAQVIRRIGADSVVLLKNDGALPLTGQEKTVGILGEDAGSNPKGANGCSDRGCDKGTLAMAWGSGTANFPYLVTPEQAIQNEVLKGRGNVFAVTDNYDTQQIAAVASQSTVSLVFVNADAGEGYLNVDGNMGDRKNLTLWQNGEEVIKTVTEHCNNTVVVIHSVGPVLIDEWYAHPNVTGILWAGLPGQESGNAIADVLYGRVNPGGKTPFTWGKTRASYGDYLLTEPNNGNGAPQDNFNEGYFIDYRRFDKYNETPIYEFGHGLSYTTFELSGLQVQLINGSSYVPTTGQTSAAQTFGKVEDASSYLYPEGLKRISKFIYPWLNSTDLKASTGDPDYGEPNFEYIPEGATDGSPQPRLPASGGPGGNPGLYEDLFQVSVTITNTGKVAGDEVPQLYVSLGGPNEPKRVLRKFERLHLAPGQQKVWTTTLNRRDLANWDVVAQDWKITPYAKTIFVGTSSRKLPLAGRLPRV

SEQ ID NO: 45490 - protein, 626 aa, Aspergillus oryzae RIB40
PWADGQGEWAEVYKRAVDIVSQMTLTEKVNLTTGTGWQLERCVGQTGSVPRLNIPSLCLQDSPLGIRFSDYNSAFPAGVNVAATWDKTLAYLRGQAMGEEFSDKGIDVQLGPAAGPLGAHPDGGRNWEGFSPDPALTGVLFAETIKGIQDAGVIATAKHYIMNEQEHFRQQPEAAGYGFNVSDSLSSNVDDKTMHELYLWPFADAVRAGVGAVMCSYNQINNSYGCENSETLNKLLKAELGFQGFVMSDWTAHHSGVGAALAGLDMSMPGDVTFDSGTSFWGANLTVGVLNGTIPQWRVDDMAVRIMAAYYKVGRDTKYTPPNFSSWTRDEYGFAHNHVSEGAYERVNEFVDVQRDHADLIRRIGAQSTVLLKNKGALPLSRKEKLVALLGEDAGSNSWGANGCDDRGCDNGTLAMAWGSGTANFPYLVTPEQAIQNEVLQGRGNVFAVTDSWALDKIAAAARQASVSLVFVNSDSGEGYLSVDGNEGDRNNITLWKNGDNVVKTAANNCNNTVVIIHSVGPVLIDEWYDHPNVTGILWAGLPGQESGNSIADVLYGRVNPGAKSPFTWGKTRESYGSPLVKDANNGNGAPQSDFTQGVFIDYRHFDKFNETPIYEFGYGLSYTTF

SEQ ID NO: 45491 - protein, 839 aa, Aspergillus terreus
DLAYSPPYYPSPWADGHGEWSNAYKRAVDIVSQMTLTEKVNLTTGTGWELERCVGQTGSVPRLGIPSLCLQDSPLGIRMSDYNSAFPAGINVAATWDKKLAYQRGKAMGEEFSDKGIDVQLGPAAGPLGRSPDGGRNWEGFSPDPALTGVLFAETIKGIQDAGVIATAKHYILNEQEHFRQVGEAQGYGFNITETVSSNVDDKTMHELYLWPFADAVRAGVGAVMCSYNQINNSYGCQNSLTLNKLLKAELGFQGFVMSDWSAHHSGVGAALAGLDMSMPGDISFDSGTSFYGTNLTVGVLNGTIPQWRVDDMAVRIMAAYYKVGRDRLWTPPNFSSWTRDEYGFAHFFPSEGAYERVNEFVNVQRDHAQVIRRIGADSVVLLKNDGALPLTGQEKTVGILGEDAGSNPKGANGCSDRGCDKGTLAMAWGSGTANFPYLVTPEQAIQNEVLKGRGNVFAVTDNYDTQQIAAVASQSTVSLVFVNADAGEGFLNVDGNMGDRKNLTLWQNGEEVIKTVTEHCNNTVVVIHSVGPVLIDEWYAHPNVTGILWAGLPGQESGNAIADVLYGRVNPGGKTPFTWGKTRASYGDYLLTEPNNGNGAPQDNFNEGVFIDYRRFDKYNETPIYEFGHGLSYTTFELSGLQVQLINGSSYVPTTGQTSAAQAFGKVEDASSYLYPEGLKRISKFIYPWLNSTDLKASTGDPEYGEPNFEYIPEGATDGSPQPRLPASGGPGGNPGLYEDLFQVSVTITNTGKVAGDEVPQLYVSLGGPNEPKRVLRKFERLHIAPGQQKVWTTTLNRRDLANWDVVAQDWKITPYAKTIFVGTSSRKLPLAGRLPRV

SEQ ID NO: 45492 - protein, 626 aa, Aspergillus oryzae
PWADGQGEWAEVYKRAVDIVSQMTLTEKVNLTTGTGWQLERCVGQTGSVPRLNIPSLCLQDSPLGIRFSDYNSAFPAGVNVAATWDKTLAYLRGQAMGEEFSDKGIDVQLGPAAGPLGAHPDGGRNWEGFSPDPALTGVLFAETIKGIQDAGVIATAKHYIMNEQEHFRQQPEAAGYGFNVSDSLSSNVDDKTMHELYLWPFADAVRAGVGAVMCSYNQINNSYGCENSETLNKLLKAELGFQGFVMSDWTAHHSGVGAALAGLDMSMPGDVTFDSGTSFWGANLTVGVLNGTIPQWRVDDMAVRIMAAYYKVGRDTKYTPPNFSSWTRDEYGFAHNHVSEGAYERVNEFVDVQRDHADLIRRIGAQSTVLLKNKGALPLSRKEKLVALLGEDAGSNSWGANGCDDRGCDNGTLAMAWGSGTANFPYLVTPEQAIQNEVLQGRGNVFAVTDSWALDKIAAAARQASVSLVFVNSDSGESYLSVDGNEGDRNNITLWKNGDNVVKTAANNCNNTVVIIHSVGPVLIDEWYDHPNVTGILWAGLPGQESGNSIADVLYGRVNPGAKSPFTWGKTRESYGSPLVKDANNGNGAPQSDFTQGVFIDYRHFDKFNETPIYEFGYGLSYTTF

SEQ ID NO: 45493 - protein, 860 aa, Aspergillus terreus
MKLSILEAAALTAASVVSAQDDLAYSPPYYPSPWADGHGEWSNAYKRAVDIVSQMTLTEKVNLTTGTGWELERCVGQTGSVPRLGIPSLCLQDSPLGIRMSDYNSAFPAGINVAATWDKKLAYQRGKAMGEEFSDKGIDVQLGPAAGPLGRSPDGGRNWEGFSPDPALTGVLFAETIKGIQDAGVIATAKHYILNEQEHFRQVGEAQGYGFNITETVSSNVDDKTMHELYLWPFADAVRAGVGAVMCSYNQINNSYGCQNSLTLNKLLKAELGFQGFVMSDWSAHHSGVGAALAGLDMSMPGDISFDSGTSFYGTNLTVGVLNGTIPQWRVDDMAVRIMAAYYKVGRDRLWTPPNFSSWTRDEYGFAHFFPSEGAYERVNEFVNVQRDHAQVIRRIGADSVVLLKNDGALPLTGQEKTVGILGEDAGSNPKGANGCSDRGCDKGTLAMAWGSGTANFPYLVTPEQAIQNEVLKGRGNVFAVTDNYDTQQIAAVASQSTVSLVFVNADAGEGFLNVDGNMGDRKNLTLWQNGEEVIKTVTEHCNNTVVVIHSVGPVLIDEWYAHPNVTGILWAGLPGQESGNAIADVLYGRVNPGGKTPFTWGKTRASYGDYLLTEPNNGNGAPQDNFNEGVFIDYRRFDKYNETPIYEFGHGLSYTTFELSGLQVQLINGSSYVPTTGQTSAAQAFGKVEDASSYLYPEGLKRISKFIYPWLNSTDLKASTGDPEYGEPNFEYIPEGATDGSPQPRLPASGGPGGNPGLYEDLFQVSVTITNTGKVAGDEVPQLYVSLGGPNEPKRVLRKFERLHIAPGQQKVWTTTLNRRDLANWDVVAQDWKITPYAKTIFVGTSSRKLPLAGRLPRV

SEQ ID NO: 45494 - protein, 626 aa, Aspergillus niger CBS 513.88
PWANGQGDWAEAYQRAVDIVSQMTLAEKVNLTTGTGWELELCVGQTGGVPRLGIPGMCAQDSPLGVRDSDYNSAFPAGVNVAATWDKNLAYLRGQAMGQEFSDKGADIQLGPAAGPLGRSPDGGRNWEGFSPDPALSGVLFAETIKGIQDAGVVATAKHYIAYEQEHFRQAPEAQGYGFNITESGSANLDDKTMHELYLWPFADAIRAGAGAVMCSYNQINNSYGCQNSYTLNKLLKAELGFQGFVMSDWAAHHAGVSGALAGLDMSMPGDVDYDSGTSYWGTNLTISVLNGTVPQWRVDDMAVRIMAAYYKVGRDRLWTPPNFSSWTRDEYGFKYYYVSEGPYEKVNQFVNVQRNHSELIRRIGADSTVLLKNDGALPLTGKERLVALIGEDAGSNPYGANGCSDRGCDNGTLAMGWGSGTANFPYLVTPEQAISNEVLKNKNGVFTATDNWAIDQIEALAKTASVSLVFVNADSGEGYINVDGNLGDRRNLTLWRNGDNVIKAAASNCNNTIVIIHSVGPVLVNEWYDNPNVTAILWGGLPGQESGNSLADVLYGRVNPGAKSPFTWGKTREAYQDYLYTEPNNGNGAPQEDFVEGVFIDYRGFDKRNETPIYEFGYGLSYTTF

SEQ ID NO: 45495 - protein, 626 aa, Unidentified
PWANGQGDWAQAYQRAVDIVSQMTLAEKVNLTTGTGWELELCVGQTGGVPRLGVPGMCLQDSPLGVRDSDYNSAFPSGMNVAATWDKNLAYLRGKAMGQEFSDKGADIQLGPAAGPLGRSPDGGRNWEGFSPDPALSGVLFAETIKGIQDAGVVATAKHYIAYEQEHFRQAPEAQGYGFNISESGSANLDDKTMHELYLWPFADAIRAGAGAVMCSYNQINNSYGCQNSYTLNKLLKAELGFQGFVMSDWAAHHAGVSGALAGLDMSMPGDVDYDSGTSYWGTNLTVSVLNGTVPQWRVDDMAVRIMAAYYKVGRDRLWTPPNFSSWTRDEYGYKYYYVSEGPYEKVNHYVNVQRNHSELIRRIGADSTVLLKNDGALPLTGKERLVALIGEDAGSNPYGANGCSDRGCDNGTLAMGWGSGTANFPYLVTPEQAISNEVLKNKNGVFTATDNWAIDQIEALAKTASVSLVFVNADSGEGYINVDGNLGDRKNLTLWRNGDNVIKAAASNCNNTIVIIHSVGPVLVNEWYDNPNVTAILWGGLPGQESGNSLADVLYGRVNPGAKSPFTWGKTREAYQDYLVTEPNNGNGAPQEDFVEGVFIDYRGFDKRNETPIYEFGYGLSYTTF

SEQ ID NO: 45496 - protein, 839 aa, Aspergillus aculeatus
ELAFSPPFYPSPWANGQGEWAEAYQRAVAIVSQMTLDEKVNLTTGTGWELEKCVGQTGGVPRLNIGGMCLQDSPLGIRDSDYNSAFPAGVNVAATWDKNLAYLRGQAMGQEFSDKGIDVQLGPAAGPLGRSPDGGRNWEGFSPDPALTGVLFAETIKGIQDAGVVATAKHYILNEQEHFRQVAEAAGYGFNISDTISSNVDDKTIHEMYLWPFADAVRAGVGAIMCSYNQINNSYGCQNSYTLNKLLKAELGFQGFVMSDWGAHHSGVGSALAGLDMSMPGDITFDSATSFWGTNLTIAVLNGTVPQWRVDDMAVRIMAAYYKVGRDRLYQPPNFSSWTRDEYGFKYFYPQEGPYEKVNHFVNVQRNHSEVIRKLGADSTVLLKNNNALPLTGKERKVAILGEDAGSNSYGANGCSDRGCDNGTLAMAWGSGTAEFPYLVTPEQAIQAEVLKHKGSVYAITDNWALSQVETLAKQASVSLVFVNSDAGEGYISVDGNEGDRNNLTLWKNGDNLIKAAANNCNNTIVVIHSVGPVLVDEWYDHPNVTAILWAGLPGQESGNSLADVLYGRVNPGAKSPFTWGKTREAYGDYLVRELNNGNGAPQDDFSEGVFIDYRGFDKRNETPIYEFGHGLSYTTFNYSGLHIQVLNASSYEPASGETGAAPTFGQVGNASDYVYPEGLTRISKFIYPWLNSTDLKASSGDPYYGVDTAEHVPEGATDGSPQPVLPAGGGSGGNPRLYDELIRVSVTVKNTGRVAGDAVPQLYVSLGGPNEPKVVLRKFDRLTLKPSEETVWTTTLTRRDLSNWDVAAQDWVITSYPKKVHVGSSSRQLPLHAALPKV

SEQ ID NO: 45497 - protein, 839 aa, Aspergillus aculeatus
ELAFSPPFYPSPWANGQGEWAEAYQRAVAIVSQMTLDEKVNLTTGTGWELEKCVGQTGGVPRLNIGGMCLQDSPLGIRDSDYNSAFPAGVNVAATWDKNLAYLRGQAMGQEFSDKGIDVQLGPAAGPLGRSPDGGRNWEGFSPDPALTGVLFAETIKGIQDAGVVATAKHYILNEQEHFRQVAEAAGYGFNISDTISSNVDDKTIHEMYLWPFADAVRAGVGAIMCSYNQINNSYGCQNSYTLNKLLKAELGFQGFVMSDWGAHHSGVGSALAGLDMSMPGDITFDSATSFWGTNLTIAVLNGTVPQWRVDDMAVRIMAAYYKVGRDRLYQPPNFSSWTRDEYGFKYFYPQEGPYEKVNHFVNVQRNHSEVIRKLGADSTVLLKNNNALPLTGKERKVAILGEDAGSNSYGANGCSDRGCDNGTLAMAWGSGTAEFPYLVTPEQAIQAEVLKHKGSVYAITDNWALSQVETLAKQASVSLVFVNSDAGEGYISVDGNEGDRNNLTLWKNGDNLIKAAANNCNNTIVVIHSVGPVLVDEWYDHPNVTAILWAGLPGQESGNSLADVLYGRVNPGAKSPFTWGKTREAYGDYLVRELNNGNGAPQDDFSEGVFIDYRGFDKRNETPIYEFGHGLSYTTFNYSGLHIQVLNASSNAQVATETGAAPTFGQVGNASDYVYPEGLTRISKFIYPWLNSTDLKASSGDPYYGVDTAEHVPEGATDGSPQPVLPAGGGSGGNPTLYDELIRVSVTVKNTGRVAGDAVPQLYVSLGGPNEPKVVLRKFDRLTLKPSEETVWTTTLTRRDLSNWDVAAQDWVITSYPKKVHVGSSSRQLPLHAALPKV

SEQ ID NO: 45498 - protein, 839 aa, Aspergillus aculeatus
ELAFSPPFYPSPWANGQGEWAEAYQRAVAIVSQMTLDEKVNLTTGTGWELEKCVGQTGGVPRLNIGGMCLQDSPLGIRDSDYNSAFPAGVNVAATWDKNLAYLRGQAMGQEFSDKGIDVQLGPAAGPLGRSPDGGRNWEGFSPDPALTGVLFAETIKGIQDAGVVATAKHYILNEQEHFRQVAEAAGYGFNISDTISSNVDDKTIHEMYLWPFADAVRAGVGAIMCSYNQINNSYGCQNSYTLNKLLKAELGFQGFVMSDWGAHHSGVGSALAGLDMSMPGDITFDSATSFWGTNLTIAVLNGTVPQWRVDDMAVRIMAAYYKVGRDRLYQPPNFSSWTRDEYGFKYFYPQEGPYEKVNHFVNVQRNHSEVIRKLGADSTVLLKNNNALPLTGKERKVAILGEDAGSNSYGANGCSDRGCDNGTLAMAWGSGTAEFPYLVTPEQAIQAEVLKHKGSVYAITDNWALSQVETLAKQASVSLVFVNSDAGEGYISVDGNEGDRNNLTLWKNGDNLIKAAANNCNNTIVVIHSVGPVLVDEWYDHPNVTAILWAGLPGQESGNSLADVLYGRVNPGAKSPFTWGKTREAYGDYLVRELNNGNGAPQDDFSEGVFIDYRGFDKRNETPIYEFGHGLSYTTFNYSGLHIQVLNASSNAQVATETGAAPTFGQVGNASDYVYPEGLTRISKFIYPWLNSTDLKASSGDPYYGVDTAEHVPEGATDGSPQPVLPAGGGSGGNPRLYDELIRVSVTVKNTGRVAGDAVPQLYVSLGGPNEPKVVLRKFDRLTLNPSEETVWTTTLTRRDLSNWDVAAQDWVITSYPKKVHVGSSSRQLPLHAALPKV

SEQ ID NO: 45499 - protein, 839 aa, Aspergillus aculeatus
ELAFSPPFYPSPWANGQGEWAEAYQRAVAIVSQMTLDEKVNLTTGTGWELEKCVGQTGGVPRLNIGGMCLQDSPLGIRDSDYNSAFPAGVNVAATWDKNLAYLRGQAMGQEFSDKGIDVQLGPAAGPLGRSPDGGRNWEGFSPDPALTGVLFAETIKGIQDAGVVATAKHYILNEQEHFRQVAEAAGYGFNISDTISSNVDDKTIHEMYLWPFADAVRAGVGAIMCSYNQINNSYGCQNSYTLNKLLKAELGFQGFVMSDWGAHHSGVGSALAGLDMSMPGDITFDSATSFWGTNLTIAVLNGTVPQWRVDDMAVRIMAAYYKVGRDRLYQPPNFSSWTRDEYGFKYFYPQEGPYEKVNHFVNVQRNHSEVIRKLGADSTVLLKNNNALPLTGKERKVAILGEDAGSNSYGANGCSDRGCDNGTLAMAWGSGTAEFPYLVTPEQAIQAEVLKHKGSVYAITDNWALSQVETLAKQASVSLVFVNSDAGEGYISVDGNEGDRNNLTLWKNGDNLIKAAANNCNNTIVVIHSVGPVLVDEWYDHPNVTAILWAGLPGQESGNSLADVLYGRVNPGAKSPFTWGKTREAYGDYLVRELNNGNGAPQDDFSEGVFIDYRGFDKRNETPIYEFGHGLSYTTFNYSGLHIQVLNASSNAQVATETGAAPTFGQVGNASDYVYPEGLTRISKFIYPWLNSTDLKASSGDPYYGVDTAEHVPEGATDGSPQPVLPAGGGSGGNPRLYDELIRVSVTVKNTGRVAGDAVPQLYVSLGGPNEPKVVLRKFDRLTLKPSEETVWTTTLTRRDLSNWDVAAQDWVITSYPKKVHVGSSSRQLPLHAALPKV

SEQ ID NO: 45500 - protein, 841 aa, Schizosaccharomyces
ADELAFSPPFYPSPWANGQGEWAEAYQRAVAIVSQMTLDEKVNLTTGTGWELEKCVGQTGGVPRLNIGGMCLQDSPLGIRDSDYNSAFPAGVNVAATWDKNLAYLRGRAMGQEFSDKGIDVQLGPAAGPLGRSPDGGRNWEGFSPDPALTGVLFAETIKGIQDAGVVATAKHYILNEQEHFRQVAEAAGYGFNISDTISSNVDDKTIHEMYLWPFADAVRAGVGAIMCSYNQINNSYGCQNSYTLNKLLKAELGFQGFVMSDWGAHHSGVGSALAGLDMSMPGDITFDSATSFWGTNLTIAVLNGTVPQWRVDDMAVRIMAAYYKVGRDRLYQPPNFSSWTRDEYGFKYFYPQEGPYEKVNHFVNVQRNHSEVIRKLGADSTVLLKNNNALPLTGKERKVAILGEDAGSNSYGANGCSDRGCDNGTLAMAWGSGTAEFPYLVTPEQAIQAEVLKHKGSVYAITDNWALSQVETLAKQASVSLVFVNSDAGEGYISVDGNEGDRNNLTLWKNGDNLIKAAANNCNNTIVVIHSVGPVLVDEWYDHPNVTAILWAGLPGQESGNSLADVLYGRVNPGAKSPFTWGKTREAYGDYLVRELNNGNGAPQDDFSEGVFIDYRGFDKRNETPIYEFGHGLSYTTFNYSGLHIQVLNASSNAQVATETGAAPTFGQVGNASDYVYPEGLTRISKFIYPWLNSTDLKASSGDPYYGVDTAEHVPEGATDGSPQPVLPAGGGSGGNPRLYDELIRVSVTVKNTGRVAGDAVPQLYVSLGGPNEPKVVLRKFDRLTLKPSEETVWTTTLTRRDLSNWDVAAQDWVITSYPKKVHVGSSSRQLPLHAALPKV

SEQ ID NO: 45501 - protein, 841 aa, Schizosaccharomyces
ADELAFSPPFYPSPWANGQGEWAEAYQRAVAIVSQMTLDEKVNLTTGTGWELEKCVGQTGGVPRLNIGGMCLQDSPLGIRDSDYNSAFPAGVNVAATWDKNLAYLRGNAMGQEFSDKGIDVQLGPAAGPLGRSPDGGRNWEGFSPDPALTGVLFAETIKGIQDAGVVATAKHYILNEQEHFRQVAEAAGYGFNISDTISSNVDDKTIHEMYLWPFADAVRAGVGAIMCSYNQINNSYGCQNSYTLNKLLKAELGFQGFVMSDWGAHHSGVGSALAGLDMSMPGDITFDSATSFWGTNLTIAVLNGTVPQWRVDDMAVRIMAAYYKVGRDRLYQPPNFSSWTRDEYGFKYFYPQEGPYEKVNHFVNVQRNHSEVIRKLGADSTVLLKNNNALPLTGKERKVAILGEDAGSNSYGANGCSDRGCDNGTLAMAWGSGTAEFPYLVTPEQAIQAEVLKHKGSVYAITDNWALSQVETLAKQASVSLVFVNSDAGEGYISVDGNEGDRNNLTLWKNGDNLIKAAANNCNNTIVVIHSVGPVLVDEWYDHPNVTAILWAGLPGQESGNSLADVLYGRVNPGAKSPFTWGKTREAYGDYLVRELNNGNGAPQDDFSEGVFIDYRGFDKRNETPIYEFGHGLSYTTFNYSGLHIQVLNASSNAQVATETGAAPTFGQVGNASDYVYPEGLTRISKFIYPWLNSTDLKASSGDPYYGVDTAEHVPEGATDGSPQPVLPAGGGSGGNPRLYDELIRVSVTVKNTGRVAGDAVPQLYVSLGGPNEPKVVLRKFDRLTLKPSEETVWTTTLTRRDLSNWDVAAQDWVITSYPKKVHVGSSSRQLPLHAALPKV

SEQ ID NO: 45502 - protein, 841 aa, Schizosaccharomyces
ADELAFSPPFYPSPWANGQGEWAEAYQRAVAIVSQMTLDEKVNLTTGTGWELEKCVGQTGGVPRLNIGGMCLQDSPLGIRDSDYNSAFPAGVNVAATWDKNLAYLRGQAMGQEFSDKGIDVLLGPAAGPLGRSPDGGRNWEGFSPDPALTGVLFAETIKGIQDAGVVATAKHYILNEQEHFRQVAEAAGYGFNISDTISSNVDDKTIHEMYLWPFADAVRAGVGAFMCSYNQINNSYGCQNSYTLNKLLKAELGFQGFVMSDWFAHHSGVGSALAGLDMSMPGDITFDSATSFWGTNLTIAVLNGTVPQWRVDDMAVRIMAAYYKVGRDRLYQPPNFSSWTRDEYGFKYFYPQEGPYEKVNHFVNVQRNHSEVIRKLGADSTVLLKNNNALPLTGKERKVAILGEDAGSNSYGANGCSDRGCDNGTLAMAWGSGTAEFPYLVTPEQAIQAEVLKHKGSVYAITDNWALSQVETLAKQASVSLVFVNSDAGEGYISVDGNEGDRNNLTLWKNGDNLIKAAANNCNNTIVVIHSVGPVLVDEWYDHPNVTAILWAGLPGQESGNSLADVLYGRVNPGAKSPFTWGKTREAYGDYLVRELNNGNGAPQDDFSEGVFIDYRGFDKRNETPIYEFGHGLSYTTFNYSGLHIQVLNASSNAQVATETGAAPTFGQVGNASDYVYPEGLTRISKFIYPWLNSTDLKASSGDPYYGVDTAEHVPEGATDGSPQPVLPAGGGSGGNPRLYDELIRVSVTVKNTGRVAGDAVPQLYVSLGGPNEPKVVLRKFDRLTLKPSEETVWTTTLTRRDLSNWDVAAQDWVITSYPKKVHVGSSSRQLPLHAALPKV

SEQ ID NO: 45503 - protein, 841 aa, Schizosaccharomyces
ADELAFSPPFYPSPWANGQGEWAEAYQRAVAIVSQMTLDEKVNLTTGTGWELEKCVGQTGGVPRLNIGGMCLQDSPLGIRDSDYNSAFPAGVNVAATWDKNLAYLRGQAMGQEFSDKGIDVQLGPAAGPLGRSPDGGRNWEGFSPDPALTGVLFAETIKGIQDAGVVATAKHYILNEQEHFRQVAEAAGYGFNISDTISSNVDDKTIHEMYLWPFADAVRAGVGAIMCSYNQINNSYGCQNSYTLNKLLKAELGFQGFVMSDWGAHHSGVGSALAGLDMSMPGDITFDSATSFWGTNLTIAVLNGTVPQWRVDDMAVRIMAAYYKVGRDRLYQPPNFSSWTRDEYGFKYFYPQEGPYEKVNHFVNVQRNHSEVIRKLGADSTVLLKNNNALPLTGKERKVAILGEDAGSNSYGANGCSDRGCDNGTLAMAWGSGTAEFPYLVTPEQAIQAEVLKHKGSVYAITDNWALSQVETLAKQASVSLVFVNSDAGEGYISVDGNEGDRNNLTLWKNGDNLIKAAANNCNNTIVVIHSVGPVLVDEWYDHPNVTAILWAGLPGQESGNSLADVLYGRVNPGAKSPFTWGKTREAYGDYLVRELNNGNGAPQDDFSEGVFIDYRGFDKRNETPIYEFGHGLSYTTFNYSGLHIQVLNASSNAQVATETGAAPTFGQVGNASDYVYPEGLTRISKFIYPWLNSTDLKASSGDPYYGVDTAEHVPEGATDGSPQPVLPAGGGSGGNPRLYDELIRVSVTVKNTGRVAGDAVPQLYVSLGGPNEPKVVLRKFDRLTLKPSEETVWTTTLTRRDLSNWDVAAQDWVITSYPKKVHVGSSSRQLPLHAALPKV

SEQ ID NO: 45504 - protein, 839 aa, Aspergillus aculeatus
ELAFSPPFYPSPWANGQGEWAEAYQRAVAIVSQMTLDEKVNLTTGTGWELEKCVGQTGGVPRLNIGGMCLQDSPLGIRDSDYNSAFPAGVNVAATWDKNLAYLRGQAMGQEFSDKGIDVQLGPAAGPLGRSPDGGRNWEGFSPDPALTGVLFAETIKGIQDAGVVATAKHYILNEQEHFRQVAEAAGYGFNISDTISSNVDDKTIHEMYLWPFADAVRAGVGAIMCSYNQINNSYGCQNSYTLNKLLKAELGFQGFVMSDWGAHHSGVGSALAGLDMSMPGDITFDSATSFWGTNLTIAVLNGTVPQWRVDDMAVRIMAAYYKVGRDRLYQPPNFSSWTRDEYGFKYFYPQEGPYEKVNHFVNVQRNHSEVIRKLGADSTVLLKNNNALPLTGKERKVAILGEDAGSNSYGANGCSDRGCDNGTLAMAWGSGTAEFPYLVTPEQAIQAEVLKHKGSVYAITDNWALSQVETLAKQASVSLVFVNSDAGEGYISVDGNEGDRNNLTLWKNGDNLIKAAANNCNNTIVVIHSVGPVLVDEWYDHPNVTAILWAGLPGQESGNSLADVLYGRVNPGAKSPFTWGKTREAYGDYLVRELNNGNGAPQDDFSEGVFIDYRGFDKRNETPIYEFGHGLSYTTFNYTGLHIQVLNASSNAQVATETGAAPTFGQVGNASDYVYPEGLTRISKFIYPWLNSTDLKASSGDPYYGVDTAEHVPEGATDGSPQPVLPAGGGSGGNPRLYDELIRVSVTVKNTGRVAGDAVPQLYVSLGGPNEPKVVLRKFDRLTLKPSEETVWTTTLTRRDLSNWDVAAQDWVITSYPKKVHVGSSSRQLPLHAALPKV

SEQ ID NO: 45505 - protein, 839 aa, Aspergillus aculeatus
ELAFSPPFYPSPWANGQGEWAEAYQRAVAIVSQMTLDEKVNLTTGTGWELEKCVGQTGGVPRLNIGGMCLQDSPLGIRDSDYNSAFPAGVNVAATWDKNLAYLRGQAMGQEFSDKGIDVQLGPAAGPLGRSPDGGRNWEGFSPDPALTGVLFAETIKGIQDAGVVATAKHYILNEQEHFRQVAEAAGYGFNISDTISSNVDDKTIHEMYLWPFADAVRAGVGAIMCSYNQINNSYGCQNSYTLNKLLKAELGFQGFVMSDWGAHHSGVGSALAGLDMSMPGDITFDSATSFWGTNLTIAVLNGTVPQWRVDDMAVRIMAAYYKVGRDRLYQPPNFSSWTRDEYGFKYFYPQEGPYEKVNHFVNVQRNHSEVIRKLGADSTVLLKNNNALPLTGKERKVAILGEDAGSNSYGANGCSDRGCDNGTLAMAWGSGTAEFPYLVTPEQAIQAEVLKHKGSVYAITDNWALSQVETLAKQASVSLVFVNSDAGEGYISVDGNEGDRNNLTLWKNGDNLIKAAANNCNNTIVVIHSVGPVLVDEWYDHPNVTAILWAGLPGQESGNSLADVLYGRVNPGAKSPFTWGKTREAYGDYLVRELNNGNGAPQDDFSEGVFIDYRGFDKRNETPIYEFGHGLSYTTFNYSGLHIQVLNASSNAQVATETGAAPTFGQVGNASDYVYPEGLTRISKFIYPWLNSTDLKASSGDPYYGVDTAEHVPEGATDGSPQPVLPAGGGSGGNPRLYDELINVSVTVKNTGRVAGDAVPQLYVSLGGPNEPKVVLRKFDRLTLKPSEETVWTTTLTRRDLSNWDVAAQDWVITSYPKKVHVGSSSRQLPLHAALPKV

SEQ ID NO: 45506 - protein, 839 aa, Aspergillus aculeatus
ELAFSPPFYPSPWANGQGEWAEAYQRAVAIVSQMTLDEKVNLTTGTGWELEKCVGQTGGVPRLNIGGMCLQDSPLGIRDSDYNSAFPAGVNVAATWDKNLAYLRGQAMGQEFSDKGIDVQLGPAAGPLGRSPDGGRNWEGFSPDPALTGVLFAETIKGIQDAGVVATAKHYILNEQEHFRQVAEAAGYGFNISDTISSNVDDKTIHEMYLWPFADAVRAGVGAIMCSYNQINNSYGCQNSYTLNKLLKAELGFQGFVMSDWGAHHSGVGSALAGLDMSMPGDITFDSATSFWGTNLTIAVLNGTVPQWRVDDMAVRIMAAYYKVGRDRLYQPPNFSSWTRDEYGFKYFYPQEGPYEKVNHFVNVQRNHSEVIRKLGADSTVLLKNNNALPLTGKERKVAILGEDAGSNSYGANGCSDRGCDNGTLAMAWGSGTAEFPYLVTPEQAIQAEVLKHKGSVYAITDNWALSQVETLAKQASVSLVFVNSDAGEGYISVDGNEGDRNNLTLWKNGDNLIKAAANNCNNTIVVIHSVGPVLVDEWYDHPNVTAILWAGLPGQESGNSLADVLYGRVNPGAKSPFTWGKTREAYGDYLVRELNNGNGAPQDDFSEGVFIDYRGFDKRNETPIYEFGHGLSYTTFNYSGLHIQVLNASSNAQVATETGAAPTFGQVGNASDYVYPEGLTRISKFIYPWLNSTDLKASSGDPYYGVDTAEHVPEGATDGSPQPVLPAGGGSGGNPRLYDELIRVSVTVKNTGRVAGDAVPQLYVSLGGPNEPKVVLRKFDRLTLKPSEETVWTTNLTRRDLSNWDVAAQDWVITSYPKKVHVGSSSRQLPLHAALPKV

SEQ ID NO: 45507 - protein, 839 aa, Aspergillus aculeatus
ELAFSPPFYPSPWANGQGEWAEAYQRAVAIVSQMTLDEKVNLTTGTGWELEKCVGQTGGVPRLNIGGMCLQDSPLGIRDSDYNSAFPAGVNVAATWDKNLAYLRGQAMGQEFSDKGIDVQLGPAAGPLGRSPDGGRNWEGFSPDPALTGVLFAETIKGIQDAGVVATAKHYILNEQEHFRQVAEAAGYGFNISDTISSNVDDKTIHEMYLWPFADAVRAGVGAIMCSYNQINNSYGCQNSYTLNKLLKAELGFQGFVMSDWGAHHSGVGSALAGLDMSMPGDITFDSATSFWGTNLTIAVLNGTVPQWRVDDMAVRIMAAYYKVGRDRLYQPPNFSSWTRDEYGFKYFYPQEGPYEKVNHFVNVQRNHSEVIRKLGADSTVLLKNNNALPLTGKERKVAILGEDAGSNSYGANGCSDRGCDNGTLAMAWGSGTAEFPYLVTPEQAIQAEVLKHKGSVYAITDNWALSQVETLAKQASVSLVFVNSDAGEGYISVDGNEGDRNNLTLWKNGDNLIKAAANNCNNTIVVIHSVGPVLVDEWYDHPNVTAILWAGLPGQESGNSLADVLYGRVNPGAKSPFTWGKTREAYGDYLVRELNNGNGAPQDDFSEGVFIDYRGFDKRNETPIYEFGHGLSYTTFNYSGLHIQVLQASSNATVATETGAAPTFGQVGNASDYVYPEGLTRISKFIYPWLNSTDLKASSGDPYYGVDTAEHVPEGATDGSPQPVLPAGGGSGGNPRLYDELIRVSVTVKNTGRVAGDAVPQLYVSLGGPNEPKVVLRKFDRLTLKPSEETVWTTTLTRRDLSNWDVAAQDWVITSYPKKVHVGSSSRQLPLHAALPKV

SEQ ID NO: 45508 - protein, 839 aa, Aspergillus aculeatus
ELAFSPPFYPSPWANGQGEWAEAYQRAVAIVSQMTLDEKVNLTTGTGWELEKCVGQTGGVPRLNIGGMCLQDSPLGIRDSDYNSAFPAGVNVAATWDKNLAYLRGQAMGQEFSDKGIDVQLGPAAGPLGRSPDGGRNWEGFSPDPALTGVLFAETIKGIQDAGVVATAKHYILNEQEHFRQVAEAAGYGFNISDTISSNVDDKTIHEMYLWPFADAVRAGVGAIMCSYNQINNSYGCQNSYTLNKLLKAELGFQGFVMSDWGAHHSGVGSALAGLDMSMPGDITFDSATSFWGTNLTIAVLNGTVPQWRVDDMAVRIMAAYYKVGRDRLYQPPNFSSWTRDEYGFKYFYPQEGPYEKVNHFVNVQRNHSEVIRKLGADSTVLLKNNNALPLTGKERKVAILGEDAGSNSYGANGCSDRGCDNGTLAMAWGSGTAEFPYLVTPEQAIQAEVLKHKGSVYAITDNWALSQVETLAKQASVSLVFVNSDAGEGYISVDGNEGDRNNLTLWKNGDNLIKAAANNCNNTIVVIHSVGPVLVDEWYDHPNVTAILWAGLPGQESGNSLADVLYGRVNPGAKSPFTWGKTREAYGDYLVRELNNGNGAPQDDFSEGVFIDYRGFDKRNETPIYEFGHGLSYTTFNYSGLHIQVLNASSNAQVATETGAAPTFGQVGNASDYVYPEGLTRISKFIYPWLNSTDLKASSGDPYYGVDTAEHVPEGATDGSPQPVLPAGGGSGGNPRLYDELIRVSVTVKNTGRVAGDAVPQLYVSLGGPNEPKVVLRKFDRLTLKPSNETVWTTTLTRRDLSNWDVAAQDWVITSYPKKVHVGSSSRQLPLHAALPKV

SEQ ID NO: 45509 - protein, 839 aa, Aspergillus aculeatus
ELAFSPPFYPSPWANGQGEWAEAYQRAVAIVSQMTLDEKVNLTTGTGWELEKCVGQTGGVPRLNIGGMCLQDSPLGIRDSDYNSAFPAGVNVAATWDKNLAYLRGQAMGQEFSDKGIDVQLGPAAGPLGRSPDGGRNWEGFSPDPALTGVLFAETIKGIQDAGVVATAKHYILNEQEHFRQVAEAAGYGFNISDTISSNVDDKTIHEMYLWPFADAVRAGVGAIMCSYNQINNSYGCQNSYTLNKLLKAELGFQGFVMSDWGAHHSGVGSALAGLDMSMPGDITFDSATSFWGTNLTIAVLNGTVPQWRVDDMAVRIMAAYYKVGRDRLYQPPNFSSWTRDEYGFKYFYPQEGPYEKVNHFVNVQRNHSEVIRKLGADSTVLLKNNNALPLTGKERKVAILGEDAGSNSYGANGCSDRGCDNGTLAMAWGSGTAEFPYLVTPEQAIQAEVLKHKGSVYAITDNWALSQVETLAKQASVSLVFVNSDAGEGYISVDGNEGDRNNLTLWKNGDNLIKAAANNCNNTIVVIHSVGPVLVDEWYDHPNVTAILWAGLPGQESGNSLADVLYGRVNPGAKSPFTWGKTREAYGDYLVRELNNGNGAPQDDFSEGVFIDYRGFDKRNETPIYEFGHGLSYTTFNYSGLHIQVLNASSNAQVATETGAAPTFGQVGNASDYVYPEGLTRISKFIYPWLNSTDLKASSGDPYYGVDTAEHVPEGATDGSPQPVLPAGGGSGGNPRLYDELIRVSVTVKNTGRVAGDAVPQLYVSLGGPNEPKVVLRKFDRLTLKPSEETNWTTTLTRRDLSNWDVAAQDWVITSYPKKVHVGSSSRQLPLHAALPKV

SEQ ID NO: 45510 - protein, 839 aa, Aspergillus aculeatus
ELAFSPPFYPSPWANGQGEWAEAYQRAVAIVSQMTLDEKVNLTTGTGWELEKCVGQTGGVPRLNIGGMCLQDSPLGIRDSDYNSAFPAGVNVAATWDKNLAYLRGQAMGQEFSDKGIDVQLGPAAGPLGRSPDGGRNWEGFSPDPALTGVLFAETIKGIQDAGVVATAKHYILNEQEHFRQVAEAAGYGFNISDTISSNVDDKTIHEMYLWPFADAVRAGVGAIMCSYNQINNSYGCQNSYTLNKLLKAELGFQGFVMSDWGAHHSGVGSALAGLDMSMPGDITFDSATSFWGTNLTIAVLNGTVPQWRVDDMAVRIMAAYYKVGRDRLYQPPNFSSWTRDEYGFKYFYPQEGPYEKVNHFVNVQRNHSEVIRKLGADSTVLLKNNNALPLTGKERKVAILGEDAGSNSYGANGCSDRGCDNGTLAMAWGSGTAEFPYLVTPEQAIQAEVLKHKGSVYAITDNWALSQVETLAKQASVSLVFVNSDAGEGYISVDGNEGDRNNLTLWKNGDNLIKAAANNCNNTIVVIHSVGPVLVDEWYDHPNVTAILWAGLPGQESGNSLADVLYGRVNPGAKSPFTWGKTREAYGDYLVRELNNGNGAPQDDFSEGVFIDYRGFDKRNETPIYEFGHGLSYTTFNYSGLHIQVLNASSNAQVATETGAAPTFGQVGNASDYVYPEGLTRISKFIYPWLNSTDLKASSGDPYYGVDTAEHVPEGATDGSPQPVLPAGGGSGGNPRLYDELIRVSVTVKNTGRVAGDAVPQLYVSLGGPNEPKVVLRKFDRLTLKPSEETVWTTTLTRRDLSNWDVAAQDWNITSYPKKVHVGSSSRQLPLHAALPKV

SEQ ID NO: 45511 - protein, 839 aa, Aspergillus aculeatus
ELAFSPPFYPSPWANGQGEWAEAYQRAVAIVSQMTLDEKVNLTTGTGWELEKCVGQTGGVPRLNIGGMCLQDSPLGIRDSDYNSAFPAGVNVAATWDKNLAYLRGQAMGQEFSDKGIDVQLGPAAGPLGRSPDGGRNWEGFSPDPALTGVLFAETIKGIQDAGVVATAKHYILNEQEHFRQVAEAAGYGFNISDTISSNVDDKTIHEMYLWPFADAVRAGVGAIMCSYNQINNSYGCQNSYTLNKLLKAELGFQGFVMSDWGAHHSGVGSALAGLDMSMPGDITFDSATSFWGTNLTIAVLNGTVPQWRVDDMAVRIMAAYYKVGRDRLYQPPNFSSWTRDEYGFKYFYPQEGPYEKVNHFVNVQRNHSEVIRKLGADSTVLLKNNNALPLTGKERKVAILGEDAGSNSYGANGCSDRGCDNGTLAMAWGSGTAEFPYLVTPEQAIQAEVLKHKGSVYAITDNWALSQVETLAKQASVSLVFVNSDAGEGYISVDGNEGDRNNLTLWKNGDNLIKAAANNCNNTIVVIHSVGPVLVDEWYDHPNVTAILWAGLPGQESGNSLADVLYGRVNPGAKSPFTWGKTREAYGDYLVRELNNGNGAPQDDFSEGVFIDYRGFDKRNETPIYEFGHGLSYTTFNYSGLHIQVLNASSNAQVATETGAAPTFGQVGNASDYVYPEGLTRISKFIYPWLNSTDLKASSGDPYYGVDTAEHVPEGATDGSPQPVLPAGGGSGGNPRLYDELIRVSVTVKNTGRVAGDAVPQLYVSLGGPNEPKVVLRKFDRLTLKPSEETVWTTTLTRRDLSNWTVAAQDWVITSYPKKVHVGSSSRQLPLHAALPKV

SEQ ID NO: 45512 - protein, 839 aa, Aspergillus aculeatus
ELAFSPPFYPSPWANGQGEWAEAYQRAVAIVSQMTLDEKVNLTTGTGWELEKCVGQTGGVPRLNIGGMCLQDSPLGIRDSDYNSAFPAGVNVAATWDKNLAYLRGQAMGQEFSDKGIDVQLGPAAGPLGRSPDGGRNWEGFSPDPALTGVLFAETIKGIQDAGVVATAKHYILNEQEHFRQVAEAAGYGFNISDTISSNVDDKTIHEMYLWPFADAVRAGVGAIMCSYNQINNSYGCQNSYTLNKLLKAELGFQGFVMSDWGAHHSGVGSALAGLDMSMPGDITFDSATSFWGTNLTIAVLNGTVPQWRVDDMAVRIMAAYYKVGRDRLYQPPNFSSWTRDEYGFKYFYPQEGPYEKVNHFVNVQRNHSEVIRKLGADSTVLLKNNNALPLTGKERKVAILGEDAGSNSYGANGCSDRGCDNGTLAMAWGSGTAEFPYLVTPEQAIQAEVLKHKGSVYAITDNWALSQVETLAKQASVSLVFVNSDAGEGYISVDGNEGDRNNLTLWKNGDNLIKAAANNCNNTIVVIHSVGPVLVDEWYDHPNVTAILWAGLPGQESGNSLADVLYGRVNPGAKSPFTWGKTREAYGDYLVRELNNGNGAPQDDFSEGVFIDYRGFDKRNETPIYEFGHGLSYTTFNYSGLHIQVLNASSNAQVATETGAAPTFGQVGNASDYVYPEGLTRISKFIYPWLNSTDLKASSGDPYYGVDTAEHVPEGATDGSPQPVLPAGGGSGGNPRLYDELIRVSVTVKNTGRVAGDAVPQLYVSLGGPNEPKVVLRKFDRLTLKPSEETVWTTTLTRRDLSNWDVAAQDWVITSYPKKVHVGNSSRQLPLHAALPKV

SEQ ID NO: 45513 - protein, 551 aa, Aspergillus niger
WAEAYQRAVDIVSQMTLAEKVNLTTGTGWELELCVGQTGGVPRLGIPGMCAQDSPLGVRDSDYNSAFPAGVNVAATWDKNLAYLRGQAMGQEFSDKGADIQLGPAAGPLGRSPDGGRNWEGFSPDPALSGVLFAETIKGIQDAGVVATAKHYIAYEQEHFRQAPEAQGYGFNITESGSANLDDKTMHELYLWPFADAIRAGAGAVMCSYNQINNSYGCQNSYTLNKLLKAELGFQGFVMSDWAAHHAGVSGALAGLDMSMPGDVDYDSGTSYWGTNLTISVKNGTVPQWRVDDMAVRIMAAYYKVGRDRLWTPPNFSSWTRDEYGFKYYYVSEGPYEKVNQFVNVQRNHSELIRRIGADSTVLLKNDDGALPLTGKERLVALIGEDAGSNPYGANGCSDRGCDNGTLAMGWGSGTANFPYLVTPEQAISNEVLKNKNGVFTATDNWAIDQIEALAKTASVSLVFVNADSGEGYINVDGNLGDRRNLTLWRNGDNVIKAAASNCNNTIVIIHSVGPVLVNEWYDNPNVTAILWGGLPGQESGNSLADVLYGR

SEQ ID NO: 45514 - protein, 626 aa, Aspergillus niger
PWANGQGDWAQAYQRAVDIVSQMTLDEKVNLTTGTGWELELCVGQTGGVPRLGVPGMCLQDSPLGVRDSDYNSAFPAGMNVAATWDKNLAYLRGKAMGQEFSDKGADIQLGPAAGPLGRSPDGGRNWEGFSPDPALSGVLFAETIKGIQDAGVVATAKHYIAYEQEHFRQAPEAQGFGFNISESGSANLDDKTMHELYLWPFADAIRAGAGAVMCSYNQINNSYGCQNSYTLNKLLKAELGFQGFVMSDWAAHHAGVSGALAGLDMSMPGDVDYDSGTSYWGTNLTISVLNGTVPQWRVDDMAVRIMAAYYKVGRDRLWTPPNFSSWTRDEYGYKYYYVSEGPYEKVNQYVNVQRNHSELIRRIGADSTVLLKNDGALPLTGKERLVALIGEDAGSNPYGANGCSDRGCDNGTLAMGWGSGTANFPYLVTPEQAISNEVLKHKNGVFTATDNWAIDQIEALAKTASVSLVFVNADSGEGYINVDGNLGDRRNLTLWRNGDNVIKAAASNCNNTIVVIHSVGPVLVNEWYDNPNVTAILWGGLPGQESGNSLADVLYGRVNPGAKSPFTWGKTREAYQDYLVTEPNNGNGAPQEDFVEGVFIDYRGFDKRNETPIYEFGYGLSYTTF

SEQ ID NO: 45515 - protein, 841 aa, Schizosaccharomyces
ADELAFSPPFYPSPWANGQGEWAEAYQRAVAIVSQMTLDEKVNLTTGTGWELEKCVGQTGGVPRLNIGGMCLQDSPLGIRDSDYNSAFPAGVNVAATWDKNLAYLRGQAMGQEFSDKGIDVQLGPAAGPLGRSPDGGRNWEGFSPDPALTGVLFAETIKGIQDAGVVATAKHYILNEQEHFRQVAEAAGYGFNISDTISSNVDDKTIHEMYLWPFADAVRAGVGAIMCSYNQINNSYGCQNSYTLNKLLKAELGFQGFVMSDWFAHHSGVGSALAGLDMSMPGDITFDSATSFWGTNLTIAVLNGTVPQWRVDDMAVRIMAAYYKVGRDRLYQPPNFSSWTRDEYGFKYFYPQEGPYEKVNHFVNVQRNHSEVIRKLGADSTVLLKNNNALPLTGKERKVAILGEDAGSNSYGANGCSDRGCDNGTLAMAWGSGTAEFPYLVTPEQAIQAEVLKHKGSVYAITDNWALSQVETLAKQASVSLVFVNSDAGEGYISVDGNEGDRNNLTLWKNGDNLIKAAANNCNNTIVVIHSVGPVLVDEWYDHPNVTAILWAGLPGQESGNSLADVLYGRVNPGAKSPFTWGKTREAYGDYLVRELNNGNGAPQDDFSEGVFIDYRGFDKRNETPIYEFGHGLSYTTFNYSGLHIQVLNASSNAQVATETGAAPTFGQVGNASDYVYPEGLTRISKFIYPWLNSTDLKASSGDPYYGVDTAEHVPEGATDGSPQPVLPAGGGSGGNPRLYDELIRVSVTVKNTGRVAGDAVPQLYVSLGGPNEPKVVLRKFDRLTLKPSEETVWTTTLTRRDLSNWDVAAQDWVITSYPKKVHVGSSSRQLPLHAALPKV

SEQ ID NO: 45516 - protein, 841 aa, Aspergillus aculeatus
ADELAFSPPFYPSPWANGQGEWAEAYQRAVAIVSQMTLDEKVNLTTGTGWELEKCVGQTGGVPRLNIGGMCLQDSPLGIRDSDYNSAFPAGVNVAATWDKNLAYLRGLAMGQEFSDKGIDVQLGPAAGPLGRSPDGGRNWEGFSPDPALTGVLFAETIKGIQDAGVVATAKHYILNEQEHFRQVAEAAGYGFNISDTISSNVDDKTIHEMYLWPFADAVRAGVGAIMCSYNQINNSYGCQNSYTLNKLLKAELGFQGFVMSDWGAHHSGVGSALAGLDMSMPGDITFDSATSFWGTNLTIAVLNGTVPQWRVDDMAVRIMAAYYKVGRDRLYQPPNFSSWTRDEYGFKYFYPQEGPYEKVNHFVNVQRNHSEVIRKLGADSTVLLKNNNALPLTGKERKVAILGEDAGSNSYGANGCSDRGCDNGTLAMAWGSGTAEFPYLVTPEQAIQAEVLKHKGSVYAITDNWALSQVETLAKQASVSLVFANSDAGEGYISVDGNEGDRNNLTLWKNGDNLIKAAANNCNNTIVVIHSVGPVLVDEWYDHPNVTAILWAGLPGQESGNSLADVLYGRVNPGAKSPFTWGKTREAYGDYLVLELNNGNGAPQDDFSEGVFIDYRGFDKRNETPIYEFGHGLSYTTFNYSGLHIQVLNASSNAQVATETGAAPTFGQVGNASDYVYPEGLTRISKFIYPWLNSTDLKASSGDPYYGVDTAEHVPEGATDGSPQPVLPAGGGSGGNPRLYDELIRVSVTVKNTGRVAGDAVPQLYVSLGGPNEPKVVLRKFDRLTLKPSEETVWTTTLTRRDLSNWDVAAQDWVITSYPKKVHVGSSSRQLPLHAALPKV

SEQ ID NO: 45517 - protein, 841 aa, Aspergillus aculeatus
ADELAFSPPFYPSPWANGQGEWAEAYQRAVAIVSQMTLDEKVNLTTGTGWELEKCVGQTGGVPRLNIGGMCLQDSPLGIRDSDYNSAFPAGVNVAATWDKNLAYLRGQAMGQEFSDKGIDVQLGPAAGPLGRSPDGGRNWEGFSPDPALTGVLFAETIKGIQDAGVVATAKHYILNEQEHFRQVAEAAGYGFNISDTISSNVDDKTIHEMYLWPFADAVRAGVGAIMCSYNQINNSYGCQNSYTLNKLLKAELGFQGFVMSDWGAHHSGVGSALAGLDMSMPGDITFDSATSFWGTNLTIAVLNGTVPQWRVDDMAVRIMAAYYKVGRDRLYQPPNFSSWTRDEYGFKYFYPQEGPYEKVNHFVNVQRNHSEVIRKLGADSTVLLKNNNALPLTGKERKVAILGEDAGSNSYGANGCSDRGCDNGTLAMAWGSGTAEFPYLVTPEQAIQAEVLKHKGSVYAITDNWALSQVETLAKQASVSLVFGNSDAGEGYISVDGNEGDRNNLTLWKNGDNLIKAAANNCNNTIVVIHSVGPVLVDEWYDHPNVTAILWAGLPGQESGNSLADVLYGRVNPGAKSPFTWGKTREAYGDYLVRELNNGNGAPQDDFSEGVFIDYRGFDKRNETPIYEFGHGLSYTTFNYSGLHIQVLNASSNAQVATETGAAPTFGQVGNASDYVYPEGLTRISKFIYPWLNSTDLKASSGDPYYGVDTAEHVPEGATDGSPQPVLPAGGGSGGNPRLYDELIRVSVTVKNTGRVAGDAVPQLYVSLGGPNEPKVVLRKFDRLTLKPSEETVWTTTLTRRDLSNWDVAAQDWVITSYPKKVHVGSSSRQLPLHAALPKV

SEQ ID NO: 45518 - protein, 841 aa, Schizosaccharomyces
ADELAFSPPFYPSPWANGQGEWAEAYQRAVAIVSQMTLDEKVNLTTGTGWELEKCVGQTGGVPRLNIGGMCLQDSPLGIRDSDYNSAFPAGVNVAATWDKNLAYLRGQAMGQEFSDKGIDVLLGPAAGPLGRSPDGGRNWEGFSPDPALTGVLFAETIKGIQDAGVVATAKHYILNEQEHFRQVAEAAGYGFNISDTISSNVDDKTIHEMYLWPFADAVRAGVGAFMCSYNQINNSYGCQNSYTLNKLLKAELGFQGFVMSDWFAHHSGVGSALAGLDMSMPGDITFDSATSFWGTNLTIAVLNGTVPQWRVDDMAVRIMAAYYKVGRDRLYQPPNFSSWTRDEYGFKYFYPQEGPYEKVNHFVNVQRNHSEVIRKLGADSTVLLKNNNALPLTGKERKVAILGEDAGSNSYGANGCSDRGCDNGTLAMAWGSSTAEFPYLVTPEQAIQAEVLKHKGSVYAITDNWALSQVETLAKQASVSLVFVNSDAGEGYISVDGNEGDRNNLTLWKNGDNLIKAAANNCNNTIVVIHSVGPVLVDEWYDHPNVTAILWAGLPGQESGNSLADVLYGRVNPGAKSPFTWGKTREAYGDYLVRELNNGNGAPQDDFSEGVFIDYRGFDKRNETPIYEFGHGLSYTTFNYSGLHIQVLNASSNAQVATETGAAPTFGQVGNASDYVYPEGLTRISKFIYPWLNSTDLKASSGDPYYGVDTAEHVPEGATDGSPQPVLPAGGGSGGNPRLYDELIRVSVTVKNTGRVAGDAVPQLYVSLGGPNEPKVVLRKFDRLTLKPSEETVWTTTLTRRDLSNWDVAAQDWVITSYPKKVHVGSSSRQLPLHAALPKV

SEQ ID NO: 45519 - protein, 841 aa, Schizosaccharomyces
ADELAFSPPFYPSPWANGQGEWAEAYQRAVAIVSQMTLDEKVNLTTGTGWELEKCVGQTGGVPRLNIGGMCLQDSPLGIRDSDYNSAFPAGVNVAATWDKNLAYLRGQAMGQEFSDKGIDVQLGPAAGPLGRSPDGGRNWEGFSPDPALTGVLFAETIKGIQDAGVVATAKHYILNEQEHFRQVAEAAGYGFNISDTISSNVDDKTIHEMYLWPFADAVRAGVGAIMCSYNQINNSYGCQNSYTLNKLLKAELGFQGFVMSDWGAHHSGVGSALAGLDMSMPGDITFDSATSFWGTNLTIAVLNGTVPQWRVDDMAVRIMAAYYKVGRDRLYQPPNFSSWTRDEYGFKYFYPQEGPYEKVNHFVNVQRNHSEVIRKLGADSTVLLKNNNALPLTGKERKVAILGEDAGSNSYGANGCSDRGCDNGTLAMAWGSGTAEFPYLVTPEQAIQAEVLKHKGSVYAITDNWALSQVETLAKQASVSLVFANSDAGEGYISVDGNEGDRNNLTLWKNGDNLIKAAANNCNNTIVVIHSVGPVLVDEWYDHPNVTAILWAGLPGQESGNSLADVLYGRVNPGAKSPFTWGKTREAYGDYLVLELNNGNGAPQDDFSEGVFIDYRGFDKRNETPIYEFGHGLSYTTFNYSGLHIQVLNASSNAQVATETGAAPTFGQVGNASDYVYPEGLTRISKFIYPWLNSTDLKASSGDPYYGVDTAEHVPEGATDGSPQPVLPAGGGSGGNPRLYDELIRVSVTVKNTGRVAGDAVPQLYVSLGGPNEPKVVLRKFDRLTLKPSEETVWTTTLTRRDLSNWDVAAQDWVITSYPKKVHVGSSSRQLPLHAALPKV

SEQ ID NO: 45520 - protein, 841 aa, Aspergillus aculeatus
ADELAFSPPFYPSPWANGQGEWAEAYQRAVAIVSQMTLDEKVNLTTGTGWELEKCVGQTGGVPRLNIGGMCLQDSPLGIRDSDYNSAFPAGVNVAATWDKNLAYLRGQAMGQEFSDKGIDVQLGPAAGPLGRSPDGGRNWEGFSPDPALTGVLFAETIKGIQDAGVVATAKHYILNEQEHFRQVAEAAGYGFNISDTISSNVDDKTIHEMYLWPFADAVRAGVGAIMCSYNQINNSYGCQNSYTLNKLLKAELGFQGFVMSDWPAHHSGVGSALAGLDMSMPGDITFDSATSFWGTNLTIAVLNGTVPQWRVDDMAVRIMAAYYKVGRDRLYQPPNFSSWTRDEYGFKYFYPQEGPYEKVNHFVNVQRNHSEVIRKLGADSTVLLKNNNALPLTGKERKVAILGEDAGSNSYGANGCSDRGCDNGTLAMAWGSGTAEFPYLVTPEQAIQAEVLKHKGSVYAITDNWALSQVETLAKQASVSLVFVNSDAGEGYISVDGNEGDRNNLTLWKNGDNLIKAAANNCNNTIVVIHSVGPVLVDEWYDHPNVTAILWAGLPGQESGNSLADVLYGRVNPGAKSPFTWGKTREAYGDYLVRELNNGNGAPQDDFSEGVFIDYRGFDKRNETPIYEFGHGLSYTTFNYSGLHIQVLNASSNAQVATETGAAPTFGQVGNASDYVYPEGLTRISKFIYPWLNSTDLKASSGDPYYGVDTAEHVPEGATDGSPQPVLPAGGGSGGNPRLYDELIRVSVTVKNTGRVAGDAVPQLYVSLGGPNEPKVVLRKFDRLTLKPSEETVWTTTLTRRDLSNWDVAAQDWVITSYPKKVHVGSSSRQLPLHAALPKV

SEQ ID NO: 45521 - protein, 841 aa, Aspergillus aculeatus
ADELAFSPPFYPSPWANGQGEWAEAYQRAVAIVSQMTLDEKVNLTTGTGWELEKCVGQTGGVPRLNIGGMCLQDSPLGIRDSDYNSAFPAGVNVAATWDKNLAYLRGQAMGQEFSDKGIDVQLGPAAGPLGRSPDGGRNWEGFSPDPALTGVLFAETIKGIQDAGVVATAKHYILNEQEHFRQVAEAAGYGFNISDTISSNVDDKTIHEMYLWPFADAVRAGVGAIMCSYNQINNSYGCQNSYTLNKLLKAELGFQGFVMSDWGAHHSGVGSALAGLDMSMPGDITFDSATSFWGTNLTIAVLNGTVPQWRVDDMAVRIMAAYYKVGRDRLYQPPNFSSWTRDEYGFKYFYPQEGPYEKVNHFVNVQRNHSEVIRKLGADSTVLLKNNNALPLTGKERKVAILGEDAGSNSYGANGCSDRGCDNGTLAMAWGSGTAEFPYLVTPEQAIQAEVLKHKGSVYAITDNWALSQVETLAKQASVSLVFCNSDAGEGYISVDGNEGDRNNLTLWKNGDNLIKAAANNCNNTIVVIHSVGPVLVDEWYDHPNVTAILWAGLPGQESGNSLADVLYGRVNPGAKSPFTWGKTREAYGDYLVRELNNGNGAPQDDFSEGVFIDYRGFDKRNETPIYEFGHGLSYTTFNYSGLHIQVLNASSNAQVATETGAAPTFGQVGNASDYVYPEGLTRISKFIYPWLNSTDLKASSGDPYYGVDTAEHVPEGATDGSPQPVLPAGGGSGGNPRLYDELIRVSVTVKNTGRVAGDAVPQLYVSLGGPNEPKVVLRKFDRLTLKPSEETVWTTTLTRRDLSNWDVAAQDWVITSYPKKVHVGSSSRQLPLHAALPKV

SEQ ID NO: 45522 - protein, 841 aa, Schizosaccharomyces
ADELAFSPPFYPSPWANGQGEWAEAYQRAVAIVSQMTLDEKVNLTTGTGWELEKCVGQTGGVPRLNIGGMCLQDSPLGIRDSDYNSAFPAGVNVAATWDKNLAYLRGQAMGQEFSDKGIDVQLGPAAGPLGRSPDGGRNWEGFSPDPALTGVLFAETIKGIQDAGVVATAKHYILNEQEHFRQVAEAAGYGFNISDTISSNVDDKTIHEMYLWPFADAVRAGVGAIMCSYNQINNSYGCQNSYTLNKLLKAELGFQGFVMSDWSAHHSGVGSALAGLDMSMPGDITFDSATSFWGTNLTIAVLNGTVPQWRVDDMAVRIMAAYYKVGRDRLYQPPNFSSWTRDEYGFKYFYPQEGPYEKVNHFVNVQRNHSEVIRKLGADSTVLLKNNNALPLTGKERKVAILGEDAGSNSYGANGCSDRGCDNGTLAMAWGSGTAEFPYLVTPEQAIQAEVLKHKGSVYAITDNWALSQVETLAKQASVSLVFVNSDAGEGYISVDGNEGDRNNLTLWKNGDNLIKAAANNCNNTIVVIHSVGPVLVDEWYDHPNVTAILWAGLPGQESGNSLADVLYGRVNPGAKSPFTWGKTREAYGDYLVRELNNGNGAPQDDFSEGVFIDYRGFDKRNETPIYEFGHGLSYTTFNYSGLHIQVLNASSNAQVATETGAAPTFGQVGNASDYVYPEGLTRISKFIYPWLNSTDLKASSGDPYYGVDTAEHVPEGATDGSPQPVLPAGGGSGGNPRLYDELIRVSVTVKNTGRVAGDAVPQLYVSLGGPNEPKVVLRKFDRLTLKPSEETVWTTTLTRRDLSNWDVAAQDWVITSYPKKVHVGSSSRQLPLHAALPKV

SEQ ID NO: 45523 - protein, 841 aa, Schizosaccharomyces
ADELAFSPPFYPSPWANGQGEWAEAYQRAVAIVSQMTLDEKVNLTTGTGWELEKCVGQTGGVPRLNIGGMCLQDSPLGIRDSDYNSAFPAGVNVAATWDKNLAYLRGQAMGQEFSDKGIDVLLGPAAGPLGRSPDGGRNWEGFSPDPALTGVLFAETIKGIQDAGVVATAKHYILNEQEHFRQVAEAAGYGFNISDTISSNVDDKTIHEMYLWPFADAVRAGVGAFMCSYNQINNSYGCQNSYTLNKLLKAELGFQGFVMSDWFAHHSGVGSALAGLDMSMPGDITFDSATSFWGTNLTIAVLNGTVPQWRVDDMAVRIMAAYYKVGRDRLYQPPNFSSWTRDEYGFKYFYPQEGPYEKVNHFVNVQRNHSEVIRKLGADSTVLLKNNNALPLTGKERKVAILGEDAGSNSYGANGCSDRGCDNGTLAMAWGSGTAEFPYLVTPEQAIQAEVLKHKGSVYAITDNWALSQVETLAKQASVSLVFANSDAGEGYISVDGNEGDRNNLTLWKNGDNLIKAAANNCNNTIVVIHSVGPVLVDEWYDHPNVTAILWAGLPGQESGNSLADVLYGRVNPGAKSPFTWGKTREAYGDYLVLELNNGNGAPQDDFSEGVFIDYRGFDKRNETPIYEFGHGLSYTTFNYSGLHIQVLNASSNAQVATETGAAPTFGQVGNASDYVYPEGLTRISKFIYPWLNSTDLKASSGDPYYGVDTAEHVPEGATDGSPQPVLPAGGGSGGNPRLYDELIRVSVTVKNTGRVAGDAVPQLYVSLGGPNEPKVVLRKFDRLTLKPSEETVWTTTLTRRDLSNWDVAAQDWVITSYPKKVHVGSSSRQLPLHAALPKV

SEQ ID NO: 45524 - protein, 841 aa, Aspergillus aculeatus
ADELAFSPPFYPSPWANGQGEWAEAYQRAVAIVSQMTLDEKVNLTTGTGWELEKCVGQTGGVPRLNIGGMCLQDSPLGIRDSDYNSAFPAGVNVAATWDKNLAYLRGQAMGQEFSDKGIDVQLGPAAGPLGRSPDGGRNWEGFSPDPALTGVLFAETIKGIQDAGVVATAKHYILNEQEHFRQVAEAAGYGFNISDTISSNVDDKTIHEMYLWPFADAVRAGVGAIMCSYNQINNSYGCQNSYTLNKLLKAELGFQGFVMSDWGAHHSGVGSALAGLDMSMPGDITFDSATSFWGTNLTIAVLNGTVPQWRVDDMAVRIMAAYYKVGRDRLYQPPNFSSWTRDEYGFKYFYPQEGPYEKVNHFVNVQRNHSEVIRKLGADSTVLLKNNNALPLTGKERKVAILGEDAGSNSYGANGCSDRGCDNGTLAMAWGSGTAEFPYLVTPEQAIQAEVLKHKGSVYAITDNWALSQVETLAKQASVSLVFANSDAGEGYISVDGNEGDRNNLTLWKNGDNLIKAAANNCNNTIVVIHSVGPVLVDEWYDHPNVTAILWAGLPGQESGNSLADVLYGRVNPGAKSPFTWGKTREAYGDYLVRELNNGNGAPQDDFSEGVFIDYRGFDKRNETPIYEFGHGLSYTTFNYSGLHIQVLNASSNAQVATETGAAPTFGQVGNASDYVYPEGLTRISKFIYPWLNSTDLKASSGDPYYGVDTAEHVPEGATDGSPQPVLPAGGGSGGNPRLYDELIRVSVTVKNTGRVAGDAVPQLYVSLGGPNEPKVVLRKFDRLTLKPSEETVWTTTLTRRDLSNWDVAAQDWVITSYPKKVHVGSSSRQLPLHAALPKV

SEQ ID NO: 45525 - protein, 841 aa, Aspergillus aculeatus
ADELAFSPPFYPSPWANGQGEWAEAYQRAVAIVSQMTLDEKVNLTTGTGWELEKCVGQTGGVPRLNIGGMCLQDSPLGIRDSDYNSAFPAGVNVAATWDKNLAYLRGQAMGQEFSDKGIDVQLGPAAGPLGRSPDGGRNWEGFSPDPALTGVLFAETIKGIQDAGVVATAKHYILNEQEHFRQVAEAAGYGFNISDTISSNVDDKTIHEMYLWPFADAVRAGVGAIMCSYNQINNSYGCQNSYTLNKLLKAELGFQGFVMSDWGAHHSGVGSALAGLDMSMPGDITFDSATSFWGTNLTIAVLNGTVPQWRVDDMAVRIMAAYYKVGRDRLYQPPNFSSWTRDEYGFKYFYPQEGPYEKVNHFVNVQRNHSEVIRKLGADSTVLLKNNNALPLTGKERKVAILGEDAGSNSYGANGCSDRGCDNGTLAMAWGSSTAEFPYLVTPEQAIQAEVLKHKGSVYAITDNWALSQVETLAKQASVSLVFVNSDAGEGYISVDGNEGDRNNLTLWKNGDNLIKAAANNCNNTIVVIHSVGPVLVDEWYDHPNVTAILWAGLPGQESGNSLADVLYGRVNPGAKSPFTWGKTREAYGDYLVRELNNGNGAPQDDFSEGVFIDYRGFDKRNETPIYEFGHGLSYTTFNYSGLHIQVLNASSNAQVATETGAAPTFGQVGNASDYVYPEGLTRISKFIYPWLNSTDLKASSGDPYYGVDTAEHVPEGATDGSPQPVLPAGGGSGGNPRLYDELIRVSVTVKNTGRVAGDAVPQLYVSLGGPNEPKVVLRKFDRLTLKPSEETVWTTTLTRRDLSNWDVAAQDWVITSYPKKVHVGSSSRQLPLHAALPKV

SEQ ID NO: 45526 - protein, 841 aa, Schizosaccharomyces
ADELAFSPPFYPSPWANGQGEWAEAYQRAVAIVSQMTLDEKVNLTTGTGWELEKCVGQTGGVPRLNIGGMCLQDSPLGIRDSDYNSAFPAGVNVAATWDKNLAYLRGNAMGQEFSDKGIDVLLGPAAGPLGRSPDGGRNWEGFSPDPALTGVLFAETIKGIQDAGVVATAKHYILNEQEHFRQVAEAAGYGFNISDTISSNVDDKTIHEMYLWPFADAVRAGVGAFMCSYNQINNSYGCQNSYTLNKLLKAELGFQGFVMSDWFAHHSGVGSALAGLDMSMPGDITFDSATSFWGTNLTIAVLNGTVPQWRVDDMAVRIMAAYYKVGRDRLYQPPNFSSWTRDEYGFKYFYPQEGPYEKVNHFVNVQRNHSEVIRKLGADSTVLLKNNNALPLTGKERKVAILGEDAGSNSYGANGCSDRGCDSGTLAMAWGSGTAEFPYLVTPEQAIQAEVLKHKGSVYAITDNWALSQVETLAKQASVSLVFANSDAGEGYISVDGNEGDRNNLTLWKNGDNLIKAAANNCNNTIVVIHSVGPVLVDEWYDHPNVTAILWAGLPGQESGNSLADVLYGRVNPGAKSPFTWGKTREAYGDYLVLELNNGNGAPQDDFSEGVFIDYRGFDKRNETPIYEFGHGLSYTTFNYSGLHIQVLNASSNAQVATETGAAPTFGQVGNASDYVYPEGLTRISKFIYPWLNSTDLKASSGDPYYGVDTAEHVPEGATDGSPQPVLPAGGGSGGNPRLYDELIRVSVTVKNTGRVAGDAVPQLYVSLGGPNEPKVVLRKFDRLTLKPSEETVWTTTLTRRDLSNWDVAAQDWVITSYPKKVHVGSSSRQLPLHAALPKV

SEQ ID NO: 45527 - protein, 841 aa, Aspergillus aculeatus
ADELAFSPPFYPSPWANGQGEWAEAYQRAVAIVSQMTLDEKVNLTTGTGWELEKCVGQTGGVPRLNIGGMCLQDSPLGIRDSDYNSAFPAGVNVAATWDKNLAYLRGLAMGQEFSDKGIDVQLGPAAGPLGRSPDGGRNWEGFSPDPALTGVLFAETIKGIQDAGVVATAKHYILNEQEHFRQVAEAAGYGFNISDTISSNVDDKTIHEMYLWPFADAVRAGVGAIMCSYNQINNSYGCQNSYTLNKLLKAELGFQGFVMSDWGAHHSGVGSALAGLDMSMPGDITFDSATSFWGTNLTIAVLNGTVPQWRVDDMAVRIMAAYYKVGRDRLYQPPNFSSWTRDEYGFKYFYPQEGPYEKVNHFVNVQRNHSEVIRKLGADSTVLLKNNNALPLTGKERKVAILGEDAGSNSYGANGCSDRGCDSGTLAMAWGSGTAEFPYLVTPEQAIQAEVLKHKGSVYAITDNWALSQVETLAKQASVSLVFANSDAGEGYISVDGNEGDRNNLTLWKNGDNLIKAAANNCNNTIVVIHSVGPVLVDEWYDHPNVTAILWAGLPGQESGNSLADVLYGRVNPGAKSPFTWGKTREAYGDYLVLELNNGNGAPQDDFSEGVFIDYRGFDKRNETPIYEFGHGLSYTTFNYSGLHIQVLNASSNAQVATETGAAPTFGQVGNASDYVYPEGLTRISKFIYPWLNSTDLKASSGDPYYGVDTAEHVPEGATDGSPQPVLPAGGGSGGNPRLYDELIRVSVTVKNTGRVAGDAVPQLYVSLGGPNEPKVVLRKFDRLTLKPSEETVWTTTLTRRDLSNWDVAAQDWVITSYPKKVHVGSSSRQLPLHAALPKV

SEQ ID NO: 45528 - protein, 841 aa, Schizosaccharomyces
ADELAFSPPFYPSPWANGQGEWAEAYQRAVAIVSQMTLDEKVNLTTGTGWELEKCVGQTGGVPRLNIGGMCLQDSPLGIRDSDYNSAFPAGVNVAATWDKNLAYLRGQAMGQEFSDKGIDVQLGPAAGPLGRSPDGGRNWEGFSPDPALTGVLFAETIKGIQDAGVVATAKHYILNEQEHFRQVAEAAGYGFNISDTISSNVDDKTIHEMYLWPFADAVRAGVGAIMCSYNQINNSYGCQNSYTLNKLLKAELGFQGFVMSDWSAHHSGVGSALAGLDMSMPGDITFDSATSFWGTNLTIAVLNGTVPQWRVDDMAVRIMAAYYKVGRDRLYQPPNFSSWTRDEYGFKYFYPQEGPYEKVNHFVNVQRNHSEVIRKLGADSTVLLKNNNALPLTGKERKVAILGEDAGSNSYGANGCSDRGCDNGTLAMAWGSGTAEFPYLVTPEQAIQAEVLKHKGSVYAITDNWALSQVETLAKQASVSLVFVNSDAGEGYISVDGNEGDRNNLTLWKNGDNLIKAAANNCNNTIVVIHSVGPVLVDEWYDHPNVTAILWAGLPGQESGNSLADVLYGRVNPGAKSPFTWGKTREAYGDYLVRELNNGNGAPQDDFSEGVFIDYRGFDKRNETPIYEFGHGLSYTTFNYSGLHIHVLNASSNAQVATETGAAPTFGQVGNASDYVYPEGLTRISKFIYPWLNSTDLKASSGDPYYGVNTAEHVPEGATDGSPQPVLPAGGGSGGNPRLYDELIRVSVTVKNTGRVAGDAVPQLYVSLGGPNEPKVVLRKFDRLTLKPSEETVWTTTLTRRDLSNWDVAAQDWVITSYPKKVHVGSSSRQLPLHAALPKV

SEQ ID NO: 45529 - protein, 841 aa, Aspergillus aculeatus
ADELAFSPPFYPSPWANGQGEWAEAYQRAVAIVSQMTLDEKVNLTTGTGWELEKCVGQTGGVPRLNIGGMCLQDSPLGIRDSDYNSAFPAGVNVAATWDKNLAYLRGQAMGQEFSDKGIDVLLGPAAGPLGRSPDGGRNWEGFSPDPALTGVLFAETIKGIQDAGVVATAKHYILNEQEHFRQVAEAAGYGFNISDTISSNVDDKTIHEMYLWPFADAVRAGVGAFMCSYNQINNSYGCQNSYTLNKLLKAELGFQGFVMSDWFAHHSGVGSALAGLDMSMPGDITFDSATSFWGTNLTIAVLNGTVPQWRVDDMAVRIMAAYYKVGRDRLYQPPNFSSWTRDEYGFKYFYPQEGPYEKVNHFVNVQRNHSEVIRKLGADSTVLLKNNNALPLTGKERKVAILGEDAGSNSYGANGCSDRGCDSGTLAMAWGSGTAEFPYLVTPEQAIQAEVLKHKGSVYAITDNWALSQVETLAKQASVSLVFANSDAGEGYISVDGNEGDRNNLTLWKNGDNLIKAAANNCNNTIVVIHSVGPVLVDEWYDHPNVTAILWAGLPGQESGNSLADVLYGRVNPGAKSPFTWGKTREAYGDYLVLELNNGNGAPQDDFSEGVFIDYRGFDKRNETPIYEFGHGLSYTTFNYSGLHIQVLNASSNAQVATETGAAPTFGQVGNASDYVYPEGLTRISKFIYPWLNSTDLKASSGDPYYGVDTAEHVPEGATDGSPQPVLPAGGGSGGNPRLYDELIRVSVTVKNTGRVAGDAVPQLYVSLGGPNEPKVVLRKFDRLTLKPSEETVWTTTLTRRDLSNWDVAAQDWVITSYPKKVHVGSSSRQLPLHAALPKV

SEQ ID NO: 45530 - protein, 859 aa, Aspergillus aculeatus
MKLSWLEAAALTAASVVSADELAFSPPFYPSPWANGQGEWAEAYQRAVAIVSQMTLDEKVNLTTGTGWELEKCVGQTGGVPRLNIGGMCLQDSPLGIRDSDYNSAFPAGVNVAATWDKNLAYLRGQAMGQEFSDKGIDVQLGPAAGPLGRSPDGGRNWEGFSPDPALTGVLFAETIKGIQDAGVVATAKHYILNEQEHFRQVAEAAGYGFNISDTISSNVDDKTIHEMYLWPFADAVRAGVGAIMCSYNQINNSYGCQNSYTLNKLLKAELGFQGFVMSDWGAHHSGVGSALAGLDMSMPGDITFDSATSFWGTNLTIAVLNGTVPQWRVDDMAVRIMAAYYKVGRDRLYQPPNFSSWTRDEYGFKYFYPQEGPYEKVNHFVNVQRNHSEVIRKLGADSTVLLKNNNALPLTGKERKVAILGEDAGSNSYGANGCTDRGCDNGTLAMAWGSGTAEFPYLVTPEQAIQAEVLKHKGSVYAITDNWALSQVETLAKQASVSLVFVNSDAGEGYISVDGNEGDRNNLTLWKNGDNLIKAAANNCNNTIVVIHSVGPVLVDEWYDHPNVTAILWAGLPGQESGNSLADVLYGRVNPGAKSPFTWGKTREAYGDYLVRELNNGNGAPQDDFSEGVFIDYRGFDKRNETPIYEFGHGLSYTTFNYSGLHIQVLNASSNAQVATETGAAPTFGQVGNASDYVYPEGLTRISKFIYPWLNSTDLKASSGDPYYGVDTAEHVPEGATDGSPQPVLPAGGGSGGNPRLYDELIRVSVTVKNTGRVAGDAVPQLYVSLGGPNEPKVVLRKFDRLTLKPSEETVWTTTLTRRDLSNWDVAAQDWVITSYPKKVHVGSSSRQLPLHAALPKV

SEQ ID NO: 45531 - protein, 859 aa, Aspergillus aculeatus
MKLSWLEAAALTAASVVSADELAFSPPFYPSPWANGQGEWAEAYQRAVAIVSQMTLDEKVNLTTGTGWELEKCVGQTGGVPRLNIGGMCLQDSPLGIRDSDYNSAFPAGVNVAATWDKNLAYLRGQAMGQEFSDKGIDVQLGPAAGPLGRSPDGGRNWEGFSPDPALTGVLFAETIKGIQDAGVVATAKHYILNEQEHFRQVAEAAGYGFNISDTISSNVDDKTIHEMYLWPFADAVRAGVGAIMCSYNQINNSYGCQNSYTLNKLLKAELGFQGFVMSDWGAHHSGVGSALAGLDMSMPGDITFDSATSFWGTNLTIAVLNGTVPQWRVDDMAVRIMAAYYKVGRDRLYQPPNFSSWTRDEYGFKYFYPQEGPYEKVNHFVNVQRNHSEVIRKLGADSTVLLKNNNALPLTGKERKVAILGEDAGSNSYGANGCSDRGCDNGTLAMAWGSGTAEFPYLVTPEQAIQAEVLKHKGSVYAITDNWALSQVETLAKQASVSLVFVNSDAGEGYISVDGNEGDRNNLTLWKNGDNLIKAAANNCNNTIVVIHSVGPVLVDEWYDHPNVTAILWAGLPGQESGNSLADVLYGRVNPGAKSPFTWGKTREAYGDYLVLELNNGNGAPQDDFSEGVFIDYRGFDKRNETPIYEFGHGLSYTTFNYSGLHIQVLNASSNAQVATETGAAPTFGQVGNASDYVYPEGLTRISKFIYPWLNSTDLKASSGDPYYGVDTAEHVPEGATDGSPQPVLPAGGGSGGNPRLYDELIRVSVTVKNTGRVAGDAVPQLYVSLGGPNEPKVVLRKFDRLTLKPSEETVWTTTLTRRDLSNWDVAAQDWVITSYPKKVHVGSSSRQLPLHAALPKV

SEQ ID NO: 45532 - protein, 859 aa, Aspergillus aculeatus
MKLSWLEAAALTAASVVSADELAFSPPFYPSPWANGQGEWAEAYQRAVAIVSQMTLDEKVNLTTGTGWELEKCVGQTGGVPRLNIGGMCLQDSPLGIRDSDYNSAFPAGVNVAATWDKNLAYLRGQAMGQEFSDKGIDVQLGPAAGPLGRSPDGGRNWEGFSPDPALTGVLFAETIKGIQDAGVVATAKHYILNEQEHFRQVAEAAGYGFNISDTISSNVDDKTIHEMYLWPFADAVRAGVGAIMCSYNQINNSYGCQNSYTLNKLLKAELGFQGFVMSDWGAHHSGVGSALAGLDMSMPGDITFDSATSFWGTNLTIAVLNGTVPQWRVDDMAVRIMAAYYKVGRDRLYQPPNFSSWTRDEYGFKYFYPQEGPYEKVNHFVNVQRNHSEVIRKLGADSTVLLKNNNALPLTGKERKVAILGEDAGSNSYGANGCVDRGCDNGTLAMAWGSGTAEFPYLVTPEQAIQAEVLKHKGSVYAITDNWALSQVETLAKQASVSLVFVNSDAGEGYISVDGNEGDRNNLTLWKNGDNLIKAAANNCNNTIVVIHSVGPVLVDEWYDHPNVTAILWAGLPGQESGNSLADVLYGRVNPGAKSPFTWGKTREAYGDYLVRELNNGNGAPQDDFSEGVFIDYRGFDKRNETPIYEFGHGLSYTTFNYSGLHIQVLNASSNAQVATETGAAPTFGQVGNASDYVYPEGLTRISKFIYPWLNSTDLKASSGDPYYGVDTAEHVPEGATDGSPQPVLPAGGGSGGNPRLYDELIRVSVTVKNTGRVAGDAVPQLYVSLGGPNEPKVVLRKFDRLTLKPSEETVWTTTLTRRDLSNWDVAAQDWVITSYPKKVHVGSSSRQLPLHAALPKV

SEQ ID NO: 45533 - protein, 859 aa, Aspergillus aculeatus
MKLSWLEAAALTAASVVSADELAFSPPFYPSPWANGQGEWAEAYQRAVAIVSQMTLDEKVNLTTGTGWELEKCVGQTGGVPRLNIGGMCLQDSPLGIRDSDYNSAFPAGVNVAATWDKNLAYLRGQAMGQEFSDKGIDVQLGPAAGPLGRSPDGGRNWEGFSPDPALTGVLFAETIKGIQDAGVVATAKHYILNEQEHFRQVAEAAGYGFNISDTISSNVDDKTIHEMYLWPFADAVRAGVGAFMCSYNQINNSYGCQNSYTLNKLLKAELGFQGFVMSDWGAHHSGVGSALAGLDMSMPGDITFDSATSFWGTNLTIAVLNGTVPQWRVDDMAVRIMAAYYKVGRDRLYQPPNFSSWTRDEYGFKYFYPQEGPYEKVNHFVNVQRNHSEVIRKLGADSTVLLKNNNALPLTGKERKVAILGEDAGSNSYGANGCSDRGCDNGTLAMAWGSGTAEFPYLVTPEQAIQAEVLKHKGSVYAITDNWALSQVETLAKQASVSLVFVNSDAGEGYISVDGNEGDRNNLTLWKNGDNLIKAAANNCNNTIVVIHSVGPVLVDEWYDHPNVTAILWAGLPGQESGNSLADVLYGRVNPGAKSPFTWGKTREAYGDYLVRELNNGNGAPQDDFSEGVFIDYRGFDKRNETPIYEFGHGLSYTTFNYSGLHIQVLNASSNAQVATETGAAPTFGQVGNASDYVYPEGLTRISKFIYPWLNSTDLKASSGDPYYGVDTAEHVPEGATDGSPQPVLPAGGGSGGNPRLYDELIRVSVTVKNTGRVAGDAVPQLYVSLGGPNEPKVVLRKFDRLTLKPSEETVWTTTLTRRDLSNWDVAAQDWVITSYPKKVHVGSSSRQLPLHAALPKV

SEQ ID NO: 45534 - protein, 859 aa, Aspergillus aculeatus
MKLSWLEAAALTAASVVSADELAFSPPFYPSPWANGQGEWAEAYQRAVAIVSQMTLDEKVNLTTGTGWELEKCVGQTGGVPRLNIGGMCLQDSPLGIRDSDYNSAFPAGVNVAATWDKNLAYLRGQAMGQEFSDKGIDVQLGPAAGPLGRSPDGGRNWEGFSPDPALTGVLFAETIKGIQDAGVVATAKHYILNEQEHFRQVAEAAGYGFNISDTISSNVDDKTIHEMYLWPFADAVRAGVGAIMCSYNQINNSYGCQNSYTLNKLLKAELGFQGFVMSDWGAHHSGVGSALAGLDMSMPGDITFDSATSFWGTNLTIAVLNGTVPQWRVDDMAVRIMAAYYKVGRDRLYQPPNFSSWTRDEYGFKYFYPQEGPYEKVNHFVNVQRNHSEVIRKLGADSTVLLKNNNALPLTGKERKVAILGEDAGSNSYGANGCSDRGCDNGTLAMAWGSGTAEFPYLVTPEQAIQAEVLKHKGSVYAITDNWALSQVETLAKQASVSLVFVNSDAGEGYISVDGNEGDRNNLTLWKNGDNLIKAAANNCNNTIVVIHSVGPVLVDEWYDHPNVTAILWAGLPGQESGNSLADVLYGRVNPGAKSPFTWGKTREAYGDYLVRELNNGNGAPQDDFSEGVFIDYRGFDKRNETPIYEFGHGLSYTTFNYSGLHIQVLNASSNAQVATETGAAPTFGQVGNASDYVYPEGLTRISKFIYPWLNSTDLKASSGDPYYGVDTAEHVPEGATDGSPQPVLPAGGGFGGNPRLYDELIRVSVTVKNTGRVAGDAVPQLYVSLGGPNEPKVVLRKFDRLTLKPSEETVWTTTLTRRDLSNWDVAAQDWVITSYPKKVHVGSSSRQLPLHAALPKV

SEQ ID NO: 45535 - protein, 859 aa, Aspergillus aculeatus
MKLSWLEAAALTAASVVSADELAFSPPFYPSPWANGQGEWAEAYQRAVAIVSQMTLDEKVNLTTGTGWELEKCVGQTGGVPRLNIGGMCLQDSPLGIRDSDYNSAFPAGVNVAATWDKNLAYLRGQAMGQEFSDKGIDVQLGPAAGPLGRSPDGGRNWEGFSPDPALTGVLFAETIKGIQDAGVVATAKHYILNEQEHFRQVAEAAGYGFNISDTISSNVDDKTIHEMYLWPFADAVRAGVGAIMCSYNQINNSYGCQNSYTLNKLLKAELGFQGFVMSDWGAHHSGVGSALAGLDMSMPGDITFDSATSFWGTNLTIAVLNGTVPQWRVDDMAVRIMAAYYKVGRDRLYQPPNFSSWTRDEYGFKYFYPQEGPYEKVNHFVNVQRNHSEVIRKLGADSTVLLKNNNALPLTGKERKVAILGEDAGSNSYGANGCRDRGCDNGTLAMAWGSGTAEFPYLVTPEQAIQAEVLKHKGSVYAITDNWALSQVETLAKQASVSLVFVNSDAGEGYISVDGNEGDRNNLTLWKNGDNLIKAAANNCNNTIVVIHSVGPVLVDEWYDHPNVTAILWAGLPGQESGNSLADVLYGRVNPGAKSPFTWGKTREAYGDYLVRELNNGNGAPQDDFSEGVFIDYRGFDKRNETPIYEFGHGLSYTTFNYSGLHIQVLNASSNAQVATETGAAPTFGQVGNASDYVYPEGLTRISKFIYPWLNSTDLKASSGDPYYGVDTAEHVPEGATDGSPQPVLPAGGGSGGNPRLYDELIRVSVTVKNTGRVAGDAVPQLYVSLGGPNEPKVVLRKFDRLTLKPSEETVWTTTLTRRDLSNWDVAAQDWVITSYPKKVHVGSSSRQLPLHAALPKV

SEQ ID NO: 45536 - protein, 859 aa, Aspergillus aculeatus
MKLSWLEAAALTAASVVSADELAFSPPFYPSPWANGQGEWAEAYQRAVAIVSQMTLDEKVNLTTGTGWELEKCVGQTGGVPRLNIGGMCLQDSPLGIRDSDYNSAFPAGVNVAATWDKNLAYLRGQAMGQEFSDKGIDVQLGPAAGPLGRSPDGGRNWEGFSPDPALTGVLFAETIKGIQDAGVVATAKHYILNEQEHFRQVAEAAGYGFNISDTISSNVDDKTIHEMYLWPFADAVRAGVGAIMCSYNQINNSYGCQNSYTLNKLLKAELGFQGFVMSDWGAHHSGVGSALAGLDMSMPGDITFDSATSFWGTNLTIAVLNGTVPQWRVDDMAVRIMAAYYKVGRDRLYQPPNFSSWTRDEYGFKYFYPQEGPYEKVNHFVNVQRNHSEVIRKLGADSTVLLKNNNALPLTGKERKVAILGEDAGSNSYGANGCSDRGCDNGTLAMAWGSGTAEFPYLVTPEQAIQAEVLKHKGSVYAITDNWALSQVETLAKQASVSLVFVNSDAGEGYISVDGNEGDRNNLTLWKNGDNLIKAAANNCNNTIVVIHSVGPVLVDEWYDHPNVTAILWAGLPGQESGNSLADVLYGRVNPGAKSPFTWGKTREAYGDYLVRELNNGNGAPQDDFSEGVFIDYRGFDKRNETPIYEFGHGLSYTTFNYSGLHIQVLNGSSNAQVATETGAAPTFGQVGNASDYVYPEGLTRISKFIYPWLNSTDLKASSGDPYYGVDTAEHVPEGATDGSPQPVLPAGGGSGGNPRLYDELIRVSVTVKNTGRVAGDAVPQLYVSLGGPNEPKVVLRKFDRLTLKPSEETVWTTTLTRRDLSNWDVAAQDWVITSYPKKVHVGSSSRQLPLHAALPKV

SEQ ID NO: 45537 - protein, 859 aa, Aspergillus aculeatus
MKLSWLEAAALTAASVVSADELAFSPPFYPSPWANGQGEWAEAYQRAVAIVSQMTLDEKVNLTTGTGWELEKCVGQTGGVPRLNIGGMCLQDSPLGIRDSDYNSAFPAGVNVAATWDKNLAYLRGQAMGQEFSDKGIDVQLGPAAGPLGRSPDGGRNWEGFSPDPALTGVLFAETIKGIQDAGVVATAKHYILNEQEHFRQVAEAAGYGFNISDTISSNVDDKTIHEMYLWPFADAVRAGVGAIMCSYNQINNSYGCQNSYTLNKLLKAELGFQGFVMSDWGAHHSGVGSALAGLDMSMPGDITFDSATSFWGTNLTIAVLNGTVPQWRVDDMAVRIMAAYYKVGRDRLYQPPNFSSWTRDEYGFKYFYPQEGPYEKVNHFVNVQRNHSEVIRKLGADSTVLLKNNNALPLTGKERKVAILGEDAGSNSYGANGCSDRGCDNGTLAMAWGSGTAEFPYLVTPEQAIQAEVLKHKGSVYAITDNWALSQVETLAKQASVSLVFVNSDAGEGYISVDGNEGDRNNLTLWKNGDNLIKAAANNCNNTIVVIHSVGPVLVDEWYDHPNVTAILWAGLPGQESGNSLADVLYGRVNPGAKSPFTWGKTREAYGDYLVRELNNGNGAPQDDFSEGVFIDYRGFDKRNETPIYEFGHGLSYTTFNYSGLHIQVLNASSNAQVATETGAAPTFGQVGNASDYVYPEGLTRISKFIYPWLNSTDLKASSGDPYYGVDTAEHVPEGATDGSPQPVLPAGGGSGGNPRLYDELIRVSVTVKNTGRVAGDAVPQLYVSLGGPNEPKVVLRKFDRLTLKPSEETVWTTTLTRRDLSNWDVAAQDWVITSYPKKVHVGSSSRQLPLHAALPKV

SEQ ID NO: 45538 - protein, 844 aa, Unidentified
LVSADELAFSPPFYPSPWANGQGEWAEAYQRAVAIVSQMTLDEKVNLTTGTGWELEKCVGQTGGVPRLNIGGMCLQDSPLGIRDSDYNSAFPAGVNVAATWDKNLAYLRGQAMGQEFSDKGIDVQLGPAAGPLGRSPDGGRNWEGFSPDPALTGVLFAETIKGIQDAGVVATAKHYILNEQEHFRQVAEAAGYGFNISDTISSNVDDKTIHEMYLWPFADAVRAGVGAIMCSYNQINNSYGCQNSYTLNKLLKAELGFQGFVMSDWGAHHSGVGSALAGLDMSMPGDITFDSATSFWGTNLTIAVLNGTVPQWRVDDMAVRIMAAYYKVGRDRLYQPPNFSSWTRDEYGFKYFYPQEGPYEKVNHFVNVQRNHSEVIRKLGADSTVLLKNNNALPLTGKERKVAILGEDAGSNSYGANGCSDRGCDNGTLAMAWGSGTAEFPYLVTPEQAIQAEVLKHKGSVYAITDNWALSQVETLAKQASVSLVFVNSDAGEGYISVDGNEGDRNNLTLWKNGDNLIKAAANNCNNTIVVIHSVGPVLVDEWYDHPNVTAILWAGLPGQESGNSLADVLYGRVNPGAKSPFTWGKTREAYGDYLVRELNNGNGAPQDDFSEGVFIDYRGFDKRNETPIYEFGHGLSYTTFNYSGLHIQVLNASSNAQVATETGAAPTFGQVGNASDYVYPEGLTRISKFIYPWLNSTDLKASSGDPYYGVDTAEHVPEGATDGSPQPVLPAGGGSGGNPRLYDELIRVSVTVKNTGRVAGDAVPQLYVSLGGPNEPKVVLRKFDRLTLKPSEETVWTTTLTRRDLSNWDVAAQDWVITSYPKKVHVGSSSRQLPLHAALPKV

SEQ ID NO: 45539 - protein, 548 aa, Aspergillus niger
SPWANGQGDGWAEAYQRAVDIVSQMTLAEKVNLTTGTGWELELCVGQTGGVPRLGIPGMCAQDSPLGVRDSDYNSAFPAGVNVAATWDKNLAYLRGQAMGQEFSDKGADIQLGPAAGPLGRSPDGGRNWEGFSPDPALSGVLFAETIKGIQDAGVVATAKHYIAYEQEHFRQAPEAQGYGFNITESGSANLDDKTMHELYLWPFADAIRAGAGAVMCSYNQINNSYGGQNSYTLNKLLKAELGFQGFVMSDWAAHHAGVSGALAGLDMSMPGDVDYDSGTSYWGTNLTISVLNGTVPQWRVDDMAVRIMAAYYKVGRDRELWTPPNFSSWTRDEYGFKYYYVSEGPYEKVNQFVNVQRNHSELIRRIGADSTVLLKNDGALPLTGKERLVALIGEDAGSNPYGANGCSDRGCDNGTLAMGWGSGTANFPYLVTPEQAISNEVLKNKNGVFTATDNWAIDQIEALAKTQASVSLVFVNADSGEGYINVDGNLGDRRNLTLWRNGDNVIKAAASNCNNTIVIIHSVGPVLVNEWYDNPNVTAILWGGLPG

SEQ ID NO: 45540 - protein, 841 aa, Aspergillus aculeatus
ADELAFSPPFYPSPWANGQGEWAEAYQRAVAIVSQMTLDEKVNLTTGTGWELEKCVGQTGGVPRLNIGGMCLQDSPLGIRDSDYNSAFPAGVNVAATWDKNLAYLRGQAMGQEFSDKGIDVLLGPAAGPLGRSPDGGRNWEGFSPDPALTGVLFAETIKGIQDAGVVATAKHYILNEQEHFRQVAEAAGYGFNISDTISSNVDDKTIHEMYLWPFADAVRAGVGAFMCSYNQINNSYGCQNSYTLNKLLKAELGFQGFVMSDWFAHHSGVGSALAGLDMSMPGDITFDSATSFWGTNLTIAVLNGTVPQWRVDDMAVRIMAAYYKVGRDRLYQPPNFSSWTRDEYGFKYFYPQEGPYEKVNHFVNVQRNHSEVIRKLGADSTVLLKNNNALPLTGKERKVAILGEDAGSNSYGANGCSDRGCDSGTLAMAWGSGTAEFPYLVTPEQAIQAEVLKHKGSVYAITDNWALSQVETLAKQASVSLVFANSDAGEGYISVDGNEGDRNNLTLWKNGDNLIKAAANNCNNTIVVIHSVGPVLVDEWYDHPNVTAILWAGLPGQESGNSLADVLYGRVNPGAKSPFTWGKTREAYGDYLVLELNNGNGAPQDDFSEGVFIDYRGFDKRNETPIYEFGHGLSYTTFNYSGLHIQVLNASSNAQVAAETGAAPTFGQVGNASDYVYPEGLTRISKFIYPWLNSTDLKASSGDPYYGVDTAEHVPEGATDGSPQPVLPAGGGSGGNPRLYDELIRVSVTVKNTGRVAGDAVPQLYVSLGGPNEPKVVLRKFDRLTLKPSEETVWTTTLTRRDLSNWDVAAQDWVITSYPKKVHVGSSSRQLPLHAALPKV

SEQ ID NO: 45541 - protein, 841 aa, Schizosaccharomyces
ADELAFSPPFYPSPWANGQGEWAEAYQRAVAIVSQMTLDEKVNLTTGTGWELEKCVGQTGGVPRLNIGGMCLQDSPLGIRDSDYNSAFPAGVNVAATWDKNLAYLRGLAMGQEFSDKGIDVQLGPAAGPLGRSPDGGRNWEGFSPDPALTGVLFAETIKGIQDAGVVATAKHYILNEQEHFRQVAEAAGYGFNISDTISSNVDDKTIHEMYLWPFADAVRAGVGAIMCSYNQINNSYGCQNSYTLNKLLKAELGFQGFVMSDWGAHHSGVGSALAGLDMSMPGDITFDSATSFWGTNLTIAVLNGTVPQWRVDDMAVRIMAAYYKVGRDRLYQPPNFSSWTRDEYGFKYFYPQEGPYEKVNHFVNVQRNHSEVIRKLGADSTVLLKNNNALPLTGKERKVAILGEDAGSNSYGANGCSDRGCDSGTLAMAWGSGTAEFPYLVTPEQAIQAEVLKHKGSVYAITDNWALSQVETLAKQASVSLVFANSDAGEGYISVDGNEGDRNNLTLWKNGDNLIKAAANNCNNTIVVIHSVGPVLVDEWYDHPNVTAILWAGLPGQESGNSLADVLYGRVNPGAKSPFTWGKTREAYGDYLVLELNNGNGAPQDDFSEGVFIDYRGFDKRNETPIYEFGHGLSYTTFNYSGLHIQVLNASSNAQVAAETGAAPTFGQVGNASDYVYPEGLTRISKFIYPWLNSTDLKASSGDPYYGVDTAEHVPEGATDGSPQPVLPAGGGSGGNPRLYDELIRVSVTVKNTGRVAGDAVPQLYVSLGGPNEPKVVLRKFDRLTLKPSEETVWTTTLTRRDLSNWDVAAQDWVITSYPKKVHVGSSSRQLPLHAALPKV

SEQ ID NO: 45542 - protein, 841 aa, Schizosaccharomyces
ADELAFSPPFYPSPWANGQGEWAEAYQRAVAIVSQMTLDEKVNLTTGTGWELEKCVGQTGGVPRLNIGGMCLQDSPLGIRDSDYNSAFPAGVNVAATWDKNLAYLRGNAMGQEFSDKGIDVLLGPAAGPLGRSPDGGRNWEGFSPDPALTGVLFAETIKGIQDAGVVATAKHYILNEQEHFRQVAEAAGYGFNISDTISSNVDDKTIHEMYLWPFADAVRAGVGAFMCSYNQINNSYGCQNSYTLNKLLKAELGFQGFVMSDWFAHHSGVGSALAGLDMSMPGDITFDSATSFWGTNLTIAVLNGTVPQWRVDDMAVRIMAAYYKVGRDRLYQPPNFSSWTRDEYGFKYFYPQEGPYEKVNHFVNVQRNHSEVIRKLGADSTVLLKNNNALPLTGKERKVAILGEDAGSNSYGANGCSDRGCDSGTLAMAWGSSTAEFPYLVTPEQAIQAEVLKHKGSVYAITDNWALSQVETLAKQASVSLVFANSDAGEGYISVDGNEGDRNNLTLWKNGDNLIKAAANNCNNTIVVIHSVGPVLVDEWYDHPNVTAILWAGLPGQESGNSLADVLYGRVNPGAKSPFTWGKTREAYGDYLVLELNNGNGAPQDDFSEGVFIDYRGFDKRNETPIYEFGHGLSYTTFNYSGLHIQVLNASSNAQVATETGAAPTFGQVGNASDYVYPEGLTRISKFIYPWLNSTDLKASSGDPYYGVDTAEHVPEGATDGSPQPVLPAGGGSGGNPRLYDELIRVSVTVKNTGRVAGDAVPQLYVSLGGPNEPKVVLRKFDRLTLKPSEETVWTTTLTRRDLSNWDVAAQDWVITSYPKKVHVGSSSRQLPLHAALPKV

SEQ ID NO: 45543 - protein, 841 aa, Schizosaccharomyces
ADELAFSPPFYPSPWANGQGEWAEAYQRAVAIVSQMTLDEKVNLTTGTGWELEKCVGQTGGVPRLNIGGMCLQDSPLGIRDSDYNSAFPAGVNVAATWDKNLAYLRGQAMGQEFSDKGIDVQLGPAAGPLGRSPDGGRNWEGFSPDPALTGVLFAETIKGIQDAGVVATAKHYILNEQEHFRQVAEAAGYGFNISDTISSNVDDKTIHEMYLWPFADAVRAGVGAIMCSYNQINNSYGCQNSYTLNKLLKAELGFQGFVMSDWGAHHSGVGSALAGLDMSMPGDITFDSATSFWGTNLTIAVLNGTVPQWRVDDMAVRIMAAYYKVGRDRLYQPPNFSSWTRDEYGFKYFYPQEGPYEKVNHFVNVQRNHSEVIRKLGADSTVLLKNNNALPLTGKERKVAILGEDAGSNSYGANGCSDRGCDSGTLAMAWGSGTAEFPYLVTPEQAIQAEVLKHKGSVYAITDNWALSQVETLAKQASVSLVFANSDAGEGYISVDGNEGDRNNLTLWKNGDNLIKAAANNCNNTIVVIHSVGPVLVDEWYDHPNVTAILWAGLPGQESGNSLADVLYGRVNPGAKSPFTWGKTREAYGDYLVLELNNGNGAPQDDFSEGVFIDYRGFDKRNETPIYEFGHGLSYTTFNYSGLHIQVLNASSNAQVAAETGAAPTFGQVGNASDYVYPEGLTRISKFIYPWLNSTDLKASSGDPYYGVDTAEHVPEGATDGSPQPVLPAGGGSGGNPRLYDELIRVSVTVKNTGRVAGDAVPQLYVSLGGPNEPKVVLRKFDRLTLKPSEETVWTTTLTRRDLSNWDVAAQDWVITSYPKKVHVGSSSRQLPLHAALPKV

SEQ ID NO: 45544 - protein, 841 aa, Schizosaccharomyces
ADELAFSPPFYPSPWANGQGEWAEAYQRAVAIVSQMTLDEKVNLTTGTGWELEKCVGQTGGVPRLNIGGMCLQDSPLGIRDSDYNSAFPAGVNVAATWDKNLAYLRGQAMGQEFSDKGIDVLLGPAAGPLGRSPDGGRNWEGFSPDPALTGVLFAETIKGIQDAGVVATAKHYILNEQEHFRQVAEAAGYGFNISDTISSNVDDKTIHEMYLWPFADAVRAGVGAFMCSYNQINNSYGCQNSYTLNKLLKAELGFQGFVMSDWFAHHSGVGSALAGLDMSMPGDITFDSATSFWGTNLTIAVLNGTVPQWRVDDMAVRIMAAYYKVGRDRLYQPPNFSSWTRDEYGFKYFYPQEGPYEKVNHFVNVQRNHSEVIRKLGADSTVLLKNNNALPLTGKERKVAILGEDAGSNSYGANGCSDRGCDSGTLAMAWGSSTAEFPYLVTPEQAIQAEVLKHKGSVYAITDNWALSQVETLAKQASVSLVFANSDAGEGYISVDGNEGDRNNLTLWKNGDNLIKAAANNCNNTIVVIHSVGPVLVDEWYDHPNVTAILWAGLPGQESGNSLADVLYGRVNPGAKSPFTWGKTREAYGDYLVLELNNGNGAPQDDFSEGVFIDYRGFDKRNETPIYEFGHGLSYTTFNYSGLHIQVLNASSNAQVATETGAAPTFGQVGNASDYVYPEGLTRISKFIYPWLNSTDLKASSGDPYYGVDTAEHVPEGATDGSPQPVLPAGGGSGGNPRLYDELIRVSVTVKNTGRVAGDAVPQLYVSLGGPNEPKVVLRKFDRLTLKPSEETVWTTTLTRRDLSNWDVAAQDWVITSYPKKVHVGSSSRQLPLHAALPKV

SEQ ID NO: 45545 - protein, 859 aa, Aspergillus aculeatus
MKLSWLEAAALTAASVVSADELAFSPPFYPSPWANGQGEWAEAYQRAVAIVSQMTLDEKVNLTTGTGWMLEKCVGQTGGVPRLNIGGMCLQDSPLGIRDSDYNSAFPAGVNVAATWDKNLAYLRGQAMGQEFSDKGIDVQLGPAAGPLGRSPDGGRNWEGFSPDPALTGVLFAETIKGIQDAGVVATAKHYILNEQEHFRQVAEAAGYGFNISDTISSNVDDKTIHEMYLWPFADAVRAGVGAIMCSYNQINNSYGCQNSYTLNKLLKAELGFQGFVMSDWGAHHSGVGSALAGLDMSMPGDITFDSATSFWGTNLTIAVLNGTVPQWRVDDMAVRIMAAYYKVGRDRLYQPPNFSSWTRDEYGFKYFYPQEGPYEKVNHFVNVQRNHSEVIRKLGADSTVLLKNNNALPLTGKERKVAILGEDAGSNSYGANGCSDRGCDNGTLAMAWGSGTAEFPYLVTPEQAIQAEVLKHKGSVYAITDNWALSQVETLAKQASVSLVFVNSDAGEGYISVDGNEGDRNNLTLWKNGDNLIKAAANNCNNTIVVIHSVGPVLVDEWYDHPNVTAILWAGLPGQESGNSLADVLYGRVNPGAKSPFTWGKTREAYGDYLVRELNNGNGAPQDDFSEGVFIDYRGFDKRNETPIYEFGHGLSYTTFNYSGLHIQVLNASSNAQVATETGAAPTFGQVGNASDYVYPEGLTRISKFIYPWLNSTDLKASSGDPYYGVDTAEHVPEGATDGSPQPVLPAGGGSGGNPRLYDELIRVSVTVKNTGRVAGDAVPQLYVSLGGPNEPKVVLRKFDRLTLKPSEETVWTTTLTRRDLSNWDVAAQDWVITSYPKKVHVGSSSRQLPLHAALPKV

SEQ ID NO: 45546 - protein, 859 aa, Aspergillus aculeatus
MKLSWLEAAALTAASVVSADELAFSPPFYPSPWANGQGEWAEAYQRAVAIVSQMTLDEKVNLTTGTGWELEKCVGQTGGVPRLNIGGMCLQDSPLGIRDSDYNSAFPAGVNVAATWDKNLAYLRGQAMGQEFSDKGIDVQLGPAAGPLGRSPDGGRNWEGFSPDPALTGVLFAETIKGIQDAGVVATAKHYILNEQEHFRQVAEAAGYGFNISDTISSNVDDKTIHEMYLWPFADAVRAGVGAIMCSYNQINNSYGCQNSYTLNKLLKAELGFQGFVMSDWGAHHSGVGSALAGLDMSMPGDITFDSATSFWGTNLTIAVLNGTVPQWRVDDMAVRIMAAYYKVGRDRLYQPPNFSSWTRDEYGFKYFYPQEGPYEKVNHFVNVQRNHSEVIRKLGADSTVLLKNNNALPLTGKERKVAILGEDAGSNSYGANGCSDRGCDNGTLAMAWGSSTAEFPYLVTPEQAIQAEVLKHKGSVYAITDNWALSQVETLAKQASVSLVFVNSDAGEGYISVDGNEGDRNNLTLWKNGDNLIKAAANNCNNTIVVIHSVGPVLVDEWYDHPNVTAILWAGLPGQESGNSLADVLYGRVNPGAKSPFTWGKTREAYGDYLVRELNNGNGAPQDDFSEGVFIDYRGFDKRNETPIYEFGHGLSYTTFNYSGLHIQVLNASSNAQVATETGAAPTFGQVGNASDYVYPEGLTRISKFIYPWLNSTDLKASSGDPYYGVDTAEHVPEGATDGSPQPVLPAGGGSGGNPRLYDELIRVSVTVKNTGRVAGDAVPQLYVSLGGPNEPKVVLRKFDRLTLKPSEETVWTTTLTRRDLSNWDVAAQDWVITSYPKKVHVGSSSRQLPLHAALPKV

SEQ ID NO: 45547 - protein, 859 aa, Aspergillus aculeatus
MKLSWLEAAALTAASVVSADELAFSPPFYPSPWANGQGEWAEAYQRAVAIVSQMTLDEKVNLTTGTGWELEKCVGQTGGVPRLNIGGMCLQDSPLGIRDSDYNSAFPAGVNVAATWDKNLAYLRGQAMGQEFSDKGIDVQLGPAAGPLGRSPDGGRNWEGFSPDPALTGVLFAETIKGIQDAGVVATAKHYILNEQEHFREVAEAAGYGFNISDTISSNVDDKTIHEMYLWPFADAVRAGVGAIMCSYNQINNSYGCQNSYTLNKLLKAELGFQGFVMSDWGAHHSGVGSALAGLDMSMPGDITFDSATSFWGTNLTIAVLNGTVPQWRVDDMAVRIMAAYYKVGRDRLYQPPNFSSWTRDEYGFKYFYPQEGPYEKVNHFVNVQRNHSEVIRKLGADSTVLLKNNNALPLTGKERKVAILGEDAGSNSYGANGCVDRGCDNGTLAMAWGSGTAEFPYLVTPEQAIQAEVLKHKGSVYAITDNWALSQVETLAKQASVSLVFVNSDAGEGYISVDGNEGDRNNLTLWKNGDNLIKAAANNCNNTIVVIHSVGPVLVDEWYDHPNVTAILWAGLPGQESGNSLADVLYGRVNPGAKSPFTWGKTREAYGDYLVRELNNGNGAPQDDFSEGVFIDYRGFDKRNETPIYEFGHGLSYTTFNYSGLHIQVLNASSNAQVATETGAAPTFGQVGNASDYVYPEGLTRISKFIYPWLNSTDLKASSGDPYYGVDTAEHVPEGATDGSPQPVLPAGGGSGGNPRLYDELIRVSVTVKNTGRVAGDAVPQLYVSLGGPNEPKVVLRKFDRLTLKPSEETVWTTTLTRRDLSNWDVAAQDWVITSYPKKVHVGSSSRQLPLHAALPKV

SEQ ID NO: 45548 - protein, 859 aa, Aspergillus aculeatus
MKLSWLEAAALTAASVVSADELAFSPPFYPSPWANGQGEWAEAYQRAVAIVSQMTLDEKVNLTTGTGWELEKCVGQTGGVPRLNIGGMCLQDSPLGIRDSDYNSAFPAGVNVAATWDKNLAYLRGQAMGQEFSDKGIDVQLGPAAGPLGRSPDGGRNWEGFSPDPALTGVLFAETIKGIQDAGVVATAKHYILNEQEHFRQVAEAAGYGFNISDTISSNVDDKTIHEMYLWPFADAVRAGVGAIMCSFNQINNSYGCQNSYTLNKLLKAELGFQGFVMSDWGAHHSGVGSALAGLDMSMPGDITFDSATSFWGTNLTIAVLNGTVPQWRVDDMAVRIMAAYYKVGRDRLYQPPNFSSWTRDEYGFKYFYPQEGPYEKVNHFVNVQRNHSEVIRKLGADSTVLLKNNNALPLTGKERKVAILGEDAGSNSYGANGCSDRGCDNGTLAMAWGSGTAEFPYLVTPEQAIQAEVLKHKGSVYAITDNWALSQVETLAKQASVSLVFVNSDAGEGYISVDGNEGDRNNLTLWKNGDNLIKAAANNCNNTIVVIHSVGPVLVDEWYDHPNVTAILWAGLPGQESGNSLADVLYGRVNPGAKSPFTWGKTREAYGDYLVRELNNGNGAPQDDFSEGVFIDYRGFDKRNETPIYEFGHGLSYTTFNYSGLHIQVLNASSNAQVATETGAAPTFGQVGNASDYVYPEGLTRISKFIYPWLNSTDLKASSGDPYYGVDTAEHVPEGATDGSPQPVLPAGGGSGGNPRLYDELIRVSVTVKNTGRVAGDAVPQLYVSLGGPNEPKVVLRKFDRLTLKPSEETVWTTTLTRRDLSNWDVAAQDWVITSYPKKVHVGSSSRQLPLHAALPKV

SEQ ID NO: 45549 - protein, 859 aa, Aspergillus aculeatus
MKLSWLEAAALTAASVVSADELAFSPPFYPSPWANGQGEWAEAYQRAVAIVSQMTLDEKVNLTTGTGWMLEKCVGQTGGVPRLNIGGMCLQDSPLGIRDSDYNSAFPAGVNVAATWDKNLAYLRGQAMGQEFSDKGIDVQLGPAAGPLGRSPDGGRNWEGFSPDPALTGVLFAETIKGIQDAGVVATAKHYILNEQEHFRQVAEAAGYGFNISDTISSNVDDKTIHEMYLWPFADAVRAGVGAIMCSYNQINNSYGCQNSYTLNKLLKAELGFQGFVMSDWGAHHSGVGSALAGLDMSMPGDITFDSATSFWGTNLTIAVLNGTVPQWRVDDMAVRIMAAYYKVGRDRLYQPPNFSSWTRDEYGFKYFYPQEGPYEKVNHFVNVQRNHSEVIRKLGADSTVLLKNNNALPLTGKERKVAILGEDAGSNSYGANGCVDRGCDNGTLAMAWGSGTAEFPYLVTPEQAIQAEVLKHKGSVYAITDNWALSQVETLAKQASVSLVFVNSDAGEGYISVDGNEGDRNNLTLWKNGDNLIKAAANNCNNTIVVIHSVGPVLVDEWYDHPNVTAILWAGLPGQESGNSLADVLYGRVNPGAKSPFTWGKTREAYGDYLVRELNNGNGAPQDDFSEGVFIDYRGFDKRNETPIYEFGHGLSYTTFNYSGLHIQVLNASSNAQVATETGAAPTFGQVGNASDYVYPEGLTRISKFIYPWLNSTDLKASSGDPYYGVDTAEHVPEGATDGSPQPVLPAGGGSGGNPRLYDELIRVSVTVKNTGRVAGDAVPQLYVSLGGPNEPKVVLRKFDRLTLKPSEETVWTTTLTRRDLSNWDVAAQDWVITSYPKKVHVGSSSRQLPLHAALPKV

SEQ ID NO: 45550 - protein, 859 aa, Aspergillus aculeatus
MKLSWLEAAALTAASVVSADELAFSPPFYPSPWANGQGEWAEAYQRAVAIVSQMTLDEKVNLTTGTGWSLEKCVGQTGGVPRLNIGGMCLQDSPLGIRDSDYNSAFPAGVNVAATWDKNLAYLRGQAMGQEFSDKGIDVQLGPAAGPLGRSPDGGRNWEGFSPDPALTGVLFAETIKGIQDAGVVATAKHYILNEQEHFRQVAEAAGYGFNISDTISSNVDDKTIHEMYLWPFADAVRAGVGAIMCSYNQINNSYGCQNSYTLNKLLKAELGFQGFVMSDWGAHHSGVGSALAGLDMSMPGDITFDSATSFWGTNLTIAVLNGTVPQWRVDDMAVRIMAAYYKVGRDRLYQPPNFSSWTRDEYGFKYFYPQEGPYEKVNHFVNVQRNHSEVIRKLGADSTVLLKNNNALPLTGKERKVAILGEDAGSNSYGANGCSDRGCDNGTLAMAWGSGTAEFPYLVTPEQAIQAEVLKHKGSVYAITDNWALSQVETLAKQASVSLVFVNSDAGEGYISVDGNEGDRNNLTLWKNGDNLIKAAANNCNNTIVVIHSVGPVLVDEWYDHPNVTAILWAGLPGQESGNSLADVLYGRVNPGAKSPFTWGKTREAYGDYLVRELNNGNGAPQDDFSEGVFIDYRGFDKRNETPIYEFGHGLSYTTFNYSGLHIQVLNASSNAQVATETGAAPTFGQVGNASDYVYPEGLTRISKFIYPWLNSTDLKASSGDPYYGVDTAEHVPEGATDGSPQPVLPAGGGSGGNPRLYDELIRVSVTVKNTGRVAGDAVPQLYVSLGGPNEPKVVLRKFDRLTLKPSEETVWTTTLTRRDLSNWDVAAQDWVITSYPKKVHVGSSSRQLPLHAALPKV

SEQ ID NO: 45551 - protein, 859 aa, Aspergillus aculeatus
MKLSWLEAAALTAASVVSADELAFSPPFYPSPWANGQGEWAEAYQRAVAIVSQMTLDEKVNLTTGTGWELEKCVGQTGGVPRLNIGGMCLQDSPLGIRDSDYNSAFPAGVNVAATWDKNLAYLRGQAMGQEFSDKGIDVQLGPAAGPLGRSPDGGRNWEGFSPDPALTGVLFAETIKGIQDAGVVATAKHYILNEQEHFRQVAEAAGYGFNISDTISSNVDDKTIHEMYLWPFADAVRAGVGAIMCSSNQINNSYGCQNSYTLNKLLKAELGFQGFVMSDWGAHHSGVGSALAGLDMSMPGDITFDSATSFWGTNLTIAVLNGTVPQWRVDDMAVRIMAAYYKVGRDRLYQPPNFSSWTRDEYGFKYFYPQEGPYEKVNHFVNVQRNHSEVIRKLGADSTVLLKNNNALPLTGKERKVAILGEDAGSNSYGANGCSDRGCDNGTLAMAWGSGTAEFPYLVTPEQAIQAEVLKHKGSVYAITDNWALSQVETLAKQASVSLVFVNSDAGEGYISVDGNEGDRNNLTLWKNGDNLIKAAANNCNNTIVVIHSVGPVLVDEWYDHPNVTAILWAGLPGQESGNSLADVLYGRVNPGAKSPFTWGKTREAYGDYLVRELNNGNGAPQDDFSEGVFIDYRGFDKRNETPIYEFGHGLSYTTFNYSGLHIQVLNASSNAQVATETGAAPTFGQVGNASDYVYPEGLTRISKFIYPWLNSTDLKASSGDPYYGVDTAEHVPEGATDGSPQPVLPAGGGSGGNPRLYDELIRVSVTVKNTGRVAGDAVPQLYVSLGGPNEPKVVLRKFDRLTLKPSEETVWTTTLTRRDLSNWDVAAQDWVITSYPKKVHVGSSSRQLPLHAALPKV

SEQ ID NO: 45552 - protein, 859 aa, Aspergillus aculeatus
MKLSWLEAAALTAASVVSADELAFSPPFYPSPWANGQGEWAEAYQRAVAIVSQMTLDEKVNLTTGTGWELEKCVGQTGGVPRLNIGGMCLQDSPLGIRDSDYNSAFPAGVNVAATWDKNLAYLRGQAMGQEFSDKGIDVQLGPAAGPLGRSPDGGRNWEGFSPDPALTGVLFAETIKGIQDAGVVATAKHYILNEQEHFRQVAEAAGYGFNISDTISSNVDDKTIHEMYLWPFADAVRAGVGAIMCSLNQINNSYGCQNSYTLNKLLKAELGFQGFVMSDWGAHHSGVGSALAGLDMSMPGDITFDSATSFWGTNLTIAVLNGTVPQWRVDDMAVRIMAAYYKVGRDRLYQPPNFSSWTRDEYGFKYFYPQEGPYEKVNHFVNVQRNHSEVIRKLGADSTVLLKNNNALPLTGKERKVAILGEDAGSNSYGANGCSDRGCDNGTLAMAWGSGTAEFPYLVTPEQAIQAEVLKHKGSVYAITDNWALSQVETLAKQASVSLVFVNSDAGEGYISVDGNEGDRNNLTLWKNGDNLIKAAANNCNNTIVVIHSVGPVLVDEWYDHPNVTAILWAGLPGQESGNSLADVLYGRVNPGAKSPFTWGKTREAYGDYLVRELNNGNGAPQDDFSEGVFIDYRGFDKRNETPIYEFGHGLSYTTFNYSGLHIQVLNASSNAQVATETGAAPTFGQVGNASDYVYPEGLTRISKFIYPWLNSTDLKASSGDPYYGVDTAEHVPEGATDGSPQPVLPAGGGSGGNPRLYDELIRVSVTVKNTGRVAGDAVPQLYVSLGGPNEPKVVLRKFDRLTLKPSEETVWTTTLTRRDLSNWDVAAQDWVITSYPKKVHVGSSSRQLPLHAALPKV

SEQ ID NO: 45553 - protein, 859 aa, Aspergillus aculeatus
MKLSWLEAAALTAASVVSADELAFSPPFYPSPWANGQGEWAEAYQRAVAIVSQMTLDEKVNLTTGTGWGLEKCVGQTGGVPRLNIGGMCLQDSPLGIRDSDYNSAFPAGVNVAATWDKNLAYLRGQAMGQEFSDKGIDVQLGPAAGPLGRSPDGGRNWEGFSPDPALTGVLFAETIKGIQDAGVVATAKHYILNEQEHFRQVAEAAGYGFNISDTISSNVDDKTIHEMYLWPFADAVRAGVGAIMCSYNQINNSYGCQNSYTLNKLLKAELGFQGFVMSDWGAHHSGVGSALAGLDMSMPGDITFDSATSFWGTNLTIAVLNGTVPQWRVDDMAVRIMAAYYKVGRDRLYQPPNFSSWTRDEYGFKYFYPQEGPYEKVNHFVNVQRNHSEVIRKLGADSTVLLKNNNALPLTGKERKVAILGEDAGSNSYGANGCSDRGCDNGTLAMAWGSGTAEFPYLVTPEQAIQAEVLKHKGSVYAITDNWALSQVETLAKQASVSLVFVNSDAGEGYISVDGNEGDRNNLTLWKNGDNLIKAAANNCNNTIVVIHSVGPVLVDEWYDHPNVTAILWAGLPGQESGNSLADVLYGRVNPGAKSPFTWGKTREAYGDYLVRELNNGNGAPQDDFSEGVFIDYRGFDKRNETPIYEFGHGLSYTTFNYSGLHIQVLNASSNAQVATETGAAPTFGQVGNASDYVYPEGLTRISKFIYPWLNSTDLKASSGDPYYGVDTAEHVPEGATDGSPQPVLPAGGGSGGNPRLYDELIRVSVTVKNTGRVAGDAVPQLYVSLGGPNEPKVVLRKFDRLTLKPSEETVWTTTLTRRDLSNWDVAAQDWVITSYPKKVHVGSSSRQLPLHAALPKV

SEQ ID NO: 45554 - protein, 859 aa, Aspergillus aculeatus
MKLSWLEAAALTAASVVSADELAFSPPFYPSPWANGQGEWAEAYQRAVAIVSQMTLDEKVNLTTGTGWELEKCVGQTGGVPRLNIGGMCLQDSPLGIRDSDYNSAFPAGVNVAATWDKNLAYLRGQAMGQEFSDKGIDVQLGPAAGPLGRSPDGGRNWEGFSPDPALTGVLFAETIKGIQDAGVVATAKHYILNEQEHFRQVAEAAGYGFNISDTISSNVDDKTIHEMYLWPFADAVRAGVGAIMCSYNQINNSYGCQNSYTLNKLLKAELGFQGFVMSDWGAHHSGVGSALAGLDMSMPGDITFDSATSFWGTNLTIAVLNGTVPQWRVDDMAVRIMAAYYKVGRDRLYQPPNFSSWTRDEYGFKYFYPQEGPYEKVNHFVNVQRNHSEVIRKLGADSTVLLKNNNALPLTGKERKVAILGEDAGSNSYGANGCSDRGCDSGTLAMAWGSGTAEFPYLVTPEQAIQAEVLKHKGSVYAITDNWALSQVETLAKQASVSLVFVNSDAGEGYISVDGNEGDRNNLTLWKNGDNLIKAAANNCNNTIVVIHSVGPVLVDEWYDHPNVTAILWAGLPGQESGNSLADVLYGRVNPGAKSPFTWGKTREAYGDYLVRELNNGNGAPQDDFSEGVFIDYRGFDKRNETPIYEFGHGLSYTTFNYSGLHIQVLNASSNAQVATETGAAPTFGQVGNASDYVYPEGLTRISKFIYPWLNSTDLKASSGDPYYGVDTAEHVPEGATDGSPQPVLPAGGGSGGNPRLYDELIRVSVTVKNTGRVAGDAVPQLYVSLGGPNEPKVVLRKFDRLTLKPSEETVWTTTLTRRDLSNWDVAAQDWVITSYPKKVHVGSSSRQLPLHAALPKV

SEQ ID NO: 45555 - protein, 859 aa, Aspergillus aculeatus
MKLSWLEAAALTAASVVSADELAFSPPFYPSPWANGQGEWAEAYQRAVAIVSQMTLDEKVNLTTGTGWELEKCVGQTGGVPRLNIGGMCLQDSPLGIRDSDYNSAFPAGVNVAATWDKNLAYLRGQAMGQEFSDKGIDVQLGPAAGPLGRSPDGGRNWEGFSPDPALTGVLFAETIKGIQDAGVVATAKHYILNEQEHFRQVAEAAGYGFNISDTISSNVDDKTIHEMYLWPFADAVRAGVGAIMCSYNQINNSYGCQNSYTLNKLLKAELGFQGFVMSDWFAHHSGVGSALAGLDMSMPGDITFDSATSFWGTNLTIAVLNGTVPQWRVDDMAVRIMAAYYKVGRDRLYQPPNFSSWTRDEYGFKYFYPQEGPYEKVNHFVNVQRNHSEVIRKLGADSTVLLKNNNALPLTGKERKVAILGEDAGSNSYGANGCSDRGCDNGTLAMAWGSGTAEFPYLVTPEQAIQAEVLKHKGSVYAITDNWALSQVETLAKQASVSLVFVNSDAGEGYISVDGNEGDRNNLTLWKNGDNLIKAAANNCNNTIVVIHSVGPVLVDEWYDHPNVTAILWAGLPGQESGNSLADVLYGRVNPGAKSPFTWGKTREAYGDYLVRELNNGNGAPQDDFSEGVFIDYRGFDKRNETPIYEFGHGLSYTTFNYSGLHIQVLNASSNAQVATETGAAPTFGQVGNASDYVYPEGLTRISKFIYPWLNSTDLKASSGDPYYGVDTAEHVPEGATDGSPQPVLPAGGGSGGNPRLYDELIRVSVTVKNTGRVAGDAVPQLYVSLGGPNEPKVVLRKFDRLTLKPSEETVWTTTLTRRDLSNWDVAAQDWVITSYPKKVHVGSSSRQLPLHAALPKV

SEQ ID NO: 45556 - protein, 859 aa, Aspergillus aculeatus
MKLSWLEAAALTAASVVSADELAFSPPFYPSPWANGQGEWAEAYQRAVAIVSQMTLDEKVNLTTGTGWVLEKCVGQTGGVPRLNIGGMCLQDSPLGIRDSDYNSAFPAGVNVAATWDKNLAYLRGQAMGQEFSDKGIDVQLGPAAGPLGRSPDGGRNWEGFSPDPALTGVLFAETIKGIQDAGVVATAKHYILNEQEHFRQVAEAAGYGFNISDTISSNVDDKTIHEMYLWPFADAVRAGVGAIMCSYNQINNSYGCQNSYTLNKLLKAELGFQGFVMSDWGAHHSGVGSALAGLDMSMPGDITFDSATSFWGTNLTIAVLNGTVPQWRVDDMAVRIMAAYYKVGRDRLYQPPNFSSWTRDEYGFKYFYPQEGPYEKVNHFVNVQRNHSEVIRKLGADSTVLLKNNNALPLTGKERKVAILGEDAGSNSYGANGCSDRGCDNGTLAMAWGSGTAEFPYLVTPEQAIQAEVLKHKGSVYAITDNWALSQVETLAKQASVSLVFVNSDAGEGYISVDGNEGDRNNLTLWKNGDNLIKAAANNCNNTIVVIHSVGPVLVDEWYDHPNVTAILWAGLPGQESGNSLADVLYGRVNPGAKSPFTWGKTREAYGDYLVRELNNGNGAPQDDFSEGVFIDYRGFDKRNETPIYEFGHGLSYTTFNYSGLHIQVLNASSNAQVATETGAAPTFGQVGNASDYVYPEGLTRISKFIYPWLNSTDLKASSGDPYYGVDTAEHVPEGATDGSPQPVLPAGGGSGGNPRLYDELIRVSVTVKNTGRVAGDAVPQLYVSLGGPNEPKVVLRKFDRLTLKPSEETVWTTTLTRRDLSNWDVAAQDWVITSYPKKVHVGSSSRQLPLHAALPKV

SEQ ID NO: 45557 - protein, 859 aa, Aspergillus aculeatus
MKLSWLEAAALTAASVVSADELAFSPPFYPSPWANGQGEWAEAYQRAVAIVSQMTLDEKVNLTTGTGWELEKCVGQTGGVPRLNIGGMCLQDSPLGIRDSDYNSAFPAGVNVAATWDKNLAYLRGQAMGQEFSDKGIDVQLGPAAGPLGRSPDGGRNWEGFSPDPALTGVLFAETIKGIQDAGVVATAKHYILNEQEHFRQVAEAAGYGFNISDTISSNVDDKTIHEMYLWPFADAVRAGVGAIMCSYNQINNSYGCQNSYTLNKLLKAELGFQGFVMSDWGAHHSGVGSALAGLDMSMPGDITFDSATSFWGTNLTIAVLNGTVPQWRVDDMAVRIMAAYYKVGRDRLYQPPNFSSWTRDEYGFKYFYPQEGPYEKVNHFVNVQRNHSEVIRKLGADSTVLLKNNNALPLTGKERKVAILGEDAGSNSYGANGCSDRGCDNGTLAMAWGSGTAEFPYLVTPEQAIQAEVLKHKGSVYAITDNWALSQVETLAKQASVSLVFANSDAGEGYISVDGNEGDRNNLTLWKNGDNLIKAAANNCNNTIVVIHSVGPVLVDEWYDHPNVTAILWAGLPGQESGNSLADVLYGRVNPGAKSPFTWGKTREAYGDYLVRELNNGNGAPQDDFSEGVFIDYRGFDKRNETPIYEFGHGLSYTTFNYSGLHIQVLNASSNAQVATETGAAPTFGQVGNASDYVYPEGLTRISKFIYPWLNSTDLKASSGDPYYGVDTAEHVPEGATDGSPQPVLPAGGGSGGNPRLYDELIRVSVTVKNTGRVAGDAVPQLYVSLGGPNEPKVVLRKFDRLTLKPSEETVWTTTLTRRDLSNWDVAAQDWVITSYPKKVHVGSSSRQLPLHAALPKV

SEQ ID NO: 45558 - protein, 859 aa, Aspergillus aculeatus
MKLSWLEAAALTAASVVSADELAFSPPFYPSPWANGQGEWAEAYQRAVAIVSQMTLDEKVNLTTGTGWELEKCVGQTGGVPRLNIGGMCLQDSPLGIRDSDYNSAFPAGVNVAATWDKNLAYLRGQAMGQEFSDKGIDVQLGPAAGPLGRSPDGGRNWEGFSPDPALTGVLFAETIKGIQDAGVVATAKHYILNEQEHFREVAEAAGYGFNISDTISSNVDDKTIHEMYLWPFADAVRAGVGAIMCSYNQINNSYGCQNSYTLNKLLKAELGFQGFVMSDWGAHHSGVGSALAGLDMSMPGDITFDSATSFWGTNLTIAVLNGTVPQWRVDDMAVRIMAAYYKVGRDRLYQPPNFSSWTRDEYGFKYFYPQEGPYEKVNHFVNVQRNHSEVIRKLGADSTVLLKNNNALPLTGKERKVAILGEDAGSNSYGANGCSDRGCDNGTLAMAWGSGTAEFPYLVTPEQAIQAEVLKHKGSVYAITDNWALSQVETLAKQASVSLVFVNSDAGEGYISVDGNEGDRNNLTLWKNGDNLIKAAANNCNNTIVVIHSVGPVLVDEWYDHPNVTAILWAGLPGQESGNSLADVLYGRVNPGAKSPFTWGKTREAYGDYLVRELNNGNGAPQDDFSEGVFIDYRGFDKRNETPIYEFGHGLSYTTFNYSGLHIQVLNASSNAQVATETGAAPTFGQVGNASDYVYPEGLTRISKFIYPWLNSTDLKASSGDPYYGVDTAEHVPEGATDGSPQPVLPAGGGSGGNPRLYDELIRVSVTVKNTGRVAGDAVPQLYVSLGGPNEPKVVLRKFDRLTLKPSEETVWTTTLTRRDLSNWDVAAQDWVITSYPKKVHVGSSSRQLPLHAALPKV

SEQ ID NO: 45559 - protein, 859 aa, Aspergillus aculeatus
MKLSWLEAAALTAASVVSADELAFSPPFYPSPWANGQGEWAEAYQRAVAIVSQMTLDEKVNLTTGTGWRLEKCVGQTGGVPRLNIGGMCLQDSPLGIRDSDYNSAFPAGVNVAATWDKNLAYLRGQAMGQEFSDKGIDVQLGPAAGPLGRSPDGGRNWEGFSPDPALTGVLFAETIKGIQDAGVVATAKHYILNEQEHFRQVAEAAGYGFNISDTISSNVDDKTIHEMYLWPFADAVRAGVGAIMCSYNQINNSYGCQNSYTLNKLLKAELGFQGFVMSDWGAHHSGVGSALAGLDMSMPGDITFDSATSFWGTNLTIAVLNGTVPQWRVDDMAVRIMAAYYKVGRDRLYQPPNFSSWTRDEYGFKYFYPQEGPYEKVNHFVNVQRNHSEVIRKLGADSTVLLKNNNALPLTGKERKVAILGEDAGSNSYGANGCSDRGCDNGTLAMAWGSGTAEFPYLVTPEQAIQAEVLKHKGSVYAITDNWALSQVETLAKQASVSLVFVNSDAGEGYISVDGNEGDRNNLTLWKNGDNLIKAAANNCNNTIVVIHSVGPVLVDEWYDHPNVTAILWAGLPGQESGNSLADVLYGRVNPGAKSPFTWGKTREAYGDYLVRELNNGNGAPQDDFSEGVFIDYRGFDKRNETPIYEFGHGLSYTTFNYSGLHIQVLNASSNAQVATETGAAPTFGQVGNASDYVYPEGLTRISKFIYPWLNSTDLKASSGDPYYGVDTAEHVPEGATDGSPQPVLPAGGGSGGNPRLYDELIRVSVTVKNTGRVAGDAVPQLYVSLGGPNEPKVVLRKFDRLTLKPSEETVWTTTLTRRDLSNWDVAAQDWVITSYPKKVHVGSSSRQLPLHAALPKV

SEQ ID NO: 45560 - protein, 626 aa, Thermoascus aurantiacus
PWMDGNGEWAEAYRRAVDFVSQLTLAEKVNLTTGVGWMQEKCVGETGSIPRLGFRGLCLQDSPLGVRFADYVSAFPAGVNVAATWDKNLAYLRGKAMGEEHRGKGVDVQLGPVAGPLGRHPDGGRNWEGFSPDPVLTGVLMAETIKGIQDAGVIACAKHFIGNEMEHFRQASEAVGYGFDITESVSSNIDDKTLHELYLWPFADAVRAGVGSFMCSYNQVNNSYSCSNSYLLNKLLKSELDFQGFVMSDWGAHHSGVGAALAGLDMSMPGDTAFGTGKSFWGTNLTIAVLNGTVPEWRVDDMAVRIMAAFYKVGRDRYQVPVNFDSWTKDEYGYEHALVGQNYVKVNDKVDVRADHADIIRQIGSASVVLLKNDGGLPLTGYEKFTGVFGEDAGSNRWGADGCSDRGCDNGTLAMGWGSGTADFPYLVTPEQAIQNEILSKGKGLVSAVTDNGALDQMEQVASQASVSIVFVNADSGEGYINVDGNEGDRKNLTLWKGGEEVIKTVAANCNNTIVVMHTVGPVLIDEWYDNPNVTAIVWAGLPGQESGNSLVDVLYGRVSPGGKTPFTWGKTRESYGAPLLTKPNNGKGAPQDDFTEGVFIDYRRFDKYNETPIYEFGFGLSYTTF

SEQ ID NO: 45561 - protein, 859 aa, Aspergillus aculeatus
MKLSWLEAAALTAASVVSADELAFSPPFYPSPWANGQGEWAEAYQRAVAIVSQMTLDEKVNLTTGTGWMLEKCVGQTGGVPRLNIGGMCLQDSPLGIRDSDYNSAFPAGVNVAATWDKNLAYLRGQAMGQEFSDKGIDVQLGPAAGPLGRSPDGGRNWEGFSPDPALTGVLFAETIKGIQDAGVVATAKHYILNEQEHFREVAEAAGYGFNISDTISSNVDDKTIHEMYLWPFADAVRAGVGAIMCSYNQINNSYGCQNSYTLNKLLKAELGFQGFVMSDWGAHHSGVGSALAGLDMSMPGDITFDSATSFWGTNLTIAVLNGTVPQWRVDDMAVRIMAAYYKVGRDRLYQPPNFSSWTRDEYGFKYFYPQEGPYEKVNHFVNVQRNHSEVIRKLGADSTVLLKNNNALPLTGKERKVAILGEDAGSNSYGANGCVDRGCDNGTLAMAWGSGTAEFPYLVTPEQAIQAEVLKHKGSVYAITDNWALSQVETLAKQASVSLVFVNSDAGEGYISVDGNEGDRNNLTLWKNGDNLIKAAANNCNNTIVVIHSVGPVLVDEWYDHPNVTAILWAGLPGQESGNSLADVLYGRVNPGAKSPFTWGKTREAYGDYLVRELNNGNGAPQDDFSEGVFIDYRGFDKRNETPIYEFGHGLSYTTFNYSGLHIQVLNASSNAQVATETGAAPTFGQVGNASDYVYPEGLTRISKFIYPWLNSTDLKASSGDPYYGVDTAEHVPEGATDGSPQPVLPAGGGSGGNPRLYDELIRVSVTVKNTGRVAGDAVPQLYVSLGGPNEPKVVLRKFDRLTLKPSEETVWTTTLTRRDLSNWDVAAQDWVITSYPKKVHVGSSSRQLPLHAALPKV

SEQ ID NO: 45562 - protein, 859 aa, Aspergillus aculeatus
MKLSWLEAAALTAASVVSADELAFSPPFYPSPWANGQGEWAEAYQRAVAIVSQMTLDEKVNLTTGTGWMLEKCVGQTGGVPRLNIGGMCLQDSPLGIRDSDYNSAFPAGVNVAATWDKNLAYLRGQAMGQEFSDKGIDVQLGPAAGPLGRSPDGGRNWEGFSPDPALTGVLFAETIKGIQDAGVVATAKHYILNEQEHFREVAEAAGYGFNISDTISSNVDDKTIHEMYLWPFADAVRAGVGAIMCSYNQINNSYGCQNSYTLNKLLKAELGFQGFVMSDWGAHHSGVGSALAGLDMSMPGDITFDSATSFWGTNLTIAVLNGTVPQWRVDDMAVRIMAAYYKVGRDRLYQPPNFSSWTRDEYGFKYFYPQEGPYEKVNHFVNVQRNHSEVIRKLGADSTVLLKNNNALPLTGKERKVAILGEDAGSNSYGANGCSDRGCDNGTLAMAWGSGTAEFPYLVTPEQAIQAEVLKHKGSVYAITDNWALSQVETLAKQASVSLVFVNSDAGEGYISVDGNEGDRNNLTLWKNGDNLIKAAANNCNNTIVVIHSVGPVLVDEWYDHPNVTAILWAGLPGQESGNSLADVLYGRVNPGAKSPFTWGKTREAYGDYLVRELNNGNGAPQDDFSEGVFIDYRGFDKRNETPIYEFGHGLSYTTFNYSGLHIQVLNASSNAQVATETGAAPTFGQVGNASDYVYPEGLTRISKFIYPWLNSTDLKASSGDPYYGVDTAEHVPEGATDGSPQPVLPAGGGSGGNPRLYDELIRVSVTVKNTGRVAGDAVPQLYVSLGGPNEPKVVLRKFDRLTLKPSEETVWTTTLTRRDLSNWDVAAQDWVITSYPKKVHVGSSSRQLPLHAALPKV

SEQ ID NO: 45563 - protein, 839 aa, Aspergillus sp. SG-2011
ELAFASPFYPSPWANGQGEWADAYKRAVDIVSQMTLDEKVNLTTGTGWELEKCVGQTGGVPRLDIGGMCLQDSPLGVRDSDYNSGFPAGVNVAATWDRKLAYLRGQAMGQEFSDKGVDVQLGPAAGPLGRSPDGGRNWEGFSPDPALTGVLFAETIKGIQDAGVIATAKHYILNEQEHFRQVSEAAGYGFNISDTISSNIDDKTIHEMYLWPFADAVRAGVGAVMCSYNQINNSYACQNSYTLNKLLKSELGFQGFVMSDWGAHHSGVGSALAGLDMSMPGDVSFDSATSFWGTNLTVAVLNGTVPQWRVDDMAVRIMAAYYKVGRDRLYQPPNFSSWTRDEYGFKYYYSQEGPYEKVNQYVNVQRNHSEVIRKVGADSTVLLKNNNALPLTGKERKVALIGEDAGSNAYGANGCSDRGCDNGTLAMAWGSGTAEFPYLVTPEQAIQAEVLKNKGSTYTITDNWALSQVEALAKTASVSLVFVNADSGEGYISVDGNEGDRNNLTLWKNGDNLIKATASNCNNTIVVIHSVGAVLVDEWYDHPNVTAILWAGLPGQESGNSLADVLYGRVNPGGKTPFTWGKTRASYGDYLVREPNNGHGAPQDNFSEGVFIDYRGFDKRNETPIYEFGHGLSYTTFNYSGLQVEVLNTSSSTPVATQTKPAPTFGEIGNASDYLYPEGLDRITAFIYPWLNSTDLKESSGDPDYGVDTAKYIPAGATNSSAQPVLPAGGGFGGNPRLYDELIRVSVTVKNTGRVTGDAVPQLYVSLGGPNEPKVVLRQFDRITLRPSEETVWTTTLTRRDLSNWDVAAQDWVITSYPKKVHVGSSSRQLPLHAALPKV

SEQ ID NO: 45564 - protein, 626 aa, Thermoascus aurantiacus var. levisporus
PWMNGNGEWAEAYRRAVDFVSQLTLAEKVNLTTGVGWMQEKCVGETGSIPRLGFRGLCLQDSPLGVRFADYISAFPAGVNVAATWDKNLAYLRGKAMGEEHRGKGVDVQLGPVAGPLGRHPDGGRNWEGFSPDPVLTGVLMAETIKGIQDAGVIACAKHFIGNEMEHFRQASEAVGYGFDITESVSSNIDDKTLHELYLWPFADAVRAGVGSFMCSYNQVNNSYSCSNSYLLNKLLKSELDFQGFVMSDWGAHHSGVGAALAGLDMSMPGDTAFGTGKSFWGTNLTIAVLNGTVPEWRVDDMAVRIMAAFYKVGRDRYQVPVNFDSWTKDEHGYEHALVGQDYVKVNDKVDVRADHADIIRQIGSASVVLLKNDGGLPLTGYEKFTGVFGEDAGSNRWGADGCSDRGCDNGTLAMGWGSGTADFPYLVTPEQAIQNEILSKGKGLVSAVTDNGALDQMEQVASQASVSIVFVNADSGEGYINVDGNEGDRKNLTLWKGGEEVIKTVAANCNNTIVVMHTVGPVLIDEWYDNPNVTAIVWAGLPGQESGNSLVDVLYGRVSPGGKTPFTWGKTRESYGAPLLTKPNNGKGAPQDDFTEGVFIDYRRFDKYNETPIYEFGFGLSYTTF

SEQ ID NO: 45565 - protein, 859 aa, Aspergillus sp. SG-2011
MRLSWLEAAALTAASVVSADELAFASPFYPSPWANGQGEWADAYKRAVDIVSQMTLDEKVNLTTGTGWELEKCVGQTGGVPRLDIGGMCLQDSPLGVRDSDYNSGFPAGVNVAATWDRKLAYLRGQAMGQEFSDKGVDVQLGPAAGPLGRSPDGGRNWEGFSPDPALTGVLFAETIKGIQDAGVIATAKHYILNEQEHFRQVSEAAGYGFNISDTISSNIDDKTIHEMYLWPFADAVRAGVGAVMCSYNQINNSYACQNSYTLNKLLKSELGFQGFVMSDWGAHHSGVGSALAGLDMSMPGDVSFDSATSFWGTNLTVAVLNGTVPQWRVDDMAVRIMAAYYKVGRDRLYQPPNFSSWTRDEYGFKYYYSQEGPYEKVNQYVNVQRNHSEVIRKVGADSTVLLKNNNALPLTGKERKVALIGEDAGSNAYGANGCSDRGCDNGTLAMAWGSGTAEFPYLVTPEQAIQAEVLKNKGSTYTITDNWALSQVEALAKTASVSLVFVNADSGEGYISVDGNEGDRNNLTLWKNGDNLIKATASNCNNTIVVIHSVGAVLVDEWYDHPNVTAILWAGLPGQESGNSLADVLYGRVNPGGKTPFTWGKTRASYGDYLVREPNNGHGAPQDNFSEGVFIDYRGFDKRNETPIYEFGHGLSYTTFNYSGLQVEVLNTSSSTPVATQTKPAPTFGEIGNASDYLYPEGLDRITAFIYPWLNSTDLKESSGDPDYGVDTAKYIPAGATNSSAQPVLPAGGGFGGNPRLYDELIRVSVTVKNTGRVTGDAVPQLYVSLGGPNEPKVVLRQFDRITLRPSEETVWTTTLTRRDLSNWDVAAQDWVITSYPKKVHVGSSSRQLPLHAALPKV

SEQ ID NO: 45566 - protein, 856 aa, Aspergillus aculeatus
GTVSTTTATTTASASADELAFSPPFYPSPWANGQGEWAEAYQRAVAIVSQMTLDEKVNLTTGTGWELEKCVGQTGGVPRLNIGGMCLQDSPLGIRDSDYNSAFPAGVNVAATWDKNLAYLRGQAMGQEFSDKGIDVQLGPAAGPLGRSPDGGRNWEGFSPDPALTGVLFAETIKGIQDAGVVATAKHYILNEQEHFRQVAEAAGYGFNISDTISSNVDDKTIHEMYLWPFADAVRAGVGAIMCSYNQINNSYGCQNSYTLNKLLKAELGFQGFVMSDWGAHHSGVGSALAGLDMSMPGDITFDSATSFWGTNLTIAVLNGTVPQWRVDDMAVRIMAAYYKVGRDRLYQPPNFSSWTRDEYGFKYFYPQEGPYEKVNHFVNVQRNHSEVIRKLGADSTVLLKNNNALPLTGKERKVAILGEDAGSNSYGANGCSDRGCDNGTLAMAWGSGTAEFPYLVTPEQAIQAEVLKHKGSVYAITDNWALSQVETLAKQASVSLVFVNSDAGEGYISVDGNEGDRNNLTLWKNGDNLIKAAANNCNNTIVVIHSVGPVLVDEWYDHPNVTAILWAGLPGQESGNSLADVLYGRVNPGAKSPFTWGKTREAYGDYLVRELNNGNGAPQDDFSEGVFIDYRGFDKRNETPIYEFGHGLSYTTFNYSGLHIQVLNASSNAQVATETGAAPTFGQVGNASDYVYPEGLTRISKFIYPWLNSTDLKASSGDPYYGVDTAEHVPEGATDGSPQPVLPAGGGSGGNPRLYDELIRVSVTVKNTGRVAGDAVPQLYVSLGGPNEPKVVLRKFDRLTLKPSEETVWTTTLTRRDLSNWDVAAQDWVITSYPKKVHVGSSSRQLPLHAALPKV

SEQ ID NO: 45567 - protein, 838 aa, Aspergillus oryzae var. brunneus
DLAYSPPFYPSPWADGQGEWAEVYKRAVDIVSQMTLTEKVNLTTGTGWQLERCVGQTGSVPRLNIPSLCLQDSPLGIRFSDYNSAFPAGVNVAATWDKTLAYLRGQAMGEEFSDKGIDVQLGPAAGPLGAHPDGGRNWEGFSPDPALTGVLFAETIKGIQDAGVIATAKHYIMNEQEHFRQQPEAAGYGFNVSDSLSSNVDDKTMHELYLWPFADAVRAGVGAVMCSYNQINNSYGCENSETLNKLLKAELGFQGFVMSDWTAHHSGVGAALAGLDMSMPGDVTFDSGTSFWGANLTVGVLNGTIPQWRVDDMAVRIMAAYYKVGRDTKYTPPNFSSWTRDEYGFAHNHVSEGAYERVNEFVDVQRDHADLIRRIGAQSTVLLKNKGALPLSRKEKLVALLGEDAGSNSWGANGCDDRGCDNGTLAMAWGSGTANFPYLVTPEQAIQNEVLQGRGNVFAVTDSWALDKIAAAARQASVSLVFVNSDSGEGYLSVDGNEGDRNNITLWKNGDNVVKTAANNCNNTVVIIHSVGPVLIDEWYDHPNVTGILWAGLPGQESGNSIADVLYGRVNPGAKSPFTWGKTRESYGSPLVKDANNGNGAPQSDFTQGVFIDYRHFDKFNETPIYEFGYGLSYTTFELSDLHVQPLNASRYTPTSGMTEAAKNFGEIGDASEYVYPEGLERIHEFIYPWINSTDLKASSDDSNYGWEDSKYIPEGATDGSAQPRLPASGGAGGNPGLYEDLFRVSVKVKNTGNVAGDEVPQLYVSLGGPNEPKVVLRKFERIHLAPSQEAVWTTTLTRRDLANWDVSAQDWTVTPYPKTIYVGNSSRKLPLQASLPK

SEQ ID NO: 45568 - protein, 840 aa, Aspergillus oryzae
MKLGWIEVAALAAASVVSAKDDLAYSPPFYPSPWADGQGEWAEVYKRAVDIVSQMTLTEKVNLTTGTGWQLERCVGQTGSVPRLNIPSLCLQDSPLGIRFSDYNSAFPAGVNVAATWDKTLAYLRGQAMGEEFSDKGIDVQLGPAAGPLGAHPDGGRNWEGFSPDPALTGVLFAETIKGIQDAGVIATAKHYIMNEQEHFRQQPEAAGYGFNVSDSLSSNVDDKTMHELYLWPFADAVRAGVGAVMCSYNQINNSYGCENSETLNKLLKAELGFQGFVMSDWTAHHSGVGAALAGLDMSMPGDVTFDSGTSFWGANLTVGVLNGTIPQWRVDDMAVRIMAAYYKVGRDTKYTPPNFSSWTRDEYGFAHNHVSEGAYERVNEFVDVQRDHADLIRRIGAQSTVLLKNKGALPLSRKEKLVALLGEDAGSNSWGANGCDDRGCDNGTLAMAWGSGTANFPYLVTPEQAIQNEVLQGRGNVFAVTDSWALDKIAAAARQASVSLVFVNSDSGESYLSVDGNEGDRNNITLWKNGDNVVKTAANNCNNTVVIIHSVGPVLIDEWYDHPNVTGILWAGLPGQESGNSIADVLYGRVNPGAKSPFTWGKTRESYGSPLVKDANNGNGAPQSDFTQGVFIDYRHFDKFNETPIYEFGYGLSYTTFELSDLHVQPLNASRYTPTSGMTEAAKNFGEIGDASEYVYPEGLERIHEFIYPWINSTDLKASSDDSNYGWEDSKYIPEGATDGSAQPRLPASGGAGGNPGLYEDLFRVSVKVKNTGNVAGDEVPQLYVSLGGPNEPKVVLRKFERIHLAPSQEAVWTTTLTRRDLANWDVSAQDWTVTPYPK

SEQ ID NO: 45569 - protein, 857 aa, unidentified
MKLSILEAAALTAASVVSAQDDLAYSPPYYPSPWADGHGEWSNAYKRAVDIVSQMTLTEKVNLTTGTGWELERCVGQTGSVPRLGIPSLCLQDSPLGIRMSDYNSAFPAGINVAATWDKKLAYQRGKAMGEEFSDKGIDVQLGPAAGPLGRSPDGGRNWEGFSPDPCLTGVCSPRRSRVSRTAGVIATGSTTFLNEQEHFRQVAEAQGYGFNITETVSSNVDDKTMHELYLWPFADAVRAGVGAVMCSYNQINNSYGCQNSLTLNKLLKAELGFQGFVMSDWSAHHSGVGAALAGLDMSMPGDISFDSGTSFYGTNLTVGVLNGTIPQWRVDDMAVRIMAAYYKVGRDRLWSPPNFSSWTRDEYGFAHFFPSEGAYERVNEFVNVQRDHAQVIRRIGADSVVLLKNNGALPLTGQEKTVGILGEDAGSNPKGANGCSDRGCDKGTLAMAWGSGTANFPYLVTPEQAIQNEVLKGRGNVFAVTDNYDTQQIAAVASQSTVSLVFVNADAGEGFLNVDGNMGDRKNLTLWQNGEEVIKTVTEHCNNTVVIHSVGPVLVDEWYAHPNVTGILWAGLPGQESGNAIADVLYGRVNPGGKTPFTWGKTRASYGDYLLTEPNNGNGAPQDNFNEGVFIDYRRFDKYNETPIYEFGHGMSYTTFELSGLQVQLINGSSYVPTTGQTAAAQAFGKVEDASSYLYPEGLKRISKFIYPWLNSTDLKASTGDPYGEPNFEYIPEGATDGSPQPRLPASGGPGGNPGLYEDLFQVSVTITNTGKVAGDAVPQLYVSLGGPNEPKRVLRKFERLHIAPGQQKVWTTTLNRRDLANWDVVAQDWKTPYAKTIFVGTSSRKLPLAGRLPRV

SEQ ID NO: 45570 - protein, 859 aa, Aspergillus flavus
MKLGWIEVAALAAASVVSAKDDLAYSPPFYPSPWADGQGEWAEVYKRAVDIVSQMTLTEKVNLTTGTGWQLERCVGQTGSVPRLNIPSLCLQDSPLGIRFSDYNSAFPAGVNVAATWDKTLAYLRGQAMGEEFSDKGIDVQLGPAAGPLGAHPDGGRNWEGFSPDPALTGVLFAETIRGIQDAGVIATAKHYIMNEQEHFRQQPEAAGYGFNVSDSLSSNVDDKTMHELYLWPFADAVRAGVGAVMCSYNQINNSYGCENSETLNKLLKAELGFQGFVMSDWTAHHSGVGAALAGLDMSMPGDVTFDSGTSFWGANLTVGVLNGTIPQWRVDDMAVRIMAAYYKVGRDTKYTPPNFSSWTRDEYGFAHNHVSEGAYERVNEFVDVQRDHADLIRRIGAQSTVLLKNKGALPLSRKEKLVALLGEDAGSNSWGANGCDDRGCDNGTLAMAWGSGTANFPYLVTPEQAIQNEVLQGRGNVFAVTDSWALDKIAAAARQASVSLVFVNSDSGEGYLSVDGNEGDRNNITLWKNGDNVVKTAAENCNNTVVIIHSVGPVLIDEWYDHPNVTGILWAGLPGQESGNSIADVLYGRVNPGAKSPFTWGKTRESYGSPLVKDANNGNGAPQSDFTQGVFIDYRHFDKFNETPIYEFGYGLSYTTFELSDLHVQPLNASRYTPTSGMTEAAKNFGEIGDASEYVYPEGLERIHEFIYPWINSTDLKASSDDSNYGWEDSKYIPEGATDGSAQPLLPASGGAGGNPGLYEDLFRVSVKVKNTGNVAGDEVPQLYVSLGGPNEPKVVLRKFERIHLAPSQEAVWTTTLTRRDLANWDVSAQDWTVTPYPKTIYVGNSSRKLPLQASLPK

SEQ ID NO: 45571 - protein, 859 aa, Aspergillus oryzae
MKLGWIEVAALAAASVVSAKDDLAYSPPFYPSPWADGQGEWAEVYKRAVDIVSQMTLTEKVNLTTGTGWQLERCVGQTGSVPRLNIPSLCLQDSPLGIRFSDYNSAFPAGVNVAATWDKTLAYLRGQAMGEEFSDKGIDVQLGPAAGPLGAHPDGGRNWEGFSPDPALTGVLFAETIKGIQDAGVIATAKHYIMNEQEHFRQQPEAAGYGFNVSDSLSSNVDDKTMHELYLWPFADAVRAGVGAVMCSYNQINNSYGCENSETLNKLLKAELGFQGFVMSDWTAHHSGVGAALAGLDMSMPGDVTFDSGTSFWGANLTVGVLNGTIPQWRVDDMAVRIMAAYYKVGRDTKYTPPNFSSWTRDEYGFAHNHVSEGAYERVNEFVDVQRDHADLIRRIGAQSTVLLKNKGALPLSRKEKLVALLGEDAGSNSWGANGCDDRGCDNGTLAMAWGSGTANFPYLVTPEQAIQNEVLQGRGNVFAVTDSWALDKIAAAARQASVSLVFVNSDSGEGYLSVDGNEGDRNNITLWKNGDNVVKTAANNCNNTVVIIHSVGPVLIDEWYDHPNVTGILWAGLPGQESGNSIADVLYGRVNPGAKSPFTWGKTRESYGSPLVKDANNGNGAPQSDFTQGVFIDYRHFDKFNETPIYEFGYGLSYTTFELSDLHVQPLNASRYTPTSGMTEAAKNFGEIGDASEYVYPEGLERIHEFIYPWINSTDLKASSDDSNYGWEDSKYIPEGATDGSAQPRLPASGGAGGNPGLYEDLFRVSVKVKNTGNVAGDEVPQLYVSLGGPNEPKVVLRKFERIHLAPSQEAVWTTTLTRRDLANWDVSAQDWTVTPYPKTIYVGNSSRKLPLQASLPK

SEQ ID NO: 45572 - protein, 859 aa, Aspergillus oryzae
MKLGWIEVAALAAASVVSAKDDLAYSPPFYPSPWADGQGEWAEVYKRAVDIVSQMTLTEKVNLTTGTGWQLERCVGQTGSVPRLNIPSLCLQDSPLGIRFSDYNSAFPAGVNVAATWDKTLAYLRGQAMGEEFSDKGIDVQLGPAAGPLGAHPDGGRNWEGFSPDPALTGVLFAETIKGIQDAGVIATAKHYIMNEQEHFRQQPEAAGYGFNVSDSLSSNVDDKTMHELYLWPFADAVRAGVGAVMCSYNQINNSYGCENSETLNKLLKAELGFQGFVMSDWTAHHSGVGAALAGLDMSMPGDVTFDSGTSFWGANLTVGVLNGTIPQWRVDDMAVRIMAAYYKVGRDTKYTPPNFSSWTRDEYGFAHNHVSEGAYERVNEFVDVQRDHADLIRRIGAQSTVLLKNKGALPLSRKEKLVALLGEDAGSNSWGANGCDDRGCDNGTLAMAWGSGTANFPYLVTPEQAIQNEVLQGRGNVFAVTDSWALDKIAAAARQASVSLVFVNSDSGESYLSVDGNEGDRNNITLWKNGDNVVKTAANNCNNTVVIIHSVGPVLIDEWYDHPNVTGILWAGLPGQESGNSIADVLYGRVNPGAKSPFTWGKTRESYGSPLVKDANNGNGAPQSDFTQGVFIDYRHFDKFNETPIYEFGYGLSYTTFELSDLHVQPLNASRYTPTSGMTEAAKNFGEIGDASEYVYPEGLERIHEFIYPWINSTDLKASSDDSNYGWEDSKYIPEGATDGSAQPRLPASGGAGGNPGLYEDLFRVSVKVKNTGNVAGDEVPQLYVSLGGPNEPKVVLRKFERIHLAPSQEAVWTTTLTRRDLANWDVSAQDWTVTPYPKTIYVGNSSRKLPLQASLPK

SEQ ID NO: 45573 - protein, 839 aa, unidentified
LAYSPPYYPSPWANGQGDWAEAYQRAVDIVSQMTLAEKVNLTTGTGWELELCVGQTGGVPRLGIPGMCAQDSPLGVRDSDYNSAFPAGVNVAATWDKNLAYLRGQAMGQEFSDKGADILLGPAAGPLGRSPDGGRNWEGFSPDPALSGVLFAETIKGIQDAGVVATAKHYIAYEQEHFRQAPEAQGYGFNITESGSANLDDKTMHELYLWPFADAIRAGAGAVMCSYNQINNSYGCQNSYTLNKLLKAELGFQGFVMSDWAAHHAGVSGALAGLDMSMPGDVDCDSGTSYWGTNLTISVLNGTVPQWRVDDMAVRIMAAYYKVGRDRLWTPPNFSSWTRDEYGFKYYYVSEGPYEKVNQFVNVQRNHSELIRRIGADSTVLLKNDGALPLTGKERLVALIGEDAGSNPYGANGCSDRGCDNGTLAMGWGSGTANFPYLVTPEQAISNEVLKNKNGVFTVTDNWAIDQIEALAKTASVSLVFVNADSGEGYINVDGNLGDRRNLTLWRNGDNVIKAAASNCNNTIVIIHSVGPVLVNEWYDNPNVTAILWGGLPGQESGNSLADVLYGRVNPGAKSPFTWGKTREAYQDYLYTEPNNGNGAPQEDFVEGVFIDYRGFDKRNETPIYEFGYGLSYTTFNYSNLQVEVLSAPAYEPASGETEAAPTFGEVGNASDYLYPDGLQRITKFIYPWLNSTDLEASSGDASYGQDASDYLPEGATDGSAQPILPAGGGAGGNPRLYDELIRVSVTIKNTGKVAGDEVPQLYVSLGGPNEPKIVLRQFERITLQPSEETQWSTTLTRRDLANWNVETQDWEITSYPKMVFVGSSSRKLPLRASLPTVH

SEQ ID NO: 45574 - protein, 838 aa, Aspergillus sojae
DLAYSPPFYPSPWADGQGEWAEVYKRAVDIVSQMTLTEKVNLTTGTGWQLERCVGQTGSVPRLNIPSLCLQDSPLGIRFSDYNSAFPAGVNVAATWDKTLAYLRGQAMGEEFSDKGIDVQLGPAAGPLGAHPDGGRNWEGFSPDPALTGVLFAETIKGIQDAGVIATAKHYIMNEQEHFRQQPEAAGYGFNVSDSLSSNVDDKTIHELYLWPFADAVRAGVGAVMCSYNQINNSYGCENSETLNKLLKAELGFQGFVMSDWTAHHSGVGAALAGMDMSMPGDVTFDSGTSFWGANLTVGVLNGTIPQWRVDDMAVRIMAAYYKVGRDTKYTPPNFSSWTRDEYGFAHNHVSEGAYERVNEFVDVQRDHADLIRRIGAQSTVLLKNKGALPLSRKEKLVALLGEDAGSNSWGANGCDDRGCDNGTLAMAWGSGTANFPYLVTPEQAIQNEVLQGRGNVFAVTDSWALDKIAAAARQASVSLVFVNSDSGEGYLSVDGNEGDRNNITLWKNGDNVVKTAANNCNNTVVIIHSVGPVLINEWYDHPNVTGILWAGLPGQESGNSIADVLYGRVNPGAKSPFTWGKTRDSYGSPLVKDANNGNGAPQSDFTQGVFIDYRHFDKFNETPIYEFGYGLSYTTFELSDLHVQPLNASQYTPTSGMTEAAKNFGEIGDASEYVYPEGLERIHEFIYPWINSTDLKASSDDSNYGWEDSEYIPEGATDGSAQPRLPASGGAGGNPGLYEDLFRVSVKVKNTGNVAGDEVPQLYVSLGGPNEPKVVLRKFERIHLAPSQEVVWTTTLTRRDLANWDVSAQDWAVTPYPKTIYVGNSSRKLPLQVSLPK

SEQ ID NO: 45575 - protein, 850 aa, Aspergillus oryzae
VAALPVLALAKDDLAYSPPFYPSPWADGQGEWAEVYKRAVDIVSQMTLTEKVNLTTGTGWQLERCVGQTGSVPRLNIPSLCLQDSPLGIRFSDYNSAFPAGVNVAATWDKTLAYLRGQAMGEEFSDKGIDVQLGPAAGPLGAHPDGGRNWEGFSPDPALTGVLFAETIKGIQDAGVIATAKHYIMNEQEHFRQQPEAAGYGFNVSDSLSSNVDDKTMHELYLWPFADAVRAGVGAVMCSYNQINNSYGCENSETLNKLLKAELGFQGFVMSDWTAHHSGVGAALAGLDMSMPGDVTFDSGTSFWGANLTVGVLNGTIPQWRVDDMAVRIMAAYYKVGRDTKYTPPNFSSWTRDEYGFAHNHVSEGAYERVNEFVDVQRDHADLIRRIGAQSTVLLKNKGALPLSRKEKLVALLGEDAGSNSWGANGCDDRGCDNGTLAMAWGSGTANFPYLVTPEQAIQNEVLQGRGNVFAVTDSWALDKIAAAARQASVSLVFVNSDSGEGYLSVDGNEGDRNNITLWKNGDNVVKTAANNCNNTVVIIHSVGPVLIDEWYDHPNVTGILWAGLPGQESGNSIADVLYGRVNPGAKSPFTWGKTRESYGSPLVKDANNGNGAPQSDFTQGVFIDYRHFDKFNETPIYEFGYGLSYTTFELSDLHVQPLNASRYTPTSGMTEAAKNFGEIGDASEYVYPEGLERIHEFIYPWINSTDLKASSDDSNYGWEDSKYIPEGATDGSAQPRLPASGGAGGNPGLYEDLFRVSVKVKNTGNVAGDEVPQLYVSLGGPNEPKVVLRKFERIHLAPSQEAVWTTTLTRRDLANWDVSAQDWTVTPYPKTIYVGNSSRKLPLQASLPK

SEQ ID NO: 45576 - protein, 859 aa, Aspergillus oryzae
MKLGWIEVAALAAASVVSAKDDLAYSPPFYPSPWADGQGEWAEVYKRAVDIVSQMTLTEKVNLTTGTGWQLERCVGQTGSVPRLNIPSLCLQDSPLGIRFSDYNSAFPAGVNVAATWDKTLAYLRGQAMGEEFSDKGIDVQLGPAAGPLGAHPDGGRNWESFSPDPALTGVLFAETIKGIQDAGVIATAKHYIMNEQEHFRQQPEAAGYGFNVSDSLSSNVDDKTMHELYLWPFADAVRAGVGAVMCSYNQINNSYGCENSETLNKLLKAELGFQGFVMSDWTAQHSGVGAALAGLDMSMPGDVTFDSGTSFWGANLTVGVLNGTIPQWRVDDMAVRIMAAYYKVGRDTKYTPPNFSSWTRDEYGFAHNHVSEGAYERVNEFVDVQRDHADLIRRIGAQSTVLLKNKGALPLSRKEKLVALLGEDAGSNSWGANGCDDRGCDNGTLAMAWGSGTANFPYLVTPEQAIQNEVLQGRGNVFAVTDSWALDKIAAAARQASVSLVFVNSDSGEGYLSVDGNEGDRNNITLWKNGDNVVKTAANNCNNTVVIIHSVGPVLIDEWYDHPNVTGILWAGLPGQESGNSIADVLYGRVNPGAKSPFTWGKTRESYGSPLVKDANNGNGAPQSDFTQGVFIDYRHFDKFNETPIYEFGYGLSYTTFELSDLHVQPLNASRYTPTSGMTEAAKNFGEIGDASEYVYPEGLERIHEFIYPWINSTDLKASSDDSNYGWEDSKYIPEGATDGSAQPRLPASGGAGGNPGLYEDLFRVSVKVKNTGNVAGDEVPQLYVSLGGPNEPKVVLRKFERIHLAPSQEAVWTTTLTRRDLANWDVSAQDWTVTPYPKTIYVGNSSRKLPLQASLPK

SEQ ID NO: 45577 - protein, 859 aa, Aspergillus oryzae
MKLGWIEVAALAAASVVSAKDDLAYSPPFYPSPWADGQGEWAEVYKRAVDIVSQMTLTEKVNLTTGTGWQLERCVGQTGSVPRLNIPSLCLQDSPLGIRFSDYNSAFPAGVNVAATWDKTLAYLRGQAMGEEFSDKGIDVQLGPAAGPLGAHPDGGRNWEGFSPDPALTGVLFAETIRGIQDAGVIATAKHYIMNEQEHFRQQPEAAGYGFNVSDSLSSNVDDKTMHELYLWPFADAVRAGVGAVMCSYNQINNSYGCENSETLNKLLKAELGFQGFVMSDWTAHHSGVLAALAGLDMSMPGDVTFDSGTSFWGANLTVGVLNGTIPQWRVDDMAVRIMAAYYKVGRDTKYTPPNFSSWTRDEYGFAHNHVSEGAYERVNEFVDVQRDHADLIRRIGAQSTVLLKNKGALPLSRKEKLVALLGEDAGSNSWGANGCDDRGCDNGTLAMAWGSGTANFPYLVTPEQAIQNEVLQGRGNVFAVTDSWALDKIAAAARQASVSLVFVNSDSGEGYLSVDGNEGDRNNITLWKNGDNVVKTAANNCNNTVVIIHSVGPVLIDEWYDHPNVTGILWAGLPGQESGNSIADVLYGRVNPGAKSPFTWGKTRESYGSPLVKDANNGNGAPQSDFTQGVFIDYRHFDKFNETPIYEFGYGLSYTTFELSDLHVQPLNASRYTPTSGMTEAAKNFGEIGDASEYVYPEGLERIHEFIYPWINSTDLKASSDDSNYGWEDSKYIPEGATDGSAQPRLPASGGAGGNPGLYEDLFRVSVKVKNTGNVAGDEVPQLYVSLGGPNEPKVVLRKFERIHLAPSQEAVWTTTLTRRDLANWDVSAQDWTVTPYPKTIYVGNSSRKLPLQASLPK

SEQ ID NO: 45578 - protein, 839 aa, unidentified
LAYSPPYYPSPWANGQGDWAEAYQRAVDIVSQMTLAEKVNLTTGTGWELELCVGQTGGVPRLGIPGMCAQDSPLGVRDSDYNSAFPAGVNVAATWDKNLAYLRGQAMGQEFSDKGADIQLGPAAGPLGRSPDGGRNWEGFSPDPALSGVLFAETIKGIQDAGVVATAKHYIAYEQEHFRQAPEAQGYGFNITESGSANLDDKTMHELYLWPFADAIRAGAGAVMCSYNQINNSYGCQNSYTLNKLLKAELGFQGFVMSDWAAHHAGVSGALAGLDMSMPGDVDYDSGTSYWGTNLTISVLNGTVPQWRVDDMAVRIMAAYYKVGRDRLWTPPNFSSWTRDEYGFKYYYVSEGPYEKVNQFVNVQRNHSELIRRIGADSTVLLKNDGALPLTGKERLVALIGEDAGSNPYGANGCSDRGCDNGTLAMGWGSGTANFPYLVTPEQAISNEVLKNKNGVFTATDNWAIDQIEALAKTASVSLVFVNADSGEGYINVDGNLGDRRNLTLWRNGDNVIKAAASNCNNTIVIIHSVGPVLVDEWYDNPNVTAILWGGLPGQESGNSLADVLYGRVNPGAKSPFTWGKTREAYQDYLYTEPNNGNGAPQEDFVEGVFIDYRGFDKRNETPIYEFGYGLSYTTFNYSNLQVEVLSAPAYEPASGETEAAPTFGEVGNASDYLYPDGLQRITKFIYPWLNSTDLEASSGDASYGQDASDYLPEGATDGSAQPILPAGGGAGGNPRLYDELIRVSVTIKNTGKVAGDEVPQLYVSLGGPNEPKIVLRQFERITLQPSEETQWSTTLTRRDLANWNVETQDWEITSYPKMVFVGSSSRKLPLRASLPTVH

SEQ ID NO: 45579 - protein, 839 aa, unidentified
LAYSPPYYPSPWANGQGDWAEAYQRAVDIVSQMTLAEKVNLTTGTGWELELCVGQTGGVPRLGIPGMCAQDSPLGVRDSDYNSAFPAGVNVAATWDKNLAYLRGQAMGQEFSDKGADILLGPAAGPLGRSPDGGRNWEGFSPDPALSGVLFAETIKGIQDAGVVATAKHYIAYEQEHFRQAPEAQGYGFNITESGSANLDDKTMHELYLWPFADAIRAGAGAVMCSYNQINNSYGCQNSYTLNKLLKAELGFQGFVMSDWAAHHAGVSGALAGLDMSMPGDVDYDSGTSYWGTNLTISVLNGTVPQWRVDDMAVRIMAAYYKVGRDRLWTPPNFSSWTRDEYGFKYYYVSEGPYEKVNQFVNVQRNHSELIRRIGADSTVLLKNDGALPLTGKERLVALIGEDAGSNPYGANGCSDRGCDNGTLAMGWGSGTANFPYLVTPEQAISNEVLKNKNGVFTATDNWAIDQIEALAKTASVSLVFVNADSGEGYINVDGNLGDRRNLTLWRNGDNVIKAAASNCNNTIVIIHSVGPVLVNEWYDNPNVTAILWGGLPGQESGNSLADVLYGRVNPGAKSPFTWGKTREAYQDYLYTEPNNGNGAPQEDFVEGVFIDYRGFDKRNETPIYEFGYGLSYTTFNYSNLQVEVLSAPAYEPASGETEAAPTFGEVGNASDYLYPDGLQRITKFIYPWLNSTDLEASSGDASYGQDASDYLPEGATDGSAQPILPAGGGAGGNPRLYDELIRVSVTIKNTGKVAGDEVPQLYVSLGGPNEPKIVLRQFERITLQPSEETQWSTTLTRRDLANWNVETQDWEITSYPKMVFVGSSSRKLPLRASLPTVH

SEQ ID NO: 45580 - protein, 839 aa, unidentified
LAYSPPYYPSPWANGQGDWAEAYQRAVDIVSQMTLAEKVNLTTGTGWELELCVGQTGGVPRLGIPGMCAQDSPLGVRDSDYNSAFPAGVNVAATWDKNLAYLRGQAMGQEFSDKGADIQLGPAAGPLGRSPDGGRNWEGFSPDPALSGVLFAETIKGIQDAGVVATAKHYIAYEQEHFRQAPEAQGYGFNITESGSANLDDKTMHELYLWPFADAIRAGAGAVMCSYNQINNSYGCQNSYTLNKLLKAELGFQGFVMSDWAAHHAGVSGALAGLDMSMPGDVDYDSGTSYWGTNLTISVLNGTVPQWRVDDMAVRIMAAYYKVGRDRLWTPPNFSSWTRDEYGFKYYYVSEGPYEKVNQFVNVQRNHSELIRRIGADSTVLLKNDGALPLTGKERLVALIGEDAGSNPYGANGCSDRGCDNGTLAMGWGSGTANFPYLVTPEQAISNEVLKNKNGVFTVTDNWAIDQIEALAKTASVSLVFVNADSGEGYINVDGNLGDRRNLTLWRNGDNVIKAAASNCNNTIVIIHSVGPVLVNEWYDNPNVTAILWGGLPGQESGNSLADVLYGRVNPGAKSPFTWGKTREAYQDYLYTEPNNGNGAPQEDFVEGVFIDYRGFDKRNETPIYEFGYGLSYTTFNYSNLQVEVLSAPAYEPASGETEAAPTFGEVGNASDYLYPDGLQRITKFIYPWLNSTDLEASSGDASYGQDASDYLPEGATDGSAQPILPAGGGAGGNPRLYDELIRVSVTIKNTGKVAGDEVPQLYVSLGGPNEPKIVLRQFERITLQPSEETQWSTTLTRRDLANWNVETQDWEITSYPKMVFVGSSSRKLPLRASLPTVH

SEQ ID NO: 45581 - protein, 839 aa, unidentified
LAYSPPYYPSPWANGQGDWAEAYQRAVDIVSQMTLAEKVNLTTGTGWELELCVGQTGGVPRLGIPGMCAQDSPLGVRDSDYNSAFPAGVNVAATWDKNLAYLRGQAMGQEFSDKGADIQLGPAAGPLGRSPDGGRNWEGFSPDPALSGVLFAETIKGIQDAGVVATAKHYIAYEQEHFRQAPEAQGYGFNITESGSANLDDKTMHELYLWPFADAIRAGAGAVMCSYNQINNSYGCQNSYTLNKLLKAELGFQGFVMSDWAAHHAGVSGALAGLDMSMPGDVDCDSGTSYWGTNLTISVLNGTVPQWRVDDMAVRIMAAYYKVGRDRLWTPPNFSSWTRDEYGFKYYYVSEGPYEKVNQFVNVQRNHSELIRRIGADSTVLLKNDGALPLTGKERLVALIGEDAGSNPYGANGCSDRGCDNGTLAMGWGSGTANFPYLVTPEQAISNEVLKNKNGVFTVTDNWAIDQIEALAKTASVSLVFVNADSGEGYINVDGNLGDRRNLTLWRNGDNVIKAAASNCNNTIVIIHSVGPVLVNEWYDNPNVTAILWGGLPGQESGNSLADVLYGRVNPGAKSPFTWGKTREAYQDYLYTEPNNGNGAPQEDFVEGVFIDYRGFDKRNETPIYEFGYGLSYTTFNYSNLQVEVLSAPAYEPASGETEAAPTFGEVGNASDYLYPDGLQRITKFIYPWLNSTDLEASSGDASYGQDASDYLPEGATDGSAQPILPAGGGAGGNPRLYDELIRVSVTIKNTGKVAGDEVPQLYVSLGGPNEPKIVLRQFERITLQPSEETQWSTTLTRRDLANWNVETQDWEITSYPKMVFVGSSSRKLPLRASLPTVH

SEQ ID NO: 45582 - protein, 839 aa, unidentified
LAYSPPYYPSPWANGQGDWAEAYQRAVDIVSQMTLAEKVNLTTGTGWELELCVGQTGGVPRLGIPGMCAQDSPLGVRDSDYNSAFPAGVNVAATWDKNLAYLRGQAMGQEFSDKGADIQLGPAAGPLGRSPDGGRNWEGFSPDPALSGVLFAETIKGIQDAGVVATAKHYIAYEQEHFRQAPEAQGYGFNITESGSANLDDKTMHELYLWPFADAIRAGAGAVMCSYNQINNSYGCQNSYTLNKLLKAELGFQGFVMSDWAAHHAGVSGALAGLDMSMPGDVDYDSGTSYWGTNLTISVLNGTVPQWRVDDMAVRIMAAYYKVGRDRLWTPPNFSSWTRDEYGFKYYYVSEGPYEKVNQFVNVQRNHSELIRRIGADSTVLLKNDGALPLTGKERLVALIGEDAGSNPYGANGCSDRGCDNGTLAMGWGSGTANFPYLVTPEQAISNEVLKNKNGVFTVTDNWAIDQIEALAKTASVSLVFVNADSGEGYINVDGNLGDRRNLTLWRNGDNVIKAAASNCNNTIVIIHSVGPVLVNEWYDNPNVTAILWGGLPGQESGNSLADVLYGRVNPGAKSPFTWGKTREAYQDYLYTEPNNGNGAPQEDFVEGVFIDYRGFDKRNETPIYEFGYGLSYTTFNYSNLQVEVLSAPAYEPASGETEAAPTFGEVGNASDYLYPDGLQRITKFIYPWLNSTDLEASSGDASYGQDASDYLPEGATDGSAQPILPAGGGAGGNPRLYDELIRVSVTIKNTGKVAGDEVPQLYVSLGGPNEPQIVLRQFERITLQPSEETQWSTTLTRRDLANWNVETQDWEITSYPKMVFVGSSSRKLPLRASLPTVH

SEQ ID NO: 45583 - protein, 839 aa, unidentified
LAYSPPYYPSPWANGQGDWAEAYQRAVDIVSQMTLAEKVNLTTGTGWELELCVGQTGGVPRLGIPGMCAQDSPLGVRDSDYNSAFPAGVNVAATWDKNLAYLRGQAMGQEFSDKGADILLGPAAGPLGRSPDGGRNWEGFSPDPALSGVLFAETIKGIQDAGVVATAKHYIAYEQEHFRQAPEAQGYGFNITESGSANLDDKTMHELYLWPFADAIRAGAGAVMCSYNQINNSYGCQNSYTLNKLLKAELGFQGFVMSDWAAHHAGVSGALAGLDMSMPGDVDCDSGTSYWGTNLTISVLNGTVPQWRVDDMAVRIMAAYYKVGRDRLWTPPNFSSWTRDEYGFKYYYVSEGPYEKVNQFVNVQRNHSELIRRIGADSTVLLKNDGALPLTGKERLVALIGEDAGSNPYGANGCSDRGCDNGTLAMGWGSGTANFPYLVTPEQAISNEVLKNKNGVFTATDNWAIDQIEALAKTASVSLVFVNADSGEGYINVDGNLGDRRNLTLWRNGDNVIKAAASNCNNTIVIIHSVGPVLVNEWYDNPNVTAILWGGLPGQESGNSLADVLYGRVNPGAKSPFTWGKTREAYQDYLYTEPNNGNGAPQEDFVEGVFIDYRGFDKRNETPIYEFGYGLSYTTFNYSNLQVEVLSAPAYEPASGETEAAPTFGEVGNASDYLYPDGLQRITKFIYPWLNSTDLEASSGDASYGQDASDYLPEGATDGSAQPILPAGGGAGGNPRLYDELIRVSVTIKNTGKVAGDEVPQLYVSLGGPNEPKIVLRQFERITLQPSEETQWSTTLTRRDLANWNVETQDWEITSYPKMVFVGSSSRKLPLRASLPTVH

SEQ ID NO: 45584 - protein, 839 aa, unidentified
LAYSPPYYPSPWANGQGDWAEAYQRAVDIVSQMTLAEKVNLTTGTGWELELCVGQTGGVPRLGIPGMCAQDSPLGVRDSDYNSAFPAGVNVAATWDKNLAYLRGQAMGQEFSDKGADIQLGPAAGPLGRSPDGGRNWEGFSPDPALSGVLFAETIKGIQDAGVVATAKHYIAYEQEHFRQAPEAQGYGFNITESGSANLDDKTMHELYLWPFADAIRAGAGAVMCSYNQINNSYGCQNSYTLNKLLKAELGFQGFVMSDWAAHHAGVSGALAGLDMSMPGDVDYDSGTSYWGTNLTISVLNGTVPQWRVDDMAVRIMAAYYKVGRDRLWTPPNFSSWTRDEYGFKYYYVSEGPYEKVNQFVNVQRNHSELIRRIGADSTVLLKNDGALPLTGKERLVALIGEDAGSNPYGANGCSDRGCDNGTLAMGWGSGTANFPYLVTPEQAISNEVLKNKNGVFTATDNWAIDQIEALAQTASVSLVFVNADSGEGYINVDGNLGDRRNLTLWRNGDNVIKAAASNCNNTIVIIHSVGPVLVDEWYDNPNVTAILWGGLPGQESGNSLADVLYGRVNPGAKSPFTWGKTREAYQDYLYTEPNNGNGAPQEDFVEGVFIDYRGFDKRNETPIYEFGYGLSYTTFNYSNLQVEVLSAPAYEPASGETEAAPTFGEVGNASDYLYPDGLQRITKFIYPWLNSTDLEASSGDASYGQDASDYLPEGATDGSAQPILPAGGGAGGNPRLYDELIRVSVTIKNTGKVAGDEVPQLYVSLGGPNEPKIVLRQFERITLQPSEETQWSTTLTRRDLANWNVETQDWEITSYPKMVFVGSSSRKLPLRASLPTVH

SEQ ID NO: 45585 - protein, 839 aa, unidentified
LAYSPPYYPSPWANGQGDWAEAYQRAVDIVSQMTLAEKVNLTTGTGWELELCVGQTGGVPRLGIPGMCAQDSPLGVRDSDYNSAFPAGVNVAATWDKNLAYLRGQAMGQEFSDKGADIQLGPAAGPLGRSPDGGRNWEGFSPDPALSGVLFAETIKGIQDAGVVATAKHYIAYEQEHFRQAPEAQGYGFNITESGSANLDDKTMHELYLWPFADAIRAGAGAVMCSYNQINNSYGCQNSYTLNKLLKAELGFQGFVMSDWAAHHAGVSGALAGLDMSMPGDVDADSGTSYWGTNLTISVLNGTVPQWRVDDMAVRIMAAYYKVGRDRLWTPPNFSSWTRDEYGFKYYYVSEGPYEKVNQFVNVQRNHSELIRRIGADSTVLLKNDGALPLTGKERLVALIGEDAGSNPYGANGCSDRGCDNGTLAMGWGSGTANFPYLVTPEQAISNEVLKNKNGVFTATDNWAIDQIEALAKTASVSLVFVNADSGEGYINVDGNLGDRRNLTLWRNGDNVIKAAASNCNNTIVIIHSVGPVLVNEWYDNPNVTAILWGGLPGQESGNSLADVLYGRVNPGAKSPFTWGKTREAYQDYLYTEPNNGNGAPQEDFVEGVFIDYRGFDKRNETPIYEFGYGLSYTTFNYSNLQVEVLSAPAYEPASGETEAAPTFGEVGNASDYLYPDGLQRITKFIYPWLNSTDLEASSGDASYGQDASDYLPEGATDGSAQPILPAGGGAGGNPRLYDELIRVSVTIKNTGKVAGDEVPQLYVSLGGPNEPKIVLRQFERITLQPSEETQWSTTLTRRDLANWNVETQDWEITSYPKMVFVGSSSRKLPLRASLPTVH

SEQ ID NO: 45586 - protein, 839 aa, unidentified
LAYSPPYYPSPWANGQGDWAEAYQRAVDIVSQMTLAEKVNLTTGTGWELELCVGQTGGVPRLGIPGMCAQDSPLGVRDSDYNSAFPAGVNVAATWDKNLAYLRGQAMGQEFSDKGADIQLGPAAGPLGRSPDGGRNWEGFSPDPALSGVLFAETIKGIQDAGVVATAKHYIAYEQEHFRQAPEAQGYGFNITESGSANLDDKTMHELYLWPFADAIRAGAGAVMCSYNQINNSYGCQNSYTLNKLLKAELGFQGFVMSDWAAHHAGVSGALAGLDMSMPGDVDYDSGTSYWGTNLTISVLNGTVPQWRVDDMAVRIMAAYYKVGRDRLWTPPNFSSWTRDEYGFKYYYVSEGPYEKVNQFVNVQRNHSELIRRIGADSTVLLKNDGALPLTGKERLVALIGEDAGSNPYGANGCSDRGCDNGTLAMGWGSGTANFPYLVTPEQAISNEVLKNKNGVFTATDNWAIDQIEALAKTASVSLVFVNADSGEGYINVDGNLGDRRNLTLWRNGDNVIKAAASNCNNTIVIIHSVGPVLVNEWYDNPNVTAILWGGLPGQESGNSLADVLYGRVNPGAKSPFTWGKTREAYQDYLYTEPNNGNGAPQEDFVEGVFIDYRGFDKRNETPIYEFGYGLSYTTFNYSNLQVEVLSAPAYEPASGETEAAPTFGEVGNASDYLYPDGLQRITKFIYPWLNSTDLEASSGDASYGQDASDYLPEGATDGSAQPILPAGGGAGGNPRLYDELIRVSVTIKNTGKVAGDEVPQLYVSLGGPNEPKIVLRQFERITLQPSEEMQWSTTLTRRDLANWNVETQDWEITSYPKMVFVGSSSRKLPLRASLPTVH

SEQ ID NO: 45587 - protein, 839 aa, unidentified
LAYSPPYYPSPWANGQGDWAEAYQRAVDIVSQMTLAEKVNLTTGTGWELELCVGQTGGVPRLGIPGMCAQDSPLGVRDSDYNSAFPAGVNVAATWDKNLAYLRGQAMGQEFSDKGADIQLGPAAGPLGRSPDGGRNWEGFSPDPALSGVLFAETIKGIQDAGVVATAKHYIAYEQEHFRQAPEAQGYGFNITESGSANLDDKTMHELYLWPFADAIRAGAGAVMCSYNQINNSYGCQNSYTLNKLLKAELGFQGFVMSDWAAHHAGVSGALAGLDMSMPGDVDYDSGTSYWGTNLTISVLNGTVPQWRVDDMAVRIMAAYYKVGRDRLWTPPNFSSWTRDEYGFKYYYVSEGPYEKVNQFVNVQRNHSELIRRIGADSTVLLKNDGALPLTGKERLVALIGEDAGSNPYGANGCSDRGCDNGTLAMGWGSGTANFPYLVTPEQAISNEVLKNKNGVFTATDNWAIDQIEALAQTASVSLVFVNADSGEGYINVDGNLGDRRNLTLWRNGDNVIKAAASNCNNTIVIIHSVGPVLVNEWYDNPNVTAILWGGLPGQESGNSLADVLYGRVNPGAKSPFTWGKTREAYQDYLYTEPNNGNGAPQEDFVEGVFIDYRGFDKRNETPIYEFGYGLSYTTFNYSNLQVEVLSAPAYEPASGETEAAPTFGEVGNASDYLYPDGLQRITKFIYPWLNSTDLEASSGDASYGQDASDYLPEGATDGSAQPILPAGGGAGGNPRLYDELIRVSVTIKNTGKVAGDEVPQLYVSLGGPNEPKIVLRQFERITLQPSEETQWSTTLTRRDLANWNVETQDWEITSYPKMVFVGSSSRKLPLRASLPTVH

SEQ ID NO: 45588 - protein, 839 aa, unidentified
LAYSPPYYPSPWANGQGDWAEAYQRAVDIVSQMTLAEKVNLTTGTGWELELCVGQTGGVPRLGIPGMCAQDSPLGVRDSDYNSAFPAGVNVAATWDKNLAYLRGQAMGQEFSDKGADIQLGPAAGPLGRSPDGGRNWEGFSPDPALSGVLFAETIKGIQDAGVVATAKHYIAYEQEHFRQAPEAQGYGFNITESGSANLDDKTMHELYLWPFADAIRAGAGAVMCSYNQINNSYGCQNSYTLNKLLKAELGFQGFVMSDWAAHHAGVSGALAGLDMSMPGDVDCDSGTSYWGTNLTISVLNGTVPQWRVDDMAVRIMAAYYKVGRDRLWTPPNFSSWTRDEYGFKYYYVSEGPYEKVNQFVNVQRNHSELIRRIGADSTVLLKNDGALPLTGKERLVALIGEDAGSNPYGANGCSDRGCDNGTLAMGWGSGTANFPYLVTPEQAISNEVLKNKNGVFTATDNWAIDQIEALAKTASVSLVFVNADSGEGYINVDGNLGDRRNLTLWRNGDNVIKAAASNCNNTIVIIHSVGPVLVNEWYDNPNVTAILWGGLPGQESGNSLADVLYGRVNPGAKSPFTWGKTREAYQDYLYTEPNNGNGAPQEDFVEGVFIDYRGFDKRNETPIYEFGYGLSYTTFNYSNLQVEVLSAPAYEPASGETEAAPTFGEVGNASDYLYPDGLQRITKFIYPWLNSTDLEASSGDASYGQDASDYLPEGATDGSAQPILPAGGGAGGNPRLYDELIRVSVTIKNTGKVAGDEVPQLYVSLGGPNEPKIVLRQFERITLQPSEETQWSTTLTRRDLANWNVETQDWEITSYPKMVFVGSSSRKLPLRASLPTVH

SEQ ID NO: 45589 - protein, 839 aa, unidentified
LAYSPPYYPSPWANGQGDWAEAYQRAVDIVSQMTLAEKVNLTTGTGWELELCVGQTGGVPRLGIPGMCAQDSPLGVRDSDYNSAFPAGVNVAATWDKNLAYLRGQAMGQEFSDKGADIQLGPAAGPLGRSPDGGRNWEGFSPDPALSGVLFAETIKGIQDAGVVATAKHYIAYEQEHFRQAPEAQGYGFNITESGSANLDDKTMHELYLWPFADAIRAGAGAVMCSYNQINNSYGCQNSYTLNKLLKAELGFQGFVMSDWAAHHAGVSGALAGLDMSMPGDVDGDSGTSYWGTNLTISVLNGTVPQWRVDDMAVRIMAAYYKVGRDRLWTPPNFSSWTRDEYGFKYYYVSEGPYEKVNQFVNVQRNHSELIRRIGADSTVLLKNDGALPLTGKERLVALIGEDAGSNPYGANGCSDRGCDNGTLAMGWGSGTANFPYLVTPEQAISNEVLKNKNGVFTATDNWAIDQIEALAKTASVSLVFVNADSGEGYINVDGNLGDRRNLTLWRNGDNVIKAAASNCNNTIVIIHSVGPVLVNEWYDNPNVTAILWGGLPGQESGNSLADVLYGRVNPGAKSPFTWGKTREAYQDYLYTEPNNGNGAPQEDFVEGVFIDYRGFDKRNETPIYEFGYGLSYTTFNYSNLQVEVLSAPAYEPASGETEAAPTFGEVGNASDYLYPDGLQRITKFIYPWLNSTDLEASSGDASYGQDASDYLPEGATDGSAQPILPAGGGAGGNPRLYDELIRVSVTIKNTGKVAGDEVPQLYVSLGGPNEPKIVLRQFERITLQPSEETQWSTTLTRRDLANWNVETQDWEITSYPKMVFVGSSSRKLPLRASLPTVH

SEQ ID NO: 45590 - protein, 839 aa, unidentified
LAYSPPYYPSPWANGQGDWAEAYQRAVDIVSQMTLAEKVNLTTGTGWELELCVGQTGGVPRLGIPGMCAQDSPLGVRDSDYNSAFPAGVNVAATWDKNLAYLRGQAMGQEFSDKGADIQLGPAAGPLGRSPDGGRNWEGFSPDPALSGVLFAETIKGIQDAGVVATAKHYIAYEQEHFRQAPEAQGYGFNITESGSANLDDKTMHELYLWPFADAIRAGAGAVMCSYNQINNSYGCQNSYTLNKLLKAELGFQGFVMSDWAAHHAGVSGALAGLDMSMPGDVDVDSGTSYWGTNLTISVLNGTVPQWRVDDMAVRIMAAYYKVGRDRLWTPPNFSSWTRDEYGFKYYYVSEGPYEKVNQFVNVQRNHSELIRRIGADSTVLLKNDGALPLTGKERLVALIGEDAGSNPYGANGCSDRGCDNGTLAMGWGSGTANFPYLVTPEQAISNEVLKNKNGVFTATDNWAIDQIEALAKTASVSLVFVNADSGEGYINVDGNLGDRRNLTLWRNGDNVIKAAASNCNNTIVIIHSVGPVLVNEWYDNPNVTAILWGGLPGQESGNSLADVLYGRVNPGAKSPFTWGKTREAYQDYLYTEPNNGNGAPQEDFVEGVFIDYRGFDKRNETPIYEFGYGLSYTTFNYSNLQVEVLSAPAYEPASGETEAAPTFGEVGNASDYLYPDGLQRITKFIYPWLNSTDLEASSGDASYGQDASDYLPEGATDGSAQPILPAGGGAGGNPRLYDELIRVSVTIKNTGKVAGDEVPQLYVSLGGPNEPKIVLRQFERITLQPSEETQWSTTLTRRDLANWNVETQDWEITSYPKMVFVGSSSRKLPLRASLPTVH

SEQ ID NO: 45591 - protein, 839 aa, unidentified
LAYSPPYYPSPWANGQGDWAEAYQRAVDIVSQMTLAEKVNLTTGTGWELELCVGQTGGVPRLGIPGMCAQDSPLGVRDSDYNSAFPAGVNVAATWDKNLAYLRGQAMGQEFSDKGADIQLGPAAGPLGRSPDGGRNWEGFSPDPALSGVLFAETIKGIQDAGVVATAKHYIAYEQEHFRQAPEAQGYGFNITESGSANLDDKTMHELYLWPFADAIRAGAGAVMCSYNQINNSYGCQNSYTLNKLLKAELGFQGFVMSDWAAHHAGVSGALAGLDMSMPGDADYDSGTSYWGTNLTISVLNGTVPQWRVDDMAVRIMAAYYKVGRDRLWTPPNFSSWTRDEYGFKYYYVSEGPYEKVNQFVNVQRNHSELIRRIGADSTVLLKNDGALPLTGKERLVALIGEDAGSNPYGANGCSDRGCDNGTLAMGWGSGTANFPYLVTPEQAISNEVLKNKNGVFTATDNWAIDQIEALAKTASVSLVFVNADSGEGYINVDGNLGDRRNLTLWRNGDNVIKAAASNCNNTIVIIHSVGPVLVNEWYDNPNVTAILWGGLPGQESGNSLADVLYGRVNPGAKSPFTWGKTREAYQDYLYTEPNNGNGAPQEDFVEGVFIDYRGFDKRNETPIYEFGYGLSYTTFNYSNLQVEVLSAPAYEPASGETEAAPTFGEVGNASDYLYPDGLQRITKFIYPWLNSTDLEASSGDASYGQDASDYLPEGATDGSAQPILPAGGGAGGNPRLYDELIRVSVTIKNTGKVAGDEVPQLYVSLGGPNEPKIVLRQFERITLQPSEETQWSTTLTRRDLANWNVETQDWEITSYPKMVFVGSSSRKLPLRASLPTVH

SEQ ID NO: 45592 - protein, 839 aa, Aspergillus niger
LAYSPPYYPSPWANGQGDWAEAYQRAVDIVSQMTLAEKVNLTTGTGWELELCVGQTGGVPRLGIPGMCAQDSPLGVRDSDYNSAFPAGVNVAATWDKNLAYLRGQAMGQEFSDKGADIQLGPAAGPLGRSPDGGRNWEGFSPDPALSGVLFAETIKGIQDAGVVATAKHYIAYEQEHFRQAPEAQGYGFNITESGSANLDDKTMHELYLWPFADAIRAGAGAVMCSYNQINNSYGCQNSYTLNKLLKAELGFQGFVMSDWAAHHAGVSGALAGLDMSMPGDVDYDSGTSYWGTNLTISVLNGTVPQWRVDDMAVRIMAAYYKVGRDRLWTPPNFSSWTRDEYGFKYYYVSEGPYEKVNQFVNVQRNHSELIRRIGADSTVLLKNDGALPLTGKERLVALIGEDAGSNPYGANGCSDRGCDNGTLAMGWGSGTANFPYLVTPEQAISNEVLKNKNGVFTATDNWAIDQIEALAKTASVSLVFVNADSGEGYINVDGNLGDRRNLTLWRNGDNVIKAAASNCNNTIVIIHSVGPVLVNEWYDNPNVTAILWGGLPGQESGNSLADVLYGRVNPGAKSPFTWGKTREAYQDYLYTEPNNGNGAPQEDFVEGVFIDYRGFDKRNETPIYEFGYGLSYTTFNYSNLQVEVLSAPAYEPASGETEAAPTFGEVGNASDYLYPDGLQRITKFIYPWLNSTDLEASSGDASYGQDASDYLPEGATDGSAQPILPAGGGAGGNPRLYDELIRVSVTIKNTGKVAGDEVPQLYVSLGGPNEPKIVLRQFERITLQPSEETQWSTTLTRRDLANWNVETQDWEITSYPKMVFVGSSSRKLPLRASLPTVH

SEQ ID NO: 45593 - protein, 839 aa, unidentified
LAYSPPYYPSPWANGQGDWAEAYQRAVDIVSQMTLAEKVNLTTGTGWELELCVGQTGGVPRLGIPGMCAQDSPLGVRDSDYNSAFPAGVNVAATWDKNLAYLRGQAMGQEFSDKGADILLGPAAGPLGRSPDGGRNWEGFSPDPALSGVLFAETIKGIQDAGVVATAKHYIAYEQEHFRQAPEAQGYGFNITESGSANLDDKTMHELYLWPFADAIRAGAGAVMCSYNQINNSYGCQNSYTLNKLLKAELGFQGFVMSDWAAHHAGVSGALAGLDMSMPGDVDYDSGTSYWGTNLTISVLNGTVPQWRVDDMAVRIMAAYYKVGRDRLWTPPNFSSWTRDEYGFKYYYVSEGPYEKVNQFVNVQRNHSELIRRIGADSTVLLKNDGALPLTGKERLVALIGEDAGSNPYGANGCSDRGCDNGTLAMGWGSGTANFPYLVTPEQAISNEVLKNKNGVFTATDNWAIDQIEALAKTASVSLVFVNADSGEGYINVDGNLGDRRNLTLWRNGDNVIKAAASNCNNTIVIIHSVGPVLVNEWYDNPNVTAILWGGLPGQESGNSLADVLYGRVNPGAKSPFTWGKTREAYQDYLYTEPNNGNGAPQEDFVEGVFIDYRGFDMRNETPIYEFGYGLSYTTFNYSNLQVEVLSAPAYEPASGETEAAPTFGEVGNASDYLYPDGLQRITKFIYPWLNSTDLEASSGDASYGQDASDYLPEGATDGSAQPILPAGGGAGGNPRLYDELIRVSVTIKNTGKVAGDEVPQLYVSLGGPNEPKIVLRQFERITLQPSEETQWSTTLTRRDLANWNVETQDWEITSYPKMVFVGSSSRKLPLRASLPTVH

SEQ ID NO: 45594 - protein, 850 aa, Aspergillus oryzae
VAALPVLALAKDDLAYSPPFYPSPWADGQGEWAEVYKRAVDIVSQMTLTEKVNLTTGTGWQLERCVGQTGSVPRLNIPSLCLQDSPLGIRFSDYNSAFPAGVNVAATWDKTLAYLRGQAMGEEFSDKGIDVQLGPAAGPLGAHPDGGRNWESFSPDPALTGVLFAETIKGIQDAGVIATAKHYIMNEQEHFRQQPEAAGYGFNVSDSLSSNVDDKTMHELYLWPFADAVRAGVGAVMCSYNQINNSYGCENSETLNKLLKAELGFQGFVMSDWTAQHSGVGAALAGLDMSMPGDVTFDSGTSFWGANLTVGVLNGTIPQWRVDDMAVRIMAAYYKVGRDTKYTPPNFSSWTRDEYGFAHNHVSEGAYERVNEFVDVQRDHADLIRRIGAQSTVLLKNKGALPLSRKEKLVALLGEDAGSNSWGANGCDDRGCDNGTLAMAWGSGTANFPYLVTPEQAIQNEVLQGRGNVFAVTDSWALDKIAAAARQASVSLVFVNSDSGEGYLSVDGNEGDRNNITLWKNGDNVVKTAANNCNNTVVIIHSVGPVLIDEWYDHPNVTGILWAGLPGQESGNSIADVLYGRVNPGAKSPFTWGKTRESYGSPLVKDANNGNGAPQSDFTQGVFIDYRHFDKFNETPIYEFGYGLSYTTFELSDLHVQPLNASRYTPTSGMTEAAKNFGEIGDASEYVYPEGLERIHEFIYPWINSTDLKASSDDSNYGWEDSKYIPEGATDGSAQPRLPASGGAGGNPGLYEDLFRVSVKVKNTGNVAGDEVPQLYVSLGGPNEPKVVLRKFERIHLAPSQEAVWTTTLTRRDLANWDVSAQDWTVTPYPKTIYVGNSSRKLPLQASLPK

SEQ ID NO: 45595 - protein, 859 aa, Aspergillus sojae
MKLGWIEVAALVAASVVSAKDDLAYSPPFYPSPWADGQGEWAEVYKRAVDIVSQMTLTEKVNLTTGTGWQLERCVGQTGSVPRLNIPSLCLQDSPLGIRFSDYNSAFPAGVNVAATWDKTLAYLRGQAMGEEFSDKGIDVQLGPAAGPLGAHPDGGRNWEGFSPDPALTGVLFAETIKGIQDAGVIATAKHYIMNEQEHFRQQPEAAGYGFNVSDSLSSNVDDKTIHELYLWPFADAVRAGVGAVMCSYNQINNSYGCENSETLNKLLKAELGFQGFVMSDWTAHHSGVGAALAGMDMSMPGDVTFDSGTSFWGANLTVGVLNGTIPQWRVDDMAVRIMAAYYKVGRDTKYTPPNFSSWTRDEYGFAHNHVSEGAYERVNEFVDVQRDHADLIRRIGAQSTVLLKNKGALPLSRKEKLVALLGEDAGSNSWGANGCDDRGCDNGTLAMAWGSGTANFPYLVTPEQAIQNEVLQGRGNVFAVTDSWALDKIAAAARQASVSLVFVNSDSGEGYLSVDGNEGDRNNITLWKNGDNVVKTAANNCNNTVVIIHSVGPVLINEWYDHPNVTGILWAGLPGQESGNSIADVLYGRVNPGAKSPFTWGKTRDSYGSPLVKDANNGNGAPQSDFTQGVFIDYRHFDKFNETPIYEFGYGLSYTTFELSDLHVQPLNASQYTPTSGMTEAAKNFGEIGDASEYVYPEGLERIHEFIYPWINSTDLKASSDDSNYGWEDSEYIPEGATDGSAQPRLPASGGAGGNPGLYEDLFRVSVKVKNTGNVAGDEVPQLYVSLGGPNEPKVVLRKFERIHLAPSQEVVWTTTLTRRDLANWDVSAQDWAVTPYPKTIYVGNSSRKLPLQVSLPK

SEQ ID NO: 45596 - protein, 840 aa, Aspergillus niger SH-2
ELAYSPPYYPSPWANGQGDWAEAYQRAVDIVSQMTLAEKVNLTTGTGWELELCVGQTGGVPRLGIPGMCAQDSPLGVRDSDYNSAFPAGVNVAATWDKNLAYLRGQAMGQEFSDKGADIQLGPAAGPLGRSPDGGRNWEGFSPDPALSGVLFAETIKGIQDAGVVATAKHYIAYEQEHFRQAPEAQGYGFNITESGSANLDDKTMHELYLWPFADAIRAGAGAVMCSYNQINNSYGCQNSYTLNKLLKAELGFQGFVMSDWAAHHAGVSGALAGLDMSMPGDVDFDSGTSYWGTNLTISVLNGTVPQWRVDDMAVRIMAAYYKVGRDRLWTPPNFSSWTRDEYGFKYYYVSEGPYEKVNQFVNVQRNHSELIRRIGADSTVLLKNDGALPLTGKERLVALIGEDAGSNPYGANGCSDRGCDNGTLAMGWGSGTANFPYLVTPEQAISNEVLKNKNGVFTATDNWAIDQIEALAKTASVSLVFVNADSGEGYINVDGNLGDRRNLTLWRNGDNVIKAAASNCNNTIVIIHSVGPVLVNEWYDNPNVTAILWGGLPGQESGNSLADVLYGRVNPGAKSPFTWGKTREAYQDYLYTEPNNGNGAPQEDFVEGVFIDYRGFDKRNETPIYEFGYGLSYTTFNYSNLQVEVLSAPAYEPASGETEAAPTFGEVGNASDYLYPDGLQRITKFIYPWLNSTDLEASSGDASYGQDASDYLPEGATDGSAQPILPAGGGAGGNPRLYDELIRVSVTIKNTGKVAGDEVPQLYVSLGGPNEPKIVLRQFERITLQPSKETQWSTTLTRRDLANWNVETQDWEITSYPKMVFAGSSSRKLPLRASLPTVH

SEQ ID NO: 45597 - protein, 839 aa, unidentified
LAYSPPYYPSPWANGQGDWAEAYQRAVDIVSQMTLAEKVNLTTGTGWELELCVGQTGGVPRLGIPGMCAQDSPLGVRDSDYNSAFPAGVNVAATWDKNLAYLRGQAMGQEFSDKGADIQLGPAAGPLGRSPDGGRNWEGFSPDPALSGVLFAETIKGIQDAGVVATAKHYIAYEQEHFRQAPEAQGYGFNITESGSANLDDKTMHELYLWPFADAIRAGAGAVMCSYNQINNSYGCQNSYTLNKLLKAELGFQGFVMSDWAAHHAGVSGALAGLDMSMPGDVDCDSGTSYWGTNLTISVLNGTVPQWRVDDMAVRIMAAYYKVGRDRLWTPPNFSSWTRDEYGFKYYYVSEGPYEKVNQFVNVQRNHSELIRRIGADSTVLLKNDGALPLTGKERLVALIGEDAGSNPYGANGCSDRGCDNGTLAMGWGSGTANFPYLVTPEQAISNEVLKNKNGVFTATDNWAIDQIEALAKTASVSLVFVNADSGEGYINVDGNLGDRRNLTLWRNGDNVIKAAASNCNNTIVIIHSVGPVLVNEWYDNPNVTAILWGGLPGQESGNSLADVLYGRVNPGAKSPFTWGKTREAYQDYLYTEPNNGNGAPQEDFVEGVFIDYRGFDKRNVTPIYEFGYGLSYTTFNYSNLQVEVLSAPAYEPASGETEAAPTFGEVGNASDYLYPDGLQRITKFIYPWLNSTDLEASSGDASYGQDASDYLPEGATDGSAQPILPAGGGAGGNPRLYDELIRVSVTIKNTGKVAGDEVPQLYVSLGGPNEPKIVLRQFERITLQPSEETQWSTTLTRRDLANWNVETQDWEITSYPKMVFVGSSSRKLPLRASLPTVH

SEQ ID NO: 45598 - protein, 840 aa, Unidentified
ELAYSPPYYPSPWANGQGDWAQAYQRAVDIVSQMTLAEKVNLTTGTGWELELCVGQTGGVPRLGVPGMCLQDSPLGVRDSDYNSAFPSGMNVAATWDKNLAYLRGKAMGQEFSDKGADIQLGPAAGPLGRSPDGGRNWEGFSPDPALSGVLFAETIKGIQDAGVVATAKHYIAYEQEHFRQAPEAQGYGFNISESGSANLDDKTMHELYLWPFADAIRAGAGAVMCSYNQINNSYGCQNSYTLNKLLKAELGFQGFVMSDWAAHHAGVSGALAGLDMSMPGDVDYDSGTSYWGTNLTVSVLNGTVPQWRVDDMAVRIMAAYYKVGRDRLWTPPNFSSWTRDEYGYKYYYVSEGPYEKVNHYVNVQRNHSELIRRIGADSTVLLKNDGALPLTGKERLVALIGEDAGSNPYGANGCSDRGCDNGTLAMGWGSGTANFPYLVTPEQAISNEVLKNKNGVFTATDNWAIDQIEALAKTASVSLVFVNADSGEGYINVDGNLGDRKNLTLWRNGDNVIKAAASNCNNTIVIIHSVGPVLVNEWYDNPNVTAILWGGLPGQESGNSLADVLYGRVNPGAKSPFTWGKTREAYQDYLVTEPNNGNGAPQEDFVEGVFIDYRGFDKRNETPIYEFGYGLSYTTFNYSNLEVQVLSAPAYEPASGETEAAPTFGEVGNASNYLYPDGLQKITKFIYPWLNSTDLEASSGDASYGQDSSDYLPEGATDGSAQPILPAGGGPGGNPRLYDELIRVSVTIKNTGKVAGDEVPQLYVSLGGPNEPKIVLRQFERITLQPSEETKWSTTLTRRDLANWNVEKQDWEITSYPKMVFVGSSSRKPPLRASLPTVH

SEQ ID NO: 45599 - protein, 840 aa, Aspergillus niger
ELAYSPPYYPSPWANGQGDWAEAYQRAVDIVSQMTLAEKVNLTTGTGWELELCVGQTGGVPRLGIPGMCAQDSPLGVRDSDYNSAFPAGVNVAATWDKNLAYLRGQAMGQEFSDKGADIQLGPAAGPLGRSPDGGRNWEGFSPDPALSGVLFAETIKGIQDAGVVATAKHYIAYEQEHFRQAPEAQGYGFNITESGSANLDDKTMHELYLWPFADAIRAGAGAVMCSYNQINNSYGCQNSYTLNKLLKAELGFQGFVMSDWAAHHAGVSGALAGLDMSMPGDVDYDSGTSYWGTNLTISVLNGTVPQWRVDDMAVRIMAAYYKVGRDRLWTPPNFSSWTRDEYGFKYYYVSEGPYEKVNQFVNVQRNHSELIRRIGADSTVLLKNDGALPLTGKERLVALIGEDAGSNPYGANGCSDRGCDNGTLAMGWGSGTANFPYLVTPEQAISNEVLKNKNGVFTATDNWAIDQIEALAKTASVSLVFVNADSGEGYINVDGNLGDRRNLTLWRNGDNVIKAAASNCNNTIVIIHSVGPVLVNEWYDNPNVTAILWGGLPGQESGNSLADVLYGRVNPGAKSPFTWGKTREAYQDYLYTEPNNGNGAPQEDFVEGVFIDYRGFDKRNETPIYEFGYGLSYTTFNYSNLQVEVLSAPAYEPASGETEAAPTFGEVGNASDYLYPDGLQRITKFIYPWLNSTDLEASSGDASYGQDASDYLPEGATDGSAQPILPAGGGAGGNPRLYDELIRVSVTIKNTGKVAGDEVPQLYVSLGGPNEPKIVLRQFERITLQPSKETQWSTTLTRRDLANWNVETQDWEITSYPKMVFAGSSSRKLPLRASLPTVH

SEQ ID NO: 45600 - protein, 840 aa, Unidentified
ELAYSPPYYPSPWANGQGDWAQAYQRAVDIVSQMTLAEKVNLTTGTGWELELCVGQTGGVPRLGVPGMCLQDSPLGVRDSDYNSAFPSGMNVAATWDKNLAYLRGKAMGQEFSDKGADIQLGPAAGPLGRSPDGGRNWEGFSPDPALSGVLFAETIKGIQDAGVVATAKHYIAYEQEHFRQAPEAQGYGFNISESGSANLDDKTMHELYLWPFADAIRAGAGAVMCSYNQINNSYGCQNSYTLNKLLKAELGFQGFVMSDWAAHHAGVSGALAGLDMSMPGDVDYDSGTSYWGTNLTVSVLNGTVPQWRVDDMAVRIMAAYYKVGRDRLWTPPNFSSWTRDEYGYKYYYVSEGPYEKVNHYVNVQRNHSELIRRIGADSTVLLKNDGALPLTGKERLVALIGEDAGSNPYGANGCSDRGCDNGTLAMGWGSGTANFPYLVTPEQAISNEVLKNKNGVFTATDNWAIDQIEALAKTASVSLVFVNADSGEGYINVDGNLGDRRNLTLWRNGDNVIKAAASNCNNTIVIIHSVGPVLVNEWYDNPNVTAILWGGLPGQESGNSLADVLYGRVNPGAKSPFTWGKTREAYQDYLVTEPNNGNGAPQEDFVEGVFIDYRGFDKRNETPIYEFGYGLSYTTFNYSNLEVQVLSAPAYEPASGETEAAPTFGEVGNASNYLYPDGLQKITKFIYPWLNSTDLEASSGDASYGQDSSDYLPEGATDGSAQPILPAGGGPGGNPRLYDELIRVSVTIKNTGKVAGDEVPQLYVSLGGPNEPKIVLRQFERITLQPSEETKWSTTLTRRDLANWNVEKQDWEITSYPKMVFVGSSSRKLPLRASLPTVH

SEQ ID NO: 45601 - protein, 840 aa, Aspergillus niger SH-2
ELAYSPPYYPSPWANGQGDWAEAYQRAVDIVSQMTLAEKVNLTTGTGWELELCVGQTGGVPRLGIPGMCAQDSPLGVRDSDYNSAFPAGVNVAATWDKNLAYLRGQAMGQEFSDKGADIQLGPAAGPLGRSPDGGRNWEGFSPDPALSGVLFAETIKGIQDAGVVATAKHYIAYEQEHFRQAPEAQGYGFNITESGSANLDDKTMHELYLWPFADAIRAGAGAVMCSYNQINNSYGCQNSYTLNKLLKAELGFQGFVMSDWAAHHAGVSGALAGLDMSMPGDVDYDSGTSYWGTNLTISVLNGTVPQWRVDDMAVRIMAAYYKVGRDRLWTPPNFSSWTRDEYGFKYYYVSEGPYEKVNQFVNVQRNHSELIRRIGADSTVLLKNDGALPLTGKERLVALIGEDAGSNPYGANGCSDRGCDNGTLAMGWGSGTANFPYLVTPEQAISNEVLKNKNGVFTATDNWAIDQIEALAKTASVSLVFVNADSGEGYINVDGNLGDRRNLTLWRNGDNVIKAAASNCNNTIVIIHSVGPVLVNEWYDNPNVTAILWGGLPGQESGNSLADVLYGRVNPGAKSPFTWGKTREAYQDYLYTEPNNGNGAPQEDFVEGVFIDYRGFDKRNETPIYEFGYGLSYTTFEYSNLQVEVLSAPAYEPASGETEAAPTFGEVGNASDYLYPDGLQRITKFIYPWLNSTDLEASSGDASYGQDASDYLPEGATDGSAQPILPAGGGAGGNPRLYDELIRVSVTIKNTGKVAGDEVPQLYVSLGGPNEPKIVLRQFERITLQPSKETQWSTTLTRRDLANWNVETQDWEITSYPKMVFAGSSSRKLPLRASLPTVH

SEQ ID NO: 45602 - protein, 839 aa, unidentified
LAYSPPYYPSPWANGQGDWAEAYQRAVDIVSQMTLAEKVNLTTGTGWELELCVGQTGGVPRLGIPGMCAQDSPLGVRDSDYNSAFPAGVNVAATWDKNLAYLRGQAMGQEFSDKGADIQLGPAAGPLGRSPDGGRNWEGFSPDPALSGVLFAETIKGIQDAGVVATAKHYIAYEQEHFRQAPEAQGYGFNVTESGSANLDDKTMHELYLWPFADAIRAGAGAVMCSYNQINNSYGCQNSYTLNKLLKAELGFQGFVMSDWAAHHAGVSGALAGLDMSMPGDVDYDSGTSYWGTNLTISVLNGTVPQWRVDDMAVRIMAAYYKVGRDRLWTPPNFSSWTRDEYGFKYYYVSEGPYEKVNQFVNVQRNHSELIRRIGADSTVLLKNDGALPLTGKERLVALIGEDAGSNPYGANGCSDRGCDNGTLAMGWGSGTANFPYLVTPEQAISNEVLKNKNGVFTATDNWAIDQIEALAKTASVSLVFVNADSGEGYINVDGNLGDRRNLTLWRNGDNVIKAAASNCNNTIVIIHSVGPVLVNEWYDNPNVTAILWGGLPGQESGNSLADVLYGRVNPGAKSPFTWGRTREAYQDYLYTEPNNGNGAPQEDFVEGVFIDYRGFDKRNETPIYEFGYGLSYTTFNYSNLQVEVLSAPAYEPASGETEAAPTFGEVGNASDYLYPDGLQRITKFIYPWLNSTDLEASSGDASYGQDASDYLPEGATDGSAQPILPAGGGAGGNPRLYDELIRVSVTIKNTGKVAGDEVPQLYVSLGGPNEPKIVLRQFERITLQPSEETQWSTTLTRRDLANWNVETQDWEITSYPKMVFVGSSSRKLPLRASLPTVH

SEQ ID NO: 45603 - protein, 860 aa, unidentified
MRFTLIEAVALTAVSLASADELAYSPPYYPSPWANGQGDWAEAYQRAVDIVSQMTLAEKVNLTTGTGWELELCVGQTGGVPRLGIPGMCAQDSPLGVRDSDYNSAFPAGVNVAATWDKNLAYLRGQAMGQEFSDKGADILLGPAAGPLGRSPDGGRNWEGFSPDPALSGVLFAETIKGIQDAGVVATAKHYIAYEQEHFRQAPEAQGYGFNITESGSANLDDKTMHELYLWPFADAIRAGAGAVMCSYNQINNSYGCQNSYTLNKLLKAELGFQGFVMSDWAAHHAGVSGALAGLDMSMPGDVDCDSGTSYWGTNLTISVLNGTVPQWRVDDMAVRIMAAYYKVGRDRLWTPPNFSSWTRDEYGFKYYYVSEGPYEKVNQFVNVQRNHSELIRRIGADSTVLLKNDGALPLTGKERLVALIGEDAGSNPYGANGCSDRGCDNGTLAMGWGSGTANFPYLVTPEQAISNEVLKNKNGVFTVTDNWAIDQIEALAKTASVSLVFVNADSGEGYINVDGNLGDRRNLTLWRNGDNVIKAAASNCNNTIVIIHSVGPVLVNEWYDNPNVTAILWGGLPGQESGNSLADVLYGRVNPGAKSPFTWGKTREAYQDYLYTEPNNGNGAPQEDFVEGVFIDYRGFDKRNETPIYEFGYGLSYTTFNYSNLQVEVLSAPAYEPASGETEAAPTFGEVGNASDYLYPDGLQRITKFIYPWLNSTDLEASSGDASYGQDASDYLPEGATDGSAQPILPAGGGAGGNPRLYDELIRVSVTIKNTGKVAGDEVPQLYVSLGGPNEPKIVLRQFERITLQPSEETQWSTTLTRRDLANWNVETQDWEITSYPKMVFVGSSSRKLPLRASLPTVH

SEQ ID NO: 45604 - protein, 840 aa, Aspergillus niger
ELAYSPPYYPSPWANGQGDWAQAYQRAVDIVSQMTLDEKVNLTTGTGWELELCVGQTGGVPRLGVPGMCLQDSPLGVRDSDYNSAFPAGMNVAATWDKNLAYLRGKAMGQEFSDKGADIQLGPAAGPLGRSPDGGRNWEGFSPDPALSGVLFAETIKGIQDAGVVATAKHYIAYEQEHFRQAPEAQGFGFNISESGSANLDDKTMHELYLWPFADAIRAGAGAVMCSYNQINNSYGCQNSYTLNKLLKAELGFQGFVMSDWAAHHAGVSGALAGLDMSMPGDVDYDSGTSYWGTNLTISVLNGTVPQWRVDDMAVRIMAAYYKVGRDRLWTPPNFSSWTRDEYGYKYYYVSEGPYEKVNQYVNVQRNHSELIRRIGADSTVLLKNDGALPLTGKERLVALIGEDAGSNPYGANGCSDRGCDNGTLAMGWGSGTANFPYLVTPEQAISNEVLKHKNGVFTATDNWAIDQIEALAKTASVSLVFVNADSGEGYINVDGNLGDRRNLTLWRNGDNVIKAAASNCNNTIVVIHSVGPVLVNEWYDNPNVTAILWGGLPGQESGNSLADVLYGRVNPGAKSPFTWGKTREAYQDYLVTEPNNGNGAPQEDFVEGVFIDYRGFDKRNETPIYEFGYGLSYTTFNYSNLEVQVLSAPAYEPASGETEAAPTFGEVGNASDYLYPSGLLRITKFIYPWLNGTDLEASSGDASYGQDSSDYLPEGATDGSAQPILPAGGGPGGNPRLYDELIRVSVTIKNTGKVAGDEVPQLYVSLGGPNEPKIVLRQFERITLQPSEETKWSTTLTRRDLANWNVEKQDWEITSYPKMVFVGSSSRKLPLRASLPTVH

SEQ ID NO: 45605 - protein, 840 aa, Aspergillus niger
ELAYSPPYYPSPWANGQGDWAQAYQRAVDIVSQMTLDEKVNLTTGTGWELELCVGQTGGVPRLGVPGMCLQDSPLGVRDSDYNSAFPAGMNVAATWDKNLAYLRGKAMGQEFSDKGADIQLGPAAGPLGRSPDGGRNWEGFSPDPALSGVLFAETIKGIQDAGVVATAKHYIAYEQEHFRQAPEAQGFGFNISESGSANLDDKTMHELYLWPFADAIRAGAGAVMCSYNQINNSYGCQNSYTLNKLLKAELGFQGFVMSDWAAHHAGVSGALAGLDMSMPGDVDYDSGTSYWGTNLTISVLNGTVPQWRVDDMAVRIMAAYYKVGRDRLWTPPNFSSWTRDEYGYKYYYVSEGPYEKVNQYVNVQRNHSELIRRIGADSTVLLKNDGALPLTGKERLVALIGEDAGSNPYGANGCSDRGCDNGTLAMGWGSGTANFPYLVTPEQAISNEVLKHKNGVFTATDNWAIDQIEALAKTASVSLVFVNADSGEGYINVDGNLGDRRNLTLWRNGDNVIKAAASNCNNTIVVIHSVGPVLVNEWYDNPNVTAILWGGLPGQESGNSLADVLYGRVNPGAKSPFTWGKTREAYQDYLVTEPNNGNGAPQEDFVEGVFIDYRGFDKRNETPIYEFGYGLSYTTFNYSNLEVQVLSAPAYEPASGETEAAPTFGEVGNASDYLYPSGLQRITKFIYPWLNGTDLEASSGDASYGQDSSDYLPEGATDGSAQPILPAGGGPGGNPRLYDELIRVSVTIKNTGKVAGDEVPQLYVSLGGPNEPKIVLRQFERITLQPSEETKWSTTLTRRDLANWNVEKQDWEITSYPKMVFVGSSSRKLPLRASLPTVH

SEQ ID NO: 45606 - protein, 840 aa, Aspergillus niger
ELAYSPPYYPSPWANGQGDWAEAYQRAVDIVSQMTLAEKVNLTTGTGWELELCVGQTGGVPRLGIPGMCAQDSPLGVRDSDYNSAFPAGVNVAATWDKNLAYLRGQAMGQEFSDKGADIQLGPAAGPLGRSPDGGRNWEGFSPDPALSGVLFAETIKGIQDAGVVATAKHYIAYEQEHFRQAPEAQGYGFNITESGSANLDDKTMHELYLWPFADAIRAGAGAVMCSYNQINNSYGCQSSYTLNKLLKAELGFQGFVMSDWAAHHAGVSGALAGLDMSMPGDVDYDSGTSYWGTNLTISVLNGTVPQWRVDDMAVRIMAAYYKVGRDRLWTPPNFSSWTRDEYGFKYYYVSEGPYEKVNQFVNVQRNHSELIRRIGADSTVLLKNDGALPLTGKERLVALIGEDAGSNPYGANGCSDRGCDNGTLAMGWGSGTANFPYLVTPEQAISNEVLKNKNGVFTATDNWAIDQIEALAKTASVSLVFVNADSGEGYIDVDGNLGDRRNLTLWRNGDNVIKAAASNCNNTIVIIHSVGPVLVNEWYDNPNVTAILWGGLPGQESGNSLADVLYGRVNPGAKSPFTWGKTREAYQDYLYTEPNNGNGAPQEDFVEGVFIDYRGFNKRNETPIYEFGYGLSYTTFNYSNLQVEVLSAPAYEPASGETEAAPTFGEVGNASDYLYPDGLQRITKFIYPWLNSTDLEASSGDASYGQDASDYLPEGATDGSAQPILPAGGGAGGNPRLYDELIRVTVTIKNTGKVAGDEVPQLYVSLGGPNEPKIVLRQFERITLQPSEETQWSTTLTRRDLANWNVETQDWEITSYPKMVFVGSSSRKLPLRASLPTVH

SEQ ID NO: 45607 - protein, 860 aa, unidentified
MRFTLIEAVALTAVSLASADELAYSPPYYPSPWANGQGDWAEAYQRAVDIVSQMTLAEKVNLTTGTGWELELCVGQTGGVPRLGIPGMCAQDSPLGVRDSDYNSAFPAGVNVAATWDKNLAYLRGQAMGQEFSDKGADIQLGPAAGPLGRSPDGGRNWEGFSPDPALSGVLFAETIKGIQDAGVVATAKHYIAYEQEHFRQAPEAQGYGFNITESGSANLDDKTMHELYLWPFADAIRAGAGAVMCSYNQINNSYGCQNSYTLNKLLKAELGFQGFVMSDWAAHHAGVSGALAGLDMSMPGDVDYDSGTSYWGTNLTISVLNGTVPQWRVDDMAVRIMAAYYKVGRDRLWTPPNFSSWTRDEYGFKYYYVSEGPYEKVNQFVNVQRNHSELIRRIGADSTVLLKNDGALPLTGKERLVALIGEDAGSNPYGANGCSDRGCDNGTLAMGWGSGTANFPYLVTPEQAISNEVLKNKNGVFTATDNWAIDQIEALAKTASVSLVFVNADSGEGYINVDGNLGDRRNLTLWRNGDNVIKAAASNCNNTIVIIHSVGPVLVDEWYDNPNVTAILWGGLPGQESGNSLADVLYGRVNPGAKSPFTWGKTREAYQDYLYTEPNNGNGAPQEDFVEGVFIDYRGFDKRNETPIYEFGYGLSYTTFNYSNLQVEVLSAPAYEPASGETEAAPTFGEVGNASDYLYPDGLQRITKFIYPWLNSTDLEASSGDASYGQDASDYLPEGATDGSAQPILPAGGGAGGNPRLYDELIRVSVTIKNTGKVAGDEVPQLYVSLGGPNEPKIVLRQFERITLQPSEETQWSTTLTRRDLANWNVETQDWEITSYPKMVFVGSSSRKLPLRASLPTVH

SEQ ID NO: 45608 - protein, 860 aa, unidentified
MRFTLIEAVALTAVSLASADELAYSPPYYPSPWANGQGDWAEAYQRAVDIVSQMTLAEKVNLTTGTGWELELCVGQTGGVPRLGIPGMCAQDSPLGVRDSDYNSAFPAGVNVAATWDKNLAYLRGQAMGQEFSDKGADIQLGPAAGPLGRSPDGGRNWEGFSPDPALSGVLFAETIKGIQDAGVVATAKHYIAYEQEHFRQAPEAQGYGFNITESGSANLDDKTMHELYLWPFADAIRAGAGAVMCSYNQINNSYGCQNSYTLNKLLKAELGFQGFVMSDWAAHHAGVSGALAGLDMSMPGDVDYDSGTSYWGTNLTISVLNGTVPQWRVDDMAVRIMAAYYKVGRDRLWTPPNFSSWTRDEYGFKYYYVSEGPYEKVNQFVNVQRNHSELIRRIGADSTVLLKNDGALPLTGKERLVALIGEDAGSNPYGANGCSDRGCDNGTLAMGWGSGTANFPYLVTPEQAISNEVLKNKNGVFTVTDNWAIDQIEALAKTASVSLVFVNADSGEGYINVDGNLGDRRNLTLWRNGDNVIKAAASNCNNTIVIIHSVGPVLVNEWYDNPNVTAILWGGLPGQESGNSLADVLYGRVNPGAKSPFTWGKTREAYQDYLYTEPNNGNGAPQEDFVEGVFIDYRGFDKRNETPIYEFGYGLSYTTFNYSNLQVEVLSAPAYEPASGETEAAPTFGEVGNASDYLYPDGLQRITKFIYPWLNSTDLEASSGDASYGQDASDYLPEGATDGSAQPILPAGGGAGGNPRLYDELIRVSVTIKNTGKVAGDEVPQLYVSLGGPNEPKIVLRQFERITLQPSEETQWSTTLTRRDLANWNVETQDWEITSYPKMVFVGSSSRKLPLRASLPTVH

SEQ ID NO: 45609 - protein, 860 aa, unidentified
MRFTLIEAVALTAVSLASADELAYSPPYYPSPWANGQGDWAEAYQRAVDIVSQMTLAEKVNLTTGTGWELELCVGQTGGVPRLGIPGMCAQDSPLGVRDSDYNSAFPAGVNVAATWDKNLAYLRGQAMGQEFSDKGADIQLGPAAGPLGRSPDGGRNWEGFSPDPALSGVLFAETIKGIQDAGVVATAKHYIAYEQEHFRQAPEAQGYGFNITESGSANLDDKTMHELYLWPFADAIRAGAGAVMCSYNQINNSYGCQNSYTLNKLLKAELGFQGFVMSDWAAHHAGVSGALAGLDMSMPGDVDYDSGTSYWGTNLTISVLNGTVPQWRVDDMAVRIMAAYYKVGRDRLWTPPNFSSWTRDEYGFKYYYVSEGPYEKVNQFVNVQRNHSELIRRIGADSTVLLKNDGALPLTGKERLVALIGEDAGSNPYGANGCSDRGCDNGTLAMGWGSGTANFPYLVTPEQAISNEVLKNKNGVFTATDNWAIDQIEALAQTASVSLVFVNADSGEGYINVDGNLGDRRNLTLWRNGDNVIKAAASNCNNTIVIIHSVGPVLVDEWYDNPNVTAILWGGLPGQESGNSLADVLYGRVNPGAKSPFTWGKTREAYQDYLYTEPNNGNGAPQEDFVEGVFIDYRGFDKRNETPIYEFGYGLSYTTFNYSNLQVEVLSAPAYEPASGETEAAPTFGEVGNASDYLYPDGLQRITKFIYPWLNSTDLEASSGDASYGQDASDYLPEGATDGSAQPILPAGGGAGGNPRLYDELIRVSVTIKNTGKVAGDEVPQLYVSLGGPNEPKIVLRQFERITLQPSEETQWSTTLTRRDLANWNVETQDWEITSYPKMVFVGSSSRKLPLRASLPTVH

SEQ ID NO: 45610 - protein, 860 aa, unidentified
MRFTLIEAVALTAVSLASADELAYSPPYYPSPWANGQGDWAEAYQRAVDIVSQMTLAEKVNLTTGTGWELELCVGQTGGVPRLGIPGMCAQDSPLGVRDSDYNSAFPAGVNVAATWDKNLAYLRGQAMGQEFSDKGADILLGPAAGPLGRSPDGGRNWEGFSPDPALSGVLFAETIKGIQDAGVVATAKHYIAYEQEHFRQAPEAQGYGFNITESGSANLDDKTMHELYLWPFADAIRAGAGAVMCSYNQINNSYGCQNSYTLNKLLKAELGFQGFVMSDWAAHHAGVSGALAGLDMSMPGDVDCDSGTSYWGTNLTISVLNGTVPQWRVDDMAVRIMAAYYKVGRDRLWTPPNFSSWTRDEYGFKYYYVSEGPYEKVNQFVNVQRNHSELIRRIGADSTVLLKNDGALPLTGKERLVALIGEDAGSNPYGANGCSDRGCDNGTLAMGWGSGTANFPYLVTPEQAISNEVLKNKNGVFTATDNWAIDQIEALAKTASVSLVFVNADSGEGYINVDGNLGDRRNLTLWRNGDNVIKAAASNCNNTIVIIHSVGPVLVNEWYDNPNVTAILWGGLPGQESGNSLADVLYGRVNPGAKSPFTWGKTREAYQDYLYTEPNNGNGAPQEDFVEGVFIDYRGFDKRNETPIYEFGYGLSYTTFNYSNLQVEVLSAPAYEPASGETEAAPTFGEVGNASDYLYPDGLQRITKFIYPWLNSTDLEASSGDASYGQDASDYLPEGATDGSAQPILPAGGGAGGNPRLYDELIRVSVTIKNTGKVAGDEVPQLYVSLGGPNEPKIVLRQFERITLQPSEETQWSTTLTRRDLANWNVETQDWEITSYPKMVFVGSSSRKLPLRASLPTVH

SEQ ID NO: 45611 - protein, 860 aa, unidentified
MRFTLIEAVALTAVSLASADELAYSPPYYPSPWANGQGDWAEAYQRAVDIVSQMTLAEKVNLTTGTGWELELCVGQTGGVPRLGIPGMCAQDSPLGVRDSDYNSAFPAGVNVAATWDKNLAYLRGQAMGQEFSDKGADILLGPAAGPLGRSPDGGRNWEGFSPDPALSGVLFAETIKGIQDAGVVATAKHYIAYEQEHFRQAPEAQGYGFNITESGSANLDDKTMHELYLWPFADAIRAGAGAVMCSYNQINNSYGCQNSYTLNKLLKAELGFQGFVMSDWAAHHAGVSGALAGLDMSMPGDVDYDSGTSYWGTNLTISVLNGTVPQWRVDDMAVRIMAAYYKVGRDRLWTPPNFSSWTRDEYGFKYYYVSEGPYEKVNQFVNVQRNHSELIRRIGADSTVLLKNDGALPLTGKERLVALIGEDAGSNPYGANGCSDRGCDNGTLAMGWGSGTANFPYLVTPEQAISNEVLKNKNGVFTATDNWAIDQIEALAKTASVSLVFVNADSGEGYINVDGNLGDRRNLTLWRNGDNVIKAAASNCNNTIVIIHSVGPVLVNEWYDNPNVTAILWGGLPGQESGNSLADVLYGRVNPGAKSPFTWGKTREAYQDYLYTEPNNGNGAPQEDFVEGVFIDYRGFDKRNETPIYEFGYGLSYTTFNYSNLQVEVLSAPAYEPASGETEAAPTFGEVGNASDYLYPDGLQRITKFIYPWLNSTDLEASSGDASYGQDASDYLPEGATDGSAQPILPAGGGAGGNPRLYDELIRVSVTIKNTGKVAGDEVPQLYVSLGGPNEPKIVLRQFERITLQPSEETQWSTTLTRRDLANWNVETQDWEITSYPKMVFVGSSSRKLPLRASLPTVH

SEQ ID NO: 45612 - protein, 860 aa, unidentified
MRFTLIEAVALTAVSLASADELAYSPPYYPSPWANGQGDWAEAYQRAVDIVSQMTLAEKVNLTTGTGWELELCVGQTGGVPRLGIPGMCAQDSPLGVRDSDYNSAFPAGVNVAATWDKNLAYLRGQAMGQEFSDKGADIQLGPAAGPLGRSPDGGRNWEGFSPDPALSGVLFAETIKGIQDAGVVATAKHYIAYEQEHFRQAPEAQGYGFNITESGSANLDDKTMHELYLWPFADAIRAGAGAVMCSYNQINNSYGCQNSYTLNKLLKAELGFQGFVMSDWAAHHAGVSGALAGLDMSMPGDVDCDSGTSYWGTNLTISVLNGTVPQWRVDDMAVRIMAAYYKVGRDRLWTPPNFSSWTRDEYGFKYYYVSEGPYEKVNQFVNVQRNHSELIRRIGADSTVLLKNDGALPLTGKERLVALIGEDAGSNPYGANGCSDRGCDNGTLAMGWGSGTANFPYLVTPEQAISNEVLKNKNGVFTVTDNWAIDQIEALAKTASVSLVFVNADSGEGYINVDGNLGDRRNLTLWRNGDNVIKAAASNCNNTIVIIHSVGPVLVNEWYDNPNVTAILWGGLPGQESGNSLADVLYGRVNPGAKSPFTWGKTREAYQDYLYTEPNNGNGAPQEDFVEGVFIDYRGFDKRNETPIYEFGYGLSYTTFNYSNLQVEVLSAPAYEPASGETEAAPTFGEVGNASDYLYPDGLQRITKFIYPWLNSTDLEASSGDASYGQDASDYLPEGATDGSAQPILPAGGGAGGNPRLYDELIRVSVTIKNTGKVAGDEVPQLYVSLGGPNEPKIVLRQFERITLQPSEETQWSTTLTRRDLANWNVETQDWEITSYPKMVFVGSSSRKLPLRASLPTVH

SEQ ID NO: 45613 - protein, 860 aa, unidentified
MRFTLIEAVALTAVSLASADELAYSPPYYPSPWANGQGDWAEAYQRAVDIVSQMTLAEKVNLTTGTGWELELCVGQTGGVPRLGIPGMCAQDSPLGVRDSDYNSAFPAGVNVAATWDKNLAYLRGQAMGQEFSDKGADIQLGPAAGPLGRSPDGGRNWEGFSPDPALSGVLFAETIKGIQDAGVVATAKHYIAYEQEHFRQAPEAQGYGFNITESGSANLDDKTMHELYLWPFADAIRAGAGAVMCSYNQINNSYGCQNSYTLNKLLKAELGFQGFVMSDWAAHHAGVSGALAGLDMSMPGDVDYDSGTSYWGTNLTISVLNGTVPQWRVDDMAVRIMAAYYKVGRDRLWTPPNFSSWTRDEYGFKYYYVSEGPYEKVNQFVNVQRNHSELIRRIGADSTVLLKNDGALPLTGKERLVALIGEDAGSNPYGANGCSDRGCDNGTLAMGWGSGTANFPYLVTPEQAISNEVLKNKNGVFTVTDNWAIDQIEALAKTASVSLVFVNADSGEGYINVDGNLGDRRNLTLWRNGDNVIKAAASNCNNTIVIIHSVGPVLVNEWYDNPNVTAILWGGLPGQESGNSLADVLYGRVNPGAKSPFTWGKTREAYQDYLYTEPNNGNGAPQEDFVEGVFIDYRGFDKRNETPIYEFGYGLSYTTFNYSNLQVEVLSAPAYEPASGETEAAPTFGEVGNASDYLYPDGLQRITKFIYPWLNSTDLEASSGDASYGQDASDYLPEGATDGSAQPILPAGGGAGGNPRLYDELIRVSVTIKNTGKVAGDEVPQLYVSLGGPNEPQIVLRQFERITLQPSEETQWSTTLTRRDLANWNVETQDWEITSYPKMVFVGSSSRKLPLRASLPTVH

SEQ ID NO: 45614 - protein, 840 aa, Aspergillus niger
ELAYSPPYYPSPWANGQGDWAQAYQRAVDIVSQMTLDEKVNLTTGTGWELELCVGQTGGVPRLGVPGMCLQDSPLGVRDSDYNSAFPAGMNVAATWDKNLAYLRGKAMGQEFSDKGADIQLGPAAGPLGRSPDGGRNWEGFSPDPALSGVLFAETIKGIQDAGVVATAKHXIAXEQEHFRQAPEAQGFGFNISESGSANLDDKTMHELYLWPFADAIRAGAGAVMCSYNQINNSYGCQNSYTLNKLLKAELGFQGFVMSDWAAHHAGVSGALAGLDMSMPGDVDYDSGTSYWGTNLTISVLNGTVPQWRVDDMAVRIMAAYYKVGRDRLWTPPNFSSWTRDEYGYKYYYVSEGPYEKVNQYVNVQRNHSELIRRIGADSTVLLKNDGALPLTGKERLVALIGEDAGSNPYGANGCSDRGCDNGTLAMGWGSGTANFPYLVTPEQAISNEVLKHKNGVFTATDNWAIDQIEALAKTASVSLVFVNADSGEGYINVDGNLGDRRNLTLWRNGDNVIKAAASNCNNTIVVIHSVGPVLVNEWYDNPNVTAILWGGLPGQESGNSLADVLYGRVNPGAKSPFTWGKTREAYQDYLVTEPNNGNGAPQEDFVEGVFIDYRGFDKRNETPIYEFGYGLSYTTFNYSNLEVQVLSAPAYEPASGETEAAPTFGEVGNASDYLYPSGLLRITKFIYPWLNGTDLEASSGDASYGQDSSDYLPEGATDGSAQPILPAGGGPGGNPRLYDELIRVSVTIKNTGKVAGDEVPQLYVSLGGPNEPKIVLRQFERITLQPSEETKWSTTLTRRDLANWNVEKQDWEITSYPKMVFVGSSSRKLPLRASLPIVH

SEQ ID NO: 45615 - protein, 840 aa, Aspergillus niger
ELAYSPPYYPSPWANGQGDWAEAYQRAVDIVSQMTLAEKVNLTTGTGWELELCVGQTGGVPRLGVPGMCAQDSPLGVRDSDYNSAFPAGVNVAATWDKNLAYLRGQAMGQEFSDKGADIQLGPAAGPLGRSPDGGRNWEGFSPDPALSGVLFAETIKGIQDAGVVATAKHYIAYEQEHFRQAPEAQGYGFNITESGSANLDDKTMHELYLWPFADAIRAGAGAVMCSYNQINNSYGCQNSYTLNKLLKAELGFQGFVMSDWAAHHAGVSGALAGLDMSMPGDVDYDSGTSYWGTNLTISVLNGTVPQWRVDDMAVRIMAAYYKVGRDRLWTPPNFSSWTRDEYGFKYYYVSGGPYEKVNQFVNVQRNHSELIRRIGADSTVLLKNDGALPLTGKERLVALIGEDAGSNPYGANGCSDRGCDNGTLAMGWGSGTANFPYLVTPEQAISNEVLKNKNGVFTATDNWAIDQIEALAKTASVSLVFVNADSGEGYINVDGNLGDRRNLTLWRNGDNVIKAAASNCNNTIVIIHSVGPVLVNEWYDNPNVTAILWGGLPGQESGNSLADVLYGRVNPGAKSPFTWGKTREAYQDYLYTEPNNGNGAPQEDFVEGVFIDYRGFDKRNETPIYEFGYGLSYTTFNYSNLQVEVLSAPAYEPASGETEAAPTFGEVGNASDYLYPDGLQRITKFIYPWLNSTDLEASSGDASYGQDASDYLPEGATDGSAQPILPAGGGAGGNPRLYDELIRVTVTIKNTGKVAGDKVPQLYVSLGGPNEPKIVLRQFERITLQPSEETQWSTTLTRRDLANWNVETQDWEITSYPKMVFVGSSSRKLPLRASLPTVH

SEQ ID NO: 45616 - protein, 860 aa, Aspergillus niger
MRFTLIEAVALTAVSLASADELAYSPPYYPSPWANGQGDWAEAYQRAVDIVSQMTLAEKVNLTTGTGWELELCVGQTGGVPRLGIPGMCAQDSPLGVRDSDYNSAFPAGVNVAATWDKNLAYLRGQAMGQEFSDKGADIQLGPAAGPLGRSPDGGRNWEGFSPDPALSGVLFAETIKGIQDAGVVATAKHYIAYEQEHFRQAPEAQGYGFNITESGSANLDDKTMHELYLWPFADAIRAGAGAVMCSYNQINNSYGCQNSYTLNKLLKAELGFQGFVMSDWAAHHAGVSGALAGLDMSMPGDVDYDSGTSYWGTNLTISVLNGTVPQWRVDDMAVRIMAAYYKVGRDRLWTPPNFSSWTRDEYGFKYYYVSEGPYEKVNQFVNVQRNHSELIRRIGADSTVLLKNDGALPLTGKERLVALIGEDAGSNPYGANGCSDRGCDNGTLAMGWGSGTANFPYLVTPEQAISNEVLKNKNGVFTATDNWAIDQIEALAKTASVSLVFVNADSGEGYINVDGNLGDRRNLTLWRNGDNVIKAAASNCNNTIVIIHSVGPVLVNEWYDNPNVTAILWGGLPGQESGNSLADVLYGRVNPGAKSPFTWGKTREAYQDYLYTEPNNGNGAPQEDFVEGVFIDYRGFDKRNETPIYEFGYGLSYTTFNYSNLQVEVLSAPAYEPASGETEAAPTFGEVGNASDYLYPDGLQRITKFIYPWLNSTDLEASSGDASYGQDASDYLPEGATDGSAQPILPAGGGAGGNPRLYDELIRVSVTIKNTGKVAGDEVPQLYVSLGGPNEPKIVLRQFERITLQPSEETQWSTTLTRRDLANWNVETQDWEITSYPKMVFVGSSSRKLPLRASLPTVH

SEQ ID NO: 45617 - protein, 860 aa, unidentified
MRFTLIEAVALTAVSLASADELAYSPPYYPSPWANGQGDWAEAYQRAVDIVSQMTLAEKVNLTTGTGWELELCVGQTGGVPRLGIPGMCAQDSPLGVRDSDYNSAFPAGVNVAATWDKNLAYLRGQAMGQEFSDKGADIQLGPAAGPLGRSPDGGRNWEGFSPDPALSGVLFAETIKGIQDAGVVATAKHYIAYEQEHFRQAPEAQGYGFNITESGSANLDDKTMHELYLWPFADAIRAGAGAVMCSYNQINNSYGCQNSYTLNKLLKAELGFQGFVMSDWAAHHAGVSGALAGLDMSMPGDVDADSGTSYWGTNLTISVLNGTVPQWRVDDMAVRIMAAYYKVGRDRLWTPPNFSSWTRDEYGFKYYYVSEGPYEKVNQFVNVQRNHSELIRRIGADSTVLLKNDGALPLTGKERLVALIGEDAGSNPYGANGCSDRGCDNGTLAMGWGSGTANFPYLVTPEQAISNEVLKNKNGVFTATDNWAIDQIEALAKTASVSLVFVNADSGEGYINVDGNLGDRRNLTLWRNGDNVIKAAASNCNNTIVIIHSVGPVLVNEWYDNPNVTAILWGGLPGQESGNSLADVLYGRVNPGAKSPFTWGKTREAYQDYLYTEPNNGNGAPQEDFVEGVFIDYRGFDKRNETPIYEFGYGLSYTTFNYSNLQVEVLSAPAYEPASGETEAAPTFGEVGNASDYLYPDGLQRITKFIYPWLNSTDLEASSGDASYGQDASDYLPEGATDGSAQPILPAGGGAGGNPRLYDELIRVSVTIKNTGKVAGDEVPQLYVSLGGPNEPKIVLRQFERITLQPSEETQWSTTLTRRDLANWNVETQDWEITSYPKMVFVGSSSRKLPLRASLPTVH

SEQ ID NO: 45618 - protein, 860 aa, unidentified
MRFTLIEAVALTAVSLASADELAYSPPYYPSPWANGQGDWAEAYQRAVDIVSQMTLAEKVNLTTGTGWELELCVGQTGGVPRLGIPGMCAQDSPLGVRDSDYNSAFPAGVNVAATWDKNLAYLRGQAMGQEFSDKGADIQLGPAAGPLGRSPDGGRNWEGFSPDPALSGVLFAETIKGIQDAGVVATAKHYIAYEQEHFRQAPEAQGYGFNITESGSANLDDKTMHELYLWPFADAIRAGAGAVMCSYNQINNSYGCQNSYTLNKLLKAELGFQGFVMSDWAAHHAGVSGALAGLDMSMPGDADYDSGTSYWGTNLTISVLNGTVPQWRVDDMAVRIMAAYYKVGRDRLWTPPNFSSWTRDEYGFKYYYVSEGPYEKVNQFVNVQRNHSELIRRIGADSTVLLKNDGALPLTGKERLVALIGEDAGSNPYGANGCSDRGCDNGTLAMGWGSGTANFPYLVTPEQAISNEVLKNKNGVFTATDNWAIDQIEALAKTASVSLVFVNADSGEGYINVDGNLGDRRNLTLWRNGDNVIKAAASNCNNTIVIIHSVGPVLVNEWYDNPNVTAILWGGLPGQESGNSLADVLYGRVNPGAKSPFTWGKTREAYQDYLYTEPNNGNGAPQEDFVEGVFIDYRGFDKRNETPIYEFGYGLSYTTFNYSNLQVEVLSAPAYEPASGETEAAPTFGEVGNASDYLYPDGLQRITKFIYPWLNSTDLEASSGDASYGQDASDYLPEGATDGSAQPILPAGGGAGGNPRLYDELIRVSVTIKNTGKVAGDEVPQLYVSLGGPNEPKIVLRQFERITLQPSEETQWSTTLTRRDLANWNVETQDWEITSYPKMVFVGSSSRKLPLRASLPTVH

SEQ ID NO: 45619 - protein, 863 aa, unidentified
MRFPSIFTAVLFAASSALAAPDNTLAYSPPYYPSPWANGQGDWAEAYQRAVDIVSQMTLAEKVNLTTGTGWELELCVGQTGGVPRLGIPGMCAQDSPLGVRDSDYNSAFPAGVNVAATWDKNLAYLRGQAMGQEFSDKGADILLGPAAGPLGRSPDGGRNWEGFSPDPALSGVLFAETIKGIQDAGVVATAKHYIAYEQEHFRQAPEAQGYGFNITESGSANLDDKTMHELYLWPFADAIRAGAGAVMCSYNQINNSYGCQNSYTLNKLLKAELGFQGFVMSDWAAHHAGVSGALAGLDMSMPGDVDCDSGTSYWGTNLTISVLNGTVPQWRVDDMAVRIMAAYYKVGRDRLWTPPNFSSWTRDEYGFKYYYVSEGPYEKVNQFVNVQRNHSELIRRIGADSTVLLKNDGALPLTGKERLVALIGEDAGSNPYGANGCSDRGCDNGTLAMGWGSGTANFPYLVTPEQAISNEVLKNKNGVFTVTDNWAIDQIEALAKTASVSLVFVNADSGEGYINVDGNLGDRRNLTLWRNGDNVIKAAASNCNNTIVIIHSVGPVLVNEWYDNPNVTAILWGGLPGQESGNSLADVLYGRVNPGAKSPFTWGKTREAYQDYLYTEPNNGNGAPQEDFVEGVFIDYRGFDKRNETPIYEFGYGLSYTTFNYSNLQVEVLSAPAYEPASGETEAAPTFGEVGNASDYLYPDGLQRITKFIYPWLNSTDLEASSGDASYGQDASDYLPEGATDGSAQPILPAGGGAGGNPRLYDELIRVSVTIKNTGKVAGDEVPQLYVSLGGPNEPKIVLRQFERITLQPSEETQWSTTLTRRDLANWNVETQDWEITSYPKMVFVGSSSRKLPLRASLPTVH

SEQ ID NO: 45620 - protein, 860 aa, unidentified
MRFTLIEAVALTAVSLASADELAYSPPYYPSPWANGQGDWAEAYQRAVDIVSQMTLAEKVNLTTGTGWELELCVGQTGGVPRLGIPGMCAQDSPLGVRDSDYNSAFPAGVNVAATWDKNLAYLRGQAMGQEFSDKGADIQLGPAAGPLGRSPDGGRNWEGFSPDPALSGVLFAETIKGIQDAGVVATAKHYIAYEQEHFRQAPEAQGYGFNITESGSANLDDKTMHELYLWPFADAIRAGAGAVMCSYNQINNSYGCQNSYTLNKLLKAELGFQGFVMSDWAAHHAGVSGALAGLDMSMPGDVDGDSGTSYWGTNLTISVLNGTVPQWRVDDMAVRIMAAYYKVGRDRLWTPPNFSSWTRDEYGFKYYYVSEGPYEKVNQFVNVQRNHSELIRRIGADSTVLLKNDGALPLTGKERLVALIGEDAGSNPYGANGCSDRGCDNGTLAMGWGSGTANFPYLVTPEQAISNEVLKNKNGVFTATDNWAIDQIEALAKTASVSLVFVNADSGEGYINVDGNLGDRRNLTLWRNGDNVIKAAASNCNNTIVIIHSVGPVLVNEWYDNPNVTAILWGGLPGQESGNSLADVLYGRVNPGAKSPFTWGKTREAYQDYLYTEPNNGNGAPQEDFVEGVFIDYRGFDKRNETPIYEFGYGLSYTTFNYSNLQVEVLSAPAYEPASGETEAAPTFGEVGNASDYLYPDGLQRITKFIYPWLNSTDLEASSGDASYGQDASDYLPEGATDGSAQPILPAGGGAGGNPRLYDELIRVSVTIKNTGKVAGDEVPQLYVSLGGPNEPKIVLRQFERITLQPSEETQWSTTLTRRDLANWNVETQDWEITSYPKMVFVGSSSRKLPLRASLPTVH

SEQ ID NO: 45621 - protein, 860 aa, unidentified
MRFTLIEAVALTAVSLASADELAYSPPYYPSPWANGQGDWAEAYQRAVDIVSQMTLAEKVNLTTGTGWELELCVGQTGGVPRLGIPGMCAQDSPLGVRDSDYNSAFPAGVNVAATWDKNLAYLRGQAMGQEFSDKGADIQLGPAAGPLGRSPDGGRNWEGFSPDPALSGVLFAETIKGIQDAGVVATAKHYIAYEQEHFRQAPEAQGYGFNITESGSANLDDKTMHELYLWPFADAIRAGAGAVMCSYNQINNSYGCQNSYTLNKLLKAELGFQGFVMSDWAAHHAGVSGALAGLDMSMPGDVDYDSGTSYWGTNLTISVLNGTVPQWRVDDMAVRIMAAYYKVGRDRLWTPPNFSSWTRDEYGFKYYYVSEGPYEKVNQFVNVQRNHSELIRRIGADSTVLLKNDGALPLTGKERLVALIGEDAGSNPYGANGCSDRGCDNGTLAMGWGSGTANFPYLVTPEQAISNEVLKNKNGVFTATDNWAIDQIEALAQTASVSLVFVNADSGEGYINVDGNLGDRRNLTLWRNGDNVIKAAASNCNNTIVIIHSVGPVLVNEWYDNPNVTAILWGGLPGQESGNSLADVLYGRVNPGAKSPFTWGKTREAYQDYLYTEPNNGNGAPQEDFVEGVFIDYRGFDKRNETPIYEFGYGLSYTTFNYSNLQVEVLSAPAYEPASGETEAAPTFGEVGNASDYLYPDGLQRITKFIYPWLNSTDLEASSGDASYGQDASDYLPEGATDGSAQPILPAGGGAGGNPRLYDELIRVSVTIKNTGKVAGDEVPQLYVSLGGPNEPKIVLRQFERITLQPSEETQWSTTLTRRDLANWNVETQDWEITSYPKMVFVGSSSRKLPLRASLPTVH

SEQ ID NO: 45622 - protein, 860 aa, unidentified
MRFTLIEAVALTAVSLASADELAYSPPYYPSPWANGQGDWAEAYQRAVDIVSQMTLAEKVNLTTGTGWELELCVGQTGGVPRLGIPGMCAQDSPLGVRDSDYNSAFPAGVNVAATWDKNLAYLRGQAMGQEFSDKGADIQLGPAAGPLGRSPDGGRNWEGFSPDPALSGVLFAETIKGIQDAGVVATAKHYIAYEQEHFRQAPEAQGYGFNITESGSANLDDKTMHELYLWPFADAIRAGAGAVMCSYNQINNSYGCQNSYTLNKLLKAELGFQGFVMSDWAAHHAGVSGALAGLDMSMPGDVDCDSGTSYWGTNLTISVLNGTVPQWRVDDMAVRIMAAYYKVGRDRLWTPPNFSSWTRDEYGFKYYYVSEGPYEKVNQFVNVQRNHSELIRRIGADSTVLLKNDGALPLTGKERLVALIGEDAGSNPYGANGCSDRGCDNGTLAMGWGSGTANFPYLVTPEQAISNEVLKNKNGVFTATDNWAIDQIEALAKTASVSLVFVNADSGEGYINVDGNLGDRRNLTLWRNGDNVIKAAASNCNNTIVIIHSVGPVLVNEWYDNPNVTAILWGGLPGQESGNSLADVLYGRVNPGAKSPFTWGKTREAYQDYLYTEPNNGNGAPQEDFVEGVFIDYRGFDKRNETPIYEFGYGLSYTTFNYSNLQVEVLSAPAYEPASGETEAAPTFGEVGNASDYLYPDGLQRITKFIYPWLNSTDLEASSGDASYGQDASDYLPEGATDGSAQPILPAGGGAGGNPRLYDELIRVSVTIKNTGKVAGDEVPQLYVSLGGPNEPKIVLRQFERITLQPSEETQWSTTLTRRDLANWNVETQDWEITSYPKMVFVGSSSRKLPLRASLPTVH

SEQ ID NO: 45623 - protein, 860 aa, unidentified
MRFTLIEAVALTAVSLASADELAYSPPYYPSPWANGQGDWAEAYQRAVDIVSQMTLAEKVNLTTGTGWELELCVGQTGGVPRLGIPGMCAQDSPLGVRDSDYNSAFPAGVNVAATWDKNLAYLRGQAMGQEFSDKGADIQLGPAAGPLGRSPDGGRNWEGFSPDPALSGVLFAETIKGIQDAGVVATAKHYIAYEQEHFRQAPEAQGYGFNITESGSANLDDKTMHELYLWPFADAIRAGAGAVMCSYNQINNSYGCQNSYTLNKLLKAELGFQGFVMSDWAAHHAGVSGALAGLDMSMPGDVDYDSGTSYWGTNLTISVLNGTVPQWRVDDMAVRIMAAYYKVGRDRLWTPPNFSSWTRDEYGFKYYYVSEGPYEKVNQFVNVQRNHSELIRRIGADSTVLLKNDGALPLTGKERLVALIGEDAGSNPYGANGCSDRGCDNGTLAMGWGSGTANFPYLVTPEQAISNEVLKNKNGVFTATDNWAIDQIEALAKTASVSLVFVNADSGEGYINVDGNLGDRRNLTLWRNGDNVIKAAASNCNNTIVIIHSVGPVLVNEWYDNPNVTAILWGGLPGQESGNSLADVLYGRVNPGAKSPFTWGKTREAYQDYLYTEPNNGNGAPQEDFVEGVFIDYRGFDKRNETPIYEFGYGLSYTTFNYSNLQVEVLSAPAYEPASGETEAAPTFGEVGNASDYLYPDGLQRITKFIYPWLNSTDLEASSGDASYGQDASDYLPEGATDGSAQPILPAGGGAGGNPRLYDELIRVSVTIKNTGKVAGDEVPQLYVSLGGPNEPKIVLRQFERITLQPSEEMQWSTTLTRRDLANWNVETQDWEITSYPKMVFVGSSSRKLPLRASLPTVH

SEQ ID NO: 45624 - protein, 860 aa, unidentified
MRFTLIEAVALTAVSLASADELAYSPPYYPSPWANGQGDWAEAYQRAVDIVSQMTLAEKVNLTTGTGWELELCVGQTGGVPRLGIPGMCAQDSPLGVRDSDYNSAFPAGVNVAATWDKNLAYLRGQAMGQEFSDKGADIQLGPAAGPLGRSPDGGRNWEGFSPDPALSGVLFAETIKGIQDAGVVATAKHYIAYEQEHFRQAPEAQGYGFNITESGSANLDDKTMHELYLWPFADAIRAGAGAVMCSYNQINNSYGCQNSYTLNKLLKAELGFQGFVMSDWAAHHAGVSGALAGLDMSMPGDVDVDSGTSYWGTNLTISVLNGTVPQWRVDDMAVRIMAAYYKVGRDRLWTPPNFSSWTRDEYGFKYYYVSEGPYEKVNQFVNVQRNHSELIRRIGADSTVLLKNDGALPLTGKERLVALIGEDAGSNPYGANGCSDRGCDNGTLAMGWGSGTANFPYLVTPEQAISNEVLKNKNGVFTATDNWAIDQIEALAKTASVSLVFVNADSGEGYINVDGNLGDRRNLTLWRNGDNVIKAAASNCNNTIVIIHSVGPVLVNEWYDNPNVTAILWGGLPGQESGNSLADVLYGRVNPGAKSPFTWGKTREAYQDYLYTEPNNGNGAPQEDFVEGVFIDYRGFDKRNETPIYEFGYGLSYTTFNYSNLQVEVLSAPAYEPASGETEAAPTFGEVGNASDYLYPDGLQRITKFIYPWLNSTDLEASSGDASYGQDASDYLPEGATDGSAQPILPAGGGAGGNPRLYDELIRVSVTIKNTGKVAGDEVPQLYVSLGGPNEPKIVLRQFERITLQPSEETQWSTTLTRRDLANWNVETQDWEITSYPKMVFVGSSSRKLPLRASLPTVH

SEQ ID NO: 45625 - protein, 860 aa, unidentified
MRFTLIEAVALTAVSLASADELAYSPPYYPSPWANGQGDWAEAYQRAVDIVSQMTLAEKVNLTTGTGWELELCVGQTGGVPRLGIPGMCAQDSPLGVRDSDYNSAFPAGVNVAATWDKNLAYLRGQAMGQEFSDKGADILLGPAAGPLGRSPDGGRNWEGFSPDPALSGVLFAETIKGIQDAGVVATAKHYIAYEQEHFRQAPEAQGYGFNITESGSANLDDKTMHELYLWPFADAIRAGAGAVMCSYNQINNSYGCQNSYTLNKLLKAELGFQGFVMSDWAAHHAGVSGALAGLDMSMPGDVDYDSGTSYWGTNLTISVLNGTVPQWRVDDMAVRIMAAYYKVGRDRLWTPPNFSSWTRDEYGFKYYYVSEGPYEKVNQFVNVQRNHSELIRRIGADSTVLLKNDGALPLTGKERLVALIGEDAGSNPYGANGCSDRGCDNGTLAMGWGSGTANFPYLVTPEQAISNEVLKNKNGVFTATDNWAIDQIEALAKTASVSLVFVNADSGEGYINVDGNLGDRRNLTLWRNGDNVIKAAASNCNNTIVIIHSVGPVLVNEWYDNPNVTAILWGGLPGQESGNSLADVLYGRVNPGAKSPFTWGKTREAYQDYLYTEPNNGNGAPQEDFVEGVFIDYRGFDMRNETPIYEFGYGLSYTTFNYSNLQVEVLSAPAYEPASGETEAAPTFGEVGNASDYLYPDGLQRITKFIYPWLNSTDLEASSGDASYGQDASDYLPEGATDGSAQPILPAGGGAGGNPRLYDELIRVSVTIKNTGKVAGDEVPQLYVSLGGPNEPKIVLRQFERITLQPSEETQWSTTLTRRDLANWNVETQDWEITSYPKMVFVGSSSRKLPLRASLPTVH

SEQ ID NO: 45626 - protein, 847 aa, Unidentified
SLSSAEDELAYSPPYYPSPWANGQGDWAQAYQRAVDIVSQMTLAEKVNLTTGTGWELELCVGQTGGVPRLGVPGMCLQDSPLGVRDSDYNSAFPSGMNVAATWDKNLAYLRGKAMGQEFSDKGADIQLGPAAGPLGRSPDGGRNWEGFSPDPALSGVLFAETIKGIQDAGVVATAKHYIAYEQEHFRQAPEAQGYGFNISESGSANLDDKTMHELYLWPFADAIRAGAGAVMCSYNQINNSYGCQNSYTLNKLLKAELGFQGFVMSDWAAHHAGVSGALAGLDMSMPGDVDYDSGTSYWGTNLTVSVLNGTVPQWRVDDMAVRIMAAYYKVGRDRLWTPPNFSSWTRDEYGYKYYYVSEGPYEKVNHYVNVQRNHSELIRRIGADSTVLLKNDGALPLTGKERLVALIGEDAGSNPYGANGCSDRGCDNGTLAMGWGSGTANFPYLVTPEQAISNEVLKNKNGVFTATDNWAIDQIEALAKTASVSLVFVNADSGEGYINVDGNLGDRKNLTLWRNGDNVIKAAASNCNNTIVIIHSVGPVLVNEWYDNPNVTAILWGGLPGQESGNSLADVLYGRVNPGAKSPFTWGKTREAYQDYLVTEPNNGNGAPQEDFVEGVFIDYRGFDKRNETPIYEFGYGLSYTTFNYSNLEVQVLSAPAYEPASGETEAAPTFGEVGNASNYLYPDGLQKITKFIYPWLNSTDLEASSGDASYGQDSSDYLPEGATDGSAQPILPAGGGPGGNPRLYDELIRVSVTIKNTGKVAGDEVPQLYVSLGGPNEPKIVLRQFERITLQPSEETKWSTTLTRRDLANWNVEKQDWEITSYPKMVFVGSSSRKPPLRASLPTVH

SEQ ID NO: 45627 - protein, 860 aa, Aspergillus niger ATCC 1015
MRFTLIEAVALTAVSLASADELAYSPPYYPSPWANGQGDWAEAYQRAVDIVSQMTLAEKVNLTTGTGWELELCVGQTGGVPRLGIPGMCAQDSPLGVRDSDYNSAFPAGVNVAATWDKNLAYLRGQAMGQEFSDKGADIQLGPAAGPLGRSPDGGRNWEGFSPDPALSGVLFAETIKGIQDAGVVATAKHYIAYEQEHFRQAPEAQGYGFNITESGSANLDDKTMHELYLWPFADAIRAGAGAVMCSYNQINNSYGCQNSYTLNKLLKAELGFQGFVMSDWAAHHAGVSGALAWLDMSMPGDVDYDSGTSYWGTNLTISVLNGTVPQWRVDDMAVRIMAAYYKVGRDRLWTPPNFSSWTRDEYGFKYYYVSEGPYEKVNQFVNVQRNHSELIRRIGADSTVLLKNDGALPLTGKERLVALIGEDAGSNPYGANGCSDRGCDNGTLAMGWGSGTANFPYLVTPEQAISNEVLKNKNGVFTATDNWAIDQIEALAKTASVSLVFVNADSGEGYINVDGNLGDRRNLTLWRNGDNVIKAAASNCNNTIVIIHSVGPVLVNEWYDNPNVTAILWGGLPGQESGNSLADVLYGRVNPGAKSPFTWGKTREAYQDYLYTEPNNGNGAPQEDFVEGVFIDYRGFDKRNETPIYEFGYGLSYTTFNYSNLQVEVLSAPAYEPASGETEAAPTFGEVGNASDYLYPDGLQRITKFIYPWLNSTDLEASSGDASYGQDASDYLPEGATDGSAQPILPAGGGAGGNPRLYDELIRVSVTIKNTGKVAGDEVPQLYVSLGGPNEPKIVLRQFERITLQPSEETQWSTTLTRRDLANWNVETQDWEITSYPKMVFVGSSSRKLPLRASLPTVH

SEQ ID NO: 45628 - protein, 860 aa, Aspergillus niger ATCC 1015
MRFTLIEAVALTAVSLASADELAYSPPYYPSPWANGQGDWAEAYQRAVDIVSQMTLAEKVNLTTGTGWELELCVGQTGGVPRLGIPGMCAQDSPLGVRDSDYNSAFPAGVNVAATWDKNLAYLRGQAMGQEFSDKGADIQLGPAAGPLGRSPDGGRNWEGFSPDPALSGVLFAETIKGSQDAGVVATAKHYIAYEQEHFRQAPEAQGYGFNITESGSANLDDKTMHELYLWPFADAIRAGAGAVMCSYNQINNSYGCQNSYTLNKLLKAELGFQGFVMSDWAAHHAGVSGALAGLDMSMPGDVDYDSGTSYWGTNLTISVLNGTVPQWRVDDMAVRIMAAYYKVGRDRLWTPPNFSSWTRDEYGFKYYYVSEGPYEKVNQFVNVQRNHSELIRRIGADSTVLLKNDGALPLTGKERLVALIGEDAGSNPYGANGCSDRGCDNGTLAMGWGSGTANFPYLVTPEQAISNEVLKNKNGVFTATDNWAIDQIEALAKTASVSLVFVNADSGEGYINVDGNLGDRRNLTLWRNGDNVIKAAASNCNNTIVIIHSVGPVLVNEWYDNPNVTAILWGGLPGQESGNSLADVLYGRVNPGAKSPFTWGKTREAYQDYLYTEPNNGNGAPQEDFVEGVFIDYRGFDKRNETPIYEFGYGLSYTTFNYSNLQVEVLSAPAYEPASGETEAAPTFGEVGNASDYLYPDGLQRITKFIYPWLNSTDLEASSGDASYGQDASDYLPEGATDGSAQPILPAGGGAGGNPRLYDELIRVSVTIKNTGKVAGDEVPQLYVSLGGPNEPKIVLRQFERITLQPSEETQWSTTLTRRDLANWNVETQDWEITSYPKMVFVGSSSRKLPLRASLPTVH

SEQ ID NO: 45629 - protein, 860 aa, Aspergillus niger ATCC 1015
MRFTLIEAVALTAVSLASADELAYSPPYYPSPWANGQGDWAEAYQRAVDIVSQMTLAEKVNLTTGTGWELELCVGQTGGVPRLGIPGMCAQDSPLGVRDSDYNSAFPAGVNVAATWDKNLAYLRGQAMGQEFSDKGADIQLGPAAGPLGRSPDGGRNWEGFSPDPALSGVLFAETIKGIQDAGVVATAKHYIAYEQEHFREAPEAQGYGFNITESGSANLDDKTMHELYLWPFADAIRAGAGAVMCSYNQINNSYGCQNSYTLNKLLKAELGFQGFVMSDWAAHHAGVSGALAGLDMSMPGDVDYDSGTSYWGTNLTISVLNGTVPQWRVDDMAVRIMAAYYKVGRDRLWTPPNFSSWTRDEYGFKYYYVSEGPYEKVNQFVNVQRNHSELIRRIGADSTVLLKNDGALPLTGKERLVALIGEDAGSNPYGANGCSDRGCDNGTLAMGWGSGTANFPYLVTPEQAISNEVLKNKNGVFTATDNWAIDQIEALAKTASVSLVFVNADSGEGYINVDGNLGDRRNLTLWRNGDNVIKAAASNCNNTIVIIHSVGPVLVNEWYDNPNVTAILWGGLPGQESGNSLADVLYGRVNPGAKSPFTWGKTREAYQDYLYTEPNNGNGAPQEDFVEGVFIDYRGFDKRNETPIYEFGYGLSYTTFNYSNLQVEVLSAPAYEPASGETEAAPTFGEVGNASDYLYPDGLQRITKFIYPWLNSTDLEASSGDASYGQDASDYLPEGATDGSAQPILPAGGGAGGNPRLYDELIRVSVTIKNTGKVAGDEVPQLYVSLGGPNEPKIVLRQFERITLQPSEETQWSTTLTRRDLANWNVETQDWEITSYPKMVFVGSSSRKLPLRASLPTVH

SEQ ID NO: 45630 - protein, 863 aa, unidentified
MRFPSIFTAVLFAASSALAAPVNTLAYSPPYYPSPWANGQGDWAEAYQRAVDIVSQMTLAEKVNLTTGTGWELELCVGQTGGVPRLGIPGMCAQDSPLGVRDSDYNSAFPAGVNVAATWDKNLAYLRGQAMGQEFSDKGADILLGPAAGPLGRSPDGGRNWEGFSPDPALSGVLFAETIKGIQDAGVVATAKHYIAYEQEHFRQAPEAQGYGFNITESGSANLDDKTMHELYLWPFADAIRAGAGAVMCSYNQINNSYGCQNSYTLNKLLKAELGFQGFVMSDWAAHHAGVSGALAGLDMSMPGDVDYDSGTSYWGTNLTISVLNGTVPQWRVDDMAVRIMAAYYKVGRDRLWTPPNFSSWTRDEYGFKYYYVSEGPYEKVNQFVNVQRNHSELIRRIGADSTVLLKNDGALPLTGKERLVALIGEDAGSNPYGANGCSDRGCDNGTLAMGWGSGTANFPYLVTPEQAISNEVLKNKNGVFTATDNWAIDQIEALAKTASVSLVFVNADSGEGYINVDGNLGDRRNLTLWRNGDNVIKAAASNCNNTIVIIHSVGPVLVNEWYDNPNVTAILWGGLPGQESGNSLADVLYGRVNPGAKSPFTWGKTREAYQDYLYTEPNNGNGAPQEDFVEGVFIDYRGFDKRNETPIYEFGYGLSYTTFNYSNLQVEVLSAPAYEPASGETEAAPTFGEVGNASDYLYPDGLQRITKFIYPWLNSTDLEASSGDASYGQDASDYLPEGATDGSAQPILPAGGGAGGNPRLYDELIRVSVTIKNTGKVAGDEVPQLYVSLGGPNEPKIVLRQFERITLQPSEETQWSTTLTRRDLANWNVETQDWEITSYPKMVFVGSSSRKLPLRASLPTVH

SEQ ID NO: 45631 - protein, 863 aa, unidentified
MRFPSIFTAVLFAASSALAAPVNTLAYSPPYYPSPWANGQGDWAEAYQRAVDIVSQMTLAEKVNLTTGTGWELELCVGQTGGVPRLGIPGMCAQDSPLGVRDSDYNSAFPAGVNVAATWDKNLAYLRGQAMGQEFSDKGADIQLGPAAGPLGRSPDGGRNWEGFSPDPALSGVLFAETIKGIQDAGVVATAKHYIAYEQEHFRQAPEAQGYGFNITESGSANLDDKTMHELYLWPFADAIRAGAGAVMCSYNQINNSYGCQNSYTLNKLLKAELGFQGFVMSDWAAHHAGVSGALAGLDMSMPGDVDCDSGTSYWGTNLTISVLNGTVPQWRVDDMAVRIMAAYYKVGRDRLWTPPNFSSWTRDEYGFKYYYVSEGPYEKVNQFVNVQRNHSELIRRIGADSTVLLKNDGALPLTGKERLVALIGEDAGSNPYGANGCSDRGCDNGTLAMGWGSGTANFPYLVTPEQAISNEVLKNKNGVFTVTDNWAIDQIEALAKTASVSLVFVNADSGEGYINVDGNLGDRRNLTLWRNGDNVIKAAASNCNNTIVIIHSVGPVLVNEWYDNPNVTAILWGGLPGQESGNSLADVLYGRVNPGAKSPFTWGKTREAYQDYLYTEPNNGNGAPQEDFVEGVFIDYRGFDKRNETPIYEFGYGLSYTTFNYSNLQVEVLSAPAYEPASGETEAAPTFGEVGNASDYLYPDGLQRITKFIYPWLNSTDLEASSGDASYGQDASDYLPEGATDGSAQPILPAGGGAGGNPRLYDELIRVSVTIKNTGKVAGDEVPQLYVSLGGPNEPKIVLRQFERITLQPSEETQWSTTLTRRDLANWNVETQDWEITSYPKMVFVGSSSRKLPLRASLPTVH

SEQ ID NO: 45632 - protein, 860 aa, unidentified
MRFTLIEAVALTAVSLASADELAYSPPYYPSPWANGQGDWAEAYQRAVDIVSQMTLAEKVNLTTGTGWELELCVGQTGGVPRLGIPGMCAQDSPLGVRDSDYNSAFPAGVNVAATWDKNLAYLRGQAMGQEFSDKGADIQLGPAAGPLGRSPDGGRNWEGFSPDPALSGVLFAETIKGIQDAGVVATAKHYIAYEQEHFRQAPEAQGYGFNITESGSANLDDKTMHELYLWPFADAIRAGAGAVMCSYNQINNSYGCQNSYTLNKLLKAELGFQGFVMSDWAAHHAGVSGALAGLDMSMPGDVDCDSGTSYWGTNLTISVLNGTVPQWRVDDMAVRIMAAYYKVGRDRLWTPPNFSSWTRDEYGFKYYYVSEGPYEKVNQFVNVQRNHSELIRRIGADSTVLLKNDGALPLTGKERLVALIGEDAGSNPYGANGCSDRGCDNGTLAMGWGSGTANFPYLVTPEQAISNEVLKNKNGVFTATDNWAIDQIEALAKTASVSLVFVNADSGEGYINVDGNLGDRRNLTLWRNGDNVIKAAASNCNNTIVIIHSVGPVLVNEWYDNPNVTAILWGGLPGQESGNSLADVLYGRVNPGAKSPFTWGKTREAYQDYLYTEPNNGNGAPQEDFVEGVFIDYRGFDKRNVTPIYEFGYGLSYTTFNYSNLQVEVLSAPAYEPASGETEAAPTFGEVGNASDYLYPDGLQRITKFIYPWLNSTDLEASSGDASYGQDASDYLPEGATDGSAQPILPAGGGAGGNPRLYDELIRVSVTIKNTGKVAGDEVPQLYVSLGGPNEPKIVLRQFERITLQPSEETQWSTTLTRRDLANWNVETQDWEITSYPKMVFVGSSSRKLPLRASLPTVH

SEQ ID NO: 45633 - protein, 863 aa, unidentified
MRFPSIFTAVLFAASSALAAPVNTLAYSPPYYPSPWANGQGDWAEAYQRAVDIVSQMTLAEKVNLTTGTGWELELCVGQTGGVPRLGIPGMCAQDSPLGVRDSDYNSAFPAGVNVAATWDKNLAYLRGQAMGQEFSDKGADIQLGPAAGPLGRSPDGGRNWEGFSPDPALSGVLFAETIKGIQDAGVVATAKHYIAYEQEHFRQAPEAQGYGFNITESGSANLDDKTMHELYLWPFADAIRAGAGAVMCSYNQINNSYGCQNSYTLNKLLKAELGFQGFVMSDWAAHHAGVSGALAGLDMSMPGDVDYDSGTSYWGTNLTISVLNGTVPQWRVDDMAVRIMAAYYKVGRDRLWTPPNFSSWTRDEYGFKYYYVSEGPYEKVNQFVNVQRNHSELIRRIGADSTVLLKNDGALPLTGKERLVALIGEDAGSNPYGANGCSDRGCDNGTLAMGWGSGTANFPYLVTPEQAISNEVLKNKNGVFTATDNWAIDQIEALAKTASVSLVFVNADSGEGYINVDGNLGDRRNLTLWRNGDNVIKAAASNCNNTIVIIHSVGPVLVDEWYDNPNVTAILWGGLPGQESGNSLADVLYGRVNPGAKSPFTWGKTREAYQDYLYTEPNNGNGAPQEDFVEGVFIDYRGFDKRNETPIYEFGYGLSYTTFNYSNLQVEVLSAPAYEPASGETEAAPTFGEVGNASDYLYPDGLQRITKFIYPWLNSTDLEASSGDASYGQDASDYLPEGATDGSAQPILPAGGGAGGNPRLYDELIRVSVTIKNTGKVAGDEVPQLYVSLGGPNEPKIVLRQFERITLQPSEETQWSTTLTRRDLANWNVETQDWEITSYPKMVFVGSSSRKLPLRASLPTVH

SEQ ID NO: 45634 - protein, 863 aa, unidentified
MRFPSIFTAVLFAASSALAAPVNTLAYSPPYYPSPWANGQGDWAEAYQRAVDIVSQMTLAEKVNLTTGTGWELELCVGQTGGVPRLGIPGMCAQDSPLGVRDSDYNSAFPAGVNVAATWDKNLAYLRGQAMGQEFSDKGADILLGPAAGPLGRSPDGGRNWEGFSPDPALSGVLFAETIKGIQDAGVVATAKHYIAYEQEHFRQAPEAQGYGFNITESGSANLDDKTMHELYLWPFADAIRAGAGAVMCSYNQINNSYGCQNSYTLNKLLKAELGFQGFVMSDWAAHHAGVSGALAGLDMSMPGDVDCDSGTSYWGTNLTISVLNGTVPQWRVDDMAVRIMAAYYKVGRDRLWTPPNFSSWTRDEYGFKYYYVSEGPYEKVNQFVNVQRNHSELIRRIGADSTVLLKNDGALPLTGKERLVALIGEDAGSNPYGANGCSDRGCDNGTLAMGWGSGTANFPYLVTPEQAISNEVLKNKNGVFTATDNWAIDQIEALAKTASVSLVFVNADSGEGYINVDGNLGDRRNLTLWRNGDNVIKAAASNCNNTIVIIHSVGPVLVNEWYDNPNVTAILWGGLPGQESGNSLADVLYGRVNPGAKSPFTWGKTREAYQDYLYTEPNNGNGAPQEDFVEGVFIDYRGFDKRNETPIYEFGYGLSYTTFNYSNLQVEVLSAPAYEPASGETEAAPTFGEVGNASDYLYPDGLQRITKFIYPWLNSTDLEASSGDASYGQDASDYLPEGATDGSAQPILPAGGGAGGNPRLYDELIRVSVTIKNTGKVAGDEVPQLYVSLGGPNEPKIVLRQFERITLQPSEETQWSTTLTRRDLANWNVETQDWEITSYPKMVFVGSSSRKLPLRASLPTVH

SEQ ID NO: 45635 - protein, 863 aa, unidentified
MRFPSIFTAVLFAASSALAAPVNTLAYSPPYYPSPWANGQGDWAEAYQRAVDIVSQMTLAEKVNLTTGTGWELELCVGQTGGVPRLGIPGMCAQDSPLGVRDSDYNSAFPAGVNVAATWDKNLAYLRGQAMGQEFSDKGADIQLGPAAGPLGRSPDGGRNWEGFSPDPALSGVLFAETIKGIQDAGVVATAKHYIAYEQEHFRQAPEAQGYGFNITESGSANLDDKTMHELYLWPFADAIRAGAGAVMCSYNQINNSYGCQNSYTLNKLLKAELGFQGFVMSDWAAHHAGVSGALAGLDMSMPGDVDYDSGTSYWGTNLTISVLNGTVPQWRVDDMAVRIMAAYYKVGRDRLWTPPNFSSWTRDEYGFKYYYVSEGPYEKVNQFVNVQRNHSELIRRIGADSTVLLKNDGALPLTGKERLVALIGEDAGSNPYGANGCSDRGCDNGTLAMGWGSGTANFPYLVTPEQAISNEVLKNKNGVFTATDNWAIDQIEALAQTASVSLVFVNADSGEGYINVDGNLGDRRNLTLWRNGDNVIKAAASNCNNTIVIIHSVGPVLVDEWYDNPNVTAILWGGLPGQESGNSLADVLYGRVNPGAKSPFTWGKTREAYQDYLYTEPNNGNGAPQEDFVEGVFIDYRGFDKRNETPIYEFGYGLSYTTFNYSNLQVEVLSAPAYEPASGETEAAPTFGEVGNASDYLYPDGLQRITKFIYPWLNSTDLEASSGDASYGQDASDYLPEGATDGSAQPILPAGGGAGGNPRLYDELIRVSVTIKNTGKVAGDEVPQLYVSLGGPNEPKIVLRQFERITLQPSEETQWSTTLTRRDLANWNVETQDWEITSYPKMVFVGSSSRKLPLRASLPTVH

SEQ ID NO: 45636 - protein, 863 aa, unidentified
MRFPSIFTAVLFAASSALAAPVNTLAYSPPYYPSPWANGQGDWAEAYQRAVDIVSQMTLAEKVNLTTGTGWELELCVGQTGGVPRLGIPGMCAQDSPLGVRDSDYNSAFPAGVNVAATWDKNLAYLRGQAMGQEFSDKGADIQLGPAAGPLGRSPDGGRNWEGFSPDPALSGVLFAETIKGIQDAGVVATAKHYIAYEQEHFRQAPEAQGYGFNITESGSANLDDKTMHELYLWPFADAIRAGAGAVMCSYNQINNSYGCQNSYTLNKLLKAELGFQGFVMSDWAAHHAGVSGALAGLDMSMPGDVDYDSGTSYWGTNLTISVLNGTVPQWRVDDMAVRIMAAYYKVGRDRLWTPPNFSSWTRDEYGFKYYYVSEGPYEKVNQFVNVQRNHSELIRRIGADSTVLLKNDGALPLTGKERLVALIGEDAGSNPYGANGCSDRGCDNGTLAMGWGSGTANFPYLVTPEQAISNEVLKNKNGVFTVTDNWAIDQIEALAKTASVSLVFVNADSGEGYINVDGNLGDRRNLTLWRNGDNVIKAAASNCNNTIVIIHSVGPVLVNEWYDNPNVTAILWGGLPGQESGNSLADVLYGRVNPGAKSPFTWGKTREAYQDYLYTEPNNGNGAPQEDFVEGVFIDYRGFDKRNETPIYEFGYGLSYTTFNYSNLQVEVLSAPAYEPASGETEAAPTFGEVGNASDYLYPDGLQRITKFIYPWLNSTDLEASSGDASYGQDASDYLPEGATDGSAQPILPAGGGAGGNPRLYDELIRVSVTIKNTGKVAGDEVPQLYVSLGGPNEPKIVLRQFERITLQPSEETQWSTTLTRRDLANWNVETQDWEITSYPKMVFVGSSSRKLPLRASLPTVH

SEQ ID NO: 45637 - protein, 847 aa, Unidentified
SLSSAEDELAYSPPYYPSPWANGQGDWAQAYQRAVDIVSQMTLDEKVNLTTGTGWELELCVGQTGGVPRLGVPGMCLQDSPLGVRDSDYNSAFPAGMNVAATWDKNLAYLRGKAMGQEFSDKGADIQLGPAAGPLGRSPDGGRNWEGFSPDPALSGVLFAETIKGIQDAGVVATAKHYIAYEQEHFRQAPEAQGFGFNISESGSANLDDKTMHELYLWPFADAIRAGAGAVMCSYNQINNSYGCQNSYTLNKLLKAELGFQGFVMSDWAAHHAGVSGALAGLDMSMPGDVDYDSGTSYWGTNLTISVLNGTVPQWRVDDMAVRIMAAYYKVGRDRLWTPPNFSSWTRDEYGYKYYYVSEGPYEKVNQYVNVQRNHSELIRRIGADSTVLLKNDGALPLTGKERLVALIGEDAGSNPYGANGCSDRGCDNGTLAMGWGSGTANFPYLVTPEQAISNEVLKHKNGVFTATDNWAIDQIEALAKTASVSLVFVNADSGEGYINVDGNLGDRRNLTLWRNGDNVIKAAASNCNNTIVVIHSVGPVLVNEWYDNPNVTAILWGGLPGQESGNSLADVLYGRVNPGAKSPFTWGKTREAYQDYLVTEPNNGNGAPQEDFVEGVFIDYRGFDKRNETPIYEFGYGLSYTTFNYSNLEVQVLSAPAYEPASGETEAAPTFGEVGNASDYLYPSGLQRITKFIYPWLNGTDLEASSGDASYGQDSSDYLPEGATDGSAQPILPAGGGPGGNPRLYDELIRVSVTIKNTGKVAGDEVPQLYVSLGGPNEPKIVLRQFERITLQPSEETKWSTTLTRRDLANWNVEKQDWEITSYPKMVFVGSSSRKLPLRASLPTVH

SEQ ID NO: 45638 - protein, 849 aa, Aspergillus niger
ALRKSSMADELAYSPPYYPSPWANGQGDWAQAYQRAVDIVSQMTLDEKVNLTTGTGWELELCVGQTGGVPRLGVPGMCLQDSPLGVRDSDYNSAFPAGMNVAATWDKNLAYLRGKAMGQEFSDKGADIQLGPAAGPLGRSPDGGRNWEGFSPDPALSGVLFAETIKGIQDAGVVATAKHYIAYEQEHFRQAPEAQGFGFNISESGSANLDDKTMHELYLWPFADAIRAGAGAVMCSYNQINNSYGCQNSYTLNKLLKAELGFQGFVMSDWAAHHAGVSGALAGLDMSMPGDVDYDSGTSYWGTNLTISVLNGTVPQWRVDDMAVRIMAAYYKVGRDRLWTPPNFSSWTRDEYGYKYYYVSEGPYEKVNQYVNVQRNHSELIRRIGADSTVLLKNDGALPLTGKERLVALIGEDAGSNPYGANGCSDRGCDNGTLAMGWGSGTANFPYLVTPEQAISNEVLKHKNGVFTATDNWAIDQIEALAKTASVSLVFVNADSGEGYINVDGNLGDRRNLTLWRNGDNVIKAAASNCNNTIVVIHSVGPVLVNEWYDNPNVTAILWGGLPGQESGNSLADVLYGRVNPGAKSPFTWGKTREAYQDYLVTEPNNGNGAPQEDFVEGVFIDYRGFDKRNETPIYEFGYGLSYTTFNYSNLEVQVLSAPAYEPASGETEAAPTFGEVGNASDYLYPSGLLRITKFIYPWLNGTDLEASSGDASYGQDSSDYLPEGATDGSAQPILPAGGGPGGNPRLYDELIRVSVTIKNTGKVAGDEVPQLYVSLGGPNEPKIVLRQFERITLQPSEETKWSTTLTRRDLANWNVEKQDWEITSYPKMVFVGSSSRKLPLRASLPTVH

SEQ ID NO: 45639 - protein, 551 aa, Penicillium chrysogenum
SPWMTGEGDGWSEAYTRAVEFVSNLTLAEKVNLTTGSGWMQESCVGETGGIPRLGMWGMCMQDAPLGIRFSDYNSAFPAGVNVAAAWDKRLAYQRGVAMGEEHRDKGVDVQLGPVAGPLGKFPDGGRNWEGFSPDPVLTGVMMAETIKGMQDAGVIACAKHFIGNEQEHFRQSGEAQGYGYNISQSLSSNIDDKTMHELYLWPFVDSIRAGVGSVMCSYNQINNSYGGANSYSLNKLLKGELGFQGFVMSDWGAHHSGVESALAGLDMSMPGDVILGSPYSYWGTNLTISVLNGTMPEWRVDDMAVRIMSAYYKVGRDREFRTPPNFSSWTRDEYNFQHSMVSEDWGKVNERVNVQRDHAQIIRKIGSDSTVLLKNKGGALPLTHNEKFISILGEDAGSNAHGANGCDDRGCDNGTLAMGWGSGTANYPYLITPEQAIQNEALEYSNGQTNVFAVTDNWALTQMAALASQQADVALVFVNADSGEGFINVDGNEGDRKNLTLWKNGEEVIKTASQHCNNTIVVIHSTSAVLISDWYDNDNITAIIWAGLPG

SEQ ID NO: 45640 - protein, 860 aa, Aspergillus niger
MRFTSIEAVALTAVSLASADELAYSPPYYPSPWANGQGDWAQAYQRAVDIVSQMTLDEKVNLTTGTGWELELCVGQTGGVPRLGVPGMCLQDSPLGVRDSDYNSAFPAGMNVAATWDKNLAYLRGKAMGQEFSDKGADIQLGPAAGPLGRSPDGGRNWEGFSPDPALSGVLFAETIKGIQDAGVVATAKHYIAYEQEHFRQAPEAQGYGFNISESGSANLDDKTMHELYLWPFADAIRAGAGAVMCSYNQINNSYGCQNSYTLNKLLKAELGFQGFVMSDWAAHHAGVSGALAGLDMSMPGDVDYDSGTSYWGTNLTISVLNGTVPQWRVDDMAVRIMAAYYKVGRDRLWTPPNFSSWTRDEYGYKYYYVSEGPYEKVNQYVNVQRNHSELIRRIGADSTVLLKNDGALPLTGKERLVALIGEDAGSNPYGANGCSDRGCDNGTLAMGWGSGTANFPYLVTPEQAISNEVLKHKNGVFTATDNWAIDQIEALAKTASVSLVFVNADSGEGYINVDGNLGDRRNLTLWRNGDNVIKAAASNCNNTIVVIHSVGPVLVNEWYDNPNVTAILWGGLPGQESGNSLADVLYGRVNPGAKSPFTWGKTREAYQDYLVTEPNNGNGAPQEDFVEGVFIDYRGFDKRNETPIYEFGYGLSYTTFNYSNLEVQVLSAPAYEPASGETEAAPTFGEVGNASDYLYPSGLQRITKFIYPWLNGTDLEASSGDASYGQDSSDYLPEGATDGSAQPILPAGGGPGGNPRLYDELIRVSVTIKNTGKVAGDEVPQLYVSLGGPNEPKIVLRQFERITLQPSEETKWSTTLTRRDLANWNVEKQDWEITSYPKMVFVGSSSRKLPLRASLPTVH

SEQ ID NO: 45641 - protein, 860 aa, Aspergillus luchuensis
MRFTLIEAVALTAVSLASADELAYSPPYYPSPWANGQGDWAQAYQRAVDIVSQMTLAEKVNLTTGTGWELELCVGQTGGVPRLGVPGMCLQDSPLGVRDSDYNSAFPSGMNVAATWDKNLAYLRGKAMGQEFSDKGADIQLGPAAGPLGRSPDGGRNWEGFSPDPALSGVLFAETIKGIQDAGVVATAKHYIAYEQEHFRQAPEAQGYGFNISESGSANLDDKTMHELYLWPFADAIRAGAGAVMCSYNQINNSYGCQNSYTLNKLLKAELGFQGFVMSDWAAHHAGVSGALAGLDMSMPGDVDYDSGTSYWGTNLTVSVLNGTVPQWRVDDMAVRIMAAYYKVGRDRLWTPPNFSSWTRDEYGYKYYYVSEGPYEKVNHYVNVQRNHSELIRRIGADSTVLLKNDGALPLTGKERLVALIGEDAGSNPYGANGCSDRGCDNGTLAMGWGSGTANFPYLVTPEQAISNEVLKNKNGVFTATDNWAIDQIEALAKTASVSLVFVNADSGEGYINVDGNLGDRRNLTLWRNGDNVIKAAASNCNNTIVIIHSVGPVLVNEWYDNPNVTAILWGGLPGQESGNSLADVLYGRVNPGAKSPFTWGKTREAYQDYLVTEPNNGNGAPQEDFVEGVFIDYRGFDKRNETPIYEFGYGLSYTTFNYSNLEVQVLSAPAYEPASGETEAAPTFGEVGNASNYLYPDGLQKITKFIYPWLNSTDLEASSGDASYGQDSSDYLPEGATDGSAQPILPAGGGPGGNPRLYDELIRVSVTIKNTGKVAGDEVPQLYVSLGGPNEPKIVLRQFERITLQPSEETKWSTTLTRRDLANWNVEKQDWEITSYPKMVFVGSSSRKLPLRASLPTVH

SEQ ID NO: 45642 - protein, 860 aa, unidentified
MRFTSIEAVALTAVSLASADELAYSPPYYPSPWANGQGDWAEAYQRAVDIVSQMTLAEKVNLTTGTGWELELCVGQTGGVPRLGIPGMCAQDSPLGVRDSDYNSAFPAGVNVAATWDKNLAYLRGQAMGQEFSDKGADIQLGPAAGPLGRSPDGGRNWEGFSPDPALSGVLFAETIKGIQDAGVVATAKHYIAYEQEHFRQAPEAQGYGFNITESGSANLDDKTMHELYLWPFADAIRAGAGAVMCSYNQINNSYGCQNSYTLNKLLKAELGFQGFVMSDWAAHHAGVSGALAGLDMSMPGDVDYDSGTSYWGTNLTISVLNGTVPQWRVDDMAVRIMAAYYKVGRDRLWTPPNFSSWTRDEYGFKYYYVSEGPYEKVNQFVNVQRNHSELIRRIGADSTVLLKNDGALPLTGKERLVALIGEDAGSNPYGANGCSDRGCDNGTLAMGWGSGTANFPYLVTPEQAISNEVLKNKNGVFTATDNWAIDQIEALAKTASVSLVFVNADSGEGYINVDGNLGDRRNLTLWRNGDNVIKAAASNCNNTIVIIHSVGPVLVNEWYDNPNVTAILWGGLPGQESGNSLADVLYGRVNPGAKSPFTWGKTREAYQDYLYTEPNNGNGAPQEDFVEGVFIDYRGFDKRNETPIYEFGYGLSYTTFNYSNLQVEVLSAPAYEPASGETEAAPTFGEVGNASDYLYPDGLQRITKFIYPWLNSTDLEASSGDASYGQDASDYLPEGATDGSAQPILPAGGGAGGNPRLYDELIRVSVTIKNTGKVAGDEVPQLYVSLGGPNEPKIVLRQFERITLQPSKETQWSTTLTRRDLANWNVETQDWEITSYPKMVFAGSSSRKLPLRASLPTVH

SEQ ID NO: 45643 - protein, 860 aa, unidentified
MRFTLIEAVALTAVSLASADELAYSPPYYPSPWANGQGDWAEAYQRAVDIVSQMTLAEKVNLTTGTGWELELCVGQTGGVPRLGIPGMCAQDSPLGVRDSDYNSAFPAGVNVAATWDKNLAYLRGQAMGQEFSDKGADIQLGPAAGPLGRSPDGGRNWEGFSPDPALSGVLFAETIKGIQDAGVVATAKHYIAYEQEHFRQAPEAQGYGFNVTESGSANLDDKTMHELYLWPFADAIRAGAGAVMCSYNQINNSYGCQNSYTLNKLLKAELGFQGFVMSDWAAHHAGVSGALAGLDMSMPGDVDYDSGTSYWGTNLTISVLNGTVPQWRVDDMAVRIMAAYYKVGRDRLWTPPNFSSWTRDEYGFKYYYVSEGPYEKVNQFVNVQRNHSELIRRIGADSTVLLKNDGALPLTGKERLVALIGEDAGSNPYGANGCSDRGCDNGTLAMGWGSGTANFPYLVTPEQAISNEVLKNKNGVFTATDNWAIDQIEALAKTASVSLVFVNADSGEGYINVDGNLGDRRNLTLWRNGDNVIKAAASNCNNTIVIIHSVGPVLVNEWYDNPNVTAILWGGLPGQESGNSLADVLYGRVNPGAKSPFTWGRTREAYQDYLYTEPNNGNGAPQEDFVEGVFIDYRGFDKRNETPIYEFGYGLSYTTFNYSNLQVEVLSAPAYEPASGETEAAPTFGEVGNASDYLYPDGLQRITKFIYPWLNSTDLEASSGDASYGQDASDYLPEGATDGSAQPILPAGGGAGGNPRLYDELIRVSVTIKNTGKVAGDEVPQLYVSLGGPNEPKIVLRQFERITLQPSEETQWSTTLTRRDLANWNVETQDWEITSYPKMVFVGSSSRKLPLRASLPTVH

SEQ ID NO: 45644 - protein, 860 aa, unidentified
MRFTLIEAVALTAVSLASADELAYSPPYYPSPWANGQGDWAQAYQRAVDIVSQMTLAEKVNLTTGTGWELELCVGQTGGVPRLGVPGMCLQDSPLGVRDSDYNSAFPSGMNVAATWDKNLAYLRGKAMGQEFSDKGADIQLGPAAGPLGRSPDGGRNWEGFSPDPALSGVLFAETIKGIQDAGVVATAKHYIAYEQEHFRQAPEAQGYGFNISESGSANLDDKTMHELYLWPFADAIRAGAGAVMCSYNQINNSYGCQNSYTLNKLLKAELGFQGFVMSDWAAHHAGVSGALAGLDMSMPGDVDYDSGTSYWGTNLTVSVLNGTVPQWRVDDMAVRIMAAYYKVGRDRLWTPPNFSSWTRDEYGYKYYYVSEGPYEKVNHYVNVQRNHSELIRRIGADSTVLLKNDGALPLTGKERLVALIGEDAGSNPYGANGCSDRGCDNGTLAMGWGSGTANFPYLVTPEQAISNEVLKNKNGVFTATDNWAIDQIEALAKTASVSLVFVNADSGEGYINVDGNLGDRKNLTLWRNGDNVIKAAASNCNNTIVIIHSVGPVLVNEWYDNPNVTAILWGGLPGQESGNSLADVLYGRVNPGAKSPFTWGKTREAYQDYLVTEPNNGNGAPQEDFVEGVFIDYRGFDKRNETPIYEFGYGLSYTTFNYSNLEVQVLSAPAYEPASGETEAAPTFGEVGNASNYLYPDGLQKITKFIYPWLNSTDLEASSGDASYGQDSSDYLPEGATDGSAQPILPAGGGPGGNPRLYDELIRVSVTIKNTGKVAGDEVPQLYVSLGGPNEPKIVLRQFERITLQPSEETKWSTTLTRRDLANWNVEKQDWEITSYPKMVFVGSSSRKPPLRASLPTVH

SEQ ID NO: 45645 - protein, 863 aa, unidentified
MRFPSIFTAVLFAASSALAAPVNTLAYSPPYYPSPWANGQGDWAEAYQRAVDIVSQMTLAEKVNLTTGTGWELELCVGQTGGVPRLGIPGMCAQDSPLGVRDSDYNSAFPAGVNVAATWDKNLAYLRGQAMGQEFSDKGADILLGPAAGPLGRSPDGGRNWEGFSPDPALSGVLFAETIKGIQDAGVVATAKHYIAYEQEHFRQAPEAQGYGFNITESGSANLDDKTMHELYLWPFADAIRAGAGAVMCSYNQINNSYGCQNSYTLNKLLKAELGFQGFVMSDWAAHHAGVSGALAGLDMSMPGDVDYDSGTSYWGTNLTISVLNGTVPQWRVDDMAVRIMAAYYKVGRDRLWTPPNFSSWTRDEYGFKYYYVSEGPYEKVNQFVNVQRNHSELIRRIGADSTVLLKNDGALPLTGKERLVALIGEDAGSNPYGANGCSDRGCDNGTLAMGWGSGTANFPYLVTPEQAISNEVLKNKNGVFTATDNWAIDQIEALAKTASVSLVFVNADSGEGYINVDGNLGDRRNLTLWRNGDNVIKAAASNCNNTIVIIHSVGPVLVNEWYDNPNVTAILWGGLPGQESGNSLADVLYGRVNPGAKSPFTWGKTREAYQDYLYTEPNNGNGAPQEDFVEGVFIDYRGFDMRNETPIYEFGYGLSYTTFNYSNLQVEVLSAPAYEPASGETEAAPTFGEVGNASDYLYPDGLQRITKFIYPWLNSTDLEASSGDASYGQDASDYLPEGATDGSAQPILPAGGGAGGNPRLYDELIRVSVTIKNTGKVAGDEVPQLYVSLGGPNEPKIVLRQFERITLQPSEETQWSTTLTRRDLANWNVETQDWEITSYPKMVFVGSSSRKLPLRASLPTVH

SEQ ID NO: 45646 - protein, 863 aa, Synthetic construct
MRFPSIFTAVLFAASSALAAPVNTLAYSPPYYPSPWANGQGDWAEAYQRAVDIVSQMTLAEKVNLTTGTGWELELCVGQTGGVPRLGIPGMCAQDSPLGVRDSDYNSAFPAGVNVAATWDKNLAYLRGQAMGQEFSDKGADIQLGPAAGPLGRSPDGGRNWEGFSPDPALSGVLFAETIKGIQDAGVVATAKHYIAYEQEHFRQAPEAQGYGFNITESGSANLDDKTMHELYLWPFADAIRAGAGAVMCSYNQINNSYGCQNSYTLNKLLKAELGFQGFVMSDWAAHHAGVSGALAGLDMSMPGDVDYDSGTSYWGTNLTISVLNGTVPQWRVDDMAVRIMAAYYKVGRDRLWTPPNFSSWTRDEYGFKYYYVSEGPYEKVNQFVNVQRNHSELIRRIGADSTVLLKNDGALPLTGKERLVALIGEDAGSNPYGANGCSDRGCDNGTLAMGWGSGTANFPYLVTPEQAISNEVLKNKNGVFTATDNWAIDQIEALAKTASVSLVFVNADSGEGYINVDGNLGDRRNLTLWRNGDNVIKAAASNCNNTIVIIHSVGPVLVNEWYDNPNVTAILWGGLPGQESGNSLADVLYGRVNPGAKSPFTWGKTREAYQDYLYTEPNNGNGAPQEDFVEGVFIDYRGFDKRNETPIYEFGYGLSYTTFNYSNLQVEVLSAPAYEPASGETEAAPTFGEVGNASDYLYPDGLQRITKFIYPWLNSTDLEASSGDASYGQDASDYLPEGATDGSAQPILPAGGGAGGNPRLYDELIRVSVTIKNTGKVAGDEVPQLYVSLGGPNEPKIVLRQFERITLQPSEETQWSTTLTRRDLANWNVETQDWEITSYPKMVFVGSSSRKLPLRASLPTVH

SEQ ID NO: 45647 - protein, 863 aa, unidentified
MRFPSIFTAVLFAASSALAAPVNTLAYSPPYYPSPWANGQGDWAEAYQRAVDIVSQMTLAEKVNLTTGTGWELELCVGQTGGVPRLGIPGMCAQDSPLGVRDSDYNSAFPAGVNVAATWDKNLAYLRGQAMGQEFSDKGADIQLGPAAGPLGRSPDGGRNWEGFSPDPALSGVLFAETIKGIQDAGVVATAKHYIAYEQEHFRQAPEAQGYGFNITESGSANLDDKTMHELYLWPFADAIRAGAGAVMCSYNQINNSYGCQNSYTLNKLLKAELGFQGFVMSDWAAHHAGVSGALAGLDMSMPGDVDGDSGTSYWGTNLTISVLNGTVPQWRVDDMAVRIMAAYYKVGRDRLWTPPNFSSWTRDEYGFKYYYVSEGPYEKVNQFVNVQRNHSELIRRIGADSTVLLKNDGALPLTGKERLVALIGEDAGSNPYGANGCSDRGCDNGTLAMGWGSGTANFPYLVTPEQAISNEVLKNKNGVFTATDNWAIDQIEALAKTASVSLVFVNADSGEGYINVDGNLGDRRNLTLWRNGDNVIKAAASNCNNTIVIIHSVGPVLVNEWYDNPNVTAILWGGLPGQESGNSLADVLYGRVNPGAKSPFTWGKTREAYQDYLYTEPNNGNGAPQEDFVEGVFIDYRGFDKRNETPIYEFGYGLSYTTFNYSNLQVEVLSAPAYEPASGETEAAPTFGEVGNASDYLYPDGLQRITKFIYPWLNSTDLEASSGDASYGQDASDYLPEGATDGSAQPILPAGGGAGGNPRLYDELIRVSVTIKNTGKVAGDEVPQLYVSLGGPNEPKIVLRQFERITLQPSEETQWSTTLTRRDLANWNVETQDWEITSYPKMVFVGSSSRKLPLRASLPTVH

SEQ ID NO: 45648 - protein, 863 aa, unidentified
MRFPSIFTAVLFAASSALAAPVNTLAYSPPYYPSPWANGQGDWAEAYQRAVDIVSQMTLAEKVNLTTGTGWELELCVGQTGGVPRLGIPGMCAQDSPLGVRDSDYNSAFPAGVNVAATWDKNLAYLRGQAMGQEFSDKGADIQLGPAAGPLGRSPDGGRNWEGFSPDPALSGVLFAETIKGIQDAGVVATAKHYIAYEQEHFRQAPEAQGYGFNITESGSANLDDKTMHELYLWPFADAIRAGAGAVMCSYNQINNSYGCQNSYTLNKLLKAELGFQGFVMSDWAAHHAGVSGALAGLDMSMPGDVDVDSGTSYWGTNLTISVLNGTVPQWRVDDMAVRIMAAYYKVGRDRLWTPPNFSSWTRDEYGFKYYYVSEGPYEKVNQFVNVQRNHSELIRRIGADSTVLLKNDGALPLTGKERLVALIGEDAGSNPYGANGCSDRGCDNGTLAMGWGSGTANFPYLVTPEQAISNEVLKNKNGVFTATDNWAIDQIEALAKTASVSLVFVNADSGEGYINVDGNLGDRRNLTLWRNGDNVIKAAASNCNNTIVIIHSVGPVLVNEWYDNPNVTAILWGGLPGQESGNSLADVLYGRVNPGAKSPFTWGKTREAYQDYLYTEPNNGNGAPQEDFVEGVFIDYRGFDKRNETPIYEFGYGLSYTTFNYSNLQVEVLSAPAYEPASGETEAAPTFGEVGNASDYLYPDGLQRITKFIYPWLNSTDLEASSGDASYGQDASDYLPEGATDGSAQPILPAGGGAGGNPRLYDELIRVSVTIKNTGKVAGDEVPQLYVSLGGPNEPKIVLRQFERITLQPSEETQWSTTLTRRDLANWNVETQDWEITSYPKMVFVGSSSRKLPLRASLPTVH

SEQ ID NO: 45649 - protein, 863 aa, unidentified
MRFPSIFTAVLFAASSALAAPANTLAYSPPYYPSPWANGQGDWAEAYQRAVDIVSQMTLAEKVNLTTGTGWELELCVGQTGGVPRLGIPGMCAQDSPLGVRDSDYNSAFPAGVNVAATWDKNLAYLRGQAMGQEFSDKGADIQLGPAAGPLGRSPDGGRNWEGFSPDPALSGVLFAETIKGIQDAGVVATAKHYIAYEQEHFRQAPEAQGYGFNITESGSANLDDKTMHELYLWPFADAIRAGAGAVMCSYNQINNSYGCQNSYTLNKLLKAELGFQGFVMSDWAAHHAGVSGALAGLDMSMPGDVDYDSGTSYWGTNLTISVLNGTVPQWRVDDMAVRIMAAYYKVGRDRLWTPPNFSSWTRDEYGFKYYYVSEGPYEKVNQFVNVQRNHSELIRRIGADSTVLLKNDGALPLTGKERLVALIGEDAGSNPYGANGCSDRGCDNGTLAMGWGSGTANFPYLVTPEQAISNEVLKNKNGVFTATDNWAIDQIEALAKTASVSLVFVNADSGEGYINVDGNLGDRRNLTLWRNGDNVIKAAASNCNNTIVIIHSVGPVLVNEWYDNPNVTAILWGGLPGQESGNSLADVLYGRVNPGAKSPFTWGKTREAYQDYLYTEPNNGNGAPQEDFVEGVFIDYRGFDKRNETPIYEFGYGLSYTTFNYSNLQVEVLSAPAYEPASGETEAAPTFGEVGNASDYLYPDGLQRITKFIYPWLNSTDLEASSGDASYGQDASDYLPEGATDGSAQPILPAGGGAGGNPRLYDELIRVSVTIKNTGKVAGDEVPQLYVSLGGPNEPKIVLRQFERITLQPSEETQWSTTLTRRDLANWNVETQDWEITSYPKMVFVGSSSRKLPLRASLPTVH

SEQ ID NO: 45650 - protein, 863 aa, unidentified
MRFPSIFTAVLFAASSALAAPANTLAYSPPYYPSPWANGQGDWAEAYQRAVDIVSQMTLAEKVNLTTGTGWELELCVGQTGGVPRLGIPGMCAQDSPLGVRDSDYNSAFPAGVNVAATWDKNLAYLRGQAMGQEFSDKGADIQLGPAAGPLGRSPDGGRNWEGFSPDPALSGVLFAETIKGIQDAGVVATAKHYIAYEQEHFRQAPEAQGYGFNITESGSANLDDKTMHELYLWPFADAIRAGAGAVMCSYNQINNSYGCQNSYTLNKLLKAELGFQGFVMSDWAAHHAGVSGALAGLDMSMPGDVDYDSGTSYWGTNLTISVLNGTVPQWRVDDMAVRIMAAYYKVGRDRLWTPPNFSSWTRDEYGFKYYYVSEGPYEKVNQFVNVQRNHSELIRRIGADSTVLLKNDGALPLTGKERLVALIGEDAGSNPYGANGCSDRGCDNGTLAMGWGSGTANFPYLVTPEQAISNEVLKNKNGVFTATDNWAIDQIEALAKTASVSLVFVNADSGEGYINVDGNLGDRRNLTLWRNGDNVIKAAASNCNNTIVIIHSVGPVLVNEWYDNPNVTAILWGGLPGQESGNSLADVLYGRVNPGAKSPFTWGKTREAYQDYLYTEPNNGNGAPQEDFVEGVFIDYRGFDKRNETPIYEFGYGLSYTTFNYSNLQVEVLSAPAYEPASGETEAAPTFGEVGNASDYLYPDGLQRITKFIYPWLNSTDLEASSGDASYGQDASDYLPEGATDGSAQPILPAGGGAGGNPRLYDELIRVSVTIKNTGKVAGDEVPQLYVSLGGPNEPKIVLRQFERITLQPSEEMQWSTTLTRRDLANWNVETQDWEITSYPKMVFVGSSSRKLPLRASLPTVH

SEQ ID NO: 45651 - protein, 863 aa, unidentified
MRFPSIFTAVLFAASSALAAPVNTLAYSPPYYPSPWANGQGDWAEAYQRAVDIVSQMTLAEKVNLTTGTGWELELCVGQTGGVPRLGIPGMCAQDSPLGVRDSDYNSAFPAGVNVAATWDKNLAYLRGQAMGQEFSDKGADIQLGPAAGPLGRSPDGGRNWEGFSPDPALSGVLFAETIKGIQDAGVVATAKHYIAYEQEHFRQAPEAQGYGFNITESGSANLDDKTMHELYLWPFADAIRAGAGAVMCSYNQINNSYGCQNSYTLNKLLKAELGFQGFVMSDWAAHHAGVSGALAGLDMSMPGDVDADSGTSYWGTNLTISVLNGTVPQWRVDDMAVRIMAAYYKVGRDRLWTPPNFSSWTRDEYGFKYYYVSEGPYEKVNQFVNVQRNHSELIRRIGADSTVLLKNDGALPLTGKERLVALIGEDAGSNPYGANGCSDRGCDNGTLAMGWGSGTANFPYLVTPEQAISNEVLKNKNGVFTATDNWAIDQIEALAKTASVSLVFVNADSGEGYINVDGNLGDRRNLTLWRNGDNVIKAAASNCNNTIVIIHSVGPVLVNEWYDNPNVTAILWGGLPGQESGNSLADVLYGRVNPGAKSPFTWGKTREAYQDYLYTEPNNGNGAPQEDFVEGVFIDYRGFDKRNETPIYEFGYGLSYTTFNYSNLQVEVLSAPAYEPASGETEAAPTFGEVGNASDYLYPDGLQRITKFIYPWLNSTDLEASSGDASYGQDASDYLPEGATDGSAQPILPAGGGAGGNPRLYDELIRVSVTIKNTGKVAGDEVPQLYVSLGGPNEPKIVLRQFERITLQPSEETQWSTTLTRRDLANWNVETQDWEITSYPKMVFVGSSSRKLPLRASLPTVH

SEQ ID NO: 45652 - protein, 863 aa, unidentified
MRFPSIFTAVLFAASSALAAPVNTLAYSPPYYPSPWANGQGDWAEAYQRAVDIVSQMTLAEKVNLTTGTGWELELCVGQTGGVPRLGIPGMCAQDSPLGVRDSDYNSAFPAGVNVAATWDKNLAYLRGQAMGQEFSDKGADIQLGPAAGPLGRSPDGGRNWEGFSPDPALSGVLFAETIKGIQDAGVVATAKHYIAYEQEHFRQAPEAQGYGFNITESGSANLDDKTMHELYLWPFADAIRAGAGAVMCSYNQINNSYGCQNSYTLNKLLKAELGFQGFVMSDWAAHHAGVSGALAGLDMSMPGDADYDSGTSYWGTNLTISVLNGTVPQWRVDDMAVRIMAAYYKVGRDRLWTPPNFSSWTRDEYGFKYYYVSEGPYEKVNQFVNVQRNHSELIRRIGADSTVLLKNDGALPLTGKERLVALIGEDAGSNPYGANGCSDRGCDNGTLAMGWGSGTANFPYLVTPEQAISNEVLKNKNGVFTATDNWAIDQIEALAKTASVSLVFVNADSGEGYINVDGNLGDRRNLTLWRNGDNVIKAAASNCNNTIVIIHSVGPVLVNEWYDNPNVTAILWGGLPGQESGNSLADVLYGRVNPGAKSPFTWGKTREAYQDYLYTEPNNGNGAPQEDFVEGVFIDYRGFDKRNETPIYEFGYGLSYTTFNYSNLQVEVLSAPAYEPASGETEAAPTFGEVGNASDYLYPDGLQRITKFIYPWLNSTDLEASSGDASYGQDASDYLPEGATDGSAQPILPAGGGAGGNPRLYDELIRVSVTIKNTGKVAGDEVPQLYVSLGGPNEPKIVLRQFERITLQPSEETQWSTTLTRRDLANWNVETQDWEITSYPKMVFVGSSSRKLPLRASLPTVH

SEQ ID NO: 45653 - protein, 863 aa, unidentified
MRFPSIFTAVLFAASSALAAPVNTLAYSPPYYPSPWANGQGDWAEAYQRAVDIVSQMTLAEKVNLTTGTGWELELCVGQTGGVPRLGIPGMCAQDSPLGVRDSDYNSAFPAGVNVAATWDKNLAYLRGQAMGQEFSDKGADIQLGPAAGPLGRSPDGGRNWEGFSPDPALSGVLFAETIKGIQDAGVVATAKHYIAYEQEHFRQAPEAQGYGFNITESGSANLDDKTMHELYLWPFADAIRAGAGAVMCSYNQINNSYGCQNSYTLNKLLKAELGFQGFVMSDWAAHHAGVSGALAGLDMSMPGDVDCDSGTSYWGTNLTISVLNGTVPQWRVDDMAVRIMAAYYKVGRDRLWTPPNFSSWTRDEYGFKYYYVSEGPYEKVNQFVNVQRNHSELIRRIGADSTVLLKNDGALPLTGKERLVALIGEDAGSNPYGANGCSDRGCDNGTLAMGWGSGTANFPYLVTPEQAISNEVLKNKNGVFTATDNWAIDQIEALAKTASVSLVFVNADSGEGYINVDGNLGDRRNLTLWRNGDNVIKAAASNCNNTIVIIHSVGPVLVNEWYDNPNVTAILWGGLPGQESGNSLADVLYGRVNPGAKSPFTWGKTREAYQDYLYTEPNNGNGAPQEDFVEGVFIDYRGFDKRNETPIYEFGYGLSYTTFNYSNLQVEVLSAPAYEPASGETEAAPTFGEVGNASDYLYPDGLQRITKFIYPWLNSTDLEASSGDASYGQDASDYLPEGATDGSAQPILPAGGGAGGNPRLYDELIRVSVTIKNTGKVAGDEVPQLYVSLGGPNEPKIVLRQFERITLQPSEETQWSTTLTRRDLANWNVETQDWEITSYPKMVFVGSSSRKLPLRASLPTVH

SEQ ID NO: 45654 - protein, 863 aa, unidentified
MRFPSIFTAVLFAASSALAAPDNTLAYSPPYYPSPWANGQGDWAEAYQRAVDIVSQMTLAEKVNLTTGTGWELELCVGQTGGVPRLGIPGMCAQDSPLGVRDSDYNSAFPAGVNVAATWDKNLAYLRGQAMGQEFSDKGADIQLGPAAGPLGRSPDGGRNWEGFSPDPALSGVLFAETIKGIQDAGVVATAKHYIAYEQEHFRQAPEAQGYGFNITESGSANLDDKTMHELYLWPFADAIRAGAGAVMCSYNQINNSYGCQNSYTLNKLLKAELGFQGFVMSDWAAHHAGVSGALAGLDMSMPGDVDCDSGTSYWGTNLTISVLNGTVPQWRVDDMAVRIMAAYYKVGRDRLWTPPNFSSWTRDEYGFKYYYVSEGPYEKVNQFVNVQRNHSELIRRIGADSTVLLKNDGALPLTGKERLVALIGEDAGSNPYGANGCSDRGCDNGTLAMGWGSGTANFPYLVTPEQAISNEVLKNKNGVFTATDNWAIDQIEALAKTASVSLVFVNADSGEGYINVDGNLGDRRNLTLWRNGDNVIKAAASNCNNTIVIIHSVGPVLVNEWYDNPNVTAILWGGLPGQESGNSLADVLYGRVNPGAKSPFTWGKTREAYQDYLYTEPNNGNGAPQEDFVEGVFIDYRGFDKRNETPIYEFGYGLSYTTFNYSNLQVEVLSAPAYEPASGETEAAPTFGEVGNASDYLYPDGLQRITKFIYPWLNSTDLEASSGDASYGQDASDYLPEGATDGSAQPILPAGGGAGGNPRLYDELIRVSVTIKNTGKVAGDEVPQLYVSLGGPNEPKIVLRQFERITLQPSEETQWSTTLTRRDLANWNVETQDWEITSYPKMVFVGSSSRKLPLRASLPTVH

SEQ ID NO: 45655 - protein, 863 aa, unidentified
MRFPSIFTAVLFAASSALAAPDNTLAYSPPYYPSPWANGQGDWAEAYQRAVDIVSQMTLAEKVNLTTGTGWELELCVGQTGGVPRLGIPGMCAQDSPLGVRDSDYNSAFPAGVNVAATWDKNLAYLRGQAMGQEFSDKGADIQLGPAAGPLGRSPDGGRNWEGFSPDPALSGVLFAETIKGIQDAGVVATAKHYIAYEQEHFRQAPEAQGYGFNITESGSANLDDKTMHELYLWPFADAIRAGAGAVMCSYNQINNSYGCQNSYTLNKLLKAELGFQGFVMSDWAAHHAGVSGALAGLDMSMPGDVDYDSGTSYWGTNLTISVLNGTVPQWRVDDMAVRIMAAYYKVGRDRLWTPPNFSSWTRDEYGFKYYYVSEGPYEKVNQFVNVQRNHSELIRRIGADSTVLLKNDGALPLTGKERLVALIGEDAGSNPYGANGCSDRGCDNGTLAMGWGSGTANFPYLVTPEQAISNEVLKNKNGVFTATDNWAIDQIEALAKTASVSLVFVNADSGEGYINVDGNLGDRRNLTLWRNGDNVIKAAASNCNNTIVIIHSVGPVLVNEWYDNPNVTAILWGGLPGQESGNSLADVLYGRVNPGAKSPFTWGKTREAYQDYLYTEPNNGNGAPQEDFVEGVFIDYRGFDKRNETPIYEFGYGLSYTTFNYSNLQVEVLSAPAYEPASGETEAAPTFGEVGNASDYLYPDGLQRITKFIYPWLNSTDLEASSGDASYGQDASDYLPEGATDGSAQPILPAGGGAGGNPRLYDELIRVSVTIKNTGKVAGDEVPQLYVSLGGPNEPKIVLRQFERITLQPSEETQWSTTLTRRDLANWNVETQDWEITSYPKMVFVGSSSRKLPLRASLPTVH

SEQ ID NO: 45656 - protein, 863 aa, unidentified
MRFPSIFTAVLFAASSALAAPVNTLAYSPPYYPSPWANGQGDWAEAYQRAVDIVSQMTLAEKVNLTTGTGWELELCVGQTGGVPRLGIPGMCAQDSPLGVRDSDYNSAFPAGVNVAATWDKNLAYLRGQAMGQEFSDKGADIQLGPAAGPLGRSPDGGRNWEGFSPDPALSGVLFAETIKGIQDAGVVATAKHYIAYEQEHFRQAPEAQGYGFNITESGSANLDDKTMHELYLWPFADAIRAGAGAVMCSYNQINNSYGCQNSYTLNKLLKAELGFQGFVMSDWAAHHAGVSGALAGLDMSMPGDVDYDSGTSYWGTNLTISVLNGTVPQWRVDDMAVRIMAAYYKVGRDRLWTPPNFSSWTRDEYGFKYYYVSEGPYEKVNQFVNVQRNHSELIRRIGADSTVLLKNDGALPLTGKERLVALIGEDAGSNPYGANGCSDRGCDNGTLAMGWGSGTANFPYLVTPEQAISNEVLKNKNGVFTATDNWAIDQIEALAQTASVSLVFVNADSGEGYINVDGNLGDRRNLTLWRNGDNVIKAAASNCNNTIVIIHSVGPVLVNEWYDNPNVTAILWGGLPGQESGNSLADVLYGRVNPGAKSPFTWGKTREAYQDYLYTEPNNGNGAPQEDFVEGVFIDYRGFDKRNETPIYEFGYGLSYTTFNYSNLQVEVLSAPAYEPASGETEAAPTFGEVGNASDYLYPDGLQRITKFIYPWLNSTDLEASSGDASYGQDASDYLPEGATDGSAQPILPAGGGAGGNPRLYDELIRVSVTIKNTGKVAGDEVPQLYVSLGGPNEPKIVLRQFERITLQPSEETQWSTTLTRRDLANWNVETQDWEITSYPKMVFVGSSSRKLPLRASLPTVH

SEQ ID NO: 45657 - protein, 860 aa, Aspergillus niger
MRFTLIEAVALTAVSLASADELAYSPPYYPSPWANGQGDWAEAYQRAVDIVSQMTLAEKVNLTTGTGWELELCVGQTGGVPRLGIPGMCAQDSPLGVRDSDYNSAFPAGVNVAATWDKNLAYLRGQAMGQEFSDKGADIQLGPAAGPLGRSPDGGRNWEGFSPDPALSGVLFAETIKGIQDAGVVATAKHYIAYEQEHFRQAPEAQGYGFNITESRSANLDDKTMHELYLWPFADAIRAGAGAVMCSYNQINNSYGCQNSYTLNKLLKAELGFQGFVMSDWAAHHAGVSGALAGLDMSMPGDVDYDSGTSYWGTNLTISVLNGTAPQWRVDDMAVRIMAAYYKVGRDRLWTPPNFSSWTRDEYGFKYYYVSEGPYEKVNQFVNVQRNHSELIRRIGADSTVLLKNDGALPLTGKERLVALIGEDAGSNPYGANGCSDRGCDNGTLAMGWGSGTANFPYLVTPEQAISNEVLKNKNGVFTATDNWAIDQIEALAKTASVSLVFVNADSGEGYINVDGNLGDRRNLTLWRNGDNVIKAAASNCNNTIVIIHSVGPVLVNEWYDNPNVTAILWGGLPGQESGNSLADVLYGRVNPGAKSPFTWGKTREAYQDYLYTEPNNGNGAPQEDFVEGVFIDYRGFDKRNETPIYEFGYGLSYTTFNYSNLQVEVLSAPAYEPASGETEAAPTFGEVGNASDYLYPDGLQRITKFIYPWLNSTDLEASSGDASYGQDASDYLPEGATDGSAQPILPAGGGAGGNPRLYDELIRVSVTIKNTGKVAGDEVPQLYVSLGGPNEPKIVLRQFERITLQPSKETQWSTTLTRRDLANWNVETQDWEITSYPKMVFAGSSSRKLPLRASLPTVH

SEQ ID NO: 45658 - protein, 860 aa, Aspergillus niger ATCC 1015
MRFTLIEAVALTAVSLASADELAYSPPYYPSPWANGQGDWAEAYQRAVDIVSQMTLAEKVNLTTGTGWELELCVGQTGGVPRLGIPGMCAQDSPLGVRDSDYNSAFPAGVNVAATWDKNLAYLRGQAMGQEFSDKGADIQLGPAAGPLGRSPDGGRNWEGFSPDPALSGVLFAETIKGSQDAGVVATAKHYIAYEQEHFREAPEAQGYGFNITESGSANLDDKTMHELYLWPFADAIRAGAGAVMCSYNQINNSYGCQNSYTLNKLLKAELGFQGFVMSDWAAHHAGVSGALAWLDMSMPGDVDYDSGTSYWGTNLTISVLNGTVPQWRVDDMAVRIMAAYYKVGRDRLWTPPNFSSWTRDEYGFKYYYVSEGPYEKVNQFVNVQRNHSELIRRIGADSTVLLKNDGALPLTGKERLVALIGEDAGSNPYGANGCSDRGCDNGTLAMGWGSGTANFPYLVTPEQAISNEVLKNKNGVFTATDNWAIDQIEALAKTASVSLVFVNADSGEGYINVDGNLGDRRNLTLWRNGDNVIKAAASNCNNTIVIIHSVGPVLVNEWYDNPNVTAILWGGLPGQESGNSLADVLYGRVNPGAKSPFTWGKTREAYQDYLYTEPNNGNGAPQEDFVEGVFIDYRGFDKRNETPIYEFGYGLSYTTFNYSNLQVEVLSAPAYEPASGETEAAPTFGEVGNASDYLYPDGLQRITKFIYPWLNSTDLEASSGDASYGQDASDYLPEGATDGSAQPILPAGGGAGGNPRLYDELIRVSVTIKNTGKVAGDEVPQLYVSLGGPNEPKIVLRQFERITLQPSEETQWSTTLTRRDLANWNVETQDWEITSYPKMVFVGSSSRKLPLRASLPTVH

SEQ ID NO: 45659 - protein, 860 aa, Aspergillus niger
MRFTLIEAVALTAVSLASADELAYSPPYYPSPWANGQGDWAEAYQRAVDIVSQMTLAEKVNLTTGTGWELELCVGQTGGVPRLGIPGMCAQDSPLGVRDSDYNSAFPAGVNVAATWDKNLAYLRGQAMGQEFSDKGADIQLGPAAGPLGRSPDGGRNWEGFSPDPALSGVLFAETIKGIQDAGVVATAKHYIAYEQEHFRQAPEAQGYGFNITESGSANLDDKTMHELYLWPFADAIRAGAGAVMCSYNQINNSYGCQSSYTLNKLLKAELGFQGFVMSDWAAHHAGVSGALAGLDMSMPGDVDYDSGTSYWGTNLTISVLNGTVPQWRVDDMAVRIMAAYYKVGRDRLWTPPNFSSWTRDEYGFKYYYVSEGPYEKVNQFVNVQRNHSELIRRIGADSTVLLKNDGALPLTGKERLVALIGEDAGSNPYGANGCSDRGCDNGTLAMGWGSGTANFPYLVTPEQAISNEVLKNKNGVFTATDNWAIDQIEALAKTASVSLVFVNADSGEGYIDVDGNLGDRRNLTLWRNGDNVIKAAASNCNNTIVIIHSVGPVLVNEWYDNPNVTAILWGGLPGQESGNSLADVLYGRVNPGAKSPFTWGKTREAYQDYLYTEPNNGNGAPQEDFVEGVFIDYRGFNKRNETPIYEFGYGLSYTTFNYSNLQVEVLSAPAYEPASGETEAAPTFGEVGNASDYLYPDGLQRITKFIYPWLNSTDLEASSGDASYGQDASDYLPEGATDGSAQPILPAGGGAGGNPRLYDELIRVTVTIKNTGKVAGDEVPQLYVSLGGPNEPKIVLRQFERITLQPSEETQWSTTLTRRDLANWNVETQDWEITSYPKMVFVGSSSRKLPLRASLPTVH

SEQ ID NO: 45660 - protein, 860 aa, Aspergillus niger
MRFTLIEAVALTAVSLASADELAYSPPYYPSPWANGQGDWAQAYQRAVDIVSQMTLDEKVNLTTGTGWELELCVGQTGGVPRLGVPGMCLQDSPLGVRDSDYNSAFPAGMNVAATWDKNLAYLRGKAMGQEFSDKGADIQLGPAAGPLGRSPDGGRNWEGFSPDPALSGVLFAETIKGIQDAGVVATAKHYIAYEQEHFRQAPEAQGFGFNISESGSANLDDKTMHELYLWPFADAIRAGAGAVMCSYNQINNSYGCQNSYTLNKLLKAELGFQGFVMSDWAAHHAGVSGALAGLDMSMPGDVDYDSGTSYWGTNLTISVLNGTVPQWRVDDMAVRIMAAYYKVGRDRLWTPPNFSSWTRDEYGYKYYYVSEGPYEKVNQYVNVQRNHSELIRRIGADSTVLLKNDGALPLTGKERLVALIGEDAGSNPYGANGCSDRGCDNGTLAMGWGSGTANFPYLVTPEQAISNEVLKHKNGVFTATDNWAIDQIEALAKTASVSLVFVNADSGEGYINVDGNLGDRRNLTLWRNGDNVIKAAASNCNNTIVVIHSVGPVLVNEWYDNPNVTAILWGGLPGQESGNSLADVLYGRVNPGAKSPFTWGKTREAYQDYLVTEPNNGNGAPQEDFVEGVFIDYRGFDKRNETPIYEFGYGLSYTTFNYSNLEVQVLSAPAYEPASGETEAAPTFGEVGNASDYLYPSGLLRITKFIYPWLNGTDLEASSGDASYGQDSSDYLPEGATDGSAQPILPAGGGPGGNPRLYDELIRVSVTIKNTGKVAGDEVPQLYVSLGGPNEPKIVLRQFERITLQPSEETKWSTTLTRRDLANWNVEKQDWEITSYPKMVFVGSSSRKLPLRASLPTVH

SEQ ID NO: 45661 - protein, 860 aa, Aspergillus niger
MRFTLIEAVALTAVSLASADELAYSPPYYPSPWANGQGDWAQAYQRAVDIVSQMTLDEKVNLTTGTGWELELCVGQTGGVPRLGVPGMCLQDSPLGVRDSDYNSAFPAGMNVAATWDKNLAYLRGKAMGQEFSDKGADIQLGPAAGPLGRSPDGGRNWEGFSPDPALSGVLFAETIKGIQDAGVVATAKHYIAYEQEHFRQAPEAQGFGFNISESGSANLDDKTMHELYLWPFADAIRAGAGAVMCSYNQINNSYGCQNSYTLNKLLKAELGFQGFVMSDWAAHHAGVSGALAGLDMSMPGDVDYDSGTSYWGTNLTISVLNGTVPQWRVDDMAVRIMAAYYKVGRDRLWTPPNFSSWTRDEYGYKYYYVSEGPYEKVNQYVNVQRNHSELIRRIGADSTVLLKNDGALPLTGKERLVALIGEDAGSNPYGANGCSDRGCDNGTLAMGWGSGTANFPYLVTPEQAISNEVLKHKNGVFTATDNWAIDQIEALAKTASVSLVFVNADSGEGYINVDGNLGDRRNLTLWRNGDNVIKAAASNCNNTIVVIHSVGPVLVNEWYDNPNVTAILWGGLPGQESGNSLADVLYGRVNPGAKSPFTWGKTREAYQDYLVTEPNNGNGAPQEDFVEGVFIDYRGFDKRNETPIYEFGYGLSYTTFNYSNLEVQVLSAPAYEPASGETEAAPTFGEVGNASDYLYPSGLQRITKFIYPWLNGTDLEASSGDASYGQDSSDYLPEGATDGSAQPILPAGGGPGGNPRLYDELIRVSVTIKNTGKVAGDEVPQLYVSLGGPNEPKIVLRQFERITLQPSEETKWSTTLTRRDLANWNVEKQDWEITSYPKMVFVGSSSRKLPLRASLPTVH

SEQ ID NO: 45662 - protein, 863 aa, unidentified
MRFPSIFTAVLFAASSALAAPVNTLAYSPPYYPSPWANGQGDWAEAYQRAVDIVSQMTLAEKVNLTTGTGWELELCVGQTGGVPRLGIPGMCAQDSPLGVRDSDYNSAFPAGVNVAATWDKNLAYLRGQAMGQEFSDKGADIQLGPAAGPLGRSPDGGRNWEGFSPDPALSGVLFAETIKGIQDAGVVATAKHYIAYEQEHFRQAPEAQGYGFNITESGSANLDDKTMHELYLWPFADAIRAGAGAVMCSYNQINNSYGCQNSYTLNKLLKAELGFQGFVMSDWAAHHAGVSGALAGLDMSMPGDVDCDSGTSYWGTNLTISVLNGTVPQWRVDDMAVRIMAAYYKVGRDRLWTPPNFSSWTRDEYGFKYYYVSEGPYEKVNQFVNVQRNHSELIRRIGADSTVLLKNDGALPLTGKERLVALIGEDAGSNPYGANGCSDRGCDNGTLAMGWGSGTANFPYLVTPEQAISNEVLKNKNGVFTATDNWAIDQIEALAKTASVSLVFVNADSGEGYINVDGNLGDRRNLTLWRNGDNVIKAAASNCNNTIVIIHSVGPVLVNEWYDNPNVTAILWGGLPGQESGNSLADVLYGRVNPGAKSPFTWGKTREAYQDYLYTEPNNGNGAPQEDFVEGVFIDYRGFDKRNVTPIYEFGYGLSYTTFNYSNLQVEVLSAPAYEPASGETEAAPTFGEVGNASDYLYPDGLQRITKFIYPWLNSTDLEASSGDASYGQDASDYLPEGATDGSAQPILPAGGGAGGNPRLYDELIRVSVTIKNTGKVAGDEVPQLYVSLGGPNEPKIVLRQFERITLQPSEETQWSTTLTRRDLANWNVETQDWEITSYPKMVFVGSSSRKLPLRASLPTVH

SEQ ID NO: 45663 - protein, 863 aa, unidentified
MRFPSIFTTVLFAASSALAATVNTLAYSPPYYPSPWANGQGDWAEAYQRAVDIVSQMTLAEKVNLTTGTGWELELCVGQTGGVPRLGIPGMCAQDSPLGVRDSDYNSAFPAGVNVAATWDKNLAYLRGQAMGQEFSDKGADIQLGPAAGPLGRSPDGGRNWEGFSPDPALSGVLFAETIKGIQDAGVVATAKHYIAYEQEHFRQAPEAQGYGFNITESGSANLDDKTMHELYLWPFADAIRAGAGAVMCSYNQINNSYGCQNSYTLNKLLKAELGFQGFVMSDWAAHHAGVSGALAGLDMSMPGDVDYDSGTSYWGTNLTISVLNGTVPQWRVDDMAVRIMAAYYKVGRDRLWTPPNFSSWTRDEYGFKYYYVSEGPYEKVNQFVNVQRNHSELIRRIGADSTVLLKNDGALPLTGKERLVALIGEDAGSNPYGANGCSDRGCDNGTLAMGWGSGTANFPYLVTPEQAISNEVLKNKNGVFTVTDNWAIDQIEALAKTASVSLVFVNADSGEGYINVDGNLGDRRNLTLWRNGDNVIKAAASNCNNTIVIIHSVGPVLVNEWYDNPNVTAILWGGLPGQESGNSLADVLYGRVNPGAKSPFTWGKTREAYQDYLYTEPNNGNGAPQEDFVEGVFIDYRGFDKRNETPIYEFGYGLSYTTFNYSNLQVEVLSAPAYEPASGETEAAPTFGEVGNASDYLYPDGLQRITKFIYPWLNSTDLEASSGDASYGQDASDYLPEGATDGSAQPILPAGGGAGGNPRLYDELIRVSVTIKNTGKVAGDEVPQLYVSLGGPNEPQIVLRQFERITLQPSEETQWSTTLTRRDLANWNVETQDWEITSYPKMVFVGSSSRKLPLRASLPTVH

SEQ ID NO: 45664 - protein, 863 aa, unidentified
MRFPSIFTAVLFAASSALAASVNTLAYSPPYYPSPWANGQGDWAEAYQRAVDIVSQMTLAEKVNLTTGTGWELELCVGQTGGVPRLGIPGMCAQDSPLGVRDSDYNSAFPAGVNVAATWDKNLAYLRGQAMGQEFSDKGADIQLGPAAGPLGRSPDGGRNWEGFSPDPALSGVLFAETIKGIQDAGVVATAKHYIAYEQEHFRQAPEAQGYGFNITESGSANLDDKTMHELYLWPFADAIRAGAGAVMCSYNQINNSYGCQNSYTLNKLLKAELGFQGFVMSDWAAHHAGVSGALAGLDMSMPGDVDYDSGTSYWGTNLTISVLNGTVPQWRVDDMAVRIMAAYYKVGRDRLWTPPNFSSWTRDEYGFKYYYVSEGPYEKVNQFVNVQRNHSELIRRIGADSTVLLKNDGALPLTGKERLVALIGEDAGSNPYGANGCSDRGCDNGTLAMGWGSGTANFPYLVTPEQAISNEVLKNKNGVFTATDNWAIDQIEALAKTASVSLVFVNADSGEGYINVDGNLGDRRNLTLWRNGDNVIKAAASNCNNTIVIIHSVGPVLVNEWYDNPNVTAILWGGLPGQESGNSLADVLYGRVNPGAKSPFTWGKTREAYQDYLYTEPNNGNGAPQEDFVEGVFIDYRGFDKRNETPIYEFGYGLSYTTFNYSNLQVEVLSAPAYEPASGETEAAPTFGEVGNASDYLYPDGLQRITKFIYPWLNSTDLEASSGDASYGQDASDYLPEGATDGSAQPILPAGGGAGGNPRLYDELIRVSVTIKNTGKVAGDEVPQLYVSLGGPNEPKIVLRQFERITLQPSEETQWSTTLTRRDLANWNVETQDWEITSYPKMVFVGSSSRKLPLRASLPTVH

SEQ ID NO: 45665 - protein, 863 aa, unidentified
MRFPSIFTAVLFAASSALAATVNTLAYSPPYYPSPWANGQGDWAEAYQRAVDIVSQMTLAEKVNLTTGTGWELELCVGQTGGVPRLGIPGMCAQDSPLGVRDSDYNSAFPAGVNVAATWDKNLAYLRGQAMGQEFSDKGADIQLGPAAGPLGRSPDGGRNWEGFSPDPALSGVLFAETIKGIQDAGVVATAKHYIAYEQEHFRQAPEAQGYGFNITESGSANLDDKTMHELYLWPFADAIRAGAGAVMCSYNQINNSYGCQNSYTLNKLLKAELGFQGFVMSDWAAHHAGVSGALAGLDMSMPGDVDYDSGTSYWGTNLTISVLNGTVPQWRVDDMAVRIMAAYYKVGRDRLWTPPNFSSWTRDEYGFKYYYVSEGPYEKVNQFVNVQRNHSELIRRIGADSTVLLKNDGALPLTGKERLVALIGEDAGSNPYGANGCSDRGCDNGTLAMGWGSGTANFPYLVTPEQAISNEVLKNKNGVFTATDNWAIDQIEALAKTASVSLVFVNADSGEGYINVDGNLGDRRNLTLWRNGDNVIKAAASNCNNTIVIIHSVGPVLVNEWYDNPNVTAILWGGLPGQESGNSLADVLYGRVNPGAKSPFTWGKTREAYQDYLYTEPNNGNGAPQEDFVEGVFIDYRGFDKRNETPIYEFGYGLSYTTFNYSNLQVEVLSAPAYEPASGETEAAPTFGEVGNASDYLYPDGLQRITKFIYPWLNSTDLEASSGDASYGQDASDYLPEGATDGSAQPILPAGGGAGGNPRLYDELIRVSVTIKNTGKVAGDEVPQLYVSLGGPNEPKIVLRQFERITLQPSEETQWSTTLTRRDLANWNVETQDWEITSYPKMVFVGSSSRKLPLRASLPTVH

SEQ ID NO: 45666 - protein, 860 aa, Aspergillus niger
MRFTLIEAVALTAVSLASADELAYSPPYYPSPWANGQGDWAQAYQRAVDIVSQMTLDEKVNLTTGTGWELELCVGQTGGVPRLGVPGMCLQDSPLGVRDSDYNSAFPAGMNVAATWDKNLAYLRGKAMGQEFSDKGADIQLGPAAGPLGRSPDGGRNWEGFSPDPALSGVLFAETIKGIQDAGVVATAKHYIAYEQEHFRQAPEAQGFGFNISESGSANLDDKTMHELYLWPFADAIRAGAGAVMCSYNLINNSYGCQNSYTLNKLLKAELGFQGFVMSDWAAHHAGVSGALAGLDMSMPGDVDYDSGTSYWGTNLTISVLNGTVPQWRVDDMAVRIMAAYYKVGRDRLWTPPNFSSWTRDEYGYKYYYVSEGPYEKVNQYVNVQRNHSELIRRIGADSTVLLKNDGALPLTGKERLVALIGEDAGSNPYGANGCSDRGCDNGTLAMGWGSGTANFPYLVTPEQAISNEVLKHKNGVFTATDNWAIDQIEALAKTASVSLVFVNADSGEGYINVDGNLGDRRNLTLWRNGDNVIKAAASNCNNTIVVIHSVGPVLVNEWYDNPNVTAILWGGLPGQESGNSLADVLYGRVNPGAKSPFTWGKTREAYQDYLVTEPNNGNGAPQEDFVEGVFIDYRGFDKRNETPIYEFGYGLSYTTFNYSNLEVQVLSAPAYEPASGETEAAPTFGEVGNASDYLYPSGLQRITKFIYPWLNGTDLEASSGDASYGQDSSDYLPEGATDGSAQPILPAGGGPGGNPRLYDELIRVSVTIKNTGKVAGDEVPQLYVSLGGPNEPKIVLRQFERITLQPSEETKWSTTLTRRDLANWNVEKQDWEITSYPKMVFVGSSSRKLPLRASLPTVH

SEQ ID NO: 45667 - protein, 860 aa, Unidentified
MRFTLIEAVALTAVSLASADELAYSPPYYPSPWANGQGDWAQAYQRAVDIVSQMTLAEKVNLTTGTGWELELCVGQTGGVPRLGVPGMCLQDSPLGVRDSDYNSAFPSGMNVAATWDKNLAYLRGKAMGQEFSDKGADIQLGPAAGPLGRSPDGGRNWEGFSPDPALSGVLFAETIKGIQDAGVVATAKHYIAYEQEHFRQAPEAQGYGFNISESGSANLDDKTMHELYLWPFADAIRAGAGAVMCSYNQINNSYGCQNSYTLNKLLKAELGFQGFVMSDWAAHHAGVSGALAGLDMSMPGDVDYDSGTSYWGTNLTVSVLNGTVPQWRVDDMAVRIMAAYYKVGRDRLWTPPNFSSWTRDEYGYKYYYVSEGPYEKVNHYVNVQRNHSELIRRIGADSTVLLKNDGALPLTGKERLVALIGEDAGSNPYGANGCSDRGCDNGTLAMGWGSGTANFPYLVTPEQAISNEVLKNKNGVFTATDNWAIDQIEALAKTASVSLVFVNADSGEGYINVDGNLGDRKNLTLWRNGDNVIKAAASNCNNTIVIIHSVGPVLVNEWYDNPNTVAILWGGLPGQESGNSLADVLYGRVNPGAKSPFTWGKTREAYQDYLVTEPNNGNGAPQEDFVEGVFIDYRGFDKRNETPIYEFGYGLSYTTFNYSNLEVQVLSAPAYEPASGETEAAPTFGEVGNASNYLYPDGLQKITKFIYPWLNSTDLEASSGDASYGQDSSDYLPEGATDGSAQPILPAGGGPGGNPRLYDELIRVSVTIKNTGKVAGDEVPQLYVSLGGPNEPKIVLRQFERITLQPSEETKWSTTLTRRDLANWNVEKQDWEITSYPKMVFVGSSSRKPPLRASLPTVH

SEQ ID NO: 45668 - protein, 860 aa, Aspergillus niger
MRFTLIEAVALTAVSLASADELAYSPPYYPSPWANGQGDWAQAYQRAVDIVSQMTLDEKVNLTTGTGWESELCVGQTGGVPRLGVPGMCLQDSPLGVRDSDYNSAFPAGMNVAATWDKNLAYLRGKAMGQEFSDKGADFQLGPAAGPLGRSPDGGRNWEGFSPDPALSGVLFAETIKGIQDAGVVATAKHYIAYEQEHFRQAPEAQGFGFNISESGSANLDDKTMHELYLWPFADAIRAGAGAVMCSYNQINNSYGCQNSYTLNKLLKAELGFQGFVMSDWAAHHAGVSGALAGLDMSMPGDVDYDSGTSYWGTNLTISVLNGTVPQWRVDDMAVRIMAAYYKVGRDRLWTPPNFSSWTRDEYGYKYYYVSEGPYEKVNQYVNVQRNHSELIRRIGADSTVLLKNDGALPLTGKERLVALIGEDAGSNPYGANGCSDRGCDNGTLAMGWGSGTANFPYLVTPEQAISNEVLKHKNGVFTATDNWAIDQIEALAKTASVSLVFVNADSGEGYINVDGNLGDRRNLTLWRNGDNVIKAAASNCNNTIVVIHSVGPVLVNEWYDNPNVTAILWGGLPGQESGNSLADVLYGRVNPGAKSPFTWGKTREAYQDYLVTEPNNGNGAPQEDFVEGVFIDYRGFDKRNETPIYEFGYGLSYTTFNYSNLEVQVLSAPAYEPASGETEAAPTFGEVGNASDYLYPSGLQRITKFIYPWLNGTDLEASSGDASYGQDSSDYLPEGATDGSAQPILPAGGGPGGNPRLYDELIRVSVTIKNTGKVAGDEVPQLYVSLGGPNEPKIVLRQFERITLQPSEETKWSTTLTRRDLANWNVEKQDWEITSYPKMVFVGSSSRKLPLRASLPTVH

SEQ ID NO: 45669 - protein, 860 aa, Aspergillus niger
MRFTLIEAVALTAVSLASADELAYSPPYYPSPWANGQGDWAQAYQRAVDIVSQMTLDEKVNLTTGTGWELELCVGQTGGVPRLGVPGMCLQDSPLGVRDSDYNSAFPAGMNVAATWDKNLAYLRGKAMGQEFSDKGADIQLGPAAGPLGRSPDGGRNWEGFSPDPAMSGVLFAETIKGIQDAGVVATAKHYIAYEQEHFRQAPEAQGFGFNISESGSANLDDKTMHELYLWPFADAIRAGAGAVMCSYNQINNSYGCQNSYTLNKLLKAELGFQGFVMSDWAAHHDGVSGALAGLDMSMPGDVDYDSGTSYWGTNLTISVLNGTVPQWRVDDMAVRIMAAYYKVGRDRLWTPPNFSSWTRDEYGYKYYYVSEGPYEKVNQYVNVQRNHSELIRRIGADSTVLLKNDGALPLTGKERLVALIGEDAGSNPYGANGCSDRGCDNGTLAMGWGSGTANFPYLVTPEQAISNEVLKHKNGVFTATDNWAIDQIEALAKTASVSLVFVNADSGEGYINVDGNLGDRRNLTLWRNGDNVIKAAASNCNNTIVVIHSVGPVLVNEWYDNPNVTAILWGGLPGQESGNSLADVLYGRVNPGAKSPFTWGKTREAYQDYLVTEPNNGNGAPQEDFVEGVFIDYRGFDKRNETPIYEFGYGLSYTTFNYSNLEVQVLSAPAYEPASGETEAAPTFGEVGNASDYLYPSGLQRITKFIYPWLNGTDLEASSGDASYGQDSSDYLPEGATDGSAQPILPAGGGPGGNPRLYDELIRVSVTIKNTGKVAGDEVPQLYVSLGGPNEPKIVLRQFERITLQPSEETKWSTTLTRRDLANWNVEKQDWEITSYPKMVFVGSSSRKLPLRASLPTVH

SEQ ID NO: 45670 - protein, 860 aa, Aspergillus niger
MRFTLIEAVALTAVSLASADELAYSPPYYPSPWANGQGDWAQAYQRAVDIVSQMTLDEKVNLTTGTGWELELCVGQTGGVPRLGVPGMCLQDSPLGVRDSDYNSAFPAGMNVAATWDKNLAYLRGKAMGQEFSDKGADIQLGPAAGPLGRSPDGGRNWEGFSPDPALSGVLFAETIKGIQDAGVVATAKHYIAYEQEHFRQAPEAQGFGFNISESGSANLDDKTMHELYLWPFADAIRAGAGAVMCSYNQINNSYGCQNSYTLNKLLKAELGFQGFVMSDWAAHHAGVSGALAGLDMSMPGDVDYDSGTSYWGTNLTISVLNGTVPQWRVDDMAVRIMAAYYKVGRDRLWTPPNFSSWTRDECGYKYYYVSEGPFEKVNQYVNVQRNHSELIRRIGADSTVLLKNDGALPLTGKERLVALIGEDAGSNPYGANGCSDRGCDNGTLAMGWGSGTANFPYLVTPEQAISNEVLKHKNGVFTATDNWAIDQIEALAKTASVSLVFVNADSGEGYINVDGNLGDRRNLTLWRNGDNVIKAAASNCNNTIVVIHSVGPVLVNEWYDNPNVTAILWGGLPGQESGNSLADVLYGRVNPGAKSPFTWGKTREAYQDFLVTEPNNGNGAPQEDFVEGVFIDYRGFDKRNETPIYEFGYGLSYTTFNYSNLEVQVLSAPAYEPASGETEAAPTFGEVGNASDYLYPSGLQRITKFIYPWLNGTDLEASSGDASYGQDSSDYLPEGATDGSAQPILPAGGGPGGNPRLYDELIRVSVTIKNTGKVAGDEVPQLYVSLGGPNEPKIVLRQFERITLQPSEETKWSTTLTRRDLANWNVEKQDWEITSYPKMVFVGSSSRKLPLRASLPTVH

SEQ ID NO: 45671 - protein, 860 aa, Aspergillus niger
MRFTLIEAVALTAVSLASADELAYSPPYYPSPWANGQGDWAQAYQRAVDIVSQMTLDEKVNLTTGIGWELELCVGQTGGVPRLGVPGMCLQDSPLGVRDSDYNSAFPAGMNVAATWDKNLAYLRGKAMGQEFSDKGADIQLGPAAGPLGRSPDGGRNWEGFSPDPALSGVLFAETIKGIQDAGVVATAKHYIAYEQEHFRQAPEAQGFGFNISESGSANLDDKTMHELYLWPFADAIRAGAGAVMCSYNQINNSYGCQNSYTLNKLLKAELGFQGFVMSDWAAHHAGVSGALAGLDMSMPGDVDYDSGTSYWGTNLTISVLNGTVPQWRVDDMAVRIMAAYYKVGRDRLWTPPNFSSWTRDEYGYKYYYVSEGPYEKVNQYVNVQRNHSELIRRIGADSTVLLKNDGALPLTGKERLVALIGEDAGSNPYGANGCSDRGCDNGTLAMGWGSGTANFPYLVTPEQAISNEVLKHKNGVFTATDNWAIDQIEALAKTASVSLVFVNADSGEGYINVDGNLGDRRNLTLWRNGDNVIKAAASNCNNTIVVIHSVGPVLVNEWYDNPNVTAILWGGLPGQESGNSLADVLYGRVNPGAKSPFTWGKTREAYQDYLVTEPNNGNGAPQEDFVEGVFIDYRGFDKRNETPIYEFGYGLSYTTFNYSNLEVQVLSAPAYEPASGETEAAPTFGEVGNASDYLYPSGLQRITKFIYPWLNGTDLEASSGDASYGQDSSDYLPEGATDGSAQPILPAGGGPGGNPRLYDELIRVSVTIKNTGKVAGDEVPQLYVSLGGPNEPKIVLRQFERITLQPSEETKWSTTLTRRDLANWNVEKQDWEITSYPKMVFVGSSSRKLPLRASLPTVH

SEQ ID NO: 45672 - protein, 860 aa, unidentified
MRFTLIEAVALTAVSLASADELAYSPPYYPSPWANGQGDWAEAYQRAVDIVSQMTLAEKVNLTTGTGWELELCVGQTGGVPRLGVPGMCAQDSPLGVRDSDYNSAFPAGVNVAATWDKNLAYLRGQAMGQEFSDKGADIQLGPAAGPLGRSPDGGRNWEGFSPDPALSGVLFAETIKGIQDAGVVATAKHYIAYEQEHFRQAPEAQGYGFNITESGSANLDDKTMHELYLWPFADAIRAGAGAVMCSYNQINNSYGCQNSYTLNKLLKAELGFQGFVMSDWAAHHAGVSGALAGLDMSMPGDVDYDSGTSYWGTNLTISVLNGTVPQWRVDDMAVRIMAAYYKVGRDRLWTPPNFSSWTRDEYGFKYYYVSGGPYEKVNQFVNVQRNHSELIRRIGADSTVLLKNDGALPLTGKERLVALIGEDAGSNPYGANGCSDRGCDNGTLAMGWGSGTANFPYLVTPEQAISNEVLKNKNGVFTATDNWAIDQIEALAKTASVSLVFVNADSGEGYINVDGNLGDRRNLTLWRNGDNVIKAAASNCNNTIVIIHSVGPVLVNEWYDNPNVTAILWGGLPGQESGNSLADVLYGRVNPGAKSPFTWGKTREAYQDYLYTEPNNGNGAPQEDFVEGVFIDYRGFDKRNETPIYEFGYGLSYTTFNYSNLQVEVLSAPAYEPASGETEAAPTFGEVGNASDYLYPDGLQRITKFIYPWLNSTDLEASSGDASYGQDASDYLPEGATDGSAQPILPAGGGAGGNPRLYDELIRVTVTIKNTGKVAGDKVPQLYVSLGGPNEPKIVLRQFERITLQPSEETQWSTTLTRRDLANWNVETQDWEITSYPKMVFVGSSSRKLPLRASLPTVH

SEQ ID NO: 45673 - protein, 863 aa, unidentified
MRFPSIFTAVLFAASSALAAPDNTLAYSPPYYPSPWANGQGDWAEAYQRAVDIVSQMTLAEKVNLTTGTGWELELCVGQTGGVPRLGIPGMCAQDSPLGVRDSDYNSAFPAGVNVAATWDKNLAYLRGQAMGQEFSDKGADIQLGPAAGPLGRSPDGGRNWEGFSPDPALSGVLFAETIKGIQDAGVVATAKHYIAYEQEHFRQAPEAQGYGFNVTESGSANLDDKTMHELYLWPFADAIRAGAGAVMCSYNQINNSYGCQNSYTLNKLLKAELGFQGFVMSDWAAHHAGVSGALAGLDMSMPGDVDYDSGTSYWGTNLTISVLNGTVPQWRVDDMAVRIMAAYYKVGRDRLWTPPNFSSWTRDEYGFKYYYVSEGPYEKVNQFVNVQRNHSELIRRIGADSTVLLKNDGALPLTGKERLVALIGEDAGSNPYGANGCSDRGCDNGTLAMGWGSGTANFPYLVTPEQAISNEVLKNKNGVFTATDNWAIDQIEALAKTASVSLVFVNADSGEGYINVDGNLGDRRNLTLWRNGDNVIKAAASNCNNTIVIIHSVGPVLVNEWYDNPNVTAILWGGLPGQESGNSLADVLYGRVNPGAKSPFTWGRTREAYQDYLYTEPNNGNGAPQEDFVEGVFIDYRGFDKRNETPIYEFGYGLSYTTFNYSNLQVEVLSAPAYEPASGETEAAPTFGEVGNASDYLYPDGLQRITKFIYPWLNSTDLEASSGDASYGQDASDYLPEGATDGSAQPILPAGGGAGGNPRLYDELIRVSVTIKNTGKVAGDEVPQLYVSLGGPNEPKIVLRQFERITLQPSEETQWSTTLTRRDLANWNVETQDWEITSYPKMVFVGSSSRKLPLRASLPTVH

SEQ ID NO: 45674 - protein, 860 aa, Aspergillus niger
MRFTLIEAVALTAVSLASADELAYSPPYYPSPWANGQGDWAQAYQRAVDIVSQMTLDEKVNLTTGTGWELELCVGQTGGVPRLGVPGMCLQDSPLGVRDSDYNSAFPAGMNVAATWDKNLAYLRGKAMGQEFSDKCADIQLGPAAGPLGRSPDGGRNWEGFSPDPALSGVLFAETIKGIQDAGVVATAKHYIAYEQEHFRQAPEAQGFGFNISESGSANLDDKTMHELYLWPFADAIRAGAGAVMCSYNQINNSYGCQNSYTLNKLLKAELGFQGFVMSDWAAHHAGVSGALAGLDMSMPGDVDYDSGTSYWGTNLTISVLNGTVPQWRVDDMAVRIMAAYYKVGRDRLWTPPNFSSWTRDEYGYKYYYVSEGPYKKVNQYVNVQRNHSELIRRIGADSTVLLKNDGALPLTGKERLVALIGEDAGSNPYGANGCSDRGCDNGTLAMGWGSGTANFPYLVTPEQAISNEVLKHKNGVFTATDNWAIDQIEALAKTASVSLVFVNADSGEGYINVDGNLGDRRNLTLWRNGDNVIKAAASNCNNTIVVIHSVGPVLVNEWYDNPNVTAILWGGLPGQESGNSLADVLYGRVNPGAKSPFTWGKTREAYQDYLVTEPNNGNGAPQEDFVEGVFIDYRGFDKRNETPIYEFGYGLSYTTFNYSNLEVQVLSAPAYEPASGETEAAPTFGEVGNASDYLYPSGLQRITKFIYPWLNGTDLEASSGDASYGQDSSDYLPEGATDGSAQPILPAGGGPGGNPRLYDELIRVSVTIKNTGKVAGDEVPQLYVSLGGPIEPKIVLRQFERITLQPSEETKWSTTLTRRDLANWNVEKQDWEITSYPKMVFVGSSSRKLPLRASLPTVH

SEQ ID NO: 45675 - protein, 621 aa, Unidentified
PWANGQGDWAEAYQKAVQFVSQLTLAEKVNLTTGTGWEQDRCVGQVGSIPRLGFPGLCMQDSPLGVRDTDYNSAFPAGVNVAATWDRNLAYRRGVAMGEEHRGKGVDVQLGPVAGPLGRSPDAGRNWEGFAPDPVLTGNMMASTIQGIQDAGVIACAKHFILYEQEHFRQGAQDGYDISDSISANADDKTMHELYLWPFADAVRAGVGSVMCSYNQVNNSYACSNSYTMNKLLKSELGFQGFVMTDWGGHHSGVGSALAGLDMSMPGDIAFDSGTSFWGTNLTVAVLNGSIPEWRVDDMAVRIMSAYYKVGRDRYSVPINFDSWTLDTYGPEHYAVGQGQTKINEHVDVRGNHAEIIHEIGAASAVLLKNKGGLPLTGTERFVGVFGKDAGSNPWGVNGCSDRGCDNGTLAMGWGSGTANFPYLVTPEQAIQREVLSRNGTFTGITDNGALAEMAAAASQADTCLVFANADSGEGYITVDGNEGDRKNLTLWQGADQVIHNVSANCNNTVVVLHTVGPVLIDDWYDHPNVTAILWAGLPGQESGNSLVDVLYGRVNPGKTPFTWGRARDDYGAPLIVKPNNGKGAPQQDFTEGIFIDYRRFDKYNITPIYEFGFGLSYTTF

SEQ ID NO: 45676 - protein, 838 aa, Thermoascus aurantiacus
DLAYSPPFYPSPWMDGNGEWAEAYRRAVDFVSQLTLAEKVNLTTGVGWMQERCVGETGSIPRLGFRGLCLQDSPLGVRFADYVSAFPAGVNVAATWDKNLAYLRGKAMGEEHRGKGVDVQLGPVAGPLGRHPDGGRNWEGFSPDPVLTGVLMAETIKGIQDAGVIACAKHFIGNEMEHFRQASEAVGYGFDITESVSSNIDDKTLHELYLWPFADAVRAGVGSFMCSYNQVNNSYSCSNSYLLNKLLKSELDFQGFVMSDWGAHHSGVGAALAGLDMSMPGDTAFGTGKSFWGTNLTIAVLNGTVPEWRVDDMAVRIMAAFYKVGRDRYQVPVNFDSWTKDEYGYEHALVGQNYVKVNDKVDVRADHADIIRQIGSASVVLLKNDGGLPLTGYEKFTGVFGEDAGSNRWGADGCSDRGCDNGTLAMGWGSGTADFPYLVTPEQAIQNEILSKGKGLVSAVTDNGALDQMEQVASQASVSIVFVNADSGEGYINVDGNEGDRKNLTLWKGGEEVIKTVAANCNNTIVVMHTVGPVLIDEWYDNPNVTAIVWAGLPGQESGNSLVDVLYGRVSPGGKTPFTWGKTRESYGAPLLTKPNNGKGAPQDDFTEGVFIDYRRFDKYNETPIYEFGFGLSYTTFEYSDIYVQPLNARPYTPASGSTKAAPTFGNISTDYADYLYPEDIHKVPLYIYPWLNTTDPKKSSGDPDYGMKAEDYIPSGATDGSPQPILPAGGAPGGNPGLYDEMYRVSAIITNTGNVVGDEVPQLYVSLGGPDDPKVVLRNFDRITLHPGQQTMWTTTLTRRDISNWDPASQNWVVTKYPKTVYIGSSSRKLHLQAPLP

SEQ ID NO: 45677 - protein, 838 aa, Thermoascus aurantiacus
DLAYSPPFYPSPWMDGNGEWAEAYRRAVDFVSQLTLAEKVNLTTGVGWMQEKCVGETGSIPRLGFRGLCLQDSPLGVRFADYVSAFPAGVNVAATWDKNLAYLRGKAMGEEHRGKGVDVQLGPVAGPLGRHPDGGRNWEGFSPDPVLTGVLMAETIKGIQDAGVIACAKHFIGNEMEHFRQASEAVGYGFDITESVSSNIDDKTLHELYLWPFADAVRAGVGSFMCSYNQVNNSYSCSNSYLLNKLLKSELDFQGFVMSDWGAHHSGVGAALAGLDMSMPGDTAFGTGKSFWGTNLTIAVLNGTVPEWRVDDMAVRIMAAFYKVGRDRYQVPVNFDSWTRDEYGYEHALVGQNYVKVNDKVDVRADHADIIRQIGSASVVLLKNDGGLPLTGYEKFTGVFGEDAGSNRWGADGCSDRGCDNGTLAMGWGSGTADFPYLVTPEQAIQNEILSKGKGLVSAVTDNGALDQMEQVASQASVSIVFVNADSGEGYINVDGNEGDRKNLTLWKGGEEVIKTVAANCNNTIVVMHTVGPVLIDEWYDNPNVTAIVWAGLPGQESGNSLVDVLYGRVSPGGKTPFTWGKTRESYGAPLLTKPNNGKGAPQDDFTEGVFIDYRRFDKYNETPIYEFGFGLSYTTFEYSDIYVQPLNARPYTPASGSTKAAPTFGNISTDYADYLYPEDIHKVPLYIYPWLNTTDPKKSSGDPDYGMKAEDYIPSGATDGSPQPILPAGGAPGGNPGLYDEMYRVSAIITNTGNVVGDEVPQLYVSLGGPDDPKVVLRNFDRITLHPGQQTMWTTTLTRRDISNWDPASQNWVVTKYPKTVYIGSSSRKLHLQAPLP

SEQ ID NO: 45678 - protein, 838 aa, Thermoascus aurantiacus
DLAYSPPFYPSPWMDGNGEWAEAYRRAVDFVSQLTLAEKVNLTTGVGWMQEKCVGETGSIPRLGFRGLCLQDSPLGVRFADYVSAFPAGVNVAATWDKNLAYLRGKAMGEEHRGKGVDVQLGPVAGPLGRHPDGGRNWEGFSPDPVLTGVLMAETIKGIQDAGVIACAKHFIGNEMEHFRQASEAVGYGFDITESVSSNIDDKTLHELYLWPFADAVRAGVGSFMCSYNQVNNSYSCSNSYLLNKLLKSELDFQGFVMSDWGAHHSGVGAALAGLDMSMPGDTAFGTGKSFWGTNLTIAVLNGTVPEWRVDDMAVRIMAAFYKVGRDRYQVPVNFDSWTKDEYGYEHALVGQSYVKVNDKVDVRADHADIIRQIGSASVVLLKNDGGLPLTGYEKFTGVFGEDAGSNRWGADGCSDRGCDNGTLAMGWGSGTADFPYLVTPEQAIQNEILSKGKGLVSAVTDNGALDQMEQVASQASVSIVFVNADSGEGYINVDGNEGDRKNLTLWKGGEEVIKTVAANCNNTIVVMHTVGPVLIDEWYDNPNVTAIVWAGLPGQESGNSLVDVLYGRVSPGGKTPFTWGKTRESYGAPLLTKPNNGKGAPQDDFTEGVFIDYRRFDKYNETPIYEFGFGLSYTTFEYSDIYVQPLNARPYTPASGSTKAAPTFGNISTDYADYLYPEDIHKVPLYIYPWLNTTDPKKSSGDPDYGMKAEDYIPSGATDGSPQPILPAGGAPGGNPGLYDEMYRVSAIITNTGNVVGDEVPQLYVSLGGPDDPKVVLRNFDRITLHPGQQTMWTTTLTRRDISNWDPASQNWVVTKYPKTVYIGSSSRKLHLQAPLP

SEQ ID NO: 45679 - protein, 838 aa, Thermoascus aurantiacus
DLAYSPPFYPSPWMDGNGEWAEAYRRAVDFVSQLTLAEKVNLTTGVGWMQEKCVGETGSIPRLGFRGLCLQDSPLGVRFADYVSAFPAGVNVAATWDKNLAYLRGKAMGEEHRGKGVDVQLGPVAGPLGRHPDGGRNWEGFSPDPVLTGVLMAETIKGIQDAGVIACAKHFIGNEMEHFRQASEAVGYGFDITESVSSNIDDKTLHELYLWPFADAVRAGVGSFMCSYNQVNNSYSCSNSYLLNKLLKSELDFQGFVMSDWGAHHSGVGAALAGLDMSMPGDTAFGTGKSFWGTNLTIAVLNGTVPEWRVDDMAVRIMAAFYKVGRDRYQVPVNFDSWTKDEYGYEHALVGQNYVKVNDKVDVRADHADIIRQIGSASVVLLKNDGGLPLTGYEKFTGVFGEDAGSNRWGADGCSDRGCDNGTLAMGWGSGTADFPYLVTPEQAIQNEILSKGRGLVSAVTDNGALDQMEQVASQASVSIVFVNADSGEGYINVDGNEGDRKNLTLWKGGEEVIKTVAANCNNTIVVMHTVGPVLIDEWYDNPNVTAIVWAGLPGQESGNSLVDVLYGRVSPGGKTPFTWGKTRESYGAPLLTKPNNGKGAPQDDFTEGVFIDYRRFDKYNETPIYEFGFGLSYTTFEYSDIYVQPLNARPYTPASGSTKAAPTFGNISTDYADYLYPEDIHKVPLYIYPWLNTTDPKKSSGDPDYGMKAEDYIPSGATDGSPQPILPAGGAPGGNPGLYDEMYRVSAIITNTGNVVGDEVPQLYVSLGGPDDPKVVLRNFDRITLHPGQQTMWTTTLTRRDISNWDPASQNWVVTKYPKTVYIGSSSRKLHLQAPLP

SEQ ID NO: 45680 - protein, 838 aa, Thermoascus aurantiacus
DLAYSPPFYPSPWMDGNGEWAEAYRRAVDFVSQLTLAEKVNLTTGVGWMQEKCVGETGSIPRLGFRGLCLQDSPLGVRFADYVSAFPAGVNVAATWDKNLAYLRGKAMGEEHRGKGVDVQLGPVAGPLGRHPDGGRNWEGFSPDPVLTGVLMAETIKGIQDAGVIACAKHFIGNEMEHFRQASEAVGYGFDITESVSSNIDDKTLHELYLWPFADAVRAGVGSFMCSYNQVNNSYSCSNSYLLNKLLKSELDFQGFVMSDWGAHHSGVGAALAGLDMSMPGDTAFGTGESFWGTNLTIAVLNGTVPEWRVDDMAVRIMAAFYKVGRDRYQVPVNFDSWTKDEYGYEHALVGQNYVKVNDKVDVRADHADIIRQIGSASVVLLKNDGGLPLTGYEKFTGVFGEDAGSNRWGADGCSDRGCDNGTLAMGWGSGTADFPYLVTPEQAIQNEILSKGKGLVSAVTDNGALDQMEQVASQASVSIVFVNADSGEGYINVDGNEGDRKNLTLWKGGEEVIKTVAANCNNTIVVMHTVGPVLIDEWYDNPNVTAIVWAGLPGQESGNSLVDVLYGRVSPGGKTPFTWGKTRESYGAPLLTKPNNGKGAPQDDFTEGVFIDYRRFDKYNETPIYEFGFGLSYTTFEYSDIYVQPLNARPYTPASGSTKAAPTFGNISTDYADYLYPEDIHKVPLYIYPWLNTTDPKKSSGDPDYGMKAEDYIPSGATDGSPQPILPAGGAPGGNPGLYDEMYRVSAIITNTGNVVGDEVPQLYVSLGGPDDPKVVLRNFDRITLHPGQQTMWTTTLTRRDISNWDPASQNWVVTKYPKTVYIGSSSRKLHLQAPLP

SEQ ID NO: 45681 - protein, 838 aa, Thermoascus aurantiacus
DLAYSPPFYPSPWMDGNGEWAEAYRRAVDFVSQLTLAEKVNLTTGVGWMQEKCVGETGSIPRLGFRGLCLQDSPLGVRFADYVSAFPAGVNVAATWDKNLAYLRGKAMGEEHRGKGVDVQLGPVAGPLGRHPDGGRNWEGFSPDPVLTGVLMAETIKGIQDAGVIACAKHFIGNEMEHFRQASEAVGYGFDITESVSSNIDDKTLHELYLWPFADAVRAGVGSFMCSYNQVNNSYSCSNSYLLNKLLKSELDFQGFVMSDWGAHHSGVGAALAGLDMSMPGDTAFGTGKSFWGTNLTIAVLNGTVPEWRVDDMAVRIMAAFYKVGRDRYQVPVNFDSWTKDEYGYEHALVGQNYVKVNDKVDVRADHADIIRQIGSASVVLLKNDGGLPLTGYEKFTGVFGEDAGSNRWGADGCSDRGCDNGTLAMGWGSGTADFPYLVTPEQAIQNEILSKGKGLVSAVTDNGALDQMEQVASQASVSIVFVNADSGEGYINVDGNEGDRKNLTLWKGGEEVIKTVAANCNNTIVVMHTVGPVLIDEWYDNPNVTAIVWAGLPGQESGNSLVDVLYGRVSPGGKTPFTWGKTRESYGAPLLTKPNNGKGAPQDDFTEGVFIDYRRFDKYNETPIYEFGFGLSYTTFEYSDIYVQPLNARPYTPASGSTKAAPTFGNISTDYADYLYPEDIYKVPLYIYPWLNTTDPKKSSGDPDYGMKAEDYIPSGATDGSPQPILPAGGAPGGNPGLYDEMYRVSAIITNTGNVVGDEVPQLYVSLGGPDDPKVVLRNFDRITLHPGQQTMWTTTLTRRDISNWDPASQNWVVTKYPKTVYIGSSSRKLHLQAPLP

SEQ ID NO: 45682 - protein, 838 aa, Thermoascus aurantiacus
DLAYSPPFYPSPWMDGNGEWAEAYRRAVDFVSQLTLAEKVNLTTGVGWMQEKCVGETGSIPRLGFRGLCLQDSPLGVRFADYVSAFPAGVNVAATWDKNLAYLRGKAMGEEHRGKGVDVQLGPVAGPLGRHPDGGRNWEGFSPDPVLTGVLMAETIKGIQDAGVIACAKHFIGNEMEHFRQASEAVGYGFDITESVSSNIDDKTLHELYLWPFADAVRAGVGSFMCSYNQVNNSYSCSNSYLLNKLLKSELDFQGFVMSDWGAHHSGVGAALAGLDMSMPGDTAFGTGKSFWGTNLTIAVLNGTVPEWRVDDMAVRIMAAFYKVGRDRYQVPVNFDSWTKDEYGYEHALVGQNYVKVNDKVDVRADHADIIRQIGSASVVLLKNDGGLPLTGYEKFTGVFGEDAGSNRWGADGCSDRGCDNGTLAMGWGSGTADFPYLVTPEQAIQNEILSKGKGLVSAVTDNGALDQMEQVASQVSVSIVFVNADSGEGYINVDGNEGDRKNLTLWKGGEEVIKTVAANCNNTIVVMHTVGPVLIDEWYDNPNVTAIVWAGLPGQESGNSLVDVLYGRVSPGGKTPFTWGKTRESYGAPLLTKPNNGKGAPQDDFTEGVFIDYRRFDKYNETPIYEFGFGLSYTTFEYSDIYVQPLNARPYTPASGSTKAAPTFGNISTDYADYLYPEDIHKVPLYIYPWLNTTDPKKSSGDPDYGMKAEDYIPSGATDGSPQPILPAGGAPGGNPGLYDEMYRVSAIITNTGNVVGDEVPQLYVSLGGPDDPKVVLRNFDRITLHPGQQTMWTTTLTRRDISNWDPASQNWVVTKYPKTVYIGSSSRKLHLQAPLP

SEQ ID NO: 45683 - protein, 838 aa, Thermoascus aurantiacus
DLAYSPPFYPSPWMDGNGEWAEAYRRAVDFVSQLTLAEKVNLTTGVGWMQEKCVGETGSIPRLGFRGLCLQDSPLGVRFADYVSAFPAGVNVAATWDKNLAYLRGKAMGEEHRGKGVDVQLGPVAGPLGRHPDGGRNWEGFSPDPVLTGVLMAETIKGIQDAGVIACAKHFIGNEMEHFRQASEAVGYGFDITESVSSNIDDKTLHELYLWPFADAVRAGVGSFMCSYNQVNNSYSCSNSYLLNKLLKSELDFQGFVMSDWGAHHSGVGAALAGLDMSMPGDTAFGTGKSFWGTNLTIAVLNGTVPEWRVDDMAVRIMAAFYKVGRDRCQVPVNFDSWTKDEYGYEHALVGQNYVKVNDKVDVRADHADIIRQIGSASVVLLKNDGGLPLTGYEKFTGVFGEDAGSNRWGADGCSDRGCDNGTLAMGWGSGTADFPYLVTPEQAIQNEILSKGKGLVSAVTDNGALDQMEQVASQASVSIVFVNADSGEGYINVDGNEGDRKNLTLWKGGEEVIKTVAANCNNTIVVMHTVGPVLIDEWYDNPNVTAIVWAGLPGQESGNSLVDVLYGRVSPGGKTPFTWGKTRESYGAPLLTKPNNGKGAPQDDFTEGVFIDYRRFDKYNETPIYEFGFGLSYTTFEYSDIYVQPLNARPYTPASGSTKAAPTFGNISTDYADYLYPEDIHKVPLYIYPWLNTTDPKKSSGDPDYGMKAEDYIPSGATDGSPQPILPAGGAPGGNPGLYDEMYRVSAIITNTGNVVGDEVPQLYVSLGGPDDPKVVLRNFDRITLHPGQQTMWTTTLTRRDISNWDPASQNWVVTKYPKTVYIGSSSRKLHLQAPLP

SEQ ID NO: 45684 - protein, 838 aa, Thermoascus aurantiacus
DLAYSPPFYPSPWMDGNGEWAEAYRRAVDFVSQLTLAEKVNLTTGVGWMQEKCVGETGSIPRLGFRGLCLQDSPLGVRFADYVSAFPAGVNVAATWDKNLAYLRGKAMGEEHRGKGVDVQLGPVAGPLGRHPDGGRNWEGFSPDPVLTGVLMAETIKGIQDAGVIACAKHFIGNEMEHFRQASEAVGYGFDITESVSSNIDDKTLHELYLWPFADAVRAGVGSFMCSYNQVNNSYSCSNSYLLNKLLKSELDFQGFVMSDWGAHHSGVGAALAGLDMSMPGDTAFGTGKSFWGTNLTIAVLNGTVPEWRVDDMAVRIMAAFYKVGRDRYQVPVNFDSWTKDEYGYEHALVGQNYVKVNDKVDVRADHADIIRQIGSASVVLLKNDGGLPLTGYEKFTGVFGEDAGSNRWGADGCSDRGCDNGTLAMGWGSGTADFPYLVTPEQAIQNEILSKGKGLVSAVTDNGALDQMEQVASQASVSIVFVNADSGEGYINVDGNEGDRKNLTLWKGGEEVIKTVAANCNNTIVVMHTVGPVLIDEWYDNPNVTAIVWAGLPGQESGNSLVDVLYGRVSPGGKTPFTWGKTRESYGAPLLTKPNNGKGAPQDDFTEGVFIDYRRFDKYNETPIYEFGFGLSYTTFEYSDIYVQPLNARPYTPASGSTKAAPTFGNISTDYADYLYPEDIHKVPLYIYPWLNTTDPKKSSGDPDYGMKAEDYIPSGATDGSPQPILPAGGAPGGNPGLYDEMCRVSAIITNTGNVVGDEVPQLYVSLGGPDDPKVVLRNFDRITLHPGQQTMWTTTLTRRDISNWDPASQNWVVTKYPKTVYIGSSSRKLHLQAPLP

SEQ ID NO: 45685 - protein, 838 aa, Thermoascus aurantiacus
DLAYSPPFYPSPWMDGNGEWAEAYRRAVDFVSQLTLAEKVNLTTGVGWMQEKCVGETGSIPRLGFRGLCLQDSPLGVRFADYVSAFPAGVNVAATWDKNLAYLRGKAMGEEHRGKGVDVQLGPVAGPLGRHPDGGRNWEGFSPDPVLTGVLMAETIKGIQDAGVIACAKHFIGNEMEHFRQASEAVGYGFDITESVSSNIDDKTLHELYLWPFADAVRAGVGSFMCSYNQVNNSYSCSNSYLLNKLLKSELDFQGFVMSDWGAHHSGVGAALAGLDMSMPGDTAFGTGISFWGTNLTIAVLNGTVPEWRVDDMAVRIMAAFYKVGRDRYQVPVNFDSWTKDEYGYEHALVGQNYVKVNDKVDVRADHADIIRQIGSASVVLLKNDGGLPLTGYEKFTGVFGEDAGSNRWGADGCSDRGCDNGTLAMGWGSGTADFPYLVTPEQAIQNEILSKGKGLVSAVTDNGALDQMEQVASQASVSIVFVNADSGEGYINVDGNEGDRKNLTLWKGGEEVIKTVAANCNNTIVVMHTVGPVLIDEWYDNPNVTAIVWAGLPGQESGNSLVDVLYGRVSPGGKTPFTWGKTRESYGAPLLTKPNNGKGAPQDDFTEGVFIDYRRFDKYNETPIYEFGFGLSYTTFEYSDIYVQPLNARPYTPASGSTKAAPTFGNISTDYADYLYPEDIHKVPLYIYPWLNTTDPKKSSGDPDYGMKAEDYIPSGATDGSPQPILPAGGAPGGNPGLYDEMYRVSAIITNTGNVVGDEVPQLYVSLGGPDDPKVVLRNFDRITLHPGQQTMWTTTLTRRDISNWDPASQNWVVTKYPKTVYIGSSSRKLHLQAPLP

SEQ ID NO: 45686 - protein, 838 aa, Thermoascus aurantiacus
DLAYSPPFYPSPWMDGNGEWAEAYRRAVDFVSQLTLAEKVNLTTGVGWMQEKCVGETGSIPRLGFRGLCLQDSPLGVRFADYVSAFPAGVNVAATWDKNLAYLRGKAMGEEHRGKGVDVQLGPVAGPLGRHPDGGRNWEGFSPDPVLTGVLMAETIKGIQDAGVIACAKHFIGNEMEHFRQASEAVGYGFDITESVSSNIDDKTLHELYLWPFADAVRAGVGSFMCSYNQVNNSYSCSNSYLLNKLLKSELDFQGFVMSDWGAHHSGVGAALAGLDMSMPGDTAFGTGKSFWGTNLTIAVLNGTVPEWRVDDMAVRIMAAFYKVGRDRYQVPVNFDSWTKDEYGYEHALVGQNYVKVNDKVDVRADHADIIRQIGSASVVLLKNDGGLPLTGYEKFTGVFGEDAGSNRWGADGCSDRGCDNGTLAMGWGSGTADFPYLVTPEQAIQNEILSKGKGLVSAVTDNGALDQMEQVASQASVSIVFVNADSGEGYINVDGNEGDRKNLTLWKGGEEVIKTVAANCNNTIVVMHTVGPVLIDEWYDNPNVTAIVWAGLPGQESGNSLVDVLYGRVSPGGKTPFTWGKTRESYGAPLLTKPNNGKGAPQDDFTEGVFIDYRRFDKYNETPIYEFGFGLSYTTFEYSDIYVQPLNARPYTPASGSTKAAPTFGNISTDYADYLYPEDIHKVPLYIYPWLNTTDPKKSSGDPDYGMKAEDYIPSGATDGSPQPILPAGGAPGGNPGLYDEMYRVSAIITNTGNVVGDEVPQLYVSLGGPDDPKVVLRNFDRITLHPGQQTMWTTTLTRRDISNWDPASQNWVVTKYPKTVYIGSSSRKLHLQAPLP

SEQ ID NO: 45687 - protein, 840 aa, Unidentified
KDLAYCPPFYPSPWADGNGEWAEAHSRAVEFVSGLTLAEKVNLTTGVGWMGETCVGNTGSIPRLGFWGFCAQDSPLGVRDTDYNSAFPAGVNVAATWDKNLAYLRGRAMGEEHRDKGVDVQLGPVAGPLGRAPEGGRNWEGFGPDPVLTGQLMAETIKGIQDVGVIACAKHFILNEQEHFRQVGEAQGYGYNITQAISSNIDDKTLHELYLWPFADAVRAGVGSVMCSYNQINNSYGCSNSYTMNKLLKGELNFQGFIMSDWQAHKSGVGDALAGLDMSMPGDTTFNTGESYWGTNLTIAVLNGTIPEWRIDDMAVRIMSAFYKVGRDRVRTPPNFSSWTTDEYGYEHAAVNQGYTKVNDRVDVRSNHKDIIRQVGSSSVVLLKNQWGALPLTGKEKLVGIMGEDAGSNAYGVNGCSDRGCDNGTLAMGWGSGTANFPYLITPEQAIQWEVIESGGEVFAITDNGALDQMASVASQASVSLVFVNADSGEGYINVDGNEGDRKNLTLWKNGDEVIKTVAANCNNTIVVMHTVGPVLVTEWYDNPNITAILWAGLPGEQSGNSLVDVLYGRVNPGGKTPFTWGKSFDSWGSHVMTTPNNGNDAPQLDFSEGVFIDYRWFDKNNETPIYEFGYGLSYTTFKYSNLQVTPLNAPKYTPASGKTDPAPSFGQPGSASQYVFPRTLNRIYEYIYPWLNSTNLRESSGDPDYGMKASAYIPAGATDGSAQELLPASGAPGGNPGLYDELFRVSATITNTGKVAGDEVPQLYVSLGGPNDPKVVLRNFDRINIAPGQSVEWTTTLTRRDLSNWDVAAQDWVISKYPKTVYVGSSSRKLPLQATLPQV

SEQ ID NO: 45688 - protein, 859 aa, Evansstolkia leycettana
MRLGWLEVAALAVATVADAKDLAYCPPFYPSPWADGNGEWAEAHSRAVEFVSGLTLAEKVNLTTGVGWMGETCVGNTGSIPRLGFWGFCAQDSPLGVRDTDYNSAFPAGVNVAATWDKNLAYLRGRAMGEEHRDKGVDVQLGPVAGPLGRAPEGGRNWEGFGPDPVLTGQLMAETIKGIQDVGVIACAKHFILNEQEHFRQVGEAQGYGYNITQAISSNIDDKTLHELYLWPFADAVRAGVGSVMCSYNQINNSYGCSNSYTMNKLLKGELNFQGFIMSDWQAHKSGVGDALAGLDMSMPGDTTFNTGESYWGTNLTIAVLNGTIPEWRIDDMAVRIMSAFYKVGRDRVRTPPNFSSWTTDEYGYEHAAVNQGYTKVNDRVDVRSNHKDIIRQVGSSSVVLLKNQWGALPLTGKEKLVGIMGEDAGSNAYGVNGCSDRGCDNGTLAMGWGSGTANFPYLITPEQAIQWEVIESGGEVFAITDNGALDQMASVASQASVSLVFVNADSGEGYINVDGNEGDRKNLTLWKNGDEVIKTVAANCNNTIVVMHTVGPVLVTEWYDNPNITAILWAGLPGEQSGNSLVDVLYGRVNPGGKTPFTWGKSFDSWGSHVMTTPNNGNDAPQLDFSEGVFIDYRWFDKNNETPIYEFGYGLSYTTFKYSNLQVTPLNAPKYTPASGKTDPAPSFGQPGSASQYVFPRTLNRIYEYIYPWLNSTNLRESSGDPDYGMKASAYIPAGATDGSAQELLPASGAPGGNPGLYDELFRVSATITNTGKVAGDEVPQLYVSLGGPNDPKVVLRNFDRINIAPGQSVEWTTTLTRRDLSNWDVAAQDWVISKYPKTVYVGSSSRKLPLQATLPQV

SEQ ID NO: 45689 - protein, 838 aa, Thermoascus aurantiacus
DLAYSPPFYPSPWMDGNGEWAEAYRRAVDFVSQLTLAEKVNLTTGVGWMQEKCVGETGSIPRLGFRGLCLQDSPLGVRFADYVSAFPAGVNVAATWDKNLAYLRGKAMGEEHRGKGVDVQLGPVAGPLGRHPDGGRNWEGFSPDPVVTGVLMAETIKGIQDAGVIACAKHFIGNEMEHFRQASEAVGYGFDITESVSSNIDDKTLHELYLWPFADAVRAGVGSFMCSYNQVNNSYSCSNSYLLNKLLKSELDFQGFVMSDWGAHHSGVGAALAGLDMSMPGDTAFGTGKSFWGTNLTIAVLNGTVPEWRVDDMAVRIMAAFYKVGRDRYQVPVNFDSWTKDEYGYEHALVGQNYVKVNDKVDVRADHADIIRQIGSASVVLLKNDGGLPLTGYEKFTGVFGEDAGSNRWGADGCSDRGCDNGTLAMGWGSGTADFPYLVTPEQAIQNEILSKGKGLVSAVTDNGALDQMEQVASQASVSIVFVNADSGEGYINVDGNEGDRKNLTLWKGGEEVIKTVAANCNNTIVVMHTVGPVLIDEWYDNPNVTAIVWAGLPGQESGNSLVDVLYGRVSPGGKTPFTWGKTRESYGAPLLTKPNNGKGAPQDDFTEGVFIDYRRFDKYNETPIYEFGFGLSYTTFEYSDIYVQPLNARPYTPASGSTKAAPTFGNISTDYADYLYPEDIHKVPLYIYPWLNTTDPKKSSGDPDYGMKAEDYIPSGATDGSPQPILPAGGAPGGNPGLYDEMYRVSAIITNTGNVVGDEVPQLYVSLGGPDDPKVVLRNFDRITLHPGQQTMWTTTLTRRDISNWDPASQNWVVTKYPKTVYIGSSSRKLHLQAPLP

SEQ ID NO: 45690 - protein, 838 aa, Thermoascus aurantiacus
DLAYSPPFYPSPWMDGNGEWAEAYRRAVDFVSQLTLAEKVNLTTGVGWMQEKCVGETGSIPRLGFRGLCLQDSPLGVRFADYVSAFPAGVNVAATWDKNLAYLRGKAMGEEHRGKGVDVQLGPVAGPLGRHPDGGRNWEGFSPDPVLTGVLMAETIKGIQDAGVIACAKHFIGNEMEHFRQASEAVGYGFDITESVSSNIDDKTLHELYLWPFADAVRAGVGSFMCSYNQVNNSYSCSNSYLLNKLLKSELDFQGFVMSDWGAHHSGVGAALAGLDMSMPGDTAYGTGKSFWGTNLTIAVLNGTVPEWRVDDMAVRIMAAFYKVGRDRYQVPVNFDSWTKDEYGYEHALVGQNYVKVNDKVDVRADHADIIRQIGSASVVLLKNDGGLPLTGYEKFTGVFGEDAGSNRWGADGCSDRGCDNGTLAMGWGSGTADFPYLVTPEQAIQNEILSKGKGLVSAVTDNGALDQMEQVASQASVSIVFVNADSGEGYINVDGNEGDRKNLTLWKGGEEVIKTVAANCNNTIVVMHTVGPVLIDEWYDNPNVTAIVWAGLPGQESGNSLVDVLYGRVSPGGKTPFTWGKTRESYGAPLLTKPNNGKGAPQDDFTEGVFIDYRRFDKYNETPIYEFGFGLSYTTFEYSDIYVQPLNARPYTPASGSTKAAPTFGNISTDYADYLYPEDIHKVPLYIYPWLNTTDPKKSSGDPDYGMKAEDYIPSGATDGSPQPILPAGGAPGGNPGLYDEMYRVSAIITNTGNVVGDEVPQLYVSLGGPDDPKVVLRNFDRITLHPGQQTMWTTTLTRRDISNWDPASQNWVVTKYPKTVYIGSSSRKLHLQAPLP

SEQ ID NO: 45691 - protein, 838 aa, Thermoascus aurantiacus
DLAYSPPFYPSPWMDGNGEWAEAYRRAVDFVSQLTLAEKVNLTTGVGWMQEKCVGETGSIPRLGFRGLCLQDSPLGVRFADYVSAFPAGVNVAATWDKNLAYLRGKAMGEEHRGKGVDVQLGPVAGPLGRHPDGGRNWEGFSPDPVLTGVLMAETIKGIQDAGVIACAKHFIGNEMEHFRQASEAVGYGFDITESVSSNIDDKTLHELYLWPFADAVRAGVGSFMCSYNQVNNSYSCSNSYLLNKLLKSELDFQGFVMSDWGAHHSGVGAALAGLDMSMPGDTAFGTGKSFWGTNLTIAVLNGTVPEWRVDDMAVRIMAAFYKVGRDRYQVPVNFDSWTKDEYGYEHALVGQNYVKVNDKVDVRADHADIIRQIGSASVVLLKNDGGLPLTGYEKFTGVFGEDAGSNRWGADGCSDRGCDNGTLAMGWGSGTADFPYLVTPEQAIQNEILSKGKGLVSAVTDNGALDQMEQVASQASVSIVFVNADSGEGYINVDGNEGDRKNLTLWKGGEEVIKTVAANCNNTIVVMHTVGPVLIDEWYDNPNVTAIVWAGLPGQESGNSLVDVLYGRVSPGGKTPFTWGKTRESYGAPLLTKPNNGKGAPQDDFTEGVFIDYRRFDKYNETPIYEFGFGLSYTTFEYSDIYVQPLNARPYTPASGSTKAAPTFGNISTDYADYLYPEDIYKVPLYIYPWLNTTDPKKSSGDPDYGMKAEDYIPSGATDGSPQPILPAGGAPGGNPGLYDEMYRVSAIITNTGNVVGDEVPQLYVSLGGPDDPKVVLRNFDRITLHTGQQTMWTTTLTRRDISNWDPASQNWVVTKYPKTVYIGSSSRKLHLQAPLP

SEQ ID NO: 45692 - protein, 838 aa, Thermoascus aurantiacus
DLAYSPPFYPSPWMDGNGEWAEAYRRAVDFVSQLTLAEKVNLTTGVGWMQEKCVGETGSIPRLGFRGLCLQDSPLGVRFADYVSAFPAGVNVAATWDKNLAYLRGKAMGEEHRGKGVDVQLGPVAGPLGRHPDGGRNWEGFSPDPVLTGVLMAETIKGIQDAGVIACAKHFIGNEMEHFRQASEAVGYGFDITESVSSNIDDKTLHELYLWPFADAVRAGVGSFMCSYNQVNNSYSCSNSYLLNKLLKSELDFQGFVMSDWGAHHSGVGAALAGLDMSMPGDTAFGTGKSFWGTNLTIAVLNGTVPEWRVDDMAVRIMAAFYKVGRDRYQVPVNFDSWTKDVYGYEHALVGQNYVKVNDKVDVRADHADIIRQIGSASVVLLKNDGGLPLTGYEKFTGVFGEDAGSNRWGADGCSDRGCDNGTLAMGWGSGTADFPYLVTPEQAIQNEILSKGKGLVSAVTDNGALDQMEQVASQASVSIVFVNADSGEGYINVDGNEGDRKNLTLWKGGEEVIKTVAANCNNTIVVMHTVGPVLIDEWYDNPNVTAIVWAGLPGQESGNSLVDVLYGRVSPGGKTPFTWGKTRESYGAPLLTKPNNGKGAPQDDFTEGVFIDYRRFDKYNETPIYEFGFGLSYTTFEYSDIYVQPLNARPYTPASGSTKAAPTFGNISTDYADYLYPEDIHKVPLYIYPWLNTTDPKKSSGDPDYGMKAEDYIPSGATDGSPQPILPAGGAPGGNPGLYDEMYRVSAIITNTGNVVGDEVPQLYVSLGGPDDPKVVLRNFDRITLHPGQQTMWTTTLTRRDISNWDPASQNWVVTKYPKTVYIGSSSRKLHLQAPLP

SEQ ID NO: 45693 - protein, 838 aa, Thermoascus aurantiacus
DLAYSPPFYPSPWMDGNGEWAEAYRRAVDFVSQLTLAEKVNLTTGVGWMQEKCVGETGSIPRLGFRGLCLQDSPLGVRFADYVNAFPAGVNVAATWDKNLAYLRGKAMGEEHRGKGVDVQLGPVAGPLGRHPDGGRNWEGFSPDPVLTGVLMAETIKGIQDAGVIACAKHFIGNEMEHFRQASEAVGYGFDITESVSSNIDDKTLHELYLWPFADAVRAGVGSFMCSYNQVNNSYSCSNSYLLNKLLKSELDFQGFVMSDWGAHHSGVGAALAGLDMSMPGDTAFGTGKSFWGTNLTIAVLNGTVPEWRVDDMAVRIMAAFYKVGRDRYQVPVNFDSWTKDEYGYEHALVGQNYVKVNDKVDVRADHADIIRQIGSASVVLLKNDGGLPLTGYEKFTGVFGEDAGSNRWGADGCSDRGCDNGTLAMGWGSGTADFPYLVTPEQAIQNEILSKGKGLVSAVTDNGALDQMEQVASQASVSIVFVNADSGEGYINVDGNEGDRKNLTLWKGGEEVIKTVAANCNNTIVVMHTVGPVLIDEWYDNPNVTAIVWAGLPGQESGNSLVDVLYGRVSPGGKTPFTWGKTRESYGAPLLTKPNNGKGAPQDDFTEGVFIDYRRFDKYNETPIYEFGFGLSYTTFEYSDIYVQPLNARPYTPASGSTKAAPTFGNISTDYADYLYPEDIHKVPLYIYPWLNTTDPKKSSGDPDYGMKAEDYIPSGATDGSPQPILPAGGAPGGNPGLYDEMYRVSAIITNTGNVVGDEVPQLYVSLGGPDDPKVVLRNFDRITLHPGQQTMWTTTLTRRDISNWDPASQNWVVTKYPKTVYIGSSSRKLHLQAPLP

SEQ ID NO: 45694 - protein, 838 aa, Thermoascus aurantiacus
DLAYSPPFYPSPWMDGNGEWAEAYRRAVDFVSQLTLAEKVNLTTGVGWMQEKCVGETGSIPRLGFRGLCLQDSPLGVRFADYVSAFPAGVNVAATWDKNLAYLRGKAMGEEHRGKGVDVQLGPVAGPLGRHPDGGRNWEGFSPDPVLTGVLMAETIKGIQDAGVIACAKHFIGNEMEHFRQASEAVGYGFDITESVSSNIDDKTLHELYLWPFADAVRAGVGSFMCSYNQVNNSYSCSNSYLLNKLLKSELDFQGFVMSDWGAHHSGVGAALAGLDMSMPGDTAFGTGKSFWGTNLTIAVLNGTVPEWRVDDMAVRIMAAFYKVGRDRYQVPVNFDSWTKDEYGYEHALVGQNYVKVNDKVDVRADHADIIRQIGSASVVLLKNDGGLPLTGYEKFTGVFGEDAGSNRWGADGCSDRGCDNGTLAMGWGSGTADFPYLVTPEQAIQNEILSKGKGLVSAVTDNGALDQMEQVASQASVSIVFVNADSGEGYINVDGNEGDRKNLTLWKGGEEVIKTVAANCNNTIVVMHTVGPVLIDEWYDNPNVTAIVWAGLPGQESGNSLVDVLYGRVSPGGKTPFTWGKTRESYGAPLLTKPNNGKGAPQDDFTEGVFIDYRRFDKYNETPIYEFGFGLSYTTFEYSDIYVQPLNARPYTPASGSTKAAPTFGNISTDYADYLFPEDIHKVPLYIYPWLNTTDPKKSSGDPDYGMKAEDYIPSGATDGSPQPILPAGGAPGGNPGLYDEMYRVSAIITNTGNVVGDEVPQLYVSLGGPDDPKVVLRNFDRITLHPGQQTMWTTTLTRRDISNWDPASQNWVVTKYPKTVYIGSSSRKLHLQAPLP

SEQ ID NO: 45695 - protein, 838 aa, Thermoascus aurantiacus
DLAYSPPFYPSPWMDGNGEWAEAYRRAVDFVSQLTLAEKVNLTTGVGWMQEKCVGETGSIPRLGFRGLCLQDSPLGVRFADYVSAFPAGVNVAATWDKNLAYLRGKAMGEEHRGKGVDVQLGPVAGPLGRHPDGGRNWEGFSPDPVLTGVLMAETIKGIQDAGVIACAKHFIGNEMEHFRQASEAVGYGFDITESVSSNIDDKTLHELYLWPFADAVRAGVGSFMCSYNQVNNSYSCSNSYLLNKLLKSELDFQGFVMSDWGAHHSGVGAALAGLDMSMPGDTAFGTGKSFWGTNLTIAVLNGTVPEWRVDDMAVRIMAAFYKVGRDRYQVPVNFDSWTKDEYGYEHALVGQNYVKVNDKVDVRADHADIIRQIGSASVVLLKNDGGLPLTGYEKFTGVFGEDAGNNRWGADGCSDRGCDNGTLAMGWGSGTADFPYLVTPEQAIQNEILSKGKGLVSAVTDNGALDQMEQVASQASVSIVFVNADSGEGYINVDGNEGDRKNLTLWKGGEEVIKTVAANCNNTIVVMHTVGPVLIDEWYDNPNVTAIVWAGLPGQESGNSLVDVLYGRVSPGGKTPFTWGKTRESYGAPLLTKPNNGKGAPQDDFTEGVFIDYRRFDKYNETPIYEFGFGLSYTTFEYSDIYVQPLNARPYTPASGSTKAAPTFGNISTDYADYLYPEDIHKVPLYIYPWLNTTDPKKSSGDPDYGMKAEDYIPSGATDGSPQPILPAGGAPGGNPGLYDEMYRVSAIITNTGNVVGDEVPQLYVSLGGPDDPKVVLRNFDRITLHPGQQTMWTTTLTRRDISNWDPASQNWVVTKYPKTVYIGSSSRKLHLQAPLP

SEQ ID NO: 45696 - protein, 838 aa, Thermoascus aurantiacus
DLAYSPPFYPSPWMDGNGEWAEAYRRAVDFVSQLTLAEKVNLTTGVGWMQEKCVGETGSIPRLGFRGLCLQDSPLGVRFADYVSAFPAGVNVAATWDKNLAYLRGKAMGEEHRGKGVDVQLGPVAGPLGRHPDGGRNWEGFSPDPVLTGVLMAETIKGIQDAGVIACAKHFIGNEMEHFRQASEAVGYGFDITESVSSNIDDKTLHELYLWPFADAVRAGVGSFMCSYNQVNNSYSCSNSYLLNKLLKSELDFQGFVMSDWGAHHSGVGAALAGLDMSMPGDTAFGTGKSFWGTNLTIAVLNGTVPEWRVDDMAVRIMAAFYKVGRDRYQVPVNFDSWTKDEYGYEHALVGQNYVKVNDKVDVRADHADIIRQIGSASVVLLKNDGGLPLTGYEKFTGVFGEDAGSNRWGADGCSDRGCDNGTLAMGWGSGTADFPYLVTPEQAIQNEILSKGKGLVSAVTDNGALDQMEQVASQASVSIVFVNADSGEGYINVDGNEGDRKNLTLWKGGEEVIKTVAANCNNTIVVMHTVGPVLIDEWYDNPNVTAIVWAGLPGQESGNSLVDVLYGRVSPGGKTPFTWGKTRESYGAPLLTKPNNGKGAPQDDFTEGVFIDYRRFDKYNETPIYEFGFGLSYTTFEYSDIYVQPLKARPYTPASGSTKAAPTFGNISTDYADYLYPEDIHKVPLYIYPWLNTTDPKKSSGDPDYGMKAEDYIPSGATDGSPQPILPAGGAPGGNPGLYDEMYRVSAIITNTGNVVGDEVPQLYVSLGGPDDPKVVLRNFDRITLHPGQQTMWTTTLTRRDISNWDPASQNWVVTKYPKTVYIGSSSRKLHLQAPLP

SEQ ID NO: 45697 - protein, 838 aa, Thermoascus aurantiacus
DLAYSPPFYPSPWMDGNGEWAEAYRRAVDFVSQLTLAEKVNLTTGVGWMQEKCVGETGSIPRLGFRGLCLQDSPLGVRFADYVSAFPAGVNVAATWDRNLAYLRGKAMGEEHRGKGVDVQLGPVAGPLGRHPDGGRNWEGFSPDPVLTGVLMAETIKGIQDAGVIACAKHFIGNEMEHFRQASEAVGYGFDITESVSSNIDDKTLHELYLWPFADAVRAGVGSFMCSYNQVNNSYSCSNSYLLNKLLKSELDFQGFVMSDWGAHHSGVGAALAGLDMSMPGDTAFGTGKSFWGTNLTIAVLNGTVPEWRVDDMAVRIMAAFYKVGRDRYQVPVNFDSWTKDEYGYEHALVGQNYVKVNDKVDVRADHADIIRQIGSASVVLLKNDGGLPLTGYEKFTGVFGEDAGSNRWGADGCSDRGCDNGTLAMGWGSGTADFPYLVTPEQAIQNEILSKGKGLVSAVTDNGALDQMEQVASQASVSIVFVNADSGEGYINVDGNEGDRKNLTLWKGGEEVIKTVAANCNNTIVVMHTVGPVLIDEWYDNPNVTAIVWAGLPGQESGNSLVDVLYGRVSPGGKTPFTWGKTRESYGAPLLTKPNNGKGAPQDDFTEGVFIDYRRFDKYNETPIYEFGFGLSYTTFEYSDIYVQPLNARPYTPASGSTKAAPTFGNISTDYADYLYPEDIHKVPLYIYPWLNTTDPKKSSGDPDYGMKAEDYIPSGATDGSPQPILPAGGAPGGNPGLYDEMYRVSAIITNTGNVVGDEVPQLYVSLGGPDDPKVVLRNFDRITLHPGQQTMWTTTLTRRDISNWDPASQNWVVTKYPKTVYIGSSSRKLHLQAPLP

SEQ ID NO: 45698 - protein, 838 aa, Thermoascus aurantiacus
DLAYSPPFYPSPWMDGNGEWAEAYRRAVDFVSQLTLAEKVNLTTGVGWMQEKCVGETGSIPRLGFRGLCLQDSPLGVRFADYVSAFPAGVNVAATWDKNLAYLRGKAMGEEHRGKGVDVQLGPVAGPLGRHPDGGRNWEGFSPDPVLTGVLMAETIKGIQDAGVIACAKHFIGNEMEHFRQASEAVGYGFDITESVSSNIDDKTLHELYLWPFADAVRAGVGSFMCSYNQVNNSYSCSNSYLLNKLLKSELDFQGFVMSDWGAHHSGVGAALAGLDMSMPGDTAFGTGKSFWGTNLTIAVLNGTVPEWRVDDMAVRIMAAFYKVGRDRYQVPVNFDSWTKDEYGYEHALVGQNYVKVNDKVDVRADHADIIRQIGSASVVLLKNDGGLPLTGYEKFTGVFGEDAGSNRWGADGCSDRGCDNGTLAMGWGSGTADFPYLVTPEQAIQNEILSKGKGLVSAVTDNGALDQMEQVASQASVSIVFVNADSGEGYINVDGNEGDRKNLTLWKGGEEVIKTVAANCNNTIVVMHTVGPVLIDEWYDNPNVTAIVWAGLPGQESGNSLVDVLYGRVSPGGKTPFTWGKTRESYGAPLLTKPNNGKGAPQDDFTEGVFIDYRRFDKYNETPIYEFGFGLSYTTFEYSDIYVQPLNARPYTPASGSTKAAPTFGNISTDYADYLYPEDIHKVPLYIYPWLNTTDPKKSSGDPDYGMKAEDYIPSGATDGSPQPILPAGGAPGGNSGLYDEMYRVSAIITNTGNVVGDEVPQLYVSLGGPDDPKVVLRNFDRITLHPGQQTMWTTTLTRRDISNWDPASQNWVVTKYPKTVYIGSSSRKLHLQAPLP

SEQ ID NO: 45699 - protein, 838 aa, Thermoascus aurantiacus
DLAYSPPFYPSPWMDGNGEWAEAYRRAVDFVSQLTLAEKVNLTTGVGWMQEKCVGETGSIPRLGFRGLCLQDSPLGVRFADYVSAFPAGVNVAATWDKNLAYLRGKAMGEEHRGKGVDVQLGPVAGPLGRHPDGGRNWEGFSPDPVLTGVLMAETIKGIQDAGVIACAKHFIGNEMEHFRQASEAVGYGFDITESVSSNIDDKTLHELYLWPFADAVRAGVGSFMCSYNQVNNSYSCSNSYLLNKLLKSELDFQGFVMSDWGAHHSGVGAALAGLDMSMPGDTAFGTGKSFWGTNLTIAVLNGTVPEWRVDDMAVRIMAAFYKVGRDKYQVPVNFDSWTKDEYGYEHALVGQNYVKVNDKVDVRADHADIIRQIGSASVVLLKNDGGLPLTGYEKFTGVFGEDAGSNRWGADGCSDRGCDNGTLAMGWGSGTADFPYLVTPEQAIQNEILSKGKGLVSAVTDNGALDQMEQVASQASVSIVFVNADSGEGYINVDGNEGDRKNLTLWKGGEEVIKTVAANCNNTIVVMHTVGPVLIDEWYDNPNVTAIVWAGLPGQESGNSLVDVLYGRVSPGGKTPFTWGKTRESYGAPLLTKPNNGKGAPQDDFTEGVFIDYRRFDKYNETPIYEFGFGLSYTTFEYSDIYVQPLNARPYTPASGSTKAAPTFGNISTDYADYLYPEDIHKVPLYIYPWLNTTDPKKSSGDPDYGMKAEDYIPSGATDGSPQPILPAGGAPGGNPGLYDEMYRVSAIITNTGNVVGDEVPQLYVSLGGPDDPKVVLRNFDRITLHPGQQTMWTTTLTRRDISNWDPASQNWVVTKYPKTVYIGSSSRKLHLQAPLP

SEQ ID NO: 45700 - protein, 838 aa, Thermoascus aurantiacus
DLAYSPPFYPSPWMDGNGEWAEAYRRAVDFVSQLTLAEKVNLTTGVGWMQEKCVGETGSIPRLGFRGLCLQDSPLGVRFADYVSAFPAGVNVAATWDKNLAYLRGKAMGEEHRGKGVDVQLGPVAGPLGRHPDGGRNWEGFSPDPVLTGVLMAETIKGIQDAGVIACAKHFIGNEMEHFRQASEAVGYGFDITESVSSNIDDKTLHELYLWPFADAVRAGVGSFMCSYNQVNNSYSCSNSYLLNKLLKSELDFQGFVMSDWGAHHSGVGAALAGLDMSMPGDTAFGTGKSFWGTNLTIAVLNGTVPEWRVDDMAVRIMAAFYKVGRDRYQVPVNFDSWTKDEYGYEHALVGQNYVKVNDKVDVRADHADIIRQIGSASVVLLKNDGGLPLTGYEKFTGVFGEDAGSNRWGADGCSDRGCDNGTLAMGWGSGTADFPYLVTPEQAIQNEILSKGKGLVSAVTDNGALDQMEQVASQASVSIVFVNADSGEGYINVDGNEGDRKNLTLWKGGEEVIKTVAANCNNTIVVMHTVGPVLIDEWYDNPNVTAIVWAGLPGQESGNSLVDVLYGRVSPGGKTPFTWGKTRESYGAPLLTKPNNGKGAPQDDFTEGVFIDYRRFDKYNETPIYEFGFGLSYTTFEYSDIYVQPLNARPYTPASGSTKAAPTFGNISTDYADYLYPEDIHKVPLYIYPWLNTTDPKKSSGDPDYGMKAEDYIPSGATDGSPQPILPAGGAPGGNPGLYDEMYRVSAIITNTGNVVGDEVPQLYVSLGGPDDPKVVLRNFDRITLHTGQQTMWTTTLTRRDISNWDPASQNWVVTKYPKTVYIGSSSRKLHLQAPLP

SEQ ID NO: 45701 - protein, 838 aa, Thermoascus aurantiacus
DLAYSPPFYPSPWMDGNGEWAEAYRRAVDFVSQLTLAEKVNLTTGVGWMQEKCVGETGSIPRLGFRGLCLQDSPLGVRFADYVSAFPAGVNVAATWDKNLAYLRGKAMGEEHRGKGVDVQLGPVAGPLGRHPDGGRNWEGFSPDPVLSGVLMAETIKGIQDAGVIACAKHFIGNEMEHFRQASEAVGYGFDITESVSSNIDDKTLHELYLWPFADAVRAGVGSFMCSYNQVNNSYSCSNSYLLNKLLKSELDFQGFVMSDWGAHHSGVGAALAGLDMSMPGDTAFGTGKSFWGTNLTIAVLNGTVPEWRVDDMAVRIMAAFYKVGRDRYQVPVNFDSWTKDEYGYEHALVGQNYVKVNDKVDVRADHADIIRQIGSASVVLLKNDGGLPLTGYEKFTGVFGEDAGSNRWGADGCSDRGCDNGTLAMGWGSGTADFPYLVTPEQAIQNEILSKGKGLVSAVTDNGALDQMEQVASQASVSIVFVNADSGEGYINVDGNEGDRKNLTLWKGGEEVIKTVAANCNNTIVVMHTVGPVLIDEWYDNPNVTAIVWAGLPGQESGNSLVDVLYGRVSPGGKTPFTWGKTRESYGAPLLTKPNNGKGAPQDDFTEGVFIDYRRFDKYNETPIYEFGFGLSYTTFEYSDIYVQPLNARPYTPASGSTKAAPTFGNISTDYADYLYPEDIHKVPLYIYPWLNTTDPKKSSGDPDYGMKAEDYIPSGATDGSPQPILPAGGAPGGNPGLYDEMYRVSAIITNTGNVVGDEVPQLYVSLGGPDDPKVVLRNFDRITLHPGQQTMWTTTLTRRDISNWDPASQNWVVTKYPKTVYIGSSSRKLHLQAPLP

SEQ ID NO: 45702 - protein, 838 aa, Thermoascus aurantiacus
DLAYSPPFYPSPWMDGNGEWAEAYRRAVDFVSQLTLAEKVNLTTGVGWMQEKCVGETGSIPRLGFRGLCLQDSPLGVRFADYVSAFPAGVNVAATWDKNLAYLRGKAMGEEHRGKGVDVQLGPVAGPLGRHPDGGRNWEGFSPDPVLTGVLMAETIKGIQDAGVIACAKHFIGNEMEHFRQASEAVGYGFDITESVSSNIGDKTLHELYLWPFADAVRAGVGSFMCSYNQVNNSYSCSNSYLLNKLLKSELDFQGFVMSDWGAHHSGVGAALAGLDMSMPGDTAFGTGKSFWGTNLTIAVLNGTVPEWRVDDMAVRIMAAFYKVGRDRYQVPVNFDSWTKDEYGYEHALVGQNYVKVNDKVDVRADHADIIRQIGSASVVLLKNDGGLPLTGYEKFTGVFGEDAGSNRWGADGCSDRGCDNGTLAMGWGSGTADFPYLVTPEQAIQNEILSKGKGLVSAVTDNGALDQMEQVASQASVSIVFVNADSGEGYINVDGNEGDRKNLTLWKGGEEVIKTVAANCNNTIVVMHTVGPVLIDEWYDNPNVTAIVWAGLPGQESGNSLVDVLYGRVSPGGKTPFTWGKTRESYGAPLLTKPNNGKGAPQDDFTEGVFIDYRRFDKYNETPIYEFGFGLSYTTFEYSDIYVQPLNARPYTPASGSTKAAPTFGNISTDYADYLYPEDIHKVPLYIYPWLNTTDPKKSSGDPDYGMKAEDYIPSGATDGSPQPILPAGGAPGGNPGLYDEMYRVSAIITNTGNVVGDEVPQLYVSLGGPDDPKVVLRNFDRITLHPGQQTMWTTTLTRRDISNWDPASQNWVVTKYPKTVYIGSSSRKLHLQAPLP

SEQ ID NO: 45703 - protein, 838 aa, Thermoascus aurantiacus
DLAYSPPFYPSPWMDGNGEWAEAYRRAVDFVSQLTLAEKVNLTTGVGWMQEKCVGETGSIPRLGFRGLCLQDSPLGVRFADYVSAFPAGVNVAATWDKNLAYLRGKAMGEEHRGKGVDVQLGPVAGPLGRHPDGGRNWEGFSPDPVLTGVLMAETIKGIQDAGVIACAKHFIGNEMEHFRQASEAVGYGFDITESVSSNIDDKTLHELYLWPFADAVRAGVGSFMCSYNQVNNSYSCSNSYLLNKLLKSELDFQGFVMSDWGAHHSGVGAALAGLDMSMPGDTAFGTGKSFWGTNLTIAVLNGTVPEWRVDDMAVRIMAAFYKVGRDRYQVPVNFDSWTKDEYGYEHALVGQNYVKVNDKVDVRADHADIIRQIGSASVVLLKNDGGLPLTGYEKFTGVFGEDAGSNRWGADGCSDRGCDNGTLAMGWGSGTADFPYLVTPEQAIQNEILSKGKGLVSAVTDNGALDQMEQVASQASVSIVFVNADSGEGYINVDGNEGDRKNLTLWKGGEEVIKTVAANCNNTIVVMHTVGPVLIDEWYDNPNVTAIVWAGLPGQESGNSLVDVLYGRVSPGGKTPFTWGKTRESYGAPLLTKPNNGKGAPQDDFTEGVFIDYRRFDKYNETPIYEFGFGLSYTTFENSDIYVQPLNARPYTPASGSTKAAPTFGNISTDYADYLYPEDIHKVPLYIYPWLNTTDPKKSSGDPDYGMKAEDYIPSGATDGSPQPILPAGGAPGGNPGLYDEMYRVSAIITNTGNVVGDEVPQLYVSLGGPDDPKVVLRNFDRITLHPGQQTMWTTTLTRRDISNWDPASQNWVVTKYPKTVYIGSSSRKLHLQAPLP

SEQ ID NO: 45704 - protein, 840 aa, Unidentified
KDLAYCPPFYPSPWADGNGEWAEAHSRAVEFVSGLTLAEKVNLTTGVGWMGETCVGNTGSIPRLGFWGFCAQDSPLGVRDTDYNSAFPAGVNVAATWDKNLAYLRGRAMGEEHRDKGVDVQLGPVAGPLGRAPEGGRNWEGFGPDPVLTGQLMAETIKGIQDVGVIACAKHFILNEQEHFRQVGEAQGYGYNITQAISSNIDDKTLHELYLWPFADAVRAGVGSVMCSYNQINNSYGCSNSYTMNKLLKGELNFQGFIMSDWQAHKSGVGDALAGLDMSMPGDTTFNTGESYWGTNLTIAVLNGTIPEWRIDDMAVRIMSAFYKVGRDHVRTPPNFSSWTTDEYGYEHAAVNQGYTKVNDRVDVRSNHKDIIRQVGSSSVVLLKNQWGALPLTGKEKLVGIMGEDAGSNAYGVNGCSDRGCDNGTLAMGWGSGTANFPYLITPEQAIQWEVIESGGEVFAITDNGALDQMASVASQASVSLVFVNADSGEGYINVDGNEGDRKNLTLWKNGDEVIKTVAANCNNTIVVMHTVGPVLVTEWYDNPNITAILWAGLPGEQSGNSLVDVLYGRVNPGGKTPFTWGKSFDSWGSHVMTTPNNGNDAPQLDFSEGVFIDYRWFDKNNETPIYEFGYGLSYTTFKYSNLQVTPLNAPKYTPASGKTDPAPSFGQPGSASQYVFPRTLNRIYEYIYPWLNSTNLRESSGDPDYGMKASAYIPAGATDGSAQELLPASGAPGGNPGLYDELFRVSATITNTGKVAGDEVPQLYVSLGGPNDPKVVLRNFDRINIAPGQSVEWTTTLTRRDLSNWDVAAQDWVISKYPKTVYVGSSSRKLPLQATLPQV

SEQ ID NO: 45705 - protein, 859 aa, Unidentified
MRLGWLEVAALAVATVADAKDLAYCPPFYPSPWADGNGEWAEAHSRAVEFVSGLTLAEKVNLTTGVGWMGETCVGNTGSIPRLGFWGFCAQDSPLGVRDTDYNSAFPAGVNVAATWDKNLAYLRGRAMGEEHRDKGVDVQLGPVAGPLGRAPEGGRNWEGFGPDPVLTGQLMAETIKGIQDVGVIACAKHFILNEQEHFRQVGEAQGYGYNITQAISSNIDDKTLHELYLWPFADAVRAGVGSVMCSYNQINNSYGCSNSYTMNKLLKGELNFQGFIMSDWQAHKSGVGDALAGLDMSMPGDTTFNTGESYWGTNLTIAVLNGTIPEWRIDDMAVRIMSAFYKVGRDHVRTPPNFSSWTTDEYGYEHAAVNQGYTKVNDRVDVRSNHKDIIRQVGSSSVVLLKNQWGALPLTGKEKLVGIMGEDAGSNAYGVNGCSDRGCDNGTLAMGWGSGTANFPYLITPEQAIQWEVIESGGEVFAITDNGALDQMASVASQASVSLVFVNADSGEGYINVDGNEGDRKNLTLWKNGDEVIKTVAANCNNTIVVMHTVGPVLVTEWYDNPNITAILWAGLPGEQSGNSLVDVLYGRVNPGGKTPFTWGKSFDSWGSHVMTTPNNGNDAPQLDFSEGVFIDYRWFDKNNETPIYEFGYGLSYTTFKYSNLQVTPLNAPKYTPASGKTDPAPSFGQPGSASQYVFPRTLNRIYEYIYPWLNSTNLRESSGDPDYGMKASAYIPAGATDGSAQELLPASGAPGGNPGLYDELFRVSATITNTGKVAGDEVPQLYVSLGGPNDPKVVLRNFDRINIAPGQSVEWTTTLTRRDLSNWDVAAQDWVISKYPKTVYVGSSSRKLPLQATLPQV

SEQ ID NO: 45706 - protein, 838 aa, Thermoascus aurantiacus
DLAYSPPFYPSPWMDGNGEWAEAYRRAVDFVSQLTLAEKVNLTTGVGWMQEKCVGETGSIPRLGFRGLCLQDSPLGVRFADYVSAFPAGVNVAATWDKNLAYLRGKAMGEEHRGKGVDVQLGPVAGPLGRHPDGGRNWEGFSPDPVLTGVLMAETIKGIQDAGVIACAKHFIGNEMEHFRQASEAVGYGFDITESVSSNIGDKTLHELYLWPFADAVRAGVGSFMCSYNQVNNSYSCSNSYLLNKLLKSELDFQGFVMSDWGAHHSGVGAALAGLDMSMPGDTAFGTGISFWGTNLTIAVLNGTVPEWRVDDMAVRIMAAFYKVGRDRYQVPVNFDSWTKDVYGYEHALVGQNYVKVNDKVDVRADHADIIRQIGSASVVLLKNDGGLPLTGYEKFTGVFGEDAGSNRWGADGCSDRGCDNGTLAMGWGSGTADFPYLVTPEQAIQNEILSKGKGLVSAVTDNGALDQMEQVASQASVSIVFVNADSGEGYINVDGNEGDRKNLTLWKGGEEVIKTVAANCNNTIVVMHTVGPVLIDEWYDNPNVTAIVWAGLPGQESGNSLVDVLYGRVSPGGKTPFTWGKTRESYGAPLLTKPNNGKGAPQDDFTEGVFIDYRRFDKYNETPIYEFGFGLSYTTFEYSDIYVQPLNARPYTPASGSTKAAPTFGNISTDYADYLYPEDIHKVPLYIYPWLNTTDPKKSSGDPDYGMKAEDYIPSGATDGSPQPILPAGGAPGGNPGLYDEMCRVSAIITNTGNVVGDEVPQLYVSLGGPDDPKVVLRNFDRITLHPGQQTMWTTTLTRRDISNWDPASQNWVVTKYPKTVYIGSSSRKLHLQAPLP

SEQ ID NO: 45707 - protein, 838 aa, Thermoascus aurantiacus
DLAYSPPFYPSPWMDGNGEWAEAYRRAVDFVSQLTLAEKVNLTTGVGWMQEKCVGETGSIPRLGFRGLCLQDSPLGVRFADYVSAFPAGVNVAATWDKNLAYLRGKAMGEEHRGKGVDVQLGPVAGPLGRHPDGGRNWEGFSPDPVLSGVLMAETIKGIQDAGVIACAKHFIGNEMEHFRQASEAVGYGFDITESVSSNIDDKTLHELYLWPFADAVRAGVGSFMCSYNQVNNSYSCSNSYLLNKLLKSELDFQGFVMSDWGAHHSGVGAALAGLDMSMPGDTAFGTGKSFWGTNLTIAVLNGTVPEWRVDDMAVRIMAAFYKVGRDRYQVPVNFDSWTKDEYGYEHALVGQNYVKVNDKVDVRADHADIIRQIGSASVVLLKNDGGLPLTGYEKFTGVFGEDAGSNRWGADGCSDRGCDNGTLAMGWGSGTADFPYLVTPEQAIQNEILSKGKGLVSAVTDNGALDQMEQVASQASVSIVFVNADSGEGYINVDGNEGDRKNLTLWKGGEEVIKTVAANCNNTIVVMHTVGPVLIDEWYDNPNVTAIVWAGLPGQESGNSLVDVLYGRVSPGGKTPFTWGKTRESYGAPLLTKPNNGKGAPQDDFTEGVFIDYRRFDKYNETPIYEFGFGLSYTTFENSDIYVQPLKARPYTPASGSTKAAPTFGNISTDYADYLYPEDIHKVPLYIYPWLNTTDPKKSSGDPDYGMKAEDYIPSGATDGSPQPILPAGGAPGGNPGLYDEMYRVSAIITNTGNVVGDEVPQLYVSLGGPDDPKVVLRNFDRITLHPGQQTMWTTTLTRRDISNWDPASQNWVVTKYPKTVYIGSSSRKLHLQAPLP

SEQ ID NO: 45708 - protein, 838 aa, Thermoascus aurantiacus
DLAYSPPFYPSPWMDGNGEWAEAYRRAVDFVSQLTLAEKVNLTTGVGWMQEKCVGETGSIPRLGFRGLCLQDSPLGVRFADYVSAFPAGVNVAATWDKNLAYLRGKAMGEEHRGKGVDVQLGPVAGPLGRHPDGGRNWEGFSPDPVLSGVLMAETIKGIQDAGVIACAKHFIGNEMEHFRQASEAVGYGFDITESVSSNIDDKTLHELYLWPFADAVRAGVGSFMCSYNQVNNSYSCSNSYLLNKLLKSELDFQGFVMSDWGAHHSGVGAALAGLDMSMPGDTAFGTGKSFWGTNLTIAVLNGTVPEWRVDDMAVRIMAAFYKVGRDRYQVPVNFDSWTRDEYGYEHALVGQNYVKVNDKVDVRADHADIIRQIGSASVVLLKNDGGLPLTGYEKFTGVFGEDAGNNRWGADGCSDRGCDNGTLAMGWGSGTADFPYLVTPEQAIQNEILSKGKGLVSAVTDNGALDQMEQVASQVSVSIVFVNADSGEGYINVDGNEGDRKNLTLWKGGEEVIKTVAANCNNTIVVMHTVGPVLIDEWYDNPNVTAIVWAGLPGQESGNSLVDVLYGRVSPGGKTPFTWGKTRESYGAPLLTKPNNGKGAPQDDFTEGVFIDYRRFDKYNETPIYEFGFGLSYTTFENSDIYVQPLNARPYTPASGSTKAAPTFGNISTDYADYLFPEDIHKVPLYIYPWLNTTDPKKSSGDPDYGMKAEDYIPSGATDGSPQPILPAGGAPGGNPGLYDEMYRVSAIITNTGNVVGDEVPQLYVSLGGPDDPKVVLRNFDRITLHPGQQTMWTTTLTRRDISNWDPASQNWVVTKYPKTVYIGSSSRKLHLQAPLP

SEQ ID NO: 45709 - protein, 838 aa, Thermoascus aurantiacus
DLAYSPPFYPSPWMDGNGEWAEAYRRAVDFVSQLTLAEKVNLTTGVGWMQERCVGETGSIPRLGFRGLCLQDSPLGVRFADYVSAFPAGVNVAATWDRNLAYLRGKAMGEEHRGKGVDVQLGPVAGPLGRHPDGGRNWEGFSPDPVLSGVLMAETIKGIQDAGVIACAKHFIGNEMEHFRQASEAVGYGFDITESVSSNIDDKTLHELYLWPFADAVRAGVGSFMCSYNQVNNSYSCSNSYLLNKLLKSELDFQGFVMSDWGAHHSGVGAALAGLDMSMPGDTAFGTGKSFWGTNLTIAVLNGTVPEWRVDDMAVRIMAAFYKVGRDKCQVPVNFDSWTRDEYGYEHALVGQSYVKVNDKVDVRADHADIIRQIGSASVVLLKNDGGLPLTGYEKFTGVFGEDAGNNRWGADGCSDRGCDNGTLAMGWGSGTADFPYLVTPEQAIQNEILSKGKGLVSAVTDNGALDQMEQVASQASVSIVFVNADSGEGYINVDGNEGDRKNLTLWKGGEEVIKTVAANCNNTIVVMHTVGPVLIDEWYDNPNVTAIVWAGLPGQESGNSLVDVLYGRVSPGGKTPFTWGKTRESYGAPLLTKPNNGKGAPQDDFTEGVFIDYRRFDKYNETPIYEFGFGLSYTTFENSDIYVQPLNARPYTPASGSTKAAPTFGNISTDYADYLYPEDIHKVPLYIYPWLNTTDPKKSSGDPDYGMKAEDYIPSGATDGSPQPILPAGGAPGGNPGLYDEMYRVSAIITNTGNVVGDEVPQLYVSLGGPDDPKVVLRNFDRITLHPGQQTMWTTTLTRRDISNWDPASQNWVVTKYPKTVYIGSSSRKLHLQAPLP

SEQ ID NO: 45710 - protein, 859 aa, unidentified
MRLGWLELAVAAAATVASAKDDLAYSPPFYPSPWMDGNGEWAEAYRRAVDFVSQLTLAEKVNLTTGVGWMQEKCVGETGSIPRLGFRGLCLQDSPLGVRFADYVSAFPAGVNVAATWDKNLAYLRGKAMGEEHRGKGVDVQLGPVAGPLGRHPDGGRNWEGFSPDPVLTGVLMAETIKGIQDAGVIACAKHFIGNEMEHFRQASEAVGYGFDITESVSSNIDDKTLHELYLWPFADAVRAGVGSFMCSYNQVNNSYSCSNSYLLNKLLKSELDFQGFVMSDWGAHHSGVGAALAGLDMSMPGDTAFGTGKSFWGTNLTIAVLNGTVPEWRVDDMAVRIMAAFYKVGRDRYQVPVNFDSWTKDEYGYEHALVGQNYVKVNDKVDVRADHADIIRQIGSASVVLLKNDGGLPLTGYEKFTGVFGEDAGSNRWGADGCSDRGCDNGTLAMGWGSGTADFPYLVTPEQAIQNEILSKGKGLVSAVTDNGALDQMEQVASQASVSIVFVNADSGEGYINVDGNEGDRKNLTLWKGGEEVIKTVAANCNNTIVVMHTVGPVLIDEWYDNPNVTAIVWAGLPGQESGNSLVDVLYGRVSPGGKTPFTWGKTRESYGAPLLTKPNNGKGAPQDDFTEGVFIDYRRFDKYNETPIYEFGFGLSYTTFEYSDIYVQPLNARPYTPASGSTKAAPTFGNISTDYADYLYPEDIHKVPLYIYPWLNTTDPKKSSGDPDYGMKAEDYIPSGATDGSPQPILPAGGAPGGNPGLYDEMYRVSAIITNTGNVVGDEVPQLYVSLGGPDDPKVVLRNFDRITLHPGQQTMWTTTLTRRDISNWDPASQNWVVTKYPKTVYIGSSSRKLHLQAPLP

SEQ ID NO: 45711 - protein, 862 aa, Aspergillus nidulans
MKLGWLEAAALTAASVASAQVKQDDLPVSPPYYPSPWSNGEGEWAEAYNRAVQIVSQMTLDEKVNLTTGTGMSEKCVGQTGSVPRLGINSICLQDGPLGIRFTDYNSAFPAGVNVAATWDRQLAYIRGHAMGQEFSDKGIDVQLGPAAGPLGRFPDGGRNWEGFSPDPVLSGVLFAETIKGIQDAGVIATAKHYLLNEQEHFRQVPEANGYGYNITETLSENVDDKTLHELYLWPFADAVRAGVGAIMCSYQHLNNTQACQNSHLLNKLLKAELGFQGFVMSDWSATHSGVGSALAGMDMTMPGDIAFNDGLSYYGPNLTISVLNGTVPQWRVDDMAVRVMAAFYKVGRDRLATPPNFSSWTRAEKGYEHASIDGGAYGTVNEFVDVQQDHASLIRRVGADSIVLLKNEGSLPLTGKERNVAILGEDAGSNPYGANGCDDRGCAQGTLAMGWGSGTANFPYLVTPEQAIQQEVLKGRGNVFAVTDNWALDKVNKTASESTVSLVFVNAGAGEGFISVDGNEGDRKNLTLWKNGENLIKAAASNCNNTIVVIHSVGAVLVDQFYEHPNVTAILWAGLPGQESGNSLVDVLYGRVNPNGKSPFTWGKTREAYGAPLLTEANNGNGAPQTDHTEGVFIDYRHFDRTNQTPIYEFGHGLSYTTFKYSNLTVQKLNAPAYSPASGQTKAAPTFGTIGEAEDYVFPDSITRVREFIYPWINSTDLKESSGDPNYGWDDEDYIPEGAKDGSPQDVLPSGGGAGGNPRLYDDLFRITAIIKNTGPVAGTEVPQLYVSLGGPNEPKVVLRGFDKLVIQPGEERVFTTTLTRRDLSNWDMEKDDWVITSYPKKVFVGSSSRKLPLRASLPAV

SEQ ID NO: 45712 - protein, 859 aa, Thermoascus
MRLGWLELAVAAAATVASAKDDLAYSPPFYPSPWMDGNGEWAEAYRRAVDFVSQLTLAEKVNLTTGVGWMQEKCVGETGSIPRLGFRGLCLQDSPLGVRFADYVSAFPAGVNVAATWDKNLAYLRGKAMGEEHRGKGVDVQLGPVAGPLGRHPDGGRNWEGFSPDPVLTGVLMAETIKGIQDAGVIACAKHFIGNEMEHFRQASEAVGYGFDITESVSSNIDDKTLHELYLWPFADAVRAGVGSFMCSYNQVNNSYSCSNSYLLNKLLKSELDFQGFVMSDWGAHHSGVGAALAGLDMSMPGDTAFGTGKSFWGTNLTIAVLNGTVPEWRVDDMAVRIMAAFYKVGRDRYQVPVNFDSWTKDEYGYEHALVGQNYVKVNDKVDVRADHADIIRQIGSASVVLLKNDGGLPLTGYEKFTGVFGEDAGSNRWGADGCSDRGCDNGTLAMGWGSGTADFPYLVTPEQAIQNEILSKGKGLVSAVTDNGALDQMEQVASQASVSIVFVNADSGEGYINVDGNEGDRKNLTLWKGGEEVIKTVAANCNNTIVVMHTVGPVLIDEWYDNPNVTAIVWAGLPGQESGNSLVDVLYGRVSPGGKTPFTWGKTRESYGAPLLTKPNNGKGAPQDDFTEGVFIDYRRFDKYNETPIYEFGFGLSYTTFEYSDIYVQPLNARPYTPASGSTKAAPTFGNISTDYADYLYPEDIHKVPLYIYPWLNTTDPKKSSGDPDYGMKAEDYIPSGATDGSPQPILPAGGAPGGNPGLYDEMYAVSAIITNTGNVVGDEVPQLYVSLGGPDDPKVVLRNFDRITLHPGQQTMWTTTLTRRDISNWDPASQNWVVTKYPKTVYIGSSSRKLHLQAPLP

SEQ ID NO: 45713 - protein, 838 aa, Thermoascus aurantiacus
DLAYSPPFYPSPWMDGNGEWAEAYRRAVDFVSQLTLAEKVNLTTGVGWMQEKCVGETGSIPRLGFRGLCLQDSPLGVRFADYVSAFPAGVNVAATWDKNLAYLRGKAMGEEHRGKGVDVQLGPVAGPLGRHPDGGRNWEGFSPDPVVSGVLMAETIKGIQDAGVIACAKHFIGNEMEHFRQASEAVGYGFDITESVSSNIDDKTLHELYLWPFADAVRAGVGSFMCSYNQVNNSYSCSNSYLLNKLLKSELDFQGFVMSDWGAHHSGVGAALAGLDMSMPGDTAFGTGKSFWGTNLTIAVLNGTVPEWRVDDMAVRIMAAFYKVGRDRYQVPVNFDSWTRDEYGYEHALVGQNYVKVNDKVDVRADHADIIRQIGSASVVLLKNDGGLPLTGYEKFTGVFGEDAGNNRWGADGCSDRGCDNGTLAMGWGSGTADFPYLVTPEQAIQNEILSKGRGLVSAVTDNGALDQMEQVASQASVSIVFVNADSGEGYINVDGNEGDRKNLTLWKGGEEVIKTVAANCNNTIVVMHTVGPVLIDEWYDNPNVTAIVWAGLPGQESGNSLVDVLYGRVSPGGKTPFTWGKTRESYGAPLLTKPNNGKGAPQDDFTEGVFIDYRRFDKYNETPIYEFGFGLSYTTFENSDIYVQPLKARPYTPASGSTKAAPTFGNISTDYADYLYPEDIHKVPLYIYPWLNTTDPKKSSGDPDYGMKAEDYIPSGATDGSPQPILPAGGAPGGNPGLYDEMYRVSAIITNTGNVVGDEVPQLYVSLGGPDDPKVVLRNFDRITLHPGQQTMWTTTLTRRDISNWDPASQNWVVTKYPKTVYIGSSSRKLHLQAPLP

SEQ ID NO: 45714 - protein, 838 aa, Thermoascus aurantiacus
DLAYSPPFYPSPWMDGNGEWAEAYRRAVDFVSQLTLAEKVNLTTGVGWMQEKCVGETGSIPRLGFRGLCLQDSPLGVRFADYVSAFPAGVNVAATWDRNLAYLRGKAMGEEHRGKGVDVQLGPVAGPLGRHPDGGRNWEGFSPDPVLSGVLMAETIKGIQDAGVIACAKHFIGNEMEHFRQASEAVGYGFDITESVSSNIDDKTLHELYLWPFADAVRAGVGSFMCSYNQVNNSYSCSNSYLLNKLLKSELDFQGFVMSDWGAHHSGVGAALAGLDMSMPGDTAFGTGESFWGTNLTIAVLNGTVPEWRVDDMAVRIMAAFYKVGRDRYQVPVNFDSWTRDEYGYEHALVGQNYVKVNDKVDVRADHADIIRQIGSASVVLLKNDGGLPLTGYEKFTGVFGEDAGNNRWGADGCSDRGCDNGTLAMGWGSGTADFPYLVTPEQAIQNEILSKGKGLVSAVTDNGALDQMEQVASQASVSIVFVNADSGEGYINVDGNEGDRKNLTLWKGGEEVIKTVAANCNNTIVVMHTVGPVLIDEWYDNPNVTAIVWAGLPGQESGNSLVDVLYGRVSPGGKTPFTWGKTRESYGAPLLTKPNNGKGAPQDDFTEGVFIDYRRFDKYNETPIYEFGFGLSYTTFENSDIYVQPLNARPYTPASGSTKAAPTFGNISTDYADYLYPEDIHKVPLYIYPWLNTTDPKKSSGDPDYGMKAEDYIPSGATDGSPQPILPAGGAPGGNSGLYDEMYRVSAIITNTGNVVGDEVPQLYVSLGGPDDPKVVLRNFDRITLHPGQQTMWTTTLTRRDISNWDPASQNWVVTKYPKTVYIGSSSRKLHLQAPLP

SEQ ID NO: 45715 - protein, 838 aa, Thermoascus aurantiacus
DLAYSPPFYPSPWMDGNGEWAEAYRRAVDFVSQLTLAEKVNLTTGVGWMQEKCVGETGSIPRLGFRGLCLQDSPLGVRFADYVSAFPAGVNVAATWDRNLAYLRGKAMGEEHRGKGVDVQLGPVAGPLGRHPDGGRNWEGFSPDPVLSGVLMAETIKGIQDAGVIACAKHFIGNEMEHFRQASEAVGYGFDITESVSSNIDDKTLHELYLWPFADAVRAGVGSFMCSYNQVNNSYSCSNSYLLNKLLKSELDFQGFVMSDWGAHHSGVGAALAGLDMSMPGDTAFGTGKSFWGTNLTIAVLNGTVPEWRVDDMAVRIMAAFYKVGRDRYQVPVNFDSWTRDEYGYEHALVGQSYVKVNDKVDVRADHADIIRQIGSASVVLLKNDGGLPLTGYEKFTGVFGEDAGNNRWGADGCSDRGCDNGTLAMGWGSGTADFPYLVTPEQAIQNEILSKGKGLVSAVTDNGALDQMEQVASQASVSIVFVNADSGEGYINVDGNEGDRKNLTLWKGGEEVIKTVAANCNNTIVVMHTVGPVLIDEWYDNPNVTAIVWAGLPGQESGNSLVDVLYGRVSPGGKTPFTWGKTRESYGAPLLTKPNNGKGAPQDDFTEGVFIDYRRFDKYNETPIYEFGFGLSYTTFENSDIYVQPLKARPYTPASGSTKAAPTFGNISTDYADYLYPEDIHKVPLYIYPWLNTTDPKKSSGDPDYGMKAEDYIPSGATDGSPQPILPAGGAPGGNPGLYDEMYRVSAIITNTGNVVGDEVPQLYVSLGGPDDPKVVLRNFDRITLHPGQQTMWTTTLTRRDISNWDPASQNWVVTKYPKTVYIGSSSRKLHLQAPLP

SEQ ID NO: 45716 - protein, 838 aa, Thermoascus aurantiacus
DLAYSPPFYPSPWMDGNGEWAEAYRRAVDFVSQLTLAEKVNLTTGVGWMQEKCVGETGSIPRLGFRGLCLQDSPLGVRFADYVNAFPAGVNVAATWDKNLAYLRGKAMGEEHRGKGVDVQLGPVAGPLGRHPDGGRNWEGFSPDPVLSGVLMAETIKGIQDAGVIACAKHFIGNEMEHFRQASEAVGYGFDITESVSSNIDDKTLHELYLWPFADAVRAGVGSFMCSYNQVNNSYSCSNSYLLNKLLKSELDFQGFVMSDWGAHHSGVGAALAGLDMSMPGDTAYGTGKSFWGTNLTIAVLNGTVPEWRVDDMAVRIMAAFYKVGRDRYQVPVNFDSWTKDEYGYEHALVGQNYVKVNDKVDVRADHADIIRQIGSASVVLLKNDGGLPLTGYEKFTGVFGEDAGSNRWGADGCSDRGCDNGTLAMGWGSGTADFPYLVTPEQAIQNEILSKGKGLVSAVTDNGALDQMEQVASQASVSIVFVNADSGEGYINVDGNEGDRKNLTLWKGGEEVIKTVAANCNNTIVVMHTVGPVLIDEWYDNPNVTAIVWAGLPGQESGNSLVDVLYGRVSPGGKTPFTWGKTRESYGAPLLTKPNNGKGAPQDDFTEGVFIDYRRFDKYNETPIYEFGFGLSYTTFENSDIYVQPLKARPYTPASGSTKAAPTFGNISTDYADYLYPEDIHKVPLYIYPWLNTTDPKKSSGDPDYGMKAEDYIPSGATDGSPQPILPAGGAPGGNPGLYDEMYRVSAIITNTGNVVGDEVPQLYVSLGGPDDPKVVLRNFDRITLHPGQQTMWTTTLTRRDISNWDPASQNWVVTKYPKTVYIGSSSRKLHLQAPLP

SEQ ID NO: 45717 - protein, 481 aa, Thermoascus aurantiacus
MRLGWLELAVAAAATVASAKDDLAYSPPFYPSPWMNGNGEWAEAYRRAVDFVSQLTLAEKVNLTTGVGWMQEKCVGETGSIPRLGFRGLCLQDSPLGVRFADYVSAFPAGVNVAATWDKNLAYLRGKAMGEEHRGKGVDVQLGPVAGPLGRHPDGGRNWEGFSPDPVLTGVLMAETIKGIQDAGVIACAKHFIGNEMEHFRQAGEAVGYGFDITESVSSNIDDKTLHELYLWPFADAVRAGVGSFMCSYNQVNNSYSCSNSYLLNKLLKSELDFQGFVMSDWGAHHSGVGAALAGLDMSMPGDTAFGTGKSFWGTNLTIAVLNGTVPEWRVDDMAVRIMAAFYKVGRDRYQVPVNFDSWTKDEYGYEHALVGQNYVKVNDKVDVRADHADIIRQIGSASVVLLKNDGGLPLTGYEKFTGVFGEDAGSNRWGADGCSDRGCDNGTLAMGWGSGTADFPYLVTPEQAIQNEILSKGKGLDSVS

SEQ ID NO: 45718 - protein, 859 aa, Thermoascus thermophilus
MRLGWLELAVAAAATVTSAKGDLAYSPPFYPSPWVNGDGEWADAYQKAVDFVSQLTLAEKVNLTTGTGWMQGRCVGETGSIPRLGLRGLCLQDSPLGVRFADYVSAFPAGVNVAATWDKNLAYLRGKAMGEEHRGKGVDVQLGPVAGPLGRSPDGGRNWEGFSPDPALTGALMAETIKGIQDAGVIACAKHYIGNEQEHFRQAGEAAGYGFNITESVSSNIDDKTLHELYLWPFADAVRAGVGSFMCSYNQVNNSYSCSNSYLLNGLLKAELDFQGFVMSDWGAHHSGVGAALAGLDMSMPGDTAFGTGLSFWGTNLTIAVLNGTVPEWRVDDMAVRIMAAFYKVGRDRYQVPVNFDSWTKDDYGYEHALVNQNYVKVNEHVDVRDSHAQLIRQIGSASVVLLKNNGGLPLTGTEKFTGVFGEDAGSNPWGANGCSDRGCDNGTLAMGWGSGSDDFPYLVTPEQAIQNEILSKGKGLVQVATDNGALDQMKQIATQASVSIVFVNADSGEGYISVDGNEGDRNNLTLWQGGEAVIKTVSANCNNTIVVMHTVGPVLIDDWYDHPNITAIVWAGLPGQESGNSLVDVLYGRVSPGGKTPFTWGKDRDSYGSPLVTKPNNGNDAPQDDFTEGVFIDYRRFDKFNETPIYEFGFGLSYTTFEYSNIYVQPLNAPPYTPASGSTKAAPTFGNSSTDYADYLYPEDIDRIPKYIYPWLNTTDPKESSGDPDYGMEAEDYIPPGATDGSPQPILPAGGAPGGNPGLYDEMYRVTAIITNTGKVAGDEVPQLYVSLGGPDDPKVVLRNFDRITLQPGQQTMWTTTLTRRDISNWDTVSQNWVVSEYPKTVYVGSSSRKLHLQAPLP

SEQ ID NO: 45719 - protein, 759 aa, Thermoascus aurantiacus
SDYVSAFPAGINVAATWDKKLAYLRGKAMGEEHSGKGVDVQLGPVAGPLGRSPDGGRNWEGFSPDPALTGVLMAETIKGIQDAGVIACAKHYIGNEQEHFRQAGEAGGYGFDITESVSSNIDDKTLHELYLWPFADAVRAGVGSFMCSYNQVNNSYGCSNSYLLNGLLKAELDFQGFVMSDWGAHHSGVGAALAGLDMSMPGDTAFGTGLSFWGTNLTIAVLNGSVPEWRVDDMAVRIMAAFYKVGRDRNQVPVNFDSWTKDDYGYEHALVGQNYVKVNEHVDVRGNHADLIRKVGSSSVVLLKNNGGLPLTGTEKFTGVFGEDAGSNPWGANGCPDRGCDNGTLAMGWGSGSDDFPYLVTPEQAIQNEILSKGKGLVQVATDNGAIDQMKQIATQASVSIVFVNADSGEGYISVDGNEGDRKNLTLWQGGEEVIKTVSANCNNTIVVMHTVGPVLIDDWYDHPNVTAIVWAGLPGQESGNSLVDVLYGRVSPGGKTPFTWGKDRESYGSPLVTKPNNGKGAPQDDFTEGVFIDYRRFDKFNETPIYEFGFGLSYTTFEYSNIYVQPLNARPYTPASGRTKAAPTFGKSSMDYADYLYPEEIDKIPKYIYPWLNTTDPKESSGDPDYGMKSEDYIPPGATDGSPQPILPASGAPGGNPGLYDEMYRVTAIITNTGKVVGDEVPQLYVSLGGPDDPKVVLRNFDRITLNPGQQTMWTTTLTRRDISNWDTVSQNWVVSEYPKTVYVGSSSRKLHLQAPLP

SEQ ID NO: 45720 - protein, 859 aa, Thermoascus aurantiacus
MRLGWLELAVAAAATVASAKDDLAYSPPFYPSPWMNGNGEWAEAYQKAVDFVSQLTLAEKVNLTTGTGWMQEKCVGETGSIPRLGLRGLCLQDSPLGVRFADYVSAFPAGINVAATWDKKLAYLRGKAMGEEHSGKGVDVQLGPVAGPLGRSPDGGRNWEGFSPDPALTGVLMAETIKGIQDAGVIACAKHYIGNEQEHFRQAGEAGGYGFDITESVSSNIDDKTLHELYLWPFADAVRAGVGSFMCSYNQVNNSYGCSNSYLLNGLLKAELDFQGFVMSDWGAHHSGVGAALAGLDMSMPGDTAFGTGLSFWGTNLTIAVLNGSVPEWRVDDMAVRIMAAFYKVGRDRNQVPVNFDSWTKDDYGYEHALVGQNYVKVNEHVDVRGNHADLIRKVGSSSVVLLKNNGGLPLTGTEKFTGVFGEDAGSNPWGANGCPDRGCDNGTLAMGWGSGSDDFPYLVTPEQAIQNEILSKGKGLVQVATDNGAIDQMKQIATQASVSIVFVNADSGEGYISVDGNEGDRKNLTLWQGGEEVIKTVSANCNNTIVVMHTVGPVLIDDWYDHPNVTAIVWAGLPGQESGNSLVDVLYGRVSPGGKTPFTWGKDRESYGSPLVTKPNNGKGAPQDDFTEGVFIDYRRFDKFNETPIYEFGFGLSYTTFEYSNIYVQPLNARPYTPASGRTKAAPTFGKSSMDYADYLYPEEIDKIPKYIYPWLNTTDPKESSGDPDYGMKSEDYIPPGATDGSPQPILPASGAPGGNPGLYDEMYRVTAIITNTGKVVGDEVPQLYVSLGGPDDPKVVLRNFDRITLNPGQQTMWTTTLTRRDISNWDTVSQNWVVSEYPKTVYVGSSSRKLHLQAPLP

SEQ ID NO: 45721 - protein, 839 aa, Penicillium sumatraense
DLAYSPPYYPSPWSTGAGEWAEAYRRAVEFVSNLTLPEKVNLTTGAGWEQERCVGETGGIPRLGMWGMCMQDSPLGLRNSDYNSGFASGVNVAATWDKRLAYQRGVAMGEEHRDKGVDVQLGPVAGPLGRSPDGGRVWEGFSPDPVLTGVMMAETIKGIQDAGVIACAKHFIGNEQEHFRQAGEAQGYGYNITESVSSNIDDKTMHELYLWPFVDAVRAGVGSVMCSYNQINNSYGCSNSYTLNKLLKGELGFQGFVMSDWGAHHSGVGDALAGMDMSMPGDVILGSPYSFWGTNLTISALNGTIPEWRLDDMAVRIMAAYYKVGRDRVRVPPNFSSWTRDEYGFEHFMVSENQIKLNERVNVQRDHASGIRKLGADSTVLLKNKGALPLTHNERFVGILGEDAGSNPAGANGCADRGCDDGTLAMGWGSGTANFPYLITPEQAIQNEVLNYGNGQTNVFAVTNNSNTEQIAAVASQSSVALVFVNADSGEGFINVDGNEGDRKNLTLWKNGEQLIKTASENCNNTIVIMHTPSAVLIGDWYDNENITAILWAGLPGQESGRSLTDVLYGRVNPGAKTPFTWGKTREAYGAPLLTKPNNGHGAPQQDFSEGVFIDYRQFDKADAELIYEFGFGLSYTKFEFSDIEIKALNADKYTPTKGHSKRAPVLGKIGEASDYLFPSGIKRVTQYLYPWLNSTNLKESSADPYYGEKAEKYIPAGARNGSPQALLPASGPSGGNPGLFEDLFQVTVSITNTGSVIGDEVAQLYLSLGGEDDPAKVLRAFDRITIAPGQKAQWTTTLTRRDLSNWDVASQNWVISDAKKKVYVGNSSRHLPVSIEVP

SEQ ID NO: 45722 - protein, 833 aa, Rasamsonia emersonii
ENLAYSPPFYPSPWANGQGDWAEAYEKAVKFVSQLTLAEKVNLTTGTGWEQDRCVGQVGSIPRLGFPGLCMQDSPLGVRDTDYNSAFPAGVNVAATWNRDLAYRRGQAMGEEHRGKGVDVQLGPVAGPLGRSPDAGRNWEGFAPDPVLTGNMMASTIQGIQDAGVIACAKHFILYEQEHFRQGAQDGYDISDSISANADDKTMHELYLWPFADAVRAGVGSIMCSYNQVNNSYACSNSYTMNKLLKSELGFQGFVMTDWGGHHSGVGSALAGLDMSMPGDIAFDSGTSFWGTNLTVAVLNGSVPEWRVDDMAVRIMSAYYKVGRDRYSVPINFDSWTLDTYGPEHYAVGQGNTKINEHVDVRGNHAEIIHEIGAASAVLLKNKGGLPLTGTERFVGVFGEDAGSNPWGVNGCSDRGCDNGTLAMGWGSGTANFPYLVTPEQAIEREVVSRNGTFTAITDNGALEQMAAVASQADVCLVFANADSGEGYINVDGNEGDRKNLTLWQGADQVIHNVTANCNNTVVVLHTVGPVLIDDWYDHPNVTAILWAGLPGQESGNSLVDVLYGRVNPGGKTPFTWGRTREDYGAPLVLKPNNGKGAPQQDFTEGIFIDYRRFDKYNITPIYEFGFGLSYTTFEFSELNVQPINTPPYTPASGFTKAAQSFGPSSNASDNLYPSDIERVPLYIYPWLNSTDLKASANDPDYGLPNDKYVPPNATNGNPQPINPAGGAPGGNPSLYEPVARVSAIITNTGKVTGDEVPQLYVSLGGPDDAPKVLRGFDRITLAPGQQTLWTTTLTRRDISNWDPVTQNWVVTNYTKTVYVGNSSRNLPLQAPL

SEQ ID NO: 45723 - protein, 859 aa, Penicillium sumatraense
MKLGWLEAATLAAASVASASDLAYSPPYYPSPWSTGAGEWAEAYRRAVEFVSNLTLPEKVNLTTGAGWEQERCVGETGGIPRLGMWGMCMQDSPLGLRNSDYNSGFASGVNVAATWDKRLAYQRGVAMGEEHRDKGVDVQLGPVAGPLGRSPDGGRVWEGFSPDPVLTGVMMAETIKGIQDAGVIACAKHFIGNEQEHFRQAGEAQGYGYNITESVSSNIDDKTMHELYLWPFVDAVRAGVGSVMCSYNQINNSYGCSNSYTLNKLLKGELGFQGFVMSDWGAHHSGVGDALAGMDMSMPGDVILGSPYSFWGTNLTISALNGTIPEWRLDDMAVRIMAAYYKVGRDRVRVPPNFSSWTRDEYGFEHFMVSENQIKLNERVNVQRDHASGIRKLGADSTVLLKNKGALPLTHNERFVGILGEDAGSNPAGANGCADRGCDDGTLAMGWGSGTANFPYLITPEQAIQNEVLNYGNGQTNVFAVTNNSNTEQIAAVASQSSVALVFVNADSGEGFINVDGNEGDRKNLTLWKNGEQLIKTASENCNNTIVIMHTPSAVLIGDWYDNENITAILWAGLPGQESGRSLTDVLYGRVNPGAKTPFTWGKTREAYGAPLLTKPNNGHGAPQQDFSEGVFIDYRQFDKADAELIYEFGFGLSYTKFEFSDIEIKALNADKYTPTKGHSKRAPVLGKIGEASDYLFPSGIKRVTQYLYPWLNSTNLKESSADPYYGEKAEKYIPAGARNGSPQALLPASGPSGGNPGLFEDLFQVTVSITNTGSVIGDEVAQLYLSLGGEDDPAKVLRAFDRITIAPGQKAQWTTTLTRRDLSNWDVASQNWVISDAKKKVYVGNSSRHLPVSIEVP

SEQ ID NO: 45724 - protein, 852 aa, Rasamsonia emersonii
MRNGLLKVAALAAASVVNGENLAYSPPFYPSPWANGQGDWAEAYEKAVKFVSQLTLAEKVNLTTGTGWEQDRCVGQVGSIPRLGFPGLCMQDSPLGVRDTDYNSAFPAGVNVAATWNRDLAYRRGQAMGEEHRGKGVDVQLGPVAGPLGRSPDAGRNWEGFAPDPVLTGNMMASTIQGIQDAGVIACAKHFILYEQEHFRQGAQDGYDISDSISANADDKTMHELYLWPFADAVRAGVGSIMCSYNQVNNSYACSNSYTMNKLLKSELGFQGFVMTDWGGHHSGVGSALAGLDMSMPGDIAFDSGTSFWGTNLTVAVLNGSVPEWRVDDMAVRIMSAYYKVGRDRYSVPINFDSWTLDTYGPEHYAVGQGNTKINEHVDVRGNHAEIIHEIGAASAVLLKNKGGLPLTGTERFVGVFGEDAGSNPWGVNGCSDRGCDNGTLAMGWGSGTANFPYLVTPEQAIEREVVSRNGTFTAITDNGALEQMAAVASQADVCLVFANADSGEGYINVDGNEGDRKNLTLWQGADQVIHNVTANCNNTVVVLHTVGPVLIDDWYDHPNVTAILWAGLPGQESGNSLVDVLYGRVNPGGKTPFTWGRTREDYGAPLVLKPNNGKGAPQQDFTEGIFIDYRRFDKYNITPIYEFGFGLSYTTFEFSELNVQPINTPPYTPASGFTKAAQSFGPSSNASDNLYPSDIERVPLYIYPWLNSTDLKASANDPDYGLPNDKYVPPNATNGNPQPINPAGGAPGGNPSLYEPVARVSAIITNTGKVTGDEVPQLYVSLGGPDDAPKVLRGFDRITLAPGQQTLWTTTLTRRDISNWDPVTQNWVVTNYTKTVYVGNSSRNLPLQAPL

SEQ ID NO: 45725 - protein, 864 aa, Penicillium chrysogenum
MKFAWFEVAALTASVANANSLAYSPPYYPSPWMTGEGDWSEAYTRAVEFVSNLTLAEKVNLTTGSGWMQESCVGETGGIPRLGMWGMCMQDAPLGIRFSDYNSAFPAGVNVAAAWDKRLAYQRGVAMGEEHRDKGVDVQLGPVAGPLGKFPDGGRNWEGFSPDPVLTGVMMAETIKGMQDAGVIACAKHFIGNEQEHFRQSGEAQGYGYNISQSLSSNIDDKTMHELYLWPFVDSIRAGVGSVMCSYNQINNSYGCANSYSLNKLLKGELGFQGFVMSDWGAHHSGVESALAGLDMSMPGDVILGSPYSYWGTNLTISVLNGTMPEWRVDDMAVRIMSAYYKVGRDRFRTPPNFSSWTRDEYNFQHSMVSEDWGKVNERVNVQRDHAQIIRKIGSDSTVLLKNKGGALPLTHNEKFISILGEDAGSNAHGANGCDDRGCDNGTLAMGWGSGTANYPYLITPEQAIQNEALEYSNGQTNVFAVTDNWALTQMAALASQADVALVFVNADSGEGFINVDGNEGDRKNLTLWKNGEEVIKTASQHCNNTIVVIHSTSAVLISDWYDNDNITAIIWAGLPGQESGHSLVDVLYGRINPGGKTPFTWGKTRKDYGPPLVTVPNNGADAPQDNFEDGVFIDYRRFDKDNIEPIYEFGYGLSYTKFAFSDIKVTPLASSQRGEYKVTTGKSQKAPVLGEPSTVSDNLFPEGIKRVRQYLYPWLNSTDLRASSGDPDYGMDSKDYLPEGATDGSPQDLLPSSGSSGGNPGLFEDLYQVTATITNTGSVTGDEVPQLYLSLGGNDDPTKVLRQFDRVTIAPGQSLQWTTTLTRRDVSNWDVASQNWVISGAQKKVYVGNSSRKLPLSADLPLV

SEQ ID NO: 45726 - protein, 834 aa, Rasamsonia emersonii
SENLAYSPPFYPSPWANGQGDWAEAYEKAVKFVSQLTLAEKVNLTTGTGWEQDRCVGQVGSIPRLGFPGLCMQDSPLGVRDTDYNSAFPAGVNVAATWNRDLAYRRGQAMGEEHRGKGVDVQLGPVAGPLGRSPDAGRNWEGFAPDPVLTGNMMASTIQGIQDAGVIACAKHFILYEQEHFRQGAQDGYDISDSISANADDKTMHELYLWPFADAVRAGVGSIMCSYNQVNNSYACSNSYTMNKLLKSELGFQGFVMTDWGGHHSGVGSALAGLDMSMPGDIAFDSGTSFWGTNLTVAVLNGSVPEWRVDDMAVRIMSAYYKVGRDRYSVPINFDSWTLDTYGPEHYAVGQGNTKINEHVDVRGNHAEIIHEIGAASAVLLKNKGGLPLTGTERFVGVFGEDAGSNPWGVNGCSDRGCDNGTLAMGWGSGTANFPYLVTPEQAIEREVVSRNGTFTAITDNGALEQMAAVASQADVCLVFANADSGEGYINVDGNEGDRKNLTLWQGADQVIHNVTANCNNTVVVLHTVGPVLIDDWYDHPNVTAILWAGLPGQESGNSLVDVLYGRVNPGGKTPFTWGRTREDYGAPLVLKPNNGKGAPQQDFTEGIFIDYRRFDKYNITPIYEFGFGLSYTTFEFSELNVQPINTPPYTPASGFTKAAQSFGPSSNASDNLYPSDIERVPLYIYPWLNSTDLKASANDPDYGLPNDKYVPPNATNGNPQPINPAGGAPGGNPSLYEPVARVSAIITNTGKVTGDEVPQLYVSLGGPDDAPKVLRGFDRITLAPGQQTLWTTTLTRRDISNWDPVTQNWVVTNYTKTVYVGNSSRNLPLQAPL

SEQ ID NO: 45727 - protein, 852 aa, Unidentified
MRNGLLKVAALAAASAVNGENLAYSPPFYPSPWANGQGDWAEAYQKAVQFVSQLTLAEKVNLTTGTGWEQDRCVGQVGSIPRLGFPGLCMQDSPLGVRDTDYNSAFPAGVNVAATWDRNLAYRRGVAMGEEHRGKGVDVQLGPVAGPLGRSPDAGRNWEGFAPDPVLTGNMMASTIQGIQDAGVIACAKHFILYEQEHFRQGAQDGYDISDSISANADDKTMHELYLWPFADAVRAGVGSVMCSYNQVNNSYACSNSYTMNKLLKSELGFQGFVMTDWGGHHSGVGSALAGLDMSMPGDIAFDSGTSFWGTNLTVAVLNGSIPEWRVDDMAVRIMSAYYKVGRDRYSVPINFDSWTLDTYGPEHYAVGQGQTKINEHVDVRGNHAEIIHEIGAASAVLLKNKGGLPLTGTERFVGVFGEDAGSNPWGVNGCSDRGCDNGTLAMGWGSGTANFPYLVTPEQAIQREVLSRNGTFTAITDNGALAEMAAAASQADTCLVFANADSGEGYITVDGNEGDRKNLTLWQGADQVIHNVSANCNNTVVVLHTVGPVLIDDWYDHPNVTAILWAGLPGQESGNSLVDVLYGRVNPGGKTPFTWGRARDDYGAPLIVKPNNGKGAPQQDFTEGIFIDYRRFDKYNITPIYEFGFGLSYTTFEFSQLNVQPINAPPYTPASGFTKAAQSFGQPSNASDNLYPSDIERVPLYIYPWLNSTDLKASANDPDYGLPTEKYVPPNATNGDPQPIDPAGGAPGGNPSLYEPVARVTTIITNTGKVTGDEVPQLYVSLGGPDDAPKVLRGFDRITLAPGQQYLWTTTLTRRDISNWDPVTQNWVVTNYTKTIYVGNSSRNLPLQAPL

SEQ ID NO: 45728 - protein, 851 aa, Unidentified
MRNGLLKVAALAAASAVNGENLAYSPPFYPSPWANGQGDWAEAYQKAVQFVSQLTLAEKVNLTTGTGWEQDRCVGQVGSIPRLGFPGLCMQDSPLGVRDTDYNSAFPAGVNVAATWDRNLAYRRGVAMGEEHRGKGVDVQLGPVAGPLGRSPDAGRNWEGFAPDPVLTGNMMASTIQGIQDAGVIACAKHFILYEQEHFRQGAQDGYDISDSISANADDKTMHELYLWPFADAVRAGVGSVMCSYNQVNNSYACSNSYTMNKLLKSELGFQGFVMTDWGGHHSGVGSALAGLDMSMPGDIAFDSGTSFWGTNLTVAVLNGSIPEWRVDDMAVRIMSAYYKVGRDRYSVPINFDSWTLDTYGPEHYAVGQGQTKINEHVDVRGNHAEIIHEIGAASAVLLKNKGGLPLTGTERFVGVFGKDAGSNPWGVNGCPDRGCDNGTLAMGWGSGTANFPYLVTPEQAIQREVLSRNGTFTGITDNGALAEMAAAASQADTCLVFANADSGEGYITVDGNEGDRKNLTLWQGADQVIHNVSANCNNTVVVLHTVGPVLIDDWYDHPNVTAILWAGLPGQESGNSLVDVLYGRVNPGKTPFTWGRARDDYGAPLIVKPNNGKGAPQQDFTEGIFIDYRRFDKYNITPIYEFGFGLSYTTFEFSQLNVQPINAPPYTPASGFTKAAQSFGQPSNASDNLYPSDIERVPLYIYPWLNSTDLKASANDPDYGLPTEKYVPPNATNGDPQPIDPAGGAPGGNPSLYEPVARVTTIITNTGKVTGDEVPQLYVSLGGPDDAPKVLRGFDRITLAPGQQYLWTTTLTRRDISNWDPVTQNWVVTNYTKTIYVGNSSRNLPLQAPL

SEQ ID NO: 45729 - protein, 626 aa, Coccidioides posadasii
PWASGQGEWSEAYNKAREFVSQLTLTEKVNLTTGVGWMQEACVGNVGSIPRLGFRSLCMQDGPLGIRFADHVSAFPAGINVGATWSKSLAYLRGKAMGEEHRDKGVDVQLGPAVGPLGRSPDGGRNWEGFSPDPVLSGYLVAETIKGIQDAGVIACVKHFIVNEQERFRQAPEAQGYGFNISESSSSNVDDVTMHELYLWPFADAVRAGVGSVMCSYNQINNSYGCSNSYTQNKLLKGELGFQGFIMSDWQAHHSGVGDDLAGLDMSMPGDTLFLTGKSYWGPNLTIAVTNGTIPQWRLDDMAVRIMAAYYKVRRDQTQVPINFNSWTRDEFGYLHAGGQEGYGRVNQMVNVRGRHAVIARKVASASTVLLKNRGVLPLKGKEKLTAVIGEDAGPNLWGPNGCPDRGCANGTLAMGWGSGTADFPYLVTPAQAIENEVITKGVGEAMSVFDNYATSQIESVVSQATVSLVFVNAGAGEGFISVDGNEGDRKNLTLWKNGDELIKTVASMCNNTVVVMHTAGPVLVNKWYDHPNVTAILWAGLPGQESGNALGDVIYGRVNPGAKSPFTWAATSEDYGVSILKEPNAATKAPQIDFEEGIFIDYRAFDKSNTKPIYEFGFGLSYTTF

SEQ ID NO: 45730 - protein, 841 aa, Penicillium oxalicum
KDLAYSPPFYPSPWATGEGEWAEAYKKAVDFVSGLTLAEKVNITTGAGWEQERCVGETGGVPRLGMWGMCMQDSPLGVRNADYSSAFPAGVNVAATWDRRLAYQRGTAMGEEHRDKGVDVQLGPVAGPLGKNPDGGRGWEGFSPDPVLTGVMMAETIKGIQDAGVIACAKHFIMNEQEHFRQAGEAQGYGFNISQSLSSNVDDKTMHELYLWPFVDSVRAGVGSVMCSYNQINNSYGCSNSYTLNKLLKGELGFQGFVMSDWGAHHSGVGDALAGLDMSMPGDVILGSPYSFWGTNLTVSVLNSTIPEWRLDDMAVRIMAAYYKVGRDRHRTPPNFSSWTRDKYGYEHFIVQENYVKLNERVNVQRDHANVIRKIGSDSIVMLKNNGGLPLTHQERLVAILGEDAGSNAYGANGCSDRGCDNGTLAMGWGSGTANFPYLITPEQAIQNEVLNYGNGDTNVFAVTDNGALSQMAALASTASVALVFVNADSGEGYISVDGNEGDRKNMTLWKNGEELIKTATANCNNTIVIMHTPNAVLVDSWYDNENITAILWAGMPGQESGRSLVDVLYGRTNPGGKTPFTWGKERKDWGSPLLTKPNNGHGAPQDDFTDVLIDYRRFDKDNVEPIFEFGFGLSYTKFEFSDIQVKALNHGEYNATVGKTKPAPSLGKPGNASDHLFPSNINRVRQYLYPYLNSTDLKASANDPDYGMNASAYIPPHATDSDPQDLLPASGPSGGNPGLFEDLIEVTATVTNTGSVTGDEVPQLYVSLGGADDPVKVLRAFDRVTIAPGQKLRWTATLNRRDLSNWDVPSQNWIISDAPKKVWVGNSSRKLPLSADLPKV

SEQ ID NO: 45731 - protein, 851 aa, Unidentified
MRNGLLKVAALAAASAVNGENLAYSPPFYPSPWANGQGDWAEAYQKAVQFVSQLTLAEKVNLTTGTGWEQDRCVGQVGSIPRLGFPGLCLQDSPLGVRDTDYNSAFPAGVNVAATWDRNLAYRRGVAMGEEHRGKGVDVQLGPVAGPLGRSPDAGRNWEGFAPDPVLTGNMMASTIQGIQDAGVIACAKHFILYEQEHFRQGAQDGYDISDSISANADDKTMHELYLWPFADAVRAGVGSVMCSYNQVNNSYACSNSYTMNKLLKSELGFQGFVMTDWGGHHSGVGSALAGLDMSMPGDIAFDSGTSFWGTNLTVAVLNGSIPEWRVDDMAVRIMSAYYKVGRDRYSVPINFDSWTLDTYGPEHYAVGQGQTKINEHVDVRGNHAEIIHEIGAASAVLLKNKGGLPLTGTERFVGVFGKDAGSNPWGVNGCSDRGCDNGTLAMGWGSGTANFPYLVTPEQAIQREVLSRNGTFTGITDNGALAEMAAAASQADTCLVFANADSGEGYITVDGNEGDRKNLTLWQGADQVIHNVSANCNNTVVVLHTVGPVLIDDWYDHPNVTAILWAGLPGQESGNSLVDVLYGRVNPGKTPFTWGRARDDYGAPLIVKPNNGKGAPQQDFTEGIFIDYRRFDKYNITPIYEFGFGLSYTTFEFSQLNVQPINAPPYTPASGFTKAAQSFGQPSNASDNLYPSDIERVPLYIYPWLNSTDLKASANDPDYGLPTEKYVPPNATNGDPQPIDPAGGAPGGNPSLYEPVARVTTIITNTGKVTGDEVPQLYVSLGGPDDAPKVLRGFDRITLAPGQQYLWTTTLTRRDISNWDPVTQNWVVTNYTKTIYVGNSSRNLPLQAPL

SEQ ID NO: 45732 - protein, 851 aa, Unidentified
MRNGLLKVAALAAASAVNGENLAYSPPFYPSPWANGQGDWAEAYQKAVQFVSQLTLAEKVNLTTGTGWEQDRCVGQVGSIPRLGFPGLCMQDSPLGVRDTDYNSAFPAGVNVAATWDRNLAYRRGVAMGEEHRGKGVDVQLGPVAGPLGRSPDAGRNWEGFAPDPVLTGNMMASTIQGIQDAGVIACAKHFILYEQEHFRQGAQDGYDISDSISANADDKTMHELYLWPFADAVRAGVGSVMCSYNQVNNSYACSNSYTMNKLLKSELGFQGFVMTDWGGHHSGVGSALAGLDMSMPGDIAFDSGTSFWGTNLTVAVLNGSIPEWRVDDMAVRIMSAYYKVGRDRYSVPINFDSWTLDTYGPEHYAVGQGQTKINEHVDVRGNHAEIIHEIGAASAVLLKNKGGLPLTGTERFVGVFGKDAGSNPWGVNGCSDRGCDNGTLAMGWGSGTANFPYLVTPEQAIQREVLSRNGTFTGITDNGALAEMAAAASQADTCLVFANADSGEGYITVDGNEGDRKNLTLWQGADQVIHNVSANCNNTVVVLHTVGPVLIDDWYDHPNVTAILWAGLPGQESGNSLVDVLYGRVNPGKTPFTWGRARDDYGAPLIVKPNNGKGAPQQDFTEGIFIDYRRFDKYNITPIYEFGFGLSYTTFEFSQLNVQPINAPPYTPASGFTKAAQSFGQPSNASDNLYPSDIERVPLYIYPWLNSTDLKASANDPDYGLPTEKYVPPNATNGDPQPIDPAGGAPGGNPSLYEPVMRVTTIITNTGKVTGDEVPQLYVSLGGPDDAPKVLRGFDRITLAPGQQYLWTTTLTRRDISNWDPVTQNWVVTNYTKTIYVGNSSRNLPLQAPL

SEQ ID NO: 45733 - protein, 851 aa, Rasamsonia emersonii
MRNGLLKVAALAAASAVNGENLAYSPPFYPSPWANGQGDWAEAYQKAVQFVSQLTLAEKVNLTTGTGWEQDRCVGQVGSIPRLGFPGLCMQDSPLGVRDTDYNSAFPAGVNVAATWDRNLAYRRGVAMGEEHRGKGVDVQLGPVAGPLGRSPDAGRNWEGFAPDPVLTGNMMASTIQGIQDAGVIACAKHFILYEQEHFRQGAQDGYDISDSISANADDKTMHELYLWPFADAVRAGVGSVMCSYNQVNNSYACSNSYTMNKLLKSELGFQGFVMTDWGGHHSGVGSALAGLDMSMPGDIAFDSGTSFWGTNLTVAVLNGSIPEWRVDDMAVRIMSAYYKVGRDRYSVPINFDSWTLDTYGPEHYAVGQGQTKINEHVDVRGNHAEIIHEIGAASAVLLKNKGGLPLTGTERFVGVFGKDAGSNPWGVNGCSDRGCDNGTLAMGWGSGTANFPYLVTPEQAIQREVLSRNGTFTGITDNGALAEMAAAASQADTCLVFANADSGEGYITVDGNEGDRKNLTLWQGADQVIHNVSANCNNTVVVLHTVGPVLIDDWYDHPNVTAILWAGLPGQESGNSLVDVLYGRVNPGKTPFTWGRARDDYGAPLIVKPNNGKGAPQQDFTEGIFIDYRRFDKYNITPIYEFGFGLSYTTFEFSQLNVQPINAPPYTPASGFTKAAQSFGQPSNASDNLYPSDIERVPLYIYPWLNSTDLKASANDPDYGLPTEKYVPPNATNGDPQPIDPAGGAPGGNPSLYEPVARVTTIITNTGKVTGDEVPQLYVSLGGPDDAPKVLRGFDRITLAPGQQYLWTTTLTRRDISNWDPVTQNWVVTNYTKTIYVGNSSRNLPLQAPL

SEQ ID NO: 45734 - protein, 851 aa, Unidentified
MRNGLLKVAALAAASAVNGENLAYSPPFYPSPWANGQGDWAEAYQKAVQFVSQLTLAEKVNLTTGTGWEQDRCVGQVGSIPRLGFPGLCMQDSPLGVRDTDYNSAFPAGVNVAATWDRNLAYRRGVAMGEEHRGKGVDVQLGPVAGPLGRSPDAGRNWEGFAPDPVLTGNMMASTIQGIQDAGVIACAKHFILYEQEHFRQGAQDGYDISDSISANADDKTMHELYLWPFADAVRAGVGSVMCSYNQVNNSYACSNSYTMNKLLKSELGFQGFVMTDWGGHHSGVGSALAGLDMSMPGDIAFDSGTSFWGTNLTVAVLNGSIPEWRVDDMAVRIMSAYYKVGRDRYSVPINFDSWTLDTYGPEHYAVGQGQTKINEHVDVRGNHAEIIHEIGAASAVLLKNKGGLPLTGTERFVGVFGKDAGSNPWGVNGCSDRGCDNGTLAMGWGSGTANFPYLVTPEQAIQREVLSRNGTFTGITDNGALAEMAAAASQADTCLVFANADSGEGYITVDGNEGDRKNLTLWQGADQVIHNVSANCNNTVVVLHTVGPVLIDDWYDHPNVTAILWAGLPGQESGNSLVDVLYGRVNPGKTPFTWGRARDDYGAPLIVKPNNGKGAPQQDFTEGIFIDYRRFDKYNITPIYEFGFGLSYTTFEFSQLNVQPINAPPYTPASGFTKAAQSFGQPSNASDNLYPSDIQRVPLYIYPWLNSTDLKASANDPDYGLPTEKYVPPNATNGDPQPIDPAGGAPGGNPSLYEPVARVTTIITNTGKVTGDEVPQLYVSLGGPDDAPKVLRGFDRITLAPGQQYLWTTTLTRRDISNWDPVTQNWVVTNYTKTIYVGNSSRNLPLQAPL

SEQ ID NO: 45735 - protein, 851 aa, Unidentified
MRNGLLKVAALAAASAVNGENLAYSPPFYPSPWANGQGDWAEAYQKAVQFVSQLTLAEKVNLTTGTGWEQDRCVGQVGSIPRLGFPGLCMQDSPLGVRDTDYNSAFPAGVNVAATWDRNLAYRRGVAMGEEHRGKGVDVQLGPVAGPLGRSPDAGRNWEGFAPDPVLTGNMMASTIQGIQDAGVIACAKHFILYEQEHFRQGAQDGYDISDSISANADDKTMHELYLWPFADAVRAGVGSVMCSYNQVNNSYACSNSYTMNKLLKSELGFQGFVMTDWGGHHSGVGSALAGLDMSMPGDIAFDSGTSFWGTNLTVAVLNGSIPEWRVDDMAVRIMSAYYKVGRDRYSVPINFDSWTLDTYGPEHYAVGQGQTKINEHVDVRGNHAEIIHEIGAASAVLLKNKGGLPLTGTERFVGVFGKDAGSNPWGVNGCSDRGCDNGTLAMGWGSGTANFPYLVTPEQAIQREVLSRNGTFTGITDNGALAEMAAAASHADTCLVFANADSGEGYITVDGNEGDRKNLTLWQGADQVIHNVSANCNNTVVVLHTVGPVLIDDWYDHPNVTAILWAGLPGQESGNSLVDVLYGRVNPGKTPFTWGRARDDYGAPLIVKPNNGKGAPQQDFTEGIFIDYRRFDKYNITPIYEFGFGLSYTTFEFSQLNVQPINAPPYTPASGFTKAAQSFGQPSNASDNLYPSDIERVPLYIYPWLNSTDLKASANDPDYGLPTEKYVPPNATNGDPQPIDPAGGAPGGNPSLYEPVARVTTIITNTGKVTGDEVPQLYVSLGGPDDAPKVLRGFDRITLAPGQQYLWTTTLTRRDISNWDPVTQNWVVTNYTKTIYVGNSSRNLPLQAPL

SEQ ID NO: 45736 - protein, 851 aa, Unidentified
MRNGLLKVAALAAASAVNGENLAYSPPFYPSPWANGQGDWAEAYQKAVQFVSQLTLAEKVNLTTGTGWEQDRCVGQVGSIPRLGFPGLCMQDSPLGVRDTDYNSAFPAGVNVAATWDRNLAYRRGVAMGEEHRGKGVDVQLGPVAGPLGRSPDAGRNWEGFAPDPVLTGNMMASTIQGIQDAGVIACAKHFILYEQEHFRQGAQDGYDISDSISANADDKTMHELYLWPFADAVRAGVGSVMCSYNQVNNSYACSNSYTMNKLLKSELGFQGFVMTDWGGHHSGVGSALAGLDMSMPGDIAFDSGTSFWGTNLTVAVLNGSIPEWRVDDMAVRIMSAYYKVGRDRYSVPINFDSWTLDTYGPEHYAVGQGQTKINEHVDVRGNHAEIIHEIGAASAVLLKNKGGLPLTGTERFVGVFGKDAGSNPWGVNGCSDRGCDNGTLAMGWGSGTANFPYLVTPEQAIQREVLSRNGTFTGITDNGALAEMAAAASQADTCLVFANADSGEGYITVDGNEGDRKNLTLWQGADQVIHNVSANCNNTVVVLHTVGPVLIDDWYDHPNVTAILWAGLPGQESGNSLVDVLYGRVNPGKTPFTWGRARDDYGAPLIVKPNNGKGAPQQDFTEGIFIDYRRFDKYNITPIYEFGFGLSYTTFEFSQLNVQPINAPPYTPASGFTKAAQSFGQPSNASDNLYPSDIERVPLYIYPWLNSTDLKASANDPDYGLPTEKYVPPNATNGDPQPIDPAGGAPGGNPSLYEPVARITTIITNTGKVTGDEVPQLYVSLGGPDDAPKVLRGFDRITLAPGQQYLWTTTLTRRDISNWDPVTQNWVVTNYTKTIYVGNSSRNLPLQAPL

SEQ ID NO: 45737 - protein, 851 aa, Unidentified
MRNGLLKVAALAAASAVNGENLAYSPPFYPSPWANGQGDWAEAYQKAVQFVSQLTLAEKVNLTTGTGWEQDRCVGQVGSIPRLGFPGLCMQDSPLGVRDTDYNSAFPAGVNVAATWDRNLAYRRGVQMGEEHRGKGVDVQLGPVAGPLGRSPDAGRNWEGFAPDPVLTGNMMASTIQGIQDAGVIACAKHFILYEQEHFRQGAQDGYDISDSISANADDKTMHELYLWPFADAVRAGVGSVMCSYNQVNNSYACSNSYTMNKLLKSELGFQGFVMTDWGGHHSGVGSALAGLDMSMPGDIAFDSGTSFWGTNLTVAVLNGSIPEWRVDDMAVRIMSAYYKVGRDRYSVPINFDSWTLDTYGPEHYAVGQGQTKINEHVDVRGNHAEIIHEIGAASAVLLKNKGGLPLTGTERFVGVFGKDAGSNPWGVNGCSDRGCDNGTLAMGWGSGTANFPYLVTPEQAIQREVLSRNGTFTGITDNGALAEMAAAASQADTCLVFANADSGEGYITVDGNEGDRKNLTLWQGADQVIHNVSANCNNTVVVLHTVGPVLIDDWYDHPNVTAILWAGLPGQESGNSLVDVLYGRVNPGKTPFTWGRARDDYGAPLIVKPNNGKGAPQQDFTEGIFIDYRRFDKYNITPIYEFGFGLSYTTFEFSQLNVQPINAPPYTPASGFTKAAQSFGQPSNASDNLYPSDIERVPLYIYPWLNSTDLKASANDPDYGLPTEKYVPPNATNGDPQPIDPAGGAPGGNPSLYEPVARVTTIITNTGKVTGDEVPQLYVSLGGPDDAPKVLRGFDRITLAPGQQYLWTTTLTRRDISNWDPVTQNWVVTNYTKTIYVGNSSRNLPLQAPL

SEQ ID NO: 45738 - protein, 851 aa, Unidentified
MRNGLLKVAALAAASAVNGENLAYSPPFYPSPWANGQGDWAEAYQKAVQFVSQLTLAEKVNLTTGTGWEQDRCVGQVGSIPRLGFPGLCMQDSPLGVRDTDYNSAFPAGVNVAATWDRNLAYRRGVAMGEEHRGKGVDVQLGPVAGPLGRSPDAGRNWEGFAPDPVLTGNMMASTIQGIQDAGVIACAKHFILYEQEHFRQGAQDGYDISDSISANADDKTMHELYLWPFADAVRAGVGSVMCSYNQVNNSYACSNSYTMNKLLKSELGFQGFVMTDWGGHHSGVGSALAGLDMSMPGDIAFDSGTSFWGTNLTVAVLNGSIPEWRVDDMAVRIMSAYYKVGRDRYSVPINFDSWTLDTYGPEHYAVGQGQTKINEHVDVRGNHAEIIHEIGAASAVLLKNKGGLPLTGTERFVGVFGKDAGSNPWGVNGCSDRGCDNGTLAMGWGSGTANFPYLVTPEQAIQREVLSRNGTFTGITDNGALAEMAAAASQADTCLVFANADSGEGYITVDGNEGDRKNLTLWQGADQVIHNVSANCNNTVVVLHTVGPVLIDDWYDHPSVTAILWAGLPGQESGNSLVDVLYGRVNPGKTPFTWGRARDDYGAPLIVKPNNGKGAPQQDFTEGIFIDYRRFDKYNITPIYEFGFGLSYTTFEFSQLNVQPINAPPYTPASGFTKAAQSFGQPSNASDNLYPSDIERVPLYIYPWLNSTDLKASANDPDYGLPTEKYVPPNATNGDPQPIDPAGGAPGGNPSLYEPVARVTTIITNTGKVTGDEVPQLYVSLGGPDDAPKVLRGFDRITLAPGQQYLWTTTLTRRDISNWDPVTQNWVVTNYTKTIYVGNSSRNLPLQAPL

SEQ ID NO: 45739 - protein, 851 aa, Unidentified
MRNGLLKVAALAAASAVNGENLAYSPPFYPSPWANGQGDWAEAYQKAVQFVSQLTLAEKVNLTTGTGWEQDRCVGQVGSIPRLGFPGLCMQDSPLGVRDTDYNSAFPAGVNVAATWDRNLAYRRGVAMGEEHRGKGVDVQLGPVAGPLGRSPDAGRNWEGFAPDPVLTGNMMASTIQGIQDAGVIACAKHFILYEQEHFRQGAQDGYDISDSISANADDKTMHELYLWPFADAVRAGVGSVMCSYNQVNNSYACSNSYTMNKLLKSELGFQGFVMTDWGGHHSGVGSALAGLDMSMPGDIAFDSGTSFWGTNLTVAVLNGSIPEWRVDDMAVRIMSAYYKVGRDRYSVPINFDSWTLATYGPEHYAVGQGQTKINEHVDVRGNHAEIIHEIGAASAVLLKNKGGLPLTGTERFVGVFGKDAGSNPWGVNGCSDRGCDNGTLAMGWGSGTANFPYLVTPEQAIQREVLSRNGTFTGITDNGALAEMAAAASQADTCLVFANADSGEGYITVDGNEGDRKNLTLWQGADQVIHNVSANCNNTVVVLHTVGPVLIDDWYDHPNVTAILWAGLPGQESGNSLVDVLYGRVNPGKTPFTWGRARDDYGAPLIVKPNNGKGAPQQDFTEGIFIDYRRFDKYNITPIYEFGFGLSYTTFEFSQLNVQPINAPPYTPASGFTKAAQSFGQPSNASDNLYPSDIERVPLYIYPWLNSTDLKASANDPDYGLPTEKYVPPNATNGDPQPIDPAGGAPGGNPSLYEPVARVTTIITNTGKVTGDEVPQLYVSLGGPDDAPKVLRGFDRITLAPGQQYLWTTTLTRRDISNWDPVTQNWVVTNYTKTIYVGNSSRNLPLQAPL

SEQ ID NO: 45740 - protein, 851 aa, Unidentified
MRNGLLKVAALAAASAVNGENLAYSPPFYPSPWANGQGDWAEAYQKAVQFVSQLTLAEKVNLTTGTGWEQDRCVGQVGSIPRLGFPGLCMQDSPLGVRDTDYNSAFPAGVNVAATWDRNLAYRRGVAMGEEHRGKGVDVQLGPVAGPLGRSPDAGRNWEGFAPDPVLTGNMMASTIQGIQDAGVIACAKHFILYEQEHFRQGAQDGYDISDSISANADDKTMHELYLWPFADAVRAGVGSVMCSYNQVNNSYACSNSYTMNKLLKSELGFQGFVMTDWGGHHSGVGSALAGLDMSMPGDIAFDSGTSFWGTNLTVAVLNGSIPEWRVDDMAVRIMSAYYKVGRDRYSVPINFDSWTLSTYGPEHYAVGQGQTKINEHVDVRGNHAEIIHEIGAASAVLLKNKGGLPLTGTERFVGVFGKDAGSNPWGVNGCSDRGCDNGTLAMGWGSGTANFPYLVTPEQAIQREVLSRNGTFTGITDNGALAEMAAAASQADTCLVFANADSGEGYITVDGNEGDRKNLTLWQGADQVIHNVSANCNNTVVVLHTVGPVLIDDWYDHPNVTAILWAGLPGQESGNSLVDVLYGRVNPGKTPFTWGRARDDYGAPLIVKPNNGKGAPQQDFTEGIFIDYRRFDKYNITPIYEFGFGLSYTTFEFSQLNVQPINAPPYTPASGFTKAAQSFGQPSNASDNLYPSDIERVPLYIYPWLNSTDLKASANDPDYGLPTEKYVPPNATNGDPQPIDPAGGAPGGNPSLYEPVARVTTIITNTGKVTGDEVPQLYVSLGGPDDAPKVLRGFDRITLAPGQQYLWTTTLTRRDISNWDPVTQNWVVTNYTKTIYVGNSSRNLPLQAPL

SEQ ID NO: 45741 - protein, 851 aa, Unidentified
MRNGLLKVAALAAASAVNGENLAYSPPFYPSPWANGQGDWAEAYQKAVQFVSQLTLAEKVNLTTGTGWEQDRCVGQVGSIPRLGFPGLCMQDSPLGVRDTDYNSAFPAGVNVAATWDRNLAYRRGVAMGEEHRGKGVDVQLGPVAGPLGRSPDAGRNWEGFAPDPVLTGNMMASTIQGIQDAGVIACAKHFILYEQEHFRQGAQDGYDISDSISANADDKTMHELYLWPFADAVRAGVGSVMCSYNQVNNSYACSNSYTMNKLLKSELGFQGFVMTDWGGHHSGVGSALAGLDMSMPGDIAFDSGTSFWGTNLTVAVLNGSIPEWRVDDMAVRIMSAYYKVGRDRYSVPINFDSWTLDTYGPEHYAVGQGQTKINEHVDVRGNHAEIIHEIGAASAVLLKNKGGLPLTGTERFVGVFGKDAGSNPWGVNGCSDRGCDNGTLAMGWGSGTANFPYLVTPEQAIQREVLSRNGTFTGITDNGALAEMAAAASQADTCLVFANADSGEGYITVDGNEGDRKNLTLWQGADQVIHNVSANCNNTVVVLHTVGPVLIDDWYDHPNVTAILWAGLPGQESGNSLVDVLYGRVNPGKTPFTWGRARDDYGAPLIVKPNNGKGAPQQDFTEGIFIDYRRFDKYNITPIYEFGFGLSYTTFEFSQLNVQPINAPPYTPASGFTKAAQSFGQPSNASDNLFPSDIERVPLYIYPWLNSTDLKASANDPDYGLPTEKYVPPNATNGDPQPIDPAGGAPGGNPSLYEPVARVTTIITNTGKVTGDEVPQLYVSLGGPDDAPKVLRGFDRITLAPGQQYLWTTTLTRRDISNWDPVTQNWVVTNYTKTIYVGNSSRNLPLQAPL

SEQ ID NO: 45742 - protein, 851 aa, Unidentified
MRNGLLKVAALAAASAVNGENLAYSPPFYPSPWANGQGDWAEAYQKAVQFVSQLTLAEKVNLTTGTGWEQDRCVGQVGSIPRLGFPGLCMQDSPLGVRDTDYNSAFPAGVNVAATWDRNLAYRRGVAMGEEHRGKGVDVQLGPVAGPLGRSPDAGRNWEGFAPDPVLTGNMMASTIQGIQDAGVIACAKHFILYEQEHFRQGAQDGYDISDSISANADDKTMHELYLWPFADAVRAGVGSVMCSYNQVNNSYACSNSYTMNKLLKSELGFQGFVMTDWGGHHSGVGSALAGLDMSMPGDIAFDSGTSFWGTNLTVAVLNGSIPEWRVDDMAVRIMSAYYKVGRDRYSVPINFDSWTLDTYGPEHYAVGQGQTKINEHVDVRGNHAEIIHEIGAASAVLLKNKGGLPLTGTERFVGVFGKDAGSNPWGVNGCSDRGCDKGTLAMGWGSGTANFPYLVTPEQAIQREVLSRNGTFTGITDNGALAEMAAAASQADTCLVFANADSGEGYITVDGNEGDRKNLTLWQGADQVIHNVSANCNNTVVVLHTVGPVLIDDWYDHPNVTAILWAGLPGQESGNSLVDVLYGRVNPGKTPFTWGRARDDYGAPLIVKPNNGKGAPQQDFTEGIFIDYRRFDKYNITPIYEFGFGLSYTTFEFSQLNVQPINAPPYTPASGFTKAAQSFGQPSNASDNLYPSDIERVPLYIYPWLNSTDLKASANDPDYGLPTEKYVPPNATNGDPQPIDPAGGAPGGNPSLYEPVARVTTIITNTGKVTGDEVPQLYVSLGGPDDAPKVLRGFDRITLAPGQQYLWTTTLTRRDISNWDPVTQNWVVTNYTKTIYVGNSSRNLPLQAPL

SEQ ID NO: 45743 - protein, 851 aa, Unidentified
MRNGLLKVAALAAASAVNGENLAYSPPFYPSPWANGQGDWAEAYQKAVQFVSQLTLAEKVNLTTGTGWEQDRCVGQVGSIPRLGFPGLCMQDSPLGVRDTDYNSAFPAGVNVAATWDRNLAYRRGVAMGEEHRGKGVDVQLGPVAGPLGRSPDAGRNWEGFAPDPVLTGNMMASTIQGIQDAGVIACAKHFILYEQEHFRQGAQDGYDISDSISANADDKTMHELYLWPFADAVRAGVGSVMCSYNQVNNSYACSNSYTMNKLLKSELGFQGFVMTDWGGHHSGVGSALAGLDMSMPGDIAFDSGTSFWGTNLTVAVLNGSIPEWRVDDMAVRIMSAYYKVGRDRYSVPINFDSWTLDTYGPEHYAVGQGQTKINEHVDVRGNHAEIIHEIGAASAVLLKNKGGLPLTGTERFVGVFGKDAGSNPWGVNGCSDRGCDNGTLAMGWGSGTANFPYLVTPEQAIQREVLSRNGTFTGITDNGALAEMAAAASQADTCLVFANADSGEGYITVDGNEGDRKNLTLWQGADQVIHNVSANCNNTVVVLHTVGPVLIDDWYDHPNVTAILWAGLPGQESGNSLVDVLYGRVNPGKTPFTWGRARDDYGAPLIVKPNNGKGAPQQDFTEGIFIDYRRFDKYNITPIYEFGFGLSYTTFEFSQLNVQPINAPPYTPASGFTKAAQSFGQPSNASDNLYPSDIERVPLYIYPWLNSTDLKASANDPDYGLPTEKYVPPNATNGDPQPIDPAGGAPGGNPSLYEPVARVTTIITNTGKVTGDEVPQLYVSLGGPDDAPKVLRGFDRITLAPGQQYLWTTTLTRRDISSWDPVTQNWVVTNYTKTIYVGNSSRNLPLQAPL

SEQ ID NO: 45744 - protein, 851 aa, Unidentified
MRNGLLKVAALAAASAVNGENLAYSPPFYPSPWANGQGDWAEAYQKAVQFVSQLTLAEKVNLTTGTGWEQDRCVGQVGSIPRLGFPGLCMQDSPLGVRDTDYNSAFPAGVNVAATWDRNLAYRRGVAMGEEHRGKGVDVQLGPVAGPLGRSPDAGRNWEGFAPDPVLTGNMMASTIQGIQDAGVIACAKHFILYEQEHFRQGAQDGYDISDSISANADDKTMHELYLWPFADAVRAGVGSVMCSYNQVNNSYACSNSYTMNKLLKSELGFQGFVMTDWGGHHSGVGSALAGLDMSMPGDIAFDSGTSFWGTNLTVAVLNGSIPEWRVDDMAVRIMSAYYKVGRDRYSVPINFDSWTLDTYGPEHYAVGQGQTKINEHVDVRGNHAEIIHEIGAASAVLLKNKGGLPLTGTERFVGVFGKDAGSNPWGVNGCSDRGCDNGTLAMGWGSGTANFPYLVTPEQAIQREVLSRNGTFTGITDNGALAEMAAAASQADTCLVFANADSGEGYITVDGNEGDRKNLTLWQGADQVIHNVSANCNNTVVVLHTVGPVLIDDWYDHPNVKAILWAGLPGQESGNSLVDVLYGRVNPGKTPFTWGRARDDYGAPLIVKPNNGKGAPQQDFTEGIFIDYRRFDKYNITPIYEFGFGLSYTTFEFSQLNVQPINAPPYTPASGFTKAAQSFGQPSNASDNLYPSDIERVPLYIYPWLNSTDLKASANDPDYGLPTEKYVPPNATNGDPQPIDPAGGAPGGNPSLYEPVARVTTIITNTGKVTGDEVPQLYVSLGGPDDAPKVLRGFDRITLAPGQQYLWTTTLTRRDISNWDPVTQNWVVTNYTKTIYVGNSSRNLPLQAPL

SEQ ID NO: 45745 - protein, 851 aa, Unidentified
MRNGLLKVAALAAASAVNGENLAYSPPFYPSPWANGQGDWAEAYQKAVQFVSQLTLAEKVNLTTGTGWEQDRCVGQVGSIPRLGFPGLCMQDSPLGVRDTDYNSAFPAGVNVAATWDRNLAYRRGVAMGEEHRGKGVDVQLGPVAGPLGRSPDAGRNWEGFAPDPVLTGNMMASTIQGIQDAGVIACAKHFILYEQEHFRQGAQDGYDISDSISANADDKTMHELYLWPFADAVRAGVGSVMCSYNQVNNSYACSNSYTMNKLLKSELGFQGFVMTDWGGHHSGVGSALAGLDMSMPGDIAFDSGTSFWGTNLTVAVLNGSIPEWRVDDMAVRIMSAYYKVGRDRYSVPINFDSWTLDTYGPEHYAVGQGQTKINEHVDVRGNHAEIIHEIGAASAVLLKNKGGLPLTGTERFVGVFGKDAGSNPWGVNGCSDRGCDNGTLAMGWGSGTANFPYLVTPEQAIQREVLSRNGTFTGITDNGALAEMAAAASQADTCLVFANADSGEGYITVDGNEGDRKNLTLWQGADQVIHNVSANCNNTVVVLHTVGPVLIDDWYDHPNVTAILWAGLPGQESGNSLVDVLYGRVNPGKTPFTWGRARDDYGAPLIVKPNNGKGAPQQDFTEGIFIDYRRFDKYNITPIFEFGFGLSYTTFEFSQLNVQPINAPPYTPASGFTKAAQSFGQPSNASDNLYPSDIERVPLYIYPWLNSTDLKASANDPDYGLPTEKYVPPNATNGDPQPIDPAGGAPGGNPSLYEPVARVTTIITNTGKVTGDEVPQLYVSLGGPDDAPKVLRGFDRITLAPGQQYLWTTTLTRRDISNWDPVTQNWVVTNYTKTIYVGNSSRNLPLQAPL

SEQ ID NO: 45746 - protein, 852 aa, Rasamsonia byssochlamydoides
MRNGLLEVAALAAVSVVNGQNLAYSPPFYPSPWANGQGDWAEAYQKAVQFVSQLTLAEKVNLTTGTGWEQEQCVGQVGSIPRLGFRGLCMQDSPLGVRDTDYNSAFPAGVNVAATWDRNLAYARGQAMGEEHRGKGVDVQLGPVAGPLGRSPDAGRNWEGFAPDPVLTGNMMASTIQGIQDAGVIACAKHYILYEQEHFRQGSQDGYTVADSISSNADDKTIHELYLWPFADAVRAGVGSIMCSYNQVNNSYACSNSYTLNKLLKGELGFQGFVMTDWGGHHSGVGDALAGLDMSMPGDIDFDSGTSFWGANLTVAVLNGSIPEWRVDDMAVRIMSAYYKVGRDRYSVPINFDSWTLDTYGYEHYAVSKNWAKVNEHVDVRGNHAEIIRQIGAASAVLLKNNGALPLTGNERFVGVFGYDAAANPWGANGCSDRGCDNGTLAMGWGSGTANFPYLVTPEQAIQSEVVSRGGTFTAVTDNGAIDQMVEVASQASVCLVFANADSGEGYINVDGNEGDRKNLTLWQGADQVIQNVSANCNNTVVVLHTVGAVLIDDWYDHPNITAILWAGLPGQESGNSLTDVLYGRVNPGGKTPFTWGRTREDYGAPLVLTPNNGKGAPQQDFTEGIFIDYRRFDKYNITPIYEFGFGLSYTTFEFSNLNVEPIYAPPYTPASGTTKAAQSFGSVSNASAYLFPDNIERVPLYIYPWLNSTNLRESANDPDYGLPLDKYVPPNATDGSPQPINPAGGAPGGNPALYDPVAQVTAVITNTGKVAGDEVPQLYVSLGGPDDAPKVLRGFDRITLEPGQSTLWTTTLTRRDISNWDPVTQNWVVTNYTKTVYVGNSSRNLPLQAPL

SEQ ID NO: 45747 - protein, 841 aa, Penicillium oxalicum
KDLAYSPPFYPSPWATGEGEWAEAYKKAVDFVSGLTLAEKVNITTGAGWEQERCVGETGGVPRLGMWGMCMQDSPLGVRNADYSSAFPAGVNVAATWDRRLAYQRGTAMGEEHRDKGVDVQLGPVAGPLGKNPDGGRGWEGFSPDPVLTGVMMAETIKGIQDAGVIACAKHFIMNEQEHFRQAGEAQGYGFNISQSLSSNVDDKTMHELYLWPFVDSVRAGVGSVMCSYNQINNSYGCSNSYTLNKLLKGELGFQGFVMSDWGAHHSGVGDALAGLDMSTPGDVILGSPYSFWGTNLTVSVLNSTIPEWRLDDMAVRIMAAYYKVGRDRHRTPPNFSSWTRDKYGYEHFIVQENYVKLNERVNVQRDHANVIRKIGSDSIVMLKNNGGLPLTHQERLVAILGEDAGSNAYGANGCSDRGCDNGTLAMGWGSGTANFPYLITPEQAIQNEVLNYGNGDTNVFAVTDNGALSQMAALASTASVALLFVNADSGEGYISVDGNEGDRKNMTLWKNGEELIKTATANCNNTIVIMHTPNAVLVDSWYDNENITAILWAGMPGQESGRSLVDVLYGRTNPGGKTPFTWGKERKEWGSPLLTKPNNGHGAPQDDFTDVLIDYRRFDKDNVEPIFEFGFGLSYTKFEFSDIQVKALNHGEYNATVGKTKPAPSLGKPGNASDHLFPSNINRVRQYLYPYLNSTDLKASANDPDYGMNASAYIPPHATDSDPQDLLPASGPSGGNPGLFEDLIEVTATVTNTGSVTGDEVPQLYVSLGGADDPVKVLRAFDRVTIAPGQKLRWTATLNRRDLSNWDVPSQNWIISDAPKKVWVGNSSRKLPLSADLPKV

SEQ ID NO: 45748 - protein, 851 aa, Unidentified
MRNGLLKVAALAAASAVNGENLAYSPCFYPSPWANGQGDWAEAYQKAVQFVSQLTLAEKVNLTTGTGWEQDRCVGQVGSIPRLGFPGLCMQDSPLGVRDTDYNSAFPAGVNVAATWDRNLAYRRGVAMGEEHRGKGVDVQLGPVAGPLGRSPDAGRNWEGFAPDPVLTGNMMASTIQGIQDAGVIACAKHFILYEQEHFRQGAQDGYDISDSISANADDKTMHELYLWPFADAVRAGVGSVMCSYNQVNNSYACSNSYTMNKLLKSELGFQGFVMTDWGGHHSGVGSALAGLDMSMPGDIAFDSGTSFWGTNLTVAVLNGSIPEWRVDDMAVRIMSAYYKVGRDRYSVPINFDSWTLDTYGPEHYAVGQGQTKINEHVDVRGNHAEIIHEIGAASAVLLKNKGGLPLTGTERFVGVFGKDAGSNPWGVNGCSDRGCDNGTLAMGWGSGTANFPYLVTPEQAIQREVLSRNGTFTGITDNGALAEMAAAASQADTCLVFANADSGEGYITVDGNEGDRKNLTLWQGADQVIHNVSANCNNTVVVLHTVGPVLIDDWYDHPNVTAILWAGLPGQESGNSLVDVLYGRVNPGKTPFTWGRARDDYGAPLIVKPNNGKGAPQQDFTEGIFIDYRRFDKYNITPIYEFGFGLSYTTFEFSQLNVQPINAPPYTPASGFTKAAQSFGQPSNASDNLYPSDIERVPLYIYPWLNSTDLKASANDPDYGLPTEKYVCPNATNGDPQPIDPAGGAPGGNPSLYEPVARVTTIITNTGKVTGDEVPQLYVSLGGPDDAPKVLRGFDRITLAPGQQYLWTTTLTRRDISNWDPVTQNWVVTNYTKTIYVGNSSRNLPLQAPL

SEQ ID NO: 45749 - protein, 851 aa, Unidentified
MRNGLLKVAALAAASAVNGENLAYSPPFYPSPWANGQGDWAEAYQKAVQFVSQLTLAEKVNLTTGTGWEQDRCVGQVGSIPRLGFPGLCMQDSPLGVRDTDYNSAFPAGVNVAATWDRNLAYRRGVAMGEEHRGKGVDVQLGPVAGPLGRSPDAGRNWEGFAPDPVLTGNMMASTIQGIQDAGVIACAKHFILYEQEHFRQGAQDGYDISDSISANADDKTMHELYLWPFADAVRAGVGSVMCSYNQVNNSYACSNSYTMNKLLKSELGFQGFVMTDWGGHHSGVGSALAGLDMSMPGDIAFDSGTSFWGTNLTVAVLNGSIPEWRVDDMAVRIMSAYYKVGRDRYSVPINFDSWTLDTYGPEHYAVGQGQTKINEHVDVRGNHAEIIHEIGAASAVLLKNKGGLPLTGTERFVGVFGKDAGSNPWGVNGCSDRGCDNGTLAMGWGSGTANFPYLVTPEQAIQREVLSRNGTFTGITDNGALAEMAAAASQADTCLVFANADSGEGYITVDGNEGDRKNLTLWQGADQVIHNVSANCNNTVVVLHTVGPVLIDDWYDHPNVTAILWAGLPGQESGNSLVDVLYGRVNPGKTPFTWGRARDDYGAPLIVKPNNGKGAPQQDFTEGIFIDYRRFDKYNITPIYEFGFGLSYTTFEFSQLNVQPINAPPYTPASGFTKAAQSFGQPSNCSDNLYPSDIERVPLYIYPWLNSCDLKASANDPDYGLPTEKYVPPNATNGDPQPIDPAGGAPGGNPSLYEPVARVTTIITNTGKVTGDEVPQLYVSLGGPDDAPKVLRGFDRITLAPGQQYLWTTTLTRRDISNWDPVTQNWVVTNYTKTIYVGNSSRNLPLQAPL

SEQ ID NO: 45750 - protein, 851 aa, Unidentified
MRNGLLKVAALAAASAVNGENLAYSPPFYPSPWANGQGDWAEAYQKAVQFVSQLTLAEKVNLTTGTGWEQDRCVGQVGSIPRLGFPGLCMQDSPLGVRDTDYNSCFPAGVNVAATWDRNLAYRRGVAMGEEHRGKGVDVQLGPVAGPLGRSPDAGRNWEGFAPDPVLTGNMMASTIQGIQDAGVIACAKHFILYEQEHFRQGAQDGYDISDSISANADDKTMHELYLWPFADAVRAGVGSVMCSYNQVNNSYACSNSYTMNKLLKSELGFQGFVMTDWGGHHSGVGSALAGLDMSMPGDIAFDSGTSFWGTNLTVAVLNGSIPEWRVDDMAVRIMSAYYKVGRDRYSVPINFDSWTLDTYGPEHYAVGQGQTKINEHVDVRGNHAEIIHEIGAASAVLLKNKGGLPLTGTERFVGVFGKDAGSNPWGVNGCSDRGCDNGTLAMGWGSGTANCPYLVTPEQAIQREVLSRNGTFTGITDNGALAEMAAAASQADTCLVFANADSGEGYITVDGNEGDRKNLTLWQGADQVIHNVSANCNNTVVVLHTVGPVLIDDWYDHPNVTAILWAGLPGQESGNSLVDVLYGRVNPGKTPFTWGRARDDYGAPLIVKPNNGKGAPQQDFTEGIFIDYRRFDKYNITPIYEFGFGLSYTTFEFSQLNVQPINAPPYTPASGFTKAAQSFGQPSNASDNLYPSDIERVPLYIYPWLNSTDLKASANDPDYGLPTEKYVPPNATNGDPQPIDPAGGAPGGNPSLYEPVARVTTIITNTGKVTGDEVPQLYVSLGGPDDAPKVLRGFDRITLAPGQQYLWTTTLTRRDISNWDPVTQNWVVTNYTKTIYVGNSSRNLPLQAPL

SEQ ID NO: 45751 - protein, 860 aa, Penicillium decumbens
MKLEWLEATVLAAATVASAKDLAYSPPFYPSPWATGEGEWAEAYKKAVDFVSGLTLAEKVNITTGAGWEQERCVGETGGVPRLGMWGMCMQDSPLGVRNADYSSAFPAGVNVAATWDRRLAYQRGTAMGEEHRDKGVDVQLGPVAGPLGKNPDGGRGWEGFSPDPVLTGVMMAETIKGIQDAGVIACAKHFIMNEQEHFRQAGEAQGYGFNISQSLSSNVDDKTMHELYLWPFVDSVRAGVGSVMCSYNQINNSYGCSNSYTLNKLLKGELGFQGFVMSDWGAHHSGVGDALAGLDMSMPGDVILGSPYSFWGTNLTVSVLNSTIPEWRLDDMAVRIMAAYYKVGRDRHRTPPNFSSWTRDEYGYEHFIVQENYVKLNERVNVQRDHANVIRKIGSDSIVMLKNNGGLPLTHQERLVAILGEDAGSNAYGANGCSDRGCDNGTLAMGWGSGTANFPYLITPEQAIQNEVLNYGNGDTNVFAVTDNGALSQMAALASTASVALVFVNADSGEGYISVDGNEGDRKNMTLWKNGEELIKTATANCNNTIVIMHTPNAVLVDSWYDNENITAILWAGMPGQESGRSLVDVLYGRTNPGGKTPFTWGKERKDWGSPLLTKPNNGHGAPQDDFTDVLIDYRRFDKDNVEPIFEFGFGLSYTKFEFSDIQVKALNHGEYNATVGKTKPAPSLGKPGNASDHLFPSNINRVRQYLYPYLNSTDLKASANDPDYGMNASAYIPPHATDSDPQDLLPASGPSGGNPGLFEDLIEVTATVTNTGSVTGDEVPQLYVSLGGADDPVKVLRAFDRVTIAPGQKLRWTATLNRRDLSNWDVPSQNWIISDAPKKVWVGNSSRKLPLSADLPKV

SEQ ID NO: 45752 - protein, 860 aa, Penicillium oxalicum
MKLEWLEATVLAAATVASAKDLAYSPPFYPSPWATGEGEWAEAYKKAVDFVSGLTLAEKVNITTGAGWEQERCVGETGGVPRLGMWGMCMQDSPLGVRNADYSSAFPAGVNVAATWDRRLAYQRGTAMGEEHRDKGVDVQLGPVAGPLGKNPDGGRGWEGFSPDPVLTGVMVAETIKGIQDAGVIACAKHFIMNEQEHFRQAGEAQGYGFNISQSLSSNVDDKTMHELYLWPFVDSVRAGVGSVMCSYNQINNSYGCSNSYTLNKLLKGELGFQGFVMSDWGAHHSGVGDALAGLDMSMPGDVILGSPYSFWGTNLTVSVLNSTIPEWRLDDMAVRIMAAYYKVGRDRHRTPPNFSSWTRDEYGYEHFIVQENYVKLNERVNVQRDHANVIRKIGSDSIVMLKNNGGLPLTHQERLVAILGEDAGSNAYGANGCSDRGCDNGTLAMGWGSGTANFPYLITPEQAIQNEVLNYGNGDTNVFAVTDNGALSQMAALASTASVALVFVNADSGEGYISVDGNEGDRKNMTLWKNGEELIKTATANCNNTIVIMHTPNAVLVDSWYDNENITAILWAGMPGQESGRSLVDVLYGRTNPGGKTPFTWGKERKDWGSPLLTKPNNGHGAPQDDFTDVLIDYRRFDKDNVEPIFEFGFGLSYTKFEFSDIQVKALNHGEYNATVGKTKPAPSLGKPGNASDHLFPSNINRVRQYLYPYLNSTDLKASANDPDYGMNASAYIPPHATDSDPQDLLPASGPSGGNPGLFEDLIEVTATVTNTGSVTGDEVPQLYVSLGGADDPVKVLRAFDRVTIAPGQKLRWTATLNRRDLSNWDVPSQNWIISDAPKKVWVGNSSRKLPLSADLPKV

SEQ ID NO: 45753 - protein, 841 aa, Penicillium oxalicum
KDLAYSPPFYPSPWATGEGEWAEAYKKAVDFVSGLTLAEKVNITTGAGWEQERCVGETGGVPRLGMWGMCMQDSPLGVRNADYSSAFPAGVNVAATWDRRLAYQRGTAMGEEHRDKGVDVQLGPVAGPLGKNPDGGRGWEGFSPDPVLTGVMMAETIKGIQDAGVIACAKHFIMNEQEHFRQAGEAQGYGFNISQSLSSNVDDKTMHELYLWPFVDSVRAGVGSVMCSYNQINNSYGCSNSYTLNKLLKGELGFQGFVMSDWGAHHSGVGDALAGLDMSMPGDVILGSPYSFWGTNLTVSVLNSTIPEWRLDDMAVRIMAAYYKVGRDRHRTPPNFSSWTRDKYGYEHFIVQENYVKLNERVNVQRDHANVIRKIGSDSIVMLKNNGGLPLTHQERLVAILGEDAGSNAYGANSCSDRGCVNGTLAMGWGSGTANFPYLISPEQAIQNEVLNYGNGDTNVFAVTDNGALSQMAALASTASVALVFVNADSGEGYISVDGNEGDRKNMTLWKNGEELIKTATANCNNTIVIMHTPNAVLVDSWYDNENITAILWAGMPGQESGRSLVDVLYGRTNPGGKTPFTWGKERKDWGSPLLTKPNNGHGAPQDDFTDVLIDYRRFDKDNVEPIFEFGFGLSYTKFEFSDIQVKALNHGEYNATVGKTKPAPSLGKPGNASDHLFPSNINRVRQYLYPYLNSTDLKASANDPDYGMNASAYIPPHATDSDPQDLLPASGPSGGNPGLFEDLIEVTATVTNTGSVTGDEVPQLYVSLGGADDPVKVLRAFDRVTIAPGQKLRWTATLNRRDLSNWDVPSQNWIISDAPKKVWVGNSSRKLPLSADLPKV

SEQ ID NO: 45754 - protein, 860 aa, Penicillium decumbens JU-A10
MKLEWLEATVLAAATVASAKDLAYSPPFYPSPWATGEGEWAEAYKKAVDFVSGLTLAEKVNITTGAGWEQERCVGETGGVPRLGMWGMCMQDSPLGVRNADYSSAFPAGVNVAATWDRRLAYQRGTAMGEEHRDKGVDVQLGPVAGPLGKNPDGGRGWEGFSPDPVLTGVMMAETIKGIQDAGVIACAKHFIMNEQEHFRQAGEAQGYGFNISQSLSSNVDDKTMHELYLWPFVDSVRAGVGSVMCSYNQINNSYGCSNSYTLNKLLKGELGFQGFVMSDWGAHHSGVGDALAGLDMSMPGDVILGSPYSFWGTNLTVSVLNSTIPEWRLDDMAVRIMAAYYKVGRDRHRTPPNFSSWTRDEYGYEHFIVQENYVKLNERVNVQRDHANVIRKIGSDSIVMLKNNGGLPLTHQERLVAILGEDAGSNAYGANGCSDRGCDNGTLAMGWGSGTANFPYLITPEQAIQNEVLNYGNGDTNVFAVTDNGALGQMAALASTASVALVFVNADSGEGYISVDGNEGDRKNMTLWKNGEELIKTATANCNNTIVIMHTPNAVLVDSWYDNENITAILWAGMPGQESGRSLVDVLYGRTNPGGKTPFTWGKERKDWGSPLLTKPNNGHGAPQDDFTDVLIDYRRFDKDNVEPIFEFGFGLSYTKFEFSDIQVKALNHGEYNATVGKTKPAPSLGKPGNASDHLFPSNINRVRQYLYPYLNSTDLKASANDPDYGMNASAYIPPHATDSDPQDLLPASGPSGGNPGLFEDLIEVTATVTNTGSVTGDEVPQLYVSLGGADDPVKVLRAFDRVTIAPGQKLRWTATLNRRDLSNWDVPSQNWIISDAPKKVWVGNSSRKLPLSADLPKV

SEQ ID NO: 45755 - protein, 1378 aa, Unidentified; identical to SEQ ID NO: 58

SEQ ID NO: 45756 - protein, 471 aa, unidentified
ATLDSWLSNEATVARTAILNNIGADGAWVSGADSGIVVASPSTDNPDYFYTWTRDSGLVLKTLVDLFRNGDTSLLSTIENYISAQAIVQGISNPSGDLSSGAGLGEPKFNVDETAYTGSWGRPQRDGPALRATAMIGFGQWLLDNGYTSTATDIVWPLVRNDLSYVAQYWNQTGYDLWEEVNGSSFFTIAVQHRALVEGSAFATAVGSSCSWCDSQAPEILCYLQSFWTGSFILANFDSSRSGKDANTLLGSIHTFDPEAACDDSTFQPCSPRALANHKEVVDSFRSIYTLNDGLSDSEAVAVGRYPEDTYYNGNPWFLCTLAAAEQLYDALYQWDKQGSLEVTDVSLDFFKALYSDAATGTYSSSSSTYSSIVDAVKTFADGFVSIVETHAASNGSMSEQYDKSDGEQLSARDLTWSYAALLTANNRRNSVVPASWGETSASSVPGTCAATSAIGTYSSVTVTSWPSIVA

SEQ ID NO: 45757 - protein, 662 aa, Aspergillus niger
MSFRSLLALSGLVCTGLANVISKRATLDSWLSNEATVARTAILNNFTIGADGAWVSGADSGIVVASPSTDNPDYFYTWTRDSGLVLKTLVDLFRNGDTSLLSTIENFTYISAQAIVQGISNPSGDLSSGAGLGEPKFNVDETAYTGSWGRPQRDGPALRATAMIGFGFTQWLLDNGYTSTATDIVWPLVRNDLSYVAQYWNQTGYDLWEEVNGSSFFTIAVQHRALVEFTGSAFATAVGSSCSWCDSQAPEILCYLQSFWTGSFILANFDSSRSGKDANTLLGSIHTFDFTPEAACDDSTFQPCSPRALANHKEVVDSFRSIYTLNDGLSDSEAVAVGRYPEDTYYNGNPFTWFLCTLAAAEQLYDALYQWDKQGSLEVTDVSLDFFKALYSDAATGTYSSSSSTYSSIVDFTAVKTFADGFVSIVETHAASNGSMSEQYDKSDGEQLSARDLTWSYAALLTANNRRNSVVPFTASWGETSASSVPGTCAATSAIGTYSSVTVTSWPSIVATGGTTTTATPTGSGSVTSTSKTFTTATASKTSTSTSSTSCTTPTAVAVTFDLTATTTYGENIYLVGSISQLGDWETSDGIALSFTADKYTSSDPLWYVTVTLPAGESFEYKFIRIESDDSVEWESDPNREYTVPQACGTSTATVFTTDTWR

SEQ ID NO: 45758 - protein, 598 aa, Aspergillus niger
WLSNEATVARTAILNNIGADGAWVSGADSGIVVASPSTDNPDYFYTWTRDSGLVLKTLVDLFRNGDTSLLSTIENYISAQAIVQGISNPSGDLSSGAGLGEPKFNVDETAYTGSWGRPQRDGPALRATAMIGFGQWLLDNGYTSTATDIVWPLVRNDLSYVAQYWNQTGYDLWEEVNGSSFFTIAVQHRALVEGSAFATAVGSSCSWCDSQAPEILCYLQSFWTGSFILANFDSSRSGKDANTLLGSIHTFDPEAACDDSTFQPCSPRALANHKEVVDSFRSIYTLNDGLSDSEAVAVGRYPEDTYYNGNPWFLCTLAAAEQLYDALYQWDKQGSLEVTDVSLDFFKALYSDAATGTYSSSSSTYSSIVDAVKTFADGFVSIVETHAASNGSMSEQYDKSDGEQLSARDLTWSYAALLTANNRRNSVVPASWGETSASSVPGTCAATSAIGTYSSVTVTSWPSIVATGGTTTTATPTGSGSVTSTSKTTATASKTSTSTSSTSCTTPTAVAVTFDLTATTTYGENIYLVGSISQLGDWETSDGIALSADKYTSSDPLWYVTVTLPAGESFEYKFIRIESDDSVEWESDPNREYTVPQA

SEQ ID NO: 45759 - protein, 480 aa, Aspergillus niger
NVISKRATLDSWLSNEATVARTAILNNIGADGAWVSGADSGIVVASPSTDNPDYFYTWTRDSGLVLKTLVDLFRNGDTSLLSTIENYISAQAIVQGISNPSGDLSSGAGLGEPKFNVDETAYTGSWGRPQRDGPALRATAMIGFGQWLLDNGYTSTATDIVWPLVRNDLSYVAQYWNQTGYDLWEEVNGSSFFTIAVQHRALVEGSAFATAVGSSCSWCDSQAPEILCYLQSFWTGSFILANFDSSRSGKDANTLLGSIHTFDPEAACDDSTFQPCSPRALANHKEVVDSFRSIYTLNDGLSDSEAVAVGRYPEDTYYNGNPWFLCTLAAAEQLYDALYQWDKQGSLEVTDVSLDFFKALYSDAATGTYSSSSSTYSSIVDAVKTFADGFVSIVETHAASNGSMSEQYDKSDGEQLSARDLTWSYAALLTANNRRNSVVPASWGETSASSVPGTCAATSAIGTYSSVTVTSWPSIVATGG

SEQ ID NO: 45760 - protein, 622 aa, Aspergillus niger
NVISKRATLDSWLSNEATVARTAILNNIGADGAWVSGADSGIVVASPSTDNPDYFYTWTRDSGLVLKTLVDLFRNGDTSLLSTIENYISAQAIVQGISNPSGDLSSGAGLGEPKFNVDETAYTGSWGRPQRDGPALRATAMIGFGQWLLDNGYTSTATDIVWPLVRNDLSYVAQYWNQTGYDLWEEVNGSSFFTIAVQHRALVEGSAFATAVGSSCSWCDSQAPEILCYLQSFWTGSFILANFDSSRSGKDANTLLGSIHTFDPEAACDDSTFQPCSPRALANHKEVVDSFRSIYTLNDGLSDSEAVAVGRYPEDTYYNGNPWFLCTLAAAEQLYDALYQWDKQGSLEVTDVSLDFFKALYSDAATGTYSSSSSTYSSIVDAVKTFADGFVSIVETHAASNGSMSEQYDKSDGEQLSARDLTWSYAALLTANNRRNSVVPASWGETSASSVPGTCAATSAIGTYSSVTVTSWPSIVATGGTTTTATPTGSGSVTSTSKTTATASKTSTSTSSTSCTTPTAVAVTFDLTATTTYGENIYLVGSISQLGDWETSDGIALSADKYTSSDPLWYVTVTLPAGESFEYKFIRIESDDSVEWESDPNREYTVPQACGTSTATVTDTWR

SEQ ID NO: 45761 - protein, 616 aa, Aspergillus niger; identical to SEQ ID NO: 42

SEQ ID NO: 45762 - protein, 640 aa, unidentified; identical to SEQ ID NO: 41

SEQ ID NO: 45763 - protein, 449 aa, Aspergillus niger
ATLDSWLSNEATVARTAILNNIGADGAWVSGADSGIVVASPSTDNPDYFYTWTRDSGLVLKTLVDLFRNGDTSLLSTIENYISAQAIVQGISNPSGDLSSGAGLGEPKFNVDETAYTGSWGRPQRDGPALRATAMIGFGQWLLDNGYTSTATDIVWPLVRNDLSYVAQYWNQTGYDLWEEVNGSSFFTIAVQHRALVEGSAFATAVGSSCSWCDSQAPEILCYLQSFWTGSFILANFDSSRSGKDANTLLGSIHTFDPEAACDDSTFQPCSPRALANHKEVVDSFRSIYTLNDGLSDSEAVAVGRYPEDTYYNGNPWFLCTLAAAEQLYDALYQWDKQGSLEVTDVSLDFFKALYSDAATGTYSSSSSTYSSIVDAVKTFADGFVSIVETHAASNGSMSEQYDKSDGEQLSARDLTWSYAALLTANNRRNSVVPASWGETSASSVPGTC

SEQ ID NO: 45764 - protein, 638 aa, Aspergillus niger
ATLDSWLSNEATVARTAILNNFTIGADGAWVSGADSGIVVASPSTDNPDYFYTWTRDSGLVLKTLVDLFRNGDTSLLSTIENFTYISAQAIVQGISNPSGDLSSGAGLGEPKFNVDETAYTGSWGRPQRDGPALRATAMIGFGFTQWLLDNGYTSTATDIVWPLVRNDLSYVAQYWNQTGYDLWEEVNGSSFFTIAVQHRALVEFTGSAFATAVGSSCSWCDSQAPEILCYLQSFWTGSFILANFDSSRSGKDANTLLGSIHTFDFTPEAACDDSTFQPCSPRALANHKEVVDSFRSIYTLNDGLSDSEAVAVGRYPEDTYYNGNPFTWFLCTLAAAEQLYDALYQWDKQGSLEVTDVSLDFFKALYSDAATGTYSSSSSTYSSIVDFTAVKTFADGFVSIVETHAASNGSMSEQYDKSDGEQLSARDLTWSYAALLTANNRRNSVVPFTASWGETSASSVPGTCAATSAIGTYSSVTVTSWPSIVATGGTTTTATPTGSGSVTSTSKTFTTATASKTSTSTSSTSCTTPTAVAVTFDLTATTTYGENIYLVGSISQLGDWETSDGIALSFTADKYTSSDPLWYVTVTLPAGESFEYKFIRIESDDSVEWESDPNREYTVPQACGTSTATVFTTDTWR

SEQ ID NO: 45765 - protein, 474 aa, Aspergillus niger
ATLDSWLSNEATVARTAILNNIGADGAWVSGADSGIVVASPSTDNPDYFYTWTRDSGLVLKTLVDLFRNGDTSLLSTIENYISAQAIVQGISNPSGDLSSGAGLGEPKFNVDETAYTGSWGRPQRDGPALRATAMIGFGQWLLDNGYTSTATDIVWPLVRNDLSYVAQYWNQTGYDLWEEVNGSSFFTIAVQHRALVEGSAFATAVGSSCSWCDSQAPEILCYLQSFWTGSFILANFDSSRSGKDANTLLGSIHTFDPEAACDDSTFQPCSPRALANHKEVVDSFRSIYTLNDGLSDSEAVAVGRYPEDTYYNGNPWFLCTLAAAEQLYDALYQWDKQGSLEVTDVSLDFFKALYSDAATGTYSSSSSTYSSIVDAVKTFADGFVSIVETHAASNGSMSEQYDKSDGEQLSARDLTWSYAALLTANNRRNSVVPASWGETSASSVPGTCAATSAIGTYSSVTVTSWPSIVATGG

SEQ ID NO: 45766 - protein, 526 aa, Aspergillus niger
MSFRSLLALSGLVCTGLANVISKRATLDSWLSNEATVARTAILNNIGADGAWVSGADSGIVVASPSTDNPDYFYTWTRDSGLVLKTLVDLFRNGDTSLLSTIENYISAQAIVQGISNPSGDLSSGAGLGEPKFNVDETAYTGSWGRPQRDGPALRATAMIGFGQWLLDNGYTSTATDIVWPLVRNDLSYVAQYWNQTGYDLWEEVNGSSFFTIAVQHRALVEGSAFATAVGSSCSWCDSQAPEILCYLQSFWTGSFILANFDSSRSGKDANTLLGSIHTFDPEAACDDSTFQPCSPRALANHKEVVDSFRSIYTLNDGLSDSEAVAVGRYPEDTYYNGNPWFLCTLAAAEQLYDALYQWDKQGSLEVTDVSLDFFKALYSDAATGTYSSSSSTYSSIVDAVKTFADGFVSIVETHAASNGSMSEQYDKSDGEQLSARDLTWSYAALLTANNRRNSVVPASWGETSASSVPGTCAATSAIGTYSSVTVTSWPSIVATGGTTTTATPTGSGSVTSTSKTTATASKTST

SEQ ID NO: 45767 - protein, 502 aa, Aspergillus niger
ATLDSWLSNEATVARTAILNNIGADGAWVSGADSGIVVASPSTDNPDYFYTWTRDSGLVLKTLVDLFRNGDTSLLSTIENYISAQAIVQGISNPSGDLSSGAGLGEPKFNVDETAYTGSWGRPQRDGPALRATAMIGFGQWLLDNGYTSTATDIVWPLVRNDLSYVAQYWNQTGYDLWEEVNGSSFFTIAVQHRALVEGSAFATAVGSSCSWCDSQAPEILCYLQSFWTGSFILANFDSSRSGKDANTLLGSIHTFDPEAACDDSTFQPCSPRALANHKEVVDSFRSIYTLNDGLSDSEAVAVGRYPEDTYYNGNPWFLCTLAAAEQLYDALYQWDKQGSLEVTDVSLDFFKALYSDAATGTYSSSSSTYSSIVDAVKTFADGFVSIVETHAASNGSMSEQYDKSDGEQLSARDLTWSYAALLTANNRRNSVVPASWGETSASSVPGTCAATSAIGTYSSVTVTSWPSIVATGGTTTTATPTGSGSVTSTSKTTATASKTST

SEQ ID NO: 45768 - protein, 525 aa, Aspergillus niger
MSFRSLLALSGLVCTGLANVISKRATLDSWLSNEATVARTAILNNIGADGAWVSGADSGIVVASPSTDNPDFYTWTRDSGLVLKTLVDLFRNGDTSLLSTIENYISAQAIVQGISNPSGDLSSGAGLGEPKFNVDETAYTGSWGRPQRDGPALRATAMIGFGQWLLDNGYTSTATDIVWPLVRNDLSYVAQYWNQTGYDLWEEVNGSSFFTIAVQHRALVEGSAFATAVGSSCSWCDSQAPEILCYLQSFWTGSFILANFDSSRSGKDANTLLGSIHTFDPEAACDDSTFQPCSPRALANHKEVVDSFRSIYTLNDGLSDSEAVAVGRYPEDTYYNGNPWFLCTLAAAEQLYDALYQWDKQGSLEVTDVSLDFFKALYSDAATGTYSSSSSTYSSIVDAVKTFADGFVSIVETHAASNGSMSEQYDKSDGEQLSARDLTWSYAALLTANNRRNSVVPASWGETSASSVPGTCAATSAIGTYSSVTVTSWPSIVATGGTTTTATPTGSGSVTSTSKTTATASKTST

SEQ ID NO: 45769 - protein, 523 aa, Chimeric
MSFRSLLALSGLVCTGLANVISKRATLDSWLSNEATVARTAILNNIGADGAWVSGADSGIVVASPSTDNPDYFYTWTRDSGLVLKTLVDLFRNGDTSLLSTIENYISAQAIVQGISNPSGDLSSGAGLGEPKFNVDETAYTGSWGRPQRDGPALRATAMIGFGQWLLDNGYTSTATDIVWPLVRNDLSYVAQYWNQTGYDLWEEVNGSSFFTIAVQHRALVEGSAFATAVGSSCSWCDSQAPEILCYLQSFWTGSFILANFDSSRSGKDANTLLGSIHTFDPEAACDDSTFQPCSPRALANHKEVVDSFRSIYTLNDGLSDSEAVAVGRYPEDTYYNGNPWFLCTLAAAEQLYDALYQWDKQGSLEVTDVSLDFFKALYSDAATGTYSSSSSTYSSIVDAVKTFADGFVSIVETHAASNGSMSEQYDKSDGEQLSARDLTWSYAALLTANNRRNSVVPASWGETSASSVPGTCAATSAIGTYSSVTVTSWPSIVATGGTTTTATPTGSGSVTSTSKTTATASK

SEQ ID NO: 45770 - protein, 522 aa, Synthetic construct
MSFRSLLALSGLVCTGLANVISKRATLDSWLSNEATVARTAILNNIGADGAWVSGADSGIVVASPSTDNPDYFYTWTRDSGLVLKTLVDLFRNGDTSLLSTIENYISAQAIVQGISNPSGDLSSGAGLGEPKFNVDETAYTGSWGRPQRDGPALRATAMIGFGQWLLDNGYTSTATDIVWPLVRNDLSYVAQYWNQTGYDLWEEVNGSSFFTIAVQHRALVEGSAFATAVGSSCSWCDSQAPEILCYLQSFWTGSFILANFDSSRSGKDANTLLGSIHTFDPEAACDDSTFQPCSPRALANHKEVVDSFRSIYTLNDGLSDSEAVAVGRYPEDTYYNGNPWFLCTLAAAEQLYDALYQWDKQGSLEVTDVSLDFFKALYSDAATGTYSSSSSTYSSIVDAVKTFADGFVSIVETHAASNGSMSEQYDKSDGEQLSARDLTWSYAALLTANNRRNSVVPASWGETSASSVPGTCAATSAIGTYSSVTVTSWPSIVATGGTTTTATPTGSGSVTSTSKTTATAS

SEQ ID NO: 45771 - protein, 501 aa, Aspergillus niger
ATLDSWLSNEATVARTAILNNIGADGAWVSGADSGIVVASPSTDNPDFYTWTRDSGLVLKTLVDLFRNGDTSLLSTIENYISAQAIVQGISNPSGDLSSGAGLGEPKFNVDETAYTGSWGRPQRDGPALRATAMIGFGQWLLDNGYTSTATDIVWPLVRNDLSYVAQYWNQTGYDLWEEVNGSSFFTIAVQHRALVEGSAFATAVGSSCSWCDSQAPEILCYLQSFWTGSFILANFDSSRSGKDANTLLGSIHTFDPEAACDDSTFQPCSPRALANHKEVVDSFRSIYTLNDGLSDSEAVAVGRYPEDTYYNGNPWFLCTLAAAEQLYDALYQWDKQGSLEVTDVSLDFFKALYSDAATGTYSSSSSTYSSIVDAVKTFADGFVSIVETHAASNGSMSEQYDKSDGEQLSARDLTWSYAALLTANNRRNSVVPASWGETSASSVPGTCAATSAIGTYSSVTVTSWPSIVATGGTTTTATPTGSGSVTSTSKTTATASKTST

SEQ ID NO: 45772 - protein, 499 aa, Bos sp.
ATLDSWLSNEATVARTAILNNIGADGAWVSGADSGIVVASPSTDNPDYFYTWTRDSGLVLKTLVDLFRNGDTSLLSTIENYISAQAIVQGISNPSGDLSSGAGLGEPKFNVDETAYTGSWGRPQRDGPALRATAMIGFGQWLLDNGYTSTATDIVWPLVRNDLSYVAQYWNQTGYDLWEEVNGSSFFTIAVQHRALVEGSAFATAVGSSCSWCDSQAPEILCYLQSFWTGSFILANFDSSRSGKDANTLLGSIHTFDPEAACDDSTFQPCSPRALANHKEVVDSFRSIYTLNDGLSDSEAVAVGRYPEDTYYNGNPWFLCTLAAAEQLYDALYQWDKQGSLEVTDVSLDFFKALYSDAATGTYSSSSSTYSSIVDAVKTFADGFVSIVETHAASNGSMSEQYDKSDGEQLSARDLTWSYAALLTANNRRNSVVPASWGETSASSVPGTCAATSAIGTYSSVTVTSWPSIVATGGTTTTATPTGSGSVTSTSKTTATASK

SEQ ID NO: 45773 - protein, 498 aa, Synthetic construct
ATLDSWLSNEATVARTAILNNIGADGAWVSGADSGIVVASPSTDNPDYFYTWTRDSGLVLKTLVDLFRNGDTSLLSTIENYISAQAIVQGISNPSGDLSSGAGLGEPKFNVDETAYTGSWGRPQRDGPALRATAMIGFGQWLLDNGYTSTATDIVWPLVRNDLSYVAQYWNQTGYDLWEEVNGSSFFTIAVQHRALVEGSAFATAVGSSCSWCDSQAPEILCYLQSFWTGSFILANFDSSRSGKDANTLLGSIHTFDPEAACDDSTFQPCSPRALANHKEVVDSFRSIYTLNDGLSDSEAVAVGRYPEDTYYNGNPWFLCTLAAAEQLYDALYQWDKQGSLEVTDVSLDFFKALYSDAATGTYSSSSSTYSSIVDAVKTFADGFVSIVETHAASNGSMSEQYDKSDGEQLSARDLTWSYAALLTANNRRNSVVPASWGETSASSVPGTCAATSAIGTYSSVTVTSWPSIVATGGTTTTATPTGSGSVTSTSKTTATAS

SEQ ID NO: 45774 - protein, 640 aa, unidentified
MSFRSLLALSGLVCTGLANVISKRATLDSWLSNEATVARTAILNNIGADGAWVSGADSGIVVASPSTDNPDYFYTWTRDSGLVLKTLVDLFRNGDTSLLSTIENYISAQAIVQGISNPSGDLSSGAGLGEPKFNVDETAYTGSWGRPQRDGPALRATAMIGFGQWLLDNGYTSTATDIVWPLVRNDLSYVAQYWNQTGYDLWEEVNGSSFFTIAVQHRALVEGSAFATAVGSSCSWCDSQAPEILCYLQSFWTGSFILANFDSSRSGKDANTLLGSIHTFDPEAACDDSTFQPCSPRALANHKEVVDSFRSIYTLNDGLSDSEAVAVGRYPEDTYYNGNPWFLCTLAAAEQLYDALYQWDKQGSLEVTDVSLDFFKALYSDAATGTYSSSSSTYSSIVDAVKTFADGFVSIVETHAASNGSMSEQYDKSDGEQLSARDLTWSYAALLTANNRRNSVVPASWGETSASSVPGTCAASSAIGTYSSVTVTSWPSIVATGGTTTTATPTGSGSVTSTSKTTATASKTSTSTSSTSCTTPTAVAVTFDLTATTTYGENIYLVGSISQLGDWETSDGIALSADKYTSSDPLWYVTVTLPAGESFEYKFIRIESDDSVEWESDPNREYTVPQACGTSTATVTDTWR

SEQ ID NO: 45775 - protein, 616 aa, Aspergillus awamori
ATLDSWLSNEATVARTAILNNIGADGAWVSGADSGIVVASPSTDNPDYFYTWTRDSGLVLKTLVDLFRNGDTSLLSTIENYISAQAIVQGISNPSGDLSSGAGLGEPKFNVDETAYTGSWGRPQRDGPALRATAMIGFGQWLLDNGYTSTATDIVWPLVRNDLSYVAQYWNQTGYDLWEEVNGSSFFTIAVQHRALVEGSAFATAVGSSCSWCDSQAPEILCYLQSFWTGSFILANFDSSRSGKDANTLLGSIHTFDPEAACDDSTFQPCSPRALANHKEVVDSFRSIYTLNDGLSDSEAVAVGRYPEDTYYNGNPWFLCTLAAAEQLYDALYQWDKQGSLEVTDVSLDFFKALYSDAATGTYSSSSSTYSSIVDAVKTFADGFVSIVETHAASNGSMSEQYDKSDGEQLAARDLTWSYAALLTANNRRNSVVPASWGETSASSVPGTCAATSAIGTYSSVTVTSWPSIVATGGTTTTATPTGSGSVTSTSKTTATASKTSTSTSSTSCTTPTAVAVTFDLTATTTYGENIYLVGSISQLGDWETSDGIALSADKYTSSDPLWYVTVTLPAGESFEYKFIRIESDDSVEWESDPNREYTVPQACGTSTATVTDTWR

SEQ ID NO: 45776 - protein, 616 aa, unidentified
ATLDSWLSNEATVARTAILNNIGADGAWVSGADSGIVVASPSTDNPDYFYTWTRDSGLVLKTLVDLFRNGDTSLLSTIENYISAQAIVQGISNPSGDLSSGAGLGEPKFNVDETAYTGSWGRPQRDGPALRATAMIGFGQWLLDNGYTSTATDIVWPLVRNDLSYVAQYWNQTGYDLWEEVNGSSFFTIAVQHRALVEGSAFATAVGSSCSWCDSQAPEILCYLQSFWTGSFILANFDSSRSGKDANTLLGSIHTFDPEAACDDSTFQPCSPRALANHKEVVDSFRSIYTLNDGLSDSEAVAVGRYPEDTYYNGNPWFLCTLAAAEQLYDALYQWDKQGSLEVTDVSLDFFKALYSDAATGTYSSSSSTYSSIVDAVKTFADGFVSIVETHAASNGSMSEQYDKSDGEQLSARDLTWSYAALLTANNRRNSVVPASWGETSASSVPGTCAASSAIGTYSSVTVTSWPSIVATGGTTTTATPTGSGSVTSTSKTTATASKTSTSTSSTSCTTPTAVAVTFDLTATTTYGENIYLVGSISQLGDWETSDGIALSADKYTSSDPLWYVTVTLPAGESFEYKFIRIESDDSVEWESDPNREYTVPQACGTSTATVTDTWR

SEQ ID NO: 45777 - protein, 614 aa, unidentified
ATLDSWLSNEATVARTAILNNIGADGAWVSGADSGIVVASPSTDNPTYFYTRDSGLVLKTLVDLFRNGDTSLLSTIENYISAQAIVQGISNPSGDLSSGAGLGEPKFNVDETAYTGSWGRPQRDGPALRATAMIGFGQWLLDNGYTSTATDIVWPLVRNDLSYVAQYWNQTGYDLWEEVNGSSFFTIAVQHRALVEGSAFATAVGSSCSWCDSQAPEILCYLQSFWTGSFILANFDSSRSGKDANTLLGSIHTFDPEAACDDSTFQPCSPRALANHKEVVDSFRSIYTLNDGLSDSEAVAVGRYPEDTYYNGNPWFLCTLAAAEQLYDALYQWDKQGSLEVTDVSLDFFKALYSDAATGTYSSSSSTYSSIVDAVKTFADGFVSIVETHAASNGSMSEQYDKSDGEQLSARDLTWSYAALLTANNRRNSVVPASWGETSASSVPGTCAATSAIGTYSSVTVTSWPSIVATGGTTTTATPTGSGSVTSTSKTTATASKTSTSTSSTSCTTPTAVAVTFDLTATTTYGENIYLVGSISQLGDWETSDGIALSADKYTSSDPLWYVTVTLPAGESFEYKFIRIESDDSVEWESDPNREYTVPQACGTSTATVTDTWR

SEQ ID NO: 45778 - protein, 598 aa, Aspergillus niger
WLSNEATVARTAILNNIGADGAWVSGADSGIVVASPSTDNPDYFYTWTRDSGLVLKTLVDLFRNGDTSLLSTIENYISAQAIVQGISNPSGDLSSGAGLGEPKFNVDETAYTGSWGRPQRDGPALRATAMIGFGQWLLDNGYTSTATDIVWPLVRNDLSYVAQYWNQTGYDLWEEVNGSSFFTIAVQHRALVEGSAFATAVGSSCSWCDSQAPEILCYLQSFWTGSFILANFDSSRSGKDANTLLGSIHTFDPEAACDDSTFQPCSPRALANHKEVDDSFRSIYTLNDGLSDSEAVAVGRYPEDTYYNGNPWFLCTLAAAEQLYDALYQWDKQGSLEVTDVSLDFFKALYSDAATGTYSSSSSTYSSIVDAVKTFADGFVSIVETHAASNGSMSEQYDKSDGEQLSARDLTWSYAALLTANNRRNSVVPASWGETSASSVPGTCAATSAIGTYSSVTVTSWPSIVATGGTTTTATPTGSGSVTSTSKTTATASKTSTSTSSTSCTTPTAVAVTFDLTATTTYGENIYLVGSISQLGDWETSDGIALSADKYTSSDPLWYVTVTLPAGESFEYKFIRIESDDSVEWESDPNREYTVPQA

SEQ ID NO: 45779 - protein, 524 aa, Chimeric
MSFRSLLALSGLVCTGLANVISKRATLDSWLSNEATVARTAILNNIGADGAWVSGADSGIVVASPSTDNPDYFYTWTRDSGLVLKTLVDLFRNGDTSLLSTIENYISAQAIVQGISNPSGDLSSGAGLGEPKFNVDETAYTGSWGRPQRDGPALRATAMIGFGQWLLDNGYTSTATDIVWPLVRNDLSYVAQYWNQTGYDLWEEVNGSSFFTIAVQHRALVEGSAFATAVGSSCSWCDSQAPEILCYLQSFWTGSFILANFDSSRSGKDANTLLGSIHTFDPEAACDDSTFQPCSPRALANHKEVVDSFRSIYTLNDGLSDSEAVAVGRYPEDTYYNGNPWFLCTLAAAEQLYDALYQWDKQGSLEVTDVSLDFFKALYSDAATGTYSSSSSTYSSIVDAVKTFADGFVSIVETHAASNGSMSEQYDKSDGEQLSARDLTWSYAALLTANNRRNSVVPASWGETSASSVPGTCAATSAIGTYSSVTVTSWPSIVATGGTTTTATPTGSGSVTSTSKTTATASKS

SEQ ID NO: 45780 - protein, 500 aa, Chimeric
ATLDSWLSNEATVARTAILNNIGADGAWVSGADSGIVVASPSTDNPDYFYTWTRDSGLVLKTLVDLFRNGDTSLLSTIENYISAQAIVQGISNPSGDLSSGAGLGEPKFNVDETAYTGSWGRPQRDGPALRATAMIGFGQWLLDNGYTSTATDIVWPLVRNDLSYVAQYWNQTGYDLWEEVNGSSFFTIAVQHRALVEGSAFATAVGSSCSWCDSQAPEILCYLQSFWTGSFILANFDSSRSGKDANTLLGSIHTFDPEAACDDSTFQPCSPRALANHKEVVDSFRSIYTLNDGLSDSEAVAVGRYPEDTYYNGNPWFLCTLAAAEQLYDALYQWDKQGSLEVTDVSLDFFKALYSDAATGTYSSSSSTYSSIVDAVKTFADGFVSIVETHAASNGSMSEQYDKSDGEQLSARDLTWSYAALLTANNRRNSVVPASWGETSASSVPGTCAATSAIGTYSSVTVTSWPSIVATGGTTTTATPTGSGSVTSTSKTTATASKS

SEQ ID NO: 45781 - protein, 640 aa, unidentified
MSFRSLLALSGLVCTGLANVISKRATLDSWLSNEATVARTAILNNIGADGAWVSGADSGIVVASPSTDNPDYFYTWTRDSGLVLKTLVDLFRNGDTSLLSTIENYISAQAIVQGISNPSGDLSSGAGLGEPKFNVDETAYTGSWGRPQRDGPALRATAMIGFRQWLLDNGYTSTATDIVWPLVRNDLSYVAQYWNQTGYDLWEEVNGSSFFTIAVQHRALVEGSAFATAVGSSCSWCDSQAPEILCYLQSFWTGSFILANFDSSRSGKDANTLLGSIHTFDPEAACDDSTFQPCSPRALANHKEVVDSFRSIYTLNDGLSDSEAVAVGRYPEDTYYNGNPWFLCTLAAAEQLYDALYQWDKQGSLEVTDVSLDFFKALYSDAATGTYSSSSSTYSSIVDAVKTFADGFVSIVETHAASNGSMSEQYDKSDGEQLSARDLTWSYAALLTANNRRNSVVPASWGETSASSVPGTCAATSAIGTYSSVTVTSWPSIVATGGTTTTATPTGSGSVTSTSKTTATASKTSTSTSSTSCTTPTAVAVTFDLTATTTYGENIYLVGSISQLGDWETSDGIALSADKYTSGDPLWYVTVTLPAGESFEYKFIRIESDDSVEWESDPNREYTVPQACGTSTATVTDTWR

SEQ ID NO: 45782 - protein, 616 aa, Aspergillus awamori
ATLDSWLSNEATVARTAILCNIGADGCWVSGADSGIVVASPSTDNPDYFYTWTRDSGLVLKTLVDLFRNGDTSLLSTIENYISAQAIVQGISNPSGDLSSGAGLGEPKFNVDETAYTGSWGRPQRDGPALRATAMIGFGQWLLDNGYTSTATDIVWPLVRNDLSYVAQYWNQTGYDLWEEVNGSSFFTIAVQHRALVEGSAFATAVGSSCSWCDSQAPEILCYLQSFWTGSFILANFDSSRSGKDANTLLGSIHTFDPEAACDDSTFQPCSPRALANHKEVVDSFRSIYTLNDGLSDSEAVAVGRYPEDTYYNGNPWFLCTLAAAEQLYDALYQWDKQGSLEVTDVSLDFFKALYSDAATGTYSSSSSTYSSIVDAVKTFADGFVSIVETHAASNGSMSEQYDKSDGEQLSARDLTWSYAALLTANNRRNSVVPASWGETSASSVPGTCAATSAIGTYSSVTVTSWPSIVATGGTTTTATPTGSGSVTSTSKTTATASKTSTSTSSTSCTTPTAVAVTFDLTATTTYGENIYLVGSISQLGDWETSDGIALSADKYTSSDPLWYVTVTLPAGESFEYKFIRIESDDSVEWESDPNREYTVPQACGTSTATVTDTWR

SEQ ID NO: 45783 - protein, 616 aa, unidentified
ATLDSWLSNEATVARTAILNNIGADGAWVSGADSGIVVASPSTDNPDYFYTWTRDSGLVLKTLVDLFRNGDTSLLSTIENYISAQAIVQGISNPSGDLSSGAGLGEPKFNVDETAYTGSWGRPQRDGPALRATAMIGFRQWLLDNGYTSTATDIVWPLVRNDLSYVAQYWNQTGYDLWEEVNGSSFFTIAVQHRALVEGSAFATAVGSSCSWCDSQAPEILCYLQSFWTGSFILANFDSSRSGKDANTLLGSIHTFDPEAACDDSTFQPCSPRALANHKEVVDSFRSIYTLNDGLSDSEAVAVGRYPEDTYYNGNPWFLCTLAAAEQLYDALYQWDKQGSLEVTDVSLDFFKALYSDAATGTYSSSSSTYSSIVDAVKTFADGFVSIVETHAASNGSMSEQYDKSDGEQLSARDLTWSYAALLTANNRRNSVVPASWGETSASSVPGTCAATSAIGTYSSVTVTSWPSIVATGGTTTTATPTGSGSVTSTSKTTATASKTSTSTSSTSCTTPTAVAVTFDLTATTTYGENIYLVGSISQLGDWETSDGIALSADKYTSGDPLWYVTVTLPAGESFEYKFIRIESDDSVEWESDPNREYTVPQACGTSTATVTDTWR

SEQ ID NO: 45784 - protein, 621 aa, Synthetic construct
ATLDSWLSNEATVARTAILNNIGADGAWVSGADSGIVVASPSTDNPDYFYTWTRDSGLVLKTLVDLFRNGDTSLLSTIENYISAQAIVQGISNPSGDLSSGAGLGEPKFNVDETAYTGSWGRPQRDGPALRATAMIGFGQWLLDNGYTSTATDIVWPLVRNDLSYVAQYWNQTGYDLWEEVNGSSFFTIAVQHRALVEGSAFATAVGSSCSWCDSQAPEILCYLQSFWTGSFILANFDSSRSGKDANTLLGSIHTFDPEAACDDSTFQPCSPRALANHKEVVDSFRSIYTLNDGLSDSEAVAVGRYPEDTYNGNGNSQGNPWFLCTLAAAEQLYDALYQWDKQGSLEVTDVSLDFFKALYSDAATGTYSSSSSTYSSIVDAVKTFADGFVSIVETHAASNGSMSEQYDKSDGEQLSARDLTWSYAALLTANNRRNSVVPASWGETSASSVPGTCAATSAIGTYSSVTVTSWPSIVATGGTTTTATPTGSGSVTSTSKTTATASKTSTSTSSTSCTTPTAVAVTFDLTATTTYGENIYLVGSISQLGDWETSDGIALSADKYTSSDPLWYVTVTLPAGESFEYKFIRIESDDSVEWESDPNREYTVPQACGTSTATVTDTWR

SEQ ID NO: 45785 - protein, 616 aa, Aspergillus niger
ATLDSWLSNEATVARTAILNNIGADGAWVSGADSGIVVASPSTDNPDYFYTWTRDSGLVLKTLVDLFRNGDTSLLSTEINYISAQAIVQGISNPSGDLSSGAGLGEPKFNVDETAYTGSWGRPQRDGPALRATAMIGFGQWLLDNGYTSTATDIVWPLVRNDLSYVAQYWNQTGYDLWEEVNGSSFFTIAVQHRALVEGSAFATAVGSSCSWCDSQAPEILCYLQSFWTGSFILANFDSSRSGKDANTLLGSIHTFDPEAACDDSTFQPCSPRALANHKEVVDSFRSIYTLNDGLSDSEAVAVGRYPEDTYYNGNPWFLCTLAAAEQLYDALYQWDKQGSLEVTDVSLDFFKALYSDAATGTYSSSSSTYSSIVDAVKTFADGFVSIVETHAASNGSMSEQYDKSDGEQLSARDLTWSYAALLTANNRRNSVVPASWGETSASSVPGTCAATSAIGTYSSVTVTSWPSIVATGGTTTTATPTGSGSVTSTSKTTATASKTSTSTSSTSCTTPTAVAVTFDLTATTTYGENIYLVGSISQLGDWETSDGIALSADKYTSSDPLWYVTVTLPAGESFEYKFIRIESDDSVEWESDPNREYTVPQACGTSTATVTDTWR

SEQ ID NO: 45786 - protein, 530 aa, Aspergillus niger
MSFRSLLALSGLVCTGLANVISKRATLDSWLSNEATVARTAILNNIGADGAWVSGADSGIVVASPSTDNPDYFYTWTRDSGLVLKTLVDLFRNGDTSLLSTIENYISAQAIVQGISNPSGDLSSGAGLGEPKFNVDETAYTGSWGRPQRDGPALRATAMIGFGQWLLDNGYTSTATDIVWPLVRNDLSYVAQYWNQTGYDLWEEVNGSSFFTIAVQHRALVEGSAFATAVGSSCSWCDSQAPEILCYLQSFWTGSFILANFDSSRSGKDANTLLGSIHTFDPEAACDDSTFQPCSPRALANHKEVVDSFRSIYTLNDGLSDSEAVAVGRYPEDTYYNGNPWFLCTLAAAEQLYDALYQWDKQGSLEVTDVSLDFFKALYSDAATGTYSSSSSTYSSIVDAVKTFADGFVSIVETHAASNGSMSEQYDKSDGEQLSARDLTWSYAALLTANNRRNSVVPASWGETSASSVPGTCAATSAIGTYSSVTVTSWPSIVATGGTTTTATPTGSGSVTSTSKTTATASKTSTTTRS

SEQ ID NO: 45787 - protein, 506 aa, Aspergillus niger
ATLDSWLSNEATVARTAILNNIGADGAWVSGADSGIVVASPSTDNPDYFYTWTRDSGLVLKTLVDLFRNGDTSLLSTIENYISAQAIVQGISNPSGDLSSGAGLGEPKFNVDETAYTGSWGRPQRDGPALRATAMIGFGQWLLDNGYTSTATDIVWPLVRNDLSYVAQYWNQTGYDLWEEVNGSSFFTIAVQHRALVEGSAFATAVGSSCSWCDSQAPEILCYLQSFWTGSFILANFDSSRSGKDANTLLGSIHTFDPEAACDDSTFQPCSPRALANHKEVVDSFRSIYTLNDGLSDSEAVAVGRYPEDTYYNGNPWFLCTLAAAEQLYDALYQWDKQGSLEVTDVSLDFFKALYSDAATGTYSSSSSTYSSIVDAVKTFADGFVSIVETHAASNGSMSEQYDKSDGEQLSARDLTWSYAALLTANNRRNSVVPASWGETSASSVPGTCAATSAIGTYSSVTVTSWPSIVATGGTTTTATPTGSGSVTSTSKTTATASKTSTTTRS

SEQ ID NO: 45788 - protein, 640 aa, unidentified
MSFRSLLALSGLVCTGLANVISKRATLDSWLSNEATVARTAILSNIGADGAWVSGADSGIVVASPSTDNPDYFYTWTRDSGLVLKTLVDLFRNEDTSLLSTIENYISAQAIVQGISNPSGDLSSGAGLGEPKFNVDETAYTGSWGRPQRDGPALRATAMIGFGQWLLDNGYTSTATDIVWPLVRNDLSYVAQYWNQTGYDLWEEVNGSSFFTIAVQHRALVEGSAFATAVGSSCSWCDSQAPEILCYLQSFWTGSFILANFDSSRSGKDANTPLGSIHTFDPEAACDDSTFQPCSPRALANHKEVVDSFRSIYTLNDGLSDSEAVAVGRYPEDTYYNGNPWFLCTLAAAEQLYDALYQWDKQGSLEVTDVSLDFFKALYSDAATGTYSSSSSTYSSIVDAVKTFADGFVSIVETHAASNGSMSEQYDKSDGEQLSARDLTWSYAALLTANNRRNSVVPASWGETSASSVPGTCAATSAIGTYSSVTVTSWPSIVATGGTTTTATPTGSGSVTSTSKTTATASKTSTSTSSTSCTTPTAVAVTFDLTATTTYGENIYLVGSISQLGDWETSDGIALSADKYTSSDPLWYVTVTLPAGESFEYKFIRIESDDSVEWESDPNREYTVPQACGTSTATVTDTWR

SEQ ID NO: 45789 - protein, 630 aa, Aspergillus niger
MSFRSLLALSGLVCTGLANVISKRATLDSWLSNEATVARTAILNNIGADGAWVSGADSGIVVASPSTDNPDYFYTWTRDSGLVLKTLVDLFRNGDWSLLSTIENYISAQAIVQGISNPSGDLSSGAGLGEPKFNVDETAYTGSWGRPQRDGFGQWLLDNGYTSTATDIVWPLVRNDLSYVAQTWNQTGYDLWEEVNGSSFFTIAVQHRALVEGSAFATAVGSSCSWCDSQAPEILCYLQSFWTGSFILANFDSSRSGKDANTLLGSIHTFDPEAACDDSTFQPCSPRALANHKEVVDSFRSIYTLNNGLSDSEAVAVGRYPEDTYYNGNPWFLCTLAAAEQLYDALYQWDKQGSLEVTDVSLDFFKALYSDAATGTYSSSSSTYSSIVDAVKTFADGFVSIVETHAASNGSMSEQYDKSDGEQLSARDLTWSYAALLTANNRRNSVVPASWGETSASSVPGTCAATSAIGTYSSVTVTSWPSIVATGGTTTTATPTGSGSVTSTSKTTATASKTSTSTSSTSCTTPTAVAVTFDLTATTTYGENIYLVGSISQLGDWETSDGIALSADKYTSSDPLWYVTVTLPAGESFEYKFIRIESDDSVEWESDPNREYTVPQACGTSTATVTDTWR

SEQ ID NO: 45790 - protein, 616 aa, Aspergillus awamori
ATLDSWLSNEATVARTAILNNIGADGAWVPGADSGIVVASPSTDNPDYFYTWTRDSGLVLKTLVDLFRNGDTSLLSTIENYISAQAIVQGISNPSGDLSSGAGLGEPKFNVDETAYTGSWGRPQRDGPALRATAMIAFGQWLLDNGYTSTATDIVWPLVRNDLSYVAQYWNQTGYDLWEEVNGSSFFTIAVQHRALVEGSAFATAVGSSCSWCDSQAPEILCYLQSFWTGSFILANFDSSRSGKDANTLLGSIHTFDPEAACDDSTFQPCSPRALANHKEVVDSFRSIYTLNDGLSDSEAVAVGRYPEDTYYNGNPWFLCTLAAAEQLYDALYQWDKQGSLEVTDVSLDFFKALYSDAATGTYSSSSSTYSSIVDAVKTFADGFVSIVETHAASNGSMSEQYDKSDGEQLAARDLTWSYAALLTANNRRNSVVPASWGETSASSVPGTCAATSAIGTYSSVTVTSWPSIVATGGTTTTATPTGSGSVTSTSKTTATASKTSTSTSSTSCTTPTAVAVTFDLTATTTYGENIYLVGSISQLGDWETSDGIALSADKYTSSDPLWYVTVTLPAGESFEYKFIRIESDDSVEWESDPNREYTVPQACGTSTATVTDTWR

SEQ ID NO: 45791 - protein, 616 aa, Synthetic construct
ATLDSWLSNEATVARTAILCNIGADGCWVSGADSGIVVASPSTDNPDYFYTWTRDSGLVLKTLVDLFRNGDTSLLSTIENYISAQAIVQGISNPSGDLSSGAGLGEPKFNVDETAYTGSWGRPQRDGPALRATAMIGFGQWLLDNGYTSTATDIVWPLVRNDLSYVAQYWNQTGYDLWEEVNGSSFFTIAVQHRALVEGSAFATAVGSSCSWCDSQAPEILCYLQSFWTGSFILANFDSSRSGKDANTLLGSIHTFDPEAACDDSTFQPCSPRALANHKEVVDSFRSIYTLNDGLSDSEAVAVGRYPEDTYYNGNPWFLCTLAAAEQLYDALYQWDKQGSLEVTDVSLDFFKALYSDAATGTYSSSSSTYSSIVDAVKTFADGFVSIVETHAASNGSMSEQYDKSDGEQLAARDLTWSYAALLTANNRRNSVVPASWGETSASSVPGTCAATSAIGTYSSVTVTSWPSIVATGGTTTTATPTGSGSVTSTSKTTATASKTSTSTSSTSCTTPTAVAVTFDLTATTTYGENIYLVGSISQLGDWETSDGIALSADKYTSSDPLWYVTVTLPAGESFEYKFIRIESDDSVEWESDPNREYTVPQACGTSTATVTDTWR

SEQ ID NO: 45792 - protein, 616 aa, unidentified
ATLDSWLSNEATVARTAILSNIGADGAWVSGADSGIVVASPSTDNPDYFYTWTRDSGLVLKTLVDLFRNEDTSLLSTIENYISAQAIVQGISNPSGDLSSGAGLGEPKFNVDETAYTGSWGRPQRDGPALRATAMIGFGQWLLDNGYTSTATDIVWPLVRNDLSYVAQYWNQTGYDLWEEVNGSSFFTIAVQHRALVEGSAFATAVGSSCSWCDSQAPEILCYLQSFWTGSFILANFDSSRSGKDANTPLGSIHTFDPEAACDDSTFQPCSPRALANHKEVVDSFRSIYTLNDGLSDSEAVAVGRYPEDTYYNGNPWFLCTLAAAEQLYDALYQWDKQGSLEVTDVSLDFFKALYSDAATGTYSSSSSTYSSIVDAVKTFADGFVSIVETHAASNGSMSEQYDKSDGEQLSARDLTWSYAALLTANNRRNSVVPASWGETSASSVPGTCAATSAIGTYSSVTVTSWPSIVATGGTTTTATPTGSGSVTSTSKTTATASKTSTSTSSTSCTTPTAVAVTFDLTATTTYGENIYLVGSISQLGDWETSDGIALSADKYTSSDPLWYVTVTLPAGESFEYKFIRIESDDSVEWESDPNREYTVPQACGTSTATVTDTWR

SEQ ID NO: 45793 - protein, 606 aa, Aspergillus niger
ATLDSWLSNEATVARTAILNNIGADGAWVSGADSGIVVASPSTDNPDYFYTWTRDSGLVLKTLVDLFRNGDWSLLSTIENYISAQAIVQGISNPSGDLSSGAGLGEPKFNVDETAYTGSWGRPQRDGFGQWLLDNGYTSTATDIVWPLVRNDLSYVAQTWNQTGYDLWEEVNGSSFFTIAVQHRALVEGSAFATAVGSSCSWCDSQAPEILCYLQSFWTGSFILANFDSSRSGKDANTLLGSIHTFDPEAACDDSTFQPCSPRALANHKEVVDSFRSIYTLNNGLSDSEAVAVGRYPEDTYYNGNPWFLCTLAAAEQLYDALYQWDKQGSLEVTDVSLDFFKALYSDAATGTYSSSSSTYSSIVDAVKTFADGFVSIVETHAASNGSMSEQYDKSDGEQLSARDLTWSYAALLTANNRRNSVVPASWGETSASSVPGTCAATSAIGTYSSVTVTSWPSIVATGGTTTTATPTGSGSVTSTSKTTATASKTSTSTSSTSCTTPTAVAVTFDLTATTTYGENIYLVGSISQLGDWETSDGIALSADKYTSSDPLWYVTVTLPAGESFEYKFIRIESDDSVEWESDPNREYTVPQACGTSTATVTDTWR

SEQ ID NO: 45794 - protein, 616 aa, Aspergillus awamori
ATLDSWLSNEATVARTAILCNIGADGCWVPGADSGIVVASPSTDNPDYFYTWTRDSGLVLKTLVDLFRNGDTSLLSTIENYISAQAIVQGISNPSGDLSSGAGLGEPKFNVDETAYTGSWGRPQRDGPALRATAMIAFGQWLLDNGYTSTATDIVWPLVRNDLSYVAQYWNQTGYDLWEEVNGSSFFTIAVQHRALVEGSAFATAVGSSCSWCDSQAPEILCYLQSFWTGSFILANFDSSRSGKDANTLLGSIHTFDPEAACDDSTFQPCSPRALANHKEVVDSFRSIYTLNDGLSDSEAVAVGRYPEDTYYNGNPWFLCTLAAAEQLYDALYQWDKQGSLEVTDVSLDFFKALYSDAATGTYSSSSSTYSSIVDAVKTFADGFVSIVETHAASNGSMSEQYDKSDGEQLSARDLTWSYAALLTANNRRNSVVPASWGETSASSVPGTCAATSAIGTYSSVTVTSWPSIVATGGTTTTATPTGSGSVTSTSKTTATASKTSTSTSSTSCTTPTAVAVTFDLTATTTYGENIYLVGSISQLGDWETSDGIALSADKYTSSDPLWYVTVTLPAGESFEYKFIRIESDDSVEWESDPNREYTVPQACGTSTATVTDTWR

SEQ ID NO: 45795 - protein, 621 aa, Aspergillus awamori
ATLDSWLSNEATVARTAILNNIGADGAWVPGADSGIVVASPSTDNPDYFYTWTRDSGLVLKTLVDLFRNGDTSLLSTIENYISAQAIVQGISNPSGDLSSGAGLGEPKFNVDETAYTGSWGRPQRDGPALRATAMIAFGQWLLDNGYTSTATDIVWPLVRNDLSYVAQYWNQTGYDLWEEVNGSSFFTIAVQHRALVEGSAFATAVGSSCSWCDSQAPEILCYLQSFWTGSFILANFDSSRSGKDANTLLGSIHTFDPEAACDDSTFQPCSPRALANHKEVVDSFRSIYTLNDGLSDSEAVAVGRYPEDTYNGNGNSQGNPWFLCTLAAAEQLYDALYQWDKQGSLEVTDVSLDFFKALYSDAATGTYSSSSSTYSSIVDAVKTFADGFVSIVETHAASNGSMSEQYDKSDGEQLSARDLTWSYAALLTANNRRNSVVPASWGETSASSVPGTCAATSAIGTYSSVTVTSWPSIVATGGTTTTATPTGSGSVTSTSKTTATASKTSTSTSSTSCTTPTAVAVTFDLTATTTYGENIYLVGSISQLGDWETSDGIALSADKYTSSDPLWYVTVTLPAGESFEYKFIRIESDDSVEWESDPNREYTVPQACGTSTATVTDTWR

SEQ ID NO: 45796 - protein, 616 aa, Aspergillus niger
ATLDSWLSNEATVARTAILNNIGADGAWVSGADSGIVVASPSTDNPDYFYTWTRDSGLVLKTLVDLFRNGDTSLLSTIENYISAQAIVQGISNPSGKLKKGIGLGEPKFNVDETAYTGSWGRPQRDGPALRATAMIGFGQWLLDNGYTSTATDIVWPLVRNDLSYVAQYWNQTGYDLWEEVNGSSFFTIAVQHRALVEGSAFATAVGSSCSWCDSQAPEILCYLQSFWTGSFILANFDSSRSGKDANTLLGSIHTFDPEAACDDSTFQPCSPRALANHKEVVDSFRSIYTLNDGLSDSEAVAVGRYPEDTYYNGNPWFLCTLAAAEQLYDALYQWDKQGSLEVTDVSLDFFKALYSDAATGTYSSSSSTYSSIVDAVKTFADGFVSIVETHAASNGSMSEQYDKSDGEQLSARDLTWSYAALLTANNRRNSVVPASWGETSASSVPGTCAATSAIGTYSSVTVTSWPSIVATGGTTTTATPTGSGSVTSTSKTTATASKTSTSTSSTSCTTPTAVAVTFDLTATTTYGENIYLVGSISQLGDWETSDGIALSADKYTSSDPLWYVTVTLPAGESFEYKFIRIESDDSVEWESDPNREYTVPQACGTSTATVTDTWR

SEQ ID NO: 45797 - protein, 639 aa, Aspergillus niger
MSFRSLLALSGLVCTGLANVISKRATWDSWLSNEATVARTAILNNIGADGAWVSGADSGIVVASPSTDNPDYFYTWTRDSGLVLKTLVDLFRNGDTSLLSTIENYISAQAIVQGISNPSGDLSSGAGLGEPKFNVDETAYTGSWGRPQRDGPALRATAMIGFGQWLLDNGYTSTATDIVWPLVRNDLSYVAQYWNQTGYDLWEVNGSSFFTIAVQHRALVEGSAFATAVGSSCSWCDSQAPEILCYLQSFWTGSFILANFDSSRSAKDANTLLLGSIHTFDPEAACDDSTFQPCSPRALANHKEVVDSFRSIYTLNDGLSDSEAVAVGRYPEDTYYNGNPWFLCTLAAAEQLYDALYQWDKQGSLEVTDVSLDFFKALYSDATGTYSSSSSTYSSIVDAVKTFADGFVSIVETHAASNGSMSEQYDKSDGEQLSARDLTWSYAALLTANNRRNVVPSASWGETSASSVPGTCAATSAIGTYSSVTVTSWPSIVATGGTTTTATPTGSGSVTSTSKTTATASKTSTSTSSTSCTTPTAVAVTFDLTATTTYGENIYLVGSISQLGDWETSDGIALSADKYTSSDPLWYVTVTLPAGESFEYKFIRIESDDSVEWESDPNREYTVPQACGTSTATVTDTWR

SEQ ID NO: 45798 - protein, 621 aa, Aspergillus niger
NVISKRATWDSWLSNEATVARTAILNNIGADGAWVSGADSGIVVASPSTDNPDYFYTWTRDSGLVLKTLVDLFRNGDTSLLSTIENYISAQAIVQGISNPSGDLSSGAGLGEPKFNVDETAYTGSWGRPQRDGPALRATAMIGFGQWLLDNGYTSTATDIVWPLVRNDLSYVAQYWNQTGYDLWEVNGSSFFTIAVQHRALVEGSAFATAVGSSCSWCDSQAPEILCYLQSFWTGSFILANFDSSRSAKDANTLLLGSIHTFDPEAACDDSTFQPCSPRALANHKEVVDSFRSIYTLNDGLSDSEAVAVGRYPEDTYYNGNPWFLCTLAAAEQLYDALYQWDKQGSLEVTDVSLDFFKALYSDATGTYSSSSSTYSSIVDAVKTFADGFVSIVETHAASNGSMSEQYDKSDGEQLSARDLTWSYAALLTANNRRNVVPSASWGETSASSVPGTCAATSAIGTYSSVTVTSWPSIVATGGTTTTATPTGSGSVTSTSKTTATASKTSTSTSSTSCTTPTAVAVTFDLTATTTYGENIYLVGSISQLGDWETSDGIALSADKYTSSDPLWYVTVTLPAGESFEYKFIRIESDDSVEWESDPNREYTVPQACGTSTATVTDTWR

SEQ ID NO: 45799 - protein, 621 aa, Aspergillus awamori
ATLDSWLSNEATVARTAILCNIGADGCWVSGADSGIVVASPSTDNPDYFYTWTRDSGLVLKTLVDLFRNGDTSLLSTIENYISAQAIVQGISNPSGDLSSGAGLGEPKFNVDETAYTGSWGRPQRDGPALRATAMIGFGQWLLDNGYTSTATDIVWPLVRNDLSYVAQYWNQTGYDLWEEVNGSSFFTIAVQHRALVEGSAFATAVGSSCSWCDSQAPEILCYLQSFWTGSFILANFDSSRSGKDANTLLGSIHTFDPEAACDDSTFQPCSPRALANHKEVVDSFRSIYTLNDGLSDSEAVAVGRYPEDTYNGNGNSQGNPWFLCTLAAAEQLYDALYQWDKQGSLEVTDVSLDFFKALYSDAATGTYSSSSSTYSSIVDAVKTFADGFVSIVETHAASNGSMSEQYDKSDGEQLAARDLTWSYAALLTANNRRNSVVPASWGETSASSVPGTCAATSAIGTYSSVTVTSWPSIVATGGTTTTATPTGSGSVTSTSKTTATASKTSTSTSSTSCTTPTAVAVTFDLTATTTYGENIYLVGSISQLGDWETSDGIALSADKYTSSDPLWYVTVTLPAGESFEYKFIRIESDDSVEWESDPNREYTVPQACGTSTATVTDTWR

SEQ ID NO: 45800 - protein, 615 aa, Aspergillus niger
ATWDSWLSNEATVARTAILNNIGADGAWVSGADSGIVVASPSTDNPDYFYTWTRDSGLVLKTLVDLFRNGDTSLLSTIENYISAQAIVQGISNPSGDLSSGAGLGEPKFNVDETAYTGSWGRPQRDGPALRATAMIGFGQWLLDNGYTSTATDIVWPLVRNDLSYVAQYWNQTGYDLWEVNGSSFFTIAVQHRALVEGSAFATAVGSSCSWCDSQAPEILCYLQSFWTGSFILANFDSSRSAKDANTLLLGSIHTFDPEAACDDSTFQPCSPRALANHKEVVDSFRSIYTLNDGLSDSEAVAVGRYPEDTYYNGNPWFLCTLAAAEQLYDALYQWDKQGSLEVTDVSLDFFKALYSDATGTYSSSSSTYSSIVDAVKTFADGFVSIVETHAASNGSMSEQYDKSDGEQLSARDLTWSYAALLTANNRRNVVPSASWGETSASSVPGTCAATSAIGTYSSVTVTSWPSIVATGGTTTTATPTGSGSVTSTSKTTATASKTSTSTSSTSCTTPTAVAVTFDLTATTTYGENIYLVGSISQLGDWETSDGIALSADKYTSSDPLWYVTVTLPAGESFEYKFIRIESDDSVEWESDPNREYTVPQACGTSTATVTDTWR

SEQ ID NO: 45801 - protein, 528 aa, Aspergillus niger
MSFRSLLALSGLVCTGLANVISKRATLDSWLSNEATVARTAILNNIGADGAWVSGADSGIVVASPSTDNPDYFYTWTRDSGLVLKTLVDLFRNGDTSLLSTIENYISAQAIVQGISNPSGDLSSGAGLGEPKFNVDETAYTGSWGRPQRDGPALRATAMIGFGQWLLDNGYTSTATDIVWPLVRNDLSYVAQYWNQTGYDLWEEVNGSSFFTIAVQHRALVEGSAFATAVGSSCSWCDSQAPEILCYLQSFWTGSFILANFDSSRSGKDANTLLGSIHTFDPEAACDDSTFQPCSPRALANHKEVVDSFRSIYTLNDGLSDSEAVAVGRYPEDTYYNGNPWFLCTLAAAEQLYDALYQWDKQGSLEVTDVSLDFFKALYSDAATGTYSSSSSTYSSIVDAVKTFADGFVSIVETHAASNGSMSEQYDKSDGEQLSARDLTWSYAALLTANNRRNSVVPASWGETSASSVPGTCAATSAIGTYSSVTVTSWPSIVATGGTTTTATPTGSGSVTSTSKTTATASQEGISS

SEQ ID NO: 45802 - protein, 504 aa, Aspergillus niger
ATLDSWLSNEATVARTAILNNIGADGAWVSGADSGIVVASPSTDNPDYFYTWTRDSGLVLKTLVDLFRNGDTSLLSTIENYISAQAIVQGISNPSGDLSSGAGLGEPKFNVDETAYTGSWGRPQRDGPALRATAMIGFGQWLLDNGYTSTATDIVWPLVRNDLSYVAQYWNQTGYDLWEEVNGSSFFTIAVQHRALVEGSAFATAVGSSCSWCDSQAPEILCYLQSFWTGSFILANFDSSRSGKDANTLLGSIHTFDPEAACDDSTFQPCSPRALANHKEVVDSFRSIYTLNDGLSDSEAVAVGRYPEDTYYNGNPWFLCTLAAAEQLYDALYQWDKQGSLEVTDVSLDFFKALYSDAATGTYSSSSSTYSSIVDAVKTFADGFVSIVETHAASNGSMSEQYDKSDGEQLSARDLTWSYAALLTANNRRNSVVPASWGETSASSVPGTCAATSAIGTYSSVTVTSWPSIVATGGTTTTATPTGSGSVTSTSKTTATASQEGISS

SEQ ID NO: 45803 - protein, 503 aa, Aspergillus niger
MSFRSLLALSGLVCTGLANVISKRATLDSWLSNEATVARTAILNNIGADGAWVSGADSGIVVASPSTDNPDYFYTWTRDSGLVLKTLVDLFRNGDTSLLSTIENYISAQAIVQGISNPSGDLSSGAGLGEPKFNVDETAYTGSWGRPQRDGPALRATAMIGFGQWLLDNGYTSTATDIVWPLVRNDLSYVAQYWNQTGYDLWEVNGSSFFTIAVQHRALVEGSAFATAVGSSCSWCDSQAPEILCYLQSFWTGSFILANFDSSRSAKDANTLLLGSIHTFDPEAACDDSTFQPCSPRALANHKEVVDSFRSIYTLNDGLSDSEAVAVGRYPEDTYYNGNPWFLCTLAAAEQLYDALYQWDKQGSLEVTDVSLDFFKALYSDATGTYSSSSSTYSSIVDAVKTFADGFVSIVETHAASNGSMSEQYDKSDGEQLSARDLTWSYAALLTANNRRNVVPSASWGETSASSVPGTCAATSAIGTYSSVTVTSWPSIVATGGTTTTAS

SEQ ID NO: 45804 - protein, 479 aa, Aspergillus niger
ATLDSWLSNEATVARTAILNNIGADGAWVSGADSGIVVASPSTDNPDYFYTWTRDSGLVLKTLVDLFRNGDTSLLSTIENYISAQAIVQGISNPSGDLSSGAGLGEPKFNVDETAYTGSWGRPQRDGPALRATAMIGFGQWLLDNGYTSTATDIVWPLVRNDLSYVAQYWNQTGYDLWEVNGSSFFTIAVQHRALVEGSAFATAVGSSCSWCDSQAPEILCYLQSFWTGSFILANFDSSRSAKDANTLLLGSIHTFDPEAACDDSTFQPCSPRALANHKEVVDSFRSIYTLNDGLSDSEAVAVGRYPEDTYYNGNPWFLCTLAAAEQLYDALYQWDKQGSLEVTDVSLDFFKALYSDATGTYSSSSSTYSSIVDAVKTFADGFVSIVETHAASNGSMSEQYDKSDGEQLSARDLTWSYAALLTANNRRNVVPSASWGETSASSVPGTCAATSAIGTYSSVTVTSWPSIVATGGTTTTAS

SEQ ID NO: 45805 - protein, 503 aa, Aspergillus niger
MSFRSLLALSGLVCTGLANVISKRATWDSWLSNEATVARTAILNNIGADGAWVSGADSGIVVASPSTDNPDYFYTWTRDSGLVLKTLVDLFRNGDTSLLSTIENYISAQAIVQGISNPSGDLSSGAGLGEPKFNVDETAYTGSWGRPQRDGPALRATAMIGFGQWLLDNGYTSTATDIVWPLVRNDLSYVAQYWNQTGYDLWEVNGSSFFTIAVQHRALVEGSAFATAVGSSCSWCDSQAPEILCYLQSFWTGSFILANFDSSRSAKDANTLLLGSIHTFDPEAACDDSTFQPCSPRALANHKEVVDSFRSIYTLNDGLSDSEAVAVGRYPEDTYYNGNPWFLCTLAAAEQLYDALYQWDKQGSLEVTDVSLDFFKALYSDATGTYSSSSSTYSSIVDAVKTFADGFVSIVETHAASNGSMSEQYDKSDGEQLSARDLTWSYAALLTANNRRNVVPSASWGETSASSVPGTCAATSAIGTYSSVTVTSWPSIVATGGTTTTAS

SEQ ID NO: 45806 - protein, 640 aa, unidentified
MSFRSLLALSGLVCTGLANVISKRATLDSWLSNEATVARTAILNNIGADGAWVSGADSGIVVASPSTDNPDYFYTWTRDSGLVLKALVDLFRNGDTSLLSTIENYISAQAIVQGISNPSGDLSSGAGLGEPKFNVDETAYTGSWGRPQRDGPALRATAMIDFGQWLLDNGYTSTATDIVWPLVRNDLSYVAQYWDQTGYDLWEEVNGSSFFTIAVQHRALVEGSAFAKSVGSSCSWCDSQAPEILCYLQSFWTGSFILANFDSSRSGKDANTLLGSIHTFDPEAACDDSTFQPCSPRALANHKEVVDSFRSIYTLNDGLSDSEAVAVGRYPEDTYYNGNPWFLCTLAAAEQLYDALYQWDKQGSLEVTDVSLDFFKALYSDAATGTYSSSSSTYSSIVDAVKTFADGFVSIVETHAASNGSMSEQYDKSDGEQLSARDLTWSYAALLTANNRRNSVVPASWGETSASSVPGTCAATSATGTYSSVTVTSWPSIVATGGTTTTATPTGSGSVTSTSKTTATASKTSTSTSLASCTTPTAVAVTFDLTATTTYGENIYLVGSISQLGDWETSDGIALSADKYTSSDPLWYVTVTLPAGESFEYKFIRIESDDSVEWESDPNREYTVPQACGTSTATVTDTWR

SEQ ID NO: 45807 - protein, 639 aa, Aspergillus awamori
MSFRSLLALSGLVCTGLANVISKRATLDSWLSNEATVARTAILNNIGADGAWVSGADSGIVVASPSTDNPDYFYTWTRDSGLVLKTLVDLFRNGDTSLLSTIENYISAQAIVQGISNPSGDLSSGGLGEPKFNVDETAYTGSWGRPQRDGPASERTAMIGFGQWLLDNGYTSTATDIVWPLVRNDLSYVAQYWNQTGYDLWEEVNGSSFFTIAVQHRALVEGSAFATAVGSSCSWCDSQAPEILCYLQSFWTGSFILANFDSSRSRKDANTLLGSIHTFDPEAACDDSTFQPCSPRALANHKEVVDSFRSIYTLNDGLSDSEAVAVGRYPEDTYYNGNPWFLCTLAAAEQLYDALYQWDKQGSLEVTDVSLDFFKALYSDAATGTYSSSSSTYSSIVDAVKTFADGFVSIVETHAASNGSMSEQYDKSDGEQLSARDLTWSYAALLTANNRRNVVPSASWGETSASSVPGTCAATSAIGTYSSVTVTSWPSIVATGGTTTTATPTGSGSVTSTSKTTATASKTSTSTSSSSCTTPTAVAVTFDLTATTTYGENIYLVGSISQLGDWETSDGIALSADKYTSSDPLWYVTVTLPAGESFEYKFIRIESDDSVEWESDPNREYTVPQACGTSTATVTDTWR

SEQ ID NO: 45808 - protein, 479 aa, Aspergillus niger
ATWDSWLSNEATVARTAILNNIGADGAWVSGADSGIVVASPSTDNPDYFYTWTRDSGLVLKTLVDLFRNGDTSLLSTIENYISAQAIVQGISNPSGDLSSGAGLGEPKFNVDETAYTGSWGRPQRDGPALRATAMIGFGQWLLDNGYTSTATDIVWPLVRNDLSYVAQYWNQTGYDLWEVNGSSFFTIAVQHRALVEGSAFATAVGSSCSWCDSQAPEILCYLQSFWTGSFILANFDSSRSAKDANTLLLGSIHTFDPEAACDDSTFQPCSPRALANHKEVVDSFRSIYTLNDGLSDSEAVAVGRYPEDTYYNGNPWFLCTLAAAEQLYDALYQWDKQGSLEVTDVSLDFFKALYSDATGTYSSSSSTYSSIVDAVKTFADGFVSIVETHAASNGSMSEQYDKSDGEQLSARDLTWSYAALLTANNRRNVVPSASWGETSASSVPGTCAATSAIGTYSSVTVTSWPSIVATGGTTTTAS

SEQ ID NO: 45809 - protein, 616 aa, unidentified
ATLDSWLSNEATVARTAILNNIGADGAWVSGADSGIVVASPSTDNPDYFYTWTRDSGLVLKALVDLFRNGDTSLLSTIENYISAQAIVQGISNPSGDLSSGAGLGEPKFNVDETAYTGSWGRPQRDGPALRATAMIDFGQWLLDNGYTSTATDIVWPLVRNDLSYVAQYWDQTGYDLWEEVNGSSFFTIAVQHRALVEGSAFAKSVGSSCSWCDSQAPEILCYLQSFWTGSFILANFDSSRSGKDANTLLGSIHTFDPEAACDDSTFQPCSPRALANHKEVVDSFRSIYTLNDGLSDSEAVAVGRYPEDTYYNGNPWFLCTLAAAEQLYDALYQWDKQGSLEVTDVSLDFFKALYSDAATGTYSSSSSTYSSIVDAVKTFADGFVSIVETHAASNGSMSEQYDKSDGEQLSARDLTWSYAALLTANNRRNSVVPASWGETSASSVPGTCAATSATGTYSSVTVTSWPSIVATGGTTTTATPTGSGSVTSTSKTTATASKTSTSTSLASCTTPTAVAVTFDLTATTTYGENIYLVGSISQLGDWETSDGIALSADKYTSSDPLWYVTVTLPAGESFEYKFIRIESDDSVEWESDPNREYTVPQACGTSTATVTDTWR

SEQ ID NO: 45810 - protein, 615 aa, Aspergillus awamori
ATLDSWLSNEATVARTAILNNIGADGAWVSGADSGIVVASPSTDNPDYFYTWTRDSGLVLKTLVDLFRNGDTSLLSTIENYISAQAIVQGISNPSGDLSSGGLGEPKFNVDETAYTGSWGRPQRDGPASERTAMIGFGQWLLDNGYTSTATDIVWPLVRNDLSYVAQYWNQTGYDLWEEVNGSSFFTIAVQHRALVEGSAFATAVGSSCSWCDSQAPEILCYLQSFWTGSFILANFDSSRSRKDANTLLGSIHTFDPEAACDDSTFQPCSPRALANHKEVVDSFRSIYTLNDGLSDSEAVAVGRYPEDTYYNGNPWFLCTLAAAEQLYDALYQWDKQGSLEVTDVSLDFFKALYSDAATGTYSSSSSTYSSIVDAVKTFADGFVSIVETHAASNGSMSEQYDKSDGEQLSARDLTWSYAALLTANNRRNVVPSASWGETSASSVPGTCAATSAIGTYSSVTVTSWPSIVATGGTTTTATPTGSGSVTSTSKTTATASKTSTSTSSSSCTTPTAVAVTFDLTATTTYGENIYLVGSISQLGDWETSDGIALSADKYTSSDPLWYVTVTLPAGESFEYKFIRIESDDSVEWESDPNREYTVPQACGTSTATVTDTWR

SEQ ID NO: 45811 - protein, 496 aa, Aspergillus niger
GSWGRPQRDGPALRATAMIGFGQWLLDNGYTSTATDIVWPLVRNDLSYVAQYWNQTGYDLWEEVNGSSFFTIAVQHRALVEGSAFATAVGSSCSWCDSQAPEILCYLQSFWTGSFILANFDSSRSGKDANTLLGSIHTFDPEAACDDSTFQPCSPRALANHKEVVDSFRSIYTLNDGLTKVRAVAVGRYPEDTYYNGNPWFLCTLAAAEQLYDALYQWDKQGSLEVTDVSLDFFKALYSDAATGTYSSSSSTYSSIVDAVKTFADGFVSIVETHAASNGSMSEQYDKWFLSARDLTWSYAALLTANNRRNSVVPASWGETSASSVPGTCVITSLIGTYSSVTVTSWPSIVATGGTTTTATPTGSGSVTSTSKTTATASKTSTSTSSTSCTTPTAVAVTFDLTATTTYGENIYLVGSISQLGDWETSDGIALSADKYTSSDPLWYVTVTLPAGESFEYKFIRIESDDSVEWESDPNREYTVPQACGTSTATVTDTWR

SEQ ID NO: 45812 - protein, 546 aa, Synthetic construct
MSFRSLLALSGLVCTGLANVISKRATLDSWLSNEATVARTAILNNIGADGAWVSGADSGIVVASPSTDNPDYFYTWTRDSGLVLKTLVDLFRNGDTSLLSTIENYISAQAIVQGISNPSGDLSSGAGLGEPKFNVDETAYTGSWGRPQRDGPALRATAMIGFGQWLLDNGYTSTATDIVWPLVRNDLSYVAQYWNQTGYDLWEEVNGSSFFTIAVQHRALVEGSAFATAVGSSCSWCDSQAPEILCYLQSFWTGSFILANFDSSRSGKDANTLLGSIHTFDPEAACDDSTFQPCSPRALANHKEVVDSFRSIYTLNDGLSDSEAVAVGRYPEDTYYNGNPWFLCTLAAAEQLYDALYQWDKQGSLEVTDVSLDFFKALYSDAATGTYSSSSSTYSSIVDAVKTFADGFVSIVETHAASNGSMSEQYDKSDGEQLSARDLTWSYAALLTANNRRNSVVPASWGETSASSVPGTCAATSAIGTYSSVTVTSWPSIVATGGTTTTATPTGSGSVTSTSKTTATASKRDIQMTQSPSSLSASVGDRVTIT

SEQ ID NO: 45813 - protein, 616 aa, Aspergillus niger
ATLDSWLSNEATVARTAILNNIGADGAWVSGADSGIVVASPSTDNPDYFYTWTRDSGLVLKTLVDLFRNGDTSLLSTIENYISAQAIVQGISNPSGKLRTGKGLGEPKFNVDETAYTGSWGRPQRDGPALRATAMIGFGQWLLDNGYTSTATDIVWPLVRNDLSYVAQYWNQTGYDLWEEVNGSSFFTIAVQHRALVEGSAFATAVGSSCSWCDSQAPEILCYLQSFWTGSFILANFDSSRSGKDANTLLGSIHTFDPEAACDDSTFQPCSPRALANHKEVVDSFRSIYTLNDGLKIFRAVAVGRYPEDTYYNGNPWFLCTLAAAEQLYDALYQWDKQGSLEVTDVSLDFFKALYSDAATGTYSSSSSTYSSIVDAVKTFADGFVSIVETHAASNGSMSEQYDKFMGVVLSARDLTWSYAALLTANNRRNSVVPASWGETSASSVPGTCLMTSVIGTYSSVTVTSWPSIVATGGTTTTATPTGSGSVTSTSKTTATASKTSTSTSSTSCTTPTAVAVTFDLTATTTYGENIYLVGSISQLGDWETSDGIALSADKYTSSDPLWYVTVTLPAGESFEYKFIRIESDDSVEWESDPNREYTVPQACGTSTATVTDTWR

SEQ ID NO: 45814 - protein, 616 aa, Aspergillus niger
ATLDSWLSNEATVARTAILNNIGADGAWVSGADSGIVVASPSTDNPDYFYTWTRDSGLVLKTLVDLFRNGDTSLLSTIENYISAQAIVQGISNPSGRLKKGKGLGEPKFNVDETAYTGSWGRPQRDGPALRATAMIGFGQWLLDNGYTSTATDIVWPLVRNDLSYVAQYWNQTGYDLWEEVNGSSFFTIAVQHRALVEGSAFATAVGSSCSWCDSQAPEILCYLQSFWTGSFILANFDSSRSGKDANTLLGSIHTFDPEAACDDSTFQPCSPRALANHKEVVDSFRSIYTLNDGLMKITAVAVGRYPEDTYYNGNPWFLCTLAAAEQLYDALYQWDKQGSLEVTDVSLDFFKALYSDAATGTYSSSSSTYSSIVDAVKTFADGFVSIVETHAASNGSMSEQYDKLXGXMLSARDLTWSYAALLTANNRRNSVVPASWGETSASSVPGTCLXTSXIGTYSSVTVTSWPSIVATGGTTTTATPTGSGSVTSTSKTTATASKTSTSTSSTSCTTPTAVAVTFDLTATTTYGENIYLVGSISQLGDWETSDGIALSADKYTSSDPLWYVTVTLPAGESFEYKFIRIESDDSVEWESDPNREYTVPQACGTSTATVTDTWR

SEQ ID NO: 45815 - protein, 616 aa, Aspergillus niger
ATLDSWLSNEATVARTAILNNIGADGAWVSGADSGIVVASPSTDNPDYFYTWTRDSGLVLKTLVDLFRNGDTSLLSTIENYISAQAIVQGISNPSGRLKTGRGLGEPKFNVDETAYTGSWGRPQRDGPALRATAMIGFGQWLLDNGYTSTATDIVWPLVRNDLSYVAQYWNQTGYDLWEEVNGSSFFTIAVQHRALVEGSAFATAVGSSCSWCDSQAPEILCYLQSFWTGSFILANFDSSRSGKDANTLLGSIHTFDPEAACDDSTFQPCSPRALANHKEVVDSFRSIYTLNDGLTKITAVAVGRYPEDTYYNGNPWFLCTLAAAEQLYDALYQWDKQGSLEVTDVSLDFFKALYSDAATGTYSSSSSTYSSIVDAVKTFADGFVSIVETHAASNGSMSEQYDKLRGVVLSARDLTWSYAALLTANNRRNSVVPASWGETSASSVPGTCLITSVIGTYSSVTVTSWPSIVATGGTTTTATPTGSGSVTSTSKTTATASKTSTSTSSTSCTTPTAVAVTFDLTATTTYGENIYLVGSISQLGDWETSDGIALSADKYTSSDPLWYVTVTLPAGESFEYKFIRIESDDSVEWESDPNREYTVPQACGTSTATVTDTWR

SEQ ID NO: 45816 - protein, 616 aa, Aspergillus niger
ATLDSWLSNEATVARTAILNNIGADGAWVSGADSGIVVASPSTDNPDYFYTWTRDSGLVLKTLVDLFRNGDTSLLSTIENYISAQAIVQGISNPSGKLMTGTGLGEPKFNVDETAYTGSWGRPQRDGPALRATAMIGFGQWLLDNGYTSTATDIVWPLVRNDLSYVAQYWNQTGYDLWEEVNGSSFFTIAVQHRALVEGSAFATAVGSSCSWCDSQAPEILCYLQSFWTGSFILANFDSSRSGKDANTLLGSIHTFDPEAACDDSTFQPCSPRALANHKEVVDSFRSIYTLNDGLRRLRAVAVGRYPEDTYYNGNPWFLCTLAAAEQLYDALYQWDKQGSLEVTDVSLDFFKALYSDAATGTYSSSSSTYSSIVDAVKTFADGFVSIVETHAASNGSMSEQYDKLRGVILSARDLTWSYAALLTANNRRNSVVPASWGETSASSVPGTCLVTSMIGTYSSVTVTSWPSIVATGGTTTTATPTGSGSVTSTSKTTATASKTSTSTSSTSCTTPTAVAVTFDLTATTTYGENIYLVGSISQLGDWETSDGIALSADKYTSSDPLWYVTVTLPAGESFEYKFIRIESDDSVEWESDPNREYTVPQACGTSTATVTDTWR

SEQ ID NO: 45817 - protein, 616 aa, Aspergillus niger
ATLDSWLSNEATVARTAILNNIGADGAWVSGADSGIVVASPSTDNPDYFYTWTRDSGLVLKTLVDLFRNGDTSLLSTIENYISAQAIVQGISNPSGTLRRGTGLGEPKFNVDETAYTGSWGRPQRDGPALRATAMIGFGQWLLDNGYTSTATDIVWPLVRNDLSYVAQYWNQTGYDLWEEVNGSSFFTIAVQHRALVEGSAFATAVGSSCSWCDSQAPEILCYLQSFWTGSFILANFDSSRSGKDANTLLGSIHTFDPEAACDDSTFQPCSPRALANHKEVVDSFRSIYTLNDGLRMMTAVAVGRYPEDTYYNGNPWFLCTLAAAEQLYDALYQWDKQGSLEVTDVSLDFFKALYSDAATGTYSSSSSTYSSIVDAVKTFADGFVSIVETHAASNGSMSEQYDKLTGLFLSARDLTWSYAALLTANNRRNSVVPASWGETSASSVPGTCLLTSLIGTYSSVTVTSWPSIVATGGTTTTATPTGSGSVTSTSKTTATASKTSTSTSSTSCTTPTAVAVTFDLTATTTYGENIYLVGSISQLGDWETSDGIALSADKYTSSDPLWYVTVTLPAGESFEYKFIRIESDDSVEWESDPNREYTVPQACGTSTATVTDTWR

SEQ ID NO: 45818 - protein, 616 aa, Aspergillus niger
ATLDSWLSNEATVARTAILNNIGADGAWVSGADSGIVVASPSTDNPDYFYTWTRDSGLVLKTLVDLFRNGDTSLLSTIENYISAQAIVQGISNPSGTLTTGMGLGEPKFNVDETAYTGSWGRPQRDGPALRATAMIGFGQWLLDNGYTSTATDIVWPLVRNDLSYVAQYWNQTGYDLWEEVNGSSFFTIAVQHRALVEGSAFATAVGSSCSWCDSQAPEILCYLQSFWTGSFILANFDSSRSGKDANTLLGSIHTFDPEAACDDSTFQPCSPRALANHKEVVDSFRSIYTLNDGLKRFXAVAVGRYPEDTYYNGNPWFLCTLAAAEQLYDALYQWDKQGSLEVTDVSLDFFKALYSDAATGTYSSSSSTYSSIVDAVKTFADGFVSIVETHAASNGSMSEQYDKXXGVXLSARDLTWSYAALLTANNRRNSVVPASWGETSASSVPGTCXXTSXIGTYSSVTVTSWPSIVATGGTTTTATPTGSGSVTSTSKTTATASKTSTSTSSTSCTTPTAVAVTFDLTATTTYGENIYLVGSISQLGDWETSDGIALSADKYTSSDPLWYVTVTLPAGESFEYKFIRIESDDSVEWESDPNREYTVPQACGTSTATVTDTWR

SEQ ID NO: 45819 - protein, 616 aa, Aspergillus niger
ATLDSWLSNEATVARTAILNNIGADGAWVSGADSGIVVASPSTDNPDYFYTWTRDSGLVLKTLVDLFRNGDTSLLSTIENYISAQAIVQGISNPSGKLKRGTGLGEPKFNVDETAYTGSWGRPQRDGPALRATAMIGFGQWLLDNGYTSTATDIVWPLVRNDLSYVAQYWNQTGYDLWEEVNGSSFFTIAVQHRALVEGSAFATAVGSSCSWCDSQAPEILCYLQSFWTGSFILANFDSSRSGKDANTLLGSIHTFDPEAACDDSTFQPCSPRALANHKEVVDSFRSIYTLNDGLTKVRAVAVGRYPEDTYYNGNPWFLCTLAAAEQLYDALYQWDKQGSLEVTDVSLDFFKALYSDAATGTYSSSSSTYSSIVDAVKTFADGFVSIVETHAASNGSMSEQYDKVKGFMLSARDLTWSYAALLTANNRRNSVVPASWGETSASSVPGTCVLTSVIGTYSSVTVTSWPSIVATGGTTTTATPTGSGSVTSTSKTTATASKTSTSTSSTSCTTPTAVAVTFDLTATTTYGENIYLVGSISQLGDWETSDGIALSADKYTSSDPLWYVTVTLPAGESFEYKFIRIESDDSVEWESDPNREYTVPQACGTSTATVTDTWR

SEQ ID NO: 45820 - protein, 616 aa, Aspergillus niger
ATLDSWLSNEATVARTAILNNIGADGAWVSGADSGIVVASPSTDNPDYFYTWTRDSGLVLKTLVDLFRNGDTSLLSTIENYISAQAIVQGISNPSGRLKKGRGLGEPKFNVDETAYTGSWGRPQRDGPALRATAMIGFGQWLLDNGYTSTATDIVWPLVRNDLSYVAQYWNQTGYDLWEEVNGSSFFTIAVQHRALVEGSAFATAVGSSCSWCDSQAPEILCYLQSFWTGSFILANFDSSRSGKDANTLLGSIHTFDPEAACDDSTFQPCSPRALANHKEVVDSFRSIYTLNDGLTRVRAVAVGRYPEDTYYNGNPWFLCTLAAAEQLYDALYQWDKQGSLEVTDVSLDFFKALYSDAATGTYSSSSSTYSSIVDAVKTFADGFVSIVETHAASNGSMSEQYDKMRGLVLSARDLTWSYAALLTANNRRNSVVPASWGETSASSVPGTCVLTSVIGTYSSVTVTSWPSIVATGGTTTTATPTGSGSVTSTSKTTATASKTSTSTSSTSCTTPTAVAVTFDLTATTTYGENIYLVGSISQLGDWETSDGIALSADKYTSSDPLWYVTVTLPAGESFEYKFIRIESDDSVEWESDPNREYTVPQACGTSTATVTDTWR

SEQ ID NO: 45821 - protein, 616 aa, Aspergillus niger
ATLDSWLSNEATVARTAILNNIGADGAWVSGADSGIVVASPSTDNPDYFYTWTRDSGLVLKTLVDLFRNGDTSLLSTIENYISAQAIVQGISNPSGRLMMGKGLGEPKFNVDETAYTGSWGRPQRDGPALRATAMIGFGQWLLDNGYTSTATDIVWPLVRNDLSYVAQYWNQTGYDLWEEVNGSSFFTIAVQHRALVEGSAFATAVGSSCSWCDSQAPEILCYLQSFWTGSFILANFDSSRSGKDANTLLGSIHTFDPEAACDDSTFQPCSPRALANHKEVVDSFRSIYTLNDGLKKIRAVAVGRYPEDTYYNGNPWFLCTLAAAEQLYDALYQWDKQGSLEVTDVSLDFFKALYSDAATGTYSSSSSTYSSIVDAVKTFADGFVSIVETHAASNGSMSEQYDKLKGMMLSARDLTWSYAALLTANNRRNSVVPASWGETSASSVPGTCVITSLIGTYSSVTVTSWPSIVATGGTTTTATPTGSGSVTSTSKTTATASKTSTSTSSTSCTTPTAVAVTFDLTATTTYGENIYLVGSISQLGDWETSDGIALSADKYTSSDPLWYVTVTLPAGESFEYKFIRIESDDSVEWESDPNREYTVPQACGTSTATVTDTWR

SEQ ID NO: 45822 - protein, 616 aa, Aspergillus niger
ATLDSWLSNEATVARTAILNNIGADGAWVSGADSGIVVASPSTDNPDYFYTWTRDSGLVLKTLVDLFRNGDTSLLSTIENYISAQAIVQGISNPSGKLTRGIGLGEPKFNVDETAYTGSWGRPQRDGPALRATAMIGFGQWLLDNGYTSTATDIVWPLVRNDLSYVAQYWNQTGYDLWEEVNGSSFFTIAVQHRALVEGSAFATAVGSSCSWCDSQAPEILCYLQSFWTGSFILANFDSSRSGKDANTLLGSIHTFDPEAACDDSTFQPCSPRALANHKEVVDSFRSIYTLNDGLRKVTAVAVGRYPEDTYYNGNPWFLCTLAAAEQLYDALYQWDKQGSLEVTDVSLDFFKALYSDAATGTYSSSSSTYSSIVDAVKTFADGFVSIVETHAASNGSMSEQYDKFKGIFLSARDLTWSYAALLTANNRRNSVVPASWGETSASSVPGTCVFTSFIGTYSSVTVTSWPSIVATGGTTTTATPTGSGSVTSTSKTTATASKTSTSTSSTSCTTPTAVAVTFDLTATTTYGENIYLVGSISQLGDWETSDGIALSADKYTSSDPLWYVTVTLPAGESFEYKFIRIESDDSVEWESDPNREYTVPQACGTSTATVTDTWR

SEQ ID NO: 45823 - protein, 522 aa, Synthetic construct
ATLDSWLSNEATVARTAILNNIGADGAWVSGADSGIVVASPSTDNPDYFYTWTRDSGLVLKTLVDLFRNGDTSLLSTIENYISAQAIVQGISNPSGDLSSGAGLGEPKFNVDETAYTGSWGRPQRDGPALRATAMIGFGQWLLDNGYTSTATDIVWPLVRNDLSYVAQYWNQTGYDLWEEVNGSSFFTIAVQHRALVEGSAFATAVGSSCSWCDSQAPEILCYLQSFWTGSFILANFDSSRSGKDANTLLGSIHTFDPEAACDDSTFQPCSPRALANHKEVVDSFRSIYTLNDGLSDSEAVAVGRYPEDTYYNGNPWFLCTLAAAEQLYDALYQWDKQGSLEVTDVSLDFFKALYSDAATGTYSSSSSTYSSIVDAVKTFADGFVSIVETHAASNGSMSEQYDKSDGEQLSARDLTWSYAALLTANNRRNSVVPASWGETSASSVPGTCAATSAIGTYSSVTVTSWPSIVATGGTTTTATPTGSGSVTSTSKTTATASKRDIQMTQSPSSLSASVGDRVTIT

SEQ ID NO: 45824 - protein, 547 aa, Synthetic construct
MSFRSLLALSGLVCTGLANVISKRATLDSWLSNEATVARTAILNNIGADGAWVSGADSGIVVASPSTDNPDYFYTWTRDSGLVLKTLVDLFRNGDTSLLSTIENYISAQAIVQGISNPSGDLSSGAGLGEPKFNVDETAYTGSWGRPQRDGPALRATAMIGFGQWLLDNGYTSTATDIVWPLVRNDLSYVAQYWNQTGYDLWEEVNGSSFFTIAVQHRALVEGSAFATAVGSSCSWCDSQAPEILCYLQSFWTGSFILANFDSSRSGKDANTLLGSIHTFDPEAACDDSTFQPCSPRALANHKEVVDSFRSIYTLNDGLSDSEAVAVGRYPEDTYYNGNPWFLCTLAAAEQLYDALYQWDKQGSLEVTDVSLDFFKALYSDAATGTYSSSSSTYSSIVDAVKTFADGFVSIVETHAASNGSMSEQYDKSDGEQLSARDLTWSYAALLTANNRRNSVVPASWGETSASSVPGTCAATSAIGTYSSVTVTSWPSIVATGGTTTTATPTGSGSVTSTSKTTATASQKRDIQMTQSPSSLSASVGDRVTIT

SEQ ID NO: 45825 - protein, 547 aa, Synthetic construct
MSFRSLLALSGLVCTGLANVISKRATLDSWLSNEATVARTAILNNIGADGAWVSGADSGIVVASPSTDNPDYFYTWTRDSGLVLKTLVDLFRNGDTSLLSTIENYISAQAIVQGISNPSGDLSSGAGLGEPKFNVDETAYTGSWGRPQRDGPALRATAMIGFGQWLLDNGYTSTATDIVWPLVRNDLSYVAQYWNQTGYDLWEEVNGSSFFTIAVQHRALVEGSAFATAVGSSCSWCDSQAPEILCYLQSFWTGSFILANFDSSRSGKDANTLLGSIHTFDPEAACDDSTFQPCSPRALANHKEVVDSFRSIYTLNDGLSDSEAVAVGRYPEDTYYNGNPWFLCTLAAAEQLYDALYQWDKQGSLEVTDVSLDFFKALYSDAATGTYSSSSSTYSSIVDAVKTFADGFVSIVETHAASNGSMSEQYDKSDGEQLSARDLTWSYAALLTANNRRNSVVPASWGETSASSVPGTCAATSAIGTYSSVTVTSWPSIVATGGTTTTATPTGSGSVTSTSKTTATASLKRDIQMTQSPSSLSASVGDRVTIT

SEQ ID NO: 45826 - protein, 523 aa, Synthetic construct
ATLDSWLSNEATVARTAILNNIGADGAWVSGADSGIVVASPSTDNPDYFYTWTRDSGLVLKTLVDLFRNGDTSLLSTIENYISAQAIVQGISNPSGDLSSGAGLGEPKFNVDETAYTGSWGRPQRDGPALRATAMIGFGQWLLDNGYTSTATDIVWPLVRNDLSYVAQYWNQTGYDLWEEVNGSSFFTIAVQHRALVEGSAFATAVGSSCSWCDSQAPEILCYLQSFWTGSFILANFDSSRSGKDANTLLGSIHTFDPEAACDDSTFQPCSPRALANHKEVVDSFRSIYTLNDGLSDSEAVAVGRYPEDTYYNGNPWFLCTLAAAEQLYDALYQWDKQGSLEVTDVSLDFFKALYSDAATGTYSSSSSTYSSIVDAVKTFADGFVSIVETHAASNGSMSEQYDKSDGEQLSARDLTWSYAALLTANNRRNSVVPASWGETSASSVPGTCAATSAIGTYSSVTVTSWPSIVATGGTTTTATPTGSGSVTSTSKTTATASLKRDIQMTQSPSSLSASVGDRVTIT

SEQ ID NO: 45827 - protein, 523 aa, Synthetic construct
ATLDSWLSNEATVARTAILNNIGADGAWVSGADSGIVVASPSTDNPDYFYTWTRDSGLVLKTLVDLFRNGDTSLLSTIENYISAQAIVQGISNPSGDLSSGAGLGEPKFNVDETAYTGSWGRPQRDGPALRATAMIGFGQWLLDNGYTSTATDIVWPLVRNDLSYVAQYWNQTGYDLWEEVNGSSFFTIAVQHRALVEGSAFATAVGSSCSWCDSQAPEILCYLQSFWTGSFILANFDSSRSGKDANTLLGSIHTFDPEAACDDSTFQPCSPRALANHKEVVDSFRSIYTLNDGLSDSEAVAVGRYPEDTYYNGNPWFLCTLAAAEQLYDALYQWDKQGSLEVTDVSLDFFKALYSDAATGTYSSSSSTYSSIVDAVKTFADGFVSIVETHAASNGSMSEQYDKSDGEQLSARDLTWSYAALLTANNRRNSVVPASWGETSASSVPGTCAATSAIGTYSSVTVTSWPSIVATGGTTTTATPTGSGSVTSTSKTTATASQKRDIQMTQSPSSLSASVGDRVTIT

SEQ ID NO: 45828 - protein, 616 aa, Aspergillus niger
ATLDSWLSNEATVARTAILNNIGADGAWVSGADSGIVVASPSTDNPDYFYTWTRDSGLVLKTLVDLFRNGDTSLLSTEINYISAQAIVQGISNPSGTLRTGMGLGEPKFNVDETAYTGSWGRPQRDGPALRATAMIGFGQWLLDNGYTSTATDIVWPLVRNDLSYVAQYWNQTGYDLWEEVNGSSFFTIAVQHRALVEGSAFATAVGSSCSWCDSQAPEILCYLQSFWTGSFILANFDSSRSGKDANTLLGSIHTFDPEAACDDSTFQPCSPRALANHKEVVDSFRSIYTLNDGLTMLIAVAVGRYPEDTYYNGNPWFLCTLAAAEQLYDALYQWDKQGSLEVTDVSLDFFKALYSDAATGTYSSSSSTYSSIVDAVKTFADGFVSIVETHAASNGSMSEQYDKVKGVVLSARDLTWSYAALLTANNRRNSVVPASWGETSASSVPGTCFVTSLIGTYSSVTVTSWPSIVATGGTTTTATPTGSGSVTSTSKTTATASKTSTSTSSTSCTTPTAVAVTFDLTATTTYGENIYLVGSISQLGDWETSDGIALSADKYTSSDPLWYVTVTLPAGESFEYKFIRIESDDSVEWESDPNREYTVPQACGTSTATVTDTWR

SEQ ID NO: 45829 - protein, 616 aa, Aspergillus niger
ATLDSWLSNEATVARTAILNNIGADGAWVSGADSGIVVASPSTDNPDYFYTWTRDSGLVLKTLVDLFRNGDTSLLSTEINYISAQAIVQGISNPSGTLRTGMGLGEPKFNVDETAYTGSWGRPQRDGPALRATAMIGFGQWLLDNGYTSTATDIVWPLVRNDLSYVAQYWNQTGYDLWEEVNGSSFFTIAVQHRALVEGSAFATAVGSSCSWCDSQAPEILCYLQSFWTGSFILANFDSSRSGKDANTLLGSIHTFDPEAACDDSTFQPCSPRALANHKEVVDSFRSIYTLNDGLTMLIAVAVGRYPEDTYYNGNPWFLCTLAAAEQLYDALYQWDKQGSLEVTDVSLDFFKALYSDAATGTYSSSSSTYSSIVDAVKTFADGFVSIVETHAASNGSMSEQYDKVRGLVLSARDLTWSYAALLTANNRRNSVVPASWGETSASSVPGTCLVTSMIGTYSSVTVTSWPSIVATGGTTTTATPTGSGSVTSTSKTTATASKTSTSTSSTSCTTPTAVAVTFDLTATTTYGENIYLVGSISQLGDWETSDGIALSADKYTSSDPLWYVTVTLPAGESFEYKFIRIESDDSVEWESDPNREYTVPQACGTSTATVTDTWR

SEQ ID NO: 45830 - protein, 616 aa, Aspergillus niger
ATLDSWLSNEATVARTAILNNIGADGAWVSGADSGIVVASPSTDNPDYFYTWTRDSGLVLKTLVDLFRNGDTSLLSTEINYISAQAIVQGISNPSGMLKKGMGLGEPKFNVDETAYTGSWGRPQRDGPALRATAMIGFGQWLLDNGYTSTATDIVWPLVRNDLSYVAQYWNQTGYDLWEEVNGSSFFTIAVQHRALVEGSAFATAVGSSCSWCDSQAPEILCYLQSFWTGSFILANFDSSRSGKDANTLLGSIHTFDPEAACDDSTFQPCSPRALANHKEVVDSFRSIYTLNDGLKMMTAVAVGRYPEDTYYNGNPWFLCTLAAAEQLYDALYQWDKQGSLEVTDVSLDFFKALYSDAATGTYSSSSSTYSSIVDAVKTFADGFVSIVETHAASNGSMSEQYDKVKGIVLSARDLTWSYAALLTANNRRNSVVPASWGETSASSVPGTCLVTSFIGTYSSVTVTSWPSIVATGGTTTTATPTGSGSVTSTSKTTATASKTSTSTSSTSCTTPTAVAVTFDLTATTTYGENIYLVGSISQLGDWETSDGIALSADKYTSSDPLWYVTVTLPAGESFEYKFIRIESDDSVEWESDPNREYTVPQACGTSTATVTDTWR

SEQ ID NO: 45831 - protein, 616 aa, Aspergillus niger
ATLDSWLSNEATVARTAILNNIGADGAWVSGADSGIVVASPSTDNPDYFYTWTRDSGLVLKTLVDLFRNGDTSLLSTEINYISAQAIVQGISNPSGTLTTGMGLGEPKFNVDETAYTGSWGRPQRDGPALRATAMIGFGQWLLDNGYTSTATDIVWPLVRNDLSYVAQYWNQTGYDLWEEVNGSSFFTIAVQHRALVEGSAFATAVGSSCSWCDSQAPEILCYLQSFWTGSFILANFDSSRSGKDANTLLGSIHTFDPEAACDDSTFQPCSPRALANHKEVVDSFRSIYTLNDGLTKIRAVAVGRYPEDTYYNGNPWFLCTLAAAEQLYDALYQWDKQGSLEVTDVSLDFFKALYSDAATGTYSSSSSTYSSIVDAVKTFADGFVSIVETHAASNGSMSEQYDKMRGLVLSARDLTWSYAALLTANNRRNSVVPASWGETSASSVPGTCVLTSVIGTYSSVTVTSWPSIVATGGTTTTATPTGSGSVTSTSKTTATASKTSTSTSSTSCTTPTAVAVTFDLTATTTYGENIYLVGSISQLGDWETSDGIALSADKYTSSDPLWYVTVTLPAGESFEYKFIRIESDDSVEWESDPNREYTVPQACGTSTATVTDTWR

SEQ ID NO: 45832 - protein, 616 aa, Aspergillus niger
ATLDSWLSNEATVARTAILNNIGADGAWVSGADSGIVVASPSTDNPDYFYTWTRDSGLVLKTLVDLFRNGDTSLLSTEINYISAQAIVQGISNPSGTLMRGKGLGEPKFNVDETAYTGSWGRPQRDGPALRATAMIGFGQWLLDNGYTSTATDIVWPLVRNDLSYVAQYWNQTGYDLWEEVNGSSFFTIAVQHRALVEGSAFATAVGSSCSWCDSQAPEILCYLQSFWTGSFILANFDSSRSGKDANTLLGSIHTFDPEAACDDSTFQPCSPRALANHKEVVDSFRSIYTLNDGLRRLRAVAVGRYPEDTYYNGNPWFLCTLAAAEQLYDALYQWDKQGSLEVTDVSLDFFKALYSDAATGTYSSSSSTYSSIVDAVKTFADGFVSIVETHAASNGSMSEQYDKLRGVILSARDLTWSYAALLTANNRRNSVVPASWGETSASSVPGTCLVTSMIGTYSSVTVTSWPSIVATGGTTTTATPTGSGSVTSTSKTTATASKTSTSTSSTSCTTPTAVAVTFDLTATTTYGENIYLVGSISQLGDWETSDGIALSADKYTSSDPLWYVTVTLPAGESFEYKFIRIESDDSVEWESDPNREYTVPQACGTSTATVTDTWR

SEQ ID NO: 45833 - protein, 616 aa, Aspergillus niger
ATLDSWLSNEATVARTAILNNIGADGAWVSGADSGIVVASPSTDNPDYFYTWTRDSGLVLKTLVDLFRNGDTSLLSTEINYISAQAIVQGISNPSGKLMTGTGLGEPKFNVDETAYTGSWGRPQRDGPALRATAMIGFGQWLLDNGYTSTATDIVWPLVRNDLSYVAQYWNQTGYDLWEEVNGSSFFTIAVQHRALVEGSAFATAVGSSCSWCDSQAPEILCYLQSFWTGSFILANFDSSRSGKDANTLLGSIHTFDPEAACDDSTFQPCSPRALANHKEVVDSFRSIYTLNDGLITFKAVAVGRYPEDTYYNGNPWFLCTLAAAEQLYDALYQWDKQGSLEVTDVSLDFFKALYSDAATGTYSSSSSTYSSIVDAVKTFADGFVSIVETHAASNGSMSEQYDKLTGLLLSARDLTWSYAALLTANNRRNSVVPASWGETSASSVPGTCLFTSIIGTYSSVTVTSWPSIVATGGTTTTATPTGSGSVTSTSKTTATASKTSTSTSSTSCTTPTAVAVTFDLTATTTYGENIYLVGSISQLGDWETSDGIALSADKYTSSDPLWYVTVTLPAGESFEYKFIRIESDDSVEWESDPNREYTVPQACGTSTATVTDTWR

SEQ ID NO: 45834 - protein, 391 aa, Aspergillus niger
SFWTGSFILANFDSSRSGKDANTLLGSIHTFDPEAACDDSTFQPCSPRALANHKEVVDSFRSIYTLNDGLKMVKAVAVGRYPEDTYYNGNPWFLCTLAAAEQLYDALYQWDKQGSLEVTDVSLDFFKALYSDAATGTYSSSSSTYSSIVDAVKTFADGFVSIVETHAASNGSMSEQYDKMRGLLLSARDLTWSYAALLTANNRRNSVVPASWGETSASSVPGTCVLTSIIGTYSSVTVTSWPSIVATGGTTTTATPTGSGSVTSTSKTTATASKTSTSTSSTSCTTPTAVAVTFDLTATTTYGENIYLVGSISQLGDWETSDGIALSADKYTSSDPLWYVTVTLPAGESFEYKFIRIESDDSVEWESDPNREYTVPQACGTSTATVTDTWR

SEQ ID NO: 45835 - protein, 391 aa, Aspergillus niger
SFWTGSFILANFDSSRSGKDANTLLGSIHTFDPEAACDDSTFQPCSPRALANHKEVVDSFRSIYTLNDGLKMVKAVAVGRYPEDTYYNGNPWFLCTLAAAEQLYDALYQWDKQGSLEVTDVSLDFFKALYSDAATGTYSSSSSTYSSIVDAVKTFADGFVSIVETHAASNGSMSEQYDKVKGVVLSARDLTWSYAALLTANNRRNSVVPASWGETSASSVPGTCFVTSLIGTYSSVTVTSWPSIVATGGTTTTATPTGSGSVTSTSKTTATASKTSTSTSSTSCTTPTAVAVTFDLTATTTYGENIYLVGSISQLGDWETSDGIALSADKYTSSDPLWYVTVTLPAGESFEYKFIRIESDDSVEWESDPNREYTVPQACGTSTATVTDTWR

SEQ ID NO: 45836 - protein, 391 aa, Aspergillus niger
SFWTGSFILANFDSSRSGKDANTLLGSIHTFDPEAACDDSTFQPCSPRALANHKEVVDSFRSIYTLNDGLMMVKAVAVGRYPEDTYYNGNPWFLCTLAAAEQLYDALYQWDKQGSLEVTDVSLDFFKALYSDAATGTYSSSSSTYSSIVDAVKTFADGFVSIVETHAASNGSMSEQYDKMRGLVLSARDLTWSYAALLTANNRRNSVVPASWGETSASSVPGTCVMTSIIGTYSSVTVTSWPSIVATGGTTTTATPTGSGSVTSTSKTTATASKTSTSTSSTSCTTPTAVAVTFDLTATTTYGENIYLVGSISQLGDWETSDGIALSADKYTSSDPLWYVTVTLPAGESFEYKFIRIESDDSVEWESDPNREYTVPQACGTSTATVTDTWR

SEQ ID NO: 45837 - protein, 549 aa, Unidentified
MSFRSLLALSGLVCTGLANVISKRATLDSWLSNEATVARTAILNNIGADGAWVSGADSGIVVASPSTDNPDYFYTWTRDSGLVLKTLVDLFRNGDTSLLSTIENYISAQAIVQGISNPSGDLSSGAGLGEPKFNVDETAYTGSWGRPQRDGPALRATAMIGFRQWLLDNGYTSTATDIVWPLVRNDLSYVAQYWNQTGYDLWEEVNGSSFFTIAVQHRALVEGSAFATAVGSSCSWCDSQAPEILCYLQSFWTGSFILANFDSSRSGKDANTLLGSIHTFDPEAACDDSTFQPCSPRALANHKEVVDSFRSIYTLNDGLSDSEAVAVGRYPEDTYYNGNPWFLCTLAAAEQLYDALYQWDKQGSLEVTDVSLDFFKALYSDAATGTYSSSSSTYSSIVDAVKTFADGFVSIVETHAASNGSMSEQYDKSDGEQLSARDLTWSYAALLTANNRRNSVVPASWGETSASSVPGTCAATSAIGTYSSVTVTSWPSIVATGGTTTTATPTGSGSVTSTSKTTATASKTSTSTSSNVISKRAPVELELNVTALT

SEQ ID NO: 45838 - protein, 525 aa, Unidentified
ATLDSWLSNEATVARTAILNNIGADGAWVSGADSGIVVASPSTDNPDYFYTWTRDSGLVLKTLVDLFRNGDTSLLSTIENYISAQAIVQGISNPSGDLSSGAGLGEPKFNVDETAYTGSWGRPQRDGPALRATAMIGFRQWLLDNGYTSTATDIVWPLVRNDLSYVAQYWNQTGYDLWEEVNGSSFFTIAVQHRALVEGSAFATAVGSSCSWCDSQAPEILCYLQSFWTGSFILANFDSSRSGKDANTLLGSIHTFDPEAACDDSTFQPCSPRALANHKEVVDSFRSIYTLNDGLSDSEAVAVGRYPEDTYYNGNPWFLCTLAAAEQLYDALYQWDKQGSLEVTDVSLDFFKALYSDAATGTYSSSSSTYSSIVDAVKTFADGFVSIVETHAASNGSMSEQYDKSDGEQLSARDLTWSYAALLTANNRRNSVVPASWGETSASSVPGTCAATSAIGTYSSVTVTSWPSIVATGGTTTTATPTGSGSVTSTSKTTATASKTSTSTSSNVISKRAPVELELNVTALT

SEQ ID NO: 45839 - protein, 551 aa, Synthetic construct
MSFRSLLALSGLVCTGLANVISKRATLDSWLSNEATVARTAILNNIGADGAWVSGADSGIVVASPSTDNPDYFYTWTRDSGLVLKTLVDLFRNGDTSLLSTIENYISAQAIVQGISNPSGDLSSGAGLGEPKFNVDETAYTGSWGRPQRDGPALRATAMIGFGQWLLDNGYTSTATDIVWPLVRNDLSYVAQYWNQTGYDLWEEVNGSSFFTIAVQHRALVEGSAFATAVGSSCSWCDSQAPEILCYLQSFWTGSFILANFDSSRSGKDANTLLGSIHTFDPEAACDDSTFQPCSPRALANHKEVVDSFRSIYTLNDGLSDSEAVAVGRYPEDTYYNGNPWFLCTLAAAEQLYDALYQWDKQGSLEVTDVSLDFFKALYSDAATGTYSSSSSTYSSIVDAVKTFADGFVSIVETHAASNGSMSEQYDKSDGEQLSARDLTWSYAALLTANNRRNSVVPASWGETSASSVPGTCAATSAIGTYSSVTVTSWPSIVATGGTTTTATPTGSGSVTSTSKTTATASKTSTYKRDIQMTQSPSSLSASVGDRVTIT

SEQ ID NO: 45840 - protein, 527 aa, Synthetic construct
ATLDSWLSNEATVARTAILNNIGADGAWVSGADSGIVVASPSTDNPDYFYTWTRDSGLVLKTLVDLFRNGDTSLLSTIENYISAQAIVQGISNPSGDLSSGAGLGEPKFNVDETAYTGSWGRPQRDGPALRATAMIGFGQWLLDNGYTSTATDIVWPLVRNDLSYVAQYWNQTGYDLWEEVNGSSFFTIAVQHRALVEGSAFATAVGSSCSWCDSQAPEILCYLQSFWTGSFILANFDSSRSGKDANTLLGSIHTFDPEAACDDSTFQPCSPRALANHKEVVDSFRSIYTLNDGLSDSEAVAVGRYPEDTYYNGNPWFLCTLAAAEQLYDALYQWDKQGSLEVTDVSLDFFKALYSDAATGTYSSSSSTYSSIVDAVKTFADGFVSIVETHAASNGSMSEQYDKSDGEQLSARDLTWSYAALLTANNRRNSVVPASWGETSASSVPGTCAATSAIGTYSSVTVTSWPSIVATGGTTTTATPTGSGSVTSTSKTTATASKTSTYKRDIQMTQSPSSLSASVGDRVTIT

SEQ ID NO: 45841 - protein, 619 aa, unidentified
ATLDSWLSNEATVARTAILNNIGADGAWVSGADSGIVVASPSTDNPDYFYTWTRDSGLVIKTLVDLFRNGDTDLLSTIENYISSQAIVQGISNPSGDLSSGGLGEPKFNVDETAYTGSWGRPQRDGPALRATAMIGFGQWLLLTGQDNGYTSAATEIVWPLVRNDLSYVAQYWNQTGYDLWEEVNGSSFFTIAVQHRALVEGSAFATAVGSSCSWCDSQAPQILCYLQSFWTGEYILANFDSSRSGKDTNTLLGSIHTFDPEAGCDDSTFQPCSPRALANHKEVVDSFRSIYTLNDGLSDSEAVAVGRYPEDSYYNGNPWFLCTLAAAEQLYDALYQWDKQGSLEITDVSLDFFQALYSDAATGTYSSSSSTYSSIVDAVKTFADGFVSIVETHAASNGSLSEQYDKSDGDELSARDLTWSYAALLTANNRRNSVVPPSWGETSASSVPGTCAATSASGTYSSVTVTSWPSIVATGGTTTTATTTGSGSVTSTSKTTTTASKTSTTTSSTSCTTPTAVAVTFDLTATTTYGENIYLVGSISQLGDWDTSDGIALSADKYTSSNPLWYVTVTLPAGESFEYKFIRIESDDSVEWESDPNREYTVPQACGESTATVTDTWR

SEQ ID NO: 45842 - protein, 643 aa, unidentified
MSFRSLLALSGLVCSGLASVISKRATLDSWLSNEATVARTAILNNIGADGAWVSGADSGIVVASPSTDNPDYFYTWTRDSGLVIKTLVDLFRNGDTDLLSTIENYISSQAIVQGISNPSGDLSSGGLGEPKFNVDETAYTGSWGRPQRDGPALRATAMIGFGQWLLLTGQDNGYTSAATEIVWPLVRNDLSYVAQYWNQTGYDLWEEVNGSSFFTIAVQHRALVEGSAFATAVGSSCSWCDSQAPQILCYLQSFWTGEYILANFDSSRSGKDTNTLLGSIHTFDPEAGCDDSTFQPCSPRALANHKEVVDSFRSIYTLNDGLSDSEAVAVGRYPEDSYYNGNPWFLCTLAAAEQLYDALYQWDKQGSLEITDVSLDFFQALYSDAATGTYSSSSSTYSSIVDAVKTFADGFVSIVETHAASNGSLSEQYDKSDGDELSARDLTWSYAALLTANNRRNSVVPPSWGETSASSVPGTCAATSASGTYSSVTVTSWPSIVATGGTTTTATTTGSGSVTSTSKTTTTASKTSTTTSSTSCTTPTAVAVTFDLTATTTYGENIYLVGSISQLGDWDTSDGIALSADKYTSSNPLWYVTVTLPAGESFEYKFIRIESDDSVEWESDPNREYTVPQACGESTATVTDTWR

SEQ ID NO: 45843 - protein, 551 aa, Synthetic construct
MSFRSLLALSGLVCTGLANVISKRATLDSWLSNEATVARTAILNNIGADGAWVSGADSGIVVASPSTDNPDYFYTWTRDSGLVLKTLVDLFRNGDTSLLSTIENYISAQAIVQGISNPSGDLSSGAGLGEPKFNVDETAYTGSWGRPQRDGPALRATAMIGFGQWLLDNGYTSTATDIVWPLVRNDLSYVAQYWNQTGYDLWEEVNGSSFFTIAVQHRALVEGSAFATAVGSSCSWCDSQAPEILCYLQSFWTGSFILANFDSSRSGKDANTLLGSIHTFDPEAACDDSTFQPCSPRALANHKEVVDSFRSIYTLNDGLSDSEAVAVGRYPEDTYYNGNPWFLCTLAAAEQLYDALYQWDKQGSLEVTDVSLDFFKALYSDAATGTYSSSSSTYSSIVDAVKTFADGFVSIVETHAASNGSMSEQYDKSDGEQLSARDLTWSYAALLTANNRRNSVVPASWGETSASSVPGTCAATSAIGTYSSVTVTSWPSIVATGGTTTTATPTGSGSVTSTSKTTATASISKRGGGDIQMTQSPSSLSASVGDRVTIT

SEQ ID NO: 45844 - protein, 448 aa, Aspergillus awamori
ATLDSWLSNEATVARTAILNNIGADGAWVSGADSGIVVASPSTDNPDYFYTWTRDSGLVIKTLVDLFRNGDTDLLSTIENYISSQAIVQGISNPSGDLSSGGLGEPKFNVDETAYTGSWGRPQRDGPALRATAMIGFRQWLLDNGYTSAATEIVWPLVRNDLSYVAQYWNQTGYDLWEEVNGSSFFTIAVQHRALVEGSAFATAVGSSCSWCDSQAPQILCYLQSFWTGEYILANFDSSRSGKDTNTLLGSIHTFDPEAGCDDSTFQPCSPRALANHKEVVDSFRSIYTLNDGLSDSEAVAVGRYPKDSYYNGNPWFLCTLAAAEQLYDALYQWDKQGSLEITDVSLDFFQALYSDAATGTYSSSSSTYSSIVDAVKTFADGFVSIVETHAASNGSLSEQYDKSDGDELSARDLTWSYAALLTANNRRNSVMPPSWGETSASSVPGTC

SEQ ID NO: 45845 - protein, 550 aa, Synthetic construct
MSFRSLLALSGLVCTGLANVISKRATLDSWLSNEATVARTAILNNIGADGAWVSGADSGIVVASPSTDNPDYFYTWTRDSGLVLKTLVDLFRNGDTSLLSTIENYISAQAIVQGISNPSGDLSSGAGLGEPKFNVDETAYTGSWGRPQRDGPALRATAMIGFGQWLLDNGYTSTATDIVWPLVRNDLSYVAQYWNQTGYDLWEEVNGSSFFTIAVQHRALVEGSAFATAVGSSCSWCDSQAPEILCYLQSFWTGSFILANFDSSRSGKDANTLLGSIHTFDPEAACDDSTFQPCSPRALANHKEVVDSFRSIYTLNDGLSDSEAVAVGRYPEDTYYNGNPWFLCTLAAAEQLYDALYQWDKQGSLEVTDVSLDFFKALYSDAATGTYSSSSSTYSSIVDAVKTFADGFVSIVETHAASNGSMSEQYDKSDGEQLSARDLTWSYAALLTANNRRNSVVPASWGETSASSVPGTCAATSAIGTYSSVTVTSWPSIVATGGTTTTATPTGSGSVTSTSKTTATASNVISKRDIQMTQSPSSLSASVGDRVTIT

SEQ ID NO: 45846 - protein, 527 aa, Synthetic construct
ATLDSWLSNEATVARTAILNNIGADGAWVSGADSGIVVASPSTDNPDYFYTWTRDSGLVLKTLVDLFRNGDTSLLSTIENYISAQAIVQGISNPSGDLSSGAGLGEPKFNVDETAYTGSWGRPQRDGPALRATAMIGFGQWLLDNGYTSTATDIVWPLVRNDLSYVAQYWNQTGYDLWEEVNGSSFFTIAVQHRALVEGSAFATAVGSSCSWCDSQAPEILCYLQSFWTGSFILANFDSSRSGKDANTLLGSIHTFDPEAACDDSTFQPCSPRALANHKEVVDSFRSIYTLNDGLSDSEAVAVGRYPEDTYYNGNPWFLCTLAAAEQLYDALYQWDKQGSLEVTDVSLDFFKALYSDAATGTYSSSSSTYSSIVDAVKTFADGFVSIVETHAASNGSMSEQYDKSDGEQLSARDLTWSYAALLTANNRRNSVVPASWGETSASSVPGTCAATSAIGTYSSVTVTSWPSIVATGGTTTTATPTGSGSVTSTSKTTATASISKRGGGDIQMTQSPSSLSASVGDRVTIT

SEQ ID NO: 45847 - protein, 559 aa, Synthetic construct
MSFRSLLALSGLVCTGLANVISKRATLDSWLSNEATVARTAILNNIGADGAWVSGADSGIVVASPSTDNPDYFYTWTRDSGLVLKTLVDLFRNGDTSLLSTIENYISAQAIVQGISNPSGDLSSGAGLGEPKFNVDETAYTGSWGRPQRDGPALRATAMIGFGQWLLDNGYTSTATDIVWPLVRNDLSYVAQYWNQTGYDLWEEVNGSSFFTIAVQHRALVEGSAFATAVGSSCSWCDSQAPEILCYLQSFWTGSFILANFDSSRSGKDANTLLGSIHTFDPEAACDDSTFQPCSPRALANHKEVVDSFRSIYTLNDGLSDSEAVAVGRYPEDTYYNGNPWFLCTLAAAEQLYDALYQWDKQGSLEVTDVSLDFFKALYSDAATGTYSSSSSTYSSIVDAVKTFADGFVSIVETHAASNGSMSEQYDKSDGEQLSARDLTWSYAALLTANNRRNSVVPASWGETSASSVPGTCAATSAIGTYSSVTVTSWPSIVATGGTTTTATPTGSGSVTSTSKTTATASISKRGGGDIQMTQSPSSLSASVGDRVTITCRASENIY

SEQ ID NO: 45848 - protein, 556 aa, Synthetic construct
MSFRSLLALSGLVCTGLANVISKRATLDSWLSNEATVARTAILNNIGADGAWVSGADSGIVVASPSTDNPDYFYTWTRDSGLVLKTLVDLFRNGDTSLLSTIENYISAQAIVQGISNPSGDLSSGAGLGEPKFNVDETAYTGSWGRPQRDGPALRATAMIGFGQWLLDNGYTSTATDIVWPLVRNDLSYVAQYWNQTGYDLWEEVNGSSFFTIAVQHRALVEGSAFATAVGSSCSWCDSQAPEILCYLQSFWTGSFILANFDSSRSGKDANTLLGSIHTFDPEAACDDSTFQPCSPRALANHKEVVDSFRSIYTLNDGLSDSEAVAVGRYPEDTYYNGNPWFLCTLAAAEQLYDALYQWDKQGSLEVTDVSLDFFKALYSDAATGTYSSSSSTYSSIVDAVKTFADGFVSIVETHAASNGSMSEQYDKSDGEQLSARDLTWSYAALLTANNRRNSVVPASWGETSASSVPGTCAATSAIGTYSSVTVTSWPSIVATGGTTTTATPTGSGSVTSTSKTTATASISKRDIQMTQSPSSLSASVGDRVTITCRASENIY

SEQ ID NO: 45849 - protein, 615 aa, Aspergillus kawachii
ATLDSWLSNEATVARTAILNNIGADGAWVSGADSGIVVASPSTDNPDYFYTWTRDSGLVIKTLVDLFRNGDTDLLSTIEHYISSQAIIQGVSNPSGDLSSGGLGEPKFNVDETAYTGSWGRPQRDGPALRATAMIGFGQWLLDNGYTSAATEIVWPLVRNDLSYVAQYWNQTGYDLWEEVNGSSFFTIAVQHRALVEGSAFATAVGSSCSWCDSQAPQILCYLQSFWTGSYILANFDSSRSGKDTNTLLGSIHTFDPEAGCDDSTFQPCSPRALANHKEVVDSFRSIYTLNDGLSDSEAVAVGRYPEDSYYNGNPWFLCTLAAAEQLYDALYQWDKQGSLEITDVSLDFFKALYSGAATGTYSSSSSTYSSIVSAVKTFADGFVSIVETHAASNGSLSEQFDKSDGDELSARDLTWSYAALLTANNRRNSVVPPSWGETSASSVPGTCAATSASGTYSSVTVTSWPSIVATGGTTTTATTTGSGGVTSTSKTTTTASKTSTTTSSTSCTTPTAVAVTFDLTATTTYGENIYLVGSISQLGDWETSDGIALSADKYTSSNPLWYVTVTLPAGESFEYKFIRVESDDSVEWESDPNREYTVPQACGESTATVTDTWR

SEQ ID NO: 45850 - protein, 614 aa, Aspergillus awamori
TLDSWLSNEATVARTAILNNIGADGAWVSGADSGIVVASPSTDNPDYFYTWTRDSGLVIKTLVDLFRNGDTDLLSTIEHYISSQAIIQGVSNPSGDLSSGGLGEPKFNVDETAYTGSWGRPQRDGPALRATAMIGFGQWLLDNGYTSAATEIVWPLVRNDLSYVAQYWNQTGYDLWEEVNGSSFFTIAVQHRALVEGSAFATAVGSSCSWCDSQAPQILCYLQSFWTGSYILANFDSSRSGKDTNTLLGSIHTFDPEAGCDDSTFQPCSPRALANHKEVVDSFRSIYTLNDGLSDSEAVAVGRYPEDSYYNGNPWFLCTLAAAEQLYDALYQWDKQGSLEITDVSLDFFKALYSGAATGTYSSSSSTYSSIVSAVKTFADGFVSIVETHAASNGSLSEQFDKSDGDELSARDLTWSYAALLTANNRRNSVVPPSWGETSASSVPGTCAATSASGTYSSVTVTSWPSIVATGGTTTTATTTGSGGVTSTSKTTTTASKTSTTTSSTSCTTPTAVAVTFDLTATTTYGENIYLVGSISQLGDWETSDGIALSADKYTSSNPLWYVTVTLPAGESFEYKFIRVESDDSVEWESDPNREYTVPQACGESTATVTDTWR

SEQ ID NO: 45851 - protein, 526 aa, Synthetic construct
ATLDSWLSNEATVARTAILNNIGADGAWVSGADSGIVVASPSTDNPDYFYTWTRDSGLVLKTLVDLFRNGDTSLLSTIENYISAQAIVQGISNPSGDLSSGAGLGEPKFNVDETAYTGSWGRPQRDGPALRATAMIGFGQWLLDNGYTSTATDIVWPLVRNDLSYVAQYWNQTGYDLWEEVNGSSFFTIAVQHRALVEGSAFATAVGSSCSWCDSQAPEILCYLQSFWTGSFILANFDSSRSGKDANTLLGSIHTFDPEAACDDSTFQPCSPRALANHKEVVDSFRSIYTLNDGLSDSEAVAVGRYPEDTYYNGNPWFLCTLAAAEQLYDALYQWDKQGSLEVTDVSLDFFKALYSDAATGTYSSSSSTYSSIVDAVKTFADGFVSIVETHAASNGSMSEQYDKSDGEQLSARDLTWSYAALLTANNRRNSVVPASWGETSASSVPGTCAATSAIGTYSSVTVTSWPSIVATGGTTTTATPTGSGSVTSTSKTTATASNVISKRDIQMTQSPSSLSASVGDRVTIT

SEQ ID NO: 45852 - protein, 639 aa, Aspergillus luchuensis
MSFRSLLALSGLVCSGLASVISKRATLDSWLSNEATVARTAILNNIGADGAWVSGADSGIVVASPSTDNPDYFYTWTRDSGLVIKTLVDLFRNGDTDLLSTIEHYISSQAIIQGVSNPSGDLSSGGLGEPKFNVDETAYTGSWGRPQRDGPALRATAMIGFGQWLLDNGYTSAATEIVWPLVRNDLSYVAQYWNQTGYDLWEEVNGSSFFTIAVQHRALVEGSAFATAVGSSCSWCDSQAPQILCYLQSFWTGSYILANFDSSRSGKDTNTLLGSIHTFDPEAGCDDSTFQPCSPRALANHKEVVDSFRSIYTLNDGLSDSEAVAVGRYPEDSYYNGNPWFLCTLAAAEQLYDALYQWDKQGSLEITDVSLDFFKALYSGAATGTYSSSSSTYSSIVSAVKTFADGFVSIVETHAASNGSLSEQFDKSDGDELSARDLTWSYAALLTANNRRNSVVPPSWGETSASSVPGTCAATSASGTYSSVTVTSWPSIVATGGTTTTATTTGSGGVTSTSKTTTTASKTSTTTSSTSCTTPTAVAVTFDLTATTTYGENIYLVGSISQLGDWETSDGIALSADKYTSSNPLWYVTVTLPAGESFEYKFIRVESDDSVEWESDPNREYTVPQACGESTATVTDTWR

SEQ ID NO: 45853 - protein, 615 aa, unidentified
ATLDSWLSNEATVARTAILNNIGADGAWVSGADSGIVVASPSTDNPDYFYTWTRDSGLVIKTLVDLFRNGDTDLLSTIENYISSQAIVQGISNPSGDLSSGGLGEPKFNVDETAYTGSWGRPQRDGPALRATAMIGFRQWLLDNGYTSAATEIVWPLVRNDLSYVAQYWNQTGYDLWEEVNGSSFFTIAVQHRALVEGSAFATAVGSSCSWCDSQAPQILCYLQSFWTGEYILANFDSSRSGKDTNTLLGSIHTFDPEAGCDDSTFQPCSPRALANHKEVVDSFRSIYTLNDGLSDSEAVAVGRYPKDSYYNGNPWFLCTLAAAEQLYDALYQWDKQGSLEITDVSLDFFQALYSDAATGTYSSSSSTYSSIVDAVKTFADGFVSIVETHAASNGSLSEQYDKSDGDELSARDLTWSYAALLTANNRRNSVMPPSWGETSASSVPGTCAATSASGTYSSVTVTSSPSIVATGGTTTTATTTGFGGVTSTSKTTTTASKTSTTTSSTSCTTPTAVAVTFDLTATTTYGENIYLVGSISQLGDWDTSDGIALSADKYTSSNPLWYVTVTLPAGESFEYKFIRIESDDSVEWESDPNREYTVPQACGESTATVTDTWR

SEQ ID NO: 45854 - protein, 614 aa, Aspergillus awamori
TLDSWLSNEATVARTAILNNIGADGAWVSGADSGIVVASPSTDNPDYFYTWTRDSGLVIKTLVDLFRNGDTDLLSTIENYISSQAIVQGISNPSGDLSSGGLGEPKFNVDETAYTGSWGRPQRDGPALRATAMIGFRQWLLDNGYTSAATEIVWPLVRNDLSYVAQYWNQTGYDLWEEVNGSSFFTIAVQHRALVEGSAFATAVGSSCSWCDSQAPQILCYLQSFWTGEYILANFDSSRSGKDTNTLLGSIHTFDPEAGCDDSTFQPCSPRALANHKEVVDSFRSIYTLNDGLSDSEAVAVGRYPKDSYYNGNPWFLCTLAAAEQLYDALYQWDKQGSLEITDVSLDFFQALYSDAATGTYSSSSSTYSSIVDAVKTFADGFVSIVETHAASNGSLSEQYDKSDGDELSARDLTWSYAALLTANNRRNSVMPPSWGETSASSVPGTCAATSASGTYSSVTVTSSPSIVATGGTTTTATTTGFGGVTSTSKTTTTASKTSTTTSSTSCTTPTAVAVTFDLTATTTYGENIYLVGSISQLGDWDTSDGIALSADKYTSSNPLWYVTVTLPAGESFEYKFIRIESDDSVEWESDPNREYTVPQACGESTATVTDTWR

SEQ ID NO: 45855 - protein, 535 aa, Synthetic construct
ATLDSWLSNEATVARTAILNNIGADGAWVSGADSGIVVASPSTDNPDYFYTWTRDSGLVLKTLVDLFRNGDTSLLSTIENYISAQAIVQGISNPSGDLSSGAGLGEPKFNVDETAYTGSWGRPQRDGPALRATAMIGFGQWLLDNGYTSTATDIVWPLVRNDLSYVAQYWNQTGYDLWEEVNGSSFFTIAVQHRALVEGSAFATAVGSSCSWCDSQAPEILCYLQSFWTGSFILANFDSSRSGKDANTLLGSIHTFDPEAACDDSTFQPCSPRALANHKEVVDSFRSIYTLNDGLSDSEAVAVGRYPEDTYYNGNPWFLCTLAAAEQLYDALYQWDKQGSLEVTDVSLDFFKALYSDAATGTYSSSSSTYSSIVDAVKTFADGFVSIVETHAASNGSMSEQYDKSDGEQLSARDLTWSYAALLTANNRRNSVVPASWGETSASSVPGTCAATSAIGTYSSVTVTSWPSIVATGGTTTTATPTGSGSVTSTSKTTATASISKRGGGDIQMTQSPSSLSASVGDRVTITCRASENIY

SEQ ID NO: 45856 - protein, 532 aa, Synthetic construct
ATLDSWLSNEATVARTAILNNIGADGAWVSGADSGIVVASPSTDNPDYFYTWTRDSGLVLKTLVDLFRNGDTSLLSTIENYISAQAIVQGISNPSGDLSSGAGLGEPKFNVDETAYTGSWGRPQRDGPALRATAMIGFGQWLLDNGYTSTATDIVWPLVRNDLSYVAQYWNQTGYDLWEEVNGSSFFTIAVQHRALVEGSAFATAVGSSCSWCDSQAPEILCYLQSFWTGSFILANFDSSRSGKDANTLLGSIHTFDPEAACDDSTFQPCSPRALANHKEVVDSFRSIYTLNDGLSDSEAVAVGRYPEDTYYNGNPWFLCTLAAAEQLYDALYQWDKQGSLEVTDVSLDFFKALYSDAATGTYSSSSSTYSSIVDAVKTFADGFVSIVETHAASNGSMSEQYDKSDGEQLSARDLTWSYAALLTANNRRNSVVPASWGETSASSVPGTCAATSAIGTYSSVTVTSWPSIVATGGTTTTATPTGSGSVTSTSKTTATASISKRDIQMTQSPSSLSASVGDRVTITCRASENIY

SEQ ID NO: 45857 - protein, 639 aa, Aspergillus awamori
MSFRSLLALSGLVCSGLASVISKRATLDSWLSNEATVARTAILNNIGADGAWVSGADSGIVVASPSTDNPDYFYTWTRDSGLVIKTLVDLFRNGDTDLLSTIENYISSQAIVQGISNPSGDLSSGGLGEPKFNVDETAYTGSWGRPQRDGPALRATAMIGFRQWLLDNGYTSAATEIVWPLVRNDLSYVAQYWNQTGYDLWEEVNGSSFFTIAVQHRALVEGSAFATAVGSSCSWCDSQAPQILCYLQSFWTGEYILANFDSSRSGKDTNTLLGSIHTFDPEAGCDDSTFQPCSPRALANHKEVVDSFRSIYTLNDGLSDSEAVAVGRYPKDSYYNGNPWFLCTLAAAEQLYDALYQWDKQGSLEITDVSLDFFQALYSDAATGTYSSSSSTYSSIVDAVKTFADGFVSIVETHAASNGSLSEQYDKSDGDELSARDLTWSYAALLTANNRRNSVMPPSWGETSASSVPGTCAATSASGTYSSVTVTSSPSIVATGGTTTTATTTGFGGVTSTSKTTTTASKTSTTTSSTSCTTPTAVAVTFDLTATTTYGENIYLVGSISQLGDWDTSDGIALSADKYTSSNPLWYVTVTLPAGESFEYKFIRIESDDSVEWESDPNREYTVPQACGESTATVTDTWR

SEQ ID NO: 45858 - protein, 615 aa, Unidentified
ATLDSWLSNEATVARTAILNNIGADGAWVSGADSGIVVASPSTDNPDYFYTWTRDSGIVLKTLVDLFRNGDTDLLSTIEHYISSQAIIQGVSNPSGDLSSGGLGEPKFNVDETAYAGSWGRPQRDGPALRATAMIGFGQWLLDNGYTSAATEIVWPLVRNDLSYVAQYWNQTGYDLWEEVNGSSFFTIAVQHRALVEGSAFATAVGSSCSWCDSQAPQILCYLQSFWTGSYILANFDSSRSGKDTNTLLGSIHTFDPEAGCDDSTFQPCSPRALANHKEVVDSFRSIYTLNDGLSDSEAVAVGRYPEDSYYNGNPWFLCTLAAAEQLYDALYQWDKQGSLEITDVSLDFFKALYSGAATGTYSSSSSTYSSIVSAVKTFADGFVSIVETHAASNGSLSEQFDKSDGDELSARDLTWSYAALLTANNRRNSVVPPSWGETSASSVPGTCAATSASGTYSSVTVTSWPSIVATGGTTTTATTTGSGGVTSTSKTTTTASKTSTTTSSTSCTTPTAVAVTFDLTATTTYGENIYLVGSISQLGDWETSDGIALSADKYTSSNPPWYVTVTLPAGESFEYKFIRVESDDSVEWESDPNREYTVPQACGESTATVTDTWR

SEQ ID NO: 45859 - protein, 615 aa, unidentified
ATLDSWLSNEATVARTAILNNIGADGAWVSGADSGIVVASPSTDNPDYFYTWTRDSGLVIKTLVDLFRNGDTDLLSTIEHYISSQAIIQGVSNPSGDLSSGGLGEPKFNVDETAYTGSWGRPQRDGPALRATAMIGFGQWLLDNGYTSAATEIVWPLVRNDLSYVAQYWNQTGYDLWEEVNGSSFFTIAVQHRALVEGSAFATAVGSSCSWCDSQAPQILCYLQSFSSRSGWTGSYILANFDKDTNTLLGSIHTFDPEAGCDDSTFQPCSPRALANHKEVVDSFRSIYTLNDGLSDSEAVAVGRYPEDSYYNGNPWFLCTLAAAEQLYDALYQWDKQGSLEITDVSLDFFKALYSGAATGTYSSSSSTYSSIVSAVKTFADGFVSIVETHAASNGSLSEQFDKSDGDELSARDLTWSYAALLTANNRRNSVVPPSWGETSASSWPGTCAATSASGTYSSVTVTSWPSIVATGATTTTATTTGSGGVTSTSKTTTTASKTSTTTSSTSCTTPTAVAVTFDLTATTTYGENIYLVGSISQLGDWETSDGIALSADKYTSSNPLWYVTVTLPAGESFEYKFIRVESDDSVEWESDPNREYTVPQACGESTATVTDTWR

SEQ ID NO: 45860 - protein, 622 aa, Unidentified
ASVISKRATLDSWLSNEATVARTAILNNIGADGAWVSGADSGIVVASPSTDNPDYFYTWTRDSGIVLKTLVDLFRNGDTDLLSTIEHYISSQAIIQGVSNPSGDLSSGGLGEPKFNVDETAYAGSWGRPQRDGPALRATAMIGFGQWLLDNGYTSAATEIVWPLVRNDLSYVAQYWNQTGYDLWEEVNGSSFFTIAVQHRALVEGSAFATAVGSSCSWCDSQAPQILCYLQSFWTGSYILANFDSSRSGKDTNTLLGSIHTFDPEAGCDDSTFQPCSPRALANHKEVVDSFRSIYTLNDGLSDSEAVAVGRYPEDSYYNGNPWFLCTLAAAEQLYDALYQWDKQGSLEITDVSLDFFKALYSGAATGTYSSSSSTYSSIVSAVKTFADGFVSIVETHAASNGSLSEQFDKSDGDELSARDLTWSYAALLTANNRRNSVVPPSWGETSASSVPGTCAATSASGTYSSVTVTSWPSIVATGGTTTTATTTGSGGVTSTSKTTTTASKTSTTTSSTSCTTPTAVAVTFDLTATTTYGENIYLVGSISQLGDWETSDGIALSADKYTSSNPPWYVTVTLPAGESFEYKFIRVESDDSVEWESDPNREYTVPQACGESTATVTDTWR

SEQ ID NO: 45861 - protein, 621 aa, Saccharomycopsis fibuligera
SVISKRATLDSWLSNEATVARTAILNNIGADGAWVSGADSGIVVASPSTDNPDYFYTWTRDSGIVLKTLVDLFRNGDTDLLSTIEHYISSQAIIQGVSNPSGDLSSGGLGEPKFNVDETAYAGSWGRPQRDGPALRATAMIGFGQWLLDNGYTSAATEIVWPLVRNDLSYVAQYWNQTGYDLWEEVNGSSFFTIAVQHRALVEGSAFATAVGSSCSWCDSQAPQILCYLQSFWTGSYILANFDSSRSGKDTNTLLGSIHTFDPEAGCDDSTFQPCSPRALANHKEVVDSFRSIYTLNDGLSDSEAVAVGRYPEDSYYNGNPWFLCTLAAAEQLYDALYQWDKQGSLEITDVSLDFFKALYSGAATGTYSSSSSTYSSIVSAVKTFADGFVSIVETHAASNGSLSEQFDKSDGDELSARDLTWSYAALLTANNRRNSVVPPSWGETSASSVPGTCAATSASGTYSSVTVTSWPSIVATGGTTTTATTTGSGGVTSTSKTTTTASKTSTTTSSTSCTTPTAVAVTFDLTATTTYGENIYLVGSISQLGDWETSDGIALSADKYTSSNPPWYVTVTLPAGESFEYKFIRVESDDSVEWESDPNREYTVPQACGESTATVTDTWR

SEQ ID NO: 45862 - protein, 639 aa, Unidentified
MSFRSLLALSGLVCSGLASVISKRATLDSWLSNEATVARTAILNNIGADGAWVSGADSGIVVASPSTDNPDYFYTWTRDSGIVLKTLVDLFRNGDTDLLSTIEHYISSQAIIQGVSNPSGDLSSGGLGEPKFNVDETAYAGSWGRPQRDGPALRATAMIGFGQWLLDNGYTSAATEIVWPLVRNDLSYVAQYWNQTGYDLWEEVNGSSFFTIAVQHRALVEGSAFATAVGSSCSWCDSQAPQILCYLQSFWTGSYILANFDSSRSGKDTNTLLGSIHTFDPEAGCDDSTFQPCSPRALANHKEVVDSFRSIYTLNDGLSDSEAVAVGRYPEDSYYNGNPWFLCTLAAAEQLYDALYQWDKQGSLEITDVSLDFFKALYSGAATGTYSSSSSTYSSIVSAVKTFADGFVSIVETHAASNGSLSEQFDKSDGDELSARDLTWSYAALLTANNRRNSVVPPSWGETSASSVPGTCAATSASGTYSSVTVTSWPSIVATGGTTTTATTTGSGGVTSTSKTTTTASKTSTTTSSTSCTTPTAVAVTFDLTATTTYGENIYLVGSISQLGDWETSDGIALSADKYTSSNPPWYVTVTLPAGESFEYKFIRVESDDSVEWESDPNREYTVPQACGESTATVTDTWR

SEQ ID NO: 45863 - protein, 618 aa, Unidentified
SKPATLDSWLSNEATVARTAILNNIGADGAWVSGADSGIVVASPSTDNPDYFYTWTRDSGIVLKTLVDLFRNGDTDLLSTIEHYISSQAIIQGVSNPSGDLSSGGLGEPKFNVDETAYAGSWGRPQRDGPALRATAMIGFGQWLLDNGYTSAATEIVWPLVRNDLSYVAQYWNQTGYDLWEEVNGSSFFTIAVQHRALVEGSAFATAVGSSCSWCDSQAPQILCYLQSFWTGSYILANFDSSRSGKDTNTLLGSIHTFDPEAGCDDSTFQPCSPRALANHKEVVDSFRSIYTLNDGLSDSEAVAVGRYPEDSYYNGNPWFLCTLAAAEQLYDALYQWDKQGSLEITDVSLDFFKALYSGAATGTYSSSSSTYSSIVSAVKTFADGFVSIVETHAASNGSLSEQFDKSDGDELSARDLTWSYAALLTANNRRNSVVPPSWGETSASSVPGTCAATSASGTYSSVTVTSWPSIVATGGTTTTATTTGSGGVTSTSKTTTTASKTSTTTSSTSCTTPTAVAVTFDLTATTTYGENIYLVGSISQLGDWETSDGIALSADKYTSSNPPWYVTVTLPAGESFEYKFIRVESDDSVEWESDPNREYTVPQACGESTATVTDTWR

SEQ ID NO: 45864 - protein, 615 aa, Unidentified
ATLDSWLSNEATVARTAILNNIGADGAWVSGADSGIVVASPSTDNPDYFYTWTRDSGIVLKTLVDLFRNGDTDLLSTIEHYISSQAIIQGVSNPSGDLSSGGLGEPKFNVDETAYAGSWGRPQRDGPALRATAMIGFGQWLLDNGYTSAATEIVWPLVRNDLSYVAQYWNQTGYDLWEEVNGSSFFTIAVQHRALVEGSAFATAVGSSCSWCDSQAPQILCYLQSFWTGSYILANFDSSRSGKDTNTLLGSIHTFDPEAGCDDSTFQPCSPRALANHKEVVDSFRSIYTLNDGLSDSEAVAVGRYPEDSYYNGNPWFLCTLAAAEQLYDALYQWDKQGSLEITDVSLDFFKALYSGAATGTYSSSSSTYSSIVSAVKTFADGFVSIVETHAASNGSLSEQFDKSDGDELSARDLTWSYAALLTANNRRNSVVPPSWGETSASSVPGTCAATSASGTYSSVTVTSWPSIVATGGTTTTATTTGSGGVTSTSKTTTTASKTSTTTSSTSCTTPTAVAVTFDLTATTTTGENIYLVGSISQLGDWETSDGIALSADKYTSSNPPWYVTVTLPAGESFEYKFIRVESDDSVEWESDPNREYTVPQACGESTATVTDTWR

SEQ ID NO: 45865 - protein, 639 aa, Aspergillus awamori
MSFRSLLALSGLVCSGLASVISKRATLDSWLSNEATVARTAILNNIGADGAWVSGADSGIVVASPSTDNPDYFYTWTRDSGLVIKTLVDLFRNGDTDLLSTIEHYISSQAIIQGVSNPSGDLSSGGLGEPKFNVDETAYTGSWGRPQRDGPALRATAMIGFGQWLLDNGYTSAATEIVWPLVRNDLSYVAQYWNQTGYDLWEEVNGSSFFTIAVQHRALVEGSAFATAVGSSCSWCDSQAPQILCYLQSFSSRSGWTGSYILANFDKDTNTLLGSIHTFDPEAGCDDSTFQPCSPRALANHKEVVDSFRSIYTLNDGLSDSEAVAVGRYPEDSYYNGNPWFLCTLAAAEQLYDALYQWDKQGSLEITDVSLDFFKALYSGAATGTYSSSSSTYSSIVSAVKTFADGFVSIVETHAASNGSLSEQFDKSDGDELSARDLTWSYAALLTANNRRNSVVPPSWGETSASSWPGTCAATSASGTYSSVTVTSWPSIVATGATTTTATTTGSGGVTSTSKTTTTASKTSTTTSSTSCTTPTAVAVTFDLTATTTYGENIYLVGSISQLGDWETSDGIALSADKYTSSNPLWYVTVTLPAGESFEYKFIRVESDDSVEWESDPNREYTVPQACGESTATVTDTWR

SEQ ID NO: 45866 - protein, 618 aa, Unidentified
SKPATLDSWLSNEATVARTAILNNIGADGAWVSGADSGIVVASPSTDNPDYFYTWTRDSGIVLKTLVDLFRNGDTDLLSTIEHYISSQAIIQGVSNPSGDLSSGGLGEPKFNVDETAYAGSWGRPQRDGPALRATAMIGFGQWLLDNGYTSAATEIVWPLVRNDLSYVAQYWNQTGYDLWEEVNGSSFFTIAVQHRALVEGSAFATAVGSSCSWCDSQAPQILCYLQSFWTGSYILANFDSSRSGKDTNTLLGSIHTFDPEAGCDDSTFQPCSPRALANHKEVVDSFRSIYTLNDGLSDSEAVAVGRYPEDSYYNGNPWFLCTLAAAEQLYDALYQWDKQGSLEITDVSLDFFKALYSGAATGTYSSSSSTYSSIVSAVKTFADGFVSIVETHAASNGSLSEQFDKSDGDELSARDLTWSYAALLTANNRRNSVVPPSWGETSASSVPGTCAATSASGTYSSVTVTSWPSIVATGGTTTTATTTGSGGVTSTSKTTTTASKTSTTTSSTSCTTPTAVAVTFDLTATTTTGENIYLVGSISQLGDWETSDGIALSADKYTSSNPPWYVTVTLPAGESFEYKFIRVESDDSVEWESDPNREYTVPQACGESTATVTDTWR

SEQ ID NO: 45867 - protein, 639 aa, Unidentified
MSFRSLLALSGLVCSGLANVISKRATLDSWLSNEATVARTAILNNIGADGAWVSGADSGIVVASPSTDNPDYFYTWTRDSGLVIKTLVDLFRNGDTDLLSTIEHYISSQAIIQGVSNPSGDLSSGGLGEPKFNVDETAYTGSWGRPQRDGPALRATAMIGFGQVLLDNGYTSAATEIVWPLVRNDLSYVAQYWNQTGYDLWEEVNGSSFFTIAVQHRALVEGSAFATAVGSSCSWCDSQAPQILCYLQSFWTGSYILANFDSRRSGKDTNTLLGSIHTFDPEAGCDDSTFQPCSPRALANHKEVVDSFRSIYTLNDGLSDSEAVAVGRYPEDSYYNGNPWFQSTLAAAEQLYDALYQWDKQGSLEITDVSLDFFKALYSGAATGTYSSSSSTYSSIVSAVKTFADGFVSIVETHAASNGSLSEQFDKSDGDELSARDLTWSYAALLTANNRRNSVVPPSWGETSASSWPGTCAATSASGTYSSVTVTSWPSIVATGGTTTTATTTGSGGVTSTSKTTTTASKTSTTTSSTSCTTPTAVAVTFDLTATTTYGENIYLVGSISQLGDWETSDGIALSADKYTSSNPLWYVTVTLPAGESFEYKFIRVESDDSVEWESDPNREYTVPQACGESTATVTDTWR

SEQ ID NO: 45868 - protein, 615 aa, unidentified
ATLDSWLSNEATVARTAILNNIGADGAWVSGADSGIVVASPSTDNPDYFYTWTRDSGLVIKTLVDLFRNGDTDLLSTIEHYISSQAIIQGVSNPSGDLSSGGLGEPKFNVDETAYTGSWGRPQRDGPALRATAMIGFGQVLLDNGYTSAATEIVWPLVRNDLSYVAQYWNQTGYDLWEEVNGSSFFTIAVQHRALVEGSAFATAVGSSCSWCDSQAPQILCYLQSFWTGSYILANFDSRRSGKDTNTLLGSIHTFDPEAGCDDSTFQPCSPRALANHKEVVDSFRSIYTLNDGLSDSEAVAVGRYPEDSYYNGNPWFQSTLAAAEQLYDALYQWDKQGSLEITDVSLDFFKALYSGAATGTYSSSSSTYSSIVSAVKTFADGFVSIVETHAASNGSLSEQFDKSDGDELSARDLTWSYAALLTANNRRNSVVPPSWGETSASSWPGTCAATSASGTYSSVTVTSWPSIVATGGTTTTATTTGSGGVTSTSKTTTTASKTSTTTSSTSCTTPTAVAVTFDLTATTTYGENIYLVGSISQLGDWETSDGIALSADKYTSSNPLWYVTVTLPAGESFEYKFIRVESDDSVEWESDPNREYTVPQACGESTATVTDTWR

SEQ ID NO: 45869 - protein, 631 aa, Unidentified
LTALLGICQGSVISKRATLDSWLSNEATVARTAILNNIGADGAWVSGADSGIVVASPSTDNPDYFYTWTRDSGIVLKTLVDLFRNGDTDLLSTIEHYISSQAIIQGVSNPSGDLSSGGLGEPKFNVDETAYAGSWGRPQRDGPALRATAMIGFGQWLLDNGYTSAATEIVWPLVRNDLSYVAQYWNQTGYDLWEEVNGSSFFTIAVQHRALVEGSAFATAVGSSCSWCDSQAPQILCYLQSFWTGSYILANFDSSRSGKDTNTLLGSIHTFDPEAGCDDSTFQPCSPRALANHKEVVDSFRSIYTLNDGLSDSEAVAVGRYPEDSYYNGNPWFLCTLAAAEQLYDALYQWDKQGSLEITDVSLDFFKALYSGAATGTYSSSSSTYSSIVSAVKTFADGFVSIVETHAASNGSLSEQFDKSDGDELSARDLTWSYAALLTANNRRNSVVPPSWGETSASSVPGTCAATSASGTYSSVTVTSWPSIVATGGTTTTATTTGSGGVTSTSKTTTTASKTSTTTSSTSCTTPTAVAVTFDLTATTTYGENIYLVGSISQLGDWETSDGIALSADKYTSSNPPWYVTVTLPAGESFEYKFIRVESDDSVEWESDPNREYTVPQACGESTATVTDTWR

SEQ ID NO: 45870 - protein, 646 aa, Aspergillus awamori
VSFTSLLAGVAAISGVLAAPAAEVEPVAVEKRTLDSWLSNEATVARTAILNNIGADGAWVSGADSGIVVASPSTDNPDYFYTWTRDSGLVIKTLVDLFRNGDTDLLSTIEHYISSQAIIQGVSNPSGDLSSGGLGEPKFNVDETAYTGSWGRPQRDGPALRATAMIGFGQWLLDNGYTSAATEIVWPLVRNDLSYVAQYWNQTGYDLWEEVNGSSFFTIAVQHRALVEGSAFATAVGSSCSWCDSQAPQILCYLQSFWTGSYILANFDSSRSGKDTNTLLGSIHTFDPEAGCDDSTFQPCSPRALANHKEVVDSFRSIYTLNDGLSDSEAVAVGRYPEDSYYNGNPWFLCTLAAAEQLYDALYQWDKQGSLEITDVSLDFFKALYSGAATGTYSSSSSTYSSIVSAVKTFADGFVSIVETHAASNGSLSEQFDKSDGDELSARDLTWSYAALLTANNRRNSVVPPSWGETSASSVPGTCAATSASGTYSSVTVTSWPSIVATGGTTTTATTTGSGGVTSTSKTTTTASKTSTTTSSTSCTTPTAVAVTFDLTATTTYGENIYLVGSISQLGDWETSDGIALSADKYTSSNPLWYVTVTLPAGESFEYKFIRVESDDSVEWESDPNREYTVPQACGESTATVTDTWR

SEQ ID NO: 45871 - protein, 634 aa, Unidentified
LFLLAGFAAKISASVISKRATLDSWLSNEATVARTAILNNIGADGAWVSGADSGIVVASPSTDNPDYFYTWTRDSGIVLKTLVDLFRNGDTDLLSTIEHYISSQAIIQGVSNPSGDLSSGGLGEPKFNVDETAYAGSWGRPQRDGPALRATAMIGFGQWLLDNGYTSAATEIVWPLVRNDLSYVAQYWNQTGYDLWEEVNGSSFFTIAVQHRALVEGSAFATAVGSSCSWCDSQAPQILCYLQSFWTGSYILANFDSSRSGKDTNTLLGSIHTFDPEAGCDDSTFQPCSPRALANHKEVVDSFRSIYTLNDGLSDSEAVAVGRYPEDSYYNGNPWFLCTLAAAEQLYDALYQWDKQGSLEITDVSLDFFKALYSGAATGTYSSSSSTYSSIVSAVKTFADGFVSIVETHAASNGSLSEQFDKSDGDELSARDLTWSYAALLTANNRRNSVVPPSWGETSASSVPGTCAATSASGTYSSVTVTSWPSIVATGGTTTTATTTGSGGVTSTSKTTTTASKTSTTTSSTSCTTPTAVAVTFDLTATTTYGENIYLVGSISQLGDWETSDGIALSADKYTSSNPPWYVTVTLPAGESFEYKFIRVESDDSVEWESDPNREYTVPQACGESTATVTDTWR

SEQ ID NO: 45872 - protein, 640 aa, Unidentified
MRFPSIFTAVLFAASSALASVISKRATLDSWLSNEATVARTAILNNIGADGAWVSGADSGIVVASPSTDNPDYFYTWTRDSGIVLKTLVDLFRNGDTDLLSTIEHYISSQAIIQGVSNPSGDLSSGGLGEPKFNVDETAYAGSWGRPQRDGPALRATAMIGFGQWLLDNGYTSAATEIVWPLVRNDLSYVAQYWNQTGYDLWEEVNGSSFFTIAVQHRALVEGSAFATAVGSSCSWCDSQAPQILCYLQSFWTGSYILANFDSSRSGKDTNTLLGSIHTFDPEAGCDDSTFQPCSPRALANHKEVVDSFRSIYTLNDGLSDSEAVAVGRYPEDSYYNGNPWFLCTLAAAEQLYDALYQWDKQGSLEITDVSLDFFKALYSGAATGTYSSSSSTYSSIVSAVKTFADGFVSIVETHAASNGSLSEQFDKSDGDELSARDLTWSYAALLTANNRRNSVVPPSWGETSASSVPGTCAATSASGTYSSVTVTSWPSIVATGGTTTTATTTGSGGVTSTSKTTTTASKTSTTTSSTSCTTPTAVAVTFDLTATTTYGENIYLVGSISQLGDWETSDGIALSADKYTSSNPPWYVTVTLPAGESFEYKFIRVESDDSVEWESDPNREYTVPQACGESTATVTDTWR

SEQ ID NO: 45873 - protein, 639 aa, Unidentified
MKWVTFISLLFLFSSAYSSVISKRATLDSWLSNEATVARTAILNNIGADGAWVSGADSGIVVASPSTDNPDYFYTWTRDSGIVLKTLVDLFRNGDTDLLSTIEHYISSQAIIQGVSNPSGDLSSGGLGEPKFNVDETAYAGSWGRPQRDGPALRATAMIGFGQWLLDNGYTSAATEIVWPLVRNDLSYVAQYWNQTGYDLWEEVNGSSFFTIAVQHRALVEGSAFATAVGSSCSWCDSQAPQILCYLQSFWTGSYILANFDSSRSGKDTNTLLGSIHTFDPEAGCDDSTFQPCSPRALANHKEVVDSFRSIYTLNDGLSDSEAVAVGRYPEDSYYNGNPWFLCTLAAAEQLYDALYQWDKQGSLEITDVSLDFFKALYSGAATGTYSSSSSTYSSIVSAVKTFADGFVSIVETHAASNGSLSEQFDKSDGDELSARDLTWSYAALLTANNRRNSVVPPSWGETSASSVPGTCAATSASGTYSSVTVTSWPSIVATGGTTTTATTTGSGGVTSTSKTTTTASKTSTTTSSTSCTTPTAVAVTFDLTATTTYGENIYLVGSISQLGDWETSDGIALSADKYTSSNPPWYVTVTLPAGESFEYKFIRVESDDSVEWESDPNREYTVPQACGESTATVTDTWR

SEQ ID NO: 45874 - protein, 629 aa, Synthetic construct
MSFRSLLALSGLVCTGLANVISKRATLDSWLSNEATVARTAILNNIGADGAWVSGADSGIVVASPSTDNPDYFYTWTRDSGLVLKTLVDLFRNGDTSLLSTIENYISAQAIVQGISNPSGDLSSGAGLGEPKFNVDETAYTGSWGRPQRDGPALRATAMIGFGQWLLDNGYTSTATDIVWPLVRNDLSYVAQYWNQTGYDLWEEVNGSSFFTIAVQHRALVEGSAFATAVGSSCSWCDSQAPEILCYLQSFWTGSFILANFDSSRSGKDANTLLGSIHTFDPEAACDDSTFQPCSPRALANHKEVVDSFRSIYTLNDGLSDSEAVAVGRYPEDTYYNGNPWFLCTLAAAEQLYDALYQWDKQGSLEVTDVSLDFFKALYSDAATGTYSSSSSTYSSIVDAVKTFADGFVSIVETHAASNGSMSEQYDKSDGEQLSARDLTWSYAALLTANNRRNSVVPASWGETSASSVPGTCAATSAIGTYSSVTVTSWPSIVATGGTTTTATPTGSGSVTSTSKTTATASVISKRDIQMTQSPSSLSASVGDRVTITCRASQDVNTAVAWYQQKPGKAPKLLIYSASFLYSGVPSRFSGSRSGTDFTLTISSLQPEDFATYYCQQHYTTPPTFGQGT

SEQ ID NO: 45875 - protein, 628 aa, Synthetic construct
MSFRSLLALSGLVCTGLANVISKRATLDSWLSNEATVARTAILNNIGADGAWVSGADSGIVVASPSTDNPDYFYTWTRDSGLVLKTLVDLFRNGDTSLLSTIENYISAQAIVQGISNPSGDLSSGAGLGEPKFNVDETAYTGSWGRPQRDGPALRATAMIGFGQWLLDNGYTSTATDIVWPLVRNDLSYVAQYWNQTGYDLWEEVNGSSFFTIAVQHRALVEGSAFATAVGSSCSWCDSQAPEILCYLQSFWTGSFILANFDSSRSGKDANTLLGSIHTFDPEAACDDSTFQPCSPRALANHKEVVDSFRSIYTLNDGLSDSEAVAVGRYPEDTYYNGNPWFLCTLAAAEQLYDALYQWDKQGSLEVTDVSLDFFKALYSDAATGTYSSSSSTYSSIVDAVKTFADGFVSIVETHAASNGSMSEQYDKSDGEQLSARDLTWSYAALLTANNRRNSVVPASWGETSASSVPGTCAATSAIGTYSSVTVTSWPSIVATGGTTTTATPTGSGSVTSTSKTTATASISKRDIQMTQSPSSLSASVGDRVTITCRASQDVNTAVAWYQQKPGKAPKLLIYSASFLYSGVPSRFSGSRSGTDFTLTISSLQPEDFATYYCQQHYTTPPTFGQGT

SEQ ID NO: 45876 - protein, 605 aa, Synthetic construct
ATLDSWLSNEATVARTAILNNIGADGAWVSGADSGIVVASPSTDNPDYFYTWTRDSGLVLKTLVDLFRNGDTSLLSTIENYISAQAIVQGISNPSGDLSSGAGLGEPKFNVDETAYTGSWGRPQRDGPALRATAMIGFGQWLLDNGYTSTATDIVWPLVRNDLSYVAQYWNQTGYDLWEEVNGSSFFTIAVQHRALVEGSAFATAVGSSCSWCDSQAPEILCYLQSFWTGSFILANFDSSRSGKDANTLLGSIHTFDPEAACDDSTFQPCSPRALANHKEVVDSFRSIYTLNDGLSDSEAVAVGRYPEDTYYNGNPWFLCTLAAAEQLYDALYQWDKQGSLEVTDVSLDFFKALYSDAATGTYSSSSSTYSSIVDAVKTFADGFVSIVETHAASNGSMSEQYDKSDGEQLSARDLTWSYAALLTANNRRNSVVPASWGETSASSVPGTCAATSAIGTYSSVTVTSWPSIVATGGTTTTATPTGSGSVTSTSKTTATASVISKRDIQMTQSPSSLSASVGDRVTITCRASQDVNTAVAWYQQKPGKAPKLLIYSASFLYSGVPSRFSGSRSGTDFTLTISSLQPEDFATYYCQQHYTTPPTFGQGT

SEQ ID NO: 45877 - protein, 604 aa, Synthetic construct
ATLDSWLSNEATVARTAILNNIGADGAWVSGADSGIVVASPSTDNPDYFYTWTRDSGLVLKTLVDLFRNGDTSLLSTIENYISAQAIVQGISNPSGDLSSGAGLGEPKFNVDETAYTGSWGRPQRDGPALRATAMIGFGQWLLDNGYTSTATDIVWPLVRNDLSYVAQYWNQTGYDLWEEVNGSSFFTIAVQHRALVEGSAFATAVGSSCSWCDSQAPEILCYLQSFWTGSFILANFDSSRSGKDANTLLGSIHTFDPEAACDDSTFQPCSPRALANHKEVVDSFRSIYTLNDGLSDSEAVAVGRYPEDTYYNGNPWFLCTLAAAEQLYDALYQWDKQGSLEVTDVSLDFFKALYSDAATGTYSSSSSTYSSIVDAVKTFADGFVSIVETHAASNGSMSEQYDKSDGEQLSARDLTWSYAALLTANNRRNSVVPASWGETSASSVPGTCAATSAIGTYSSVTVTSWPSIVATGGTTTTATPTGSGSVTSTSKTTATASISKRDIQMTQSPSSLSASVGDRVTITCRASQDVNTAVAWYQQKPGKAPKLLIYSASFLYSGVPSRFSGSRSGTDFTLTISSLQPEDFATYYCQQHYTTPPTFGQGT

SEQ ID NO: 45878 - protein, 606 aa, Penicillium sumatraense
SLDTWLASETAVARQGILDNIGSDGAYAKSSDAGIVIASPSTDSPDYYYTWTRDSALVMKTLVDLFKNGDTELLTVIEEYISSQAHIQTVSNPSGGLSSGGLGEPKFNVDETAYTGSWGRPQRDGPALRATAMVAFGQWLIDNGYTSTATDIVWPIVRNDLSYVAQYWNSSGYDLWEEVNGESFFTTAVQHRALVEGSKFASQVGSSCSYCDSQAPQVLCFLQSYWTGSYTLANFGSSRTGKDANTLLGSIHTFDPEAGCDDTTFQPCSARALANHKVVTDSFRSIYTVNSGKSAGQAVAVGRYPEDSYYNGNPWYLCTMAAAEQLYDALYQWNKAGSLTISSVSLNFFTDLYSSAATGTYSSSSATYSSIVSAVKTYADGYMSIAEQYAYTNGSMSEQFSKSDGTPESARDLTWSYAALLTANMRRNSVVPPAWGETSASSVPGTCSATSATGTYSTATNTNWPSTLTSGSGSTTTGGTTTSKSTTTTSKTSTTTTSCTTPTTVAVTFNVIATTVYGENIKLAGSISALGSWDTSSAIALSASKYTSSNHLWYVTVNLAAGQVFQYKYIRVESDSTIEWESDPNRSYTVPAACSTTAVTISDTWR

SEQ ID NO: 45879 - protein, 613 aa, Penicillium sumatraense
LAPRATGSLDTWLASETAVARQGILDNIGSDGAYAKSSDAGIVIASPSTDSPDYYYTWTRDSALVMKTLVDLFKNGDTELLTVIEEYISSQAHIQTVSNPSGGLSSGGLGEPKFNVDETAYTGSWGRPQRDGPALRATAMVAFGQWLIDNGYTSTATDIVWPIVRNDLSYVAQYWNSSGYDLWEEVNGESFFTTAVQHRALVEGSKFASQVGSSCSYCDSQAPQVLCFLQSYWTGSYTLANFGSSRTGKDANTLLGSIHTFDPEAGCDDTTFQPCSARALANHKVVTDSFRSIYTVNSGKSAGQAVAVGRYPEDSYYNGNPWYLCTMAAAEQLYDALYQWNKAGSLTISSVSLNFFTDLYSSAATGTYSSSSATYSSIVSAVKTYADGYMSIAEQYAYTNGSMSEQFSKSDGTPESARDLTWSYAALLTANMRRNSVVPPAWGETSASSVPGTCSATSATGTYSTATNTNWPSTLTSGSGSTTTGGTTTSKSTTTTSKTSTTTTSCTTPTTVAVTFNVIATTVYGENIKLAGSISALGSWDTSSAIALSASKYTSSNHLWYVTVNLAAGQVFQYKYIRVESDSTIEWESDPNRSYTVPAACSTTAVTISDTWR

SEQ ID NO: 45880 - protein, 607 aa, Fusarium oxysporum
SLDTWLASEKAVAREGILDNIGSDGAYAKSSKSGIVIASPSTDSPDYYYTWTRDSALVMKTLVDLFKNGDTDLLTVIEEYISSQAYIQTVSNPSGSLSSGGLGEPKFNVDETSYTGSWGRPQRDGPALRATALVAFGQWLIDNGYTSTATDIVWPIVRNDLSYVAQYWNSSGYDLWEEVNGESFFTTAVQHRALVEGSKFASQVGSSCSYCDSQAPQVLCFLQSYWTGSYTLANFGSSRTGKDANTLLGSIHTFDPEAGCDDTTFQPCSARALANHKVVTDSFRSIYTVNSGKSAGQAVAVGRYPEDSYYNGNPWYLCTMAAAELLYDALYQWNKAGSLTISSVSLSFFTDLYSSAATGTYSSSSSTFSSIVSAVKTYADGYMSIAEQYAYTNGSMSEQFSKSDGTPESARDLTWSYAALLTANMRRNSVVPPTWGETSASSVPGTCSATSATGTYSTATNTNWPVTLTGGSGSTTTGGTTTSKTSTTTTSKTSTTTTSCTTPTSVAVTFDVIATTSYGENIKLAGSIAALGSWDTSSAIALSADKYTSSNNLWYVTVNLAAGQVIQYKYIRVESDSTIEWESDPNRSYTVPAACATTAVTISDTWR

SEQ ID NO: 45881 - protein, 614 aa, Fusarium oxysporum
LAPRATGSLDTWLASEKAVAREGILDNIGSDGAYAKSSKSGIVIASPSTDSPDYYYTWTRDSALVMKTLVDLFKNGDTDLLTVIEEYISSQAYIQTVSNPSGSLSSGGLGEPKFNVDETSYTGSWGRPQRDGPALRATALVAFGQWLIDNGYTSTATDIVWPIVRNDLSYVAQYWNSSGYDLWEEVNGESFFTTAVQHRALVEGSKFASQVGSSCSYCDSQAPQVLCFLQSYWTGSYTLANFGSSRTGKDANTLLGSIHTFDPEAGCDDTTFQPCSARALANHKVVTDSFRSIYTVNSGKSAGQAVAVGRYPEDSYYNGNPWYLCTMAAAELLYDALYQWNKAGSLTISSVSLSFFTDLYSSAATGTYSSSSSTFSSIVSAVKTYADGYMSIAEQYAYTNGSMSEQFSKSDGTPESARDLTWSYAALLTANMRRNSVVPPTWGETSASSVPGTCSATSATGTYSTATNTNWPVTLTGGSGSTTTGGTTTSKTSTTTTSKTSTTTTSCTTPTSVAVTFDVIATTSYGENIKLAGSIAALGSWDTSSAIALSADKYTSSNNLWYVTVNLAAGQVIQYKYIRVESDSTIEWESDPNRSYTVPAACATTAVTISDTWR

SEQ ID NO: 45882 - protein, 609 aa, Elaphocordyceps ophioglossoides
SLDTWLASETTVARQGILNNIGSAGAYSASAKPGILIASPSTSSPDYYYTWTRDSALVFKALVDMFKNGDTALLTVIEEYISAQAYIQTVSNPSGGLSSGGLGEPKFNVDETAFTGSWGRPQRDGPALRATALISFGQWLLDNGYSTYATNIVWPVVRNDLSYVAQYWNQTGYDLWEEVSGSSFFTIAAQHRALVEGSTFATRVGASCSYCDSQAPQVLCFLQSFWTGSYTLANFGGGRSGKDANTLLGSIHTFDPEAGCDDTTFQPCSARALANHKVVTDSFRSVYTINSGIAAGKAVSVGRYSEDSYYNGNPWYLCTLAAAEQLYDALYTWNRVGSLTITSVSLSFFKDLYSSAATGTYSSSSATYSSIVSAVKTYADGYVSIVENYALTNGSMSEQFSKSDGSQLSARDLTWSYAALLTANERRNAVVPAPWGETAASSVPAQCSSTSATGTFSTATNTAWPSTLTSGTGSGTTTTGTGTTTKATTTTSTKTTSTTTSCTTPTSVAVTFDVIATTVYGENIKLAGSISQLGSWDTSSAIALSASSYTSSNHLWYVTVTLPAGSTFTYKYIRVESDGSIQWESDPNLSYTVPQACGTSAVTISDTWR

SEQ ID NO: 45883 - protein, 616 aa, Elaphocordyceps ophioglossoides
LAPRATGSLDTWLASETTVARQGILNNIGSAGAYSASAKPGILIASPSTSSPDYYYTWTRDSALVFKALVDMFKNGDTALLTVIEEYISAQAYIQTVSNPSGGLSSGGLGEPKFNVDETAFTGSWGRPQRDGPALRATALISFGQWLLDNGYSTYATNIVWPVVRNDLSYVAQYWNQTGYDLWEEVSGSSFFTIAAQHRALVEGSTFATRVGASCSYCDSQAPQVLCFLQSFWTGSYTLANFGGGRSGKDANTLLGSIHTFDPEAGCDDTTFQPCSARALANHKVVTDSFRSVYTINSGIAAGKAVSVGRYSEDSYYNGNPWYLCTLAAAEQLYDALYTWNRVGSLTITSVSLSFFKDLYSSAATGTYSSSSATYSSIVSAVKTYADGYVSIVENYALTNGSMSEQFSKSDGSQLSARDLTWSYAALLTANERRNAVVPAPWGETAASSVPAQCSSTSATGTFSTATNTAWPSTLTSGTGSGTTTTGTGTTTKATTTTSTKTTSTTTSCTTPTSVAVTFDVIATTVYGENIKLAGSISQLGSWDTSSAIALSASSYTSSNHLWYVTVTLPAGSTFTYKYIRVESDGSIQWESDPNLSYTVPQACGTSAVTISDTWR

SEQ ID NO: 45884 - protein, 614 aa, Rasamsonia emersonii
ASLSSWLATETSYALEAILNNIGSSGAWAQSASPGIVVASPSTSDPDYYYTWTRDSALTLKVLIDLFKNGNSSLQGVIEEYIDAQAYLQTVSNPSGTLSTGGLGEPKFNVDKTAFTGSWGRPQRDGPALRATALISFGEWLIDNGYSTYASDIVWPIVRNDLSYVAQYWNETGYDLWEEVDGSSFFTVAVQHRALVEGANFASALGTSCDYCTSQAPEILCYLQSFWTGSYILANFQSSRSGKDVNTILGSIHTFDPEAACDDTTFQPCSPRALANHKVVVDAFRDLYTINNNAAEGVAVAVGRYPEDTYYNGNPWFLCTLAAAEQLYDALYQWNNIGSITITDVSLDFFQDLYSDAAVGTYSSSSSEYSAIVDAVKTYADGFVSIVENYALTNGSLSEQYSKTDGTQESARDLTWSYAALLTANMRRNSIVPAAWGETAASSVPATCVSTSATGIYSTATDTAWPSTLTAATTTATATTTTTTTTSKTTTSTGTSTISTTSSSSSCTTPTSVAVTFKLTATTYYGENIKMSGSIPQLGDWDTDDAVALSAANYTSTDPLWFVTINLPAGESFEYKYIRIESDGTIEWESDPNRSYTVPAACGETAAVESDTWR

SEQ ID NO: 45885 - protein, 621 aa, Rasamsonia emersonii
LLKSRATASLSSWLATETSYALEAILNNIGSSGAWAQSASPGIVVASPSTSDPDYYYTWTRDSALTLKVLIDLFKNGNSSLQGVIEEYIDAQAYLQTVSNPSGTLSTGGLGEPKFNVDKTAFTGSWGRPQRDGPALRATALISFGEWLIDNGYSTYASDIVWPIVRNDLSYVAQYWNETGYDLWEEVDGSSFFTVAVQHRALVEGANFASALGTSCDYCTSQAPEILCYLQSFWTGSYILANFQSSRSGKDVNTILGSIHTFDPEAACDDTTFQPCSPRALANHKVVVDAFRDLYTINNNAAEGVAVAVGRYPEDTYYNGNPWFLCTLAAAEQLYDALYQWNNIGSITITDVSLDFFQDLYSDAAVGTYSSSSSEYSAIVDAVKTYADGFVSIVENYALTNGSLSEQYSKTDGTQESARDLTWSYAALLTANMRRNSIVPAAWGETAASSVPATCVSTSATGIYSTATDTAWPSTLTAATTTATATTTTTTTTSKTTTSTGTSTISTTSSSSSCTTPTSVAVTFKLTATTYYGENIKMSGSIPQLGDWDTDDAVALSAANYTSTDPLWFVTINLPAGESFEYKYIRIESDGTIEWESDPNRSYTVPAACGETAAVESDTWR

SEQ ID NO: 45886 - protein, 379 aa, Penicillium chrysogenum
QSFWTGSYILANFGGGRSGKDANTLLGSIHTFDPEAGCDDTTFQPCSARALANHKVVTDSFRSIYSVNSGIAAGKAVSVGRYPEDSYYNGNPWYLCTLAAAEQLYDAIYTWNHIGSLTITSVSLSFFKDLYSSAATGTYSSSSDTYSSIVAAVKEYADGYVSIVEKYAASSGSLSEQFSKSDGSQLSARDLTWSYAALLTANERRNAIVPAPWGETSASSVPGQCQYTSAIGTYSSATNTAWPTTLTSGSGSVTTTKTTTTTSKTTTTTTSCTTPTTVAVTFNVIATTEYGQNIKLAGSISQLGSWSPSSAVALSASKYTTSNHLWFVTVTLPVGTSFSYKYIQVASDGTIKWESDPNQSYTVPATCGTTAITISDTWR

SEQ ID NO: 45887 - protein, 632 aa, Rasamsonia emersonii
LALSPAVMADPLLKSRATASLSSWLATETSYALEAILNNIGSSGAWAQSASPGIVVASPSTSDPDYYYTWTRDSALTLKVLIDLFKNGNSSLQGVIEEYIDAQAYLQTVSNPSGTLSTGGLGEPKFNVDKTAFTGSWGRPQRDGPALRATALISFGEWLIDNGYSTYASDIVWPIVRNDLSYVAQYWNETGYDLWEEVDGSSFFTVAVQHRALVEGANFASALGTSCDYCTSQAPEILCYLQSFWTGSYILANFQSSRSGKDVNTILGSIHTFDPEAACDDTTFQPCSPRALANHKVVVDAFRDLYTINNNAAEGVAVAVGRYPEDTYYNGNPWFLCTLAAAEQLYDALYQWNNIGSITITDVSLDFFQDLYSDAAVGTYSSSSSEYSAIVDAVKTYADGFVSIVENYALTNGSLSEQYSKTDGTQESARDLTWSYAALLTANMRRNSIVPAAWGETAASSVPATCVSTSATGIYSTATDTAWPSTLTAATTTATATTTTTTTTSKTTTSTGTSTISTTSSSSSCTTPTSVAVTFKLTATTYYGENIKMSGSIPQLGDWDTDDAVALSAANYTSTDPLWFVTINLPAGESFEYKYIRIESDGTIEWESDPNRSYTVPAACGETAAVESDTWR

SEQ ID NO: 45888 - protein, 600 aa, Penicillium chrysogenum
SLDTWLASETVVARQGILDNIGSAGAHAANAKPGVVLASPSTSDPDYYYTWTRDSALVFKNLVDMFRSGDSALLEVIEEYISSQAYIQTVSNPSGGLSGGGGLGEPKFNADETAFTGSWGRPQRDGPALRATALISFGQWLIDNGYTTYATDIVWPVVRNDLSYVSQYWNQTGFDLWEEVSGSSFFTVAAQHRALVEGSTFASQVGSSCLYCDSQAPQVLCFLQSFWTGSYILANFGGGRSGKDANTLLGSIHTFDPEAGCDDTTFQPCSARALANHKVVTDSFRSIYSVNSGIAAGKAVSVGRYPEDSYYNGNPWYLCTLAAAEQLYDAIYTWNRIGSLTITSVSLSFFKDLYSSAATGTYSSSSDTYSSIVAAVKEYADGYVSIVEKYAASSGSLSEQFSKSDGSQLSARDLTWSYAALLTANERRNAIVPAPWGETSASSVPGQCQYTSAIGTYSSATNTAWPTTLTSGSGSVTTTKTTTTTSKPTTTSCTTPTTVAVTFNVIATTEYGQNIKLAGSISQLGSWSPSSAVALSASKYTTSNHLWFVTVTLPVGTSFSYKYIQVASDGTIKWESDPNQSYTVPATCGTTAVTVSDTWR

SEQ ID NO: 45889 - protein, 606 aa, Aspergillus terreus
SLDAWLASETTVALDGILDNVGSSGAYAKSAKSGIVIASPSTSDPDYYYTWTRDAALTVKALIDLFRNGETSLQTVIMEYISSQAYLQTVSNPSGSLSTGGLAEPKYYVDETAYTGSWGRPQRDGPALRATAMIDFGNWLIDNGYSTYASSIVWPIVRNDLSYVAQYWNQTGYDLWEEVNGSSFFTIAVQHRALVEGSTFASKVGASCSWCDSQAPQVLCFLQRFWTGSYIMANFGGGRSGKDANTVLGSIHTFDPNAGCDDTTFQPCSPRALANHKVYTDSFRSIYSINSGISSGKAVAVGRYPEDSYYNGNPWFLTTLAAAEQLYDAIYQWQKIGSITITDVSLAFFKDLYSSAAVGTYASSSSAFTSIVSAVKTYADGYMSIVQTHAMTNGSLSEQFGKSDGFSLSARDLTWSYAALLTANLRRNSVVPPSWGETTATSVPSVCSATSATGTYSTATNTAWPSTLTSGTGATTTTSKATSSSTTTTSSASSTTVECVVPTAVAVTFDEVATTTYGENVYVVGSISQLGSWDTSKAVALSASKYTSSNNLWYVTVTLPAGTTFQYKFIRVSSSGSVTWESDPNRSYTVPSACGTSTAVVNTTWR

SEQ ID NO: 45890 - protein, 613 aa, Aspergillus terreus
LAPRATTSLDAWLASETTVALDGILDNVGSSGAYAKSAKSGIVIASPSTSDPDYYYTWTRDAALTVKALIDLFRNGETSLQTVIMEYISSQAYLQTVSNPSGSLSTGGLAEPKYYVDETAYTGSWGRPQRDGPALRATAMIDFGNWLIDNGYSTYASSIVWPIVRNDLSYVAQYWNQTGYDLWEEVNGSSFFTIAVQHRALVEGSTFASKVGASCSWCDSQAPQVLCFLQRFWTGSYIMANFGGGRSGKDANTVLGSIHTFDPNAGCDDTTFQPCSPRALANHKVYTDSFRSIYSINSGISSGKAVAVGRYPEDSYYNGNPWFLTTLAAAEQLYDAIYQWQKIGSITITDVSLAFFKDLYSSAAVGTYASSSSAFTSIVSAVKTYADGYMSIVQTHAMTNGSLSEQFGKSDGFSLSARDLTWSYAALLTANLRRNSVVPPSWGETTATSVPSVCSATSATGTYSTATNTAWPSTLTSGTGATTTTSKATSSSTTTTSSASSTTVECVVPTAVAVTFDEVATTTYGENVYVVGSISQLGSWDTSKAVALSASKYTSSNNLWYVTVTLPAGTTFQYKFIRVSSSGSVTWESDPNRSYTVPSACGTSTAVVNTTWR

SEQ ID NO: 45891 - protein, 604 aa, Aspergillus versicolor
SLDAWLASETTVALDGILDNVGSSGAYAKSAKSGIVIASPSTDNPDYYYTWTRDAALTVKALIDLFRNGETSLQTVIMEYISSQAYLQTVSNPSGSLSTGGLAEPKYYVDETAYTGSWGRPQRDGPALRATAMIDFGNWLIDNGYSTYASNIVWPIVRNDLSYVAQYWNQTGYDLWEEVNGSSFFTIAVQHRALVEGSTFASKVGASCSWCDSQAPQVLCFLQRFWTGSYIMANFGGGRSGKDANTVLGSIHTFDPNAGCDDTTFQPCSPRALANHKVYTDSFRSIYSINSGISQGKAVAVGRYPEDSYYNGNPWFLTTLAAAEQLYDAIYQWQKIGSITITDVSLAFFKDLYSSAAVGTYASSSSAFTSIVNAVKTYADGYMSIVQTHAMTNGSLSEQFGKSDGFSLSARDLTWSYAALLTANLRRNSVVPPSWGETTATSVPSVCSATSATGTYSTATNTAWPSTLTSGTGATTTTSKATSTTTTSSASTTTAGCVVPTAVAVTFDEIATTTYGENVYVVGSISQLGSWDTSKAVALSASKYTSSNNLWYATVTLPAGTTFQYKFIRVSSSGTVTWESDPNRSYTVPSACGTSTAVVNTTWR

SEQ ID NO: 45892 - protein, 611 aa, unidentified
LAPRATTSLDAWLASETTVALDGILDNVGSSGAYAKSAKSGIVIASPSTDNPDYYYTWTRDAALTVKALIDLFRNGETSLQTVIMEYISSQAYLQTVSNPSGSLSTGGLAEPKYYVDETAYTGSWGRPQRDGPALRATAMIDFGNWLIDNGYSTYASNIVWPIVRNDLSYVAQYWNQTGYDLWEEVNGSSFFTIAVQHRALVEGSTFASKVGASCSWCDSQAPQVLCFLQRFWTGSYIMANFGGGRSGKDANTVLGSIHTFDPNAGCDDTTFQPCSPRALANHKVYTDSFRSIYSINSGISQGKAVAVGRYPEDSYYNGNPWFLTTLAAAEQLYDAIYQWQKIGSITITDVSLAFFKDLYSSAAVGTYASSSSAFTSIVNAVKTYADGYMSIVQTHAMTNGSLSEQFGKSDGFSLSARDLTWSYAALLTANLRRNSVVPPSWGETTATSVPSVCSATSATGTYSTATNTAWPSTLTSGTGATTTTSKATSTTTTSSASTTTAGCVVPTAVAVTFDEIATTTYGENVYVVGSISQLGSWDTSKAVALSASKYTSSNNLWYATVTLPAGTTFQYKFIRVSSSGTVTWESDPNRSYTVPSACGTSTAVVNTTWR

SEQ ID NO: 45893 - protein, 626 aa, Aspergillus terreus
LTALLGICQGAPQLAPRATTSLDAWLASETTVALDGILDNVGSSGAYAKSAKSGIVIASPSTSDPDYYYTWTRDAALTVKALIDLFRNGETSLQTVIMEYISSQAYLQTVSNPSGSLSTGGLAEPKYYVDETAYTGSWGRPQRDGPALRATAMIDFGNWLIDNGYSTYASSIVWPIVRNDLSYVAQYWNQTGYDLWEEVNGSSFFTIAVQHRALVEGSTFASKVGASCSWCDSQAPQVLCFLQRFWTGSYIMANFGGGRSGKDANTVLGSIHTFDPNAGCDDTTFQPCSPRALANHKVYTDSFRSIYSINSGISSGKAVAVGRYPEDSYYNGNPWFLTTLAAAEQLYDAIYQWQKIGSITITDVSLAFFKDLYSSAAVGTYASSSSAFTSIVSAVKTYADGYMSIVQTHAMTNGSLSEQFGKSDGFSLSARDLTWSYAALLTANLRRNSVVPPSWGETTATSVPSVCSATSATGTYSTATNTAWPSTLTSGTGATTTTSKATSSSTTTTSSASSTTVECVVPTAVAVTFDEVATTTYGENVYVVGSISQLGSWDTSKAVALSASKYTSSNNLWYVTVTLPAGTTFQYKFIRVSSSGSVTWESDPNRSYTVPSACGTSTAVVNTTWR

SEQ ID NO: 45894 - protein, 628 aa, Aspergillus versicolor
LALHGLALVQSVVGAPQLAPRATTSLDAWLASETTVALDGILDNVGSSGAYAKSAKSGIVIASPSTDNPDYYYTWTRDAALTVKALIDLFRNGETSLQTVIMEYISSQAYLQTVSNPSGSLSTGGLAEPKYYVDETAYTGSWGRPQRDGPALRATAMIDFGNWLIDNGYSTYASNIVWPIVRNDLSYVAQYWNQTGYDLWEEVNGSSFFTIAVQHRALVEGSTFASKVGASCSWCDSQAPQVLCFLQRFWTGSYIMANFGGGRSGKDANTVLGSIHTFDPNAGCDDTTFQPCSPRALANHKVYTDSFRSIYSINSGISQGKAVAVGRYPEDSYYNGNPWFLTTLAAAEQLYDAIYQWQKIGSITITDVSLAFFKDLYSSAAVGTYASSSSAFTSIVNAVKTYADGYMSIVQTHAMTNGSLSEQFGKSDGFSLSARDLTWSYAALLTANLRRNSVVPPSWGETTATSVPSVCSATSATGTYSTATNTAWPSTLTSGTGATTTTSKATSTTTTSSASTTTAGCVVPTAVAVTFDEIATTTYGENVYVVGSISQLGSWDTSKAVALSASKYTSSNNLWYATVTLPAGTTFQYKFIRVSSSGTVTWESDPNRSYTVPSACGTSTAVVNTTWR

SEQ ID NO: 45895 - protein, 609 aa, Unidentified
RATTSLDSWLASETSVALTGILNNIGSSGAYAQTASPGIVIASPSTSNPDYYYTWTRDAALTMKVLIDLFKNGNSSLLTVIEQYIDAQAYLQTVSNPSGSLSSGGLGEPKFNVDETAFTGAWGRPQRDGPALRATALIAFGQWLIDNGYSTYASSIVWPIVRNDLSYLAQYWNQTGYELWEEVSGSSFFTLAVQHRALVEGSSFASQLGTSCPYCDSQAPQILCFLQSFWTGEYILANFGSSRSGKDANTLLGSIHTFDPAAGCDDTTFQPCSSRALANHKVVTDSFRSIYTINSGISEGTAVAVGRYPEDSYYNGNPWFICTLAAAEQLYDAIYQWNRIGSITITSISLAFFQDLYPSAATGTYSSSSTVFSSIVSAAKTYADGYMSIVETHAMTNGSLSEQFSKSDGTELSARDLTWSYAALLTAHLRRNSIVPASWGETTANSVPSVCSATSATGTYSTATNTAWPATLTSGSGSATTTTSSITSGTSTPSTTTSSTACSTPTSVAVTFDLIATTYYGENIKIAGSISELGNWDTNNAVPLSASQYTSSNPLWYVTIDLPAGESFEYKYIRIESDGSIVWESDPNRSYTVPAVCGETAVTENDTWR

SEQ ID NO: 45896 - protein, 624 aa, Penicillium chrysogenum
ALWALTLGHAVVATPQILAPRATGSLDTWLASETVVARQGILDNIGSAGAHAANAKPGVVLASPSTSDPDYYYTWTRDSALVFKNLVDMFRSGDSALLEVIEEYISSQAYIQTVSNPSGGLSGGGGLGEPKFNADETAFTGSWGRPQRDGPALRATALISFGQWLIDNGYTTYATDIVWPVVRNDLSYVSQYWNQTGFDLWEEVSGSSFFTVAAQHRALVEGSTFASQVGSSCLYCDSQAPQVLCFLQSFWTGSYILANFGGGRSGKDANTLLGSIHTFDPEAGCDDTTFQPCSARALANHKVVTDSFRSIYSVNSGIAAGKAVSVGRYPEDSYYNGNPWYLCTLAAAEQLYDAIYTWNRIGSLTITSVSLSFFKDLYSSAATGTYSSSSDTYSSIVAAVKEYADGYVSIVEKYAASSGSLSEQFSKSDGSQLSARDLTWSYAALLTANERRNAIVPAPWGETSASSVPGQCQYTSAIGTYSSATNTAWPTTLTSGSGSVTTTKTTTTTSKPTTTSCTTPTTVAVTFNVIATTEYGQNIKLAGSISQLGSWSPSSAVALSASKYTTSNHLWFVTVTLPVGTSFSYKYIQVASDGTIKWESDPNQSYTVPATCGTTAVTVSDTWR

SEQ ID NO: 45897 - protein, 621 aa, Rasamsonia emersonii
ASLNSWLATETQYALEAILNNIGPSGAWAQSASPGIVVASPSTSDPDYYYTWTRDSALTFKVLIDLFKNGNSSLQGVIEEYIDAQAYIQTVSNPSGSLSTGGLGEPKFNVNRAAFTGSWGRPQRDGPALRATALIAFGEWLIDNGYTTYASDIVWPIVRNDLSYVAQYWNETSFDLWEEVDGSSFFTIAVQHRAMVEGANFASALGTSCSYCTSQAPEILCYLQSFWTGSYILANFQSSRSGKDVNTILGSIHTFDPEAGCDDTTFQPCSPRALANHKVVVDAFRDLYAINNNAAGGVAVAVGRYPEDTYYNGNPWFLCTLAAAEQLYDALYQWNSIGSITITDVSLGFFQDLYNDAAVGTHSSSSSEYSAIVDAVKTYADGFMSIVENYALTNGSLSEQYSKTDGTQESARDLTWSYAALLTANMRRNSVVPAAWGETAASSVPATCVSTSATGVYSTATDTAWPSTLTAATTTATTTTSRATTSKTTGTGTTSTATTSSSSSSCTTPTTMAITFKLTATTYYGENIKMTGSIPQLGDWNPDDAVALSAANYTSTDPLWFVTINLPAGLSFEYKYIRIESDGTVVWESDPNRLYTVPSSASACGETVATAAAVVESDTWR

SEQ ID NO: 45898 - protein, 629 aa, Aspergillus terreus
LFLLAGFAAKISAAPQLAPRATTSLDAWLASETTVALDGILDNVGSSGAYAKSAKSGIVIASPSTSDPDYYYTWTRDAALTVKALIDLFRNGETSLQTVIMEYISSQAYLQTVSNPSGSLSTGGLAEPKYYVDETAYTGSWGRPQRDGPALRATAMIDFGNWLIDNGYSTYASSIVWPIVRNDLSYVAQYWNQTGYDLWEEVNGSSFFTIAVQHRALVEGSTFASKVGASCSWCDSQAPQVLCFLQRFWTGSYIMANFGGGRSGKDANTVLGSIHTFDPNAGCDDTTFQPCSPRALANHKVYTDSFRSIYSINSGISSGKAVAVGRYPEDSYYNGNPWFLTTLAAAEQLYDAIYQWQKIGSITITDVSLAFFKDLYSSAAVGTYASSSSAFTSIVSAVKTYADGYMSIVQTHAMTNGSLSEQFGKSDGFSLSARDLTWSYAALLTANLRRNSVVPPSWGETTATSVPSVCSATSATGTYSTATNTAWPSTLTSGTGATTTTSKATSSSTTTTSSASSTTVECVVPTAVAVTFDEVATTTYGENVYVVGSISQLGSWDTSKAVALSASKYTSSNNLWYVTVTLPAGTTFQYKFIRVSSSGSVTWESDPNRSYTVPSACGTSTAVVNTTWR

SEQ ID NO: 45899 - protein, 631 aa, Aspergillus terreus
VTFISLLFLFSSAYSAPQLAPRATTSLDAWLASETTVALDGILDNVGSSGAYAKSAKSGIVIASPSTSDPDYYYTWTRDAALTVKALIDLFRNGETSLQTVIMEYISSQAYLQTVSNPSGSLSTGGLAEPKYYVDETAYTGSWGRPQRDGPALRATAMIDFGNWLIDNGYSTYASSIVWPIVRNDLSYVAQYWNQTGYDLWEEVNGSSFFTIAVQHRALVEGSTFASKVGASCSWCDSQAPQVLCFLQRFWTGSYIMANFGGGRSGKDANTVLGSIHTFDPNAGCDDTTFQPCSPRALANHKVYTDSFRSIYSINSGISSGKAVAVGRYPEDSYYNGNPWFLTTLAAAEQLYDAIYQWQKIGSITITDVSLAFFKDLYSSAAVGTYASSSSAFTSIVSAVKTYADGYMSIVQTHAMTNGSLSEQFGKSDGFSLSARDLTWSYAALLTANLRRNSVVPPSWGETTATSVPSVCSATSATGTYSTATNTAWPSTLTSGTGATTTTSKATSSSTTTTSSASSTTVECVVPTAVAVTFDEVATTTYGENVYVVGSISQLGSWDTSKAVALSASKYTSSNNLWYVTVTLPAGTTFQYKFIRVSSSGSVTWESDPNRSYTVPSACGTSTAVVNTTWR

SEQ ID NO: 45900 - protein, 605 aa, Unidentified
SLDSWLASETSVALTGILNNIGSSGAYAQTASPGIVIASPSTSNPDYYYTWTRDAALTMKVLIDLFKNGNSSLLTVIEQYIDAQAYLQTVSNPSGSLSSGGLGEPKFNVDETAFTGAWGRPQRDGPALRATALIAFGQWLIDNGYSTYASSIVWPIVRNDLSYLAQYWNQTGYELWEEVSGSSFFTLAVQHRALVEGSSFASQLGTSCPYCDSQAPQILCFLQSFWTGEYILANFGSSRSGKDANTLLGSIHTFDPAAGCDDTTFQPCSSRALANHKVVTDSFRSIYTINSGISEGTAVAVGRYPEDSYYNGNPWFICTLAAAEQLYDAIYQWNRIGSITITSISLAFFQDLYPSAATGTYSSSSTVFSSIVSAAKTYADGYMSIVETHAMTNGSLSEQFSKSDGTELSARDLTWSYAALLTAHLRRNSIVPASWGETTANSVPSVCSATSATGTYSTATNTAWPATLTSGSGSATTTTSSITSGTSTPSTTTSSTACSTPTSVAVTFDLIATTYYGENIKIAGSISELGNWDTNNAVPLSASQYTSSNPLWYVTIDLPAGESFEYKYIRIESDGSIVWESDPNRSYTVPAVCGETAVTENDTWR

SEQ ID NO: 45901 - protein, 566 aa, Aspergillus niger
SLDSFLATETPIALQGVLNNIGPNGADVAGASAGIVVASPSRSDPNYFYSWTRDAALTAKYLVDAFIAGNKDLEQTIQQYISAQAKVQTISNPSGDLSTGGLGEPKFNVNETAFTGPWGRPQRDGPALRATALIAYANYLIDNGEASTADEIIWPIVQNDLSYITQYWNSSTFDLWEEVEGSSFFTTAVQHRALVEGNALATRLNHTCSNCVSQAPQVLCFLQSYWTGSYVLANFGGSGRSGKDVNSILGSIHTFDPAGGCDDSTFQPCSARALANHKVVTDSFRSIYAINSGIAEGSAVAVGRYPEDVYQGGNPWYLATAAAAEQLYDAIYQWKKIGSISITDVSLPFFQDIYPSAAVGTYNSGSTTFNDIISAVQTYGDGYLSIVEKYTPSDGSLTEQFSRTDGTPLSASALTWSYASLLTASARRQSVVPASWGESSASSVPAVCSATSATGPYSTATNTVWPSIVATGGTTTTATPTGSGSVTSTSKTTATASKTSTSTSSTSCTTPTAVAVTFDLTATTTYGENIYLVGSISQLGDWETSDGIALSADKYTSSDPLWYVTV

SEQ ID NO: 45902 - protein, 640 aa, Rasamsonia emersonii
LALSPALVMADALLKPRATASLNSWLATETQYALEAILNNIGPSGAWAQSASPGIVVASPSTSDPDYYYTWTRDSALTFKVLIDLFKNGNSSLQGVIEEYIDAQAYIQTVSNPSGSLSTGGLGEPKFNVNRAAFTGSWGRPQRDGPALRATALIAFGEWLIDNGYTTYASDIVWPIVRNDLSYVAQYWNETSFDLWEEVDGSSFFTIAVQHRAMVEGANFASALGTSCSYCTSQAPEILCYLQSFWTGSYILANFQSSRSGKDVNTILGSIHTFDPEAGCDDTTFQPCSPRALANHKVVVDAFRDLYAINNNAAGGVAVAVGRYPEDTYYNGNPWFLCTLAAAEQLYDALYQWNSIGSITITDVSLGFFQDLYNDAAVGTHSSSSSEYSAIVDAVKTYADGFMSIVENYALTNGSLSEQYSKTDGTQESARDLTWSYAALLTANMRRNSVVPAAWGETAASSVPATCVSTSATGVYSTATDTAWPSTLTAATTTATTTTSRATTSKTTGTGTTSTATTSSSSSSCTTPTTMAITFKLTATTYYGENIKMTGSIPQLGDWNPDDAVALSAANYTSTDPLWFVTINLPAGLSFEYKYIRIESDGTVVWESDPNRLYTVPSSASACGETVATAAAVVESDTWR

SEQ ID NO: 45903 - protein, 629 aa, Unidentified
ALCALAFGQAVVAAPQPVLPRATTSLDSWLASETSVALTGILNNIGSSGAYAQTASPGIVIASPSTSNPDYYYTWTRDAALTMKVLIDLFKNGNSSLLTVIEQYIDAQAYLQTVSNPSGSLSSGGLGEPKFNVDETAFTGAWGRPQRDGPALRATALIAFGQWLIDNGYSTYASSIVWPIVRNDLSYLAQYWNQTGYELWEEVSGSSFFTLAVQHRALVEGSSFASQLGTSCPYCDSQAPQILCFLQSFWTGEYILANFGSSRSGKDANTLLGSIHTFDPAAGCDDTTFQPCSSRALANHKVVTDSFRSIYTINSGISEGTAVAVGRYPEDSYYNGNPWFICTLAAAEQLYDAIYQWNRIGSITITSISLAFFQDLYPSAATGTYSSSSTVFSSIVSAAKTYADGYMSIVETHAMTNGSLSEQFSKSDGTELSARDLTWSYAALLTAHLRRNSIVPASWGETTANSVPSVCSATSATGTYSTATNTAWPATLTSGSGSATTTTSSITSGTSTPSTTTSSTACSTPTSVAVTFDLIATTYYGENIKIAGSISELGNWDTNNAVPLSASQYTSSNPLWYVTIDLPAGESFEYKYIRIESDGSIVWESDPNRSYTVPAVCGETAVTENDTWR

SEQ ID NO: 45904 - protein, 588 aa, Aspergillus niger
LCILGLTPAAFARAPVAARATGSLDSFLATETPIALQGVLNNIGPNGADVAGASAGIVVASPSRSDPNYFYSWTRDAALTAKYLVDAFIAGNKDLEQTIQQYISAQAKVQTISNPSGDLSTGGLGEPKFNVNETAFTGPWGRPQRDGPALRATALIAYANYLIDNGEASTADEIIWPIVQNDLSYITQYWNSSTFDLWEEVEGSSFFTTAVQHRALVEGNALATRLNHTCSNCVSQAPQVLCFLQSYWTGSYVLANFGGSGRSGKDVNSILGSIHTFDPAGGCDDSTFQPCSARALANHKVVTDSFRSIYAINSGIAEGSAVAVGRYPEDVYQGGNPWYLATAAAAEQLYDAIYQWKKIGSISITDVSLPFFQDIYPSAAVGTYNSGSTTFNDIISAVQTYGDGYLSIVEKYTPSDGSLTEQFSRTDGTPLSASALTWSYASLLTASARRQSVVPASWGESSASSVPAVCSATSATGPYSTATNTVWPSIVATGGTTTTATPTGSGSVTSTSKTTATASKTSTSTSSTSCTTPTAVAVTFDLTATTTYGENIYLVGSISQLGDWETSDGIALSADKYTSSDPLWYVTV

SEQ ID NO: 45905 - protein, 723 aa, Trichoderma atroviride
NSSFWYAAMDHTGQFKGSAPYVDASYNVFVAVSPGDAGSLQNAIDSAGSGNRQNEWLASQPRVVYIPSGTYELSSTLNMRTDTILFGDATNPPVIKAAAGFSDNYLVNGQDPSTGDAGELSFAVGLKNVVLDTTAVDGSSSISALYWGVAQACQLQNVKITLAPSVNGKGHTGVQLGRGSTLALADIRIENGQTGIWHNGHQQALYKSIYFYKNTVGMLISGGNTISLLNPTFDSVGTGVSNTGGSPFIGIVDATSINSGVTFTTSVYPSIVIDNLTKDTDSDVAVIRGTTTVGASKNVVNYSYGNTVGANPVYGGVNGNTTRPSGVAPGGRIPAVAVPNYANNPVTDFVNVKDPSQNGGQTVKGDGSTDDSAALNKVLQFAATNNKIAYFPFGDYRVESTLLVPVGSQLVGEAWATISGGGDFFKDASSPKPVVQVGNEGDVGVAQIQDFRFTVSDVLPGAIIVQFNAAGSKPGDVALFNSLVTVGGTHGADALTNACTDASNECQAAFLGLHFTEGSSAYVENTWNWVADHITEGFSGGSNIAAKGGALVESTKGTWLNGLGSEHWWLYQLNLKAASNVAVTLLQSETNYDQGDNTKQVPPAPWTADVQGWGDPDFSWCDSTARCHMGLANYVNGGSDIYYYGSASWAFFSGPGYQGCAGSYQCQDYMHFISATPTNLQMYGMCSKDTSVALRLGDGTKINAQPDFTGGWSPGADIGRYTS

SEQ ID NO: 45906 - protein, 756 aa, Trichoderma atroviride; identical to SEQ ID NO: 59

SEQ ID NO: 45907 - protein, 450 aa, unidentified; identical to SEQ ID NO: 60

SEQ ID NO: 45908 - protein, 431 aa, Trichoderma harzianum
APSLIPRVSPFSIAKPGGVDDIVITANNTLNGTYHSSTTVSKNVIQTRAQAGHLPIQLVNNFSGSQVNAYISGLDTDNRVVFVRGDGSLVYPSSGGSSVPVAISTPINIALPAQGQSITVNVPIVISSARIYFSVGDLQFFMVKIPNGDGLVQPSQFNLQDPSAGLLWGFVELTYTTDLAVYANISYVDFVGMILSMSLSATDGSATQTTKGLGSSALTQICQGLVQQASVDGFPWSSMCIANSAGTLVRALSPGDYSVINAAAFQNYWSAYVDQVWSQYTNTPLTINTQTSAGSVNCQVSGDTLNCNGDNRGYAKPAAGDIWGCNSGPFAIQSGDNAVHSAVVPRLCAAFVRSTLLLAGGNVQPGLGQSSYYTVSPTNHYSRLVHQFEIDGRGYAFPYDDVNPDGNENASGTLASGAPNVLTVYVGAPPS

SEQ ID NO: 45909 - protein, 723 aa, Trichoderma atroviride
NSSFWYAAMDHTGQFKGSAPYVDASYNVFVAVSPGDAGSLQNAIDSAGNGNRQNEWLASQPRVVYIPSGTYELSSTLNMRTDTILFGDATNPPVIKAAAGFSDSYLVNGQDPSTGDAGELSFAVGLKNVVLDTTAVDGSSSISALYWGVAQACQLQNVKITLAPSVNGKGHTGVQLGRGSTLALADIRIENGQTGIWHNGHQQALYKSIYFYKNTVGMLISGGNTISLLNPTFDSVGTGVSNTGGSPFIGIVDATSINSGVTFTTSVYPSIVIDNLTKDTDSDVAVIRGTTTVGASKNVVNYSYGNTVGANPVYGGVNGNTTRPSGVAPGGRIPAVAVPNYANNHVTDFVNVKDPSQNGGQTVKGDGSTDDSAALNKVLQFAATNNKIAYFPFGDYRVESTLLVPVGSQLVGEAWATISGGGDFFKDSSSPKPVVQVGNEGDVGVAQIQDFRFTVSDVLPGAIIVQFNAAGSKPGDVALFNSLVTVGGTHGADALTNACTDASNECQAAFIGLHFTESSSAYVENTWNWVADHITEGFSGGSNIAAKGGALVESTKGTWLNGLGSEHWWLYQLNLKSASNVAVTLLQSETNYDQGDNTKQVPPAPWTADVQGWGDPDFSWCDSTARCHMGLANYVNGGSDIYYYGSASWAFFSGPGYQGCAGSYQCQDYMHFISATPTNLQMYGMCSKDTSVALRLGDGTKINAQPDFTGGWSPGADIGRYTS

SEQ ID NO: 45910 - protein, 756 aa, Trichoderma atroviride
MKSLTAVVAFLGAVTASPALVRHHGRSALQPRANSSFWYAAMDHTGQFKGSAPYVDASYNVFVAVSPGDAGSLQNAIDSAGNGNRQNEWLASQPRVVYIPSGTYELSSTLNMRTDTILFGDATNPPVIKAAAGFSDSYLVNGQDPSTGDAGELSFAVGLKNVVLDTTAVDGSSSISALYWGVAQACQLQNVKITLAPSVNGKGHTGVQLGRGSTLALADIRIENGQTGIWHNGHQQALYKSIYFYKNTVGMLISGGNTISLLNPTFDSVGTGVSNTGGSPFIGIVDATSINSGVTFTTSVYPSIVIDNLTKDTDSDVAVIRGTTTVGASKNVVNYSYGNTVGANPVYGGVNGNTTRPSGVAPGGRIPAVAVPNYANNHVTDFVNVKDPSQNGGQTVKGDGSTDDSAALNKVLQFAATNNKIAYFPFGDYRVESTLLVPVGSQLVGEAWATISGGGDFFKDSSSPKPVVQVGNEGDVGVAQIQDFRFTVSDVLPGAIIVQFNAAGSKPGDVALFNSLVTVGGTHGADALTNACTDASNECQAAFIGLHFTESSSAYVENTWNWVADHITEGFSGGSNIAAKGGALVESTKGTWLNGLGSEHWWLYQLNLKSASNVAVTLLQSETNYDQGDNTKQVPPAPWTADVQGWGDPDFSWCDSTARCHMGLANYVNGGSDIYYYGSASWAFFSGPGYQGCAGSYQCQDYMHFISATPTNLQMYGMCSKDTSVALRLGDGTKINAQPDFTGGWSPGADIGRYTS

SEQ ID NO: 45911 - protein, 441 aa, Trichoderma harzianum
LTTLIGAVAAAPSLIPRVSPFSIAKPGGVDDIVITANNTLNGTYHSSTTVSKNVIQTRAQAGHLPIQLVNNFSGSQVNAYISGLDTDNRVVFVRGDGSLVYPSSGGSSVPVAISTPINIALPAQGQSITVNVPIVISSARIYFSVGDLQFFMVKIPNGDGLVQPSQFNLQDPSAGLLWGFVELTYTTDLAVYANISYVDFVGMILSMSLSATDGSATQTTKGLGSSALTQICQGLVQQASVDGFPWSSMCIANSAGTLVRALSPGDYSVINAAAFQNYWSAYVDQVWSQYTNTPLTINTQTSAGSVNCQVSGDTLNCNGDNRGYAKPAAGDIWGCNSGPFAIQSGDNAVHSAVVPRLCAAFVRSTLLLAGGNVQPGLGQSSYYTVSPTNHYSRLVHQFEIDGRGYAFPYDDVNPDGNENASGTLASGAPNVLTVYVGAPPS

SEQ ID NO: 45912 - protein, 762 aa, Trichoderma reesei
MKSLAVVAALLGLATASPAAVRNQTRVEAHVEASSSTSFWYAAMDHTGQYKGYAPHAPSPGSYSVFVAVNAGDGGSLQQAIDSAGSSGNRQNEWLSSQPRVVYIPPGTYTLSQTLNMRTDTILMGDATNPPVIKAAAGFSGNYLVNGQDPSTGVSGELSFAVGLKNVVLDTTAVSATSSISALYWGVAQAAQLQNVKIVLAPSSGGKGHTGIQLGRGSTLGLADVRIENGQTGIWHNGHQQALYKSIYFYRNTVGMLISGGNTITLLNPTFDTVGTGVSNTGGSPFIGIVDATSINSGVTFSTTVYPSIVIDNLTKDTSSDVVVLRGATALGASSHVVNYSYGNTVGRNPIYGAVSGSTARPSAVAPGGRIPAVAAPNFAQNPVTDFVNVKDPGQNGGQTVKGDGSTDDSAALNKVLQFAAANNKIAYFPFGDYRVLSTLVVPVGSRLVGEAWATISGGGNLFKDASNPKPIVQVGNAGDVGVAQIQDMRFTVSDVLPGAIIVQFNAAGSKPGDVALFNSLVTVGGTRGADGLTNTCTKANSECKAAFLGLHFTESSSAYVENTWNWVADHITEGFSGGSNIAAKGGALVESTKGTWLHGLGSEHWWLYQLNLKSASNVVVSLLQSETNYDQGDNTQQVPPAPWTVDVQGWGDPDFSWCDSSARCHMGLANYVQGGSNIYYFGSASWAFFSGPGYQGCASGGYQCQDYMHVVKTTPTNLQMYGMCSKDTKVALRLGNGTDINAQDGFTGGWSPGGDVGRYTT

SEQ ID NO: 45913 - protein, 415 aa, Humicola insolens
QKPGETKEVHPQLTTFRCTKRGGCKPATNFIVLDSLSHPIHRAEGLGPGGCGDWGNPPPKDVCPDVESCAKNCIMEGIPDYSQYGVTTNGTSLRLQHILPDGRVPSPRVYLLDKTKRRYEMLHLTGFEFTFDVDATKLPCGMNSALYLSEMHPTGAKSKYNPGGAYYGTGYCDAQCFVTPFINGLGNIEGKGSCCNEMDIWEANSRASHVAPHTCNKKGLYLCEGEECAFEGVCDKNGCGWNNYRVNVTDYYGRGEEFKVNTLKPFTVVTQFLANRRGKLEKIHRFYVQDGKVIESFYTNKEGVPYTNMIDDEFCEATGSRKYMELGATQGMGEALTRGMVLAMSIWWDQGGNMEWLDHGEAGPCAKGEGAPSNIVQVEPFPEVTYTNLRWGEIGSTYQEVQKPKPKPGHGPRSD

SEQ ID NO: 45914 - protein, 435 aa, Humicola insolens; identical to SEQ ID NO: 43

SEQ ID NO: 45915 - protein, 425 aa, Escherichia coli B
TALLLGLVNGQKPGETKEVHPQLTTFRCTKRGGCKPATNFIVLDSLSHPIHRAEGLGPGGCGDWGNPPPKDVCPDVESCAKNCIMEGIPDYSQYGVTTNGTSLRLQHILPDGRVPSPRVYLLDKTKRRYEMLHLTGFEFTFDVDATKLPCGMNSALYLSEMHPTGAKSKYNPGGAYYGTGYCDAQCFVTPFINGLGNIEGKGSCCNEMDIWEANSRASHVAPHTCNKKGLYLCEGEECAFEGVCDKNGCGWNNYRVNVTDYYGRGEEFKVNTLKPFTVVTQFLANRRGKLEKIHRFYVQDGKVIESFYTNKEGVPYTNMIDDEFCEATGSRKYMELGATQGMGEALTRGMVLAMSIWWDQGGNMEWLDHGEAGPCAKGEGAPSNIVQVEPFPEVTYTNLRWGEIGSTYQEVQKPKPKPGHGPRSD

SEQ ID NO: 45916 - protein, 201 aa, Humicola insolens
ADGRSTRYWDCCKPSCGWAKKAPVNQPVFSCNANFQRITDFDAKSGCEPGGVAYSCADQTPWAVNDDFALGFAATSIAGSNEAGWCCACYELTFTSGPVAGKKMVVQSTSTGGDLGSNHFDLNIPGGGVGIFDGCTPQFGGLPGQRYGGISSRNECDRFPDALKPGCYWRFDWFKNADNPSFSFRQVQCPAELVARTGCRR

SEQ ID NO: 45917 - protein, 283 aa, Humicola insolens
ADGRSTRYWDCCKPSCGWAKKAPVNQPVFSCNANFQRITDFDAKSGCEPGGVAYSCADQTPWAVNDDFALGFAATSIAGSNEAGWCCACYELTFTSGPVAGKKMVVQSTSTGGDLGSNHFDLNIPGGGVGIFDGCTPQFGGLPGQRYGGISSRNECDRFPDALKPGCYWRFDWFKNADNPSFSFRQVQCPAELVARTGCRRNDDGNFPAVQISSSTSSPVNQPTSTSTTSTSTTSSPPVQPTTPSGCTAERWAQCGGNGWSGCTTCVAGSTCTKINDWYHQCL

SEQ ID NO: 45918 - protein, 284 aa, Humicola insolens
ADGRSTRYWDCCKPSCGWAKKAPVNQPVFSCNANFQRITDFDAKSGCEPGGVAYSCADQTPWAVNDDFALGFAATSIAGSNEAGWCCACYELTFTSGPVAGKKMVVQSTSTGGDLGSNHFDLNIPGGGVGIFDGCTPQFGGLPGQRYGGISSRNECDRFPDALKPGCYWRFDWFKNADNPSFSFRQVQCPAELVARTGCRRNDDGNFPAVQIPSSSTSSPVNQPTSTSTTSTSTTSSPPVQPTTPSGCTAERWAQCGGNGWSGCTTCVAGSTCTKINDWYHQCL

SEQ ID NO: 45919 - protein, 305 aa, Humicola insolens; identical to SEQ ID NO: 44

SEQ ID NO: 45920 - protein, 213 aa, Humicola insolens
ADGRSTRYWDCCKPSCGWAKKAPVNQPVFSCNANFQRITDFDAKSGCEPGGVAYSCADQTPWAVNDDFALGFAATSIAGSNEAGWCCACYELTFTSGPVAGKKMVVQSTSTGGDLGSNHFDLNIPGGGVGIFDGCTPQFGGLPGQRYGGISSRNECDRFPDALKPGCYWRFDWFKNADNPSFSFRQVQCPAELVARTGCRRNDDGNFPAVQIP

SEQ ID NO: 45921 - protein, 211 aa, Humicola insolens
ADGRSTRYWDCCKPSCGWAKKAPVNQPVFSCNANFQRITDFDAKSGCEPGGVAYSCADQTPWAVNDDFALGFAATSIAGSNEAGWCCACYELTFTSGPVAGKKMVVQSTSTGGDLGSNHFDLNIPGGGVGIFDGCTPQFGGLPGQRYGGISSRNECDRFPDALKPGCYWRFDWFKNADNPSFSFRQVQCPAELVARTGCRRNDDGNFPAVQ

SEQ ID NO: 45922 - protein, 278 aa, Unidentified [sequence omitted]

SEQ ID NO: 45923 - protein, 212 aa, Thermothielavioides terrestris
ASGSGQSTRYWDCCKPSCAWPGKAAVSQPVYACDANFQRLSDFNVQSGCNGGSAYSCADQTPWAVNDNLAYGFAATSIAGGSESSWCCACYALTFTSGPVAGKTMVVQSTSTGGDLGSNHFDIAMPGGGVGIFNGCSSQFGGLPGAQYGGISSRDQCDSFPAPLKPGCQWRFDWFQNADNPTFTFQQVQCPAEIVARSGCKRNDDSSFPVFT

SEQ ID NO: 45924 - protein, 237 aa, Unidentified
MRSTPVLRTTLAAALPLVASAASGSGQSTRYWDCCKPSCAWPGKAAVSQPVYACDANFQRLSDFNVQSGCNGGSAYSCADQTPWAVNDNLAYGFAATSIAGGSESSWCCACYALTFTSGPVAGKTMVVQSTSTGGDLGSNHFDIAMPGGGVGIFNGCSSQFGGLPGAQYGGISSRDQCDSFPAPLKPGCQWRFDWFQNADNPTFTFQQVQCPAEIVARSGCKRNDDSSFPVFTPPSG

SEQ ID NO: 45925 - protein, 200 aa, Synthetic construct
GSGQSTRYWDCCKPSCAWPGKAAVSQPVYACDANFQRLSDFNVQSGCNGGSAYSCADQTPWAVNDNLAYGFAATSIAGGSESSWCCACYALTFTSGPVAGKTMVVQSTSTGGDLGSNHFDIAMPGGGVGIFNGCSSQFGGLPGAQYGGISSRDQCDSFPAPLKPGCQWRFDWFQNADNPTFTFQQVQCPAEIVARSGCKR

SEQ ID NO: 45926 - protein, 402 aa, Humicola insolens
QKPGETKEVHPQLTTFRCTKRGGCKPATNFIVLDSLSHPIHRAEGLGPGGCGDWGNPPPKDVCPDVESCAKNCIMEGIPDYSQYGVTTNGTSLRLQHILPDGRVPSPRVYLLDKTKRRYEMLHLTGFEFTFDVDATKLPCGMNSALYLSEMHPTGAKSKYNPGGAYYGTGYCDAQCFVTPFINGLGNIEGKGSCCNEMDIWEANSRASHVAPHTCNKKGLYLCEGEECAFEGVCDKNGCGWNNYRVNVTDYYGRGEEFKVNTLKPFTVVTQFLANRRGKLEKIHRFYVQDGKVIESFYTNKEGVPYTNMIDDEFCEATGSRKYMELGATQGMGEALTRGMVLAMSIWWDQGGNMEWLDHGEAGPCAKGEGAPSNIVQVEPFPEVTYTNLRWGEIGSTYQELQ

SEQ ID NO: 45927 - protein, 305 aa, Humicola insolens
MRSSPLLPSAVVAALPVLALAADGRSTRYWDCCKPSCGWAKKAPVNQPVFSCNANFQRITDFDAKSGCEPGGVAYSCADQTPWAVNDDFALGFAATSIAGSNEAGWCCACYELTFTSGPVAGKKMVVQSTSTGGDLGSNHFDLNIPGGGVGIFDGCTPQFGGLPGQRYGGISSRNECDRFPDALKPGCYWRFDWFKNADNPSFSFRQVQCPAELVARTGCRRNDDGNFPAVQIPSSSTSSPVNQPTSTSTTSTSTTSSPPVQPTTPSGCTAERWAQCGGNGWSGCTTCVAGSTCTKINDWYHQCL

SEQ ID NO: 45928 - protein, 305 aa, Humicola insolens
MRSSPLLRSAVVAALPVLALAADGKSTRYWDCCKPSCGWAKKAPVNQPVFSCNANFQRITDFDAKSGCEPGGVAYSCADQTPWAVNDDFALGFAATSIAGSNEAGWCCACYELTFTSGPVAGKKMVVQSTSTGGDLGSNHFDLNIPGGGVGIFDGCTPQFGGLPGQRYGGISSRNECDRFPDALKPGCYWRFDWFKNADNPSFSFRQVQCPAELVARTGCRRNDDGNFPAVQIPSSSTSSPVNQPTSTSTTSTSTTSSPPVQPTTPSGCTAERWAQCGGNGWSGCTTCVAGSTCTKINDWYHQCL

SEQ ID NO: 45929 - protein, 299 aa, Unidentified
MRSTPVLRTTLAAALPLVASAASGSGQSTRYWDCCKPSCAWPGKAAVSQPVYACDANFQRLSDFNVQSGCNGGSAYSCADQTPWAVNDNLAYGFAATSIAGGSESSWCCACYALTFTSGPVAGKTMVVQSTSTGGDLGSNQFDIAMPGGGVGIFNGCSSQFGGLPGAQYGGISSRDQCDSFPAPLKPGCQWRFDWFQNADNPTFTFQQVQCPAEIVARSGCKRNDDSSFPVFTPPSGGNGGTGTPTSTAPGSGQTSPGGGSGCTSQKWAQCGGIGFSGCTTCVSGTTCQKLNDYYSQCL

SEQ ID NO: 45930 - protein, 284 aa, Humicola insolens
ADGRSTRYWDCCKPSCGWAKKAPVNQPVFSCNANFQRITDFDAKSGCEPGGVAYSCADQTPWAVNDDFALGFAATSIAGSNEAGWCCACYELTFTSGPVAGKKMVVQSTSTGGDLGSNHFDLNIPGGGVGIFDGCTPQFGGLPGQRYGGISSRNECDRFPDPLKPGCYWRFDWFKNADNPSFSFRQVQCPAELVARTGCRRNDDGNFPAVQIPSSSTSSPVNQPTSTSTTSTSTTSSPPVQPTTPSGCTAERWAQCGGNGWSGCTTCVAGSTCTKINDWYHQCL

SEQ ID NO: 45931 - protein, 284 aa, Humicola insolens
ADGRSTRYWDCCKPSCGWAKKAPVNQPVFSCNANFQRITDFDAKSGCEPGGVAYSCADQTPWAVNDDFALGFAATSIAGSNEAGWCCACYELTFTSGPVAGKKMVVQSTSTGTDLGSNHFDLNIPGGGVGIFDGCTPQFGGLPGQRYGGISSRNECDRFPDALKPGCYWRFDWFKNADNPSFSFRQVQCPAELVARTGCRRNDDGNFPAVQIPSSSTSSPVNQPTSTSTTSTSTTSSPPVQPTTPSGCTAERWAQCGGNGWSGCTTCVAGSTCTKINDWYHQCL

SEQ ID NO: 45932 - protein, 284 aa, Humicola insolens
ADGRSTRYWDCCKPSCGWAKKAPVNQPVFSCNANFQRITDFDAKSGCEPGGVAYSCADQTPWAVNDDFALGFAATSIAGSNEAGWCCACYELTFTSGPVAGKKMVVQSTSTGGDLGSNHFDLNIPGGGVGIFDGCTPQFGGLPGQRYGGISSRNECDRFPDALKPGCYWRFDWFKNADNPSFSFRQVQCPAELVARTGCRRNDDGNFPAVQIPSSSTSSPVNQPTSTSTTSTSTTSSPPVQPTTPSGCTAERWAQCGGNGWSGCTTCVAGSTCTKINDWFHQCL

SEQ ID NO: 45933 - protein, 284 aa, Humicola insolens
ADGRSTRFWDCCKPSCGWAKKAPVNQPVFSCNANFQRITDFDAKSGCEPGGVAYSCADQTPWAVNDDFALGFAATSIAGSNEAGWCCACYELTFTSGPVAGKKMVVQSTSTGGDLGSNHFDLNIPGGGVGIFDGCTPQFGGLPGQRYGGISSRNECDRFPDALKPGCYWRFDWFKNADNPSFSFRQVQCPAELVARTGCRRNDDGNFPAVQIPSSSTSSPVNQPTSTSTTSTSTTSSPPVQPTTPSGCTAERWAQCGGNGWSGCTTCVAGSTCTKINDWYHQCL

SEQ ID NO: 45934 - protein, 284 aa, Humicola insolens
ADGRSTRYWDCCKPSCGWAKKAPVNQPVFSCNANFTRITDFDAKSGCEPGGVAYSCADQTPWAVNDDFALGFAATSIAGSNEAGWCCACYELTFTSGPVAGKKMVVQSTSTGGDLGSNHFDLNIPGGGVGIFDGCTPQFGGLPGQRYGGISSRNECDRFPDALKPGCYWRFDWFKNADNPSFSFRQVQCPAELVARTGCRRNDDGNFPAVQIPSSSTSSPVNQPTSTSTTSTSTTSSPPVQPTTPSGCTAERWAQCGGNGWSGCTTCVAGSTCTKINDWYHQCL

SEQ ID NO: 45935 - protein, 284 aa, Humicola insolens
ADGRSTRYWDCCKPSCGWANKAPVNQPVFSCNANFQRITDFDAKSGCEPGGVAYSCADQTPWAVNDDFALGFAATSIAGSNEAGWCCACYELTFTSGPVAGKKMVVQSTSTGGDLGSNHFDLNIPGGGVGIFDGCTPQFGGLPGQRYGGISSRNECDRFPDALKPGCYWRFDWFKNADNPSFSFRQVQCPAELVARTGCRRNDDGNFPAVQIPSSSTSSPVNQPTSTSTTSTSTTSSPPVQPTTPSGCTAERWAQCGGNGWSGCTTCVAGSTCTKINDWYHQCL

SEQ ID NO: 45936 - protein, 284 aa, Humicola insolens
ADGRSTRYWDCCKPSCGWAKKAPVNQPVFSCNANFQRITDFDAKSGCEPGGVAYSCADQTPWAVNDDFALGFAATSIAGSNEAGWCCACYELTFTSGPVAGKKMVVQSTSTGGDLGSNHFDLNIPGGGVGIFDGCTPQFGGLPGQRYGGISSRNECDRFPDALKPGCYWRFDWFKNADNPSFSFRQVQCPAELVARTGCRRNDDGNFPAVQIPSSSTSSPVNQPTSTSTTSTSTTSSPPVQPTTPSGCTAEFWAQCGGNGWSGCTTCVAGSTCTKINDWYHQCL

SEQ ID NO: 45937 - protein, 284 aa, Humicola insolens
ADGRSTRYWDCCKPSCGWAKKAPVNQPVFSCNANFQRITDFDAKSGCEPGGVAYSCADQTPWAVNDDFALGFAATSIAGSNEAGWCCACYELTFTSGPVAGKKMVVQSTSTGGDLGSNHFDLNIPGGGVGIFDGCTPQFGGLPGQRSGGISSRNECDRFPDALKPGCYWRFDWFKNADNPSFSFRQVQCPAELVARTGCRRNDDGNFPAVQIPSSSTSSPVNQPTSTSTTSTSTTSSPPVQPTTPSGCTAERWAQCGGNGWSGCTTCVAGSTCTKINDWYHQCL

SEQ ID NO: 45938 - protein, 284 aa, Humicola insolens
ADGRSTRYWDCCKPSCGWAKKAPVNQPVFSCNANFQRITDFDAKSGCEPGGVAYSCADQTPEAVNDDFALGFAATSIAGSNEAGWCCACYELTFTSGPVAGKKMVVQSTSTGGDLGSNHFDLNIPGGGVGIFDGCTPQFGGLPGQRYGGISSRNECDRFPDALKPGCYWRFDWFKNADNPSFSFRQVQCPAELVARTGCRRNDDGNFPAVQIPSSSTSSPVNQPTSTSTTSTSTTSSPPVQPTTPSGCTAERWAQCGGNGWSGCTTCVAGSTCTKINDWYHQCL

SEQ ID NO: 45939 - protein, 284 aa, Humicola insolens
ADGRSTRYWDCCKPSCGWAKKAPVNQPVFSCNANFQRITDFDAKSGCEPGGVAYSCADQTPWAVNDDFALGFAATSIAGSNEAGWCCACYELTFTSGPVAGKKMVVQSTSTGGDLGSNHFDLNIPGGGVGIFDGCTPQFGGLPGQRYGGISSRDECDRFPDALKPGCYWRFDWFKNADNPSFSFRQVQCPAELVARTGCRRNDDGNFPAVQIPSSSTSSPVNQPTSTSTTSTSTTSSPPVQPTTPSGCTAERWAQCGGNGWSGCTTCVAGSTCTKINDWYHQCL

SEQ ID NO: 45940 - protein, 284 aa, Humicola insolens
ADGRSTRYWDCCKPSCGWAKKAPVNQPVFSCNANFQRITDFDAKSGCEPGGVAYSCADQTPWAVNDDFALGFAATSIAGSNEAGWCCACYELTFTSGPVAGKKMVVQSTSTGGDLGSNHFDLNIPGGGVGIFDGCTPQFGGLPGQRYGGISSRNECDEFPDALKPGCYWRFDWFKNADNPSFSFRQVQCPAELVARTGCRRNDDGNFPAVQIPSSSTSSPVNQPTSTSTTSTSTTSSPPVQPTTPSGCTAERWAQCGGNGWSGCTTCVAGSTCTKINDWYHQCL

SEQ ID NO: 45941 - protein, 283 aa, Humicola insolens
ADGRSTRYWDCCKPSCGWAKKAPVNQPVFSCNANFQRITDFDAKSGCEPGGVAYSCADQTPWAVNDDFALGFAATSIAGSNEAGWCCACYELTFTSGPVVGKKMVVQSTSTGGDLGSNHFDLNIPGGGVGIFDGCTPQFGGLPGQRYGGISSRNECDRFPDALKPGCYWRFDWFKNADNPSFSFRQVQCPAELVARTGCRRNDDGNFPAVQISSSTSSPVNQPTSTSTTSTSTTSSPPVQPTTPSGCTAERWAQCGGNGWSGCTTCVAGSTCTKINDWYHQCL

SEQ ID NO: 45942 - protein, 283 aa, Humicola insolens
ADGRSTRYWDCCKPSCGWAKKAPVNQPVFSCNANFQRITDFDAKSGCEPGGVAYSCADQTPWAVNDDFALGFAATSIAGSNEAGWCCACYELTFTSGPVAGKKMVVQSTSTGWDLGSNHFDLNIPGGGVGIFDGCTPQFGGLPGQRYGGISSRNECDRFPDALKPGCYWRFDWFKNADNPSFSFRQVQCPAELVARTGCRRNDDGNFPAVQISSSTSSPVNQPTSTSTTSTSTTSSPPVQPTTPSGCTAERWAQCGGNGWSGCTTCVAGSTCTKINDWYHQCL

SEQ ID NO: 45943 - protein, 283 aa, Humicola insolens
ADGRSTRYWDCCKPSCGWAKKAPVNQPVFSCNANFQRITDFDAKSGCEPGGVAYSCADQTPWAVNDDFALGFAATSIAGSNEAKWCCACYELTFTSGPVAGKKMVVQSTSTGGDLGSNHFDLNIPGGGVGIFDGCTPQFGGLPGQRYGGISSRNECDRFPDALKPGCYWRFDWFKNADNPSFSFRQVQCPAELVARTGCRRNDDGNFPAVQISSSTSSPVNQPTSTSTTSTSTTSSPPVQPTTPSGCTAERWAQCGGNGWSGCTTCVAGSTCTKINDWYHQCL

SEQ ID NO: 45944 - protein, 283 aa, Humicola insolens
ADGRSTRYWDCCKPSCGWAKKAPVNQPVFSCNANFQRITDFDAKSGCEPGGVAYSCADQTPWAVNDDFALGFAATSIAGSNEAGWCCACYELTFTSGPVAGKKMVVQSTSTGGDLGSNHFDLNIPGGGVGIFDGCTPQFGGLPGQRYGGISSRNECDRFPDALKPGCYWRFDWFKNADNPSFSFRQVQCPAESVARTGCRRNDDGNFPAVQISSSTSSPVNQPTSTSTTSTSTTSSPPVQPTTPSGCTAERWAQCGGNGWSGCTTCVAGSTCTKINDWYHQCL

SEQ ID NO: 45945 - protein, 283 aa, Humicola insolens
ADGNSTRYWDCCKPSCGWAKKAPVNQPVFSCNANFQRITDFDAKSGCEPGGVAYSCADQTPWAVNDDFALGFAATSIAGSNEAGWCCACYELTFTSGPVAGKKMVVQSTSTGGDLGSNHFDLNIPGGGVGIFDGCTPQFGGLPGQRYGGISSRNECDRFPDALKPGCYWRFDWFKNADNPSFSFRQVQCPAELVARTGCRRNDDGNFPAVQISSSTSSPVNQPTSTSTTSTSTTSSPPVQPTTPSGCTAERWAQCGGNGWSGCTTCVAGSTCTKINDWYHQCL

SEQ ID NO: 45946 - protein, 283 aa, Humicola insolens
ADGRSTRYWDCCKPSCGWAKKAPVNQPVFSCNANFQRITDFDAKSGCEPGGVAYSCADQTPWAVNDDFALGFAATSIAGSNEAGWCCACYELTFTSGPVAGKVMVVQSTSTGGDLGSNHFDLNIPGGGVGIFDGCTPQFGGLPGQRYGGISSRNECDRFPDALKPGCYWRFDWFKNADNPSFSFRQVQCPAELVARTGCRRNDDGNFPAVQISSSTSSPVNQPTSTSTTSTSTTSSPPVQPTTPSGCTAERWAQCGGNGWSGCTTCVAGSTCTKINDWYHQCL

SEQ ID NO: 45947 - protein, 283 aa, Humicola insolens
ADGRSTRYWDCCKPSCGWAKKAPVNQPVFSCNANFQRITDFDAKSGCEPGGVAYSCADQTPWAVNDDFALGFAATSIAGSNEAGWCCACYELTFTSGPVAGKKMVVQSTSTGGDLGSNHFDLNIPGGGVGVFDGCTPQFGGLPGQRYGGISSRNECDRFPDALKPGCYWRFDWFKNADNPSFSFRQVQCPAELVARTGCRRNDDGNFPAVQISSSTSSPVNQPTSTSTTSTSTTSSPPVQPTTPSGCTAERWAQCGGNGWSGCTTCVAGSTCTKINDWYHQCL

SEQ ID NO: 45948 - protein, 283 aa, Humicola insolens
ADGRSTRYWDCCKPSCGWAKKAPVNQPVFSCNANFQRITDFDAKSGCEPGGVAYSCADQTPWAVNDDFALGFAATSIAGSNEAGWCCACYELTFTSGPVAGKKMVVQSTSTGGDLGSNHFDLNIPGGGVGIFDGCTPQFGGLPGQRYGGISSRNECDRFPDALKPGCYWRFDWFKNADNPSFSFRQVQCPAELVARTGCRRNDDGNFPAVQQSSSTSSPVNQPTSTSTTSTSTTSSPPVQPTTPSGCTAERWAQCGGNGWSGCTTCVAGSTCTKINDWYHQCL

SEQ ID NO: 45949 - protein, 283 aa, Humicola insolens
ADGRSTRYWDCCKPSCGWAKKAPVNQPVFSCNANFQRITDFDAKSGCEPGGVAYSCADQTPWAVNDDFALGFAATSIAGSNEAGWCCACYELTFTSGPVEGKKMVVQSTSTGGDLGSNHFDLNIPGGGVGIFDGCTPQFGGLPGQRYGGISSRNECDRFPDALKPGCYWRFDWFKNADNPSFSFRQVQCPAELVARTGCRRNDDGNFPAVQISSSTSSPVNQPTSTSTTSTSTTSSPPVQPTTPSGCTAERWAQCGGNGWSGCTTCVAGSTCTKINDWYHQCL

SEQ ID NO: 45950 - protein, 283 aa, Humicola insolens
ADGRSTRYWDCCKPSCGWAKKAPVNQPVFSCNANFQRITDFDAKSGCEPGGVAYSCADQTPWAVNDDFALGFAATSIAGSNEAGWCCACYELTFTSGPVLGKKMVVQSTSTGGDLGSNHFDLNIPGGGVGIFDGCTPQFGGLPGQRYGGISSRNECDRFPDALKPGCYWRFDWFKNADNPSFSFRQVQCPAELVARTGCRRNDDGNFPAVQISSSTSSPVNQPTSTSTTSTSTTSSPPVQPTTPSGCTAERWAQCGGNGWSGCTTCVAGSTCTKINDWYHQCL

SEQ ID NO: 45951 - protein, 283 aa, Humicola insolens
ADGRSTRYWDCCKPSCGWAKKAPVNQPVFSCNANFQRITDFDAKSGCEPGGVAYSCADQTPWAVNDDFALGFAATSIAGSNEAGWCCACYELTFTSGPVAGKKMVVQSTSTGYDLGSNHFDLNIPGGGVGIFDGCTPQFGGLPGQRYGGISSRNECDRFPDALKPGCYWRFDWFKNADNPSFSFRQVQCPAELVARTGCRRNDDGNFPAVQISSSTSSPVNQPTSTSTTSTSTTSSPPVQPTTPSGCTAERWAQCGGNGWSGCTTCVAGSTCTKINDWYHQCL

SEQ ID NO: 45952 - protein, 283 aa, Humicola insolens
ADGRSTRYWDCCKPSCGWAKKAPVNQPVFSCNANFQRITDFDAKSGCEPGGVAYSCADQTPWAVNDDFALGFAATSIAGSNEAGWCCACYELTFTSGPVAGKKMVVQSTSTGGDLGSNHFDLNIPGGGVGIFDGCTPQFGGLPGQRYGGISSRNECDDFPDALKPGCYWRFDWFKNADNPSFSFRQVQCPAELVARTGCRRNDDGNFPAVQISSSTSSPVNQPTSTSTTSTSTTSSPPVQPTTPSGCTAERWAQCGGNGWSGCTTCVAGSTCTKINDWYHQCL

SEQ ID NO: 45953 - protein, 283 aa, Humicola insolens
ADGRSTRYWDCCKPSCGWAKKAPVNQPVFSCNANFQRITDFDAKSGCEPGGVAYSCADQTPWAVNDDFALGFAATSIAGSNEAGWCCACYELTFTSGPVAGKKMVVQSTSTGGDLGSNHFDLNIPGGGVGIFDGCTPQFGGLPGQRYGGISSRNECDEFPDALKPGCYWRFDWFKNADNPSFSFRQVQCPAELVARTGCRRNDDGNFPAVQISSSTSSPVNQPTSTSTTSTSTTSSPPVQPTTPSGCTAERWAQCGGNGWSGCTTCVAGSTCTKINDWYHQCL

SEQ ID NO: 45954 - protein, 283 aa, Humicola insolens
ADGRSTRYWDCCKPSCGWAKKAPVNQPVFSCNANFQRITDFDAKSGCEPGGVAYSCADQTPWAVNDDFALGFAATSIAGSNEAGWCCACYELTFTSGPVAGKKMVVQSTSTGGDLGSNHFDLNIPGGGVGIFDGCTPQFGGLPGERYGGISSRNECDRFPDALKPGCYWRFDWFKNADNPSFSFRQVQCPAELVARTGCRRNDDGNFPAVQISSSTSSPVNQPTSTSTTSTSTTSSPPVQPTTPSGCTAERWAQCGGNGWSGCTTCVAGSTCTKINDWYHQCL

SEQ ID NO: 45955 - protein, 283 aa, Humicola insolens
ADGRSTRYWDCCKPSCGWAKKAPVNQPVFSCNANFQRITDFDAKSGCEPGGVAYSCADQTPWAVNDDFALGFAATSIAGSNEAGWCCACYELTFTSGPVAGQKMVVQSTSTGGDLGSNHFDLNIPGGGVGIFDGCTPQFGGLPGQRYGGISSRNECDRFPDALKPGCYWRFDWFKNADNPSFSFRQVQCPAELVARTGCRRNDDGNFPAVQISSSTSSPVNQPTSTSTTSTSTTSSPPVQPTTPSGCTAERWAQCGGNGWSGCTTCVAGSTCTKINDWYHQCL

SEQ ID NO: 45956 - protein, 283 aa, Humicola insolens
ADGYSTRYWDCCKPSCGWAKKAPVNQPVFSCNANFQRITDFDAKSGCEPGGVAYSCADQTPWAVNDDFALGFAATSIAGSNEAGWCCACYELTFTSGPVAGKKMVVQSTSTGGDLGSNHFDLNIPGGGVGIFDGCTPQFGGLPGQRYGGISSRNECDRFPDALKPGCYWRFDWFKNADNPSFSFRQVQCPAELVARTGCRRNDDGNFPAVQISSSTSSPVNQPTSTSTTSTSTTSSPPVQPTTPSGCTAERWAQCGGNGWSGCTTCVAGSTCTKINDWYHQCL

SEQ ID NO: 45957 - protein, 283 aa, Humicola insolens
ADGWSTRYWDCCKPSCGWAKKAPVNQPVFSCNANFQRITDFDAKSGCEPGGVAYSCADQTPWAVNDDFALGFAATSIAGSNEAGWCCACYELTFTSGPVAGKKMVVQSTSTGGDLGSNHFDLNIPGGGVGIFDGCTPQFGGLPGQRYGGISSRNECDRFPDALKPGCYWRFDWFKNADNPSFSFRQVQCPAELVARTGCRRNDDGNFPAVQISSSTSSPVNQPTSTSTTSTSTTSSPPVQPTTPSGCTAERWAQCGGNGWSGCTTCVAGSTCTKINDWYHQCL

SEQ ID NO: 45958 - protein, 283 aa, Humicola insolens
ADGRSTRYWDCCKPSCGWAKKAPVNQPVFSCNANFQRITDFDAKSGCEPGGVAYSCADQTPWAVNDDFALGFAATSIAGSNEAGWCCACYELTFTSGPVAGKKMVVQSTSTGGDLGSNHFDLNIPGGGVGIFDGCTPQFGGLPGQRFGGISSRNECDRFPDALKPGCYWRFDWFKNADNPSFSFRQVQCPAELVARTGCRRNDDGNFPAVQISSSTSSPVNQPTSTSTTSTSTTSSPPVQPTTPSGCTAERWAQCGGNGWSGCTTCVAGSTCTKINDWYHQCL

SEQ ID NO: 45959 - protein, 283 aa, Humicola insolens
ADGRSTRYWDCCKPSCGWAKKAPVNQPVFSCNANFQRITDFDAKSGCEPGGVAYSCADQTPWAVNDDFALGFAATSIAGSNEAGWCCACYELTFTSGPVAGKKMVVQSTSTGGDLGSNHFDLNIPGGGVGIFDGCTPQFGGLPGKRYGGISSRNECDRFPDALKPGCYWRFDWFKNADNPSFSFRQVQCPAELVARTGCRRNDDGNFPAVQISSSTSSPVNQPTSTSTTSTSTTSSPPVQPTTPSGCTAERWAQCGGNGWSGCTTCVAGSTCTKINDWYHQCL

SEQ ID NO: 45960 - protein, 283 aa, Humicola insolens
ADGRSTRYWDCCKPSCGWAKKAPVNQPVFSCNANFQRITDFDAKSGCEPGGVAYSCADQTPWAVNDDFALGFAATSIAGSNEADWCCACYELTFTSGPVAGKKMVVQSTSTGGDLGSNHFDLNIPGGGVGIFDGCTPQFGGLPGQRYGGISSRNECDRFPDALKPGCYWRFDWFKNADNPSFSFRQVQCPAELVARTGCRRNDDGNFPAVQISSSTSSPVNQPTSTSTTSTSTTSSPPVQPTTPSGCTAERWAQCGGNGWSGCTTCVAGSTCTKINDWYHQCL

SEQ ID NO: 45961 - protein, 283 aa, Humicola insolens
ADGRSTRYWDCCKPSCGWAKKAPVNQPVFSCNANFQRITDFDAKSGCEPGGVAYSCADQTPWAVNDDFALGFAATSIAGSNEAGWCCACYELTFTSGPVAGKKMVVQSTSTGHDLGSNHFDLNIPGGGVGIFDGCTPQFGGLPGQRYGGISSRNECDRFPDALKPGCYWRFDWFKNADNPSFSFRQVQCPAELVARTGCRRNDDGNFPAVQISSSTSSPVNQPTSTSTTSTSTTSSPPVQPTTPSGCTAERWAQCGGNGWSGCTTCVAGSTCTKINDWYHQCL

SEQ ID NO: 45962 - protein, 283 aa, Humicola insolens
ADGRSTRYWDCCKPSCGWAKKAPVNQPVFSCNANFQRITDFDAKSGCEPGGVAYSCADQTPWAVNDDFALGFAATSIAGSNEAGWCCACYELTFTSGPVAGKKMVVQSTSTGGDLGSNHFDLNIPGGGVGIFDGCTPQFGGLPGDRYGGISSRNECDRFPDALKPGCYWRFDWFKNADNPSFSFRQVQCPAELVARTGCRRNDDGNFPAVQISSSTSSPVNQPTSTSTTSTSTTSSPPVQPTTPSGCTAERWAQCGGNGWSGCTTCVAGSTCTKINDWYHQCL

SEQ ID NO: 45963 - protein, 283 aa, Humicola insolens
ADGRSTRYWDCCKPSCGWAKKAPVNQPVFSCNANFQRITDFDAKSGCEPGGVAYSCADQTPWAVNDDFALGFAATSIAGSNEAGWCCACYELTFTSGPVAGKIMVVQSTSTGGDLGSNHFDLNIPGGGVGIFDGCTPQFGGLPGQRYGGISSRNECDRFPDALKPGCYWRFDWFKNADNPSFSFRQVQCPAELVARTGCRRNDDGNFPAVQISSSTSSPVNQPTSTSTTSTSTTSSPPVQPTTPSGCTAERWAQCGGNGWSGCTTCVAGSTCTKINDWYHQCL

SEQ ID NO: 45964 - protein, 283 aa, Humicola insolens
ADGRSTRYWDCCKPSCGWAKKAPVNQPVFSCNANFQRITDFDAKSGCEPGGVAYSCADQTPWAVNDDFALGFAATSIAGSNEAGWCCACYELTFTSGPVAGKKMVVQSTSTGGDLGSNHFDLNIPGGGVGLFDGCTPQFGGLPGQRYGGISSRNECDRFPDALKPGCYWRFDWFKNADNPSFSFRQVQCPAELVARTGCRRNDDGNFPAVQISSSTSSPVNQPTSTSTTSTSTTSSPPVQPTTPSGCTAERWAQCGGNGWSGCTTCVAGSTCTKINDWYHQCL

SEQ ID NO: 45965 - protein, 283 aa, Humicola insolens
ADGRSTRYWDCCKPSCGWAKKAPVNQPVFSCNANFQRITDFDAKSGCEPGGVAYSCADQTPWAVNDDFALGFAATSIAGSNEAGWCCACYELTFTSGPVAGKKMVVQSTSTGFDLGSNHFDLNIPGGGVGIFDGCTPQFGGLPGQRYGGISSRNECDRFPDALKPGCYWRFDWFKNADNPSFSFRQVQCPAELVARTGCRRNDDGNFPAVQISSSTSSPVNQPTSTSTTSTSTTSSPPVQPTTPSGCTAERWAQCGGNGWSGCTTCVAGSTCTKINDWYHQCL

SEQ ID NO: 45966 - protein, 283 aa, Humicola insolens
ADGRSTRYWDCCKPSCGWAKKAPVNQPVFSCNANFQRITDFDAKSGCEPGGVAYSCADQTPWAVNDDFALGFAATSIAGSNEAGWCCACYELTFVSGPVAGKKMVVQSTSTGGDLGSNHFDLNIPGGGVGIFDGCTPQFGGLPGQRYGGISSRNECDRFPDALKPGCYWRFDWFKNADNPSFSFRQVQCPAELVARTGCRRNDDGNFPAVQISSSTSSPVNQPTSTSTTSTSTTSSPPVQPTTPSGCTAERWAQCGGNGWSGCTTCVAGSTCTKINDWYHQCL

SEQ ID NO: 45967 - protein, 283 aa, Humicola insolens
ADGMSTRYWDCCKPSCGWAKKAPVNQPVFSCNANFQRITDFDAKSGCEPGGVAYSCADQTPWAVNDDFALGFAATSIAGSNEAGWCCACYELTFTSGPVAGKKMVVQSTSTGGDLGSNHFDLNIPGGGVGIFDGCTPQFGGLPGQRYGGISSRNECDRFPDALKPGCYWRFDWFKNADNPSFSFRQVQCPAELVARTGCRRNDDGNFPAVQISSSTSSPVNQPTSTSTTSTSTTSSPPVQPTTPSGCTAERWAQCGGNGWSGCTTCVAGSTCTKINDWYHQCL

SEQ ID NO: 45968 - protein, 283 aa, Humicola insolens
ADGRSTRYWDCCKPSCGWAKKAPVNQPVFSCNANFQRITDFDAKSGCEPGGVAYSCADQTPWAVNDDFALGFAATSIAGSNEAGWCCACYELTFTSGPVAGKKMVVQSTSTGGDLGSNHFDLNIPGGGVGRFDGCTPQFGGLPGQRYGGISSRNECDRFPDALKPGCYWRFDWFKNADNPSFSFRQVQCPAELVARTGCRRNDDGNFPAVQISSSTSSPVNQPTSTSTTSTSTTSSPPVQPTTPSGCTAERWAQCGGNGWSGCTTCVAGSTCTKINDWYHQCL

SEQ ID NO: 45969 - protein, 283 aa, Humicola insolens
ADGRSTRYWDCCKPSCGWAKKAPVNQPVFSCNANFQRITDFDAKSGCEPGGVAYSCADQTPWAVNDDFALGFAATSIAGSNEAGWCCACYELTFTSGPVAGKKMVVQSTSTGKDLGSNHFDLNIPGGGVGIFDGCTPQFGGLPGQRYGGISSRNECDRFPDALKPGCYWRFDWFKNADNPSFSFRQVQCPAELVARTGCRRNDDGNFPAVQISSSTSSPVNQPTSTSTTSTSTTSSPPVQPTTPSGCTAERWAQCGGNGWSGCTTCVAGSTCTKINDWYHQCL

SEQ ID NO: 45970 - protein, 278 aa, Thermothielavioides terrestris
ASGSGQSTRYWDCCKPSCAWPGKAAVSQPVYACDANFQRLSDFNVQSGCNGGSAYSCADQTPWAVNDNLAYGFAATSIAGGSESSWCCACYALTFTSGPVAGKTMVVQSTSTGGDLGINHFDIAMPGGGVGIFNGCSSQFGGLPGAQYGGISSRDQCDSFPAPLKPGCQWRFDWFQNADNPTFTFQQVQCPAEIVARSGCKRNDDSSFPVFTPPSGGNGGTGTPTSTAPGSGQTSPGGGSGCTSQKWAQCGGIGFSGCTTCVSGTTCQKLNDYYSQCL

SEQ ID NO: 45971 - protein, 278 aa, Thermothielavioides terrestris
ASGSGWSTRYWDCCKPSCAWPGKAAVSQPVYACDANFQRLSDFNVQSGCNGGSAYSCADQTPWAVNDNLAYGFAATSIAGGSESSWCCACYALTFTSGPVAGKTMVVQSTSTGGDLGSNHFDIAMPGGGVGIFNGCSSQFGGLPGAQYGGISSRDQCDSFPAPLKPGCQWRFDWFQNADNPTFTFQQVQCPAEIVARSGCKRNDDSSFPVFTPPSGGNGGTGTPTSTAPGSGQTSPGGGSGCTSQKWAQCGGIGFSGCTTCVSGTTCQKLNDYYSQCL

SEQ ID NO: 45972 - protein, 278 aa, Thermothielavioides terrestris
ASGSGQSTRYWDCCKPSCAWPGKAAVSQPVYACDANFQRLSDFNVQSGCNGGSAYSCADQTPWAVNDNLAYGFAATSIAGGSESSWCCACYALTFTSGPVAGKTMVVQSTSTGGDLGSNHFDIAMPGGGVGIFNGCSSQFGGLPGEQYGGISSRDQCDSFPAPLKPGCQWRFDWFQNADNPTFTFQQVQCPAEIVARSGCKRNDDSSFPVFTPPSGGNGGTGTPTSTAPGSGQTSPGGGSGCTSQKWAQCGGIGFSGCTTCVSGTTCQKLNDYYSQCL

SEQ ID NO: 45973 - protein, 278 aa, Thermothielavioides terrestris
ASGSGQSTRYWDCCKPSCAWPGKAAVSQPVYACDANFQRLSDFNVQSGCNGGSAYSCADQTPWAVNDNLAYGFAATSIAGGIESSWCCACYALTFTSGPVAGKTMVVQSTSTGGDLGSNHFDIAMPGGGVGIFNGCSSQFGGLPGAQYGGISSRDQCDSFPAPLKPGCQWRFDWFQNADNPTFTFQQVQCPAEIVARSGCKRNDDSSFPVFTPPSGGNGGTGTPTSTAPGSGQTSPGGGSGCTSQKWAQCGGIGFSGCTTCVSGTTCQKLNDYYSQCL

SEQ ID NO: 45974 - protein, 278 aa, Thermothielavioides terrestris
ASGSGQSTRYWDCCKPSCAWPGKAAVSQPVYACDANFQRLSDFNVQSGCNGGSAYSCADQTPWAVNDNLAYGFAATSIAGGSESSWCCACYALTFTSGPVAGKTMVVQSTSTGRDLGSNHFDIAMPGGGVGIFNGCSSQFGGLPGAQYGGISSRDQCDSFPAPLKPGCQWRFDWFQNADNPTFTFQQVQCPAEIVARSGCKRNDDSSFPVFTPPSGGNGGTGTPTSTAPGSGQTSPGGGSGCTSQKWAQCGGIGFSGCTTCVSGTTCQKLNDYYSQCL

SEQ ID NO: 45975 - protein, 278 aa, Thermothielavioides terrestris
ASGSGQSTRYWDCCKPSCAWPGKAAVSQPVYACDANFQRLSDFNVQSGCNGGSAYSCADQTPWAVNDNLAYGFAATSIAGGSESSWCCACYALTFTSGPVAGKTMVVQSTSTGGDLGSNHFDIAMPGGGVGIFNGCSSQFGGLPGKQYGGISSRDQCDSFPAPLKPGCQWRFDWFQNADNPTFTFQQVQCPAEIVARSGCKRNDDSSFPVFTPPSGGNGGTGTPTSTAPGSGQTSPGGGSGCTSQKWAQCGGIGFSGCTTCVSGTTCQKLNDYYSQCL

SEQ ID NO: 45976 - protein, 278 aa, Thermothielavioides terrestris
ASGSGQSTRYWDCCKPSCAWPGKAAVSQPVYACDANFQRLSDFNVQSGCNGGSAYSCADQTPWAVNDNLAYGFAATSIAGGSESSWCCACYALTFTSGPVAGKTMVVQSTSTGGDLGSNHFDIAMPGGGVGIFNGCSSQFGGLPGAQYGGISSRDQCDSFPAPLKPGCQWRFDWFQNADNPTFTFQQVQCPAEIVARSGCKRNDDSSFPVKTPPSGGNGGTGTPTSTAPGSGQTSPGGGSGCTSQKWAQCGGIGFSGCTTCVSGTTCQKLNDYYSQCL

SEQ ID NO: 45977 - protein, 278 aa, Thermothielavioides terrestris
ASGSGQSTRYWDCCKPSCAWPGKAAVSQPVYACDANFQRLSDFNVQSGCNGGSAYSCADQTPWAVNDNLAYGFAATSIAGGSESSWCCACYALTFTSGPVAGKTMVVQSTSTGGDLGSNHFDIAMPGGGVGIFNGCSSQFGGLPGAQYGGISSRDQCDSFPAPLKPGCQWRFDWFQNADNPTFTFQQVQCPAEIVARSGCKRNDDSSFPVHTPPSGGNGGTGTPTSTAPGSGQTSPGGGSGCTSQKWAQCGGIGFSGCTTCVSGTTCQKLNDYYSQCL

SEQ ID NO: 45978 - protein, 278 aa, Thermothielavioides terrestris
ASGSGQSTRYWDCCKPSCAWPGKAAVSQPVYACDANFQRLSDFNVQSGCNGGSAYSCADQTPWAVNDNLAYGFAATSIAGGSESSWCCACYALTFTSGPAAGKTMVVQSTSTGGDLGSNHFDIAMPGGGVGIFNGCSSQFGGLPGAQYGGISSRDQCDSFPAPLKPGCQWRFDWFQNADNPTFTFQQVQCPAEIVARSGCKRNDDSSFPVFTPPSGGNGGTGTPTSTAPGSGQTSPGGGSGCTSQKWAQCGGIGFSGCTTCVSGTTCQKLNDYYSQCL

SEQ ID NO: 45979 - protein, 278 aa, Thermothielavioides terrestris
ASGSGQSTRYWDCCKPSCAWPGKAAVSQPVYACDANFQRLSDFNVQSGCNGGSAYSCADQTPWAVNDNLAYGFAATSIAGGSESSWCCACYALTFTSGPVAGKTMVVQSTSTGGDLGSNHFDIAMPGGGVGIFNGCSSQFGGLPGAQYGGISSRDQCDSFPAPLKPGCQWRFDWFQNADNPTFTFQQVQCPAEIVARSGCKRNDDSSFPVLTPPSGGNGGTGTPTSTAPGSGQTSPGGGSGCTSQKWAQCGGIGFSGCTTCVSGTTCQKLNDYYSQCL

SEQ ID NO: 45980 - protein, 278 aa, Thielavia hyrcaniae
ASGSGQSTRYWDCCKPSCAWPGKAAVSQPVYACDANFQRLSDFNVQSGCNGGSAYSCADQTPWAVNDNLAYGFAATSIAGGSESSWCCACYALTFTSGPVAGKTMVVQSTSTGGDLGSNHFDIAMPGGGVGIFNGCSSQFGGLPGAQYGGISSRDECDSFPAPLKPGCQWRFDWFQNADNPTFTFQQVQCPAEIVARSGCKRNDDSSFPVFTPPSGGNGGTGTPTSTAPGSGQTSPGGGSGCTSQKWAQCGGIGFSGCTTCVSGTTCQKLNDYYSQCL

SEQ ID NO: 45981 - protein, 278 aa, Thermothielavioides terrestris
ASGSGQSTRYWDCCKPSCAWPGKAAVSQPVYACDANFQRLSDFNVQSGCNGGSAYSCADQTPWAVNDNLAYGFAATSIAGGSESSWCCACYALTFTSGPVAGKTMVVQSTSTGGDLGSNHFDIAMPGGGVGKFNGCSSQFGGLPGAQYGGISSRDQCDSFPAPLKPGCQWRFDWFQNADNPTFTFQQVQCPAEIVARSGCKRNDDSSFPVFTPPSGGNGGTGTPTSTAPGSGQTSPGGGSGCTSQKWAQCGGIGFSGCTTCVSGTTCQKLNDYYSQCL

SEQ ID NO: 45982 - protein, 278 aa, Thielavia hyrcaniae
ASGSGQSTRYWDCCKPSCAWPGKAAVSQPVYACDANFQRLSDFNVQSGCNGGSAYSCADQTPWAVNDNLAYGFAATSIAGGSESSWCCACYALTFTSGPVAGKTMVVQSTSTGTDLGSNHFDIAMPGGGVGIFNGCSSQFGGLPGAQYGGISSRDQCDSFPAPLKPGCQWRFDWFQNADNPTFTFQQVQCPAEIVARSGCKRNDDSSFPVFTPPSGGNGGTGTPTSTAPGSGQTSPGGGSGCTSQKWAQCGGIGFSGCTTCVSGTTCQKLNDYYSQCL

SEQ ID NO: 45983 - protein, 278 aa, Thermothielavioides terrestris
ASGSGQSTRYWDCCKPSCAWPGKAAVSQPVYACDANFQRLSDFNVQSGCNGGSAYSCADQTPWAVNDNLAYGFAATSIAGGSESSWCCACYALTFTSGPVAGKTMVVQSTSTGGDLGSNHFDIAMPGGGVGIFNGCKSQFGGLPGAQYGGISSRDQCDSFPAPLKPGCQWRFDWFQNADNPTFTFQQVQCPAEIVARSGCKRNDDSSFPVFTPPSGGNGGTGTPTSTAPGSGQTSPGGGSGCTSQKWAQCGGIGFSGCTTCVSGTTCQKLNDYYSQCL

SEQ ID NO: 45984 - protein, 278 aa, Thermothielavioides terrestris
ASGSGQSTRYWDCCKPSCAWPGKAAVSQPVYACDANFQRLSDFNVQSGCNGGSAYSCADQTPWAVNDNLAYGFAATSIAGGSESSWCCACYALTFTSGPVAGKTMVVQSTSTGGDLGSNHFDIAMPGGGVGIFNGCSSQFGGLPGAQYGGISSRDQCDSFPAPLKPGCQWRFDWFQNADNPTFLFQQVQCPAEIVARSGCKRNDDSSFPVFTPPSGGNGGTGTPTSTAPGSGQTSPGGGSGCTSQKWAQCGGIGFSGCTTCVSGTTCQKLNDYYSQCL

SEQ ID NO: 45985 - protein, 278 aa, Thermothielavioides terrestris
ASGSGQSTRYWDCCKPSCAWPGKAAVSQPVYACDANFQRLSDFNVQSGCNGGSAYSCADQTPWAVNDNLAYGFAATSIAGGSESSWCCACYALKFTSGPVAGKTMVVQSTSTGGDLGSNHFDIAMPGGGVGIFNGCSSQFGGLPGAQYGGISSRDQCDSFPAPLKPGCQWRFDWFQNADNPTFTFQQVQCPAEIVARSGCKRNDDSSFPVFTPPSGGNGGTGTPTSTAPGSGQTSPGGGSGCTSQKWAQCGGIGFSGCTTCVSGTTCQKLNDYYSQCL

SEQ ID NO: 45986 - protein, 278 aa, Thermothielavioides terrestris
ASGSGQSTRYWDCCKPSCAWPGKAAVSQPVYACDANFQRLSDFNVQSGCNNGSAYSCADQTPWAVNDNLAYGFAATSIAGGSESSWCCACYALTFTSGPVAGKTMVVQSTSTGGDLGSNHFDIAMPGGGVGIFNGCSSQFGGLPGAQYGGISSRDQCDSFPAPLKPGCQWRFDWFQNADNPTFTFQQVQCPAEIVARSGCKRNDDSSFPVFTPPSGGNGGTGTPTSTAPGSGQTSPGGGSGCTSQKWAQCGGIGFSGCTTCVSGTTCQKLNDYYSQCL

SEQ ID NO: 45987 - protein, 278 aa, Thermothielavioides terrestris
ASGSGQSTRYWDCCKPSCAWPGKAAVSQPVYACDANFQRLSDFNVQSGCNGGSAYSCADQTPWAVNDNLAYGFAATSIAGGSESVWCCACYALTFTSGPVAGKTMVVQSTSTGGDLGSNHFDIAMPGGGVGIFNGCSSQFGGLPGAQYGGISSRDQCDSFPAPLKPGCQWRFDWFQNADNPTFTFQQVQCPAEIVARSGCKRNDDSSFPVFTPPSGGNGGTGTPTSTAPGSGQTSPGGGSGCTSQKWAQCGGIGFSGCTTCVSGTTCQKLNDYYSQCL

SEQ ID NO: 45988 - protein, 278 aa, Thermothielavioides terrestris
ASGSGQSTRYWDCCKPSCAWPGKAAVSQPVYACDANFQRLSDFNVQSGCNGGSAYSCADQTPWAVNDNLAYGFAATSIAGGSESSWCCACYALTFTSGPVAGKTMVVQSTSTGGDLGSNHFDIAMPGGGVGIFNGCSSQFGGLPGAQWGGISSRDQCDSFPAPLKPGCQWRFDWFQNADNPTFTFQQVQCPAEIVARSGCKRNDDSSFPVFTPPSGGNGGTGTPTSTAPGSGQTSPGGGSGCTSQKWAQCGGIGFSGCTTCVSGTTCQKLNDYYSQCL

SEQ ID NO: 45989 - protein, 278 aa, Thermothielavioides terrestris
ASGSGQSTRYWDCCKPSCAWPGKAAVSQPVYACDANFQRLSDFNVQSGCNGGSAYSCADQTPWAVNDNLAYGFAATSIAGGSESSWCCACYALTFTSGPVAGKTMVVQSTSTGGDLGSNHFDIAMPGGGVGIFNGCSSQFGGLPGGQYGGISSRDQCDSFPAPLKPGCQWRFDWFQNADNPTFTFQQVQCPAEIVARSGCKRNDDSSFPVFTPPSGGNGGTGTPTSTAPGSGQTSPGGGSGCTSQKWAQCGGIGFSGCTTCVSGTTCQKLNDYYSQCL

SEQ ID NO: 45990 - protein, 278 aa, Thermothielavioides terrestris
ASGSGQSTRYWDCCKPSCAWPGKAAVSQPVYACDANFQRLSDFNVQSGCNGGSAYSCADQTPWAVNDNLAYGFAATSIAGGSESSWCCACYALNFTSGPVAGKTMVVQSTSTGGDLGSNHFDIAMPGGGVGIFNGCSSQFGGLPGAQYGGISSRDQCDSFPAPLKPGCQWRFDWFQNADNPTFTFQQVQCPAEIVARSGCKRNDDSSFPVFTPPSGGNGGTGTPTSTAPGSGQTSPGGGSGCTSQKWAQCGGIGFSGCTTCVSGTTCQKLNDYYSQCL

SEQ ID NO: 45991 - protein, 278 aa, Thermothielavioides terrestris
ASGSGQSTRYWDCCKPSCAWPGKAAVSQPVYACDANFQRLSDFNVQSGCNGGSAYSCADQTPWAVNDNLAYGFAATSIAGGSESSWCCACYALTFTSGPVAGKTMVVQSTSTGGDLGSNHFDIAMPGGGVGIFNGCSSQFGGLPGAQYGGISSRDQCDSFPAPLKPGCQWRFDWFQNADNPTFAFQQVQCPAEIVARSGCKRNDDSSFPVFTPPSGGNGGTGTPTSTAPGSGQTSPGGGSGCTSQKWAQCGGIGFSGCTTCVSGTTCQKLNDYYSQCL

SEQ ID NO: 45992 - protein, 278 aa, Thermothielavioides terrestris
ASGSGQSTRYWDCCKPSCAWPGKAAVSQPVYACDANFQRLSDFNVQSGCNGGSAYSCADQTPWAVNDNLAYGFAATSIAGGSESSWCCACYALTFRSGPVAGKTMVVQSTSTGGDLGSNHFDIAMPGGGVGIFNGCSSQFGGLPGAQYGGISSRDQCDSFPAPLKPGCQWRFDWFQNADNPTFTFQQVQCPAEIVARSGCKRNDDSSFPVFTPPSGGNGGTGTPTSTAPGSGQTSPGGGSGCTSQKWAQCGGIGFSGCTTCVSGTTCQKLNDYYSQCL

SEQ ID NO: 45993 - protein, 278 aa, Thermothielavioides terrestris
ASGSGQSTRYWDCCKPSCAWPGKAAVSQPVYACDANFQRLSDFNVQSGCNGGSAYSCADQTPWAVNDNLAYGFAATSIAGGSESSWCCACYALTFTSGPVAGKTMVVQSTSTGIDLGSNHFDIAMPGGGVGIFNGCSSQFGGLPGAQYGGISSRDQCDSFPAPLKPGCQWRFDWFQNADNPTFTFQQVQCPAEIVARSGCKRNDDSSFPVFTPPSGGNGGTGTPTSTAPGSGQTSPGGGSGCTSQKWAQCGGIGFSGCTTCVSGTTCQKLNDYYSQCL

SEQ ID NO: 45994 - protein, 278 aa, Thermothielavioides terrestris
ASGSGQSTRYWDCCKPSCAWPGKAAVSQPVYACDANFQRLSDFNVQSGCNGGSAYSCADQTPWAVNDNLAYGFAATSIAGGSESIWCCACYALTFTSGPVAGKTMVVQSTSTGGDLGSNHFDIAMPGGGVGIFNGCSSQFGGLPGAQYGGISSRDQCDSFPAPLKPGCQWRFDWFQNADNPTFTFQQVQCPAEIVARSGCKRNDDSSFPVFTPPSGGNGGTGTPTSTAPGSGQTSPGGGSGCTSQKWAQCGGIGFSGCTTCVSGTTCQKLNDYYSQCL

SEQ ID NO: 45995 - protein, 278 aa, Thermothielavioides terrestris
ASGSGQSTRYWDCCKPSCAWPGKAAVSQPVYACDANFQRLSDFNVQSGCNGGSAYSCADQTPWAVNDNLAYGFAATSIAGGSESSWCCACYALLFTSGPVAGKTMVVQSTSTGGDLGSNHFDIAMPGGGVGIFNGCSSQFGGLPGAQYGGISSRDQCDSFPAPLKPGCQWRFDWFQNADNPTFTFQQVQCPAEIVARSGCKRNDDSSFPVFTPPSGGNGGTGTPTSTAPGSGQTSPGGGSGCTSQKWAQCGGIGFSGCTTCVSGTTCQKLNDYYSQCL

SEQ ID NO: 45996 - protein, 278 aa, Thermothielavioides terrestris
ASGSGQSTRYWDCCKPSCAWPGKAAVSQPVYACDANFQRLSDFNVQSGCNGGSAYSCADQTPWAVNDNLAYGFAATSIAGGSESSWCCACYALTFTSGPVAGKNMVVQSTSTGGDLGSNHFDIAMPGGGVGIFNGCSSQFGGLPGAQYGGISSRDQCDSFPAPLKPGCQWRFDWFQNADNPTFTFQQVQCPAEIVARSGCKRNDDSSFPVFTPPSGGNGGTGTPTSTAPGSGQTSPGGGSGCTSQKWAQCGGIGFSGCTTCVSGTTCQKLNDYYSQCL

SEQ ID NO: 45997 - protein, 278 aa, Thermothielavioides terrestris
ASGSGQSTRYWDCCKPSCAWPGKAAVSQPVYACDANFQRLSDFNVQSGCNGGSAYSCADQTPWAVNDNLAYGFAATSIAGGSESSWCCACYALTFTSGPVRGKTMVVQSTSTGGDLGSNHFDIAMPGGGVGIFNGCSSQFGGLPGAQYGGISSRDQCDSFPAPLKPGCQWRFDWFQNADNPTFTFQQVQCPAEIVARSGCKRNDDSSFPVFTPPSGGNGGTGTPTSTAPGSGQTSPGGGSGCTSQKWAQCGGIGFSGCTTCVSGTTCQKLNDYYSQCL

SEQ ID NO: 45998 - protein, 278 aa, Thermothielavioides terrestris
ASGSGQSTRYWDCCKPSCAWPGKAAVSQPVYACDANFQRLSDFNVQSGCNGGSAYSCADQTPWAVNDNLAYGFAATSIAGGSESSWCCACYALTFTSGPVAGKTMVVQSTSTGHDLGSNHFDIAMPGGGVGIFNGCSSQFGGLPGAQYGGISSRDQCDSFPAPLKPGCQWRFDWFQNADNPTFTFQQVQCPAEIVARSGCKRNDDSSFPVFTPPSGGNGGTGTPTSTAPGSGQTSPGGGSGCTSQKWAQCGGIGFSGCTTCVSGTTCQKLNDYYSQCL

SEQ ID NO: 45999 - protein, 278 aa, Thermothielavioides terrestris
ASGSGQSTRYWDCCKPSCAWPGKAAVSQPVYACDANFQRLSDFNVQSGCNGGSAYSCADQTPWAVNDNLAYGFAATSIAGGSESSWCCACYALTFTSGPVAGKTMVVQSTSTGGDLGSNHFDIAMPGGGVGIFNGCESQFGGLPGAQYGGISSRDQCDSFPAPLKPGCQWRFDWFQNADNPTFTFQQVQCPAEIVARSGCKRNDDSSFPVFTPPSGGNGGTGTPTSTAPGSGQTSPGGGSGCTSQKWAQCGGIGFSGCTTCVSGTTCQKLNDYYSQCL

SEQ ID NO: 46000 - protein, 278 aa, Thermothielavioides terrestris
ASGSGQSTRYWDCCKPSCAWPGKAAVSQPVYACDANFQRLSDFDVQSGCNGGSAYSCADQTPWAVNDNLAYGFAATSIAGGSESSWCCACYALTFTSGPVAGKTMVVQSTSTGGDLGSNHFDIAMPGGGVGIFNGCSSQFGGLPGAQYGGISSRDQCDSFPAPLKPGCQWRFDWFQNADNPTFTFQQVQCPAEIVARSGCKRNDDSSFPVFTPPSGGNGGTGTPTSTAPGSGQTSPGGGSGCTSQKWAQCGGIGFSGCTTCVSGTTCQKLNDYYSQCL

SEQ ID NO: 46001 - protein, 278 aa, Thermothielavioides terrestris
ASGSGQSTRYWDCCKPSCAWPGKAAVSQPVYACDANFQRLSDFNVQSGCNGGSAYSCADQTPWAVNDNLAYGFAATSIAGGSESSWCCACYALTFTSGPVAGKTMVVQSTSTGGDLGSNHFDIAMPGGGVGIFNGCSSQFGGLPGAQYGGISSRDQCDSFPAPLKPGCQWRFDWFQNASNPTFTFQQVQCPAEIVARSGCKRNDDSSFPVFTPPSGGNGGTGTPTSTAPGSGQTSPGGGSGCTSQKWAQCGGIGFSGCTTCVSGTTCQKLNDYYSQCL

SEQ ID NO: 46002 - protein, 278 aa, Thermothielavioides terrestris
ASGSGQSTRYWDCCKPSCAWPGKAAVSQPVYACDANFQRLSDFNVQSGCNGGSAYSCADQTPWAVNDNLAYGFAATSIAGGSESSWCCACYALTFTSGPVAGKTMVVQSTSTGGDLGSNHFDIAMPGGGVGIFNGCSSQFGGLPGRQYGGISSRDQCDSFPAPLKPGCQWRFDWFQNADNPTFTFQQVQCPAEIVARSGCKRNDDSSFPVFTPPSGGNGGTGTPTSTAPGSGQTSPGGGSGCTSQKWAQCGGIGFSGCTTCVSGTTCQKLNDYYSQCL

SEQ ID NO: 46003 - protein, 278 aa, Thermothielavioides terrestris
ASGSGQSTRYWDCCKPSCAWPGKAAVSQPVYACDANFQRLSDFNVQSGCNGGSAYSCADQTPWAVNDNLAYGFAATSIAGGSESSWCCACYALTFTSGPVAGKTMVVQSTSTGMDLGSNHFDIAMPGGGVGIFNGCSSQFGGLPGAQYGGISSRDQCDSFPAPLKPGCQWRFDWFQNADNPTFTFQQVQCPAEIVARSGCKRNDDSSFPVFTPPSGGNGGTGTPTSTAPGSGQTSPGGGSGCTSQKWAQCGGIGFSGCTTCVSGTTCQKLNDYYSQCL

SEQ ID NO: 46004 - protein, 278 aa, Thermothielavioides terrestris
ASGSGQSTRYWDCCKPSCAWPGKAAVSQPVYACDANFQRLSDFNVQSGCNGGSAYSCADQTPWAVNDNLAYGFAATSIAGGSESSWCCACYALTFTSGPVAGKTMVVQSTSTGGDLGSNHFDIAMPGGGVGIFNGCSSQFGGLPGAQYGGISSRDQCDSFPAPLKPGCQWRFDWFQNADNPTVTFQQVQCPAEIVARSGCKRNDDSSFPVFTPPSGGNGGTGTPTSTAPGSGQTSPGGGSGCTSQKWAQCGGIGFSGCTTCVSGTTCQKLNDYYSQCL

SEQ ID NO: 46005 - protein, 278 aa, Thermothielavioides terrestris
ASGSGQSTRYWDCCKPSCAWPGKAAVSQPVYACDANFQRLSDFNVQSGCNGGSAYSCADQTPWAVNDNLAYGFAATSIAGGSESSWCCACYALTFTSGPVAGKTMVVQSTSTGGDLGSNHFDIAMPGGGVGIFNGCSSQFGGLPGAQYGGIRSRDQCDSFPAPLKPGCQWRFDWFQNADNPTFTFQQVQCPAEIVARSGCKRNDDSSFPVFTPPSGGNGGTGTPTSTAPGSGQTSPGGGSGCTSQKWAQCGGIGFSGCTTCVSGTTCQKLNDYYSQCL

SEQ ID NO: 46006 - protein, 278 aa, Thermothielavioides terrestris
ASGSGQSTRYWDCCKPSCAWPGKAAVSQPVYACDANFQRLSDFNVQSGCNGGSAYSCADQTPWAVNDNLAYGFAATSIAGGSESSWCCACYALTFTSGPSAGKTMVVQSTSTGGDLGSNHFDIAMPGGGVGIFNGCSSQFGGLPGAQYGGISSRDQCDSFPAPLKPGCQWRFDWFQNADNPTFTFQQVQCPAEIVARSGCKRNDDSSFPVFTPPSGGNGGTGTPTSTAPGSGQTSPGGGSGCTSQKWAQCGGIGFSGCTTCVSGTTCQKLNDYYSQCL

SEQ ID NO: 46007 - protein, 278 aa, Thermothielavioides terrestris
ASGSGQSTRYWDCCKPSCAWPGKAAVSQPVYACDANFQRLSDFNVQSGCNGGSAYSCADQTPWAVNDNLAYGFAATSIAGGSESSWCCACYALTFTSGPVAGKTMVVQSTSTGGDLGSNHFDIAMPGGGVGIFNGCSSQFGGLPGAQYGGISSRDQCDSFPAPLKPGCQWRFDWFQNADNPTFMFQQVQCPAEIVARSGCKRNDDSSFPVFTPPSGGNGGTGTPTSTAPGSGQTSPGGGSGCTSQKWAQCGGIGFSGCTTCVSGTTCQKLNDYYSQCL

SEQ ID NO: 46008 - protein, 278 aa, Thermothielavioides terrestris
ASGSGQSTRYWDCCKPSCAWPGKAAVSQPVYACDANFQRLSDFNVQSGCNGGSAYSCADQTPWAVNDNLAYGFAATSIAGGSESSWCCACYALTFTSGPVAGKTMVVQSTSTGGDLGSNHFDIAMPGGGVGIFNGCSSQFGGLPGHQYGGISSRDQCDSFPAPLKPGCQWRFDWFQNADNPTFTFQQVQCPAEIVARSGCKRNDDSSFPVFTPPSGGNGGTGTPTSTAPGSGQTSPGGGSGCTSQKWAQCGGIGFSGCTTCVSGTTCQKLNDYYSQCL

SEQ ID NO: 46009 - protein, 278 aa, Thermothielavioides terrestris
ASGSGQSTRYWDCCKPSCAWPGKAAVSQPVYACDANFQRLSDFNVQSGCNGGSAYSCADQTPWAVNDNLAYGFAATSIAGGSESSWCCACYALTFTSGPVAGKTMVVQSTSTGGDLGSNHFDIAMPGGGVGIFNGCSSQFGGLPGAQYGGISSRDQCDSFPAPLKPGCQWRFDWFQNADNPTFTFQQNQCPAEIVARSGCKRNDDSSFPVFTPPSGGNGGTGTPTSTAPGSGQTSPGGGSGCTSQKWAQCGGIGFSGCTTCVSGTTCQKLNDYYSQCL

SEQ ID NO: 46010 - protein, 278 aa, Thermothielavioides terrestris
ASGSGQSTRYWDCCKPSCAWPGKAAVSQPVYACDANFQRLSDFNVQSGCNGGSAYSCADQTPWAVNDNLAYGFAATSIAGGSESSWCCACYALTFTSGPVAGKTMVVQSTSTGYDLGSNHFDIAMPGGGVGIFNGCSSQFGGLPGAQYGGISSRDQCDSFPAPLKPGCQWRFDWFQNADNPTFTFQQVQCPAEIVARSGCKRNDDSSFPVFTPPSGGNGGTGTPTSTAPGSGQTSPGGGSGCTSQKWAQCGGIGFSGCTTCVSGTTCQKLNDYYSQCL

SEQ ID NO: 46011 - protein, 278 aa, Thermothielavioides terrestris
ASGSGQSTRYWDCCKPSCAWPGKAAVSQPVYACDANFQRLSDFNVQSGCNGGSAYSCADQTPWAVNDNLAYGFAATSIAGGSESSWCCACYALTFTSGPVAGKTMVVQSTSTGGDLGSNHFDIAMPGGGVGIFNGCSSQFGGLPGARYGGISSRDQCDSFPAPLKPGCQWRFDWFQNADNPTFTFQQVQCPAEIVARSGCKRNDDSSFPVFTPPSGGNGGTGTPTSTAPGSGQTSPGGGSGCTSQKWAQCGGIGFSGCTTCVSGTTCQKLNDYYSQCL

SEQ ID NO: 46012 - protein, 278 aa, Thermothielavioides terrestris
ASGSGQSTRYWDCCKPSCAWPGKAAVSQPVYACDANFQRLSDFNVQSGCNGGSAYSCADQTPWAVNDNLAYGFAATSIAGGSESSWCCACYALTFTSGPVAGKTMVVQSTSTGGDLGSNHFDIAMPGGGVGIFNGCSSQFGGLPGAQYGGISSRDQCDSFPAPLKPGCQWRFDWFQNADNPTFTFQQVQCPAELVARSGCKRNDDSSFPVFTPPSGGNGGTGTPTSTAPGSGQTSPGGGSGCTSQKWAQCGGIGFSGCTTCVSGTTCQKLNDYYSQCL

SEQ ID NO: 46013 - protein, 278 aa, Thermothielavioides terrestris
ASGSGQSTRYWDCCKPSCAWPGKAAVSQPVYACDANFQRLSDFNVQSGCNGGSAYSCADQTPWAVNDNLAYGFAATSIAGGSESSWCCACYALTFTSGPVAGKTMVVQSTSTGGDLGSNHFDIAMPGGGVGIFNGCSSQFGGLPGATYGGISSRDQCDSFPAPLKPGCQWRFDWFQNADNPTFTFQQVQCPAEIVARSGCKRNDDSSFPVFTPPSGGNGGTGTPTSTAPGSGQTSPGGGSGCTSQKWAQCGGIGFSGCTTCVSGTTCQKLNDYYSQCL

SEQ ID NO: 46014 - protein, 278 aa, Thermothielavioides terrestris
ASGSGQSTRYWDCCKPSCAWPGKAAVSQPVYACDANFQRLSDFNVQSGCNGGSAYSCADQTPWAVNDNLAYGFAATSIAGGSESSWCCACYALTFTSGPVAGKTMVVQSTSTGGDLGSNHFDIAMPGGGVGIFNGCSSQFGGLPGAQYGGIDSRDQCDSFPAPLKPGCQWRFDWFQNADNPTFTFQQVQCPAEIVARSGCKRNDDSSFPVFTPPSGGNGGTGTPTSTAPGSGQTSPGGGSGCTSQKWAQCGGIGFSGCTTCVSGTTCQKLNDYYSQCL

SEQ ID NO: 46015 - protein, 278 aa, Thermothielavioides terrestris
ASGSGQSTRYWDCCKPSCAWPGKAGVSQPVYACDANFQRLSDFNVQSGCNGGSAYSCADQTPWAVNDNLAYGFAATSIAGGSESSWCCACYALTFTSGPVAGKTMVVQSTSTGGDLGSNHFDIAMPGGGVGIFNGCSSQFGGLPGAQYGGISSRDQCDSFPAPLKPGCQWRFDWFQNADNPTFTFQQVQCPAEIVARSGCKRNDDSSFPVFTPPSGGNGGTGTPTSTAPGSGQTSPGGGSGCTSQKWAQCGGIGFSGCTTCVSGTTCQKLNDYYSQCL

SEQ ID NO: 46016 - protein, 278 aa, Thermothielavioides terrestris
ASGSGQSTRYWDCCKPSCAWPGKAAVSQPVYSCDANFQRLSDFNVQSGCNGGSAYSCADQTPWAVNDNLAYGFAATSIAGGSESSWCCACYALTFTSGPVAGKTMVVQSTSTGGDLGSNHFDIAMPGGGVGIFNGCSSQFGGLPGAQYGGISSRDQCDSFPAPLKPGCQWRFDWFQNADNPTFTFQQVQCPAEIVARSGCKRNDDSSFPVFTPPSGGNGGTGTPTSTAPGSGQTSPGGGSGCTSQKWAQCGGIGFSGCTTCVSGTTCQKLNDYYSQCL

SEQ ID NO: 46017 - protein, 278 aa, Thermothielavioides terrestris
ASGSGQSTRYWDCCKPSCAWPGKAAVSQPVYACDANFQRLSDFNVQSGCNGGSAYSCADQTPWAVNDNLAYGFAATSIAGGSESSWCCACYALTFVSGPVAGKTMVVQSTSTGGDLGSNHFDIAMPGGGVGIFNGCSSQFGGLPGAQYGGISSRDQCDSFPAPLKPGCQWRFDWFQNADNPTFTFQQVQCPAEIVARSGCKRNDDSSFPVFTPPSGGNGGTGTPTSTAPGSGQTSPGGGSGCTSQKWAQCGGIGFSGCTTCVSGTTCQKLNDYYSQCL

SEQ ID NO: 46018 - protein, 278 aa, Thermothielavioides terrestris
ASGSGQSTRYWDCCKPSCAWPGKAAVSQPVYACDANFQRLSDFNVQSGCNGGSAYSCADQTPWAVNDNLAYGFAATSIAGGSESSWCCACYALTFTSGPVAGKTMVVQSTSTGGDLGSNHFDIAMPGGGVGIFNGCSSQFGGLPGAQYGGISSRDQCDSFPAPLKPGCQWRFDWFQNADNPTFTFQQVQCPAEIVARSGCKRNDDSSFPVNTPPSGGNGGTGTPTSTAPGSGQTSPGGGSGCTSQKWAQCGGIGFSGCTTCVSGTTCQKLNDYYSQCL

SEQ ID NO: 46019 - protein, 278 aa, Thermothielavioides terrestris
ASGSGQSTRYWDCCKPSCAWPGKAAVSQPVYACDANFQRLTDFNVQSGCNGGSAYSCADQTPWAVNDNLAYGFAATSIAGGSESSWCCACYALTFTSGPVAGKTMVVQSTSTGGDLGSNHFDIAMPGGGVGIFNGCSSQFGGLPGAQYGGISSRDQCDSFPAPLKPGCQWRFDWFQNADNPTFTFQQVQCPAEIVARSGCKRNDDSSFPVFTPPSGGNGGTGTPTSTAPGSGQTSPGGGSGCTSQKWAQCGGIGFSGCTTCVSGTTCQKLNDYYSQCL

SEQ ID NO: 46020 - protein, 278 aa, Thielavia hyrcaniae
ASGSGQSTRYWDCCKPSCAWPGKAAVSQPVYACDANFQRLSDFNVQSGCNGGSAYSCADQTPWAVNDNLAYGFAATSIAGGSESSWCCACYALTFTSGPVAGKTMVVQSTSTGGDLGSNHFDIAMPGGGVGIFNGCSEQFGGLPGAQYGGISSRDQCDSFPAPLKPGCQWRFDWFQNADNPTFTFQQVQCPAEIVARSGCKRNDDSSFPVFTPPSGGNGGTGTPTSTAPGSGQTSPGGGSGCTSQKWAQCGGIGFSGCTTCVSGTTCQKLNDYYSQCL

SEQ ID NO: 46021 - protein, 278 aa, Thermothielavioides terrestris
ASGSGQSTRYWDCCKPSCAWPGKAAVSQPVYACDANFQRLSDFNVQSGCNGGSAYSCADQTPWAVNDNLAYGFAATSIAGGSESSWCCACYALTFTSGPVAGKTMVVQSTSTGGDLGSNHFDIAMPGGGVGIFDGCSSQFGGLPGAQYGGISSRDQCDSFPAPLKPGCQWRFDWFQNADNPTFTFQQVQCPAEIVARSGCKRNDDSSFPVFTPPSGGNGGTGTPTSTAPGSGQTSPGGGSGCTSQKWAQCGGIGFSGCTTCVSGTTCQKLNDYYSQCL

SEQ ID NO: 46022 - protein, 278 aa, Thermothielavioides terrestris
ASGSGQSTRYWDCCKPSCAWPGKAAVSQPVYACDANFQRLSDFNVQSGCNGGSAYSCADQTPWAVNDNLAYGFAATSIAGGSESSWCCACYALTFTSGPVAGKTMVVQSTSTGKDLGSNHFDIAMPGGGVGIFNGCSSQFGGLPGAQYGGISSRDQCDSFPAPLKPGCQWRFDWFQNADNPTFTFQQVQCPAEIVARSGCKRNDDSSFPVFTPPSGGNGGTGTPTSTAPGSGQTSPGGGSGCTSQKWAQCGGIGFSGCTTCVSGTTCQKLNDYYSQCL

SEQ ID NO: 46023 - protein, 278 aa, Thermothielavioides terrestris
ASGSGQSTRYWDCCKPSCAWPGKAAVSQPVYACDANFQRLSDFNVQSGCNGGSAYSCADQTPWAVNDNLAYGFAATSIAGGSESSWCCACYALTFTSGPVAGKTMVVQSTSTGGDLGSNHFDIAMPGGGVGLFNGCSSQFGGLPGAQYGGISSRDQCDSFPAPLKPGCQWRFDWFQNADNPTFTFQQVQCPAEIVARSGCKRNDDSSFPVFTPPSGGNGGTGTPTSTAPGSGQTSPGGGSGCTSQKWAQCGGIGFSGCTTCVSGTTCQKLNDYYSQCL

SEQ ID NO: 46024 - protein, 278 aa, Thermothielavioides terrestris
ASGSGQSTRYWDCCKPSCAWPGKAAVSQPVYACDANFQRLSDFNVQSGCNGGSAYSCADQTPWAVNDNLAYGFAATSIAGGSESSWCCACYALTFTSGPVAGKTMVVQSTSTGGDLGSNHFDIAMPGGGVGIFNGCSSQFGGLPGAQYGGISSRDQCDSFPAPLKPGCQWRFDWFQNADNPTFTFQQVQCPAEIVARSGCKLNDDSSFPVFTPPSGGNGGTGTPTSTAPGSGQTSPGGGSGCTSQKWAQCGGIGFSGCTTCVSGTTCQKLNDYYSQCL

SEQ ID NO: 46025 - protein, 278 aa, Thermothielavioides terrestris
ASGSGQSTRYWDCCKPSCAWPGKAAVSQPVYACDANFQRLSDFNVQSGCNGGSAYSCADQTPWAVNDNLAYGFAATSIAGGSESSWCCACYALTFTSGPVAGKMMVVQSTSTGGDLGSNHFDIAMPGGGVGIFNGCSSQFGGLPGAQYGGISSRDQCDSFPAPLKPGCQWRFDWFQNADNPTFTFQQVQCPAEIVARSGCKRNDDSSFPVFTPPSGGNGGTGTPTSTAPGSGQTSPGGGSGCTSQKWAQCGGIGFSGCTTCVSGTTCQKLNDYYSQCL

SEQ ID NO: 46026 - protein, 278 aa, Thermothielavioides terrestris
ASGSGQSTRYWDCCKPSCAWPGKAAVSQPVYACDANFQRLSDFNVQSGCNGGSAYSCADQTPWAVNDNLAYGFAATSIALGSESSWCCACYALTFTSGPVAGKTMVVQSTSTGGDLGSNHFDIAMPGGGVGIFNGCSSQFGGLPGAQYGGISSRDQCDSFPAPLKPGCQWRFDWFQNADNPTFTFQQVQCPAEIVARSGCKRNDDSSFPVFTPPSGGNGGTGTPTSTAPGSGQTSPGGGSGCTSQKWAQCGGIGFSGCTTCVSGTTCQKLNDYYSQCL

SEQ ID NO: 46027 - protein, 278 aa, Thermothielavioides terrestris
ASGSGQSTRYWDCCKPSCAWPGKAAVSQPVYACDANFQRLSDFNVQSGCNGGSAYSCADQTPWAVNDNLAYGFAATSIAGGSESSWCCACYALTFTSGPVAGKTMVVQSTSTGGDLGSNHFDIAMPGGGVGIFNGCSSQFGGLPGAKYGGISSRDQCDSFPAPLKPGCQWRFDWFQNADNPTFTFQQVQCPAEIVARSGCKRNDDSSFPVFTPPSGGNGGTGTPTSTAPGSGQTSPGGGSGCTSQKWAQCGGIGFSGCTTCVSGTTCQKLNDYYSQCL

SEQ ID NO: 46028 - protein, 278 aa, Thermothielavioides terrestris
ASGSGQSTRYWDCCKPSCAWPGKAAVSQPVYACDANFQRLSDFNVQSGCNGGSAYSCADQTPWAVNDNLAYGFAATSIAGGSESSWCCACYALTFTSGPVAGKLMVVQSTSTGGDLGSNHFDIAMPGGGVGIFNGCSSQFGGLPGAQYGGISSRDQCDSFPAPLKPGCQWRFDWFQNADNPTFTFQQVQCPAEIVARSGCKRNDDSSFPVFTPPSGGNGGTGTPTSTAPGSGQTSPGGGSGCTSQKWAQCGGIGFSGCTTCVSGTTCQKLNDYYSQCL

SEQ ID NO: 46029 - protein, 278 aa, Thermothielavioides terrestris
ASGSGQSTRYWDCCKPSCAWPGKAAVSQPVYACDANFQRLSDFNVQSGCNGGSAYSCADQTPWAVNDNLAYGFAATSIAGGSESDWCCACYALTFTSGPVAGKTMVVQSTSTGGDLGSNHFDIAMPGGGVGIFNGCSSQFGGLPGAQYGGISSRDQCDSFPAPLKPGCQWRFDWFQNADNPTFTFQQVQCPAEIVARSGCKRNDDSSFPVFTPPSGGNGGTGTPTSTAPGSGQTSPGGGSGCTSQKWAQCGGIGFSGCTTCVSGTTCQKLNDYYSQCL

SEQ ID NO: 46030 - protein, 278 aa, Thermothielavioides terrestris
ASGSGQSTRYWDCCKPSCAWPGKAAVSQPVYACDANFQRLSDFNVQSGCNGGSAYSCADQTPWAVNDNLAYGFAATSIAGGSESSWCCACYALTFTSGPVAGKTMVVQSTSTGGDLGSNHFDIAMPGGGVGIFNGCSSQFGGLPGAQFGGISSRDQCDSFPAPLKPGCQWRFDWFQNADNPTFTFQQVQCPAEIVARSGCKRNDDSSFPVFTPPSGGNGGTGTPTSTAPGSGQTSPGGGSGCTSQKWAQCGGIGFSGCTTCVSGTTCQKLNDYYSQCL

SEQ ID NO: 46031 - protein, 278 aa, Thermothielavioides terrestris
ASGSGQSTRYWDCCKPSCAWPGKAAVSQPVYACDANFQRLSDFNVQSGCNGGSAYSCADQTPWAVNDNLAYGFAATSIAGGSESSWCCACYALTFTSGPVAGKTMVVQSTSTGGDLGSNHFDIAMPGGGVGIFNGCSSQFGGLPGAQYGGISSRDQCDSFPAPLKPGCQWRFDWFQNADNPTFTFQQVQCPAESVARSGCKRNDDSSFPVFTPPSGGNGGTGTPTSTAPGSGQTSPGGGSGCTSQKWAQCGGIGFSGCTTCVSGTTCQKLNDYYSQCL

SEQ ID NO: 46032 - protein, 278 aa, Thermothielavioides terrestris
ASGSGQSTRYWDCCKPSCAWPGKAAVSQPVYACDANFQRLSDFNVQSGCNGGSAYSCADQTPWAVNDNLAYGFAATSIAGGSESSWCCACYALTFTSGPVKGKTMVVQSTSTGGDLGSNHFDIAMPGGGVGIFNGCSSQFGGLPGAQYGGISSRDQCDSFPAPLKPGCQWRFDWFQNADNPTFTFQQVQCPAEIVARSGCKRNDDSSFPVFTPPSGGNGGTGTPTSTAPGSGQTSPGGGSGCTSQKWAQCGGIGFSGCTTCVSGTTCQKLNDYYSQCL

SEQ ID NO: 46033 - protein, 278 aa, Thermothielavioides terrestris
ASGSGQSTRYWDCCKPSCAWPGKAAVSQPVYACDANFQRLSDFNVQSGCNGGSAYSCADQTPWAVNDNLAYGFAATSIAGGSESSWCCACYALTFTSGPVAGKTMVVQSTSTGADLGSNHFDIAMPGGGVGIFNGCSSQFGGLPGAQYGGISSRDQCDSFPAPLKPGCQWRFDWFQNADNPTFTFQQVQCPAEIVARSGCKRNDDSSFPVFTPPSGGNGGTGTPTSTAPGSGQTSPGGGSGCTSQKWAQCGGIGFSGCTTCVSGTTCQKLNDYYSQCL

SEQ ID NO: 46034 - protein, 278 aa, Thermothielavioides terrestris
ASGSGQSTRYWDCCKPSCAWPGKAAVSQPVYACDANFQRLSDFNVQSGCNGGSAYSCADQTPWAVNDNLAYGFAATSIAGGSESSWCCACYALTFTSGPVAGKTMVVQSTSTGGDLGSNHFDIAMPGGGVGIFNGCSSQFGGLPGAQYGGISSRDQCDDFPAPLKPGCQWRFDWFQNADNPTFTFQQVQCPAEIVARSGCKRNDDSSFPVFTPPSGGNGGTGTPTSTAPGSGQTSPGGGSGCTSQKWAQCGGIGFSGCTTCVSGTTCQKLNDYYSQCL

SEQ ID NO: 46035 - protein, 278 aa, Thermothielavioides terrestris
ASGSGQSTRYWDCCKPSCAWPGKAAVSQPVYACDANFQRLSDFNVQSGCNGGSAYSCADQTPWAVNDNLAYGFAATSIAGGSESSWCCACYALTFTSGPVAGKTMVVQSTSTGGDLGSNHFDIAMPGGGVGIFNGCDSQFGGLPGAQYGGISSRDQCDSFPAPLKPGCQWRFDWFQNADNPTFTFQQVQCPAEIVARSGCKRNDDSSFPVFTPPSGGNGGTGTPTSTAPGSGQTSPGGGSGCTSQKWAQCGGIGFSGCTTCVSGTTCQKLNDYYSQCL

SEQ ID NO: 46036 - protein, 278 aa, Thermothielavioides terrestris
ASGSGNSTRYWDCCKPSCAWPGKAAVSQPVYACDANFQRLSDFNVQSGCNGGSAYSCADQTPWAVNDNLAYGFAATSIAGGSESSWCCACYALTFTSGPVAGKTMVVQSTSTGGDLGSNHFDIAMPGGGVGIFNGCSSQFGGLPGAQYGGISSRDQCDSFPAPLKPGCQWRFDWFQNADNPTFTFQQVQCPAEIVARSGCKRNDDSSFPVFTPPSGGNGGTGTPTSTAPGSGQTSPGGGSGCTSQKWAQCGGIGFSGCTTCVSGTTCQKLNDYYSQCL

SEQ ID NO: 46037 - protein, 278 aa, Thermothielavioides terrestris
ASGSGQSTRYWDCCKPSCAWPGKAAVSQPVYACDANFQRLSDFNVQSGCNGGSAYSCADQTPWAVNDNLAYGFAATSIAGGSESSWCCACYALTFTSGPVAGKTMVVQSTSTGGDLGSNHFDIAMPGGGVGIFNGCMSQFGGLPGAQYGGISSRDQCDSFPAPLKPGCQWRFDWFQNADNPTFTFQQVQCPAEIVARSGCKRNDDSSFPVFTPPSGGNGGTGTPTSTAPGSGQTSPGGGSGCTSQKWAQCGGIGFSGCTTCVSGTTCQKLNDYYSQCL

SEQ ID NO: 46038 - protein, 278 aa, Thermothielavioides terrestris
ASGSGQSTRYWDCCKPSCAWPGKAAVSQPVYACDANFQRLSDFNVQSGCNGGSAYSCADQTPWAVNDNLAYGFAATSIAGGSESSWCCACYALTFTSGPVAGKTMVVQSTSTGGDLGSNHFDIAMPGGGVGIFNGCSSQFGGLPGTQYGGISSRDQCDSFPAPLKPGCQWRFDWFQNADNPTFTFQQVQCPAEIVARSGCKRNDDSSFPVFTPPSGGNGGTGTPTSTAPGSGQTSPGGGSGCTSQKWAQCGGIGFSGCTTCVSGTTCQKLNDYYSQCL

SEQ ID NO: 46039 - protein, 278 aa, Thermothielavioides terrestris
ASGSGQSTRYWDCCKPSCAWPGKAAVSQPVYACDANFQRLSDFNVQSGCNGGSAYSCADQTPWAVNDNLAYGFAATSIAGGSDSSWCCACYALTFTSGPVAGKTMVVQSTSTGGDLGSNHFDIAMPGGGVGIFNGCSSQFGGLPGAQYGGISSRDQCDSFPAPLKPGCQWRFDWFQNADNPTFTFQQVQCPAEIVARSGCKRNDDSSFPVFTPPSGGNGGTGTPTSTAPGSGQTSPGGGSGCTSQKWAQCGGIGFSGCTTCVSGTTCQKLNDYYSQCL

SEQ ID NO: 46040 - protein, 278 aa, Thermothielavioides terrestris
ASGSGQSTRYWDCCKPSCAWPGKAAVSQPVYACDANFQRLSDFNVQSGCNGGSAYSCADQTPWAVNDNLAYGFAATSIAGGSESSWCCACYALTFTSGPVAGKTMVVQSTSTGGDLGSNHFDIAMPGGGVGIFNGCSSQFGGLPGADYGGISSRDQCDSFPAPLKPGCQWRFDWFQNADNPTFTFQQVQCPAEIVARSGCKRNDDSSFPVFTPPSGGNGGTGTPTSTAPGSGQTSPGGGSGCTSQKWAQCGGIGFSGCTTCVSGTTCQKLNDYYSQCL

SEQ ID NO: 46041 - protein, 278 aa, Thermothielavioides terrestris
ASGSGQSTRYWDCCKPSCAWPGKAAVSQPVYACDANFQRLSDFNVQSGCNGGSAYSCADQTPWAVNDNLAYGFAATSIAGGSESSWCCACYALTFTSTPVAGKTMVVQSTSTGGDLGSNHFDIAMPGGGVGIFNGCSSQFGGLPGAQYGGISSRDQCDSFPAPLKPGCQWRFDWFQNADNPTFTFQQVQCPAEIVARSGCKRNDDSSFPVFTPPSGGNGGTGTPTSTAPGSGQTSPGGGSGCTSQKWAQCGGIGFSGCTTCVSGTTCQKLNDYYSQCL

SEQ ID NO: 46042 - protein, 278 aa, Thermothielavioides terrestris
ASGSGQSTRYWDCCKPSCAWPGKAAVSQPVYACDANFQRLSDFNVQSGCNGGSAYSCADQTPWAVNDNLAYGFAATSIAGGSESSWCCACYALTFTSGPVAGKTMVVQSTSTGLDLGSNHFDIAMPGGGVGIFNGCSSQFGGLPGAQYGGISSRDQCDSFPAPLKPGCQWRFDWFQNADNPTFTFQQVQCPAEIVARSGCKRNDDSSFPVFTPPSGGNGGTGTPTSTAPGSGQTSPGGGSGCTSQKWAQCGGIGFSGCTTCVSGTTCQKLNDYYSQCL

SEQ ID NO: 46043 - protein, 278 aa, Thermothielavioides terrestris
ASGSGQSTRYWDCCKPSCAWPGKAAVSQPVYACDANFQRLSDFNVQSGCNGGSAYSCADQTPWAVNDNLAYGFAATSIAGGSESMWCCACYALTFTSGPVAGKTMVVQSTSTGGDLGSNHFDIAMPGGGVGIFNGCSSQFGGLPGAQYGGISSRDQCDSFPAPLKPGCQWRFDWFQNADNPTFTFQQVQCPAEIVARSGCKRNDDSSFPVFTPPSGGNGGTGTPTSTAPGSGQTSPGGGSGCTSQKWAQCGGIGFSGCTTCVSGTTCQKLNDYYSQCL

SEQ ID NO: 46044 - protein, 278 aa, Thermothielavioides terrestris
ASGSGQSTRYWDCCKPSCAWPGKAAVSQPVYACDANFQRLSDFNVQSGCNGGSAYACADQTPWAVNDNLAYGFAATSIAGGSESSWCCACYALTFTSGPVAGKTMVVQSTSTGGDLGSNHFDIAMPGGGVGIFNGCSSQFGGLPGAQYGGISSRDQCDSFPAPLKPGCQWRFDWFQNADNPTFTFQQVQCPAEIVARSGCKRNDDSSFPVFTPPSGGNGGTGTPTSTAPGSGQTSPGGGSGCTSQKWAQCGGIGFSGCTTCVSGTTCQKLNDYYSQCL

SEQ ID NO: 46045 - protein, 278 aa, Thermothielavioides terrestris
ASGSGQSTRYWDCCKPSCAWPGKAAVSQPVYACDANFQRLSDFNVQSGCNGGSAYSCADQTPWAVNDNLAYGFAATSIAGGSESSWCCACYALTFTSGPVAGKTMVVQSTSTGGDLGSNHFDIAMPGGGVGIFNGCSSQFGGLPGAQYGGISSRDQCDSFPAPLKPGCQWRFDWFQNADNPTFTFQQQQCPAEIVARSGCKRNDDSSFPVFTPPSGGNGGTGTPTSTAPGSGQTSPGGGSGCTSQKWAQCGGIGFSGCTTCVSGTTCQKLNDYYSQCL

SEQ ID NO: 46046 - protein, 278 aa, Thermothielavioides terrestris
ASGSGQSTRYWDCCKPSCAWPGKAAVSQPVYACDANFQRLSDFNVQSGCNGGSAYSCADQTPWAVNDNLAYGFAATSIAGGSESSWCCACYALTFTSGPVAGKTMVVQSTSTGGDLGSNHFDIAMPGGGVGIFNGCSSQFGGLPGAQYGGISSRDQCDSFPAPLKPGCQWRFDWFQNADNPTFTFQQVQCPAEIVARSGCRRNDDSSFPVFTPPSGGNGGTGTPTSTAPGSGQTSPGGGSGCTSQKWAQCGGIGFSGCTTCVSGTTCQKLNDYYSQCL

SEQ ID NO: 46047 - protein, 278 aa, Thermothielavioides terrestris
ASGSGQSTRYWDCCKPSCAWPGKAAVSQPVYACDANFQRLSDFNVQSGCNGGSAYSCADQTPWAVNDNLAYGFAATSIAKGSESSWCCACYALTFTSGPVAGKTMVVQSTSTGGDLGSNHFDIAMPGGGVGIFNGCSSQFGGLPGAQYGGISSRDQCDSFPAPLKPGCQWRFDWFQNADNPTFTFQQVQCPAEIVARSGCKRNDDSSFPVFTPPSGGNGGTGTPTSTAPGSGQTSPGGGSGCTSQKWAQCGGIGFSGCTTCVSGTTCQKLNDYYSQCL

SEQ ID NO: 46048 - protein, 278 aa, Thermothielavioides terrestris
ASGSGQSTRYWDCCKPSCAWPGKAAVSQPVYACDANFQRLSDFNVQSGCNGGSAYSCADQTPWAVNDNLAYGFAATSIAGGSESSWCCACYALTFTSGPVAGKAMVVQSTSTGGDLGSNHFDIAMPGGGVGIFNGCSSQFGGLPGAQYGGISSRDQCDSFPAPLKPGCQWRFDWFQNADNPTFTFQQVQCPAEIVARSGCKRNDDSSFPVFTPPSGGNGGTGTPTSTAPGSGQTSPGGGSGCTSQKWAQCGGIGFSGCTTCVSGTTCQKLNDYYSQCL

SEQ ID NO: 46049 - protein, 278 aa, Thermothielavioides terrestris
ASGSGQSTRYWDCCKPSCAWPGKAAVSQPVYACDANFQRLSDFNVQSGCNGGSAYSCADQTPWAVNDNLAYGFAATSIAGGSESSWCCACYALTFTSGPVAGLTMVVQSTSTGGDLGSNHFDIAMPGGGVGIFNGCSSQFGGLPGAQYGGISSRDQCDSFPAPLKPGCQWRFDWFQNADNPTFTFQQVQCPAEIVARSGCKRNDDSSFPVFTPPSGGNGGTGTPTSTAPGSGQTSPGGGSGCTSQKWAQCGGIGFSGCTTCVSGTTCQKLNDYYSQCL

SEQ ID NO: 46050 - protein, 278 aa, Thermothielavioides terrestris
ASGSGQSTRYWDCCKPSCAWPGKAAVSQPVYACDANFQRLSDFNVQSGCNGGSAYSCADQTPWAVNDNLAYGFAATSIAGGSESSWCCACYALTFTSGPVAGKDMVVQSTSTGGDLGSNHFDIAMPGGGVGIFNGCSSQFGGLPGAQYGGISSRDQCDSFPAPLKPGCQWRFDWFQNADNPTFTFQQVQCPAEIVARSGCKRNDDSSFPVFTPPSGGNGGTGTPTSTAPGSGQTSPGGGSGCTSQKWAQCGGIGFSGCTTCVSGTTCQKLNDYYSQCL

SEQ ID NO: 46051 - protein, 278 aa, Thermothielavioides terrestris
ASGSGQSTRYWDCCKPSCAWPGKAAVSQPVYACDANFQRLSDFNVQSGCNGGSAYSCADQTPWAVNDNLAYGFAATSIAGGSESSWCCACYALTFTSGPVAGKTMVVQSTSTGGDLGSNHFDIAMPGGGVGIFNGCSSQFGGLPGAQYGGISSRDQCDSFPAPLKPGCYWRFDWFQNADNPTFTFQQVQCPAEIVARSGCKRNDDSSFPVFTPPSGGNGGTGTPTSTAPGSGQTSPGGGSGCTSQKWAQCGGIGFSGCTTCVSGTTCQKLNDYYSQCL

SEQ ID NO: 46052 - protein, 278 aa, Thermothielavioides terrestris
ASGSGQSTRYWDCCKPSCAWPGKAAVSQPVYACDANFQRLSDFNVQSGCNGGSAYSCADQTPWAVNDNLAYGFAATSIAGGSESSWCCACYALTFTSGPVAGKTMVVQSTSTGGDLGSNHFDIAMPGGGVGIFNGCSSQFGGLPGAQYGGISSRDQCDSFPAPLKPGCWWRFDWFQNADNPTFTFQQVQCPAEIVARSGCKRNDDSSFPVFTPPSGGNGGTGTPTSTAPGSGQTSPGGGSGCTSQKWAQCGGIGFSGCTTCVSGTTCQKLNDYYSQCL

SEQ ID NO: 46053 - protein, 278 aa, Thermothielavioides terrestris
ASGSGQSTRYWDCCKPSCAWPGKAAVSQPVYACDANFQRLSDFNVQSGCNGGSAYSCADQTPWAVNDNLAYGFAATSIAGGSESSWCCACYALTFTSGPVAGKTMVVQSTSTGGDLGSNHFDIAMPGGGVGIFNGCSSQFGGLPGAQYGGISSRDQCDSFPAPLKPGCFWRFDWFQNADNPTFTFQQVQCPAEIVARSGCKRNDDSSFPVFTPPSGGNGGTGTPTSTAPGSGQTSPGGGSGCTSQKWAQCGGIGFSGCTTCVSGTTCQKLNDYYSQCL

SEQ ID NO: 46054 - protein, 278 aa, Thielavia hyrcaniae
ASGSGQSTRYWDCCKPSCAWPGKALVSQPVYACDANFQRLSDFNVQSGCNGGSAYSCADQTPWAVNDNLAYGFAATSIAGGSESSWCCACYALTFTSGPVAGKTMVVQSTSTGGDLGSNHFDIAMPGGGVGIFNGCSSQFGGLPGAQYGGISSRDQCDSFPAPLKPGCQWRFDWFQNADNPTFTFQQVQCPAEIVARSGCKRNDDSSFPVFTPPSGGNGGTGTPTSTAPGSGQTSPGGGSGCTSQKWAQCGGIGFSGCTTCVSGTTCQKLNDYYSQCL

SEQ ID NO: 46055 - protein, 278 aa, Thermothielavioides terrestris
ASGSGQSTRYWDCCKPSCAWPGKAAVSQPVYACDANWQRLSDFNVQSGCNGGSAYSCADQTPWAVNDNLAYGFAATSIAGGSESSWCCACYALTFTSGPVAGKTMVVQSTSTGGDLGSNHFDIAMPGGGVGIFNGCSSQFGGLPGAQYGGISSRDQCDSFPAPLKPGCQWRFDWFQNADNPTFTFQQVQCPAEIVARSGCKRNDDSSFPVFTPPSGGNGGTGTPTSTAPGSGQTSPGGGSGCTSQKWAQCGGIGFSGCTTCVSGTTCQKLNDYYSQCL

SEQ ID NO: 46056 - protein, 278 aa, Thermothielavioides terrestris
ASGSGQSTRYWDCCKPSCAWPGKAAVSQPVYACDANFQRLSDFNVQSGCNGGSAYSCADQTPWAVNDNLAYGFAATSIAGGSESSWCCACYALQFTSGPVAGKTMVVQSTSTGGDLGSNHFDIAMPGGGVGIFNGCSSQFGGLPGAQYGGISSRDQCDSFPAPLKPGCQWRFDWFQNADNPTFTFQQVQCPAEIVARSGCKRNDDSSFPVFTPPSGGNGGTGTPTSTAPGSGQTSPGGGSGCTSQKWAQCGGIGFSGCTTCVSGTTCQKLNDYYSQCL

SEQ ID NO: 46057 - protein, 278 aa, Thermothielavioides terrestris
ASGSGQSTRYWDCCKPSCAWPGKAAVSQPVYACDANFQRLSDFNVQSGCNGGSAYSCADQTPWAVNDNLAYGFAATSIAGGSESSWCCACYALTFTSGPVAGKTMVVQSTSTGGDLGSNHFDIAMPGGGVGIFNGCSSQFGGLPGAQYGGISSRDQCDSFPAPLKPGCQWRFDWFQNADNPTFTFQQVQCPAEIVARSGCKRNDDSSFPVWTPPSGGNGGTGTPTSTAPGSGQTSPGGGSGCTSQKWAQCGGIGFSGCTTCVSGTTCQKLNDYYSQCL

SEQ ID NO: 46058 - protein, 278 aa, Thermothielavioides terrestris
ASGSGQSTRYWDCCKPSCAWPGKAAVSQPVYACDANFQRLSDFNVQSGCNGGSAYSCADQTPWAVNDNLAYGFAATSIAGGSESSWCCACYALTFTSGPVAGKQMVVQSTSTGGDLGSNHFDIAMPGGGVGIFNGCSSQFGGLPGAQYGGISSRDQCDSFPAPLKPGCQWRFDWFQNADNPTFTFQQVQCPAEIVARSGCKRNDDSSFPVFTPPSGGNGGTGTPTSTAPGSGQTSPGGGSGCTSQKWAQCGGIGFSGCTTCVSGTTCQKLNDYYSQCL

SEQ ID NO: 46059 - protein, 278 aa, Thermothielavioides terrestris
ASGSGQSTRYWDCCKPSCAWPGKAAVSQPVYACDANFQRLSDFNVQSGCNGGSAYSCADQTPWAVNDNLAYGFAATSIAGGSESSWCCACYALTFTSGPVAGKIMVVQSTSTGGDLGSNHFDIAMPGGGVGIFNGCSSQFGGLPGAQYGGISSRDQCDSFPAPLKPGCQWRFDWFQNADNPTFTFQQVQCPAEIVARSGCKRNDDSSFPVFTPPSGGNGGTGTPTSTAPGSGQTSPGGGSGCTSQKWAQCGGIGFSGCTTCVSGTTCQKLNDYYSQCL

SEQ ID NO: 46060 - protein, 278 aa, Thermothielavioides terrestris
ASGSGQSTRYWDCCKPSCAWPGKAAVSQPVYACDANFQRLSDFNVQSGCNGGSAYSCADQTPWAVNDNLAYGFAATSIAGGSESSWCCACYALTFTSGPVAGKTMVVQSTSTGGDLGSNHFDIAMPGGGVGIFNGCSSQFGGLPGAQYGGISSRDQCDSFPAPLKPGCQWRFDWFQNADNPTFTFQQVQCPAEIVARSGCKRNDDSSFPVFTPPSGGNWGTGTPTSTAPGSGQTSPGGGSGCTSQKWAQCGGIGFSGCTTCVSGTTCQKLNDYYSQCL

SEQ ID NO: 46061 - protein, 278 aa, Thermothielavioides terrestris
ASGSGQSTRYWDCCKPSCAWPGKAAVSQPVYACDANFQRLSDFNVQSGCNGGSAYSCADQTPWAVNDNLAYGFAATSIAGGSESSWCCACYALTFTSGPVDGKTMVVQSTSTGGDLGSNHFDIAMPGGGVGIFNGCSSQFGGLPGAQYGGISSRDQCDSFPAPLKPGCQWRFDWFQNADNPTFTFQQVQCPAEIVARSGCKRNDDSSFPVFTPPSGGNGGTGTPTSTAPGSGQTSPGGGSGCTSQKWAQCGGIGFSGCTTCVSGTTCQKLNDYYSQCL

SEQ ID NO: 46062 - protein, 278 aa, Thermothielavioides terrestris
ASGSGQSTRYWDCCKPSCAWPGKAAVSQPVYACDANFQRLSDFNVQSGCNGGSAYSCADQTPWAVNDNLAYGFAATSIAGGSESSWCCACYALTFFSGPVAGKTMVVQSTSTGGDLGSNHFDIAMPGGGVGIFNGCSSQFGGLPGAQYGGISSRDQCDSFPAPLKPGCQWRFDWFQNADNPTFTFQQVQCPAEIVARSGCKRNDDSSFPVFTPPSGGNGGTGTPTSTAPGSGQTSPGGGSGCTSQKWAQCGGIGFSGCTTCVSGTTCQKLNDYYSQCL

SEQ ID NO: 46063 - protein, 278 aa, Thermothielavioides terrestris
ASGSGQSTRYWDCCKPSCAWPGKAAVSQPVYACDANFQRLSDFNVQSGCNGGSAYSCADQTPWAVNDNLAYGFAATSIAGGSESSWCCACYALTFTSGPVAGKTMVVQSTSTGGDLGSNHFDIAMPGGGVGIFNGCNSQFGGLPGAQYGGISSRDQCDSFPAPLKPGCQWRFDWFQNADNPTFTFQQVQCPAEIVARSGCKRNDDSSFPVFTPPSGGNGGTGTPTSTAPGSGQTSPGGGSGCTSQKWAQCGGIGFSGCTTCVSGTTCQKLNDYYSQCL

SEQ ID NO: 46064 - protein, 278 aa, Thermothielavioides terrestris
ASGSGQSTRYWDCCKPSCAWPGKAAVSQPVYACDANFQRLSDFNVQSGCNGGSAYSCADQTPWAVNDNLAYGFAATSIAGGSESSWCCACYALTFTSGPVAGKTMVVQSTSTGGDLGSNHFDIAMPGGGVGIFNGCSSQFGGLPGAQYGGISSRDQCDSFPAPLKPGCQWRFDWFQNADNPTFTFQQVQCPAEIVARSGCKRNDDSSFPVPTPPSGGNGGTGTPTSTAPGSGQTSPGGGSGCTSQKWAQCGGIGFSGCTTCVSGTTCQKLNDYYSQCL

SEQ ID NO: 46065 - protein, 278 aa, Thermothielavioides terrestris
ASGSGQSTRYWDCCKPSCAWPGKAAVSQPVYACDANFQRLSDFNVQSGCNGGSAYSCADQTPWAVNDNLAYGFAATSIAGGSESSWCCACYALTFTSGPVAGKTMVVQSTSTGGDLGSNHFDIAMPGGGVGRFNGCSSQFGGLPGAQYGGISSRDQCDSFPAPLKPGCQWRFDWFQNADNPTFTFQQVQCPAEIVARSGCKRNDDSSFPVFTPPSGGNGGTGTPTSTAPGSGQTSPGGGSGCTSQKWAQCGGIGFSGCTTCVSGTTCQKLNDYYSQCL

SEQ ID NO: 46066 - protein, 278 aa, Thermothielavioides terrestris
ASGSGQSTRYWDCCKPSCAWPGKAAVSQPVYACDANFQRLSDFNVQSGCNGGSAYSCADQTPWAVNDNLAYGFAATSIAGGSESSWCCACYALTFTSGPVAGKVMVVQSTSTGGDLGSNHFDIAMPGGGVGIFNGCSSQFGGLPGAQYGGISSRDQCDSFPAPLKPGCQWRFDWFQNADNPTFTFQQVQCPAEIVARSGCKRNDDSSFPVFTPPSGGNGGTGTPTSTAPGSGQTSPGGGSGCTSQKWAQCGGIGFSGCTTCVSGTTCQKLNDYYSQCL

SEQ ID NO: 46067 - protein, 278 aa, Thermothielavioides terrestris
ASGSGQSTRYWDCCKPSCAWPGKAAVSQPVYACDANFQRLSDFNVQSGCNGGSAYSCADQTPWAVNDNLAYGFAATSIAGGSESSWCCACYALTFTSGPVAGKYMVVQSTSTGGDLGSNHFDIAMPGGGVGIFNGCSSQFGGLPGAQYGGISSRDQCDSFPAPLKPGCQWRFDWFQNADNPTFTFQQVQCPAEIVARSGCKRNDDSSFPVFTPPSGGNGGTGTPTSTAPGSGQTSPGGGSGCTSQKWAQCGGIGFSGCTTCVSGTTCQKLNDYYSQCL

SEQ ID NO: 46068 - protein, 278 aa, Thermothielavioides terrestris
ASGSGQSTRYWDCCKPSCAWPGKAAVSQPVYACDANFQRLSDFNVQSGCNGGSAYSCADQTPWAVNDNLAYGFAATSIAGGSESSWCCACYALTFTSGPVAGQTMVVQSTSTGGDLGSNHFDIAMPGGGVGIFNGCSSQFGGLPGAQYGGISSRDQCDSFPAPLKPGCQWRFDWFQNADNPTFTFQQVQCPAEIVARSGCKRNDDSSFPVFTPPSGGNGGTGTPTSTAPGSGQTSPGGGSGCTSQKWAQCGGIGFSGCTTCVSGTTCQKLNDYYSQCL

SEQ ID NO: 46069 - protein, 278 aa, Thermothielavioides terrestris
ASGSGQSTRYWDCCKPSCAWPGKAAVSQPVYACDANFQRLSDFNVQSGCNGGSAYSCADQTPWAVNDNLAYGFAATSIAGGSESSWCCACYALTFTSGPTAGKTMVVQSTSTGGDLGSNHFDIAMPGGGVGIFNGCSSQFGGLPGAQYGGISSRDQCDSFPAPLKPGCQWRFDWFQNADNPTFTFQQVQCPAEIVARSGCKRNDDSSFPVFTPPSGGNGGTGTPTSTAPGSGQTSPGGGSGCTSQKWAQCGGIGFSGCTTCVSGTTCQKLNDYYSQCL

SEQ ID NO: 46070 - protein, 278 aa, Thermothielavioides terrestris
ASGSGQSTRYWDCCKPSCAWPGKAAVSQPVYACDANFQRLSDFNVQSGCNGGSAYSCADQTPWAVNDNLAYGFAATSIAGGSESSWCCACYALTFTSGPVAGKTMVVQSTSTGGDLGSNHFDIAMPGGGVGIFNGCSSQFGGLPGAQYGGISSRDQCDEFPAPLKPGCQWRFDWFQNADNPTFTFQQVQCPAEIVARSGCKRNDDSSFPVFTPPSGGNGGTGTPTSTAPGSGQTSPGGGSGCTSQKWAQCGGIGFSGCTTCVSGTTCQKLNDYYSQCL

SEQ ID NO: 46071 - protein, 278 aa, Thermothielavioides terrestris
ASGSGQSTRYWDCCKPSCAWPGKAAVSQPVYACDANFQRLSDFNVQSGCNGGSAYSCADQTPWAVNDNLAYGFAATSIAGGSESSWCCACYALTFTSGPVLGKTMVVQSTSTGGDLGSNHFDIAMPGGGVGIFNGCSSQFGGLPGAQYGGISSRDQCDSFPAPLKPGCQWRFDWFQNADNPTFTFQQVQCPAEIVARSGCKRNDDSSFPVFTPPSGGNGGTGTPTSTAPGSGQTSPGGGSGCTSQKWAQCGGIGFSGCTTCVSGTTCQKLNDYYSQCL

SEQ ID NO: 46072 - protein, 278 aa, Thermothielavioides terrestris
ASGSGMSTRYWDCCKPSCAWPGKAAVSQPVYACDANFQRLSDFNVQSGCNGGSAYSCADQTPWAVNDNLAYGFAATSIAGGSESSWCCACYALTFTSGPVAGKTMVVQSTSTGGDLGSNHFDIAMPGGGVGIFNGCSSQFGGLPGAQYGGISSRDQCDSFPAPLKPGCQWRFDWFQNADNPTFTFQQVQCPAEIVARSGCKRNDDSSFPVFTPPSGGNGGTGTPTSTAPGSGQTSPGGGSGCTSQKWAQCGGIGFSGCTTCVSGTTCQKLNDYYSQCL

SEQ ID NO: 46073 - protein, 278 aa, Thermothielavioides terrestris
ASGSGQSTRYWDCCKPSCAWPGKAAVSQPVYACDANFQRLSDFNVQSGCNGGSAYSCADQTPWAVNDNLAYGFAATSIAGGSESSWCCACYALTFTSGPVAGKTMVVQSTSTGGDLGSNHFDIAMPGGGVGIFNGCSSQFGGLPGAEYGGISSRDQCDSFPAPLKPGCQWRFDWFQNADNPTFTFQQVQCPAEIVARSGCKRNDDSSFPVFTPPSGGNGGTGTPTSTAPGSGQTSPGGGSGCTSQKWAQCGGIGFSGCTTCVSGTTCQKLNDYYSQCL

SEQ ID NO: 46074 - protein, 278 aa, Thermothielavioides terrestris
ASGSGQSTRYWDCCKPSCAWPGKAAVSQPVYACDANFQRLSDFNVQSGCNGGSAYSCADQTPWAVNDNLAYGFAATSIAGGSESSWCCACYALTFTSGPVAGKTMVVQSTSTGGDLGSNHFDIAMPGGGVGIFNGCRSQFGGLPGAQYGGISSRDQCDSFPAPLKPGCQWRFDWFQNADNPTFTFQQVQCPAEIVARSGCKRNDDSSFPVFTPPSGGNGGTGTPTSTAPGSGQTSPGGGSGCTSQKWAQCGGIGFSGCTTCVSGTTCQKLNDYYSQCL

SEQ ID NO: 46075 - protein, 278 aa, Thermothielavioides terrestris
ASGSGQSTRYWDCCKPSCAWPGKAAVSQPVYACDANFQRLSDFNVQSGCNGGSAYSCADQTPWAVNDNLAYGFAATSIAGGSESSWCCACYALTFTSGPVAGKTMVVQSTSTGGDLGSNHFDIAMPGGGVGIFNGCSSQFGGLPGAQYGGISSRDQCDSFPEPLKPGCQWRFDWFQNADNPTFTFQQVQCPAEIVARSGCKRNDDSSFPVFTPPSGGNGGTGTPTSTAPGSGQTSPGGGSGCTSQKWAQCGGIGFSGCTTCVSGTTCQKLNDYYSQCL

SEQ ID NO: 46076 - protein, 278 aa, Thermothielavioides terrestris
ASGSGQSTRYWDCCKPSCAWPGKAAVSQPVYACDANFQRLSDFNVQSGCNGGSAYSCADQTPWAVNDNLAYGFAATSIAGGSESSWCCACYALTFTSGPVAGATMVVQSTSTGGDLGSNHFDIAMPGGGVGIFNGCSSQFGGLPGAQYGGISSRDQCDSFPAPLKPGCQWRFDWFQNADNPTFTFQQVQCPAEIVARSGCKRNDDSSFPVFTPPSGGNGGTGTPTSTAPGSGQTSPGGGSGCTSQKWAQCGGIGFSGCTTCVSGTTCQKLNDYYSQCL

SEQ ID NO: 46077 - protein, 278 aa, Thermothielavioides terrestris
ASGSGQSTRYWDCCKPSCAWPGKAAVSQPVYACDANFQRLSDFNVQSGCNGGSAYSCADQTPWAVNDNLAYGFAATSIAGGSESSWCCACYALTFTSGPVAGKTMVVQSTSTGGDLGSNHFDIAMPGGGVGIFNGCGSQFGGLPGAQYGGISSRDQCDSFPAPLKPGCQWRFDWFQNADNPTFTFQQVQCPAEIVARSGCKRNDDSSFPVFTPPSGGNGGTGTPTSTAPGSGQTSPGGGSGCTSQKWAQCGGIGFSGCTTCVSGTTCQKLNDYYSQCL

SEQ ID NO: 46078 - protein, 278 aa, Thielavia hyrcaniae
ASGSGQSTRYWDCCKPSCAWPGKAAVSQPVYACDANFTRLSDFNVQSGCNGGSAYSCADQTPWAVNDNLAYGFAATSIAGGSESSWCCACYALTFTSGPVAGKTMVVQSTSTGGDLGSNHFDIAMPGGGVGIFNGCSSQFGGLPGAQYGGISSRDQCDSFPAPLKPGCQWRFDWFQNADNPTFTFQQVQCPAEIVARSGCKRNDDSSFPVFTPPSGGNGGTGTPTSTAPGSGQTSPGGGSGCTSQKWAQCGGIGFSGCTTCVSGTTCQKLNDYYSQCL

SEQ ID NO: 46079 - protein, 278 aa, Thermothielavioides terrestris
ASGSGQSTRYWDCCKPSCAWPGKAAVSQPVYACDANFQRLSDFNVQSGCNGGSAYSCADQTPWAVNDNLAYGFAATSIAGGSESSWCCACYALTFTSGPVAGKTMVVQSTSTGFDLGSNHFDIAMPGGGVGIFNGCSSQFGGLPGAQYGGISSRDQCDSFPAPLKPGCQWRFDWFQNADNPTFTFQQVQCPAEIVARSGCKRNDDSSFPVFTPPSGGNGGTGTPTSTAPGSGQTSPGGGSGCTSQKWAQCGGIGFSGCTTCVSGTTCQKLNDYYSQCL

SEQ ID NO: 46080 - protein, 278 aa, Thermothielavioides terrestris
ASGSGQSTRYWDCCKPSCAWPGKAAVSQPVYACDANFQRLSDFNVQSGCNGGSAYSCADQTPWAVNDNLAYGFAATNIAGGSESSWCCACYALTFTSGPVAGKTMVVQSTSTGGDLGSNHFDIAMPGGGVGIFNGCSSQFGGLPGAQYGGISSRDQCDSFPAPLKPGCQWRFDWFQNADNPTFTFQQVQCPAEIVARSGCKRNDDSSFPVFTPPSGGNGGTGTPTSTAPGSGQTSPGGGSGCTSQKWAQCGGIGFSGCTTCVSGTTCQKLNDYYSQCL

SEQ ID NO: 46081 - protein, 278 aa, Thermothielavioides terrestris
ASGSGQSTRYWDCCKPSCAWPGKAAVSQPVYACDANFQRLSDFNVQSGCNGGSAYSCADQTPWAVNDNLAYGFAATSIAGGSESKWCCACYALTFTSGPVAGKTMVVQSTSTGGDLGSNHFDIAMPGGGVGIFNGCSSQFGGLPGAQYGGISSRDQCDSFPAPLKPGCQWRFDWFQNADNPTFTFQQVQCPAEIVARSGCKRNDDSSFPVFTPPSGGNGGTGTPTSTAPGSGQTSPGGGSGCTSQKWAQCGGIGFSGCTTCVSGTTCQKLNDYYSQCL

SEQ ID NO: 46082 - protein, 278 aa, Unidentified
ASGSGQSTRYWDCCKPSCAWPGKAAVSQPVYACDANFQRLSDFNVQSGCNGGSAYSCADQTPWAVNDNLAYGFAATSIAGGSESSWCCACYALTFTSGPVAGKTMVVQSTSTGGDLGSNQFDIAMPGGGVGIFNGCSSQFGGLPGAQYGGISSRDQCDSFPAPLKPGCQWRFDWFQNADNPTFTFQQVQCPAEIVARSGCKRNDDSSFPVFTPPSGGNGGTGTPTSTAPGSGQTSPGGGSGCTSQKWAQCGGIGFSGCTTCVSGTTCQKLNDYYSQCL

SEQ ID NO: 46083 - protein, 278 aa, Thermothielavioides terrestris
ASGSGQSTRYWDCCKPSCAWPGKAAVSQPVYACDANFQRLSDFNVQSGCNGGSAYSCADQTPWAVNDNLAYGFAATSIAGGSESSWCCACYALTFTSGPVAGKTMVVQSTSTGGDLGSNHFDIAMPGGGVGIFNGCSSQFGGLPGAQYGGIKSRDQCDSFPAPLKPGCQWRFDWFQNADNPTFTFQQVQCPAEIVARSGCKRNDDSSFPVFTPPSGGNGGTGTPTSTAPGSGQTSPGGGSGCTSQKWAQCGGIGFSGCTTCVSGTTCQKLNDYYSQCL

SEQ ID NO: 46084 - protein, 278 aa, Thermothielavioides terrestris
ASGSGQSTRYWDCCKPSCAWPGKAAVSQPVYACDANFQRLSDFNVQSGCNGGSAYSCADQTPWAVNDNLAYGFAATSIAGGSESSWCCACYALTFTSGPVAGKTMVVQSTSTGGDLGSNHFDIAMPGGGVGIFNGCSSQFGGLPGDQYGGISSRDQCDSFPAPLKPGCQWRFDWFQNADNPTFTFQQVQCPAEIVARSGCKRNDDSSFPVFTPPSGGNGGTGTPTSTAPGSGQTSPGGGSGCTSQKWAQCGGIGFSGCTTCVSGTTCQKLNDYYSQCL

SEQ ID NO: 46085 - protein, 278 aa, Thermothielavioides terrestris
ASGSGQSTRYWDCCKPSCAWPGKAAVSQPVYACDANFQRLSDFNVQSGCNGGSAYSCADQTPWAVNDNLAYGFAATSIAGGSESSWCCACYALTFASGPVAGKTMVVQSTSTGGDLGSNHFDIAMPGGGVGIFNGCSSQFGGLPGAQYGGISSRDQCDSFPAPLKPGCQWRFDWFQNADNPTFTFQQVQCPAEIVARSGCKRNDDSSFPVFTPPSGGNGGTGTPTSTAPGSGQTSPGGGSGCTSQKWAQCGGIGFSGCTTCVSGTTCQKLNDYYSQCL

SEQ ID NO: 46086 - protein, 278 aa, Thermothielavioides terrestris
ASGAGQSTRYWDCCKPSCAWPGKAAVSQPVYACDANFQRLSDFNVQSGCNGGSAYSCADQTPWAVNDNLAYGFAATSIAGGSESSWCCACYALTFTSGPVAGKTMVVQSTSTGGDLGSNHFDIAMPGGGVGIFNGCSSQFGGLPGAQYGGISSRDQCDSFPAPLKPGCQWRFDWFQNADNPTFTFQQVQCPAEIVARSGCKRNDDSSFPVFTPPSGGNGGTGTPTSTAPGSGQTSPGGGSGCTSQKWAQCGGIGFSGCTTCVSGTTCQKLNDYYSQCL

SEQ ID NO: 46087 - protein, 278 aa, Thermothielavioides terrestris
ASGSGQSTRYWDCCKPSCAWPGKAAVSQPVYACDANFQRLSDFNVQSGCNGGSAYSCADQTPWAVNDNLAYGFAATSIAGGSESSWCCACYALTFTSGPVEGKTMVVQSTSTGGDLGSNHFDIAMPGGGVGIFNGCSSQFGGLPGAQYGGISSRDQCDSFPAPLKPGCQWRFDWFQNADNPTFTFQQVQCPAEIVARSGCKRNDDSSFPVFTPPSGGNGGTGTPTSTAPGSGQTSPGGGSGCTSQKWAQCGGIGFSGCTTCVSGTTCQKLNDYYSQCL

SEQ ID NO: 46088 - protein, 278 aa, Thermothielavioides terrestris
ASGSGQSTRYWDCCKPSCAWPGKAAVSQPVYACDANFQRLSDFNVQSGCNGGSAYSCADQTPWAVNDNLAYGFAATSIAGGSESSWCCACYALTFTSGPVAGKTMVVQSTSTGGDLGSNHFDIAMPGGGVGIFNGCSSQFGGLPGAQYGGISSRDQCDSFPAPLKSGCQWRFDWFQNADNPTFTFQQVQCPAEIVARSGCKRNDDSSFPVFTPPSGGNGGTGTPTSTAPGSGQTSPGGGSGCTSQKWAQCGGIGFSGCTTCVSGTTCQKLNDYYSQCL

SEQ ID NO: 46089 - protein, 278 aa, Thielavia hyrcaniae
ASGSGQSTRYWDCCKPSCAWPGKAAVSQPVYACDANFQRLSDFNVQSGCNGGSAYSCADQTPWAVNDNLAYGFAATSIAGGSESSWCCACYALTFTSGPVAGKTMVVQSTSTGGDLGSNHFDIAMPGGGVGIFNGCTSQFGGLPGAQYGGISSRDQCDSFPAPLKPGCQWRFDWFQNADNPTFTFQQVQCPAEIVARSGCKRNDDSSFPVFTPPSGGNGGTGTPTSTAPGSGQTSPGGGSGCTSQKWAQCGGIGFSGCTTCVSGTTCQKLNDYYSQCL

SEQ ID NO: 46090 - protein, 278 aa, Thermothielavioides terrestris
ASGSGQSTRYWDCCKPSCAWPGKAAVSQPVYACDANFQRLSDFNVQSGCNGGSAYSCADQTPWAVNDNLAYGFAATSIAGGSESSWCCACYALTFTSGPVAGKTMVVQSTSTGGDLGSNHFDIAMPGGGVGVFNGCSSQFGGLPGAQYGGISSRDQCDSFPAPLKPGCQWRFDWFQNADNPTFTFQQVQCPAEIVARSGCKRNDDSSFPVFTPPSGGNGGTGTPTSTAPGSGQTSPGGGSGCTSQKWAQCGGIGFSGCTTCVSGTTCQKLNDYYSQCL

SEQ ID NO: 46091 - protein, 278 aa, Thermothielavioides terrestris
ASGSGQSTRYWDCCKPSCAWPGKAAVSQPVYACDANFQRLSDFNVQSGCNGGSAYSCADQTPWAVNDNLAYGFAATSIAGGSESSWCCACYALTFTSGPVAGKTMVVQSTSTGGDLGSNHFDIAMPGGGVGIFNGCSSQFGGLPGNQYGGISSRDQCDSFPAPLKPGCQWRFDWFQNADNPTFTFQQVQCPAEIVARSGCKRNDDSSFPVFTPPSGGNGGTGTPTSTAPGSGQTSPGGGSGCTSQKWAQCGGIGFSGCTTCVSGTTCQKLNDYYSQCL

SEQ ID NO: 46092 - protein, 278 aa, Thermothielavioides terrestris
ASGSGQSTRYWDCCKPSCAWPGKAAVSQPVYACDANFQRLSDFNVQSGCNGGSAYSCADQTPWAVNDNLAYGFAATSIAGGSESSWCCACYALTFTSGPVAGKTMVVQSTSTGGDLGSNHFDIAMPGGGVGIFNGCSSQFGGLPGAQYGGISSRDQCDSFPAPLKPGCQWRFDWFQNATNPTFTFQQVQCPAEIVARSGCKRNDDSSFPVFTPPSGGNGGTGTPTSTAPGSGQTSPGGGSGCTSQKWAQCGGIGFSGCTTCVSGTTCQKLNDYYSQCL

SEQ ID NO: 46093 - protein, 278 aa, Thermothielavioides terrestris
ASGSGQSTRYWDCCKPSCAWPGKAAVSQPVYACDANFQRLSDFNVQSGCNGGSAYSCADQTPWAVNDNLAYGFAATSIAGGSESSWCCACYALTFTSGPVAGKTMVVQSTSTGWDLGSNHFDIAMPGGGVGIFNGCSSQFGGLPGAQYGGISSRDQCDSFPAPLKPGCQWRFDWFQNADNPTFTFQQVQCPAEIVARSGCKRNDDSSFPVFTPPSGGNGGTGTPTSTAPGSGQTSPGGGSGCTSQKWAQCGGIGFSGCTTCVSGTTCQKLNDYYSQCL

SEQ ID NO: 46094 - protein, 278 aa, Thermothielavioides terrestris
ASGSGQSTRYWDCCKPSCAWPGKAAVSQPVYACDANFQRLSDFNVQSGCNGGSAYSCADQTPWAVNDNLAYGFAATSIAGGSESSWCCACYALTFTSGPVAGKRMVVQSTSTGGDLGSNHFDIAMPGGGVGIFNGCSSQFGGLPGAQYGGISSRDQCDSFPAPLKPGCQWRFDWFQNADNPTFTFQQVQCPAEIVARSGCKRNDDSSFPVFTPPSGGNGGTGTPTSTAPGSGQTSPGGGSGCTSQKWAQCGGIGFSGCTTCVSGTTCQKLNDYYSQCL

SEQ ID NO: 46095 - protein, 278 aa, Thermothielavioides terrestris
ASGSGQSTRYWDCCKPSCAWPGKAAVSQPVYACDANFQRLSDFNVQSGCNGGSAYSCADQTPWAVNDNLAYGFAATSIAGGSESSWCCACYALTFTSGPVAGKTMVVQSTSTGGDLRSNHFDIAMPGGGVGIFNGCSSQFGGLPGAQYGGISSRDQCDSFPAPLKPGCQWRFDWFQNADNPTFTFQQVQCPAEIVARSGCKRNDDSSFPVFTPPSGGNGGTGTPTSTAPGSGQTSPGGGSGCTSQKWAQCGGIGFSGCTTCVSGTTCQKLNDYYSQCL

SEQ ID NO: 46096 - protein, 278 aa, Thermothielavioides terrestris
ASGSGQSTRYWDCCKPSCAWPGKAAVSQPVYACDANFQRLSDFNVQSGCNGGSAYSCADQTPWAVNDNLAYGFAATSIAGGSESSWCCACYALTFTSGPVHGKTMVVQSTSTGGDLGSNHFDIAMPGGGVGIFNGCSSQFGGLPGAQYGGISSRDQCDSFPAPLKPGCQWRFDWFQNADNPTFTFQQVQCPAEIVARSGCKRNDDSSFPVFTPPSGGNGGTGTPTSTAPGSGQTSPGGGSGCTSQKWAQCGGIGFSGCTTCVSGTTCQKLNDYYSQCL

SEQ ID NO: 46097 - protein, 278 aa, Thermothielavioides terrestris
ASGSGQSTRYWDCCKPSCAWPGKAAVSQPVYACDANFQRLSDFNVQSGCNGGSAYSCADQTPWAVNDNLAYGFAATSIAGGSESSWCCACYALTFTSGPVAGKTMVVQSTSTGGDLGSNHFDIAMPGGGVGIFNGCASQFGGLPGAQYGGISSRDQCDSFPAPLKPGCQWRFDWFQNADNPTFTFQQVQCPAEIVARSGCKRNDDSSFPVFTPPSGGNGGTGTPTSTAPGSGQTSPGGGSGCTSQKWAQCGGIGFSGCTTCVSGTTCQKLNDYYSQCL

SEQ ID NO: 46098 - protein, 278 aa, Thermothielavioides terrestris
ASGSGYSTRYWDCCKPSCAWPGKAAVSQPVYACDANFQRLSDFNVQSGCNGGSAYSCADQTPWAVNDNLAYGFAATSIAGGSESSWCCACYALTFTSGPVAGKTMVVQSTSTGGDLGSNHFDIAMPGGGVGIFNGCSSQFGGLPGAQYGGISSRDQCDSFPAPLKPGCQWRFDWFQNADNPTFTFQQVQCPAEIVARSGCKRNDDSSFPVFTPPSGGNGGTGTPTSTAPGSGQTSPGGGSGCTSQKWAQCGGIGFSGCTTCVSGTTCQKLNDYYSQCL

SEQ ID NO: 46099 - protein, 278 aa, Thermothielavioides terrestris
ASGSGQSTRYWDCCKPSCAWPGKAAVSQPVYACDANFQRLSDFNVQSGCNGGSAYSCADQTPWAVNDNLAYGFAATSIAGGSESSWCCACYALTFTSGPVAGKTMVVQSTSTGGDLGSNHFDIAMPGGGVGIYNGCSSQFGGLPGAQYGGISSRDQCDSFPAPLKPGCQWRFDWFQNADNPTFTFQQVQCPAEIVARSGCKRNDDSSFPVFTPPSGGNGGTGTPTSTAPGSGQTSPGGGSGCTSQKWAQCGGIGFSGCTTCVSGTTCQKLNDYYSQCL

SEQ ID NO: 46100 - protein, 278 aa, Thermothielavioides terrestris
ASGSGQSTRYWDCCKPSCAWPGKAAVSQPVYACDANFQRLSDFNVQSGCNGGSAYSCADQTPWAVNDNLAYGFAATSIAGGSESSWCCACYALTFTSGPVAGMTMVVQSTSTGGDLGSNHFDIAMPGGGVGIFNGCSSQFGGLPGAQYGGISSRDQCDSFPAPLKPGCQWRFDWFQNADNPTFTFQQVQCPAEIVARSGCKRNDDSSFPVFTPPSGGNGGTGTPTSTAPGSGQTSPGGGSGCTSQKWAQCGGIGFSGCTTCVSGTTCQKLNDYYSQCL

SEQ ID NO: 46101 - protein, 278 aa, Thermothielavioides terrestris
ASGSGQSTRYWDCCKPSCAWPGKAAVSQPVYACDANFQRLSDFNVQSGCNGGSAYSCADQTPWAVNDNLAYGFAATSIAGGSESSWCCACYAMTFTSGPVAGKTMVVQSTSTGGDLGSNHFDIAMPGGGVGIFNGCSSQFGGLPGAQYGGISSRDQCDSFPAPLKPGCQWRFDWFQNADNPTFTFQQVQCPAEIVARSGCKRNDDSSFPVFTPPSGGNGGTGTPTSTAPGSGQTSPGGGSGCTSQKWAQCGGIGFSGCTTCVSGTTCQKLNDYYSQCL

SEQ ID NO: 46102 - protein, 278 aa, Thermothielavioides terrestris
ASGSGQSTRYWDCCKPSCAWPGKAAVSQPVYACDANFQRLSDFNVQSGCNGGSAYSCADQTPWAVNDNLAYGFAATSIAGGSESSWCCACYALTFTSGPVAGKTMVVQSTSTGGDLGSNHFDIAMPGGGVGIFNGCSSQFGGLPGAQYGGISSRDQCDSFPAPLKPGCQWRFDWFQNADNPTFTFRQVQCPAEIVARSGCKRNDDSSFPVFTPPSGGNGGTGTPTSTAPGSGQTSPGGGSGCTSQKWAQCGGIGFSGCTTCVSGTTCQKLNDYYSQCL

SEQ ID NO: 46103 - protein, 278 aa, Thermothielavioides terrestris
ASGSGQSTRYWDCCKPSCAWPGKAAVSQPVYACDANFQRLSDFNVQSGCNGGSAYSCADQTPWAVNDNLAYGFAATSIAGGSESSWCCACYALTFTSGPVAGKTMVVQSTSTGGDLGSNHFDIAMPGGGVGIFNGCSSQFGGLPGAQYGGISSRDQCDSFPAPLKPGCQWRFDWFQNADNPTFTFQQVQCPAEIVARSGCKRNDDSSFPVFTQPSGGNGGTGTPTSTAPGSGQTSPGGGSGCTSQKWAQCGGIGFSGCTTCVSGTTCQKLNDYYSQCL

SEQ ID NO: 46104 - protein, 278 aa, Thermothielavioides terrestris
ASGSGQSTRYWDCCKPSCAWPGKAAVSQPVYACDANFQRLSDFNVQSGCNGGSAYSCADQTPWAVNDNLAYGFAATSIAGGSESSWCCACYALTFTSGPVAGKKMVVQSTSTGGDLGSNHFDIAMPGGGVGIFNGCSSQFGGLPGAQYGGISSRDQCDSFPAPLKPGCQWRFDWFQNADNPTFTFQQVQCPAEIVARSGCKRNDDSSFPVFTPPSGGNGGTGTPTSTAPGSGQTSPGGGSGCTSQKWAQCGGIGFSGCTTCVSGTTCQKLNDYYSQCL

SEQ ID NO: 46105 - protein, 278 aa, Thermothielavioides terrestris
ASGSGQSTRYWDCCKPSCAWPGKAAVSQPVYACDANFQRLSDFNVQSGCNGGSAYSCADQTPWAVNDNLAYGFAATSIAGGSESSWCCACFALTFTSGPVAGKTMVVQSTSTGGDLGSNHFDIAMPGGGVGIFNGCSSQFGGLPGAQYGGISSRDQCDSFPAPLKPGCQWRFDWFQNADNPTFTFQQVQCPAEIVARSGCKRNDDSSFPVFTPPSGGNGGTGTPTSTAPGSGQTSPGGGSGCTSQKWAQCGGIGFSGCTTCVSGTTCQKLNDYYSQCL

SEQ ID NO: 46106 - protein, 278 aa, Thermothielavioides terrestris
ASGSGQSTRYWDCCKPSCAWPGKAAVSQPVYACDANFQRLSDFNVQSGCNGGSAYSCADQTPWAVNDNLAYGFAATSIAGGSESSWCCACYALTFTSGPVAGKTMVVQSTSTGGDLGSNHFDIAMPGGGVGIFNGCSSQFGGLPGAQYGGISSRDQCDSFPAPLKPGCQWRFDWFQNADNPTFTFQQVQCPAEIVARSGCKRNDDSSFPVVTPPSGGNGGTGTPTSTAPGSGQTSPGGGSGCTSQKWAQCGGIGFSGCTTCVSGTTCQKLNDYYSQCL

SEQ ID NO: 46107 - protein, 278 aa, Thermothielavioides terrestris
ASGSGQSTRYWDCCKPSCAWPGKAAVSQPVYACDANFQRLSDFNVQSGCNGGSAYSCADQTPWAVNDNLAYGFAATSIAGGSESSWCCACYALTFTSGPVAGKTMVVQSTSTGGDLGSNHFDIAMPGGGVGIFNGCSSQFGGLPGAQYGGISSRDQCDSFPAPLKPGCQWRFDWFQNADNPTFTNQQVQCPAEIVARSGCKRNDDSSFPVFTPPSGGNGGTGTPTSTAPGSGQTSPGGGSGCTSQKWAQCGGIGFSGCTTCVSGTTCQKLNDYYSQCL

SEQ ID NO: 46108 - protein, 278 aa, Thermothielavioides terrestris
ASGSGQSTRYWDCCKPSCAWPGKAAVSQPVYACDANFQRLSDFNVQSGCNGGSAYSCADQTPWAVNDNLAYGFAATSIAGGSESSWCCACYALTFTSGPVAGKTMVVQSTSTGGDLGSNHFDIAMPGGGVGIFNGCSSQFGGLPGSQYGGISSRDQCDSFPAPLKPGCQWRFDWFQNADNPTFTFQQVQCPAEIVARSGCKRNDDSSFPVFTPPSGGNGGTGTPTSTAPGSGQTSPGGGSGCTSQKWAQCGGIGFSGCTTCVSGTTCQKLNDYYSQCL

SEQ ID NO: 46109 - protein, 278 aa, Thermothielavioides terrestris
ASGSGQSTRYWDCCKPSCAWPGKAAVSQPVYACDANFQRLSDFNVQSGCNGGSAYSCADQTPWAVNDNLAYGFAATSIAGGSESSWCCACYALTFTSGPVAGKTMVVQSTSTGGDLGSNHFDIAMPGGGVGIFNGCSSQFGGLPGAQYGGISDRDQCDSFPAPLKPGCQWRFDWFQNADNPTFTFQQVQCPAEIVARSGCKRNDDSSFPVFTPPSGGNGGTGTPTSTAPGSGQTSPGGGSGCTSQKWAQCGGIGFSGCTTCVSGTTCQKLNDYYSQCL

SEQ ID NO: 46110 - protein, 278 aa, Thermothielavioides terrestris
ASGSGQSTRYWDCCKPSCAWPGKAAVSQPVYACDANFQRLSDFNVQSGCNGGSAYSCADQTPWAVNDNLAYGFAATSIAGGSESSWCCACYALTFTSGPVAGKTMVVQSTSTGGDLGSNHFDIAMPGGGVGIFNGCSSQFGGLPGAQYGGISSRDQCDSFPAPLKPGCQWRFDWFQNADNPTFTFQQVQCPAEIVARSGCKGNDDSSFPVFTPPSGGNGGTGTPTSTAPGSGQTSPGGGSGCTSQKWAQCGGIGFSGCTTCVSGTTCQKLNDYYSQCL

SEQ ID NO: 46111 - protein, 278 aa, Thermothielavioides terrestris
ASGSGQSTRYWDCCKPSCAWPGKAAVSQPVYACDANFQRLSDFNVQSGCNGGSAYSCADQTPWAVNDNLAYGFAATSIAGGSESSWCCACYALTFTSGPVVGKTMVVQSTSTGGDLGSNHFDIAMPGGGVGIFNGCSSQFGGLPGAQYGGISSRDQCDSFPAPLKPGCQWRFDWFQNADNPTFTFQQVQCPAEIVARSGCKRNDDSSFPVFTPPSGGNGGTGTPTSTAPGSGQTSPGGGSGCTSQKWAQCGGIGFSGCTTCVSGTTCQKLNDYYSQCL

SEQ ID NO: 46112 - protein, 276 aa, Humicola insolens
MRSSPLLPSAVVAALPVLALAADGRSTRYWDCCKPSCGWAKKAPVNQPVFSCNANFQRITDFDAKSGCEPGGVAYSCADQTPWAVNDDFALGFAATSIAGSNEAGWCCACYELTFTSGPVAGKKMVVQSTSTGGDLGSNHFDLNIPGGGVGIFDGCTPQFGGLPGQRYGGISSRNECDRFPDALKPGCYWRFDWFKNADNPSFSFRQVQCPAELVARTGCRRNDDGNFPAVQIPSSSTSSPVNQPTSTSTTSTSTTSSPPVQPTTPSGCTAERWAQ

SEQ ID NO: 46113 - protein, 402 aa, Synthetic construct
QKPGETKEVHPQLTTFRCTKRGGCKPATNFIVLDSLSHPIHRAEGLGPGGCGDWGNPPPKDVCPDVESCAKNCIMEGIPDYSQYGVTTQGTSLRLQHILPDGRVPSPRVYLLDKTKRRYEMLHLTGFEFTFDVDATKLPCGMNSALYLSEMHPTGAKSKYNPGGAYYGTGYCDAQCFVTPFINGLGNIEGKGSCCNEMDIWEANSRASHVAPHTCNKKGLYLCEGEECAFEGVCDKNGCGWNNYRVNVTDYYGRGEEFKVNTLKPFTVVTQFLANRRGKLEKIHRFYVQDGKVIESFYTNKEGVPYTNMIDDEFCEATGSRKYMELGATQGMGEALTRGMVLAMSIWWDQGGNMEWLDHGEAGPCAKGEGAPSNIVQVEPFPEVTYTNLRWGEIGSTYQELQ

SEQ ID NO: 46114 - protein, 402 aa, Synthetic construct
QKPGETKEVHPQLTTFRCTKRGGCKPATNFIVLDSLSHPIHRAEGLGPGGCGDWGNPPPKDVCPDVESCAKNCIMEGIPDYSQYGVTTNGTSLRLQHILPDGRVPSPRVYLLDKTKRRYEMLNLTGFEFTFDVDATKLPCGMNSALYLSEMHPTGAKSKYNPGGAYYGTGYCDAQCFVTPFINGLGNIEGKGSCCNEMDIWEANSRASHVAPHTCNKKGLYLCEGEECAFEGVCDKNGCGWNNYRVNVTDYYGRGEEFKVNTLKPFTVVTQFLANRRGKLEKIHRFYVQDGKVIESFYTNKEGVPYTNMIDDEFCEATGSRKYMELGATQGMGEALTRGMVLAMSIWWDQGGNMEWLDHGEAGPCAKGEGAPSNIVQVEPFPEVTYTNLRWGEIGSTYQELQ

SEQ ID NO: 46115 - protein, 402 aa, Synthetic construct
QKPGETKEVHPQLTTFRCTKRGGCKPATNFIVLDSLSHPIHRAEGLGPGGCGDWGNPPPKDVCPDVESCAKNCIMEGIPDYSQYGVTTNGTSLRLQHILPDGRVPSPRVYLLDKTKRRYEMLHLTGFEFTFDVDATKLPCGMNSALYLSEMHPTGAKSKYNPGGAYYGTGYCDAQCFVTPFINGLGNIEGKGSCCNEMDIWEANSRASHVAPHTCNKKGLYLCEGEECAFEGVCDKNGCGWNNYGVNVTDYYGRGEEFKVNTLKPFTVVTQFLANRRGKLEKIHRFYVQDGKVIESFYTNKEGVPYTNMIDDEFCEATGSRKYMELGATQGMGEALTRGMVLAMSIWWDQGGNMEWLDHGEAGPCAKGEGAPSNIVQVEPFPEVTYTNLRWGEIGSTYQELQ

SEQ ID NO: 46116 - protein, 402 aa, Synthetic construct
QKPGETKEVHPQLTTFRCTKRGGCKPATNFIVLDSLSHPIHRAEGLGPGGCGDWGNPPPKDVCPDVESCAKNCIMEGIPDYSQYGVTTNGTSLRLQHILPDGRVPSPRVYLLDKTKRRYEMLHLTGFEFTFDVDATKLPCGMNSALYLSEMHPTGAKSKYNPGGAYYGTGYCDAQCFVTPFINGLGNIEGKGSCCNEMDIWEANSRASHVAPHTCNKKGLYLCEGEECAFEGVCDKNGCGWNNYRVNVTDYYGRGEEFKVNTLKPFTVVTQFLANRRGKLEKIHRFYVQDGKVIESFYTNKEGVPYTNMIDDEFCEATGSRKYMELGATQGMGEALTRGMVLAMSIWWDQGGNMEWLDHGEAGPCAKGEGAPSNIVQVEPFPEVTYTNLRWGEIGSTYNELQ

SEQ ID NO: 46117 - protein, 402 aa, Synthetic construct
QKPGETKEVHPQLTTFRCTKRGGCKPATNFIVLDSLSHPIHRAEGLGPGGCGDWGNPPPKDVCPDVESCAKNCIMEGIPDYSQYGVTTNGTSLRLQHILPDGRVPSPRVYLLDKTKRRYEMLHLTGFEFTFDVDATKLPCGMNSALYLSEMHPTGAKSKYNPGGAYYGTGYCDAQCFVTPFINGLGNIEGKGSCCNEMDIWEANSRASHVAPHTCNKKGLYLCEGEECAFEGVCDKNGCGWNNYRVNVTDYYGRGEEFKVNTLKPFTVVTQFLANRRGKLEKIHRFYVQDGKVIESFYTNKEGVPYTNMDDDEFCEATGSRKYMELGATQGMGEALTRGMVLAMSIWWDQGGNMEWLDHGEAGPCAKGEGAPSNIVQVEPFPEVTYTNLRWGEIGSTYQELQ

SEQ ID NO: 46118 - protein, 402 aa, Synthetic construct
QKPGETKEVHPQLTTFRCTKRGGCKPATNFIVLDSLSHPIHRAEGLGPGGCGDWGNPPPKDVCPDVESCAKNCIMEGIPDYSQYGVTTNGTSLRLQHILPDGRVPSPRVYLLDKTKRRYEMLHLTGFEFTFDVDATKLPCGMNSALYLSQMHPTGAKSKYNPGGAYYGTGYCDAQCFVTPFINGLGNIEGKGSCCNEMDIWEANSRASHVAPHTCNKKGLYLCEGEECAFEGVCDKNGCGWNNYRVNVTDYYGRGEEFKVNTLKPFTVVTQFLANRRGKLEKIHRFYVQDGKVIESFYTNKEGVPYTNMIDDEFCEATGSRKYMELGATQGMGEALTRGMVLAMSIWWDQGGNMEWLDHGEAGPCAKGEGAPSNIVQVEPFPEVTYTNLRWGEIGSTYQELQ

SEQ ID NO: 46119 - protein, 402 aa, Synthetic construct
QKPGETKEVHPQLTTFRCTKRGGCKPATNFIVLDSLSHPIHRAEGLGPGGCGDWGNPPPKDVCPDVESCAKNCIMEGIPDYSQYGVTTNGTSLRLQHILPDGRVPSPRVYLLDKTKRRYEMLHLTGFEFTFDVDATKLPCGMNSALYLSEMHPTGAKSKYNPGGAYYGTGYCDAQCFVTPFINGLGNIEGKGSCCNELDIWEANSRASHVAPHTCNKKGLYLCEGEECAFEGVCDKNGCGWNNYRVNVTDYYGRGEEFKVNTLKPFTVVTQFLANRRGKLEKIHRFYVQDGKVIESFYTNKEGVPYTNMIDDEFCEATGSRKYMELGATQGMGEALTRGMVLAMSIWWDQGGNMEWLDHGEAGPCAKGEGAPSNIVQVEPFPEVTYTNLRWGEIGSTYQELQ

SEQ ID NO: 46120 - protein, 402 aa, Synthetic construct
QKPGETKEVHPQLTTFRCTKRGGCKPATNFIVLDSLSHPIHRAEGLGPGGCGDWGNPPPKDVCPDVESCAKNCIMEGIPDYSQYGVTTNGTSLRLQHILPDGRVPSPRVYLLDKTKRRYEMLHLTGFEFTFDVDATKLPCGMNSALYLSEMHPTGAKSKYNPGGAYYGTGYCDAQCFVTPFINGLGNIEGKGSCCNEMDIWEANSRASHVAPHTCNKKGLYLCEGEECAFEGVCDKNGCGWNNYRVNVTDYYGRGEEFKVNTLKPFTVVTQFLANRRGKLEKIHRFYVQDGKVIESFYTNKEGVPYTNMIDDEFCEATGSRKYMELGATQGMGKALTRGMVLAMSIWWDQGGNMEWLDHGEAGPCAKGEGAPSNIVQVEPFPEVTYTNLRWGEIGSTYQELQ

SEQ ID NO: 46121 - protein, 402 aa, Synthetic construct
QKPGETKEVHPQLTTFRCTKRGGCKPATNFIVLDSLSHPIHRAEGLGPGGCGDWGNPPPKDVCPDVESCAKNCIMEGIPDYSQYGVTTNGTSLRLQHILPDGRVPSPRVYLLDKTKRRYEMLHLTGFEFTFDVDATKLPCGMNSALYLSEMHPTGAKSKYNPGGAYYGTGYCDAQCFVTPFINGLGNIEGKGSCCNEMDIWAANSRASHVAPHTCNKKGLYLCEGEECAFEGVCDKNGCGWNNYRVNVTDYYGRGEEFKVNTLKPFTVVTQFLANRRGKLEKIHRFYVQDGKVIESFYTNKEGVPYTNMIDDEFCEATGSRKYMELGATQGMGEALTRGMVLAMSIWWDQGGNMEWLDHGEAGPCAKGEGAPSNIVQVEPFPEVTYTNLRWGEIGSTYQELQ

SEQ ID NO: 46122 - protein, 402 aa, Synthetic construct
QKPGETKEVHPQLTTFRCTKRGGCKPATNFIVLDSLSHPIHRAEGLGPGGCGDWGNPPPKDVCPDVESCAKNCIMEGIPDYSQYGVTTNGTSLRLQHILPDGRVPSPRVYLLDKTKRRYEMLHLTGFEFTFDVDATKLPCGMNSALYLSEMHPTGAKSKYNPGGAYYGTGYCDAQCFVTPFINGLGNIEGKGSCCNEMDIWEANSRASHVAPHTCNAKGLYLCEGEECAFEGVCDKNGCGWNNYRVNVTDYYGRGEEFKVNTLKPFTVVTQFLANRRGKLEKIHRFYVQDGKVIESFYTNKEGVPYTNMIDDEFCEATGSRKYMELGATQGMGEALTRGMVLAMSIWWDQGGNMEWLDHGEAGPCAKGEGAPSNIVQVEPFPEVTYTNLRWGEIGSTYQELQ

SEQ ID NO: 46123 - protein, 402 aa, Synthetic construct
QKPGETKEVHPQLTTFRCTKRGGCKPATNFIVLDSLSHPIHRAEGLGPGGCGDWGNPPPKDVCPDVESCAKNCIMEGIPDYSQYGVTTNGTSLRLQHILPDGRVPSPRVYLLDKTKRRYEMLHLTGFEFTFDVDATKLPCGENSALYLSEMHPTGAKSKYNPGGAYYGTGYCDAQCFVTPFINGLGNIEGKGSCCNEMDIWEANSRASHVAPHTCNKKGLYLCEGEECAFEGVCDKNGCGWNNYRVNVTDYYGRGEEFKVNTLKPFTVVTQFLANRRGKLEKIHRFYVQDGKVIESFYTNKEGVPYTNMIDDEFCEATGSRKYMELGATQGMGEALTRGMVLAMSIWWDQGGNMEWLDHGEAGPCAKGEGAPSNIVQVEPFPEVTYTNLRWGEIGSTYQELQ

SEQ ID NO: 46124 - protein, 402 aa, Synthetic construct
QKPGETKEVHPQLTTFRCTKRGGCKPATNFIVLDSLSHPIHRAEGLGPGGCGDWGNPPPKDVCPDVESCAKNCIMEGIPDYSQYGVTTNGTSLRLQHILPDGRVPSPRVYLLDKTKRRYEMLHLTGFEFTFDVDATKLPCGMNSALYLSEMHPTGAKSKYNPGGAYYGTGYCDAQCFVTPFINGLGNIEGKGSCCNEMDIWEANSRASHVAPHTCNKKGLYLCEGEECAFEGVCDKNGCGWNNYRVNVTDYYGRGEEFKVNTLKPFTVVTQFLANRRGKLEKIHRFYVQDGKVIESFYTNKEGVPYTNMIDDEFCEATGSRKYMELGATQGMGEALTRGMVLAMSIWWDQGGNMEWLDHGEAGPCAKGEGAPSNIVQVEPFPEVNYTNLRWGEIGSTYQELQ

SEQ ID NO: 46125 - protein, 201 aa, Synthetic construct
ADGRSTRYWDCCKPSCGWAKKAPVNQPVFSCNANFQRITDFDAKSGGEPGGVAYSCADQTPWAVNDDFALGFAATSIAGSNEAGWCCACYELTFTSGPVAGKKMVVQSTSTGGDLGSNHFDLNIPGGGVGIFDGCTPQFGGLPGQRYGGISSRNECDRFPDALKPGCYWRFDWFKNADNPSFSFRQVQCPAELVARTGCRR

SEQ ID NO: 46126 - protein, 200 aa, Unidentified
GSGQSTRYWDCCKPSCAWPGKAAVSQPVYACDANFQRLSDFNVQSGCNGGSAYSCADQTPWAVNDNLAYGFAATSIAGGSESSWCCACYALTFTSGPVAGKTMVVQSTSTGGDLGSNQFDIAMPGGGVGIFNGCSSQFGGLPGAQYGGISSRDQCDSFPAPLKPGCQWRFDWFQNADNPTFTFQQVQCPAEIVARSGCKR

SEQ ID NO: 46127 - protein, 305 aa, Humicola insolens
MRSSPLLPSAVVAALPVLALAADGRSTRYWDCCKPSCGWAKKAPVNQPVFSCNANFQRITDFDAKSGCGPGGVAYSCADQTPWAVNDDFALGFAATSIAGSNEAGWCCACYELTFTSGPVAGKKMVVQSTSTGGDLGSNHFDLNIPGGGVGIFDGCTPQFGGLPGQRYGGISSRNECDRFPDALKPGCYWRFDWFKNADNPSFSFRQVQCPAELVARTGCRRNDDGNFPAVQIPSSSTSSPVNQPTSTSTTSTSTTSSPPVQPTTPSGCTAERWAQCGGNGWSGCTTCVAGSTCTKINDWYHQCL

SEQ ID NO: 46128 - protein, 435 aa, Humicola insolens
MARGTALLGLTALLLGLVNGQKPGETKEVHPQLTTFRCTKRGGCKPATNFIVLDSLSHPIHRAEGLGPGGCGDWGNPPPKDVCPDVESCAKNCIMEGIPDYSQYGVTTNGTSLRLQHILPDGRVPSPRVYLLDKTKRRYEMLHLTGFEFTFDVDATKLPCGMNSALYLSEMHPTGAKSKYNSGGAYYGTGYCDAQCFVTPFINGLGNIEGKGSCCNEMDIWEVNSRASHVVPHTCNKKGLYLCEGEECAFEGVCDKNGCGWNNYRVNVTDYYGRGEEFKVNTLKPFTVVTQFLANRRGKLEKIHRFYVQDGKVIESFYTNKEGVPYTNMIDDEFCEATGSRKYMELGATQGMGEALTRGMVLAMSIWWDQGGNMEWLDHGEAGPCAKGEGAPSNIVQVEPFPEVTYTNLRWGEIGSTYQEVQKPKPKPGHGPRSD

SEQ ID NO: 46129 - protein, 284 aa, Humicola insolens
ADGRSTRYWDCCKPSCGWAKKAPVNQPVFSCNANFQRITDFDAKSGCEPGGVAYSCADQTPWAVNDDFALGFAATSIAGSNEAGWCCACYELTFTSGPVAGKKMVVQSTSTGGDLGSNHFDLNIPGGGVGIFDGCTPQFGGLPGQRYGGISSRNECDRFPDALKPGCYWRFDWFKNADNPSFSFRQVQCPAELVARTGCRRNDDGNFPAVQIPSSSTSSPVNQPTSTSTTSTSTTSSPPVQPTTPSGCTAEFWAQCGGNGWSGCTTCVAGSTCTKINDWFHQCL

SEQ ID NO: 46130 - protein, 284 aa, Humicola insolens
ADGRSTRYWDCCKPSCGWAKKAPVNQPVFSCNANFQRITDFDAKSGCEPGGVAYSCADQTPWAVNDDFALGFAATSIAGSNEAGWCCACYELTFTSGPVAGKKMVVQSTSTGGDLGSNHFDLNIPGGGVGIFDGCTPQFGGLPGQRYGGISSRNECDRFPDALKPGCYWRFDWFKNADNPSFSFRQVQCPAELVARTGCRRNDDGNFPAVQIPSSSTSSPVNQPTSTSTTSTSTTSSPPPPPTTPSGCTAERWAQCGGNGWSGCTTCVAGSTCTKINDWYHQCL

SEQ ID NO: 46131 - protein, 278 aa, Thermothielavioides terrestris
ASGSGQSTRYWDCCKPSCAWPGKAAVSQPVYACDANFQRLSDFNVQSGCNGGSAYSCADQTPWAVNDNLAYGFAATSIAGGSESSWCCACYALTFTSGPVAGKTMVVQSTSTGGDLGSNHFDIAMPGGGVGIFDGCSSQFGGLPGARYGGISSRDQCDSFPAPLKPGCQWRFDWFQNADNPTFTFQQVQCPAEIVARSGCKRNDDSSFPVFTPPSGGNGGTGTPTSTAPGSGQTSPGGGSGCTSQKWAQCGGIGFSGCTTCVSGTTCQKLNDYYSQCL

SEQ ID NO: 46132 - protein, 278 aa, Thermothielavioides terrestris
ASGSGQSTRYWDCCKPSCAWPGKAAVSQPVYACDANFQRLSDFNVQSGCNGGSAYSCADQTPWAVNDNLAYGFAATSIAGGSESSWCCACYALTFTSGPVAGATMVVQSTSTGGDLGSNHFDIAMPGGGVGIFNGCSSQFGGLPGAQYGGISSRDQCDSFPAPLKPGCQWRFDWFQNATNPTFTFQQVQCPAEIVARSGCKRNDDSSFPVFTPPSGGNGGTGTPTSTAPGSGQTSPGGGSGCTSQKWAQCGGIGFSGCTTCVSGTTCQKLNDYYSQCL

SEQ ID NO: 46133 - protein, 278 aa, Thermothielavioides terrestris
ASGSGQSTRYWDCCKPSCAWPGKAAVSQPVYACDANFQRLSDFNVQSGCNGGSAYSCADQTPWAVNDNLAYGFAATSIAGGSESSWCCACYALTFTSGPVAGKTMVVQSTSTGGDLGSNHFDIAMPGGGVGIFNGCESQFGGLPGAQYGGISSRDQCDDFPAPLKPGCQWRFDWFQNADNPTFTFQQVQCPAEIVARSGCKRNDDSSFPVFTPPSGGNGGTGTPTSTAPGSGQTSPGGGSGCTSQKWAQCGGIGFSGCTTCVSGTTCQKLNDYYSQCL

SEQ ID NO: 46134 - protein, 278 aa, Thermothielavioides terrestris
ASGSGQSTRYWDCCKPSCAWPGKAAVSQPVYACDANFQRLSDFNVQSGCNGGSAYSCADQTPWAVNDNLAYGFAATSIAGGSESSWCCACYALTFTSGPVAGKTMVVQSTSTGGDLGSNHFDIAMPGGGVGIFNGCESQFGGLPGAQYGGISSRDQCDSFPAPLKPGCQWRFDWFQNADNPTFTFQQVQCPAESVARSGCKRNDDSSFPVFTPPSGGNGGTGTPTSTAPGSGQTSPGGGSGCTSQKWAQCGGIGFSGCTTCVSGTTCQKLNDYYSQCL

SEQ ID NO: 46135 - protein, 278 aa, Thermothielavioides terrestris
ASGSGQSTRYWDCCKPSCAWPGKAAVSQPVYACDANFQRLSDFNVQSGCNGGSAYSCADQTPWAVNDNLAYGFAATSIAGGSESSWCCACYALTFTSGPVAGKTMVVQSTSTGGDLGSNHFDIAMPGGGVGIFNGCDSQFGGLPGAQYGGISSRDQCDDFPAPLKPGCQWRFDWFQNADNPTFTFQQVQCPAEIVARSGCKRNDDSSFPVFTPPSGGNGGTGTPTSTAPGSGQTSPGGGSGCTSQKWAQCGGIGFSGCTTCVSGTTCQKLNDYYSQCL

SEQ ID NO: 46136 - protein, 278 aa, Thermothielavioides terrestris
ASGSGQSTRYWDCCKPSCAWPGKAAVSQPVYACDANFQRLSDFNVQSGCNGGSAYSCADQTPWAVNDNLAYGFAATSIAGGSESSWCCACYALTFTSGPVAGKTMVVQSTSTGWDLGSNHFDIAMPGGGVGIFDGCSSQFGGLPGAQYGGISSRDQCDSFPAPLKPGCQWRFDWFQNADNPTFTFQQVQCPAEIVARSGCKRNDDSSFPVFTPPSGGNGGTGTPTSTAPGSGQTSPGGGSGCTSQKWAQCGGIGFSGCTTCVSGTTCQKLNDYYSQCL

SEQ ID NO: 46137 - protein, 278 aa, Thermothielavioides terrestris
ASGSGQSTRYWDCCKPSCAWPGKAAVSQPVYACDANFQRLSDFNVQSGCNGGSAYSCADQTPWAVNDNLAYGFAATSIAGGSESSWCCACYALTFTSGPVAGKTMVVQSTSTGGDLGSNHFDIAMPGGGVGIFNGCSSQFGGLPGDQYGGISSRDQCDSFPAPLKPGCQWRFDWFQNATNPTFTFQQVQCPAEIVARSGCKRNDDSSFPVFTPPSGGNGGTGTPTSTAPGSGQTSPGGGSGCTSQKWAQCGGIGFSGCTTCVSGTTCQKLNDYYSQCL

SEQ ID NO: 46138 - protein, 278 aa, Thermothielavioides terrestris
ASGSGQSTRYWDCCKPSCAWPGKAAVSQPVYACDANFQRLSDFNVQSGCNGGSAYSCADQTPWAVNDNLAYGFAATSIAGGSESSWCCACYALTFTSGPVAGKTMVVQSTSTGGDLGSNHFDIAMPGGGVGIFDGCSSQFGGLPGAQYGGISSRDQCDSFPAPLKPGCQWRFDWFQNATNPTFTFQQVQCPAEIVARSGCKRNDDSSFPVFTPPSGGNGGTGTPTSTAPGSGQTSPGGGSGCTSQKWAQCGGIGFSGCTTCVSGTTCQKLNDYYSQCL

SEQ ID NO: 46139 - protein, 278 aa, Thermothielavioides terrestris
ASGSGQSTRYWDCCKPSCAWPGKAAVSQPVYACDANFQRLSDFNVQSGCNGGSAYSCADQTPWAVNDNLAYGFAATSIAGGSESSWCCACYALTFTSGPVAGKTMVVQSTSTGGDLGSNHFDIAMPGGGVGIFNGCKSQFGGLPGARYGGISSRDQCDSFPAPLKPGCQWRFDWFQNADNPTFTFQQVQCPAEIVARSGCKRNDDSSFPVFTPPSGGNGGTGTPTSTAPGSGQTSPGGGSGCTSQKWAQCGGIGFSGCTTCVSGTTCQKLNDYYSQCL

SEQ ID NO: 46140 - protein, 278 aa, Thermothielavioides terrestris
ASGSGQSTRYWDCCKPSCAWPGKAAVSQPVYACDANFQRLSDFNVQSGCNGGSAYSCADQTPWAVNDNLAYGFAATSIAGGSESSWCCACYALTFTSGPVAGKTMVVQSTSTGWDLGSNHFDIAMPGGGVGIFNGCSSQFGGLPGARYGGISSRDQCDSFPAPLKPGCQWRFDWFQNADNPTFTFQQVQCPAEIVARSGCKRNDDSSFPVFTPPSGGNGGTGTPTSTAPGSGQTSPGGGSGCTSQKWAQCGGIGFSGCTTCVSGTTCQKLNDYYSQCL

SEQ ID NO: 46141 - protein, 278 aa, Thermothielavioides terrestris
ASGSGQSTRYWDCCKPSCAWPGKAAVSQPVYACDANFQRLSDFNVQSGCNGGSAYSCADQTPWAVNDNLAYGFAATSIAGGSESIWCCACYALTFTSGPVAGKTMVVQSTSTGGDLGSNHFDIAMPGGGVGIFNGCSSQFGGLPGAQYGGISSRDQCDSFPAPLKPGCQWRFDWFQNADNPTFTFQQVQCPAESVARSGCKRNDDSSFPVFTPPSGGNGGTGTPTSTAPGSGQTSPGGGSGCTSQKWAQCGGIGFSGCTTCVSGTTCQKLNDYYSQCL

SEQ ID NO: 46142 - protein, 278 aa, Thermothielavioides terrestris
ASGSGQSTRYWDCCKPSCAWPGKAAVSQPVYACDANFQRLSDFNVQSGCNGGSAYSCADQTPWAVNDNLAYGFAATSIAGGSESSWCCACYALTFTSGPVAGKTMVVQSTSTGGDLGSNHFDIAMPGGGVGIFNGCDSQFGGLPGAQYGGISSRDQCDSFPAPLKPGCQWRFDWFQNADNPTFTFQQVQCPAESVARSGCKRNDDSSFPVFTPPSGGNGGTGTPTSTAPGSGQTSPGGGSGCTSQKWAQCGGIGFSGCTTCVSGTTCQKLNDYYSQCL

SEQ ID NO: 46143 - protein, 278 aa, Thermothielavioides terrestris
ASGSGQSTRYWDCCKPSCAWPGKAAVSQPVYACDANFQRLSDFNVQSGCNGGSAYSCADQTPWAVNDNLAYGFAATSIAGGSESSWCCACYALTFTSGPVAGKTMVVQSTSTGGDLGSNHFDIAMPGGGVGIFNGCESQFGGLPGARYGGISSRDQCDSFPAPLKPGCQWRFDWFQNADNPTFTFQQVQCPAEIVARSGCKRNDDSSFPVFTPPSGGNGGTGTPTSTAPGSGQTSPGGGSGCTSQKWAQCGGIGFSGCTTCVSGTTCQKLNDYYSQCL

SEQ ID NO: 46144 - protein, 278 aa, Thermothielavioides terrestris
ASGSGQSTRYWDCCKPSCAWPGKAAVSQPVYACDANFQRLSDFNVQSGCNGGSAYSCADQTPWAVNDNLAYGFAATSIAGGSESSWCCACYALTFTSGPVAGKTMVVQSTSTGGDLGSNHFDIAMPGGGVGIFNGCRSQFGGLPGDQYGGISSRDQCDSFPAPLKPGCQWRFDWFQNADNPTFTFQQVQCPAEIVARSGCKRNDDSSFPVFTPPSGGNGGTGTPTSTAPGSGQTSPGGGSGCTSQKWAQCGGIGFSGCTTCVSGTTCQKLNDYYSQCL

SEQ ID NO: 46145 - protein, 278 aa, Thermothielavioides terrestris
ASGSGQSTRYWDCCKPSCAWPGKAAVSQPVYACDANFQRLSDFNVQSGCNGGSAYSCADQTPWAVNDNLAYGFAATSIAGGSESSWCCACYALTFTSGPVAGKTMVVQSTSTGGDLGSNHFDIAMPGGGVGIFNGCESQFGGLPGAQYGGISSRDQCDEFPAPLKPGCQWRFDWFQNADNPTFTFQQVQCPAEIVARSGCKRNDDSSFPVFTPPSGGNGGTGTPTSTAPGSGQTSPGGGSGCTSQKWAQCGGIGFSGCTTCVSGTTCQKLNDYYSQCL

SEQ ID NO: 46146 - protein, 278 aa, Thermothielavioides terrestris
ASGSGQSTRYWDCCKPSCAWPGKAAVSQPVYACDANFQRLSDFNVQSGCNGGSAYSCADQTPWAVNDNLAYGFAATSIAGGSESSWCCACYALTFTSGPVAGKTMVVQSTSTGGDLGSNHFDIAMPGGGVGIFNGCSSQFGGLPGAQYGGISSRDQCDEFPAPLKPGCQWRFDWFQNATNPTFTFQQVQCPAEIVARSGCKRNDDSSFPVFTPPSGGNGGTGTPTSTAPGSGQTSPGGGSGCTSQKWAQCGGIGFSGCTTCVSGTTCQKLNDYYSQCL

SEQ ID NO: 46147 - protein, 278 aa, Thermothielavioides terrestris
ASGSGQSTRYWDCCKPSCAWPGKAAVSQPVYACDANFQRLSDFNVQSGCNGGSAYSCADQTPWAVNDNLAYGFAATSIAGGSESSWCCACYALTFTSGPVAGKTMVVQSTSTGFDLGSNHFDIAMPGGGVGIFNGCSSQFGGLPGAQYGGISSRDQCDEFPAPLKPGCQWRFDWFQNADNPTFTFQQVQCPAEIVARSGCKRNDDSSFPVFTPPSGGNGGTGTPTSTAPGSGQTSPGGGSGCTSQKWAQCGGIGFSGCTTCVSGTTCQKLNDYYSQCL

SEQ ID NO: 46148 - protein, 278 aa, Thermothielavioides terrestris
ASGSGQSTRYWDCCKPSCAWPGKAAVSQPVYACDANFQRLSDFNVQSGCNGGSAYSCADQTPWAVNDNLAYGFAATSIAGGSESSWCCACYALTFTSGPVAGKTMVVQSTSTGGDLGSNHFDIAMPGGGVGIFDGCSSQFGGLPGAQYGGIKSRDQCDSFPAPLKPGCQWRFDWFQNADNPTFTFQQVQCPAEIVARSGCKRNDDSSFPVFTPPSGGNGGTGTPTSTAPGSGQTSPGGGSGCTSQKWAQCGGIGFSGCTTCVSGTTCQKLNDYYSQCL

SEQ ID NO: 46149 - protein, 278 aa, Thermothielavioides terrestris
ASGSGQSTRYWDCCKPSCAWPGKAAVSQPVYACDANFQRLSDFNVQSGCNGGSAYSCADQTPWAVNDNLAYGFAATSIAGGSESSWCCACYALTFTSGPVAGKTMVVQSTSTGGDLGSNHFDIAMPGGGVGIFNGCRSQFGGLPGAQYGGISSRDQCDEFPAPLKPGCQWRFDWFQNADNPTFTFQQVQCPAEIVARSGCKRNDDSSFPVFTPPSGGNGGTGTPTSTAPGSGQTSPGGGSGCTSQKWAQCGGIGFSGCTTCVSGTTCQKLNDYYSQCL

SEQ ID NO: 46150 - protein, 278 aa, Thermothielavioides terrestris
ASGSGQSTRYWDCCKPSCAWPGKAAVSQPVYACDANFQRLSDFNVQSGCNGGSAYSCADQTPWAVNDNLAYGFAATSIAGGSESSWCCACYALTFTSGPVAGKTMVVQSTSTGGDLGSNHFDIAMPGGGVGIFNGCSSQFGGLPGDQYGGISSRDQCDDFPAPLKPGCQWRFDWFQNADNPTFTFQQVQCPAEIVARSGCKRNDDSSFPVFTPPSGGNGGTGTPTSTAPGSGQTSPGGGSGCTSQKWAQCGGIGFSGCTTCVSGTTCQKLNDYYSQCL

SEQ ID NO: 46151 - protein, 278 aa, Thermothielavioides terrestris
ASGSGQSTRYWDCCKPSCAWPGKAAVSQPVYACDANFQRLSDFNVQSGCNGGSAYSCADQTPWAVNDNLAYGFAATSIAGGSESSWCCACYALTFTSGPVAGKTMVVQSTSTGGDLGSNHFDIAMPGGGVGIFDGCSSQFGGLPGAQYGGISSRDQCDEFPAPLKPGCQWRFDWFQNADNPTFTFQQVQCPAEIVARSGCKRNDDSSFPVFTPPSGGNGGTGTPTSTAPGSGQTSPGGGSGCTSQKWAQCGGIGFSGCTTCVSGTTCQKLNDYYSQCL

SEQ ID NO: 46152 - protein, 278 aa, Unidentified
ASGSGQSTRYWDCCKPSCAWPGKAAVSQPVYACDANFQRLSDFNVQSGCNGGSAYSCADQTPWAVNDNLAYGFAATSIAGGSESSWCCACYALTFTSGPVAGKTMVVQSTSTGGDLGSNQFDIAMPGGGVGIFNGCSSQFGGLPGAQYGGISSRDQCDSFPAPLKPGCQWRFDWFQNADNPTFTFQQVQCPAEIVARSGCKRNDDSSFPVFTPPSGGNGGTGTPTSTAPGSGQTSPGGGSGCTSQKWAQCGGIGFSGCTTCVSGTTCQKLNDYFSQCL

SEQ ID NO: 46153 - protein, 278 aa, Thermothielavioides terrestris
ASGSGQSTRYWDCCKPSCAWPGKAAVSQPVYACDANFQRLSDFNVQSGCNGGSAYSCADQTPWAVNDNLAYGFAATSIAGGSESSWCCACYALTFTSGPVAGKTMVVQSTSTGFDLGSNHFDIAMPGGGVGIFNGCESQFGGLPGAQYGGISSRDQCDSFPAPLKPGCQWRFDWFQNADNPTFTFQQVQCPAEIVARSGCKRNDDSSFPVFTPPSGGNGGTGTPTSTAPGSGQTSPGGGSGCTSQKWAQCGGIGFSGCTTCVSGTTCQKLNDYYSQCL

SEQ ID NO: 46154 - protein, 278 aa, Thermothielavioides terrestris
ASGSGQSTRYWDCCKPSCAWPGKAAVSQPVYACDANFQRLSDFNVQSGCNGGSAYSCADQTPWAVNDNLAYGFAATSIAGGSESSWCCACYALTFTSGPVAGKTMVVQSTSTGWDLGSNHFDIAMPGGGVGIFNGCSSQFGGLPGDQYGGISSRDQCDSFPAPLKPGCQWRFDWFQNADNPTFTFQQVQCPAEIVARSGCKRNDDSSFPVFTPPSGGNGGTGTPTSTAPGSGQTSPGGGSGCTSQKWAQCGGIGFSGCTTCVSGTTCQKLNDYYSQCL

SEQ ID NO: 46155 - protein, 278 aa, Thermothielavioides terrestris
ASGSGQSTRYWDCCKPSCAWPGKAAVSQPVYACDANFQRLSDFNVQSGCNGGSAYSCADQTPWAVNDNLAYGFAATSIAGGSESSWCCACYALTFTSGPVAGKTMVVQSTSTGGDLGSNHFDIAMPGGGVGIFNGCSSQFGGLPGARYGGISSRDQCDSFPAPLKPGCQWRFDWFQNATNPTFTFQQVQCPAEIVARSGCKRNDDSSFPVFTPPSGGNGGTGTPTSTAPGSGQTSPGGGSGCTSQKWAQCGGIGFSGCTTCVSGTTCQKLNDYYSQCL

SEQ ID NO: 46156 - protein, 278 aa, Thermothielavioides terrestris
ASGSGQSTRYWDCCKPSCAWPGKAAVSQPVYACDANFQRLSDFNVQSGCNGGSAYSCADQTPWAVNDNLAYGFAATSIAGGSESSWCCACYALTFTSGPVAGKTMVVQSTSTGFDLGSNHFDIAMPGGGVGIFNGCSSQFGGLPGAQYGGIKSRDQCDSFPAPLKPGCQWRFDWFQNADNPTFTFQQVQCPAEIVARSGCKRNDDSSFPVFTPPSGGNGGTGTPTSTAPGSGQTSPGGGSGCTSQKWAQCGGIGFSGCTTCVSGTTCQKLNDYYSQCL

SEQ ID NO: 46157 - protein, 278 aa, Thermothielavioides terrestris
ASGSGQSTRYWDCCKPSCAWPGKAAVSQPVYACDANFQRLSDFNVQSGCNGGSAYSCADQTPWAVNDNLAYGFAATSIAGGSESIWCCACYALTFTSGPVAGKTMVVQSTSTGGDLGSNHFDIAMPGGGVGIFNGCSSQFGGLPGAQYGGISSRDQCDEFPAPLKPGCQWRFDWFQNADNPTFTFQQVQCPAEIVARSGCKRNDDSSFPVFTPPSGGNGGTGTPTSTAPGSGQTSPGGGSGCTSQKWAQCGGIGFSGCTTCVSGTTCQKLNDYYSQCL

SEQ ID NO: 46158 - protein, 278 aa, Thermothielavioides terrestris
ASGSGQSTRYWDCCKPSCAWPGKAAVSQPVYACDANFQRLSDFNVQSGCNGGSAYSCADQTPWAVNDNLAYGFAATSIAGGSESSWCCACYALTFTSGPVAGATMVVQSTSTGFDLGSNHFDIAMPGGGVGIFNGCSSQFGGLPGAQYGGISSRDQCDSFPAPLKPGCQWRFDWFQNADNPTFTFQQVQCPAEIVARSGCKRNDDSSFPVFTPPSGGNGGTGTPTSTAPGSGQTSPGGGSGCTSQKWAQCGGIGFSGCTTCVSGTTCQKLNDYYSQCL

SEQ ID NO: 46159 - protein, 278 aa, Thermothielavioides terrestris
ASGSGQSTRYWDCCKPSCAWPGKAAVSQPVYACDANFQRLSDFNVQSGCNGGSAYSCADQTPWAVNDNLAYGFAATSIAGGSESSWCCACYALTFTSGPVAGKTMVVQSTSTGFDLGSNHFDIAMPGGGVGIFNGCSSQFGGLPGARYGGISSRDQCDSFPAPLKPGCQWRFDWFQNADNPTFTFQQVQCPAEIVARSGCKRNDDSSFPVFTPPSGGNGGTGTPTSTAPGSGQTSPGGGSGCTSQKWAQCGGIGFSGCTTCVSGTTCQKLNDYYSQCL

SEQ ID NO: 46160 - protein, 278 aa, Thermothielavioides terrestris
ASGSGQSTRYWDCCKPSCAWPGKAAVSQPVYACDANFQRLSDFNVQSGCNGGSAYSCADQTPWAVNDNLAYGFAATSIAGGSESSWCCACYALTFTSGPVAGATMVVQSTSTGGDLGSNHFDIAMPGGGVGIFNGCSSQFGGLPGAQYGGIKSRDQCDSFPAPLKPGCQWRFDWFQNADNPTFTFQQVQCPAEIVARSGCKRNDDSSFPVFTPPSGGNGGTGTPTSTAPGSGQTSPGGGSGCTSQKWAQCGGIGFSGCTTCVSGTTCQKLNDYYSQCL

SEQ ID NO: 46161 - protein, 278 aa, Thermothielavioides terrestris
ASGSGQSTRYWDCCKPSCAWPGKAAVSQPVYACDANFQRLSDFNVQSGCNGGSAYSCADQTPWAVNDNLAYGFAATSIAGGSESSWCCACYALTFTSGPVAGKTMVVQSTSTGGDLGSNHFDIAMPGGGVGIFNGCKSQFGGLPGAQYGGISSRDQCDSFPAPLKPGCQWRFDWFQNATNPTFTFQQVQCPAEIVARSGCKRNDDSSFPVFTPPSGGNGGTGTPTSTAPGSGQTSPGGGSGCTSQKWAQCGGIGFSGCTTCVSGTTCQKLNDYYSQCL

SEQ ID NO: 46162 - protein, 278 aa, Thermothielavioides terrestris
ASGSGQSTRYWDCCKPSCAWPGKAAVSQPVYACDANFQRLSDFNVQSGCNGGSAYSCADQTPWAVNDNLAYGFAATSIAGGSESSWCCACYALTFTSGPVAGKTMVVQSTSTGGDLGSNHFDIAMPGGGVGIFNGCKSQFGGLPGAQYGGISSRDQCDSFPAPLKPGCQWRFDWFQNADNPTFTFQQVQCPAESVARSGCKRNDDSSFPVFTPPSGGNGGTGTPTSTAPGSGQTSPGGGSGCTSQKWAQCGGIGFSGCTTCVSGTTCQKLNDYYSQCL

SEQ ID NO: 46163 - protein, 278 aa, Thermothielavioides terrestris
ASGSGQSTRYWDCCKPSCAWPGKAAVSQPVYACDANFQRLSDFNVQSGCNGGSAYSCADQTPWAVNDNLAYGFAATSIAGGSESSWCCACYALTFTSGPVAGKTMVVQSTSTGFDLGSNHFDIAMPGGGVGIFNGCSSQFGGLPGDQYGGISSRDQCDSFPAPLKPGCQWRFDWFQNADNPTFTFQQVQCPAEIVARSGCKRNDDSSFPVFTPPSGGNGGTGTPTSTAPGSGQTSPGGGSGCTSQKWAQCGGIGFSGCTTCVSGTTCQKLNDYYSQCL

SEQ ID NO: 46164 - protein, 278 aa, Thermothielavioides terrestris
ASGSGQSTRYWDCCKPSCAWPGKAAVSQPVYACDANFQRLSDFNVQSGCNGGSAYSCADQTPWAVNDNLAYGFAATSIAGGSESSWCCACYALTFTSGPVAGKTMVVQSTSTGGDLGSNHFDIAMPGGGVGIFNGCDSQFGGLPGARYGGISSRDQCDSFPAPLKPGCQWRFDWFQNADNPTFTFQQVQCPAEIVARSGCKRNDDSSFPVFTPPSGGNGGTGTPTSTAPGSGQTSPGGGSGCTSQKWAQCGGIGFSGCTTCVSGTTCQKLNDYYSQCL

SEQ ID NO: 46165 - protein, 278 aa, Thermothielavioides terrestris
ASGSGQSTRYWDCCKPSCAWPGKAAVSQPVYACDANFQRLSDFNVQSGCNGGSAYSCADQTPWAVNDNLAYGFAATSIAGGSESSWCCACYALTFTSGPVAGKTMVVQSTSTGWDLGSNHFDIAMPGGGVGIFNGCDSQFGGLPGAQYGGISSRDQCDSFPAPLKPGCQWRFDWFQNADNPTFTFQQVQCPAEIVARSGCKRNDDSSFPVFTPPSGGNGGTGTPTSTAPGSGQTSPGGGSGCTSQKWAQCGGIGFSGCTTCVSGTTCQKLNDYYSQCL

SEQ ID NO: 46166 - protein, 278 aa, Thermothielavioides terrestris
ASGSGQSTRYWDCCKPSCAWPGKAAVSQPVYACDANFQRLSDFNVQSGCNGGSAYSCADQTPWAVNDNLAYGFAATSIAGGSESSWCCACYALTFTSGPVAGKTMVVQSTSTGWDLGSNHFDIAMPGGGVGIFNGCSSQFGGLPGAQYGGISSRDQCDEFPAPLKPGCQWRFDWFQNADNPTFTFQQVQCPAEIVARSGCKRNDDSSFPVFTPPSGGNGGTGTPTSTAPGSGQTSPGGGSGCTSQKWAQCGGIGFSGCTTCVSGTTCQKLNDYYSQCL

SEQ ID NO: 46167 - protein, 278 aa, Thermothielavioides terrestris
ASGSGQSTRYWDCCKPSCAWPGKAAVSQPVYACDANFQRLSDFNVQSGCNGGSAYSCADQTPWAVNDNLAYGFAATSIAGGSESSWCCACYALTFTSGPVAGKTMVVQSTSTGWDLGSNHFDIAMPGGGVGIFNGCKSQFGGLPGAQYGGISSRDQCDSFPAPLKPGCQWRFDWFQNADNPTFTFQQVQCPAEIVARSGCKRNDDSSFPVFTPPSGGNGGTGTPTSTAPGSGQTSPGGGSGCTSQKWAQCGGIGFSGCTTCVSGTTCQKLNDYYSQCL

SEQ ID NO: 46168 - protein, 278 aa, Thermothielavioides terrestris
ASGSGQSTRYWDCCKPSCAWPGKAAVSQPVYACDANFQRLSDFNVQSGCNGGSAYSCADQTPWAVNDNLAYGFAATSIAGGSESSWCCACYALTFTSGPVAGKTMVVQSTSTGWDLGSNHFDIAMPGGGVGIFNGCRSQFGGLPGAQYGGISSRDQCDSFPAPLKPGCQWRFDWFQNADNPTFTFQQVQCPAEIVARSGCKRNDDSSFPVFTPPSGGNGGTGTPTSTAPGSGQTSPGGGSGCTSQKWAQCGGIGFSGCTTCVSGTTCQKLNDYYSQCL

SEQ ID NO: 46169 - protein, 278 aa, Thermothielavioides terrestris
ASGSGQSTRYWDCCKPSCAWPGKAAVSQPVYACDANWQRLSDFNVQSGCNGGSAYSCADQTPWAVNDNLAYGFAATSIAGGSESSWCCACYALTFTSGPVAGKTMVVQSTSTGFDLGSNHFDIAMPGGGVGIFNGCSSQFGGLPGAQYGGISSRDQCDSFPAPLKPGCQWRFDWFQNADNPTFTFQQVQCPAEIVARSGCKRNDDSSFPVFTPPSGGNGGTGTPTSTAPGSGQTSPGGGSGCTSQKWAQCGGIGFSGCTTCVSGTTCQKLNDYYSQCL

SEQ ID NO: 46170 - protein, 278 aa, Thermothielavioides terrestris
ASGSGQSTRYWDCCKPSCAWPGKAAVSQPVYACDANFQRLSDFNVQSGCNGGSAYSCADQTPWAVNDNLAYGFAATSIAGGSESSWCCACYALTFTSGPVAGATMVVQSTSTGGDLGSNHFDIAMPGGGVGIFNGCSSQFGGLPGAQYGGISSRDQCDEFPAPLKPGCQWRFDWFQNADNPTFTFQQVQCPAEIVARSGCKRNDDSSFPVFTPPSGGNGGTGTPTSTAPGSGQTSPGGGSGCTSQKWAQCGGIGFSGCTTCVSGTTCQKLNDYYSQCL

SEQ ID NO: 46171 - protein, 278 aa, Thermothielavioides terrestris
ASGSGQSTRYWDCCKPSCAWPGKAAVSQPVYACDANFQRLSDFNVQSGCNGGSAYSCADQTPWAVNDNLAYGFAATSIAGGSESSWCCACYALTFTSGPVAGKTMVVQSTSTGGDLGSNHFDIAMPGGGVGIFDGCSSQFGGLPGDQYGGISSRDQCDSFPAPLKPGCQWRFDWFQNADNPTFTFQQVQCPAEIVARSGCKRNDDSSFPVFTPPSGGNGGTGTPTSTAPGSGQTSPGGGSGCTSQKWAQCGGIGFSGCTTCVSGTTCQKLNDYYSQCL

SEQ ID NO: 46172 - protein, 278 aa, Thermothielavioides terrestris
ASGSGQSTRYWDCCKPSCAWPGKAAVSQPVYACDANFQRLSDFNVQSGCNGGSAYSCADQTPWAVNDNLAYGFAATSIAGGSESSWCCACYALTFTSGPVAGKTMVVQSTSTGGDLGSNHFDIAMPGGGVGIFNGCRSQFGGLPGAQYGGIKSRDQCDSFPAPLKPGCQWRFDWFQNADNPTFTFQQVQCPAEIVARSGCKRNDDSSFPVFTPPSGGNGGTGTPTSTAPGSGQTSPGGGSGCTSQKWAQCGGIGFSGCTTCVSGTTCQKLNDYYSQCL

SEQ ID NO: 46173 - protein, 278 aa, Thermothielavioides terrestris
ASGSGQSTRYWDCCKPSCAWPGKAAVSQPVYACDANFQRLSDFNVQSGCNGGSAYSCADQTPWAVNDNLAYGFAATSIAGGSESSWCCACYALTFTSGPVAGKTMVVQSTSTGGDLGSNHFDIAMPGGGVGIFNGCSSQFGGLPGDQYGGISSRDQCDEFPAPLKPGCQWRFDWFQNADNPTFTFQQVQCPAEIVARSGCKRNDDSSFPVFTPPSGGNGGTGTPTSTAPGSGQTSPGGGSGCTSQKWAQCGGIGFSGCTTCVSGTTCQKLNDYYSQCL

SEQ ID NO: 46174 - protein, 278 aa, Thermothielavioides terrestris
ASGSGQSTRYWDCCKPSCAWPGKAAVSQPVYACDANFQRLSDFNVQSGCNGGSAYSCADQTPWAVNDNLAYGFAATSIAGGSESSWCCACYALTFTSGPVAGKTMVVQSTSTGFDLGSNHFDIAMPGGGVGIFNGCSSQFGGLPGAQYGGISSRDQCDSFPAPLKPGCQWRFDWFQNATNPTFTFQQVQCPAEIVARSGCKRNDDSSFPVFTPPSGGNGGTGTPTSTAPGSGQTSPGGGSGCTSQKWAQCGGIGFSGCTTCVSGTTCQKLNDYYSQCL

SEQ ID NO: 46175 - protein, 278 aa, Thermothielavioides terrestris
ASGSGQSTRYWDCCKPSCAWPGKAAVSQPVYACDANFQRLSDFNVQSGCNGGSAYSCADQTPWAVNDNLAYGFAATSIAGGSESSWCCACYALTFTSGPVAGKTMVVQSTSTGGDLGSNHFDIAMPGGGVGIFNGCSSQFGGLPGDRYGGISSRDQCDSFPAPLKPGCQWRFDWFQNADNPTFTFQQVQCPAEIVARSGCKRNDDSSFPVFTPPSGGNGGTGTPTSTAPGSGQTSPGGGSGCTSQKWAQCGGIGFSGCTTCVSGTTCQKLNDYYSQCL

SEQ ID NO: 46176 - protein, 278 aa, Thermothielavioides terrestris
ASGSGQSTRYWDCCKPSCAWPGKAAVSQPVYACDANFQRLSDFNVQSGCNGGSAYSCADQTPWAVNDNLAYGFAATSIAGGSESSWCCACYALTFTSGPVAGATMVVQSTSTGGDLGSNHFDIAMPGGGVGIFNGCSSQFGGLPGDQYGGISSRDQCDSFPAPLKPGCQWRFDWFQNADNPTFTFQQVQCPAEIVARSGCKRNDDSSFPVFTPPSGGNGGTGTPTSTAPGSGQTSPGGGSGCTSQKWAQCGGIGFSGCTTCVSGTTCQKLNDYYSQCL

SEQ ID NO: 46177 - protein, 278 aa, Thermothielavioides terrestris
ASGSGQSTRYWDCCKPSCAWPGKAAVSQPVYACDANFQRLSDFNVQSGCNGGSAYSCADQTPWAVNDNLAYGFAATSIAGGSESSWCCACYALTFTSGPVAGKTMVVQSTSTGGDLGSNHFDIAMPGGGVGIFNGCESQFGGLPGAQYGGIKSRDQCDSFPAPLKPGCQWRFDWFQNADNPTFTFQQVQCPAEIVARSGCKRNDDSSFPVFTPPSGGNGGTGTPTSTAPGSGQTSPGGGSGCTSQKWAQCGGIGFSGCTTCVSGTTCQKLNDYYSQCL

SEQ ID NO: 46178 - protein, 278 aa, Thermothielavioides terrestris
ASGSGQSTRYWDCCKPSCAWPGKAAVSQPVYACDANFQRLSDFNVQSGCNGGSAYSCADQTPWAVNDNLAYGFAATSIAGGSESSWCCACYALTFTSGPVAGKTMVVQSTSTGGDLGSNHFDIAMPGGGVGIFNGCSSQFGGLPGARYGGISSRDQCDSFPAPLKPGCYWRFDWFQNADNPTFTFQQVQCPAEIVARSGCKRNDDSSFPVFTPPSGGNGGTGTPTSTAPGSGQTSPGGGSGCTSQKWAQCGGIGFSGCTTCVSGTTCQKLNDYYSQCL

SEQ ID NO: 46179 - protein, 278 aa, Thermothielavioides terrestris
ASGSGQSTRYWDCCKPSCAWPGKAAVSQPVYACDANFQRLSDFNVQSGCNGGSAYSCADQTPWAVNDNLAYGFAATSIAGGSESSWCCACYALTFTSGPVAGKTMVVQSTSTGGDLGSNHFDIAMPGGGVGIFNGCDSQFGGLPGAQYGGIKSRDQCDSFPAPLKPGCQWRFDWFQNADNPTFTFQQVQCPAEIVARSGCKRNDDSSFPVFTPPSGGNGGTGTPTSTAPGSGQTSPGGGSGCTSQKWAQCGGIGFSGCTTCVSGTTCQKLNDYYSQCL

SEQ ID NO: 46180 - protein, 278 aa, Thermothielavioides terrestris
ASGSGQSTRYWDCCKPSCAWPGKAAVSQPVYACDANFQRLSDFNVQSGCNGGSAYSCADQTPWAVNDNLAYGFAATSIAGGSESSWCCACYALTFTSGPVAGATMVVQSTSTGGDLGSNHFDIAMPGGGVGIFNGCSSQFGGLPGARYGGISSRDQCDSFPAPLKPGCQWRFDWFQNADNPTFTFQQVQCPAEIVARSGCKRNDDSSFPVFTPPSGGNGGTGTPTSTAPGSGQTSPGGGSGCTSQKWAQCGGIGFSGCTTCVSGTTCQKLNDYYSQCL

SEQ ID NO: 46181 - protein, 278 aa, Thermothielavioides terrestris
ASGSGQSTRYWDCCKPSCAWPGKAAVSQPVYACDANFQRLSDFNVQSGCNGGSAYSCADQTPWAVNDNLAYGFAATSIAGGSESSWCCACYALTFTSGPVAGKTMVVQSTSTGGDLGSNHFDIAMPGGGVGIFNGCESQFGGLPGAQYGGISSRDQCDSFPAPLKPGCQWRFDWFQNATNPTFTFQQVQCPAEIVARSGCKRNDDSSFPVFTPPSGGNGGTGTPTSTAPGSGQTSPGGGSGCTSQKWAQCGGIGFSGCTTCVSGTTCQKLNDYYSQCL

SEQ ID NO: 46182 - protein, 278 aa, Thermothielavioides terrestris
ASGSGQSTRYWDCCKPSCAWPGKAAVSQPVYACDANFQRLSDFNVQSGCNGGSAYSCADQTPWAVNDNLAYGFAATSIAGGSESSWCCACYALTFTSGPVAGKTMVVQSTSTGFDLGSNHFDIAMPGGGVGIFNGCSSQFGGLPGAQYGGISSRDQCDDFPAPLKPGCQWRFDWFQNADNPTFTFQQVQCPAEIVARSGCKRNDDSSFPVFTPPSGGNGGTGTPTSTAPGSGQTSPGGGSGCTSQKWAQCGGIGFSGCTTCVSGTTCQKLNDYYSQCL

SEQ ID NO: 46183 - protein, 278 aa, Thermothielavioides terrestris
ASGSGQSTRYWDCCKPSCAWPGKAAVSQPVYACDANFQRLSDFNVQSGCNGGSAYSCADQTPWAVNDNLAYGFAATSIAGGSESSWCCACYALTFTSGPVAGKTMVVQSTSTGGDLGSNHFDIAMPGGGVGIFNGCSSQFGGLPGAQYGGISSRDQCDDFPAPLKPGCQWRFDWFQNADNPTFTFQQVQCPAESVARSGCKRNDDSSFPVFTPPSGGNGGTGTPTSTAPGSGQTSPGGGSGCTSQKWAQCGGIGFSGCTTCVSGTTCQKLNDYYSQCL

SEQ ID NO: 46184 - protein, 278 aa, Thermothielavioides terrestris
ASGSGQSTRYWDCCKPSCAWPGKAAVSQPVYACDANFQRLSDFNVQSGCNGGSAYSCADQTPWAVNDNLAYGFAATSIAGGSESSWCCACYALTFTSGPVAGKTMVVQSTSTGGDLGSNHFDIAMPGGGVGIFNGCKSQFGGLPGAQYGGIKSRDQCDSFPAPLKPGCQWRFDWFQNADNPTFTFQQVQCPAEIVARSGCKRNDDSSFPVFTPPSGGNGGTGTPTSTAPGSGQTSPGGGSGCTSQKWAQCGGIGFSGCTTCVSGTTCQKLNDYYSQCL

SEQ ID NO: 46185 - protein, 278 aa, Thermothielavioides terrestris
ASGSGQSTRYWDCCKPSCAWPGKAAVSQPVYACDANFQRLSDFNVQSGCNGGSAYSCADQTPWAVNDNLAYGFAATSIAGGSESIWCCACYALTFTSGPVAGKTMVVQSTSTGGDLGSNHFDIAMPGGGVGIFNGCSSQFGGLPGARYGGISSRDQCDSFPAPLKPGCQWRFDWFQNADNPTFTFQQVQCPAEIVARSGCKRNDDSSFPVFTPPSGGNGGTGTPTSTAPGSGQTSPGGGSGCTSQKWAQCGGIGFSGCTTCVSGTTCQKLNDYYSQCL

SEQ ID NO: 46186 - protein, 278 aa, Thermothielavioides terrestris
ASGSGQSTRYWDCCKPSCAWPGKAAVSQPVYACDANFQRLSDFNVQSGCNGGSAYSCADQTPWAVNDNLAYGFAATSIAGGSESSWCCACYALTFTSGPVAGKTMVVQSTSTGGDLGSNHFDIAMPGGGVGIFNGCSSQFGGLPGARYGGISSRDQCDEFPAPLKPGCQWRFDWFQNADNPTFTFQQVQCPAEIVARSGCKRNDDSSFPVFTPPSGGNGGTGTPTSTAPGSGQTSPGGGSGCTSQKWAQCGGIGFSGCTTCVSGTTCQKLNDYYSQCL

SEQ ID NO: 46187 - protein, 278 aa, Thermothielavioides terrestris
ASGSGQSTRYWDCCKPSCAWPGKAAVSQPVYACDANFQRLSDFNVQSGCNGGSAYSCADQTPWAVNDNLAYGFAATSIAGGSESSWCCACYALTFTSGPVAGKTMVVQSTSTGGDLGSNHFDIAMPGGGVGIFNGCSSQFGGLPGAQYGGISSRDQCDEFPAPLKPGCQWRFDWFQNADNPTFTFQQVQCPAESVARSGCKRNDDSSFPVFTPPSGGNGGTGTPTSTAPGSGQTSPGGGSGCTSQKWAQCGGIGFSGCTTCVSGTTCQKLNDYYSQCL

SEQ ID NO: 46188 - protein, 278 aa, Thermothielavioides terrestris
ASGSGQSTRYWDCCKPSCAWPGKAAVSQPVYACDANFQRLSDFNVQSGCNGGSAYSCADQTPWAVNDNLAYGFAATSIAGGSESIWCCACYALTFTSGPVAGKTMVVQSTSTGGDLGSNHFDIAMPGGGVGIFNGCESQFGGLPGAQYGGISSRDQCDSFPAPLKPGCQWRFDWFQNADNPTFTFQQVQCPAEIVARSGCKRNDDSSFPVFTPPSGGNGGTGTPTSTAPGSGQTSPGGGSGCTSQKWAQCGGIGFSGCTTCVSGTTCQKLNDYYSQCL

SEQ ID NO: 46189 - protein, 278 aa, Thermothielavioides terrestris
ASGSGQSTRYWDCCKPSCAWPGKAAVSQPVYACDANFQRLSDFNVQSGCNGGSAYSCADQTPWAVNDNLAYGFAATSIAGGSESSWCCACYALTFTSGPVAGKTMVVQSTSTGGDLGSNHFDIAMPGGGVGIFNGCDSQFGGLPGAQYGGISSRDQCDSFPAPLKPGCQWRFDWFQNATNPTFTFQQVQCPAEIVARSGCKRNDDSSFPVFTPPSGGNGGTGTPTSTAPGSGQTSPGGGSGCTSQKWAQCGGIGFSGCTTCVSGTTCQKLNDYYSQCL

SEQ ID NO: 46190 - protein, 278 aa, Thermothielavioides terrestris
ASGSGQSTRYWDCCKPSCAWPGKAAVSQPVYACDANFQRLSDFNVQSGCNGGSAYSCADQTPWAVNDNLAYGFAATSIAGGSESSWCCACYALTFTSGPVAGKTMVVQSTSTGGDLGSNHFDIAMPGGGVGIFNGCSSQFGGLPGAQYGGISSRDECDSFPAPLKPGCYWRFDWFQNADNPTFTFQQVQCPAEIVARSGCKRNDDSSFPVFTPPSGGNGGTGTPTSTAPGSGQTSPGGGSGCTSQKWAQCGGIGFSGCTTCVSGTTCQKLNDYYSQCL

SEQ ID NO: 46191 - protein, 278 aa, Thermothielavioides terrestris
ASGSGQSTRYWDCCKPSCAWPGKAAVSQPVYACDANFQRLSDFNVQSGCNGGSAYSCADQTPWAVNDNLAYGFAATSIAGGSESSWCCACYALTFTSGPVAGKTMVVQSTSTGGDLGSNHFDIAMPGGGVGIFDGCSSQFGGLPGAQYGGISSRDQCDDFPAPLKPGCQWRFDWFQNADNPTFTFQQVQCPAEIVARSGCKRNDDSSFPVFTPPSGGNGGTGTPTSTAPGSGQTSPGGGSGCTSQKWAQCGGIGFSGCTTCVSGTTCQKLNDYYSQCL

SEQ ID NO: 46192 - protein, 278 aa, Thermothielavioides terrestris
ASGSGQSTRYWDCCKPSCAWPGKAAVSQPVYACDANFQRLSDFNVQSGCNGGSAYSCADQTPWAVNDNLAYGFAATSIAGGSESSWCCACYALTFTSGPVAGKTMVVQSTSTGFDLGSNHFDIAMPGGGVGIFNGCRSQFGGLPGAQYGGISSRDQCDSFPAPLKPGCQWRFDWFQNADNPTFTFQQVQCPAEIVARSGCKRNDDSSFPVFTPPSGGNGGTGTPTSTAPGSGQTSPGGGSGCTSQKWAQCGGIGFSGCTTCVSGTTCQKLNDYYSQCL

SEQ ID NO: 46193 - protein, 278 aa, Thermothielavioides terrestris
ASGSGQSTRYWDCCKPSCAWPGKAAVSQPVYACDANFQRLSDFNVQSGCNGGSAYSCADQTPWAVNDNLAYGFAATSIAGGSESSWCCACYALTFTSGPVAGKTMVVQSTSTGWDLGSNHFDIAMPGGGVGIFNGCSSQFGGLPGAQYGGIKSRDQCDSFPAPLKPGCQWRFDWFQNADNPTFTFQQVQCPAEIVARSGCKRNDDSSFPVFTPPSGGNGGTGTPTSTAPGSGQTSPGGGSGCTSQKWAQCGGIGFSGCTTCVSGTTCQKLNDYYSQCL

SEQ ID NO: 46194 - protein, 278 aa, Thermothielavioides terrestris
ASGSGQSTRYWDCCKPSCAWPGKAAVSQPVYACDANFQRLSDFNVQSGCNGGSAYACADQTPWAVNDNLAYGFAATSIAGGSESSWCCACYALTFTSGPVAGKTMVVQSTSTGGDLGSNHFDIAMPGGGVGIFNGCSSQFGGLPGARYGGISSRDQCDSFPAPLKPGCQWRFDWFQNADNPTFTFQQVQCPAEIVARSGCKRNDDSSFPVFTPPSGGNGGTGTPTSTAPGSGQTSPGGGSGCTSQKWAQCGGIGFSGCTTCVSGTTCQKLNDYYSQCL

SEQ ID NO: 46195 - protein, 278 aa, Thermothielavioides terrestris
ASGSGQSTRYWDCCKPSCAWPGKAAVSQPVYACDANFQRLSDFNVQSGCNGGSAYSCADQTPWAVNDNLAYGFAATSIAGGSESSWCCACYALTFTSGPVAGATMVVQSTSTGWDLGSNHFDIAMPGGGVGIFNGCSSQFGGLPGAQYGGISSRDQCDSFPAPLKPGCQWRFDWFQNADNPTFTFQQVQCPAEIVARSGCKRNDDSSFPVFTPPSGGNGGTGTPTSTAPGSGQTSPGGGSGCTSQKWAQCGGIGFSGCTTCVSGTTCQKLNDYYSQCL

SEQ ID NO: 46196 - protein, 278 aa, Thermothielavioides terrestris
ASGSGQSTRYWDCCKPSCAWPGKAAVSQPVYACDANFQRLSDFNVQSGCNGGSAYSCADQTPWAVNDNLAYGFAATSIAGGSESSWCCACYALTFTSGPVAGKTMVVQSTSTGGDLGSNHFDIAMPGGGVGIFDGCESQFGGLPGAQYGGISSRDQCDSFPAPLKPGCQWRFDWFQNADNPTFTFQQVQCPAEIVARSGCKRNDDSSFPVFTPPSGGNGGTGTPTSTAPGSGQTSPGGGSGCTSQKWAQCGGIGFSGCTTCVSGTTCQKLNDYYSQCL

SEQ ID NO: 46197 - protein, 278 aa, Thermothielavioides terrestris
ASGSGQSTRYWDCCKPSCAWPGKAAVSQPVYACDANFQRLSDFNVQSGCNGGSAYSCADQTPWAVNDNLAYGFAATSIAGGSESSWCCACYALTFTSGPVAGKTMVVQSTSTGWDLGSNHFDIAMPGGGVGIFNGCSSQFGGLPGAQYGGISSRDQCDDFPAPLKPGCQWRFDWFQNADNPTFTFQQVQCPAEIVARSGCKRNDDSSFPVFTPPSGGNGGTGTPTSTAPGSGQTSPGGGSGCTSQKWAQCGGIGFSGCTTCVSGTTCQKLNDYYSQCL

SEQ ID NO: 46198 - protein, 278 aa, Thermothielavioides terrestris
ASGSGQSTRYWDCCKPSCAWPGKAAVSQPVYACDANFQRLSDFNVQSGCNGGSAYSCADQTPWAVNDNLAYGFAATSIAGGSESSWCCACYALTFTSGPVAGKTMVVQSTSTGFDLGSNHFDIAMPGGGVGIFDGCSSQFGGLPGAQYGGISSRDQCDSFPAPLKPGCQWRFDWFQNADNPTFTFQQVQCPAEIVARSGCKRNDDSSFPVFTPPSGGNGGTGTPTSTAPGSGQTSPGGGSGCTSQKWAQCGGIGFSGCTTCVSGTTCQKLNDYYSQCL

SEQ ID NO: 46199 - protein, 278 aa, Thermothielavioides terrestris
ASGSGQSTRYWDCCKPSCAWPGKAAVSQPVYACDANFQRLSDFNVQSGCNGGSAYSCADQTPWAVNDNLAYGFAATSIAGGSESSWCCACYALTFTSGPVAGKTMVVQSTSTGWDLGSNHFDIAMPGGGVGIFNGCESQFGGLPGAQYGGISSRDQCDSFPAPLKPGCQWRFDWFQNADNPTFTFQQVQCPAEIVARSGCKRNDDSSFPVFTPPSGGNGGTGTPTSTAPGSGQTSPGGGSGCTSQKWAQCGGIGFSGCTTCVSGTTCQKLNDYYSQCL

SEQ ID NO: 46200 - protein, 278 aa, Thermothielavioides terrestris
ASGSGQSTRYWDCCKPSCAWPGKAAVSQPVYACDANFQRLSDFNVQSGCNGGSAYSCADQTPWAVNDNLAYGFAATSIAGGSESSWCCACYALTFTSGPVAGKTMVVQSTSTGGDLGSNHFDIAMPGGGVGIFNGCSSQFGGLPGARYGGISSRDQCDDFPAPLKPGCQWRFDWFQNADNPTFTFQQVQCPAEIVARSGCKRNDDSSFPVFTPPSGGNGGTGTPTSTAPGSGQTSPGGGSGCTSQKWAQCGGIGFSGCTTCVSGTTCQKLNDYYSQCL

SEQ ID NO: 46201 - protein, 278 aa, Thermothielavioides terrestris
ASGSGQSTRYWDCCKPSCAWPGKAAVSQPVYACDANFQRLSDFNVQSGCNGGSAYSCADQTPWAVNDNLAYGFAATSIAGGSESSWCCACYALTFTSGPVAGKTMVVQSTSTGGDLGSNHFDIAMPGGGVGIFDGCKSQFGGLPGAQYGGISSRDQCDSFPAPLKPGCQWRFDWFQNADNPTFTFQQVQCPAEIVARSGCKRNDDSSFPVFTPPSGGNGGTGTPTSTAPGSGQTSPGGGSGCTSQKWAQCGGIGFSGCTTCVSGTTCQKLNDYYSQCL

SEQ ID NO: 46202 - protein, 278 aa, Thermothielavioides terrestris
ASGSGQSTRYWDCCKPSCAWPGKAAVSQPVYACDANFQRLSDFNVQSGCNGGSAYSCADQTPWAVNDNLAYGFAATSIAGGSESSWCCACYALTFTSGPVAGKTMVVQSTSTGGDLGSNHFDIAMPGGGVGIFNGCSSQFGGLPGARYGGISSRDECDSFPAPLKPGCQWRFDWFQNADNPTFTFQQVQCPAEIVARSGCKRNDDSSFPVFTPPSGGNGGTGTPTSTAPGSGQTSPGGGSGCTSQKWAQCGGIGFSGCTTCVSGTTCQKLNDYYSQCL

SEQ ID NO: 46203 - protein, 278 aa, Thermothielavioides terrestris
ASGSGQSTRYWDCCKPSCAWPGKAAVSQPVYACDANFQRLSDFNVQSGCNGGSAYSCADQTPWAVNDNLAYGFAATSIAGGSESSWCCACYALTFTSGPVAGKTMVVQSTSTGGDLGSNHFDIAMPGGGVGIFNGCSSQFGGLPGARYGGISSRDQCDSFPEPLKPGCQWRFDWFQNADNPTFTFQQVQCPAEIVARSGCKRNDDSSFPVFTPPSGGNGGTGTPTSTAPGSGQTSPGGGSGCTSQKWAQCGGIGFSGCTTCVSGTTCQKLNDYYSQCL

SEQ ID NO: 46204 - protein, 278 aa, Thermothielavioides terrestris
ASGSGQSTRYWDCCKPSCAWPGKAAVSQPVYACDANFQRLSDFNVQSGCNGGSAYSCADQTPWAVNDNLAYGFAATSIAGGSESSWCCACYALTFTSGPVAGKTMVVQSTSTGGDLGSNHFDIAMPGGGVGIFNGCKSQFGGLPGAQYGGISSRDQCDEFPAPLKPGCQWRFDWFQNADNPTFTFQQVQCPAEIVARSGCKRNDDSSFPVFTPPSGGNGGTGTPTSTAPGSGQTSPGGGSGCTSQKWAQCGGIGFSGCTTCVSGTTCQKLNDYYSQCL

SEQ ID NO: 46205 - protein, 278 aa, Thermothielavioides terrestris
ASGSGQSTRYWDCCKPSCAWPGKAAVSQPVYACDANFQRLSDFNVQSGCNGGSAYSCADQTPWAVNDNLAYGFAATSIAGGSESSWCCACYALTFTSGPVAGKTMVVQSTSTGGDLGSNHFDIAMPGGGVGIFDGCDSQFGGLPGAQYGGISSRDQCDSFPAPLKPGCQWRFDWFQNADNPTFTFQQVQCPAEIVARSGCKRNDDSSFPVFTPPSGGNGGTGTPTSTAPGSGQTSPGGGSGCTSQKWAQCGGIGFSGCTTCVSGTTCQKLNDYYSQCL

SEQ ID NO: 46206 - protein, 278 aa, Thermothielavioides terrestris
ASGSGQSTRYWDCCKPSCAWPGKAAVSQPVYACDANFQRLSDFNVQSGCNGGSAYSCADQTPWAVNDNLAYGFAATSIAGGSESSWCCACYALTFTSGPVAGKTMVVQSTSTGGDLGSNHFDIAMPGGGVGIFDGCRSQFGGLPGAQYGGISSRDQCDSFPAPLKPGCQWRFDWFQNADNPTFTFQQVQCPAEIVARSGCKRNDDSSFPVFTPPSGGNGGTGTPTSTAPGSGQTSPGGGSGCTSQKWAQCGGIGFSGCTTCVSGTTCQKLNDYYSQCL

SEQ ID NO: 46207 - protein, 278 aa, Thermothielavioides terrestris
ASGSGQSTRYWDCCKPSCAWPGKAAVSQPVYACDANFQRLSDFNVQSGCNGGSAYSCADQTPWAVNDNLAYGFAATSIAGGSESIWCCACYALTFTSGPVAGKTMVVQSTSTGGDLGSNHFDIAMPGGGVGIFDGCSSQFGGLPGAQYGGISSRDQCDSFPAPLKPGCQWRFDWFQNADNPTFTFQQVQCPAEIVARSGCKRNDDSSFPVFTPPSGGNGGTGTPTSTAPGSGQTSPGGGSGCTSQKWAQCGGIGFSGCTTCVSGTTCQKLNDYYSQCL

SEQ ID NO: 46208 - protein, 278 aa, Thermothielavioides terrestris
ASGSGQSTRYWDCCKPSCAWPGKAAVSQPVYACDANFQRLSDFNVQSGCNGGSAYSCADQTPWAVNDNLAYGFAATSIAGGSESSWCCACYALTFTSGPVAGKTMVVQSTSTGGDLGSNHFDIAMPGGGVGIFNGCRSQFGGLPGAQYGGISSRDQCDSFPAPLKPGCQWRFDWFQNATNPTFTFQQVQCPAEIVARSGCKRNDDSSFPVFTPPSGGNGGTGTPTSTAPGSGQTSPGGGSGCTSQKWAQCGGIGFSGCTTCVSGTTCQKLNDYYSQCL

SEQ ID NO: 46209 - protein, 278 aa, Thermothielavioides terrestris
ASGSGQSTRYWDCCKPSCAWPGKAAVSQPVYACDANFQRLSDFNVQSGCNGGSAYSCADQTPWAVNDNLAYGFAATSIAGGSESSWCCACYALTFTSGPVAGKTMVVQSTSTGGDLGSNHFDIAMPGGGVGIFNGCRSQFGGLPGAQYGGISSRDQCDDFPAPLKPGCQWRFDWFQNADNPTFTFQQVQCPAEIVARSGCKRNDDSSFPVFTPPSGGNGGTGTPTSTAPGSGQTSPGGGSGCTSQKWAQCGGIGFSGCTTCVSGTTCQKLNDYYSQCL

SEQ ID NO: 46210 - protein, 278 aa, Thermothielavioides terrestris
ASGSGQSTRYWDCCKPSCAWPGKAAVSQPVYACDANFQRLSDFNVQSGCNGGSAYSCADQTPWAVNDNLAYGFAATSIAGGSESIWCCACYALTFTSGPVAGKTMVVQSTSTGGDLGSNHFDIAMPGGGVGIFNGCSSQFGGLPGAQYGGISSRDQCDSFPAPLKPGCQWRFDWFQNATNPTFTFQQVQCPAEIVARSGCKRNDDSSFPVFTPPSGGNGGTGTPTSTAPGSGQTSPGGGSGCTSQKWAQCGGIGFSGCTTCVSGTTCQKLNDYYSQCL

SEQ ID NO: 46211 - protein, 278 aa, Thermothielavioides terrestris
ASGSGQSTRYWDCCKPSCAWPGKAAVSQPVYACDANFQRLSDFNVQSGCNGGSAYSCADQTPWAVNDNLAYGFAATSIAGGSESSWCCACYALTFTSGPVAGKTMVVQSTSTGGDLGSNHFDIAMPGGGVGIFNGCSSQFGGLPGDQYGGIKSRDQCDSFPAPLKPGCQWRFDWFQNADNPTFTFQQVQCPAEIVARSGCKRNDDSSFPVFTPPSGGNGGTGTPTSTAPGSGQTSPGGGSGCTSQKWAQCGGIGFSGCTTCVSGTTCQKLNDYYSQCL

SEQ ID NO: 46212 - protein, 278 aa, Thermothielavioides terrestris
ASGSGQSTRYWDCCKPSCAWPGKAAVSQPVYACDANFQRLSDFNVQSGCNGGSAYSCADQTPWAVNDNLAYGFAATSIAGGSESSWCCACYALTFTSGPVAGKTMVVQSTSTGFDLGSNHFDIAMPGGGVGIFNGCKSQFGGLPGAQYGGISSRDQCDSFPAPLKPGCQWRFDWFQNADNPTFTFQQVQCPAEIVARSGCKRNDDSSFPVFTPPSGGNGGTGTPTSTAPGSGQTSPGGGSGCTSQKWAQCGGIGFSGCTTCVSGTTCQKLNDYYSQCL

SEQ ID NO: 46213 - protein, 278 aa, Thermothielavioides terrestris
ASGSGQSTRYWDCCKPSCAWPGKAAVSQPVYACDANFQRLSDFNVQSGCNGGSAYSCADQTPWAVNDNLAYGFAATSIAGGSESSWCCACYALTFTSGPVAGKTMVVQSTSTGGDLGSNHFDIAMPGGGVGIFNGCSSQFGGLPGAQYGGISSRDQCDDFPAPLKPGCQWRFDWFQNATNPTFTFQQVQCPAEIVARSGCKRNDDSSFPVFTPPSGGNGGTGTPTSTAPGSGQTSPGGGSGCTSQKWAQCGGIGFSGCTTCVSGTTCQKLNDYYSQCL

SEQ ID NO: 46214 - protein, 278 aa, Thermothielavioides terrestris
ASGSGQSTRYWDCCKPSCAWPGKAAVSQPVYACDANFQRLSDFNVQSGCNGGSAYSCADQTPWAVNDNLAYGFAATSIAGGSESSWCCACYALTFTSGPVAGKTMVVQSTSTGGDLGSNHFDIAMPGGGVGIFNGCSSQFGGLPGARYGGIKSRDQCDSFPAPLKPGCQWRFDWFQNADNPTFTFQQVQCPAEIVARSGCKRNDDSSFPVFTPPSGGNGGTGTPTSTAPGSGQTSPGGGSGCTSQKWAQCGGIGFSGCTTCVSGTTCQKLNDYYSQCL

SEQ ID NO: 46215 - protein, 278 aa, Thermothielavioides terrestris
ASGSGQSTRYWDCCKPSCAWPGKAAVSQPVYACDANFQRLSDFNVQSGCNGGSAYSCADQTPWAVNDNLAYGFAATSIAGGSESIWCCACYALTFTSGPVAGKTMVVQSTSTGGDLGSNHFDIAMPGGGVGIFNGCSSQFGGLPGAQYGGISSRDQCDDFPAPLKPGCQWRFDWFQNADNPTFTFQQVQCPAEIVARSGCKRNDDSSFPVFTPPSGGNGGTGTPTSTAPGSGQTSPGGGSGCTSQKWAQCGGIGFSGCTTCVSGTTCQKLNDYYSQCL

SEQ ID NO: 46216 - protein, 278 aa, Thermothielavioides terrestris
ASGSGQSTRYWDCCKPSCAWPGKAAVSQPVYACDANFQRLSDFNVQSGCNGGSAYSCADQTPWAVNDNLAYGFAATSIAGGSESSWCCACYALTFTSGPVAGKTMVVQSTSTGGDLGSNHFDIAMPGGGVGIFDGCSSQFGGLPGAQYGGISSRDQCDSFPAPLKPGCQWRFDWFQNADNPTFTFQQVQCPAESVARSGCKRNDDSSFPVFTPPSGGNGGTGTPTSTAPGSGQTSPGGGSGCTSQKWAQCGGIGFSGCTTCVSGTTCQKLNDYYSQCL

SEQ ID NO: 46217 - protein, 278 aa, Thermothielavioides terrestris
ASGSGQSTRYWDCCKPSCAWPGKAAVSQPVYACDANFQRLSDFNVQSGCNGGSAYSCADQTPWAVNDNLAYGFAATSIAGGSESSWCCACYALTFTSGPVAGKTMVVQSTSTGFDLGSNHFDIAMPGGGVGIFNGCDSQFGGLPGAQYGGISSRDQCDSFPAPLKPGCQWRFDWFQNADNPTFTFQQVQCPAEIVARSGCKRNDDSSFPVFTPPSGGNGGTGTPTSTAPGSGQTSPGGGSGCTSQKWAQCGGIGFSGCTTCVSGTTCQKLNDYYSQCL

SEQ ID NO: 46218 - protein, 278 aa, Thermothielavioides terrestris
ASGSGQSTRYWDCCKPSCAWPGKAAVSQPVYACDANFQRLSDFNVQSGCNGGSAYSCADQTPWAVNDNLAYGFAATSIAGGSESSWCCACYALTFTSGPVAGKTMVVQSTSTGGDLGSNHFDIAMPGGGVGIFNGCRSQFGGLPGARYGGISSRDQCDSFPAPLKPGCQWRFDWFQNADNPTFTFQQVQCPAEIVARSGCKRNDDSSFPVFTPPSGGNGGTGTPTSTAPGSGQTSPGGGSGCTSQKWAQCGGIGFSGCTTCVSGTTCQKLNDYYSQCL

SEQ ID NO: 46219 - protein, 415 aa, unidentified
QKPGETKEVHPQLTTFRCTKRGGCKPATNFIVLDSLSHPIHRAEGLGPGGCGDWGNPPPKDVCPDVESCAKNCIMEGIPDYSQYGVTTNGTSLRLQHILPDGRVPSPRVYLLDKTKRRYEMLHLTGFEFTFDVDATKLPCGMNSALYLSEMHPTGAKSKYNSGGAYYGTGYCDAQCFVTPFINGLGNIEGKGSCCNEMDIWEVNSRASHVVPHTCNKKGLYLCEGEECAFEGVCDKNGCGWNNYRVNVTDYYGRGEEFKVNTLKPFTVVTQFLANRRGKLEKIHRFYVQDGKVIESFYTNKEGVPYTNMIDDEFCEATGSRKYMELGATQGMGEALTRGMVLAMSIWWDQGGNMEWLDHGEAGPCAKGEGAPSNIVQVEPFPEVTYTNLRWGEIGSTYQEVQKPKPKPGHGPRSD

SEQ ID NO: 46220 - protein, 402 aa, Synthetic construct
QKPGETKEVHPQLTTFRCTKRGGCKPATNFIVLDSLSHPIHRAEGLGPGGCGDWGNPPPKDVCPDVESCAKNCIMEGIPDYSQYGVTTNGTSLRLQHILPDGRVPSPRVYLLDKTKRRYEMLHLTGFEFTFDVDATKLPCGMNSALYLSEMHPTGAKSKYNPGGAYYGTGYCDAQCFVTPFINGLGNIEGKGSCCNEMDIWEANSRASHVAPHTCNATGLYLCEGEECAFEGVCDKNGCGWNNYRVNVTDYYGRGEEFKVNTLKPFTVVTQFLANRRGKLEKIHRFYVQDGKVIESFYTNKEGVPYTNMIDDEFCEATGSRKYMELGATQGMGEALTRGMVLAMSIWWDQGGNMEWLDHGEAGPCAKGEGAPSNIVQVEPFPEVTYTNLRWGEIGSTYQELQ

SEQ ID NO: 46221 - protein, 402 aa, Synthetic construct
QKPGETKEVHPQLTTFRCTKRGGCKPATNFIVLDSLWHWIHRAEGLGPGGCGDWGNPPPKDVCPDVESCAKNCIMEGIPDYSQYGVTTNGTSLRLQHILPDGRVPSPRVYLLDKTKRRYEMLHLTGFEFTFDVDATKLPCGMNSALYLSEMHPTGAKSKYNPGGAYYGTGYCDAQCFVTPFINGLGNIEGKGSCCNEMDIWEANSRASHVAPHTCNKKGLYLCEGEECAFEGVCDKNGCGWNNYRVNVTDYYGRGEEFKVNTLKPFTVVTQFLANRRGKLEKIHRFYVQDGKVIESFYTNKEGVPYTNMIDDEFCEATGSRKYMELGATQGMGEALTRGMVLAMSIWWDQGGNMEWLDHGEAGPCAKGEGAPSNIVQVEPFPEVTYTNLRWGEIGSTYQELQ

SEQ ID NO: 46222 - protein, 402 aa, Synthetic construct
QKPGETKEVHPQLTTFRCTKRGGCKPATNFIVLDSLSHPIHRAEGLGPGGCGDWGNPPPKDVCPDVESCAKNCIMEGIPDYSQYGVTTQGTSLRLQHILPDGRVPSPRVYLLDKTKRRYEMLHLTGFEFTFDVDATKLPCGMNSALYLSEMHPTGAKSKYNPGGAYYGTGYCDAQCFVTPFINGLGNIEGKGSCCNEMDIWEANSRASHVAPHTCNKKGLYLCEGEECAFEGVCDKNGCGWNNYRVQVTDYYGRGEEFKVNTLKPFTVVTQFLANRRGKLEKIHRFYVQDGKVIESFYTNKEGVPYTNMIDDEFCEATGSRKYMELGATQGMGEALTRGMVLAMSIWWDQGGNMEWLDHGEAGPCAKGEGAPSNIVQVEPFPEVTYTNLRWGEIGSTYQELQ

SEQ ID NO: 46223 - protein, 262 aa, Thermothielavioides terrestris
ASGSGQSTRYWDCCKPSCAWPGKAAVSQPVYACDANFQRLSDFNVQSGCNGGSAYSCADQTPWAVNDNLAYGFAATSIAGGSESSWCCACYALTFTSGPVAGKTMVVQSTSTGGDLGSNHFDIAMPGGGVGIFNGCSSQFGGLPGAQYGGISSRDQCDSFPAPLKPGCQWRFDWFQNADNPTFTFQQVQCPAEIVARSGCKRNDDSSFPVFTTTPPTPTPTPTPGCTSQKWAQCGGIGFSGCTTCVSGTTCQKLNDYYSQCL

SEQ ID NO: 46224 - protein, 234 aa, Humicola insolens
MRSSPLLPSAVVAALPVLALAADGRSTRYWDCCKPSCGWAKKAPVNQPVFSCNANFQRITDFDAKSGCEPGGVAYSCADQTPWAVNDDFALGFAATSIAGSNEAGWCCGCYELTFTSGPVAGKKMVVQSTSTGGDLGSNHFDLNIPGGGVGIFDGCTPQFGGLPGQRYGGISSRNECDRFPDALKPGCYWRFDWFKNADNPSFSFRQVQCPAELVARTGCRRNDDGNFPAVQIP

SEQ ID NO: 46225 - protein, 305 aa, Humicola insolens
MRSSPLLPSAVVAALPVLALAADGRSTRYWDCCKPSCGWAKKAPVNQPVFSCNANFQRITDFDAKSGCEPGGVAYSCADQTPWAVNDDFALGFAATSIAGSNEAGWCCACYELTFTSGPVAGKKMVVQSTSTGGDLGSNHFDLNIPGGGVGIFDGCTPQFGGLPGQRYGGISSRNECHRFPDALKPGCYWRFDWFKNADNPSFSFRQVQSPAELVARTGCRRNDDGNFPAVQIPSSSTSSPVNQPTSTSTTSTSTTSSPPVQPTTPSGCTAERWAQCGGNGWSGCTTCVAGSTCTKINDWYHQCL

SEQ ID NO: 46226 - protein, 305 aa, Humicola insolens
MRSSPLLPSAVVAALPVLALAADGRSTRYWDCCLPSCGWAKKAPVNQPVFSCNANFQRITDFDAKSGCEPGGVAYSCADQTPWAVNDDFALGFAATSIAGSNEAGWCCACYELTFTSGPVAGKKMVVQSTSTGGDLGSNHFDLNIPGGGVGIFDGCTPQFGGLPGQRYGGISSANECDRFPDALKPGCYWRFDWFKNADNPSFSFRQVQCPAELVARTGCRRNDDGNFPAVQIPSSSTSSPVNQPTSTSTTSTSTTSSPPVQPTTPSGCTAERWAQCGGNGWSGCTTCVAGSTCTKINDWYHQCL

SEQ ID NO: 46227 - protein, 201 aa, Synthetic construct
ADGRSTRYWDCGKPSCGWAKKAPVNQPVFSCNANFQRITDFDAKSGMEPGGVAYSCADQTPWAVNDDFALGFAATSIAGSNEAGWCCACYELTFTSGPVAGKKMVVQSTSTGGDLGSNHFDLNIPGGGVGIFDGCTPQFGGLPGQRYGGISSRNECDRFPDALKPGCYWRFDWFKNADNPSFSFRQVQCPAELVARTGCRR

SEQ ID NO: 46228 - protein, 201 aa, Synthetic construct
ADGRSTRYWDCCKPSCGWAKKAPVNQPVFSCNANFQRITDFDAKSGCEPGGVAYSCADQTPWAVNDDFALGFAATSIAGSNEAGWCMACYELTFTSGPVAGKKMVVQSTSTGGDLGSNHFDLNIPGGGVGIFDGCTPQFGGLPGQRYGGISSRNECDRFPDALKPGCYWRFDWFKNADNPSFSFRQVQCPAELVARTGGRR

SEQ ID NO: 46229 - protein, 201 aa, Synthetic construct
ADGRSTRYWDCCKPSMGWAKKAPVNQPVFSCNANFQRITDFDAKSGCEPGGVAYSCADQTPWAVNDDFALGFAATSIAGSNEAGWGCACYELTFTSGPVAGKKMVVQSTSTGGDLGSNHFDLNIPGGGVGIFDGCTPQFGGLPGQRYGGISSRNECDRFPDALKPGCYWRFDWFKNADNPSFSFRQVQCPAELVARTGCRR

SEQ ID NO: 46230 - protein, 284 aa, Humicola insolens
ADGRSTRYWDCCKPSCGWAKKAPVNQPVFSCNANFQRITDFDAKSGCEPGGVAYSCADQTPWAVNDDFALGFAATSIXGSNEAGWCCACYELTFTSGPVAGKKMVVQSTSTGGDLGSNHFDLNIPGGGVGIFDGCTPQFGGLPGQRYGGISSRNECDRFPDXLKPGCYWRFDWFXNADNPSFSFRQVQCPAELVARTGCRRNDDGNFPAVQIPSSSTSSPVNQPTSTSTTSTSTTSSPPVQPTTPSGCTAERWAQCGGNGWSGCTTCVAGSTCTKINDWYHQCL

SEQ ID NO: 46231 - protein, 284 aa, Humicola insolens
ADGRSTRYWDCCKPSCGWAKKAPVNQPVFSCNANFQRITDFDAKSGCEPGGVAYSCADQTPWAVNDDFALGFAATSIAGSNEAGWCCACYELTFTSGPVAGKKMVVQSTSTGGDLGSNHFDLNIPGGGVGIFDGCTPQFGGLPGQRYGGISSRNECDRFPDALKPGCYWRFDWFKNADNPSFSFRQVQCPAELVARTGCRRNDDGNFPAVQIPSSSTSSPSSTPTSTSTTSTSTTSSPPVQPTTPSGCTAERWAQCGGNGWSGCTTCVAGSTCTKINDWYHQCL

SEQ ID NO: 46232 - protein, 278 aa, Thermothielavioides terrestris
ASGSGQSTRYWDCCKPSCAWPGKAAVSQPVYACDANFQRLSDFNVQSGCNGGSAYACADQTPWAVNDNLAYGFAATSIAGGSESSWCCACYALTFTSGPVAGKTMVVQSTSTGGDLGSNHFDIAMPGGGVGIFDGCSSQFGGLPGAQYGGISSRDQCDSFPEPLKPGCQWRFDWFQNADNPTFTFQQVQCPAEIVARSGCKRNDDSSFPVFTPPSGGNGGTGTPTSTAPGSGQTSPGGGSGCTSQKWAQCGGIGFSGCTTCVSGTTCQKLNDYYSQCL

SEQ ID NO: 46233 - protein, 278 aa, Thermothielavioides terrestris
ASGSGQSTRYWDCCKPSCAWPGKAAVSQPVYACDANFQRLSDFNVQSGCNGGSAYACADQTPWAVNDNLAYGFAATSIAGGSESSWCCACYALTFTSGPVAGKTMVVQSTSTGGDLGSNHFDIAMPGGGVGIFNGCSSQFGGLPGARYGGISSRDQCDSFPAPLKPGCYWRFDWFQNADNPTFTFQQVQCPAEIVARSGCKRNDDSSFPVFTPPSGGNGGTGTPTSTAPGSGQTSPGGGSGCTSQKWAQCGGIGFSGCTTCVSGTTCQKLNDYYSQCL

SEQ ID NO: 46234 - protein, 278 aa, Thermothielavioides terrestris
ASGSGQSTRYWDCCKPSCAWPGKAAVSQPVYACDANFQRLSDFNVQSGCNGGSAYACADQTPWAVNDNLAYGFAATSIAGGSESSWCCACYALTFTSGPVAGKTMVVQSTSTGGDLGSNHFDIAMPGGGVGIFDGCSSQFGGLPGARYGGISSRDQCDSFPAPLKPGCQWRFDWFQNADNPTFTFQQVQCPAEIVARSGCKRNDDSSFPVFTPPSGGNGGTGTPTSTAPGSGQTSPGGGSGCTSQKWAQCGGIGFSGCTTCVSGTTCQKLNDYYSQCL

SEQ ID NO: 46235 - protein, 278 aa, Thermothielavioides terrestris
ASGSGQSTRYWDCCKPSCAWPGKAAVSQPVYACDANFQRLSDFNVQSGCNGGSAYSCADQTPWAVNDNLAYGFAATSIAGGSESSWCCACYALTFTSGPVAGKTMVVQSTSTGGDLGSNHFDIAMPGGGVGIFNGCSSQFGGLPGARYGGISSRDECDSFPEPLKPGCQWRFDWFQNADNPTFTFQQVQCPAEIVARSGCKRNDDSSFPVFTPPSGGNGGTGTPTSTAPGSGQTSPGGGSGCTSQKWAQCGGIGFSGCTTCVSGTTCQKLNDYYSQCL

SEQ ID NO: 46236 - protein, 278 aa, Thermothielavioides terrestris
ASGSGQSTRYWDCCKPSCAWPGKAGVSQPVYACDANFQRLSDFNVQSGCNGGSAYACADQTPWAVNDNLAYGFAATSIAGGSESSWCCACYALTFTSGPVAGKTMVVQSTSTGGDLGSNHFDIAMPGGGVGIFNGCSSQFGGLPGARYGGISSRDQCDSFPAPLKPGCQWRFDWFQNADNPTFTFQQVQCPAEIVARSGCKRNDDSSFPVFTPPSGGNGGTGTPTSTAPGSGQTSPGGGSGCTSQKWAQCGGIGFSGCTTCVSGTTCQKLNDYYSQCL

SEQ ID NO: 46237 - protein, 278 aa, Thermothielavioides terrestris
ASGSGQSTRYWDCCKPSCAWPGKAAVSQPVYACDANFQRLSDFNVQSGCNGGSAYSCADQTPWAVNDNLAYGFAATSIAGGSESSWCCACYALTFTSGPVAGKTMVVQSTSTGGDLGSNHFDIAMPGGGVGIFDGCSSQFGGLPGAEYGGISSRDECDSFPAPLKPGCQWRFDWFQNADNPTFTFQQVQCPAEIVARSGCKRNDDSSFPVFTPPSGGNGGTGTPTSTAPGSGQTSPGGGSGCTSQKWAQCGGIGFSGCTTCVSGTTCQKLNDYYSQCL

SEQ ID NO: 46238 - protein, 305 aa, Humicola insolens
MRSSPLLPSAVVAALPVLALAADGRSTRYWDCCLPSCGWAKKAPVNQPVFSCNANFQRITDFDAKSGCEPGGVAYSCADQTPWAVNDDFALGFAATSIAGSNEAGWCCACYELTFTSGPVAGKKMVVQSTSTGGDLGSNHFDLNIPGGGVGIFDGCTPQFGGLPGQRNGGISSANECDRFPDALKPGCYWRFDWFKNADNPSFSFRQVQCPAELVARTGCRRNDDGNFPAVQIPSSSTSSPVNQPTSTSTTSTSTTSSPPVQPTTPSGCTAERWAQCGGNGWSGCTTCVAGSTCTKINDWYHQCL

SEQ ID NO: 46239 - protein, 305 aa, Humicola insolens
MRSSPLLPSAVVAALPVLALAADGRSTRYWDCCLPSCGWAKKAPVNQPVFSCNANFQRITDFDAKSGCEPGGVAYSCADQTPWAVNDDFALGFAATSIAGSNEAGWCCACYELTFTSGPVAGKKMVVQSTSTGGDLGSNHFDLNIPGGGVGIDDGCTPQFGGLPGQRYGGISSANECDRFPDALKPGCYWRFDWFKNADNPSFSFRQVQCPAELVARTGCRRNDDGNFPAVQIPSSSTSSPVNQPTSTSTTSTSTTSSPPVQPTTPSGCTAERWAQCGGNGWSGCTTCVAGSTCTKINDWYHQCL

SEQ ID NO: 46240 - protein, 305 aa, Humicola insolens
MRSSPLLRSAVVAALPVLALAADGKSTRYWDCCKPSCGWAKKAPVNQPVFSCNANFQRLTDFDAKSGCEPGGVAYSCADQTPWAVNDDFAFGFAATSIAGSNEAGWCCACYELTFTSGPVAGKKMVVQSTSTGGDLGSNHFDLNIPGGGVGIFDGCTPQFGGLPGQRYGGISSRNECDRFPDALKPGCYWRFDWFKNADNPSFSFRQVQCPAELVARTGCRRNDDGNFPAVQIPSSSTSSPVGQPTSTSTTSTSTTSSPPVQPTTPSGCTAERWAQCGGNGWSGCTTCVAGSTCTKINDWYHQCL

SEQ ID NO: 46241 - protein, 305 aa, Humicola insolens
MRSSPLLPSAVVAALPVLALAADGRSTRYWDCCLPSCGWAKKAPVNQPVFSCNANFQRITDFDAKSGCEPGGVAYSCAAQTPWAVNDDFALGFAATSIAGSNEAGWCCACYELTFTSGPVAGKKMVVQSTSTGGDLGSNHFDLNIPGGGVGIFDGCTPQFGGLPGQRYGGISSANECDRFPDALKPGCYWRFDWFKNADNPSFSFRQVQCPAELVARTGCRRNDDGNFPAVQIPSSSTSSPVNQPTSTSTTSTSTTSSPPVQPTTPSGCTAERWAQCGGNGWSGCTTCVAGSTCTKINDWYHQCL

SEQ ID NO: 46242 - protein, 305 aa, Humicola insolens
MRSSPLLPSAVVAALPVLALAADGRSTRYWDCCLPSCGWAKKAPVNQPVFSCNANFQRITDFDAKSGCEPGGVAYSCADQTPWAVNDDFALGFAATSIAGSNEAGWCCACYELTFTSGPVAGKKMVVQSTSTGGDLGSNHFDLNIPGGGVGIFDGCTPQFGGLPGQRYGGISSANECDRFPDALKPGCYWRFDWFKNADNPSFSFRQVQCPAELVARTGCRRNDDGNFPAVQIPSSSTSSPVNQPTSTSTTSTSTTSSPPVQPTTPSGCTAERWAQCGGNGWSGCTTCVAGSTCTKINDWFHQCL

SEQ ID NO: 46243 - protein, 305 aa, Humicola insolens
MRSSPLLPSAVVAALPVLALAADGRSTRYWDCCLPSCGWAKKAPVNQPVFSCNANFQRITDFDAKSGCEPGGVAYSCADQTPWAVNDDFALGFAATSIAGSNEAGWCCACYELTFTSGPVAGKKMVVQSTSTGGDLGSNHFDLNIPGGGVGIFDGCTPQFGGLPGQRSGGISSANECDRFPDALKPGCYWRFDWFKNADNPSFSFRQVQCPAELVARTGCRRNDDGNFPAVQIPSSSTSSPVNQPTSTSTTSTSTTSSPPVQPTTPSGCTAERWAQCGGNGWSGCTTCVAGSTCTKINDWYHQCL

SEQ ID NO: 46244 - protein, 305 aa, Scytalidium thermophilum
MRSSPLLRSAVVAALPVLALAADGKSTRYWDCCKPSCGWAKKAPVNQPVFSCNANFQRLTDFDAKSGCEPGGVAYSCADQTPWAVNDDFAFGFAATSIAGSNEAGWCCACYELTFTSGPVAGKKMVVQSTSTGGDLGSNHFDLNIPGGGVGIFDGCTPQFGGLPGQRYGGISSRNECDRFPDALKPGCYWRFDWFKNADNPSFSFRQVQCPAELVARTGCRRNDDGNFPAVQIPSSSTSSPVDQPTSTSTTSTSTTSSPPVQPTTPSGCTAERWAQCGGNGWSGCTTCVAGSTCTKINDWYHQCL

SEQ ID NO: 46245 - protein, 306 aa, Fungi
MRSSPLLRSAVVAALPVLALAADGKSTRYWDCCKPSCGWAKKAPVNQPVFSCNANFQRLTDFDAKSGCEPGGVAYSCADQTPWAVNDDFAFGFAATSIAGSNEAGWCCACYELTFTSGPVAGKKMVVQSTSTGGDLGSNHFDLNIPGGGVGIFDGCTPQFGGLPGQRYGGISSRNECDRFPDALKPGCYWRFDWFKNADNPSFSFRQVQCPAELVARTGCRRNDDGNFPAVQIPSSSTSSPVGQPTSTSTTSTSTTSSPPVQPTTPSGCTAERWACQCGGNGWSGCTTCVAGSTCTKINDWYHQCL

SEQ ID NO: 46246 - protein, 305 aa, Humicola insolens
MRSSPLLPSAVVAALPVLALAADGRSTRYWDCCLPSCGWAKKAPVNQPVFSCNANFQRITDFDAKSGCEPGGVAYSCADQTPWAVNDRFALGFAATSIAGSNEAGWCCACYELTFTSGPVAGKKMVVQSTSTGGDLGSNHFDLNIPGGGVGIFDGCTPQFGGLPGQRYGGISSANECDRFPDALKPGCYWRFDWFKNADNPSFSFRQVQCPAELVARTGCRRNDDGNFPAVQIPSSSTSSPVNQPTSTSTTSTSTTSSPPVQPTTPSGCTAERWAQCGGNGWSGCTTCVAGSTCTKINDWYHQCL

SEQ ID NO: 46247 - protein, 305 aa, Humicola insolens
MRSSPLLPSAVVAALPVLALAADGRSTRYWDCCLPSCGWAKKAPVNQPVFSCNANFQRITDFDAKSGCEPGGVAYECADQTPWAVNDDFALGFAATSIAGSNEAGWCCACYELTFTSGPVAGKKMVVQSTSTGGDLGSNHFDLNIPGGGVGIFDGCTPQFGGLPGQRYGGISSANECDRFPDALKPGCYWRFDWFKNADNPSFSFRQVQCPAELVARTGCRRNDDGNFPAVQIPSSSTSSPVNQPTSTSTTSTSTTSSPPVQPTTPSGCTAERWAQCGGNGWSGCTTCVAGSTCTKINDWYHQCL

SEQ ID NO: 46248 - protein, 435 aa, Humicola insolens
MARGTALLGLTALLLGLVNGQKPGETKEVHPQLTTFRCTKRGGCKPATNFIVLDSLSHPIHRAEGLGPGGCGDWGNPPPKDLCPDVESCAKNCIMEGIPDYSQYGVTTNGTSLRLQHILPDGRVPSPRVYLLDKTKRRYEMLHLTGFEFTFDVDATKLPCGMNSALYLSEMHPTGAKSKYNSGGAYYGTGYCDAQCFVTPFINRLGNIEGKGSCCNEMDIWEVNSRASHVLPHTCNKKGLYLCEGEECAFEGVCDKNGCGWNNYRVNVTDYYGRGEEFKVNTLKPFTVVTQFLANRRGKLEKIHRFYVQDAKVIESFYTNKEGVPYTNMIDDEFCEATGSRKYMELGATQGMGEALTRGMVLAMSIWWDQGGNMEWLDHGEAGPCAKGEGAPSNIVQVEPFPEVTYTNLRWGEIGSTYQEVQKPKPKPGHGPRSD

SEQ ID NO: 46249 - protein, 213 aa, Humicola insolens
ADGKSTRYWDCCKPSCGWAKKAPVNQPVFSCNANFQRLTDFDAKSGCEPGGVAYSCADQTPWAVNDDFAFGFAATSIAGSNEAGWCCACYELTFTSGPVAGKKMVVQSTSTGGDLGSNHFDLNIPGGGVGIFDGCTPQFGGLPGQRYGGISSRNECDRFPDALKPGCYWRFDWFKNADNPSFSFRQVQCPAELVARTGCRRNDDGNFPAVQIP

SEQ ID NO: 46250 - protein, 284 aa, Humicola insolens
ADGKSTRYWDCCKPSCGWAKKAPVNQPVFSCNANFQRLTDFDAKSGCEPGGVAYSCADQTPWAVNDDFAFGFAATSIAGSNEAGWCCACYELTFTSGPVAGKKMVVQSTSTGGDLGSNHFDLNIPGGGVGIFDGCTPQFGGLPGQRYGGISSRNECDRFPDALKPGCYWRFDWFKNADNPSFSFRQVQCPAELVARTGCRRNDDGNFPAVQIPSSSTSSPVGQPTSTSTTSTSTTSSPPVQPTTPSGCTAERWAQCGGNGWSGCTTCVAGSTCTKINDWYHQCL

SEQ ID NO: 46251 - protein, 284 aa, Synthetic construct
ADGKSTRYWDCCKPSCGWAKKAPVNQPVFSCNANFQRLTDFDAKSGCEPGGVAYSCADQTPWAVNDDFAYGFAATSIAGSNEAGWCCACYELTFTSGPVAGKKMVVQSTSTGGDLGSNHFDLNIPGGGVGIFDGCTPQFGGLPGQRYGGISSRNECDRFPDALKPGCYWRFDWFKNADNPSFSFRQVQCPAELVARTGCRRNDDGNFPAVQIPSSSTSSPVGQPTSTSTTSTSTTSSPPVQPTTPSGCTAERWAQCGGNGWSGCTTCVAGSTCTKINDWYHQCL

SEQ ID NO: 46252 - protein, 284 aa, Trichocladium griseum
ADGKSTRYWDCCKPSCGWAKKAPVNQPVFSCNANFQRLTDFDAKSGCEPGGVAYSCADQTPWAVNDDFAFGFAATSIAGSNEAGWCCACYELTFTSGPVAGKKMVVQSTSTGGDLGSNHFDLNIPGGGVGIFDGCTPQFGGLPGQRYGGISSRNECDRFPDALKPGCYWRFDWFKNADNPSFSFRQVQCPAELVARTGCRRNDDGNFPAVQIPSSSTSSPVDQPTSTSTTSTSTTSSPPVQPTTPSGCTAERWAQCGGNGWSGCTTCVAGSTCTKINDWYHQCL

SEQ ID NO: 46253 - protein, 284 aa, Humicola insolens
ADGRSTRYWDCCKPSCGWAKKAGVNQPVFSCNANFQRITDFDAKSGCEPGGVAYSCADQTPWAVNDNFSLGFAATSIAGSNEAGWCCACYELTFTSGPVAGKKMVVQSTSTGGDLGSNHFDLNIPGGGVGIFDGCTPQFGGLPGQRYGGISSRNECDSFPDALKPGCYWRFDWFKNADNPSFSFRQVQCPAELVARTGCRRNDDGNFPAVQIPSSSTSSPVNQPTSTSTTSTSTTSSPPVQPTTPSGCTAERWAQCGGNGWSGCTTCVAGSTCTKINDWYHQCL

SEQ ID NO: 46254 - protein, 278 aa, Thermothielavioides terrestris
ASGSGQSTRYWDCCKPSCAWPGKAAVSQPVYACDANFQRLTDFNVQSGCNGGSAYACADQTPWAVNDNLAYGFAATSIAGGSESSWCCACYALTFTSGPVAGKTMVVQSTSTGGDLGSNHFDIAMPGGGVGIFNGCSSQFGGLPGARYGGISSRDQCDSFPAPLKPGCYWRFDWFQNADNPTFTFQQVQCPAEIVARSGCKRNDDSSFPVFTPPSGGNGGTGTPTSTAPGSGQTSPGGGSGCTSQKWAQCGGIGFSGCTTCVSGTTCQKLNDYYSQCL

SEQ ID NO: 46255 - protein, 278 aa, Thermothielavioides terrestris
ASGSGQSTRYWDCCKPSCAWPGKAAVSQPVYACDANFQRLSDFNVQSGCNGGSAYACADQTPWAVNDNLAYGFAATSIAGGSESSWCCACYALTFTSGPVAGKTMVVQSTSTGGDLGSNHFDIAMPGGGVGIFNGCSSQFGGLPGDRYGGISSRDQCDSFPAPLKPGCYWRFDWFQNADNPTFTFQQVQCPAEIVARSGCKRNDDSSFPVFTPPSGGNGGTGTPTSTAPGSGQTSPGGGSGCTSQKWAQCGGIGFSGCTTCVSGTTCQKLNDYYSQCL

SEQ ID NO: 46256 - protein, 278 aa, Thermothielavioides terrestris
ASGSGQSTRYWDCCKPSCAWPGKAAVSQPVYACDANFQRLSDFNVQSGCEGGSAYACADQTPWAVNDNLAYGFAATSIAGGSESSWCCACYALTFTSGPVAGKTMVVQSTSTGGDLGSNHFDIAMPGGGVGIFNGCSSQFGGLPGARYGGISSRDQCDSFPAPLKPGCYWRFDWFQNADNPTFTFQQVQCPAEIVARSGCKRNDDSSFPVFTPPSGGNGGTGTPTSTAPGSGQTSPGGGSGCTSQKWAQCGGIGFSGCTTCVSGTTCQKLNDYYSQCL

SEQ ID NO: 46257 - protein, 278 aa, Thermothielavioides terrestris
ASGSGQSTRYWDCCKPSCAWPGKAAVSQPVYACDANFQRLSDFNVQSGCNGGSAYACADQTPWAVNDNLAYGFAATSIAGGSESSWCCACYALTFTSGPVAGKTMVVQSTSTGGDLGSNHFDIAMPGGGVGIFDGCSSQFGGLPGAQYGGISSRDECDSFPEPLKPGCQWRFDWFQNADNPTFTFQQVQCPAEIVARSGCKRNDDSSFPVFTPPSGGNGGTGTPTSTAPGSGQTSPGGGSGCTSQKWAQCGGIGFSGCTTCVSGTTCQKLNDYYSQCL

SEQ ID NO: 46258 - protein, 278 aa, Thermothielavioides terrestris
ASGSGQSTRYWDCCKPSCAWPGKAAVSQPVYACDANFQRLSDFNVQSGCNGGSAYACADQTPWAVNDNLAYGFAATSIAGGSESSWCCACYALTFTSGPVAGKTMVVQSTSTGGDLGSNHFDIAMPGGGVGIFNGCSSQFGGLPGARYGGISSRDQCDSFPAPLKPGCYWRFDWFQNADNPTVTFQQVQCPAEIVARSGCKRNDDSSFPVFTPPSGGNGGTGTPTSTAPGSGQTSPGGGSGCTSQKWAQCGGIGFSGCTTCVSGTTCQKLNDYYSQCL

SEQ ID NO: 46259 - protein, 278 aa, Thermothielavioides terrestris
ASGSGQSTRYWDCCKPSCAWPGKAAVSQPVYSCDANFQRLSDFNVQSGCNGGSAYACADQTPWAVNDNLAYGFAATSIAGGSESSWCCACYALTFTSGPVAGKTMVVQSTSTGGDLGSNHFDIAMPGGGVGIFNGCSSQFGGLPGARYGGISSRDQCDSFPAPLKPGCYWRFDWFQNADNPTFTFQQVQCPAEIVARSGCKRNDDSSFPVFTPPSGGNGGTGTPTSTAPGSGQTSPGGGSGCTSQKWAQCGGIGFSGCTTCVSGTTCQKLNDYYSQCL

SEQ ID NO: 46260 - protein, 278 aa, Thermothielavioides terrestris
ASGSGQSTRYWDCCKPSCAWPGKAAVSQPVYACDANFQRLSDFDVQSGCNGGSAYACADQTPWAVNDNLAYGFAATSIAGGSESSWCCACYALTFTSGPVAGKTMVVQSTSTGGDLGSNHFDIAMPGGGVGIFNGCSSQFGGLPGARYGGISSRDQCDSFPAPLKPGCYWRFDWFQNADNPTFTFQQVQCPAEIVARSGCKRNDDSSFPVFTPPSGGNGGTGTPTSTAPGSGQTSPGGGSGCTSQKWAQCGGIGFSGCTTCVSGTTCQKLNDYYSQCL

SEQ ID NO: 46261 - protein, 278 aa, Thermothielavioides terrestris
ASGSGQSTRYWDCCKPSCAWPGKAAVSQPVYACDANFQRLSDFNVQSGCNGGSAYACADQTPWAVNDNLAYGFAATSIAGGSESSWCCACYALTFTSGPVAGKTMVVQSTSTGGDLGSNHFDIAMPGGGVGIFNGCSSQFGGLPGARYGGISSRDQCDSFPAPLKPGCYWRFDWFQNADNPTFTFQQVQCPAEIVARSGCRRNDDSSFPVFTPPSGGNGGTGTPTSTAPGSGQTSPGGGSGCTSQKWAQCGGIGFSGCTTCVSGTTCQKLNDYYSQCL

SEQ ID NO: 46262 - protein, 278 aa, Thermothielavioides terrestris
ASGSGQSTRYWDCCKPSCAWPGKAGVSQPVYACDANFQRLSDFNVQSGCNGGSAYSCADQTPWAVNDNLAYGFAATSIAGGSESSWCCACYALTFTSGPVAGKTMVVQSTSTGGDLGSNHFDIAMPGGGVGIFDGCSSQFGGLPGAQYGGISSRDECDSFPEPLKPGCQWRFDWFQNADNPTFTFQQVQCPAEIVARSGCKRNDDSSFPVFTPPSGGNGGTGTPTSTAPGSGQTSPGGGSGCTSQKWAQCGGIGFSGCTTCVSGTTCQKLNDYYSQCL

SEQ ID NO: 46263 - protein, 278 aa, Thermothielavioides terrestris
ASGSGQSTRYWDCCKPSCAWPGKAAVSQPVYACDANFQRLSDFNVQSGCNGGSAYACADQTPWAVNDNLAYGFAATSIAGGSESSWCCACYALTFTSGPVAGKTMVVQSTSTGGDLGSNHFDIAMPGGGVGIFDGCSSQFGGLPGARYGGISSRDQCDSFPAPLKPGCYWRFDWFQNADNPTFTFQQVQCPAEIVARSGCKRNDDSSFPVFTPPSGGNGGTGTPTSTAPGSGQTSPGGGSGCTSQKWAQCGGIGFSGCTTCVSGTTCQKLNDYYSQCL

SEQ ID NO: 46264 - protein, 278 aa, Thermothielavioides terrestris
ASGSGQSTRYWDCCKPSCAWPGKAAVSQPVYACDANFQRLSDFNVQSGCNGGSAYACADQTPWAVNDNLAYGFAATSIAGGSESSWCCACYALTFTSGPVAGKTMVVQSTSTGGDLGSNHFDIAMPGGGVGIFNGCSSQFGGLPGARYGGISSRDQCDSFPAPLQPGCYWRFDWFQNADNPTFTFQQVQCPAEIVARSGCKRNDDSSFPVFTPPSGGNGGTGTPTSTAPGSGQTSPGGGSGCTSQKWAQCGGIGFSGCTTCVSGTTCQKLNDYYSQCL

SEQ ID NO: 46265 - protein, 278 aa, Thermothielavioides terrestris
ASGSGQSTRYWDCCKPSCAWPGKAGVSQPVYACDANFQRLSDFNVQSGCNGGSAYACADQTPWAVNDNLAYGFAATSIAGGSESSWCCACYALTFTSGPVAGKTMVVQSTSTGGDLGSNHFDIAMPGGGVGIFDGCSSQFGGLPGAQYGGISSRDQCDSFPAPLKPGCYWRFDWFQNADNPTFTFQQVQCPAEIVARSGCKRNDDSSFPVFTPPSGGNGGTGTPTSTAPGSGQTSPGGGSGCTSQKWAQCGGIGFSGCTTCVSGTTCQKLNDYYSQCL

SEQ ID NO: 46266 - protein, 278 aa, Thermothielavioides terrestris
ASGSGQSTRYWDCCKPSCAWPGKAAVSQPVYACDANFQRLSDFNVQSGCNGGSAYACADQTPWAVNDNLAYGFAATSIAGGSESSWCCACYALTFTSGPVAGKKMVVQSTSTGGDLGSNHFDIAMPGGGVGIFNGCSSQFGGLPGARYGGISSRDQCDSFPAPLKPGCYWRFDWFQNADNPTFTFQQVQCPAEIVARSGCKRNDDSSFPVFTPPSGGNGGTGTPTSTAPGSGQTSPGGGSGCTSQKWAQCGGIGFSGCTTCVSGTTCQKLNDYYSQCL

SEQ ID NO: 46267 - protein, 278 aa, Thermothielavioides terrestris
ASGSGQSTRYWDCCKPSCAWPGKAGVSQPVYACDANFQRLSDFNVQSGCNGGSAYACADQTPWAVNDNLAYGFAATSIAGGSESSWCCACYALTFTSGPVAGKTMVVQSTSTGGDLGSNHFDIAMPGGGVGIFNGCSSQFGGLPGAQYGGISSRDECDSFPEPLKPGCQWRFDWFQNADNPTFTFQQVQCPAEIVARSGCKRNDDSSFPVFTPPSGGNGGTGTPTSTAPGSGQTSPGGGSGCTSQKWAQCGGIGFSGCTTCVSGTTCQKLNDYYSQCL

SEQ ID NO: 46268 - protein, 278 aa, Thermothielavioides terrestris
ASGSGQSTRYWDCCKPSCAWPGKAAVSQPVYACDANFQRLSDFNVQSGCNGGSAYACADQTPWAVNDNLAYGFAATSIAGGSESSWCCACYALTFTSGPVAGKTMVVQSTSTGGDLGSNHFDIAMPGGGVGIFNGCSSQFGGLPGARYGGISSRDQCDSFPEPLKPGCYWRFDWFQNADNPTFTFQQVQCPAEIVARSGCKRNDDSSFPVFTPPSGGNGGTGTPTSTAPGSGQTSPGGGSGCTSQKWAQCGGIGFSGCTTCVSGTTCQKLNDYYSQCL

SEQ ID NO: 46269 - protein, 278 aa, Thermothielavioides terrestris
ASGSGQSTRYWDCCKPSCAWPGKAAVSQPVYACDANFQRLSDFNVQSGCNGGSAYACADQTPWAVNDNLAYGFAATSIAGGSESSWCCACYALTFTSGPVAGKTMVVQSTSTGGDLGSNHFDIAMPGGGVGIFDGCSSQFGGLPGAQYGGISSRDECDSFPAPLKPGCYWRFDWFQNADNPTFTFQQVQCPAEIVARSGCKRNDDSSFPVFTPPSGGNGGTGTPTSTAPGSGQTSPGGGSGCTSQKWAQCGGIGFSGCTTCVSGTTCQKLNDYYSQCL

SEQ ID NO: 46270 - protein, 278 aa, Thermothielavioides terrestris
ASGSGQSTRYWDCCKPSCAWPGKAAVSQPVYACDANFQRLSDFNVQSGCNGGSAYACADQTPWAVNDNLAYGFAATSIAGGSESSWCCACYALTFTSGPVAGKTMVVQSTSTGGDLGSNHFDIAMPGGGVGIFDGCSSQFGGLPGARYGGISSRDQCDSFPEPLKPGCQWRFDWFQNADNPTFTFQQVQCPAEIVARSGCKRNDDSSFPVFTPPSGGNGGTGTPTSTAPGSGQTSPGGGSGCTSQKWAQCGGIGFSGCTTCVSGTTCQKLNDYYSQCL

SEQ ID NO: 46271 - protein, 278 aa, Thermothielavioides terrestris
ASGSGQSTRYWDCCKPSCAWPGKAAVSQPVYACDANFQRLSDFNVQSGCNGGSAYACADQTPWAVNDNLAYGFAATSIAGGSESSWCCACYALTFTSGPVAGKTMVVQSTSTGGDLGSNHFDIAMPGGGVGIFNGCSSQFGGLPGARYGGISSRDQCDSFPAPLKPGCYWRFDWFQNADNPTFTFRQVQCPAEIVARSGCKRNDDSSFPVFTPPSGGNGGTGTPTSTAPGSGQTSPGGGSGCTSQKWAQCGGIGFSGCTTCVSGTTCQKLNDYYSQCL

SEQ ID NO: 46272 - protein, 278 aa, Thermothielavioides terrestris
ASGSGQSTRYWDCCKPSCAWPGKAAVSQPVYACDANFQRLSDFNVQSGCNGGSAYACADQTPWAVNDNLAYGFAATSIAGGSESSWCCACYALTFTSGPVAGKTMVVQSTSTGGDLGSNHFDIAMPGGGVGIFNGCSSQFGGLPGARYGGISSRDQCDSFPAPLKPGCYWRFDWFQNADNPTFTFQQVQCPAEIVARSGCKRNDDSSFPVFTPPSGGNWGTGTPTSTAPGSGQTSPGGGSGCTSQKWAQCGGIGFSGCTTCVSGTTCQKLNDYYSQCL

SEQ ID NO: 46273 - protein, 278 aa, Thermothielavioides terrestris
ASGSGQSTRYWDCCKPSCAWPGKAAVSQPVYACDANFQRLSDFNVQSGCNGGSAYACADQTPWAVNDNLAYGFAATSIAGGSESSWCCACYALTFTSGPVAGKTMVVQSTSTGGDLGSNHFDIAMPGGGVGIFNGCSSQFGGLPGARYGGISSRDQCDSFPAPLKPGCYWRFDWFQNADNPTFTFQQVQCPAELVARSGCKRNDDSSFPVFTPPSGGNGGTGTPTSTAPGSGQTSPGGGSGCTSQKWAQCGGIGFSGCTTCVSGTTCQKLNDYYSQCL

SEQ ID NO: 46274 - protein, 278 aa, Thermothielavioides terrestris
ASGSGQSTRYWDCCKPSCAWPGKAAVSQPVYACDANFQRLSDFNVQSGCNGGSAYACADQTPWAVNDNLAYGFAATNIAGGSESSWCCACYALTFTSGPVAGKTMVVQSTSTGGDLGSNHFDIAMPGGGVGIFNGCSSQFGGLPGARYGGISSRDQCDSFPAPLKPGCYWRFDWFQNADNPTFTFQQVQCPAEIVARSGCKRNDDSSFPVFTPPSGGNGGTGTPTSTAPGSGQTSPGGGSGCTSQKWAQCGGIGFSGCTTCVSGTTCQKLNDYYSQCL

SEQ ID NO: 46275 - protein, 415 aa, Humicola insolens
QKPGETKEVHPQLTTFRCTKRGGCKPATNFIVLDSLSHPIHRAEGLGPGGCGDWGNPPPKDLCPDVESCAKNCIMEGIPDYSQYGVTTNGTSLRLQHILPDGRVPSPRVYLLDKTKRRYEMLHLTGFEFTFDVDATKLPCGMNSALYLSEMHPTGAKSKYNSGGAYYGTGYCDAQCFVTPFINRLGNIEGKGSCCNEMDIWEVNSRASHVLPHTCNKKGLYLCEGEECAFEGVCDKNGCGWNNYRVNVTDYYGRGEEFKVNTLKPFTVVTQFLANRRGKLEKIHRFYVQDAKVIESFYTNKEGVPYTNMIDDEFCEATGSRKYMELGATQGMGEALTRGMVLAMSIWWDQGGNMEWLDHGEAGPCAKGEGAPSNIVQVEPFPEVTYTNLRWGEIGSTYQEVQKPKPKPGHGPRSD

SEQ ID NO: 46276 - protein, 205 aa, Humicola insolens
ADGKSTRYWDCCKPSCGWAKKAPVNQPVFSCNANFQRLTDFDAKSGCEPGGVAYSCADQTPWAVNDDFAFGFAATSIAGSNEAGWCCACYELTFTSGPVAGKKMVVQSTSTGGDLGSNHFDLNIPGGGVGIFDGCTPQFGGLPGQRYGGISSRNECDRFPDALKPGCYWRFDWFKNADNPSFSFRQVQCPAELVARTGCRRNDDG

SEQ ID NO: 46277 - protein, 305 aa, Humicola insolens
MRSSPLLRSAVVAALPVLALAADGKSTRYWDCCKPSCGWAKKAPVNQPVFSCNANFQRLTDFDAKSGCEPGGVAYSCADQTPWAVNDDFAFGFAATSIAGSNEAGWCCACYELTFTSGPVAGKKMVVQSTSTGGDLGSNHFDLNIPGGGVGISDGCTPQFGGLPGQRYGGISSRNECDRFPDALKPGCYWRFDWFKNADNPSFSFRQVQCPAELVARTGCRRNDDGNFPAVQIPSSSTSSPVGQPTSTSTTSTSTTSSPPVQPTTPSGCTAERWAQCGGNGWSGCTTCVAGSTCTKINDWYHQCL

SEQ ID NO: 46278 - protein, 305 aa, Humicola insolens
MRSSPLLRSAVVAALPVLALAADGKSTRYWDCCKPSCGWATKAPVNQPVFSCNANFQRLTDFDAKSGCEPGGVAYSCADQTPWAVNDDFAFGFAATSIAGSNEAGWCCACYELTFTSGPVAGKKMVVQSTSTGGDLGSNHFDLNIPGGGVGIFDGCTPQFGGLPGQRYGGISSRNECDRFPDALKPGCYWRFDWFKNADNPSFSFRQVQCPAELVARTGCRRNDDGNFPAVQIPSSSTSSPVGQPTSTSTTSTSTTSSPPVQPTTPSGCTAERWAQCGGNGWSGCTTCVAGSTCTKINDWYHQCL

SEQ ID NO: 46279 - protein, 305 aa, Humicola insolens
MRSSPLLRSAVVAALPVLALAADGKSTRYWDCCKPSCGWAGKAPVNQPVFSCNANFQRLTDFDAKSGCEPGGVAYSCADQTPWAVNDDFAFGFAATSIAGSNEAGWCCACYELTFTSGPVAGKKMVVQSTSTGGDLGSNHFDLNIPGGGVGIFDGCTPQFGGLPGQRYGGISSRNECDRFPDALKPGCYWRFDWFKNADNPSFSFRQVQCPAELVARTGCRRNDDGNFPAVQIPSSSTSSPVGQPTSTSTTSTSTTSSPPVQPTTPSGCTAERWAQCGGNGWSGCTTCVAGSTCTKINDWYHQCL

SEQ ID NO: 46280 - protein, 305 aa, Humicola insolens
MRSSPLLRSAVVAALPVLALAADGKSTRYWDCCKPSCGWAKKAPVNQPVFSCNANFQRLTDFDAKSGCEPGGVAYSCADQTPWAVNDDFAFGFAATSIAGSNEYGWCCACYELTFTSGPVAGKKMVVQSTSTGGDLGSNHFDLNIPGGGVGIFDGCTPQFGGLPGQRYGGISSRNECDRFPDALKPGCYWRFDWFKNADNPSFSFRQVQCPAELVARTGCRRNDDGNFPAVQIPSSSTSSPVGQPTSTSTTSTSTTSSPPVQPTTPSGCTAERWAQCGGNGWSGCTTCVAGSTCTKINDWYHQCL

SEQ ID NO: 46281 - protein, 305 aa, Humicola insolens
MRSSPLLRSAVVAALPVLALAADGKSTRYWDCCKPSCLWAKKAPVNQPVFSCNANFQRLTDFDAKSGCEPGGVAYSCADQTPWAVNDDFAFGFAATSIAGSNEAGWCCACYELTFTSGPVAGKKMVVQSTSTGGDLGSNHFDLNIPGGGVGIFDGCTPQFGGLPGQRYGGISSRNECDRFPDALKPGCYWRFDWFKNADNPSFSFRQVQCPAELVARTGCRRNDDGNFPAVQIPSSSTSSPVGQPTSTSTTSTSTTSSPPVQPTTPSGCTAERWAQCGGNGWSGCTTCVAGSTCTKINDWYHQCL

SEQ ID NO: 46282 - protein, 305 aa, Humicola insolens
MRSSPLLPSAVEAALPVLALAADGRSTRYWDCCKPSCGWAKKAPVNQPVFSCNANFQRITDFDAKSGCEPGGVAYSCADQTPWAVNDDFALGFAATSIAGSNEAGWWCACYELTFTSGPVAGKKMVVQSTSTGGDLGSNHFDLNIPGGGVGIFDGCTPQFGGLRGQRYGGISSRNECDRFPDALKPGCYWRFDWFKNADNPSFSFRQVQCPAELVGRTGCRRNDDGNFPAVQIPSSSTSSPVNQPTSTSTTSTSTTSSPPVQPTTPSGCTAERWAQCGGNGWSGCTTCVAGSTCTKINDWYHQCL

SEQ ID NO: 46283 - protein, 305 aa, Humicola insolens
MRSSPLLRSAVVAALPVLALAADGKSTRYWDCCKPSCGWAKKAPVNQPVFSCNANFQRLTDFDAKSGCEPGGVAYSCADQTPWAVNDDFAFGFAATSPAGSNEAGWCCACYELTFTSGPVAGKKMVVQSTSTGGDLGSNHFDLNIPGGGVGIFDGCTPQFGGLPGQRYGGISSRNECDRFPDALKPGCYWRFDWFKNADNPSFSFRQVQCPAELVARTGCRRNDDGNFPAVQIPSSSTSSPVGQPTSTSTTSTSTTSSPPVQPTTPSGCTAERWAQCGGNGWSGCTTCVAGSTCTKINDWYHQCL

SEQ ID NO: 46284 - protein, 305 aa, Humicola insolens
MRSSPLLRSAVVAALPVLALAADGKSTRYWDCCKPSCGWAKKAPVNQPVFSCNANFQRLTDFDAKSGCEPGGVAYSCADQTPWAVNDDFAFGFAATSIAGSNEAGWCCACYELTFTSGPVAGKKMVVQSTSTGGDLGSNHFDLNIPGGGVGIFDGCTPQFGGLPGQRYGGISSRNECDRFPDALKPGCYWRFDWFKNADNPSFSFRQVQCPAELVARTGCRRNDDGNFPAVQIPSSSTSSPVGQPTSTSTTSTSTTSSPPVQDTTPSGCTAERWAQCGGNGWSGCTTCVAGSTCTKINDWYHQCL

SEQ ID NO: 46285 - protein, 305 aa, Humicola insolens
MRSSPLLRSAVVAALPVLALAADGKSTRYWDCCKPSCGWAKKAPVNQPVFSCNANFQRLTDFDAKSGCEPGGVAYSCADQTPWAVNDDFAFGFAATSIAGSNEAGWCCACYELTFTSGPIAGKKMVVQSTSTGGDLGSNHFDLNIPGGGVGIFDGCTPQFGGLPGQRYGGISSRNECDRFPDALKPGCYWRFDWFKNADNPSFSFRQVQCPAELVARTGCRRNDDGNFPAVQIPSSSTSSPVGQPTSTSTTSTSTTSSPPVQPTTPSGCTAERWAQCGGNGWSGCTTCVAGSTCTKINDWYHQCL

SEQ ID NO: 46286 - protein, 305 aa, Humicola insolens
MRSSPLLRSAVVAALPVLALAADGKSTRYWDCCKPSCGWAKKAPVNQPVFSCNANFQRLTDFDAKSGCEPGGVAYSCADQTPWAVNDDFAFGFAATSIAGSNEAGWCCACYELTFTSGPVAGKKMVVQSTSTGGDLGVNHFDLNIPGGGVGIFDGCTPQFGGLPGQRYGGISSRNECDRFPDALKPGCYWRFDWFKNADNPSFSFRQVQCPAELVARTGCRRNDDGNFPAVQIPSSSTSSPVGQPTSTSTTSTSTTSSPPVQPTTPSGCTAERWAQCGGNGWSGCTTCVAGSTCTKINDWYHQCL

SEQ ID NO: 46287 - protein, 305 aa, Humicola insolens
MRSSPLLRSAVVAALPVLALAADGKSTRYWDCCKPSCGWAKKAPVNQPVFSCNANFQRLTDFDMKSGCEPGGVAYSCADQTPWAVNDDFAFGFAATSIAGSNEAGWCCACYELTFTSGPVAGKKMVVQSTSTGGDLGSNHFDLNIPGGGVGIFDGCTPQFGGLPGQRYGGISSRNECDRFPDALKPGCYWRFDWFKNADNPSFSFRQVQCPAELVARTGCRRNDDGNFPAVQIPSSSTSSPVGQPTSTSTTSTSTTSSPPVQPTTPSGCTAERWAQCGGNGWSGCTTCVAGSTCTKINDWYHQCL

SEQ ID NO: 46288 - protein, 305 aa, Humicola insolens
MRSSPLLRSAVVAALPVLALAADGKSTRYWDCCKPSCGWAKKAPVNQPVFSCNANFQRLTDFDAKSGCEPGGVAYSCADQTPWAVNDDFAFGFAATSIAGSNEAGWCCACYELTFTSGPVAGKKMVVQSTSTGGDLGSNHFDLNIPGGGVGIFDGCTRQFGGLPGQRYGGISSRNECDRFPDALKPGCYWRFDWFKNADNPSFSFRQVQCPAELVARTGCRRNDDGNFPAVQIPSSSTSSPVGQPTSTSTTSTSTTSSPPVQPTTPSGCTAERWAQCGGNGWSGCTTCVAGSTCTKINDWYHQCL

SEQ ID NO: 46289 - protein, 305 aa, Humicola insolens
MRSSPLLRSAVVAALPVLALAADGKSTRYWDCCKPSCGWAKKAPVNQPVFSCNANFQRLTDFDAKSGCEPGGVAYSCADQTPWAVNDDFAFGFAATSIAGSNEAGWCCACYEITFTSGPVAGKKMVVQSTSTGGDLGSNHFDLNIPGGGVGIFDGCTPQFGGLPGQRYGGISSRNECDRFPDALKPGCYWRFDWFKNADNPSFSFRQVQCPAELVARTGCRRNDDGNFPAVQIPSSSTSSPVGQPTSTSTTSTSTTSSPPVQPTTPSGCTAERWAQCGGNGWSGCTTCVAGSTCTKINDWYHQCL

SEQ ID NO: 46290 - protein, 285 aa, unidentified
SADGKSTRYWDCCKPSCGWAKKAPVNQPVFSCNANFQRLTDFDAKSGCEPGGVAYSCADQTPWAVNDDFAFGFAATSIAGSNEAGWCCACYELTFTSGPVAGKKMVVQSTSTGGDLGSNHFDLNIPGGGVGIFDGCTPQFGGLPGQRYGGISSRNECDRFPDALKPGCYWRFDWFKNADNPSFSFRQVQCPAELVARTGCRRNDDGNFPAVQIPSSSTSSPVGQPTSTSTTSTSTTSSPPVQPTTPSGCTAERWAQCGGNGWSGCTTCVAGSTCTKINDWYHQCL

SEQ ID NO: 46291 - protein, 229 aa, Humicola insolens
ADGRSTRYWDCCKPSCGWAKKAPVNQPVFSCNANFQRITDFDAKSGCEPGGVAYSCADQTPWAVNDDFALGFAATSIAGSNEAGWCCACYELTFTSGPVAGKKMVVQSTSTGGDLGSNHFDLNIPGGGVGIFDGCTPQFGGLPGQRYGGISSRNECDRFPDALKPGCYWRFDWFKNADNPSFSFRQVQCPAELVARTGCRRNDDGNFPAVQIPSSSTSSSPPVQPTTPS

SEQ ID NO: 46292 - protein, 284 aa, Synthetic construct
ADGKSTRYWDCCKPSCGWAKKAPVNQPVFSCNANFQRLTDFDAKSGCEPGGVAYKCADQTPWAVNDDFAFGFAATSIAGSNEAGWCCACYELTFTSGPVAGKKMVVQSTSTGGDLGSNHFDLNIPGGGVGIFDGCTPQFGGLPGQRYGGISSRNECDRFPDALKPGCYWRFDWFKNADNPSFSFRQVQCPAELVARTGCRRNDDGNFPAVQIPSSSTSSPVGQPTSTSTTSTSTTSSPPVQPTTPSGCTAERWAQCGGNGWSGCTTCVAGSTCTKINDWYHQCL

SEQ ID NO: 46293 - protein, 284 aa, Synthetic construct
ADGKSTRYWDCCKPSCGWAKKAPVNQPVFSCNANFQRLTDFDAKSGCEPGGVAYSCADQTPWAVNDDFAFGFAATSIAGSNEAGWCCACYELTFTSGPVAGKKMVVQSTSTGGDLGSNHFDLLIPGGGVGIFDGCTPQFGGLPGQRYGGISSRNECDRFPDALKPGCYWRFDWFKNADNPSFSFRQVQCPAELVARTGCRRNDDGNFPAVQIPSSSTSSPVGQPTSTSTTSTSTTSSPPVQPTTPSGCTAERWAQCGGNGWSGCTTCVAGSTCTKINDWYHQCL

SEQ ID NO: 46294 - protein, 284 aa, Humicola insolens
ADGRSTRYWDCCKPSCGWAKKAPVNQPVFSCNANFQRITDFDAKSGCEPGGVAYSCADQTPWAVNDDFALGFAATSIAGSNEAGWCCACYELTFTSGPVAGKKMVVQSTSTGGDLGSNHFDLNIPGGGVGIFDGCTPQFGGLPGQRYGGISSRNECDRFPDALKPGCYWRFDWFKNADNPSFSFRQVQCPAELVARTGCRRNDDGNFPAVQIPSSSTSSPXXXPTSTSTTSTSTTSSPPXXPTTPSGCTAERWAQCGGNGWSGCTTCVAGSTCTKINDWYHQCL

SEQ ID NO: 46295 - protein, 284 aa, Synthetic construct
ADGKSTRYWDCCKPSCGWAKKAPVNQPVFSCNANFQRLTDFDAKSGCEPGGVAYSCADQTPWAVNDDFAFGFAATSIAGSNEAGWCCACYELTFTSGPVAGKKMVVQSTSTGGDLGSNHFDLNIPGGGVGPFDGCTPQFGGLPGQRYGGISSRNECDRFPDALKPGCYWRFDWFKNADNPSFSFRQVQCPAELVARTGCRRNDDGNFPAVQIPSSSTSSPVGQPTSTSTTSTSTTSSPPVQPTTPSGCTAERWAQCGGNGWSGCTTCVAGSTCTKINDWYHQCL

SEQ ID NO: 46296 - protein, 284 aa, Synthetic construct
ADGKSTRYWDCCKPSCGWAKKAPVNQPVFSCNANFQRLTDFDAKSGCEPGGVAYSCADQTPWAVNDDFAYGFAATSIAGSNEAGWCCACYELTFTSGPVAGKKMVVQSTSTGGDLGSNHFDLNIPGGGVGPFDGCTPQFGGLPGQRYGGISSRNECDRFPDALKPGCYWRFDWFKNADNPSFSFRQVQCPAELVARTGCRRNDDGNFPAVQIPSSSTSSPVGQPTSTSTTSTSTTSSPPVQPTTPSGCTAERWAQCGGNGWSGCTTCVAGSTCTKINDWYHQCL

SEQ ID NO: 46297 - protein, 284 aa, Synthetic construct
ADGKSTRYWDCCKPSCGWAKKAPVNQPVFSCNANFQRLTDFDAKSGCEPGGVAYKCADQTPWAVNDDFAYGFAATSIAGSNEAGWCCACYELTFTSGPVAGKKMVVQSTSTGGDLGSNHFDLNIPGGGVGIFDGCTPQFGGLPGQRYGGISSRNECDRFPDALKPGCYWRFDWFKNADNPSFSFRQVQCPAELVARTGCRRNDDGNFPAVQIPSSSTSSPVGQPTSTSTTSTSTTSSPPVQPTTPSGCTAERWAQCGGNGWSGCTTCVAGSTCTKINDWYHQCL

SEQ ID NO: 46298 - protein, 284 aa, Synthetic construct
ADGKSTRYWDCCKPSCGWAKKAPVNQPVFSCNANFQRLTDFDAKSGCEPGGVAYSCADQTPWAVNDDFAYGFAATSIAGSNEAGWCCACYELTFTSGPVAGKKMVVQSTSTGGDLGSNHFDLLIPGGGVGIFDGCTPQFGGLPGQRYGGISSRNECDRFPDALKPGCYWRFDWFKNADNPSFSFRQVQCPAELVARTGCRRNDDGNFPAVQIPSSSTSSPVGQPTSTSTTSTSTTSSPPVQPTTPSGCTAERWAQCGGNGWSGCTTCVAGSTCTKINDWYHQCL

SEQ ID NO: 46299 - protein, 284 aa, Synthetic construct
ADGKSTRYWDCCKPSCGWAKKAPVNQPVFSCNANFQRLTDFDAKSGCEPGGVAYLCADQTPWAVNDDFAFGFAATSIAGSNEAGWCCACYELTFTSGPVAGKKMVVQSTSTGGDLGSNHFDLNIPGGGVGIFDGCTPQFGGLPGQRYGGISSRNECDRFPDALKPGCYWRFDWFKNADNPSFSFRQVQCPAELVARTGCRRNDDGNFPAVQIPSSSTSSPVGQPTSTSTTSTSTTSSPPVQPTTPSGCTAERWAQCGGNGWSGCTTCVAGSTCTKINDWYHQCL

SEQ ID NO: 46300 - protein, 284 aa, Synthetic construct
ADGKSTRYWDCCKPSCGWAKKAPVNQPVFSCNANFQRLTDFDAKSGCNPGGVAYSCADQTPWAVNDDFAFGFAATSIAGSNEAGWCCACYELTFTSGPVAGKKMVVQSTSTGGDLGSNHFDLNIPGGGVGIFDGCTPQFGGLPGQRYGGISSRNECDRFPDALKPGCYWRFDWFKNADNPSFSFRQVQCPAELVARTGCRRNDDGNFPAVQIPSSSTSSPVGQPTSTSTTSTSTTSSPPVQPTTPSGCTAERWAQCGGNGWSGCTTCVAGSTCTKINDWYHQCL

SEQ ID NO: 46301 - protein, 284 aa, Synthetic construct
ADGKSTRYWDCCKPSCGWAKKAPVNQPVFSCNANFQRLTDFDAKSGCEPGGVAYMCADQTPWAVNDDFAYGFAATSIAGSNEAGWCCACYELTFTSGPVAGKKMVVQSTSTGGDLGSNHFDLNIPGGGVGIFDGCTPQFGGLPGQRYGGISSRNECDRFPDALKPGCYWRFDWFKNADNPSFSFRQVQCPAELVARTGCRRNDDGNFPAVQIPSSSTSSPVGQPTSTSTTSTSTTSSPPVQPTTPSGCTAERWAQCGGNGWSGCTTCVAGSTCTKINDWYHQCL

SEQ ID NO: 46302 - protein, 284 aa, Synthetic construct
ADGKSTRYWDCCKPSCGWAKKAPVNQPVFSCNANFQRLTDFDAKSGCEPGGVAYLCADQTPWAVNDDFAYGFAATSIAGSNEAGWCCACYELTFTSGPVAGKKMVVQSTSTGGDLGSNHFDLNIPGGGVGIFDGCTPQFGGLPGQRYGGISSRNECDRFPDALKPGCYWRFDWFKNADNPSFSFRQVQCPAELVARTGCRRNDDGNFPAVQIPSSSTSSPVGQPTSTSTTSTSTTSSPPVQPTTPSGCTAERWAQCGGNGWSGCTTCVAGSTCTKINDWYHQCL

SEQ ID NO: 46303 - protein, 284 aa, Synthetic construct
ADGKSTRYWDCCKPSCGWAKKAPVNQPVFSCNANFQRLTDFDAKSGCEPGGVAYSCADQTPWAVNDDFAYGFAATSIAGSNEAGWCCACYELTFTSGPVAGKKMVVQSTSTGGDLGSNHFDLFIPGGGVGIFDGCTPQFGGLPGQRYGGISSRNECDRFPDALKPGCYWRFDWFKNADNPSFSFRQVQCPAELVARTGCRRNDDGNFPAVQIPSSSTSSPVGQPTSTSTTSTSTTSSPPVQPTTPSGCTAERWAQCGGNGWSGCTTCVAGSTCTKINDWYHQCL

SEQ ID NO: 46304 - protein, 284 aa, Synthetic construct
ADGKSTRYWDCCKPSCGWAKKAPVNQPVFSCNANFQRLTDFDAKSGCEPGGVAYSCADQTPWAVNDDFAFGFAATSIAGSNEAGWCCACYELTFTSGPVAGKKMVVQSTSTGGDLGSNHFDLFIPGGGVGIFDGCTPQFGGLPGQRYGGISSRNECDRFPDALKPGCYWRFDWFKNADNPSFSFRQVQCPAELVARTGCRRNDDGNFPAVQIPSSSTSSPVGQPTSTSTTSTSTTSSPPVQPTTPSGCTAERWAQCGGNGWSGCTTCVAGSTCTKINDWYHQCL

SEQ ID NO: 46305 - protein, 284 aa, Synthetic construct
ADGKSTRYWDCCKPSCGWAKKAPVNQPVFSCNANFQRLTDFDAKSGCNPGGVAYSCADQTPWAVNDDFAYGFAATSIAGSNEAGWCCACYELTFTSGPVAGKKMVVQSTSTGGDLGSNHFDLNIPGGGVGIFDGCTPQFGGLPGQRYGGISSRNECDRFPDALKPGCYWRFDWFKNADNPSFSFRQVQCPAELVARTGCRRNDDGNFPAVQIPSSSTSSPVGQPTSTSTTSTSTTSSPPVQPTTPSGCTAERWAQCGGNGWSGCTTCVAGSTCTKINDWYHQCL

SEQ ID NO: 46306 - protein, 284 aa, Synthetic construct
ADGKSTRYWDCCKPSCGWAKKAPVNQPVFSCNANFQRLTDFDAKSGCEPGGVAYMCADQTPWAVNDDFAFGFAATSIAGSNEAGWCCACYELTFTSGPVAGKKMVVQSTSTGGDLGSNHFDLNIPGGGVGIFDGCTPQFGGLPGQRYGGISSRNECDRFPDALKPGCYWRFDWFKNADNPSFSFRQVQCPAELVARTGCRRNDDGNFPAVQIPSSSTSSPVGQPTSTSTTSTSTTSSPPVQPTTPSGCTAERWAQCGGNGWSGCTTCVAGSTCTKINDWYHQCL

SEQ ID NO: 46307 - protein, 278 aa, Thermothielavioides terrestris
ASGSGQSTRYWDCCKPSCAWPGKAAVSQPVYACDANFQRLSDFNVQSGCNGGSAYACADQTPWAVNDNLAYGFAATSIAGGSESSWCCACYALTFTSGPVAGKTMVVQSTSTGGDLGSNHFDIAMPGGGVGIFDGCSSQFGGLPGARYGGISSRDQCDSFPEPLKPGCYWRFDWFQNADNPTFTFQQVQCPAEIVARSGCKRNDDSSFPVFTPPSGGNGGTGTPTSTAPGSGQTSPGGGSGCTSQKWAQCGGIGFSGCTTCVSGTTCQKLNDYYSQCL

SEQ ID NO: 46308 - protein, 278 aa, Thermothielavioides terrestris
ASGSGQSTRYWDCCKPSCAWPGKAAVSQPVYACDANFQRLSDFNVQSGCNGGSAYACADQTPWAVNDNLAYGFAATSIAGGSESSWCCACYALTFTSGPVAGKTMVVQSTSTGGDLGSNHFDIAMPGGGVGIFNGCSSQFGGLPGSRYGGISSRDQCDSFPEPLKPGCYWRFDWFQNADNPTFTFQQVQCPAEIVARSGCKRNDDSSFPVFTPPSGGNGGTGTPTSTAPGSGQTSPGGGSGCTSQKWAQCGGIGFSGCTTCVSGTTCQKLNDYYSQCL

SEQ ID NO: 46309 - protein, 278 aa, Thermothielavioides terrestris
ASGSGQSTRYWDCCKPSCAWPGKAAVSQPVYSCDANFQRLSDFNVQSGCNGGSAYACADQTPWAVNDNLAYGFAATSIAGGSESSWCCACYALTFTSGPVAGKTMVVQSTSTGGDLGSNHFDIAMPGGGVGIFDGCSSQFGGLPGARYGGISSRDQCDSFPAPLKPGCYWRFDWFQNADNPTFTFQQVQCPAEIVARSGCKRNDDSSFPVFTPPSGGNGGTGTPTSTAPGSGQTSPGGGSGCTSQKWAQCGGIGFSGCTTCVSGTTCQKLNDYYSQCL

SEQ ID NO: 46310 - protein, 305 aa, Humicola insolens
MRSSPLLRSAVVAALPVLALAADGKSTRYWDCCKPSCGWAKKAPVNQPVFSCNANFQRLTDFDAKSGCEPGGVACSCADQTPWAVNDDFAFGFAATSIAGSNEAGWCCACYELTFTSGPVAGKKMVVQSTSTGGDLGSNHFDLNIPGGGVGIFDGCTPQFGGLPGQRYGGISSRNECDRFPDALCPGCYWRFDWFKNADNPSFSFRQVQCPAELVARTGCRRNDDGNFPAVQIPSSSTSSPVGQPTSTSTTSTSTTSSPPVQPTTPSGCTAERWAQCGGNGWSGCTTCVAGSTCTKINDWYHQCL

SEQ ID NO: 46311 - protein, 305 aa, [Humicola] grisea var. thermoidea
MRSSPLLPSDVVAALPVLALAADGKSTRYWDCCKPSCGWAKKAPVNQPVFSCNANFQRLTDFDAKSGCEPGGVAYSCADQTPWAVNDDFAFGFAATSIAGSNEAGWCCACYELTFTSGPVAGKKMVVQSTSTGGDLGSNHFDLNIPGGGVGIFDGCTPQFGGLPGQRYGGISSRNECDRFPDALKPGCYWRFDWFKNADNPSFSFRQVQCPAELVARTGCRRNDDGNFPAVQIPSSSTSSPVGQPTSTSTTSTSTTSSPPVQPTTPSGCTAERWAQCGGNGWSGCTTCVAGSTCTKINDWYHQCL

SEQ ID NO: 46312 - protein, 305 aa, Humicola insolens
MRSSPLLRSAVVAALPVLALAADGKSTRYWDCCKPSCGWAKKAPVNQPVFSCNANCQRLTDFDAKSGCEPGGVAYSCADQTPWAVNDDFAFGFAATSIAGSNEAGWCCACYELTFTSGPVAGKKMVVQSTSTGGDLGSNHFDLNIPGGGVGIFDGCTPQFGGLPGQRYGGISSRNECDRFPDALKPGCYWRFDWFKNADNPCFSFRQVQCPAELVARTGCRRNDDGNFPAVQIPSSSTSSPVGQPTSTSTTSTSTTSSPPVQPTTPSGCTAERWAQCGGNGWSGCTTCVAGSTCTKINDWYHQCL

SEQ ID NO: 46313 - protein, 305 aa, Humicola insolens
MRSSPLLRSAVVAALPVLALAADGKSTRYWDCCKPSCGWAKKAPVNQPVFSCNANFQRLTDFDAKSGCEPGGVAYSCADQTPWAVNDDFAFGFAATSIAGSNEAGWCCACYELTFTSGPIAGKKMVVQSTSTGGDLGSNHFDLNIPGGGVGIFDGCTPQFGGLPGQRYGGISSRNECDRFPDALKPGCYWRFDWFKNADNPSFSFRQVQCPAELVARTGCRRNDDGNFPAVQIPSSSTSSPVGQPTSTSTTSTSTTSSPPVQDTTPSGCTAERWAQCGGNGWSGCTTCVAGSTCTKINDWYHQCL

SEQ ID NO: 46314 - protein, 305 aa, Humicola insolens
MRSSPLLRSAVVAALPVLALAADGKSTRYWDCCKPSCGWAKKAPVNQPVFSCNANFQRLTDFDAKSGCEPGGVAYSCADQTPWAVNDDFAFGFAATSCAGSNEAGWCCACYELTFTSGPVAGKKMVVQSTSTGCDLGSNHFDLNIPGGGVGIFDGCTPQFGGLPGQRYGGISSRNECDRFPDALKPGCYWRFDWFKNADNPSFSFRQVQCPAELVARTGCRRNDDGNFPAVQIPSSSTSSPVGQPTSTSTTSTSTTSSPPVQPTTPSGCTAERWAQCGGNGWSGCTTCVAGSTCTKINDWYHQCL

SEQ ID NO: 46315 - protein, 284 aa, Synthetic construct
ADGKSTRYWDCCKPSCGWAKKAPVNQPVFSCNANFQRLTDFDAKSGCNPGGVAYSCADQTPWAVNDDFAYGFAATSIAGSNEAGWCCACYELTFTSGPVAGKKMVVQSTSTGGDLGSNHFDLLIPGGGVGIFDGCTPQFGGLPGQRYGGISSRNECDRFPDALKPGCYWRFDWFKNADNPSFSFRQVQCPAELVARTGCRRNDDGNFPAVQIPSSSTSSPVGQPTSTSTTSTSTTSSPPVQPTTPSGCTAERWAQCGGNGWSGCTTCVAGSTCTKINDWYHQCL

SEQ ID NO: 46316 - protein, 284 aa, Synthetic construct
ADGKSTRYWDCCKPSCGWAKKAPVNQPVFSCNANFQRLTDFDAKSGCEPGGVAYLCADQTPWAVNDDFAFGFAATSIAGSNEAGWCCACYELTFTSGPVAGKKMVVQSTSTGGDLGSNHFDLLIPGGGVGIFDGCTPQFGGLPGQRYGGISSRNECDRFPDALKPGCYWRFDWFKNADNPSFSFRQVQCPAELVARTGCRRNDDGNFPAVQIPSSSTSSPVGQPTSTSTTSTSTTSSPPVQPTTPSGCTAERWAQCGGNGWSGCTTCVAGSTCTKINDWYHQCL

SEQ ID NO: 46317 - protein, 284 aa, Synthetic construct
ADGKSTRYWDCCKPSCGWAKKAPVNQPVFSCNANFQRLTDFDAKSGCEPGGVAYKCADQTPWAVNDDFAYGFAATSIAGSNEAGWCCACYELTFTSGPVAGKKMVVQSTSTGGDLGSNHFDLNIPGGGVGPFDGCTPQFGGLPGQRYGGISSRNECDRFPDALKPGCYWRFDWFKNADNPSFSFRQVQCPAELVARTGCRRNDDGNFPAVQIPSSSTSSPVGQPTSTSTTSTSTTSSPPVQPTTPSGCTAERWAQCGGNGWSGCTTCVAGSTCTKINDWYHQCL

SEQ ID NO: 46318 - protein, 284 aa, Synthetic construct
ADGKSTRYWDCCKPSCGWAKKAPVNQPVFSCNANFQRLTDFDAKSGCEPGGVAYSCADQTPWAVNDDFAFGFAATSIAGSNEAGWCCACYELTFTSGPVAGKKMVVQSTSTGGDLGSNHFDLFIPGGGVGPFDGCTPQFGGLPGQRYGGISSRNECDRFPDALKPGCYWRFDWFKNADNPSFSFRQVQCPAELVARTGCRRNDDGNFPAVQIPSSSTSSPVGQPTSTSTTSTSTTSSPPVQPTTPSGCTAERWAQCGGNGWSGCTTCVAGSTCTKINDWYHQCL

SEQ ID NO: 46319 - protein, 284 aa, Synthetic construct
ADGKSTRYWDCCKPSCGWAKKAPVNQPVFSCNANFQRLTDFDAKSGCEPGGVAYKCADQTPWAVNDDFAFGFAATSIAGSNEAGWCCACYELTFTSGPVAGKKMVVQSTSTGGDLGSNHFDLLIPGGGVGIFDGCTPQFGGLPGQRYGGISSRNECDRFPDALKPGCYWRFDWFKNADNPSFSFRQVQCPAELVARTGCRRNDDGNFPAVQIPSSSTSSPVGQPTSTSTTSTSTTSSPPVQPTTPSGCTAERWAQCGGNGWSGCTTCVAGSTCTKINDWYHQCL

SEQ ID NO: 46320 - protein, 284 aa, Humicola insolens
ADGRSTRXXDCCKPSCGXAKKAPVNQPVFSCNANFQRITDFDAKSGCEPGGVAYSCADQTPXAVNDDFALGFAATSIAGSNEAGWCCACYELTFTSGPVAGKKXVVQSTSTGGDLGSNHFDLNIPGGGVGIFDGCTPQFGGLPGQRXGGISSRNECDRFPDALKPGCYWRFDWFKNADNPSFSFRQVQCPAELVARTGCRRNDDGNFPAVQIPSSSTSSPVNQPTSTSTTSTSTTSSPPVQPTTPSGCTAERWAQCGGNGWSGCTTCVAGSTCTKINDWYHQCL

SEQ ID NO: 46321 - protein, 284 aa, Synthetic construct
ADGKSTRYWDCCKPSCGWAKKAPVNQPVFSCNANFQRLTDFDAKSGCNPGGVAYSCADQTPWAVNDDFAYGFAATSIAGSNEAGWCCACYELTFTSGPVAGKKMVVQSTSTGGDLGSNHFDLFIPGGGVGIFDGCTPQFGGLPGQRYGGISSRNECDRFPDALKPGCYWRFDWFKNADNPSFSFRQVQCPAELVARTGCRRNDDGNFPAVQIPSSSTSSPVGQPTSTSTTSTSTTSSPPVQPTTPSGCTAERWAQCGGNGWSGCTTCVAGSTCTKINDWYHQCL

SEQ ID NO: 46322 - protein, 284 aa, Synthetic construct
ADGKSTRYWDCCKPSCGWAKKAPVNQPVFSCNANFQRLTDFDAKSGCEPGGVAYSCADQTPWAVNDDFAFGFAATSIAGSNEAGWCCACYELTFTSGPVAGKKMVVQSTSTGGDLGSNHFDLLIPGGGVGPFDGCTPQFGGLPGQRYGGISSRNECDRFPDALKPGCYWRFDWFKNADNPSFSFRQVQCPAELVARTGCRRNDDGNFPAVQIPSSSTSSPVGQPTSTSTTSTSTTSSPPVQPTTPSGCTAERWAQCGGNGWSGCTTCVAGSTCTKINDWYHQCL

SEQ ID NO: 46323 - protein, 284 aa, Synthetic construct
ADGKSTRYWDCCKPSCGWAKKAPVNQPVFSCNANFQRLTDFDAKSGCEPGGVAYLCADQTPWAVNDDFAYGFAATSIAGSNEAGWCCACYELTFTSGPVAGKKMVVQSTSTGGDLGSNHFDLNIPGGGVGPFDGCTPQFGGLPGQRYGGISSRNECDRFPDALKPGCYWRFDWFKNADNPSFSFRQVQCPAELVARTGCRRNDDGNFPAVQIPSSSTSSPVGQPTSTSTTSTSTTSSPPVQPTTPSGCTAERWAQCGGNGWSGCTTCVAGSTCTKINDWYHQCL

SEQ ID NO: 46324 - protein, 284 aa, Synthetic construct
ADGKSTRYWDCCKPSCGWAKKAPVNQPVFSCNANFQRLTDFDAKSGCNPGGVAYMCADQTPWAVNDDFAFGFAATSIAGSNEAGWCCACYELTFTSGPVAGKKMVVQSTSTGGDLGSNHFDLNIPGGGVGIFDGCTPQFGGLPGQRYGGISSRNECDRFPDALKPGCYWRFDWFKNADNPSFSFRQVQCPAELVARTGCRRNDDGNFPAVQIPSSSTSSPVGQPTSTSTTSTSTTSSPPVQPTTPSGCTAERWAQCGGNGWSGCTTCVAGSTCTKINDWYHQCL

SEQ ID NO: 46325 - protein, 284 aa, Synthetic construct
ADGKSTRYWDCCKPSCGWAKKAPVNQPVFSCNANFQRLTDFDAKSGCEPGGVAYMCADQTPWAVNDDFAYGFAATSIAGSNEAGWCCACYELTFTSGPVAGKKMVVQSTSTGGDLGSNHFDLLIPGGGVGIFDGCTPQFGGLPGQRYGGISSRNECDRFPDALKPGCYWRFDWFKNADNPSFSFRQVQCPAELVARTGCRRNDDGNFPAVQIPSSSTSSPVGQPTSTSTTSTSTTSSPPVQPTTPSGCTAERWAQCGGNGWSGCTTCVAGSTCTKINDWYHQCL

SEQ ID NO: 46326 - protein, 284 aa, Synthetic construct
ADGKSTRYWDCCKPSCGWAKKAPVNQPVFSCNANFQRLTDFDAKSGCEPGGVAYLCADQTPWAVNDDFAYGFAATSIAGSNEAGWCCACYELTFTSGPVAGKKMVVQSTSTGGDLGSNHFDLFIPGGGVGIFDGCTPQFGGLPGQRYGGISSRNECDRFPDALKPGCYWRFDWFKNADNPSFSFRQVQCPAELVARTGCRRNDDGNFPAVQIPSSSTSSPVGQPTSTSTTSTSTTSSPPVQPTTPSGCTAERWAQCGGNGWSGCTTCVAGSTCTKINDWYHQCL

SEQ ID NO: 46327 - protein, 284 aa, Synthetic construct
ADGKSTRYWDCCKPSCGWAKKAPVNQPVFSCNANFQRLTDFDAKSGCEPGGVAYSCADQTPWAVNDDFAYGFAATSIAGSNEAGWCCACYELTFTSGPVAGKKMVVQSTSTGGDLGSNHFDLFIPGGGVGPFDGCTPQFGGLPGQRYGGISSRNECDRFPDALKPGCYWRFDWFKNADNPSFSFRQVQCPAELVARTGCRRNDDGNFPAVQIPSSSTSSPVGQPTSTSTTSTSTTSSPPVQPTTPSGCTAERWAQCGGNGWSGCTTCVAGSTCTKINDWYHQCL

SEQ ID NO: 46328 - protein, 284 aa, Synthetic construct
ADGKSTRYWDCCKPSCGWAKKAPVNQPVFSCNANFQRLTDFDAKSGCNPGGVAYLCADQTPWAVNDDFAFGFAATSIAGSNEAGWCCACYELTFTSGPVAGKKMVVQSTSTGGDLGSNHFDLNIPGGGVGIFDGCTPQFGGLPGQRYGGISSRNECDRFPDALKPGCYWRFDWFKNADNPSFSFRQVQCPAELVARTGCRRNDDGNFPAVQIPSSSTSSPVGQPTSTSTTSTSTTSSPPVQPTTPSGCTAERWAQCGGNGWSGCTTCVAGSTCTKINDWYHQCL

SEQ ID NO: 46329 - protein, 284 aa, Synthetic construct
ADGKSTRYWDCCKPSCGWAKKAPVNQPVFSCNANFQRLTDFDAKSGCEPGGVAYLCADQTPWAVNDDFAYGFAATSIAGSNEAGWCCACYELTFTSGPVAGKKMVVQSTSTGGDLGSNHFDLLIPGGGVGIFDGCTPQFGGLPGQRYGGISSRNECDRFPDALKPGCYWRFDWFKNADNPSFSFRQVQCPAELVARTGCRRNDDGNFPAVQIPSSSTSSPVGQPTSTSTTSTSTTSSPPVQPTTPSGCTAERWAQCGGNGWSGCTTCVAGSTCTKINDWYHQCL

SEQ ID NO: 46330 - protein, 284 aa, Synthetic construct
ADGKSTRYWDCCKPSCGWAKKAPVNQPVFSCNANFQRLTDFDAKSGCNPGGVAYKCADQTPWAVNDDFAYGFAATSIAGSNEAGWCCACYELTFTSGPVAGKKMVVQSTSTGGDLGSNHFDLNIPGGGVGIFDGCTPQFGGLPGQRYGGISSRNECDRFPDALKPGCYWRFDWFKNADNPSFSFRQVQCPAELVARTGCRRNDDGNFPAVQIPSSSTSSPVGQPTSTSTTSTSTTSSPPVQPTTPSGCTAERWAQCGGNGWSGCTTCVAGSTCTKINDWYHQCL

SEQ ID NO: 46331 - protein, 284 aa, Synthetic construct
ADGKSTRYWDCCKPSCGWAKKAPVNQPVFSCNANFQRLTDFDAKSGCNPGGVAYSCADQTPWAVNDDFAFGFAATSIAGSNEAGWCCACYELTFTSGPVAGKKMVVQSTSTGGDLGSNHFDLLIPGGGVGIFDGCTPQFGGLPGQRYGGISSRNECDRFPDALKPGCYWRFDWFKNADNPSFSFRQVQCPAELVARTGCRRNDDGNFPAVQIPSSSTSSPVGQPTSTSTTSTSTTSSPPVQPTTPSGCTAERWAQCGGNGWSGCTTCVAGSTCTKINDWYHQCL

SEQ ID NO: 46332 - protein, 284 aa, Synthetic construct
ADGKSTRYWDCCKPSCGWAKKAPVNQPVFSCNANFQRLTDFDAKSGCEPGGVAYSCADQTPWAVNDDFAYGFAATSIAGSNEAGWCCACYELTFTSGPVAGKKMVVQSTSTGGDLGSNHFDLLIPGGGVGPFDGCTPQFGGLPGQRYGGISSRNECDRFPDALKPGCYWRFDWFKNADNPSFSFRQVQCPAELVARTGCRRNDDGNFPAVQIPSSSTSSPVGQPTSTSTTSTSTTSSPPVQPTTPSGCTAERWAQCGGNGWSGCTTCVAGSTCTKINDWYHQCL

SEQ ID NO: 46333 - protein, 284 aa, Synthetic construct
ADGKSTRYWDCCKPSCGWAKKAPVNQPVFSCNANFQRLTDFDAKSGCNPGGVAYSCADQTPWAVNDDFAYGFAATSIAGSNEAGWCCACYELTFTSGPVAGKKMVVQSTSTGGDLGSNHFDLNIPGGGVGPFDGCTPQFGGLPGQRYGGISSRNECDRFPDALKPGCYWRFDWFKNADNPSFSFRQVQCPAELVARTGCRRNDDGNFPAVQIPSSSTSSPVGQPTSTSTTSTSTTSSPPVQPTTPSGCTAERWAQCGGNGWSGCTTCVAGSTCTKINDWYHQCL

SEQ ID NO: 46334 - protein, 284 aa, Synthetic construct
ADGKSTRYWDCCKPSCGWAKKAPVNQPVFSCNANFQRLTDFDAKSGCNPGGVAYMCADQTPWAVNDDFAYGFAATSIAGSNEAGWCCACYELTFTSGPVAGKKMVVQSTSTGGDLGSNHFDLNIPGGGVGIFDGCTPQFGGLPGQRYGGISSRNECDRFPDALKPGCYWRFDWFKNADNPSFSFRQVQCPAELVARTGCRRNDDGNFPAVQIPSSSTSSPVGQPTSTSTTSTSTTSSPPVQPTTPSGCTAERWAQCGGNGWSGCTTCVAGSTCTKINDWYHQCL

SEQ ID NO: 46335 - protein, 284 aa, Synthetic construct
ADGKSTRYWDCCKPSCGWAKKAPVNQPVFSCNANFQRLTDFDAKSGCEPGGVAYMCADQTPWAVNDDFAYGFAATSIAGSNEAGWCCACYELTFTSGPVAGKKMVVQSTSTGGDLGSNHFDLFIPGGGVGIFDGCTPQFGGLPGQRYGGISSRNECDRFPDALKPGCYWRFDWFKNADNPSFSFRQVQCPAELVARTGCRRNDDGNFPAVQIPSSSTSSPVGQPTSTSTTSTSTTSSPPVQPTTPSGCTAERWAQCGGNGWSGCTTCVAGSTCTKINDWYHQCL

SEQ ID NO: 46336 - protein, 284 aa, Synthetic construct
ADGKSTRYWDCCKPSCGWAKKAPVNQPVFSCNANFQRLTDFDAKSGCEPGGVAYMCADQTPWAVNDDFAFGFAATSIAGSNEAGWCCACYELTFTSGPVAGKKMVVQSTSTGGDLGSNHFDLLIPGGGVGIFDGCTPQFGGLPGQRYGGISSRNECDRFPDALKPGCYWRFDWFKNADNPSFSFRQVQCPAELVARTGCRRNDDGNFPAVQIPSSSTSSPVGQPTSTSTTSTSTTSSPPVQPTTPSGCTAERWAQCGGNGWSGCTTCVAGSTCTKINDWYHQCL

SEQ ID NO: 46337 - protein, 284 aa, Synthetic construct
ADGKSTRYWDCCKPSCGWAKKAPVNQPVFSCNANFQRLTDFDAKSGCEPGGVAYKCADQTPWAVNDDFAYGFAATSIAGSNEAGWCCACYELTFTSGPVAGKKMVVQSTSTGGDLGSNHFDLLIPGGGVGIFDGCTPQFGGLPGQRYGGISSRNECDRFPDALKPGCYWRFDWFKNADNPSFSFRQVQCPAELVARTGCRRNDDGNFPAVQIPSSSTSSPVGQPTSTSTTSTSTTSSPPVQPTTPSGCTAERWAQCGGNGWSGCTTCVAGSTCTKINDWYHQCL

SEQ ID NO: 46338 - protein, 284 aa, Synthetic construct
ADGKSTRYWDCCKPSCGWAKKAPVNQPVFSCNANFQRLTDFDAKSGCNPGGVAYKCADQTPWAVNDDFAFGFAATSIAGSNEAGWCCACYELTFTSGPVAGKKMVVQSTSTGGDLGSNHFDLNIPGGGVGIFDGCTPQFGGLPGQRYGGISSRNECDRFPDALKPGCYWRFDWFKNADNPSFSFRQVQCPAELVARTGCRRNDDGNFPAVQIPSSSTSSPVGQPTSTSTTSTSTTSSPPVQPTTPSGCTAERWAQCGGNGWSGCTTCVAGSTCTKINDWYHQCL

SEQ ID NO: 46339 - protein, 284 aa, Synthetic construct
ADGKSTRYWDCCKPSCGWAKKAPVNQPVFSCNANFQRLTDFDAKSGCEPGGVAYKCADQTPWAVNDDFAFGFAATSIAGSNEAGWCCACYELTFTSGPVAGKKMVVQSTSTGGDLGSNHFDLNIPGGGVGPFDGCTPQFGGLPGQRYGGISSRNECDRFPDALKPGCYWRFDWFKNADNPSFSFRQVQCPAELVARTGCRRNDDGNFPAVQIPSSSTSSPVGQPTSTSTTSTSTTSSPPVQPTTPSGCTAERWAQCGGNGWSGCTTCVAGSTCTKINDWYHQCL

SEQ ID NO: 46340 - protein, 284 aa, Synthetic construct
ADGKSTRYWDCCKPSCGWAKKAPVNQPVFSCNANFQRLTDFDAKSGCEPGGVAYMCADQTPWAVNDDFAFGFAATSIAGSNEAGWCCACYELTFTSGPVAGKKMVVQSTSTGGDLGSNHFDLFIPGGGVGIFDGCTPQFGGLPGQRYGGISSRNECDRFPDALKPGCYWRFDWFKNADNPSFSFRQVQCPAELVARTGCRRNDDGNFPAVQIPSSSTSSPVGQPTSTSTTSTSTTSSPPVQPTTPSGCTAERWAQCGGNGWSGCTTCVAGSTCTKINDWYHQCL

SEQ ID NO: 46341 - protein, 284 aa, Synthetic construct
ADGKSTRYWDCCKPSCGWAKKAPVNQPVFSCNANFQRLTDFDAKSGCNPGGVAYLCADQTPWAVNDDFAYGFAATSIAGSNEAGWCCACYELTFTSGPVAGKKMVVQSTSTGGDLGSNHFDLNIPGGGVGIFDGCTPQFGGLPGQRYGGISSRNECDRFPDALKPGCYWRFDWFKNADNPSFSFRQVQCPAELVARTGCRRNDDGNFPAVQIPSSSTSSPVGQPTSTSTTSTSTTSSPPVQPTTPSGCTAERWAQCGGNGWSGCTTCVAGSTCTKINDWYHQCL

SEQ ID NO: 46342 - protein, 284 aa, Synthetic construct
ADGKSTRYWDCCKPSCGWAKKAPVNQPVFSCNANFQRLTDFDAKSGCEPGGVAYLCADQTPWAVNDDFAFGFAATSIAGSNEAGWCCACYELTFTSGPVAGKKMVVQSTSTGGDLGSNHFDLFIPGGGVGIFDGCTPQFGGLPGQRYGGISSRNECDRFPDALKPGCYWRFDWFKNADNPSFSFRQVQCPAELVARTGCRRNDDGNFPAVQIPSSSTSSPVGQPTSTSTTSTSTTSSPPVQPTTPSGCTAERWAQCGGNGWSGCTTCVAGSTCTKINDWYHQCL

SEQ ID NO: 46343 - protein, 284 aa, Synthetic construct
ADGKSTRYWDCCKPSCGWAKKAPVNQPVFSCNANFQRLTDFDAKSGCEPGGVAYMCADQTPWAVNDDFAYGFAATSIAGSNEAGWCCACYELTFTSGPVAGKKMVVQSTSTGGDLGSNHFDLNIPGGGVGPFDGCTPQFGGLPGQRYGGISSRNECDRFPDALKPGCYWRFDWFKNADNPSFSFRQVQCPAELVARTGCRRNDDGNFPAVQIPSSSTSSPVGQPTSTSTTSTSTTSSPPVQPTTPSGCTAERWAQCGGNGWSGCTTCVAGSTCTKINDWYHQCL

SEQ ID NO: 46344 - protein, 284 aa, Synthetic construct
ADGKSTRYWDCCKPSCGWAKKAPVNQPVFSCNANFQRLTDFDAKSGCEPGGVAYKCADQTPWAVNDDFAYGFAATSIAGSNEAGWCCACYELTFTSGPVAGKKMVVQSTSTGGDLGSNHFDLFIPGGGVGIFDGCTPQFGGLPGQRYGGISSRNECDRFPDALKPGCYWRFDWFKNADNPSFSFRQVQCPAELVARTGCRRNDDGNFPAVQIPSSSTSSPVGQPTSTSTTSTSTTSSPPVQPTTPSGCTAERWAQCGGNGWSGCTTCVAGSTCTKINDWYHQCL

SEQ ID NO: 46345 - protein, 284 aa, Synthetic construct
ADGKSTRYWDCCKPSCGWAKKAPVNQPVFSCNANFQRLTDFDAKSGCEPGGVAYKCADQTPWAVNDDFAFGFAATSIAGSNEAGWCCACYELTFTSGPVAGKKMVVQSTSTGGDLGSNHFDLFIPGGGVGIFDGCTPQFGGLPGQRYGGISSRNECDRFPDALKPGCYWRFDWFKNADNPSFSFRQVQCPAELVARTGCRRNDDGNFPAVQIPSSSTSSPVGQPTSTSTTSTSTTSSPPVQPTTPSGCTAERWAQCGGNGWSGCTTCVAGSTCTKINDWYHQCL

SEQ ID NO: 46346 - protein, 284 aa, Synthetic construct
ADGKSTRYWDCCKPSCGWAKKAPVNQPVFSCNANFQRLTDFDAKSGCNPGGVAYSCADQTPWAVNDDFAFGFAATSIAGSNEAGWCCACYELTFTSGPVAGKKMVVQSTSTGGDLGSNHFDLFIPGGGVGIFDGCTPQFGGLPGQRYGGISSRNECDRFPDALKPGCYWRFDWFKNADNPSFSFRQVQCPAELVARTGCRRNDDGNFPAVQIPSSSTSSPVGQPTSTSTTSTSTTSSPPVQPTTPSGCTAERWAQCGGNGWSGCTTCVAGSTCTKINDWYHQCL

SEQ ID NO: 46347 - protein, 284 aa, Synthetic construct
ADGKSTRYWDCCKPSCGWAKKAPVNQPVFSCNANFQRLTDFDAKSGCEPGGVAYMCADQTPWAVNDDFAFGFAATSIAGSNEAGWCCACYELTFTSGPVAGKKMVVQSTSTGGDLGSNHFDLNIPGGGVGPFDGCTPQFGGLPGQRYGGISSRNECDRFPDALKPGCYWRFDWFKNADNPSFSFRQVQCPAELVARTGCRRNDDGNFPAVQIPSSSTSSPVGQPTSTSTTSTSTTSSPPVQPTTPSGCTAERWAQCGGNGWSGCTTCVAGSTCTKINDWYHQCL

SEQ ID NO: 46348 - protein, 284 aa, Synthetic construct
ADGKSTRYWDCCKPSCGWAKKAPVNQPVFSCNANFQRLTDFDAKSGCNPGGVAYSCADQTPWAVNDDFAFGFAATSIAGSNEAGWCCACYELTFTSGPVAGKKMVVQSTSTGGDLGSNHFDLNIPGGGVGPFDGCTPQFGGLPGQRYGGISSRNECDRFPDALKPGCYWRFDWFKNADNPSFSFRQVQCPAELVARTGCRRNDDGNFPAVQIPSSSTSSPVGQPTSTSTTSTSTTSSPPVQPTTPSGCTAERWAQCGGNGWSGCTTCVAGSTCTKINDWYHQCL

SEQ ID NO: 46349 - protein, 284 aa, Synthetic construct
ADGKSTRYWDCCKPSCGWAKKAPVNQPVFSCNANFQRLTDFDAKSGCEPGGVAYLCADQTPWAVNDDFAFGFAATSIAGSNEAGWCCACYELTFTSGPVAGKKMVVQSTSTGGDLGSNHFDLNIPGGGVGPFDGCTPQFGGLPGQRYGGISSRNECDRFPDALKPGCYWRFDWFKNADNPSFSFRQVQCPAELVARTGCRRNDDGNFPAVQIPSSSTSSPVGQPTSTSTTSTSTTSSPPVQPTTPSGCTAERWAQCGGNGWSGCTTCVAGSTCTKINDWYHQCL

SEQ ID NO: 46350 - protein, 278 aa, Thermothielavioides terrestris
ASGSGQSTRYWDCCKPSCAWPGKAAVSQPVYACDANFQRLSDFNVQSGCNGGSAYACADQTPWAVNDNLAYGFAATSIAGGSESSWCCACYALTFTSGPVAGKTMVVQSTSTGGDLGSNHFDIAMPGGGVGIFDGCSSQFGGLPGDRYGGISSRDQCDSFPAPLKPGCYWRFDWFQNADNPTVTFQQVQCPAEIVARSGCKRNDDSSFPVFTPPSGGNGGTGTPTSTAPGSGQTSPGGGSGCTSQKWAQCGGIGFSGCTTCVSGTTCQKLNDYYSQCL

SEQ ID NO: 46351 - protein, 278 aa, Thermothielavioides terrestris
ASGSGQSTRYWDCCKPSCAWPGKAAVSQPVYSCDANFQRLSDFNVQSGCNGGSAYACADQTPWAVNDNLAYGFAATSIAGGSESSWCCACYALTFTSGPVAGKTMVVQSTSTGGDLGSNHFDIAMPGGGVGIFDGCSSQFGGLPGARYGGISSRDQCDSFPAPLKPGCYWRFDWFQNADNPTFTFQQVQCPAEIVARSGCRRNDDSSFPVFTPPSGGNGGTGTPTSTAPGSGQTSPGGGSGCTSQKWAQCGGIGFSGCTTCVSGTTCQKLNDYYSQCL

SEQ ID NO: 46352 - protein, 278 aa, Thermothielavioides terrestris
ASGSGQSTRYWDCCKPSCAWPGKAAVSQPVYSCDANFQRLSDFNVQSGCNGGSAYACADQTPWAVNDNLAYGFAATSIAGGSESSWCCACYALTFTSGPVAGKTMVVQSTSTGGDLGSNHFDIAMPGGGVGIFDGCSSQFGGLPGDRYGGISSRDQCDSFPAPLKPGCYWRFDWFQNADNPTFTFQQVQCPAEIVARSGCKRNDDSSFPVFTPPSGGNGGTGTPTSTAPGSGQTSPGGGSGCTSQKWAQCGGIGFSGCTTCVSGTTCQKLNDYYSQCL

SEQ ID NO: 46353 - protein, 278 aa, Thermothielavioides terrestris
ASGSGQSTRYWDCCKPSCAWPGKAAVSQPVYSCDANFQRLSDFNVQSGCNGGSAYACADQTPWAVNDNLAYGFAATSIAGGSESSWCCACYALTFTSGPVAGKTMVVQSTSTGGDLGSNHFDIAMPGGGVGIFDGCSSQFGGLPGARYGGISSRDQCDSFPAPLKPGCYWRFDWFQNADNPTVTFQQVQCPAEIVARSGCKRNDDSSFPVFTPPSGGNGGTGTPTSTAPGSGQTSPGGGSGCTSQKWAQCGGIGFSGCTTCVSGTTCQKLNDYYSQCL

SEQ ID NO: 46354 - protein, 278 aa, Thermothielavioides terrestris
ASGSGQSTRYWDCCKPSCAWPGKAAVSQPVYACDANFQRLSDFNVQSGCNGGSAYACADQTPWAVNDNLAYGFAATSIAGGSESSWCCACYALTFTSGPVAGKTMVVQSTSTGGDLGSNHFDIAMPGGGVGIFDGCSSQFGGLPGARYGGISSRDQCDSFPEPLKPGCYWRFDWFQNADNPTVTFQQVQCPAEIVARSGCKRNDDSSFPVFTPPSGGNGGTGTPTSTAPGSGQTSPGGGSGCTSQKWAQCGGIGFSGCTTCVSGTTCQKLNDYYSQCL

SEQ ID NO: 46355 - protein, 278 aa, Thermothielavioides terrestris
ASGSGQSTRYWDCCKPSCAWPGKAAVSQPVYACDANFQRLSDFNVQSGCNGGSAYACADQTPWAVNDNLAYGFAATSIAGGSESSWCCACYALTFTSGPVAGKTMVVQSTSTGGDLGSNHFDIAMPGGGVGIFDGCSSQFGGLPGARYGGISSRDQCDSFPAPLKPGCYWRFDWFQNADNPTVTFQQVQCPAEIVARSGCRRNDDSSFPVFTPPSGGNGGTGTPTSTAPGSGQTSPGGGSGCTSQKWAQCGGIGFSGCTTCVSGTTCQKLNDYYSQCL

SEQ ID NO: 46356 - protein, 278 aa, Thermothielavioides terrestris
ASGSGQSTRYWDCCKPSCAWPGKAAVSQPVYACDANFQRLSDFNVQSGCNGGSAYACADQTPWAVNDNLAYGFAATSIAGGSESSWCCACYALTFTSGPVAGKTMVVQSTSTGGDLGSNHFDIAMPGGGVGIFDGCSSQFGGLPGDRYGGISSRDQCDSFPEPLKPGCYWRFDWFQNADNPTFTFQQVQCPAEIVARSGCKRNDDSSFPVFTPPSGGNGGTGTPTSTAPGSGQTSPGGGSGCTSQKWAQCGGIGFSGCTTCVSGTTCQKLNDYYSQCL

SEQ ID NO: 46357 - protein, 278 aa, Thermothielavioides terrestris
ASGSGQSTRYWDCCKPSCAWPGKAAVSQPVYACDANFQRLSDFNVQSGCNGGSAYACADQTPWAVNDNLAYGFAATSIAGGSESSWCCACYALTFTSGPVAGKTMVVQSTSTGGDLGSNHFDIAMPGGGVGIFDGCSSQFGGLPGDRYGGISSRDQCDSFPAPLKPGCYWRFDWFQNADNPTFTFQQVQCPAEIVARSGCRRNDDSSFPVFTPPSGGNGGTGTPTSTAPGSGQTSPGGGSGCTSQKWAQCGGIGFSGCTTCVSGTTCQKLNDYYSQCL

SEQ ID NO: 46358 - protein, 278 aa, Thermothielavioides terrestris
ASGSGQSTRYWDCCKPSCAWPGKAAVSQPVYACDANFQRLSDFNVQSGCNGGSAYACADQTPWAVNDNLAYGFAATSIAGGSESSWCCACYALTFTSGPVAGKTMVVQSTSTGGDLGSNHFDIAMPGGGVGIFDGCSSQFGGLPGARYGGISSRDQCDSFPAPLKPGCQWRFDWFQNADNPTFTFQQVQCPAEIVARSGCKRNDDSSFPVFTPPSGGPGGPGTPTSTAPGSGPTSPGGGSGCTSQKWAQCGGIGFSGCTTCVSGTTCQKLNDYYSQCL

SEQ ID NO: 46359 - protein, 278 aa, Thermothielavioides terrestris
ASGSGQSTRYWDCCKPSCAWPGKAAVSQPVYACDANFQRLSDFNVQSGCNGGSAYACADQTPWAVNDNLAYGFAATSIAGGSESSWCCACYALTFTSGPVAGKTMVVQSTSTGGDLGSNHFDIAMPGGGVGIFDGCSSQFGGLPGARYGGISSRDQCDSFPAPLKPGCQWRFDWFQNADNPTFTFQQVQCPAEIVARSGCKRNDDSSFPVFTPPPGGPGGTGTPTSTAPGSGPTSPGGGSGCTSQKWAQCGGIGFSGCTTCVSGTTCQKLNDYYSQCL

SEQ ID NO: 46360 - protein, 278 aa, Thermothielavioides terrestris
ASGSGQSTRYWDCCKPSCAWPGKAAVSQPVYSCDANFQRLSDFNVQSGCNGGSAYACADQTPWAVNDNLAYGFAATSIAGGSESSWCCACYALTFTSGPVAGKTMVVQSTSTGGDLGSNHFDIAMPGGGVGIFDGCSSQFGGLPGSRYGGISSRDQCDSFPAPLKPGCYWRFDWFQNADNPTFTFQQVQCPAEIVARSGCKRNDDSSFPVFTPPSGGNGGTGTPTSTAPGSGQTSPGGGSGCTSQKWAQCGGIGFSGCTTCVSGTTCQKLNDYYSQCL

SEQ ID NO: 46361 - protein, 262 aa, Thermothielavioides terrestris
ASGSGQSTRYWDCCKPSCAWPGKAAVSQPVYACDANFQRLSDFNVQSGCNGGSAYSCADQTPWAVNDNLAYGFAATSIAGGSESSWCCACYALTFTSGPVAGKTMVVQSTSTGGDLGSNHFDIAMPGGGVGIFNGCSSQFGGLPGAQYGGISSRDQCDSFPAPLKPGCQWRFDWFQNADNPTFTFQQVQCPAEIVARSGCKRNDDSSFPVFTPEPTPEPTPEPTGCTSQKWAQCGGIGFSGCTTCVSGTTCQKLNDYYSQCL

SEQ ID NO: 46362 - protein, 305 aa, Humicola insolens
MRSSPLLRSAVVAALPVLALAADGKSTRYWDCCKPSCLWAKKAPVNQPVFSCNANFQRLTDFDAKSGCEPGGVAYSCADQTPWAVNDDFAFGFAATSIAGSNEAGWCCACYELTFTSGPVAGKKMVVQSTSTGGDLGSNHFDLNIPGGGVGIFDGCTRQFGGLPGQRYGGISSRNECDRFPDALKPGCYWRFDWFKNADNPSFSFRQVQCPAELVARTGCRRNDDGNFPAVQIPSDSTSSPVGQPTSTSTTSTSTTSSPPVQPTTPSGCTAERWAQCGGNGWSGCTTCVAGSTCTKINDWYHQCL

SEQ ID NO: 46363 - protein, 305 aa, Humicola insolens
MRSSPLLRSAVVAALPVLALAADGKSTRYWDCCKPSCGWAGKAPVNQPVFSCNANFQRLTDFDMKSGCEPGGVAYSCADQTPWAVNDDFAFGFAATSIAGSNEAGWCCACYELTFTSGPVAGKKMVVQSTSTGGDLGSNHFDLNIPGGGVGIFDGCTPQFGGLPGQRYGGISSRNECDRFPDALKPGCYWRFDWFKNADNPSFSFRQVQCPAELVARTGCRRNDDGNFPAVQIPSDSTSSPVGQPTSTSTTSTSTTSSPPVQPTTPSGCTAERWAQCGGNGWSGCTTCVAGSTCTKINDWYHQCL

SEQ ID NO: 46364 - protein, 305 aa, Humicola insolens
MRSSPLLRSAVVAALPVLALAADGKSTRYWDCCKPSCGWATKAPVNQPVFSCNANFQRLTDFDAKSGCEPGGVAYSCADQTPWAVNDDFAFGFAATSIAGSNEYGWCCACYELTFTSGPVAGKKMVVQSTSTGGDLGSNHFDLNIPGGGVGIFDGCTPQFGGLPGQRYGGISSRNECDRFPDALKPGCYWRFDWFKNADNPSFSFRQVQCPAELVARTGCRRNDDGNFPAVQIPSDSTSSPVGQPTSTSTTSTSTTSSPPVQPTTPSGCTAERWAQCGGNGWSGCTTCVAGSTCTKINDWYHQCL

SEQ ID NO: 46365 - protein, 284 aa, Synthetic construct
ADGKSTRYWDCCKPSCGWAKKAPVNQPVFSCNANFQRLTDFDAKSGCNPGGVAYSCADQTPWAVNDDFAFGFAATSIAGSNEAGWCCACYELTFTSGPVAGKKMVVQSTSTGGDLGSNHFDLLIPGGGVGPFDGCTPQFGGLPGQRYGGISSRNECDRFPDALKPGCYWRFDWFKNADNPSFSFRQVQCPAELVARTGCRRNDDGNFPAVQIPSSSTSSPVGQPTSTSTTSTSTTSSPPVQPTTPSGCTAERWAQCGGNGWSGCTTCVAGSTCTKINDWYHQCL

SEQ ID NO: 46366 - protein, 284 aa, Synthetic construct
ADGKSTRYWDCCKPSCGWAKKAPVNQPVFSCNANFQRLTDFDAKSGCEPGGVAYMCADQTPWAVNDDFAYGFAATSIAGSNEAGWCCACYELTFTSGPVAGKKMVVQSTSTGGDLGSNHFDLFIPGGGVGPFDGCTPQFGGLPGQRYGGISSRNECDRFPDALKPGCYWRFDWFKNADNPSFSFRQVQCPAELVARTGCRRNDDGNFPAVQIPSSSTSSPVGQPTSTSTTSTSTTSSPPVQPTTPSGCTAERWAQCGGNGWSGCTTCVAGSTCTKINDWYHQCL

SEQ ID NO: 46367 - protein, 284 aa, Synthetic construct
ADGKSTRYWDCCKPSCGWAKKAPVNQPVFSCNANFQRLTDFDAKSGCEPGGVAYLCADQTPWAVNDDFAFGFAATSIAGSNEAGWCCACYELTFTSGPVAGKKMVVQSTSTGGDLGSNHFDLFIPGGGVGPFDGCTPQFGGLPGQRYGGISSRNECDRFPDALKPGCYWRFDWFKNADNPSFSFRQVQCPAELVARTGCRRNDDGNFPAVQIPSSSTSSPVGQPTSTSTTSTSTTSSPPVQPTTPSGCTAERWAQCGGNGWSGCTTCVAGSTCTKINDWYHQCL

SEQ ID NO: 46368 - protein, 284 aa, Synthetic construct
ADGKSTRYWDCCKPSCGWAKKAPVNQPVFSCNANFQRLTDFDAKSGCEPGGVAYLCADQTPWAVNDDFAFGFAATSIAGSNEAGWCCACYELTFTSGPVAGKKMVVQSTSTGGDLGSNHFDLLIPGGGVGPFDGCTPQFGGLPGQRYGGISSRNECDRFPDALKPGCYWRFDWFKNADNPSFSFRQVQCPAELVARTGCRRNDDGNFPAVQIPSSSTSSPVGQPTSTSTTSTSTTSSPPVQPTTPSGCTAERWAQCGGNGWSGCTTCVAGSTCTKINDWYHQCL

SEQ ID NO: 46369 - protein, 284 aa, Synthetic construct
ADGKSTRYWDCCKPSCGWAKKAPVNQPVFSCNANFQRLTDFDAKSGCNPGGVAYLCADQTPWAVNDDFAFGFAATSIAGSNEAGWCCACYELTFTSGPVAGKKMVVQSTSTGGDLGSNHFDLNIPGGGVGPFDGCTPQFGGLPGQRYGGISSRNECDRFPDALKPGCYWRFDWFKNADNPSFSFRQVQCPAELVARTGCRRNDDGNFPAVQIPSSSTSSPVGQPTSTSTTSTSTTSSPPVQPTTPSGCTAERWAQCGGNGWSGCTTCVAGSTCTKINDWYHQCL

SEQ ID NO: 46370 - protein, 284 aa, Synthetic construct
ADGKSTRYWDCCKPSCGWAKKAPVNQPVFSCNANFQRLTDFDAKSGCNPGGVAYMCADQTPWAVNDDFAFGFAATSIAGSNEAGWCCACYELTFTSGPVAGKKMVVQSTSTGGDLGSNHFDLLIPGGGVGIFDGCTPQFGGLPGQRYGGISSRNECDRFPDALKPGCYWRFDWFKNADNPSFSFRQVQCPAELVARTGCRRNDDGNFPAVQIPSSSTSSPVGQPTSTSTTSTSTTSSPPVQPTTPSGCTAERWAQCGGNGWSGCTTCVAGSTCTKINDWYHQCL

SEQ ID NO: 46371 - protein, 284 aa, Synthetic construct
ADGKSTRYWDCCKPSCGWAKKAPVNQPVFSCNANFQRLTDFDAKSGCEPGGVAYKCADQTPWAVNDDFAYGFAATSIAGSNEAGWCCACYELTFTSGPVAGKKMVVQSTSTGGDLGSNHFDLFIPGGGVGPFDGCTPQFGGLPGQRYGGISSRNECDRFPDALKPGCYWRFDWFKNADNPSFSFRQVQCPAELVARTGCRRNDDGNFPAVQIPSSSTSSPVGQPTSTSTTSTSTTSSPPVQPTTPSGCTAERWAQCGGNGWSGCTTCVAGSTCTKINDWYHQCL

SEQ ID NO: 46372 - protein, 284 aa, Synthetic construct
ADGKSTRYWDCCKPSCGWAKKAPVNQPVFSCNANFQRLTDFDAKSGCEPGGVAYKCADQTPWAVNDDFAFGFAATSIAGSNEAGWCCACYELTFTSGPVAGKKMVVQSTSTGGDLGSNHFDLLIPGGGVGPFDGCTPQFGGLPGQRYGGISSRNECDRFPDALKPGCYWRFDWFKNADNPSFSFRQVQCPAELVARTGCRRNDDGNFPAVQIPSSSTSSPVGQPTSTSTTSTSTTSSPPVQPTTPSGCTAERWAQCGGNGWSGCTTCVAGSTCTKINDWYHQCL

SEQ ID NO: 46373 - protein, 284 aa, Synthetic construct
ADGKSTRYWDCCKPSCGWAKKAPVNQPVFSCNANFQRLTDFDAKSGCEPGGVAYMCADQTPWAVNDDFAYGFAATSIAGSNEAGWCCACYELTFTSGPVAGKKMVVQSTSTGGDLGSNHFDLLIPGGGVGPFDGCTPQFGGLPGQRYGGISSRNECDRFPDALKPGCYWRFDWFKNADNPSFSFRQVQCPAELVARTGCRRNDDGNFPAVQIPSSSTSSPVGQPTSTSTTSTSTTSSPPVQPTTPSGCTAERWAQCGGNGWSGCTTCVAGSTCTKINDWYHQCL

SEQ ID NO: 46374 - protein, 284 aa, Synthetic construct
ADGKSTRYWDCCKPSCGWAKKAPVNQPVFSCNANFQRLTDFDAKSGCNPGGVAYLCADQTPWAVNDDFAYGFAATSIAGSNEAGWCCACYELTFTSGPVAGKKMVVQSTSTGGDLGSNHFDLLIPGGGVGIFDGCTPQFGGLPGQRYGGISSRNECDRFPDALKPGCYWRFDWFKNADNPSFSFRQVQCPAELVARTGCRRNDDGNFPAVQIPSSSTSSPVGQPTSTSTTSTSTTSSPPVQPTTPSGCTAERWAQCGGNGWSGCTTCVAGSTCTKINDWYHQCL

SEQ ID NO: 46375 - protein, 284 aa, Synthetic construct
ADGKSTRYWDCCKPSCGWAKKAPVNQPVFSCNANFQRLTDFDAKSGCNPGGVAYMCADQTPWAVNDDFAYGFAATSIAGSNEAGWCCACYELTFTSGPVAGKKMVVQSTSTGGDLGSNHFDLNIPGGGVGPFDGCTPQFGGLPGQRYGGISSRNECDRFPDALKPGCYWRFDWFKNADNPSFSFRQVQCPAELVARTGCRRNDDGNFPAVQIPSSSTSSPVGQPTSTSTTSTSTTSSPPVQPTTPSGCTAERWAQCGGNGWSGCTTCVAGSTCTKINDWYHQCL

SEQ ID NO: 46376 - protein, 284 aa, Synthetic construct
ADGKSTRYWDCCKPSCGWAKKAPVNQPVFSCNANFQRLTDFDAKSGCNPGGVAYKCADQTPWAVNDDFAYGFAATSIAGSNEAGWCCACYELTFTSGPVAGKKMVVQSTSTGGDLGSNHFDLNIPGGGVGPFDGCTPQFGGLPGQRYGGISSRNECDRFPDALKPGCYWRFDWFKNADNPSFSFRQVQCPAELVARTGCRRNDDGNFPAVQIPSSSTSSPVGQPTSTSTTSTSTTSSPPVQPTTPSGCTAERWAQCGGNGWSGCTTCVAGSTCTKINDWYHQCL

SEQ ID NO: 46377 - protein, 284 aa, Synthetic construct
ADGKSTRYWDCCKPSCGWAKKAPVNQPVFSCNANFQRLTDFDAKSGCNPGGVAYSCADQTPWAVNDDFAYGFAATSIAGSNEAGWCCACYELTFTSGPVAGKKMVVQSTSTGGDLGSNHFDLFIPGGGVGPFDGCTPQFGGLPGQRYGGISSRNECDRFPDALKPGCYWRFDWFKNADNPSFSFRQVQCPAELVARTGCRRNDDGNFPAVQIPSSSTSSPVGQPTSTSTTSTSTTSSPPVQPTTPSGCTAERWAQCGGNGWSGCTTCVAGSTCTKINDWYHQCL

SEQ ID NO: 46378 - protein, 284 aa, Synthetic construct
ADGKSTRYWDCCKPSCGWAKKAPVNQPVFSCNANFQRLTDFDAKSGCNPGGVAYKCADQTPWAVNDDFAFGFAATSIAGSNEAGWCCACYELTFTSGPVAGKKMVVQSTSTGGDLGSNHFDLLIPGGGVGIFDGCTPQFGGLPGQRYGGISSRNECDRFPDALKPGCYWRFDWFKNADNPSFSFRQVQCPAELVARTGCRRNDDGNFPAVQIPSSSTSSPVGQPTSTSTTSTSTTSSPPVQPTTPSGCTAERWAQCGGNGWSGCTTCVAGSTCTKINDWYHQCL

SEQ ID NO: 46379 - protein, 284 aa, Synthetic construct
ADGKSTRYWDCCKPSCGWAKKAPVNQPVFSCNANFQRLTDFDAKSGCNPGGVAYLCADQTPWAVNDDFAYGFAATSIAGSNEAGWCCACYELTFTSGPVAGKKMVVQSTSTGGDLGSNHFDLFIPGGGVGIFDGCTPQFGGLPGQRYGGISSRNECDRFPDALKPGCYWRFDWFKNADNPSFSFRQVQCPAELVARTGCRRNDDGNFPAVQIPSSSTSSPVGQPTSTSTTSTSTTSSPPVQPTTPSGCTAERWAQCGGNGWSGCTTCVAGSTCTKINDWYHQCL

SEQ ID NO: 46380 - protein, 284 aa, Synthetic construct
ADGKSTRYWDCCKPSCGWAKKAPVNQPVFSCNANFQRLTDFDAKSGCNPGGVAYLCADQTPWAVNDDFAYGFAATSIAGSNEAGWCCACYELTFTSGPVAGKKMVVQSTSTGGDLGSNHFDLNIPGGGVGPFDGCTPQFGGLPGQRYGGISSRNECDRFPDALKPGCYWRFDWFKNADNPSFSFRQVQCPAELVARTGCRRNDDGNFPAVQIPSSSTSSPVGQPTSTSTTSTSTTSSPPVQPTTPSGCTAERWAQCGGNGWSGCTTCVAGSTCTKINDWYHQCL

SEQ ID NO: 46381 - protein, 284 aa, Synthetic construct
ADGKSTRYWDCCKPSCGWAKKAPVNQPVFSCNANFQRLTDFDAKSGCNPGGVAYMCADQTPWAVNDDFAYGFAATSIAGSNEAGWCCACYELTFTSGPVAGKKMVVQSTSTGGDLGSNHFDLLIPGGGVGIFDGCTPQFGGLPGQRYGGISSRNECDRFPDALKPGCYWRFDWFKNADNPSFSFRQVQCPAELVARTGCRRNDDGNFPAVQIPSSSTSSPVGQPTSTSTTSTSTTSSPPVQPTTPSGCTAERWAQCGGNGWSGCTTCVAGSTCTKINDWYHQCL

SEQ ID NO: 46382 - protein, 284 aa, Synthetic construct
ADGKSTRYWDCCKPSCGWAKKAPVNQPVFSCNANFQRLTDFDAKSGCNPGGVAYMCADQTPWAVNDDFAFGFAATSIAGSNEAGWCCACYELTFTSGPVAGKKMVVQSTSTGGDLGSNHFDLFIPGGGVGIFDGCTPQFGGLPGQRYGGISSRNECDRFPDALKPGCYWRFDWFKNADNPSFSFRQVQCPAELVARTGCRRNDDGNFPAVQIPSSSTSSPVGQPTSTSTTSTSTTSSPPVQPTTPSGCTAERWAQCGGNGWSGCTTCVAGSTCTKINDWYHQCL

SEQ ID NO: 46383 - protein, 284 aa, Synthetic construct
ADGKSTRYWDCCKPSCGWAKKAPVNQPVFSCNANFQRLTDFDAKSGCNPGGVAYKCADQTPWAVNDDFAFGFAATSIAGSNEAGWCCACYELTFTSGPVAGKKMVVQSTSTGGDLGSNHFDLFIPGGGVGIFDGCTPQFGGLPGQRYGGISSRNECDRFPDALKPGCYWRFDWFKNADNPSFSFRQVQCPAELVARTGCRRNDDGNFPAVQIPSSSTSSPVGQPTSTSTTSTSTTSSPPVQPTTPSGCTAERWAQCGGNGWSGCTTCVAGSTCTKINDWYHQCL

SEQ ID NO: 46384 - protein, 284 aa, Synthetic construct
ADGKSTRYWDCCKPSCGWAKKAPVNQPVFSCNANFQRLTDFDAKSGCNPGGVAYLCADQTPWAVNDDFAFGFAATSIAGSNEAGWCCACYELTFTSGPVAGKKMVVQSTSTGGDLGSNHFDLLIPGGGVGIFDGCTPQFGGLPGQRYGGISSRNECDRFPDALKPGCYWRFDWFKNADNPSFSFRQVQCPAELVARTGCRRNDDGNFPAVQIPSSSTSSPVGQPTSTSTTSTSTTSSPPVQPTTPSGCTAERWAQCGGNGWSGCTTCVAGSTCTKINDWYHQCL

SEQ ID NO: 46385 - protein, 284 aa, Synthetic construct
ADGKSTRYWDCCKPSCGWAKKAPVNQPVFSCNANFQRLTDFDAKSGCNPGGVAYSCADQTPWAVNDDFAFGFAATSIAGSNEAGWCCACYELTFTSGPVAGKKMVVQSTSTGGDLGSNHFDLFIPGGGVGPFDGCTPQFGGLPGQRYGGISSRNECDRFPDALKPGCYWRFDWFKNADNPSFSFRQVQCPAELVARTGCRRNDDGNFPAVQIPSSSTSSPVGQPTSTSTTSTSTTSSPPVQPTTPSGCTAERWAQCGGNGWSGCTTCVAGSTCTKINDWYHQCL

SEQ ID NO: 46386 - protein, 284 aa, Synthetic construct
ADGKSTRYWDCCKPSCGWAKKAPVNQPVFSCNANFQRLTDFDAKSGCEPGGVAYKCADQTPWAVNDDFAFGFAATSIAGSNEAGWCCACYELTFTSGPVAGKKMVVQSTSTGGDLGSNHFDLFIPGGGVGPFDGCTPQFGGLPGQRYGGISSRNECDRFPDALKPGCYWRFDWFKNADNPSFSFRQVQCPAELVARTGCRRNDDGNFPAVQIPSSSTSSPVGQPTSTSTTSTSTTSSPPVQPTTPSGCTAERWAQCGGNGWSGCTTCVAGSTCTKINDWYHQCL

SEQ ID NO: 46387 - protein, 284 aa, Synthetic construct
ADGKSTRYWDCCKPSCGWAKKAPVNQPVFSCNANFQRLTDFDAKSGCNPGGVAYKCADQTPWAVNDDFAYGFAATSIAGSNEAGWCCACYELTFTSGPVAGKKMVVQSTSTGGDLGSNHFDLFIPGGGVGIFDGCTPQFGGLPGQRYGGISSRNECDRFPDALKPGCYWRFDWFKNADNPSFSFRQVQCPAELVARTGCRRNDDGNFPAVQIPSSSTSSPVGQPTSTSTTSTSTTSSPPVQPTTPSGCTAERWAQCGGNGWSGCTTCVAGSTCTKINDWYHQCL

SEQ ID NO: 46388 - protein, 284 aa, Synthetic construct
ADGKSTRYWDCCKPSCGWAKKAPVNQPVFSCNANFQRLTDFDAKSGCEPGGVAYMCADQTPWAVNDDFAFGFAATSIAGSNEAGWCCACYELTFTSGPVAGKKMVVQSTSTGGDLGSNHFDLLIPGGGVGPFDGCTPQFGGLPGQRYGGISSRNECDRFPDALKPGCYWRFDWFKNADNPSFSFRQVQCPAELVARTGCRRNDDGNFPAVQIPSSSTSSPVGQPTSTSTTSTSTTSSPPVQPTTPSGCTAERWAQCGGNGWSGCTTCVAGSTCTKINDWYHQCL

SEQ ID NO: 46389 - protein, 284 aa, Synthetic construct
ADGKSTRYWDCCKPSCGWAKKAPVNQPVFSCNANFQRLTDFDAKSGCNPGGVAYLCADQTPWAVNDDFAFGFAATSIAGSNEAGWCCACYELTFTSGPVAGKKMVVQSTSTGGDLGSNHFDLFIPGGGVGIFDGCTPQFGGLPGQRYGGISSRNECDRFPDALKPGCYWRFDWFKNADNPSFSFRQVQCPAELVARTGCRRNDDGNFPAVQIPSSSTSSPVGQPTSTSTTSTSTTSSPPVQPTTPSGCTAERWAQCGGNGWSGCTTCVAGSTCTKINDWYHQCL

SEQ ID NO: 46390 - protein, 284 aa, Synthetic construct
ADGKSTRYWDCCKPSCGWAKKAPVNQPVFSCNANFQRLTDFDAKSGCEPGGVAYKCADQTPWAVNDDFAYGFAATSIAGSNEAGWCCACYELTFTSGPVAGKKMVVQSTSTGGDLGSNHFDLLIPGGGVGPFDGCTPQFGGLPGQRYGGISSRNECDRFPDALKPGCYWRFDWFKNADNPSFSFRQVQCPAELVARTGCRRNDDGNFPAVQIPSSSTSSPVGQPTSTSTTSTSTTSSPPVQPTTPSGCTAERWAQCGGNGWSGCTTCVAGSTCTKINDWYHQCL

SEQ ID NO: 46391 - protein, 284 aa, Synthetic construct
ADGKSTRYWDCCKPSCGWAKKAPVNQPVFSCNANFQRLTDFDAKSGCNPGGVAYSCADQTPWAVNDDFAYGFAATSIAGSNEAGWCCACYELTFTSGPVAGKKMVVQSTSTGGDLGSNHFDLLIPGGGVGPFDGCTPQFGGLPGQRYGGISSRNECDRFPDALKPGCYWRFDWFKNADNPSFSFRQVQCPAELVARTGCRRNDDGNFPAVQIPSSSTSSPVGQPTSTSTTSTSTTSSPPVQPTTPSGCTAERWAQCGGNGWSGCTTCVAGSTCTKINDWYHQCL

SEQ ID NO: 46392 - protein, 284 aa, Synthetic construct
ADGKSTRYWDCCKPSCGWAKKAPVNQPVFSCNANFQRLTDFDAKSGCEPGGVAYLCADQTPWAVNDDFAYGFAATSIAGSNEAGWCCACYELTFTSGPVAGKKMVVQSTSTGGDLGSNHFDLLIPGGGVGPFDGCTPQFGGLPGQRYGGISSRNECDRFPDALKPGCYWRFDWFKNADNPSFSFRQVQCPAELVARTGCRRNDDGNFPAVQIPSSSTSSPVGQPTSTSTTSTSTTSSPPVQPTTPSGCTAERWAQCGGNGWSGCTTCVAGSTCTKINDWYHQCL

SEQ ID NO: 46393 - protein, 284 aa, Synthetic construct
ADGKSTRYWDCCKPSCGWAKKAPVNQPVFSCNANFQRLTDFDAKSGCEPGGVAYLCADQTPWAVNDDFAYGFAATSIAGSNEAGWCCACYELTFTSGPVAGKKMVVQSTSTGGDLGSNHFDLFIPGGGVGPFDGCTPQFGGLPGQRYGGISSRNECDRFPDALKPGCYWRFDWFKNADNPSFSFRQVQCPAELVARTGCRRNDDGNFPAVQIPSSSTSSPVGQPTSTSTTSTSTTSSPPVQPTTPSGCTAERWAQCGGNGWSGCTTCVAGSTCTKINDWYHQCL

SEQ ID NO: 46394 - protein, 284 aa, Synthetic construct
ADGKSTRYWDCCKPSCGWAKKAPVNQPVFSCNANFQRLTDFDAKSGCEPGGVAYMCADQTPWAVNDDFAFGFAATSIAGSNEAGWCCACYELTFTSGPVAGKKMVVQSTSTGGDLGSNHFDLFIPGGGVGPFDGCTPQFGGLPGQRYGGISSRNECDRFPDALKPGCYWRFDWFKNADNPSFSFRQVQCPAELVARTGCRRNDDGNFPAVQIPSSSTSSPVGQPTSTSTTSTSTTSSPPVQPTTPSGCTAERWAQCGGNGWSGCTTCVAGSTCTKINDWYHQCL

SEQ ID NO: 46395 - protein, 284 aa, Synthetic construct
ADGKSTRYWDCCKPSCGWAKKAPVNQPVFSCNANFQRLTDFDAKSGCNPGGVAYMCADQTPWAVNDDFAYGFAATSIAGSNEAGWCCACYELTFTSGPVAGKKMVVQSTSTGGDLGSNHFDLFIPGGGVGIFDGCTPQFGGLPGQRYGGISSRNECDRFPDALKPGCYWRFDWFKNADNPSFSFRQVQCPAELVARTGCRRNDDGNFPAVQIPSSSTSSPVGQPTSTSTTSTSTTSSPPVQPTTPSGCTAERWAQCGGNGWSGCTTCVAGSTCTKINDWYHQCL

SEQ ID NO: 46396 - protein, 284 aa, Synthetic construct
ADGKSTRYWDCCKPSCGWAKKAPVNQPVFSCNANFQRLTDFDAKSGCNPGGVAYKCADQTPWAVNDDFAYGFAATSIAGSNEAGWCCACYELTFTSGPVAGKKMVVQSTSTGGDLGSNHFDLLIPGGGVGIFDGCTPQFGGLPGQRYGGISSRNECDRFPDALKPGCYWRFDWFKNADNPSFSFRQVQCPAELVARTGCRRNDDGNFPAVQIPSSSTSSPVGQPTSTSTTSTSTTSSPPVQPTTPSGCTAERWAQCGGNGWSGCTTCVAGSTCTKINDWYHQCL

SEQ ID NO: 46397 - protein, 284 aa, Synthetic construct
ADGKSTRYWDCCKPSCGWAKKAPVNQPVFSCNANFQRLTDFDAKSGCNPGGVAYKCADQTPWAVNDDFAFGFAATSIAGSNEAGWCCACYELTFTSGPVAGKKMVVQSTSTGGDLGSNHFDLNIPGGGVGPFDGCTPQFGGLPGQRYGGISSRNECDRFPDALKPGCYWRFDWFKNADNPSFSFRQVQCPAELVARTGCRRNDDGNFPAVQIPSSSTSSPVGQPTSTSTTSTSTTSSPPVQPTTPSGCTAERWAQCGGNGWSGCTTCVAGSTCTKINDWYHQCL

SEQ ID NO: 46398 - protein, 284 aa, Synthetic construct
ADGKSTRYWDCCKPSCGWAKKAPVNQPVFSCNANFQRLTDFDAKSGCNPGGVAYMCADQTPWAVNDDFAFGFAATSIAGSNEAGWCCACYELTFTSGPVAGKKMVVQSTSTGGDLGSNHFDLNIPGGGVGPFDGCTPQFGGLPGQRYGGISSRNECDRFPDALKPGCYWRFDWFKNADNPSFSFRQVQCPAELVARTGCRRNDDGNFPAVQIPSSSTSSPVGQPTSTSTTSTSTTSSPPVQPTTPSGCTAERWAQCGGNGWSGCTTCVAGSTCTKINDWYHQCL

SEQ ID NO: 46399 - protein, 278 aa, Thermothielavioides terrestris
ASGSGQSTRYWDCCKPSCAWPGKAAVSQPVYACDANFQRLSDFNVQSGCNGGSAYACADQTPWAVNDNLAYGFAATSIAGGSESSWCCACYALTFTSGPVAGKTMVVQSTSTGGDLGSNHFDIAMPGGGVGIFDGCSSQFGGLPGARYGGISSRDQCDSFPAPLKPGCQWRFDWFQNADNPTFTFQQVQCPAEIVARSGCKRNDDSSFPVFTPPPGGPGGPGTPTSTAPGSGPTSPGGGSGCTSQKWAQCGGIGFSGCTTCVSGTTCQKLNDYYSQCL

SEQ ID NO: 46400 - protein, 278 aa, Thermothielavioides terrestris
ASGSGQSTRYWDCCKPSCAWPGKAAVSQPVYSCDANFQRLSDFNVQSGCNGGSAYACADQTPWAVNDNLAYGFAATSIAGGSESSWCCACYALTFTSGPVAGKTMVVQSTSTGGDLGSNHFDIAMPGGGVGIFDGCSSQFGGLPGDRYGGISSRDQCDSFPAPLKPGCYWRFDWFQNADNPTVTFQQVQCPAEIVARSGCKRNDDSSFPVFTPPSGGNGGTGTPTSTAPGSGQTSPGGGSGCTSQKWAQCGGIGFSGCTTCVSGTTCQKLNDYYSQCL

SEQ ID NO: 46401 - protein, 278 aa, Thermothielavioides terrestris
ASGSGQSTRYWDCCKPSCAWPGKAAVSQPVYSCDANFQRLSDFNVQSGCNGGSAYACADQTPWAVNDNLAYGFAATSIAGGSESSWCCACYALTFTSGPVAGKTMVVQSTSTGGDLGSNHFDIAMPGGGVGIFDGCSSQFGGLPGDRYGGISSRDQCDSFPEPLKPGCYWRFDWFQNADNPTFTFQQVQCPAEIVARSGCKRNDDSSFPVFTPPSGGNGGTGTPTSTAPGSGQTSPGGGSGCTSQKWAQCGGIGFSGCTTCVSGTTCQKLNDYYSQCL

SEQ ID NO: 46402 - protein, 278 aa, Thermothielavioides terrestris
ASGSGQSTRYWDCCKPSCAWPGKAAVSQPVYSCDANFQRLSDFNVQSGCNGGSAYACADQTPWAVNDNLAYGFAATNIAGGSESSWCCACYALTFTSGPVAGKTMVVQSTSTGGDLGSNHFDIAMPGGGVGIFDGCSSQFGGLPGARYGGISSRDQCDSFPEPLKPGCYWRFDWFQNADNPTFTFQQVQCPAEIVARSGCKRNDDSSFPVFTPPSGGNGGTGTPTSTAPGSGQTSPGGGSGCTSQKWAQCGGIGFSGCTTCVSGTTCQKLNDYYSQCL

SEQ ID NO: 46403 - protein, 278 aa, Thermothielavioides terrestris
ASGSGQSTRYWDCCKPSCAWPGKAAVSQPVYSCDANFQRLSDFNVQSGCNGGSAYACADQTPWAVNDNLAYGFAATSIAGGSESSWCCACYALTFTSGPVAGKTMVVQSTSTGGDLGSNHFDIAMPGGGVGIFDGCSSQFGGLPGSRYGGISSRDQCDSFPAPLKPGCYWRFDWFQNADNPTVTFQQVQCPAEIVARSGCKRNDDSSFPVFTPPSGGNGGTGTPTSTAPGSGQTSPGGGSGCTSQKWAQCGGIGFSGCTTCVSGTTCQKLNDYYSQCL

SEQ ID NO: 46404 - protein, 278 aa, Thermothielavioides terrestris
ASGSGQSTRYWDCCKPSCAWPGKAAVSQPVYSCDANFQRLSDFNVQSGCNGGSAYACADQTPWAVNDNLAYGFAATNIAGGSESSWCCACYALTFTSGPVAGKTMVVQSTSTGGDLGSNHFDIAMPGGGVGIFDGCSSQFGGLPGARYGGISSRDQCDSFPAPLKPGCYWRFDWFQNADNPTVTFQQVQCPAEIVARSGCKRNDDSSFPVFTPPSGGNGGTGTPTSTAPGSGQTSPGGGSGCTSQKWAQCGGIGFSGCTTCVSGTTCQKLNDYYSQCL

SEQ ID NO: 46405 - protein, 435 aa, Scytalidium thermophilum
MARGTALLGLTSLLLGLVNGQKPGETKEVHPQLTTFRCTKKGGCKPATNYIVLDSLSHPIHRAEGLGFGGCGDWGNPPPKDVCPDVESCAKNCIMEGIPDYSQYGVTTNGTSLRLQHILPDGRVPSPRVYLLDKTERRYEMLHLTGFEFTFDVDATKLPCGMNSALYLSEMHPTGAKSKHNPGGAYYGTGYCDAQCFVTPFINGLGNIEGKGSCCNEMDIWEANSRASHVAPHVCNKKGLYLCEGEECAFEGVCDKNGCGWNPYRVNVTDYYGRGEEFKVNTLKPFTVVTQFLANRKGKLEKIHRFYVQDGKVIESFYTNKEGVPYTNMIEDEFCEATGSRKYMELGATQGMGEALTRGMVLAMSIWWDQGGNMEWLDHGEAGPCAKGEGAPSNVVQVEPFPEVTYTNLRWGEIGSTYQEVQKPKPKPGPGPRSD

SEQ ID NO: 46406 - protein, 284 aa, Synthetic construct
ADGKSTRYWDCCKPSCGWAKKAPVNQPVFSCNANFQRLTDFDAKSGCNPGGVAYMCADQTPWAVNDDFAYGFAATSIAGSNEAGWCCACYELTFTSGPVAGKKMVVQSTSTGGDLGSNHFDLFIPGGGVGPFDGCTPQFGGLPGQRYGGISSRNECDRFPDALKPGCYWRFDWFKNADNPSFSFRQVQCPAELVARTGCRRNDDGNFPAVQIPSSSTSSPVGQPTSTSTTSTSTTSSPPVQPTTPSGCTAERWAQCGGNGWSGCTTCVAGSTCTKINDWYHQCL

SEQ ID NO: 46407 - protein, 284 aa, Synthetic construct
ADGKSTRYWDCCKPSCGWAKKAPVNQPVFSCNANFQRLTDFDAKSGCNPGGVAYMCADQTPWAVNDDFAYGFAATSIAGSNEAGWCCACYELTFTSGPVAGKKMVVQSTSTGGDLGSNHFDLLIPGGGVGPFDGCTPQFGGLPGQRYGGISSRNECDRFPDALKPGCYWRFDWFKNADNPSFSFRQVQCPAELVARTGCRRNDDGNFPAVQIPSSSTSSPVGQPTSTSTTSTSTTSSPPVQPTTPSGCTAERWAQCGGNGWSGCTTCVAGSTCTKINDWYHQCL

SEQ ID NO: 46408 - protein, 284 aa, Synthetic construct
ADGKSTRYWDCCKPSCGWAKKAPVNQPVFSCNANFQRLTDFDAKSGCNPGGVAYLCADQTPWAVNDDFAYGFAATSIAGSNEAGWCCACYELTFTSGPVAGKKMVVQSTSTGGDLGSNHFDLFIPGGGVGPFDGCTPQFGGLPGQRYGGISSRNECDRFPDALKPGCYWRFDWFKNADNPSFSFRQVQCPAELVARTGCRRNDDGNFPAVQIPSSSTSSPVGQPTSTSTTSTSTTSSPPVQPTTPSGCTAERWAQCGGNGWSGCTTCVAGSTCTKINDWYHQCL

SEQ ID NO: 46409 - protein, 284 aa, Synthetic construct
ADGKSTRYWDCCKPSCGWAKKAPVNQPVFSCNANFQRLTDFDAKSGCNPGGVAYKCADQTPWAVNDDFAYGFAATSIAGSNEAGWCCACYELTFTSGPVAGKKMVVQSTSTGGDLGSNHFDLLIPGGGVGPFDGCTPQFGGLPGQRYGGISSRNECDRFPDALKPGCYWRFDWFKNADNPSFSFRQVQCPAELVARTGCRRNDDGNFPAVQIPSSSTSSPVGQPTSTSTTSTSTTSSPPVQPTTPSGCTAERWAQCGGNGWSGCTTCVAGSTCTKINDWYHQCL

SEQ ID NO: 46410 - protein, 284 aa, Synthetic construct
ADGKSTRYWDCCKPSCGWAKKAPVNQPVFSCNANFQRLTDFDAKSGCNPGGVAYLCADQTPWAVNDDFAYGFAATSIAGSNEAGWCCACYELTFTSGPVAGKKMVVQSTSTGGDLGSNHFDLLIPGGGVGPFDGCTPQFGGLPGQRYGGISSRNECDRFPDALKPGCYWRFDWFKNADNPSFSFRQVQCPAELVARTGCRRNDDGNFPAVQIPSSSTSSPVGQPTSTSTTSTSTTSSPPVQPTTPSGCTAERWAQCGGNGWSGCTTCVAGSTCTKINDWYHQCL

SEQ ID NO: 46411 - protein, 284 aa, Synthetic construct
ADGKSTRYWDCCKPSCGWAKKAPVNQPVFSCNANFQRLTDFDAKSGCNPGGVAYKCADQTPWAVNDDFAYGFAATSIAGSNEAGWCCACYELTFTSGPVAGKKMVVQSTSTGGDLGSNHFDLFIPGGGVGPFDGCTPQFGGLPGQRYGGISSRNECDRFPDALKPGCYWRFDWFKNADNPSFSFRQVQCPAELVARTGCRRNDDGNFPAVQIPSSSTSSPVGQPTSTSTTSTSTTSSPPVQPTTPSGCTAERWAQCGGNGWSGCTTCVAGSTCTKINDWYHQCL

SEQ ID NO: 46412 - protein, 305 aa, Humicola insolens
MRSSPLLPSAVVAALPVLALAADGRSTRFWDCCLPSCGWAKKAPVNQPVFSCNANFQRITDFDAKSGCEPGGVAYSCADQTPEAVNDDFALGFAATSIAGSNEAGWCCACYELTFTSGPVAGKKMVVQSTSTGGDLGSNHFDLNIPGGGVGIFDGCTPQFGGLPGQRYGGISSANECDRFPDPLKPGCYWRFDWFKNADNPSFSFRQVQCPAELVARTGCRRNDDGNFPAVQIPSSSTSSPSSTPTSTSTTSTSTTSSPPVQPTTPSGCTAERWAQCGGNGWSGCTTCVAGSTCTKINDWYHQCL

SEQ ID NO: 46413 - protein, 263 aa, Thermothielavioides terrestris
ASGSGQSTRYWDCCKPSCAWPGKAAVSQPVYACDANFQRLSDFNVQSGCNGGSAYSCADQTPWAVNDNLAYGFAATSIAGGSESSWCCACYALTFTSGPVAGKTMVVQSTSTGGDLGSNHFDIAMPGGGVGIFNGCSSQFGGLPGAQYGGISSRDQCDSFPAPLKPGCQWRFDWFQNADNPTFTFQQVQCPAEIVARSGCKRNDDSSFPVFTPPPPPPPPPPPPPGCTSQKWAQCGGIGFSGCTTCVSGTTCQKLNDYYSQCL

SEQ ID NO: 46414 - protein, 262 aa, Thermothielavioides terrestris
ASGSGQSTRYWDCCKPSCAWPGKAAVSQPVYACDANFQRLSDFNVQSGCNGGSAYACADQTPWAVNDNLAYGFAATSIAGGSESSWCCACYALTFTSGPVAGKTMVVQSTSTGGDLGSNHFDIAMPGGGVGIFDGCSSQFGGLPGARYGGISSRDQCDSFPAPLKPGCQWRFDWFQNADNPTFTFQQVQCPAEIVARSGCKRNDDSSFPVFTTPTTPTTPTTPTGCTSQKWAQCGGIGFSGCTTCVSGTTCQKLNDYYSQCL

SEQ ID NO: 46415 - protein, 262 aa, Thermothielavioides terrestris
ASGSGQSTRYWDCCKPSCAWPGKAAVSQPVYACDANFQRLSDFNVQSGCNGGSAYACADQTPWAVNDNLAYGFAATSIAGGSESSWCCACYALTFTSGPVAGKTMVVQSTSTGGDLGSNHFDIAMPGGGVGIFNGCSSQFGGLPGARYGGISSRDQCDSFPAPLKPGCQWRFDWFQNADNPTFTFQQVQCPAEIVARSGCKRNDDSSFPVFTPEPTPEPTPEPTGCTSQKWAQCGGIGFSGCTTCVSGTTCQKLNDYYSQCL

SEQ ID NO: 46416 - protein, 262 aa, Thermothielavioides terrestris
ASGSGQSTRYWDCCKPSCAWPGKAAVSQPVYACDANFQRLSDFNVQSGCNGGSAYSCADQTPWAVNDNLAYGFAATSIAGGSESSWCCACYALTFTSGPVAGKTMVVQSTSTGGDLGSNHFDIAMPGGGVGIFDGCSSQFGGLPGARYGGISSRDQCDSFPAPLKPGCQWRFDWFQNADNPTFTFQQVQCPAEIVARSGCKRNDDSSFPVFTPEPTPEPTPEPTGCTSQKWAQCGGIGFSGCTTCVSGTTCQKLNDYYSQCL

SEQ ID NO: 46417 - protein, 229 aa, Humicola insolens
ADGKSTRYWDCCKPSCGWAKKAPVNQPVFSCNANFQRLTDFDAKSGCEPGGVAYSCADQTPWAVNDDFAFGFAATSIAGSNEAGWCCACYELTFTSGPVAGKKMVVQSTSTGGDLGSNHFDLNIPGGGVGIFDGCTPQFGGLPGQRYGGISSRNECDRFPDALKPGCYWRFDWFKNADNPSFSFRQVQCPAELVARTGCRRNDDGNFPAVQIPSSSTSSSPPVQPTTPS

SEQ ID NO: 46418 - protein, 288 aa, Humicola insolens
MRSSPLLRSAVVAALPVLALAADGRSTRYWDCCKPSCGWAKKAPVNQPVFSCNANFQRITDFDAKSGCEPGGVAYSCADQTPWAVNDDFALGFAATSIAGSNEAGWCCACYELTFTSGPVAGKKMVVQSTSTGGDLGSNHFDLNIPGGGVGIFDGCTPQFGGLPGQRYGGISSRNECDRFPDALKPGCYWRFDWFKNADNPSFSFRQVQCPAELVARTGCRRNDDGNFPAVQIPSSSTSSPVNQPTSTSTTSTSTTSSPPVQPTTPSGCADGRSTRYWDCCKPSCGWA

SEQ ID NO: 46419 - protein, 417 aa, Humicola insolens
AFLFLLAGFAAKISAQKPGETKEVHPQLTTFRCTKRGGCKPATNFIVDLSLSHPIHRAEGLGPGGCGDWGNPPPKDVCPDVESCAKNCIMEGIPDYSQYGVTTNGTSLRLQHILPDGRVPSPRVYLLDKTKRRYEMLHLTGFEFTFDVDATKLPCGMNSALYLSEMHPTGAKSKYNPGGAYYGTGYCDAQCFVTPFINGLGNIEGKGSCCNEMDIWEANSRASHVAPHTCNKKGLYLCEGEECAFEGVCDKNGCGWNNYRVNVTDYYGRGEEFKVNTLKPFTVVTQFLANRRGKLEKIHRFYVQDGKVIESFYTNKEGVPYTNMIDDEFCEATGSRKYMELGATQGMGEALTRGMVLAMSIWWDQGGNMEWLDHGEAGPCAKGEGAPSNIVQVEPFPEVTYTNLRWGEIGSTYQELQ

SEQ ID NO: 46420 - protein, 264 aa, Thermothielavioides terrestris
ASGSGQSTRYWDCCKPSCAWPGKAAVSQPVYACDANFQRLSDFNVQSGCNGGSAYSCADQTPWAVNDNLAYGFAATSIAGGSESSWCCACYALTFTSGPVAGKTMVVQSTSTGGDLGSNHFDIAMPGGGVGIFNGCSSQFGGLPGAQYGGISSRDQCDSFPAPLKPGCQWRFDWFQNADNPTFTFQQVQCPAEIVARSGCKRNDDSSFPVFTTTPTPPTPTPTPTPGCTSQKWAQCGGIGFSGCTTCVSGTTCQKLNDYYSQCL

SEQ ID NO: 46421 - protein, 262 aa, Thermothielavioides terrestris
ASGSGQSTRYWDCCKPSCAWPGKAAVSQPVYACDANFQRLSDFNVQSGCNGGSAYACADQTPWAVNDNLAYGFAATSIAGGSESSWCCACYALTFTSGPVAGKTMVVQSTSTGGDLGSNHFDIAMPGGGVGIFDGCSSQFGGLPGARYGGISSRDQCDSFPAPLKPGCQWRFDWFQNADNPTFTFQQVQCPAEIVARSGCKRNDDSSFPVFTSPSSPSSPSSPSGCTSQKWAQCGGIGFSGCTTCVSGTTCQKLNDYYSQCL

SEQ ID NO: 46422 - protein, 262 aa, Thermothielavioides terrestris
ASGSGQSTRYWDCCKPSCAWPGKAAVSQPVYACDANFQRLSDFNVQSGCNGGSAYACADQTPWAVNDNLAYGFAATSIAGGSESSWCCACYALTFTSGPVAGKTMVVQSTSTGGDLGSNHFDIAMPGGGVGIFDGCSSQFGGLPGARYGGISSRDQCDSFPAPLKPGCQWRFDWFQNADNPTFTFQQVQCPAEIVARSGCKRNDDSSFPVFTPRPTPEPTPRPTGCTSQKWAQCGGIGFSGCTTCVSGTTCQKLNDYYSQCL

SEQ ID NO: 46423 - protein, 262 aa, Thermothielavioides terrestris
ASGSGQSTRYWDCCKPSCAWPGKAAVSQPVYACDANFQRLSDFNVQSGCNGGSAYACADQTPWAVNDNLAYGFAATSIAGGSESSWCCACYALTFTSGPVAGKTMVVQSTSTGGDLGSNHFDIAMPGGGVGIFDGCSSQFGGLPGARYGGISSRDQCDSFPAPLKPGCQWRFDWFQNADNPTFTFQQVQCPAEIVARSGCKRNDDSSFPVFTPDPTPDPTPDPTGCTSQKWAQCGGIGFSGCTTCVSGTTCQKLNDYYSQCL

SEQ ID NO: 46424 - protein, 262 aa, Thermothielavioides terrestris
ASGSGQSTRYWDCCKPSCAWPGKAAVSQPVYACDANFQRLSDFNVQSGCNGGSAYACADQTPWAVNDNLAYGFAATSIAGGSESSWCCACYALTFTSGPVAGKTMVVQSTSTGGDLGSNHFDIAMPGGGVGIFDGCSSQFGGLPGARYGGISSRDQCDSFPAPLKPGCQWRFDWFQNADNPTFTFQQVQCPAEIVARSGCKRNDDSSFPVFTPKPTPEPTPKPTGCTSQKWAQCGGIGFSGCTTCVSGTTCQKLNDYYSQCL

SEQ ID NO: 46425 - protein, 262 aa, Thermothielavioides terrestris
ASGSGQSTRYWDCCKPSCAWPGKAAVSQPVYACDANFQRLSDFNVQSGCNGGSAYACADQTPWAVNDNLAYGFAATSIAGGSESSWCCACYALTFTSGPVAGKTMVVQSTSTGGDLGSNHFDIAMPGGGVGIFDGCSSQFGGLPGARYGGISSRDQCDSFPAPLKPGCQWRFDWFQNADNPTFTFQQVQCPAEIVARSGCKRNDDSSFPVFTPEPTPEPTPEPTGCTSQKWAQCGGIGFSGCTTCVSGTTCQKLNDYYSQCL

SEQ ID NO: 46426 - protein, 229 aa, Bacillus amyloliquefaciens
ADGRSTRYWDCCKPSCGWAKKASVNQPVFSCNANFQRITDFDAKSGCEPGGVAYSCADQTPWAVNDNFSLGFAATSIAGSNEAGWCCACYELTFTSGPVAGKKMVVQSTSTGGDLGSNHFDLNIPGGGVGIFDGCTPQFGGLPGQRYGGISSRNECDSFPDALKPGCYWRFDWFKNADNPSFSFRQVQCPAELVARTGCRRNDDGNFPAVQIPSSSTSSSPPVQPTTPS

SEQ ID NO: 46427 - protein, 250 aa, unidentified
MRSSPLLPSAVVAALPVLALAADGRSTRYWDCCKPSCGWAKKASVNQPVFSCNANFQRITDFDAKSGCEPGGVAYSCADQTPWAVNDNFSLGFAATSIAGSNEAGWCCACYELTFTSGPVAGKKMVVQSTSTGGDLGSNHFDLNIPGGGVGIFDGCTPQFGGLPGQRYGGISSRNECDSFPDALKPGCYWRFDWFKNADNPSFSFRQVQCPAELVARTGCRRNDDGNFPAVQIPSSSTSSSPPVQPTTPS

SEQ ID NO: 46428 - protein, 266 aa, Thermothielavioides terrestris
ASGSGQSTRYWDCCKPSCAWPGKAAVSQPVYACDANFQRLSDFNVQSGCNGGSAYSCADQTPWAVNDNLAYGFAATSIAGGSESSWCCACYALTFTSGPVAGKTMVVQSTSTGGDLGSNHFDIAMPGGGVGIFNGCSSQFGGLPGAQYGGISSRDQCDSFPAPLKPGCQWRFDWFQNADNPTFTFQQVQCPAEIVARSGCKRNDDSSFPVFTPEPTPEPTPEPTPEPTGCTSQKWAQCGGIGFSGCTTCVSGTTCQKLNDYYSQCL

SEQ ID NO: 46429 - protein, 266 aa, Thermothielavioides terrestris
ASGSGQSTRYWDCCKPSCAWPGKAAVSQPVYACDANFQRLSDFNVQSGCNGGSAYSCADQTPWAVNDNLAYGFAATSIAGGSESSWCCACYALTFTSGPVAGKTMVVQSTSTGGDLGSNHFDIAMPGGGVGIFNGCSSQFGGLPGAQYGGISSRDQCDSFPAPLKPGCQWRFDWFQNADNPTFTFQQVQCPAEIVARSGCKRNDDSSFPVFTPSPTPSPTPSPTPSPTGCTSQKWAQCGGIGFSGCTTCVSGTTCQKLNDYYSQCL

SEQ ID NO: 46430 - protein, 266 aa, Thermothielavioides terrestris
ASGSGQSTRYWDCCKPSCAWPGKAAVSQPVYACDANFQRLSDFNVQSGCNGGSAYSCADQTPWAVNDNLAYGFAATSIAGGSESSWCCACYALTFTSGPVAGKTMVVQSTSTGGDLGSNHFDIAMPGGGVGIFNGCSSQFGGLPGAQYGGISSRDQCDSFPAPLKPGCQWRFDWFQNADNPTFTFQQVQCPAEIVARSGCKRNDDSSFPVFTTTPTPTPPTPTPTPTPGCTSQKWAQCGGIGFSGCTTCVSGTTCQKLNDYYSQCL

SEQ ID NO: 46431 - protein, 265 aa, Thermothielavioides terrestris
ASGSGQSTRYWDCCKPSCAWPGKAAVSQPVYACDANFQRLSDFNVQSGCNGGSAYACADQTPWAVNDNLAYGFAATSIAGGSESSWCCACYALTFTSGPVAGKTMVVQSTSTGGDLGSNHFDIAMPGGGVGIFDGCSSQFGGLPGARYGGISSRDQCDSFPAPLKPGCQWRFDWFQNADNPTFTFQQVQCPAEIVARSGCKRNDDSSFPVFTSPSSPSSPSSPSSPSGCTSQKWAQCGGIGFSGCTTCVSGTTCQKLNDYYSQCL

SEQ ID NO: 46432 - protein, 262 aa, Thermothielavioides terrestris
ASGSGQSTRYWDCCKPSCAWPGKAAVSQPVYACDANFQRLSDFNVQSGCNGGSAYACADQTPWAVNDNLAYGFAATSIAGGSESSWCCACYALTFTSGPVAGKTMVVQSTSTGGDLGSNHFDIAMPGGGVGIFDGCSSQFGGLPGARYGGISSRDQCDSFPAPLKPGCQWRFDWFQNADNPTFTFQQVQCPAEIVARSGCKRNDDSSFPVFTPEPTPEPTPEPTPCTSQKWAQCGGIGFSGCTTCVSGTTCQKLNDYYSQCL

SEQ ID NO: 46433 - protein, 268 aa, Thermothielavioides terrestris
ASGSGQSTRYWDCCKPSCAWPGKAAVSQPVYACDANFQRLSDFNVQSGCNGGSAYSCADQTPWAVNDNLAYGFAATSIAGGSESSWCCACYALTFTSGPVAGKTMVVQSTSTGGDLGSNHFDIAMPGGGVGIFNGCSSQFGGLPGAQYGGISSRDQCDSFPAPLKPGCQWRFDWFQNADNPTFTFQQVQCPAEIVARSGCKRNDDSSFPVFTTTPTPTPTPPTPTPTPTPGCTSQKWAQCGGIGFSGCTTCVSGTTCQKLNDYYSQCL

SEQ ID NO: 46434 - protein, 268 aa, Thermothielavioides terrestris
ASGSGQSTRYWDCCKPSCAWPGKAAVSQPVYACDANFQRLSDFNVQSGCNGGSAYACADQTPWAVNDNLAYGFAATSIAGGSESSWCCACYALTFTSGPVAGKTMVVQSTSTGGDLGSNHFDIAMPGGGVGIFDGCSSQFGGLPGARYGGISSRDQCDSFPAPLKPGCQWRFDWFQNADNPTFTFQQVQCPAEIVARSGCKRNDDSSFPVFTTPTTPTTPTTPTTPTTPTGCTSQKWAQCGGIGFSGCTTCVSGTTCQKLNDYYSQCL

SEQ ID NO: 46435 - protein, 266 aa, Thermothielavioides terrestris
ASGSGQSTRYWDCCKPSCAWPGKAAVSQPVYACDANFQRLSDFNVQSGCNGGSAYACADQTPWAVNDNLAYGFAATSIAGGSESSWCCACYALTFTSGPVAGKTMVVQSTSTGGDLGSNHFDIAMPGGGVGIFDGCSSQFGGLPGARYGGISSRDQCDSFPAPLKPGCQWRFDWFQNADNPTFTFQQVQCPAEIVARSGCKRNDDSSFPVFTPQPTPEPTPQPTPEPTGCTSQKWAQCGGIGFSGCTTCVSGTTCQKLNDYYSQCL

SEQ ID NO: 46436 - protein, 266 aa, Thermothielavioides terrestris
ASGSGQSTRYWDCCKPSCAWPGKAAVSQPVYACDANFQRLSDFNVQSGCNGGSAYACADQTPWAVNDNLAYGFAATSIAGGSESSWCCACYALTFTSGPVAGKTMVVQSTSTGGDLGSNHFDIAMPGGGVGIFDGCSSQFGGLPGARYGGISSRDQCDSFPAPLKPGCQWRFDWFQNADNPTFTFQQVQCPAEIVARSGCKRNDDSSFPVFTPQPTPQPTPQPTPQPTGCTSQKWAQCGGIGFSGCTTCVSGTTCQKLNDYYSQCL

SEQ ID NO: 46437 - protein, 266 aa, Thermothielavioides terrestris
ASGSGQSTRYWDCCKPSCAWPGKAAVSQPVYACDANFQRLSDFNVQSGCNGGSAYSCADQTPWAVNDNLAYGFAATSIAGGSESSWCCACYALTFTSGPVAGKTMVVQSTSTGGDLGSNHFDIAMPGGGVGIFDGCSSQFGGLPGARYGGISSRDQCDSFPAPLKPGCQWRFDWFQNADNPTFTFQQVQCPAEIVARSGCKRNDDSSFPVFTPEPTPEPTPEPTPEPTGCTSQKWAQCGGIGFSGCTTCVSGTTCQKLNDYYSQCL

SEQ ID NO: 46438 - protein, 266 aa, Thermothielavioides terrestris
ASGSGQSTRYWDCCKPSCAWPGKAAVSQPVYACDANFQRLSDFNVQSGCNGGSAYACADQTPWAVNDNLAYGFAATSIAGGSESSWCCACYALTFTSGPVAGKTMVVQSTSTGGDLGSNHFDIAMPGGGVGIFNGCSSQFGGLPGARYGGISSRDQCDSFPAPLKPGCQWRFDWFQNADNPTFTFQQVQCPAEIVARSGCKRNDDSSFPVFTPEPTPEPTPEPTPEPTGCTSQKWAQCGGIGFSGCTTCVSGTTCQKLNDYYSQCL

SEQ ID NO: 46439 - protein, 266 aa, Thermothielavioides terrestris
ASGSGQSTRYWDCCKPSCAWPGKAAVSQPVYACDANFQRLSDFNVQSGCNGGSAYACADQTPWAVNDNLAYGFAATSIAGGSESSWCCACYALTFTSGPVAGKTMVVQSTSTGGDLGSNHFDIAMPGGGVGIFDGCSSQFGGLPGARYGGISSRDQCDSFPAPLKPGCQWRFDWFQNADNPTFTFQQVQCPAEIVARSGCKRNDDSSFPVFTPEPTPEPTPEPTPEPTGCTSQKWAQCGGIGFSGCTTCVSGTTCQKLNDYYSQCL

SEQ ID NO: 46440 - protein, 266 aa, Thermothielavioides terrestris
ASGSGQSTRYWDCCKPSCAWPGKAAVSQPVYACDANFQRLSDFNVQSGCNGGSAYACADQTPWAVNDNLAYGFAATSIAGGSESSWCCACYALTFTSGPVAGKTMVVQSTSTGGDLGSNHFDIAMPGGGVGIFDGCSSQFGGLPGARYGGISSRDQCDSFPAPLKPGCQWRFDWFQNADNPTFTFQQVQCPAEIVARSGCKRNDDSSFPVFTPEPTPRPTPEPTPRPTGCTSQKWAQCGGIGFSGCTTCVSGTTCQKLNDYYSQCL

SEQ ID NO: 46441 - protein, 266 aa, Thermothielavioides terrestris
ASGSGQSTRYWDCCKPSCAWPGKAAVSQPVYACDANFQRLSDFNVQSGCNGGSAYACADQTPWAVNDNLAYGFAATSIAGGSESSWCCACYALTFTSGPVAGKTMVVQSTSTGGDLGSNHFDIAMPGGGVGIFDGCSSQFGGLPGARYGGISSRDQCDSFPAPLKPGCQWRFDWFQNADNPTFTFQQVQCPAEIVARSGCKRNDDSSFPVFTPEPTPKPTPEPTPKPTGCTSQKWAQCGGIGFSGCTTCVSGTTCQKLNDYYSQCL

SEQ ID NO: 46442 - protein, 266 aa, Thermothielavioides terrestris
ASGSGQSTRYWDCCKPSCAWPGKAAVSQPVYACDANFQRLSDFNVQSGCNGGSAYACADQTPWAVNDNLAYGFAATSIAGGSESSWCCACYALTFTSGPVAGKTMVVQSTSTGGDLGSNHFDIAMPGGGVGIFDGCSSQFGGLPGARYGGISSRDQCDSFPAPLKPGCQWRFDWFQNADNPTFTFQQVQCPAEIVARSGCKRNDDSSFPVFTPEPTPQPTPEPTPQPTGCTSQKWAQCGGIGFSGCTTCVSGTTCQKLNDYYSQCL

SEQ ID NO: 46443 - protein, 266 aa, Thermothielavioides terrestris
ASGSGQSTRYWDCCKPSCAWPGKAAVSQPVYACDANFQRLSDFNVQSGCNGGSAYACADQTPWAVNDNLAYGFAATSIAGGSESSWCCACYALTFTSGPVAGKTMVVQSTSTGGDLGSNHFDIAMPGGGVGIFDGCSSQFGGLPGARYGGISSRDQCDSFPAPLKPGCQWRFDWFQNADNPTFTFQQVQCPAEIVARSGCKRNDDSSFPVFTPSPTPSPTPSPTPSPTGCTSQKWAQCGGIGFSGCTTCVSGTTCQKLNDYYSQCL

SEQ ID NO: 46444 - protein, 265 aa, Thermothielavioides terrestris
ASGSGQSTRYWDCCKPSCAWPGKAAVSQPVYACDANFQRLSDFNVQSGCNGGSAYACADQTPWAVNDNLAYGFAATSIAGGSESSWCCACYALTFTSGPVAGKTMVVQSTSTGGDLGSNHFDIAMPGGGVGIFDGCSSQFGGLPGARYGGISSRDQCDSFPAPLKPGCQWRFDWFQNADNPTFTFQQVQCPAEIVARSGCKRNDDSSFPVFTSPPSPPSPPSPPSPPGCTSQKWAQCGGIGFSGCTTCVSGTTCQKLNDYYSQCL

SEQ ID NO: 46445 - protein, 305 aa, Humicola insolens
MRSSPLLPSAVVAALPVLALAADGRSTRFWDCCLPSCGWAKKAPVNQPVFSCNANFQRITDFDAKSGCEPGGVAYXCAXQTPEAVNDXFALGFAATSIAGSNEAGWCCACYELTFTSGPVAGKKMVVQSTSTGGDLGSNHFDLNIPGGGVGIXDGCTPQFGGLPGQRSGGISSANECDRFPDPLKPGCYWRFDWFKNADNPSFSFRQVQCPAELVARTGCRRNDDGNFPAVQIPSSSTSSPSSTPTSTSTTSTSTTSSPPVQPTTPSGCTAERWAQCGGNGWSGCTTCVAGSTCTKINDWFHQCL

SEQ ID NO: 46446 - protein, 262 aa, Thermothielavioides terrestris
ASGSGQSTRYWDCCKPSCAWPGKAAVSQPVYACDANFQRLSDFNVQSGCNGGSAYSCADQTPWAVNDNLAYGFAATSIAGGSESSWCCACYALTFTSGPVAGKTMVVQSTSTGGDLGSNHFDIAMPGGGVGIFNGCSSQFGGLPGAQYGGISSRDQCDSFPAPLKPGCQWRFDWFQNADNPTFTFQQVQCPAEIVARSGCKRNDDSSFPVFTTTPPTPTPTPTPGCTAERWAQCGGNGWSGCTTCVAGSTCTKINDWYHQCL

SEQ ID NO: 46447 - protein, 268 aa, Thermothielavioides terrestris
ASGSGQSTRYWDCCKPSCAWPGKAAVSQPVYACDANFQRLSDFNVQSGCNGGSAYACADQTPWAVNDNLAYGFAATSIAGGSESSWCCACYALTFTSGPVAGKTMVVQSTSTGGDLGSNHFDIAMPGGGVGIFDGCSSQFGGLPGARYGGISSRDQCDSFPAPLKPGCQWRFDWFQNADNPTFTFQQVQCPAEIVARSGCKRNDDSSFPVFTTTPTPTPTPPTPTPTPTPGCTSQKWAQCGGIGFSGCTTCVSGTTCQKLNDYYSQCL

SEQ ID NO: 46448 - protein, 266 aa, Thermothielavioides terrestris
ASGSGQSTRYWDCCKPSCAWPGKAAVSQPVYACDANFQRLSDFNVQSGCNGGSAYACADQTPWAVNDNLAYGFAATSIAGGSESSWCCACYALTFTSGPVAGKTMVVQSTSTGGDLGSNHFDIAMPGGGVGIFDGCSSQFGGLPGAQYGGISSRDECDSFPEPLKPGCQWRFDWFQNADNPTFTFQQVQCPAEIVARSGCKRNDDSSFPVFTPEPTPEPTPEPTPEPTGCTSQKWAQCGGIGFSGCTTCVSGTTCQKLNDYYSQCL

SEQ ID NO: 46449 - protein, 266 aa, Thermothielavioides terrestris
ASGSGQSTRYWDCCKPSCAWPGKAAVSQPVYACDANFQRLSDFNVQSGCNGGSAYACADQTPWAVNDNLAYGFAATSIAGGSESSWCCACYALTFTSGPVAGKTMVVQSTSTGGDLGSNHFDIAMPGGGVGIFDGCSSQFGGLPGAQYGGISSRDECDSFPAPLKPGCYWRFDWFQNADNPTFTFQQVQCPAEIVARSGCKRNDDSSFPVFTPEPTPEPTPEPTPEPTGCTSQKWAQCGGIGFSGCTTCVSGTTCQKLNDYYSQCL

SEQ ID NO: 46450 - protein, 266 aa, Thermothielavioides terrestris
ASGSGQSTRYWDCCKPSCAWPGKAAVSQPVYACDANFQRLSDFNVQSGCNGGSAYACADQTPWAVNDNLAYGFAATSIAGGSESSWCCACYALTFTSGPVAGKTMVVQSTSTGGDLGSNHFDIAMPGGGVGIFDGCSSQFGGLPGARYGGISSRDQCDSFPAPLKPGCQWRFDWFQNADNPTFTFQQVQCPAEIVARSGCKRNDDSSFPVFTPKPTPEPTPKPTPEPTGCTSQKWAQCGGIGFSGCTTCVSGTTCQKLNDYYSQCL

SEQ ID NO: 46451 - protein, 257 aa, Thielavia terrestris. Staphylotrichum coccosporum. Chimeric. Synthetic construct
MRSTPVLRTTLAAALPLVASAASGSGQSTRYWDCCKPSCAWPGKAAVSQPVYACDANFQRLSDFNVQSGCNGGSAYSCADQTPWAVNDNLAYGFAATSIAGGSESSWCCACYALTFTSGPVAGKTMVVQSTSTGGDLGSNHFDIAMPGGGVGIFNGCSSQFGGLPGAQYGGISSRDQCDSFPAPLKPGCQWRFDWFQNADNPTFTFQQVQCPAEIVARSGCKRNDDGNFPVFTPPSGGQSSSSSSSSSAKPTSTSTS

SEQ ID NO: 46452 - protein, 271 aa, Thermothielavioides terrestris
ASGSGQSTRYWDCCKPSCAWPGKAAVSQPVYACDANFQRLSDFNVQSGCNGGSAYACADQTPWAVNDNLAYGFAATSIAGGSESSWCCACYALTFTSGPVAGKTMVVQSTSTGGDLGSNHFDIAMPGGGVGIFDGCSSQFGGLPGARYGGISSRDQCDSFPAPLKPGCQWRFDWFQNADNPTFTFQQVQCPAEIVARSGCKRNDDSSFPVFTPPSSPSSPSSPSSPSSPSSPSGCTSQKWAQCGGIGFSGCTTCVSGTTCQKLNDYYSQCL

SEQ ID NO: 46453 - protein, 270 aa, Thermothielavioides terrestris
ASGSGQSTRYWDCCKPSCAWPGKAAVSQPVYACDANFQRLSDFNVQSGCNGGSAYSCADQTPWAVNDNLAYGFAATSIAGGSESSWCCACYALTFTSGPVAGKTMVVQSTSTGGDLGSNHFDIAMPGGGVGIFNGCSSQFGGLPGAQYGGISSRDQCDSFPAPLKPGCQWRFDWFQNADNPTFTFQQVQCPAEIVARSGCKRNDDSSFPVFTPEPTPEPTPEPTPEPTPEPTGCTSQKWAQCGGIGFSGCTTCVSGTTCQKLNDYYSQCL

SEQ ID NO: 46454 - protein, 270 aa, Thermothielavioides terrestris
ASGSGQSTRYWDCCKPSCAWPGKAAVSQPVYACDANFQRLSDFNVQSGCNGGSAYACADQTPWAVNDNLAYGFAATSIAGGSESSWCCACYALTFTSGPVAGKTMVVQSTSTGGDLGSNHFDIAMPGGGVGIFDGCSSQFGGLPGARYGGISSRDQCDSFPAPLKPGCQWRFDWFQNADNPTFTFQQVQCPAEIVARSGCKRNDDSSFPVFTPSPTPSPTPSPTPSPTPSPTGCTSQKWAQCGGIGFSGCTTCVSGTTCQKLNDYYSQCL

SEQ ID NO: 46455 - protein, 284 aa, Humicola insolens
ADGRSTRYWDCCKPSCGWAKKAPVNQPVFSCNANFQXITDFDAKSGCEPGGVAYSCADQTPXXVNDDFALGFAATSIXGSNEAGWCCACYELTFTSGPVAGKKMVVQSTSTGGDLGSXHFDLNIPGGGXGXFXGCXPQFGGXPGQXYGGISSRNECDXFPDAXKPGCYWRFDWFKXADXPSFSFRXVQCPAELVAXTGCRRNDDGNFPAVQIPSSSTSSPVNQPTSTSTTSTSTTSSPPVQPTTPSGCTAERWAQCGGNGWSGCTTCVAGSTCTKINDWYHQCL

SEQ ID NO: 46456 - protein, 278 aa, Thermothielavioides terrestris
ASGSGQSTRYWDCCKPSCAWPGKAAVSQPVYACDANFQRLSDFNVQSGCNGGSAYACADQTPWAVNDNLAYGFAATSIAGGSESSWCCACYALTFTSGPVAGKTMVVQSTSTGGDLGSNHFDIAMPGGGVGIFDGCSSQFGGLPGARYGGISSRDQCDSFPAPLKPGCQWRFDWFQNADNPTFTFQQVQCPAEIVARSGCKRNDDSSFPVFTPPSGGPGGPGTPTSTAPGSGPTSPGGGSGCTAERWAQCGGNGWSGCTTCVAGSTCTKINDWYHQCL

SEQ ID NO: 46457 - protein, 278 aa, Thermothielavioides terrestris
ASGSGQSTRYWDCCKPSCAWPGKAAVSQPVYACDANFQRLSDFNVQSGCNGGSAYACADQTPWAVNDNLAYGFAATSIAGGSESSWCCACYALTFTSGPVAGKTMVVQSTSTGGDLGSNHFDIAMPGGGVGIFDGCSSQFGGLPGARYGGISSRDQCDSFPAPLKPGCQWRFDWFQNADNPTFTFQQVQCPAEIVARSGCKRNDDSSFPVFTPPPGGPGGTGTPTSTAPGSGPTSPGGGSGCTAERWAQCGGNGWSGCTTCVAGSTCTKINDWYHQCL

SEQ ID NO: 46458 - protein, 240 aa, Thermothielavioides terrestris
ASGSGQSTRYWDCCKPSCAWPGKAAVSQPVYACDANFQRLSDFNVQSGCNGGSAYSCADQTPWAVNDNLAYGFAATSIAGGSESSWCCACYALTFTSGPVAGKTMVVQSTSTGGDLGSNHFDIAMPGGGVGIFNGCSSQFGGLPGAQYGGISSRDQCDSFPAPLKPGCQWRFDWFQNADNPTFTFQQVQCPAEIVARSGCKRNDDSSFPVFTPEPTPEPTGCTAERWAQCGGNGWSGCTT

SEQ ID NO: 46459 - protein, 270 aa, Thermothielavioides terrestris
ASGSGQSTRYWDCCKPSCAWPGKAAVSQPVYACDANFQRLSDFNVQSGCNGGSAYSCADQTPWAVNDNLAYGFAATSIAGGSESSWCCACYALTFTSGPVAGKTMVVQSTSTGGDLGSNHFDIAMPGGGVGIFDGCSSQFGGLPGARYGGISSRDQCDSFPAPLKPGCQWRFDWFQNADNPTFTFQQVQCPAEIVARSGCKRNDDSSFPVFTPEPTPEPTPEPTPEPTPEPTGCTSQKWAQCGGIGFSGCTTCVSGTTCQKLNDYYSQCL

SEQ ID NO: 46460 - protein, 270 aa, Thermothielavioides terrestris
ASGSGQSTRYWDCCKPSCAWPGKAAVSQPVYACDANFQRLSDFNVQSGCNGGSAYACADQTPWAVNDNLAYGFAATSIAGGSESSWCCACYALTFTSGPVAGKTMVVQSTSTGGDLGSNHFDIAMPGGGVGIFDGCSSQFGGLPGARYGGISSRDQCDSFPAPLKPGCQWRFDWFQNADNPTFTFQQVQCPAEIVARSGCKRNDDSSFPVFTPEPTPEPTPEPTPEPTPGPTGCTSQKWAQCGGIGFSGCTTCVSGTTCQKLNDYYSQCL

SEQ ID NO: 46461 - protein, 270 aa, Thermothielavioides terrestris
ASGSGQSTRYWDCCKPSCAWPGKAAVSQPVYACDANFQRLSDFNVQSGCNGGSAYACADQTPWAVNDNLAYGFAATSIAGGSESSWCCACYALTFTSGPVAGKTMVVQSTSTGGDLGSNHFDIAMPGGGVGIFNGCSSQFGGLPGARYGGISSRDQCDSFPAPLKPGCQWRFDWFQNADNPTFTFQQVQCPAEIVARSGCKRNDDSSFPVFTPEPTPEPTPEPTPEPTPEPTGCTSQKWAQCGGIGFSGCTTCVSGTTCQKLNDYYSQCL

SEQ ID NO: 46462 - protein, 269 aa, Thermothielavioides terrestris
ASGSGQSTRYWDCCKPSCAWPGKAAVSQPVYACDANFQRLSDFNVQSGCNGGSAYACADQTPWAVNDNLAYGFAATSIAGGSESSWCCACYALTFTSGPVAGKTMVVQSTSTGGDLGSNHFDIAMPGGGVGIFDGCSSQFGGLPGARYGGISSRDQCDSFPAPLKPGCQWRFDWFQNADNPTFTFQQVQCPAEIVARSGCKRNDDSSFPVFTPEPTPEPTPEPTPEPTPETGCTSQKWAQCGGIGFSGCTTCVSGTTCQKLNDYYSQCL

SEQ ID NO: 46463 - protein, 268 aa, Thermothielavioides terrestris
ASGSGQSTRYWDCCKPSCAWPGKAAVSQPVYACDANFQRLSDFNVQSGCNGGSAYACADQTPWAVNDNLAYGFAATSIAGGSESSWCCACYALTFTSGPVAGKTMVVQSTSTGGDLGSNHFDIAMPGGGVGIFDGCSSQFGGLPGARYGGISSRDQCDSFPAPLKPGCQWRFDWFQNADNPTFTFQQVQCPAEIVARSGCKRNDDSSFPVFTPEPTPEPTPEPTPEPTPEPCTSQKWAQCGGIGFSGCTTCVSGTTCQKLNDYYSQCL

SEQ ID NO: 46464 - protein, 278 aa, Thermothielavioides terrestris
ASGSGQSTRYWDCCKPSCAWPGKAAVSQPVYACDANFQRLSDFNVQSGCNGGSAYACADQTPWAVNDNLAYGFAATSIAGGSESSWCCACYALTFTSGPVAGKTMVVQSTSTGGDLGSNHFDIAMPGGGVGIFDGCSSQFGGLPGARYGGISSRDQCDSFPAPLKPGCQWRFDWFQNADNPTFTFQQVQCPAEIVARSGCKRNDDSSFPVFTPPPGGPGGPGTPTSTAPGSGPTSPGGGSGCTAERWAQCGGNGWSGCTTCVAGSTCTKINDWYHQCL

SEQ ID NO: 46465 - protein, 262 aa, Thermothielavioides terrestris
ASGSGQSTRYWDCCKPSCAWPGKAAVSQPVYACDANFQRLSDFNVQSGCNGGSAYSCADQTPWAVNDNLAYGFAATSIAGGSESSWCCACYALTFTSGPVAGKTMVVQSTSTGGDLGSNHFDIAMPGGGVGIFNGCSSQFGGLPGAQYGGISSRDQCDSFPAPLKPGCQWRFDWFQNADNPTFTFQQVQCPAEIVARSGCKRNDDSSFPVFTPEPTPEPTPEPTGCTAERWAQCGGNGWSGCTTCVAGSTCTKINDWYHQCL

SEQ ID NO: 46466 - protein, 270 aa, Thermothielavioides terrestris
ASGSGQSTRYWDCCKPSCAWPGKAAVSQPVYACDANFQRLSDFNVQSGCNGGSAYACADQTPWAVNDNLAYGFAATSIAGGSESSWCCACYALTFTSGPVAGKTMVVQSTSTGGDLGSNHFDIAMPGGGVGIFDGCSSQFGGLPGARYGGISSRDQCDSFPAPLKPGCQWRFDWFQNADNPTFTFQQVQCPAEIVARSGCKRNDDSSFPVFTPEPTPEPTPEPTPEPTPSPTGCTSQKWAQCGGIGFSGCTTCVSGTTCQKLNDYYSQCL

SEQ ID NO: 46467 - protein, 270 aa, Thermothielavioides terrestris
ASGSGQSTRYWDCCKPSCAWPGKAAVSQPVYACDANFQRLSDFNVQSGCNGGSAYACADQTPWAVNDNLAYGFAATSIAGGSESSWCCACYALTFTSGPVAGKTMVVQSTSTGGDLGSNHFDIAMPGGGVGIFDGCSSQFGGLPGARYGGISSRDQCDSFPAPLKPGCQWRFDWFQNADNPTFTFQQVQCPAEIVARSGCKRNDDSSFPVFTPEPTPEPTPEPTPEPTPTPTGCTSQKWAQCGGIGFSGCTTCVSGTTCQKLNDYYSQCL

SEQ ID NO: 46468 - protein, 270 aa, Thermothielavioides terrestris
ASGSGQSTRYWDCCKPSCAWPGKAAVSQPVYACDANFQRLSDFNVQSGCNGGSAYACADQTPWAVNDNLAYGFAATSIAGGSESSWCCACYALTFTSGPVAGKTMVVQSTSTGGDLGSNHFDIAMPGGGVGIFDGCSSQFGGLPGARYGGISSRDQCDSFPAPLKPGCQWRFDWFQNADNPTFTFQQVQCPAEIVARSGCKRNDDSSFPVFTPEPTPEPTPEPTPEPTPDPTGCTSQKWAQCGGIGFSGCTTCVSGTTCQKLNDYYSQCL

SEQ ID NO: 46469 - protein, 270 aa, Thermothielavioides terrestris
ASGSGQSTRYWDCCKPSCAWPGKAAVSQPVYACDANFQRLSDFNVQSGCNGGSAYACADQTPWAVNDNLAYGFAATSIAGGSESSWCCACYALTFTSGPVAGKTMVVQSTSTGGDLGSNHFDIAMPGGGVGIFDGCSSQFGGLPGARYGGISSRDQCDSFPAPLKPGCQWRFDWFQNADNPTFTFQQVQCPAEIVARSGCKRNDDSSFPVFTPEPTPEPTPEPTPEPTPEPTGCTSQKWAQCGGIGFSGCTTCVSGTTCQKLNDYYSQCL

SEQ ID NO: 46470 - protein, 270 aa, Thermothielavioides terrestris
ASGSGQSTRYWDCCKPSCAWPGKAAVSQPVYACDANFQRLSDFNVQSGCNGGSAYACADQTPWAVNDNLAYGFAATSIAGGSESSWCCACYALTFTSGPVAGKTMVVQSTSTGGDLGSNHFDIAMPGGGVGIFDGCSSQFGGLPGARYGGISSRDQCDSFPAPLKPGCQWRFDWFQNADNPTFTFQQVQCPAEIVARSGCKRNDDSSFPVFTPEPTPEPTPEPTPEPTPEPTSCTSQKWAQCGGIGFSGCTTCVSGTTCQKLNDYYSQCL

SEQ ID NO: 46471 - protein, 284 aa, Humicola insolens
ADGRSTRYWDCCKPSCGWAKKAPVNQPVFSCNANFQRITDFDAKSGCEPGGVAYSCADQTPWAVNDDFALGFAATSIAGSNEAGWCCACYELTFTSGPVAGKKMVVQSTSTGGDLGSNHFDLNIPGGGVGIFDGCTPQFGGLPGQRYGGISSRNECDRFPDALKPGCYWRFDWFKNADNPSFSFRQVQCPAELVARTGCRRNDDGNFPAVQIPSSSTSSPVNQPTSTSTTSTSTTSSPPVQPTTPSGCTAXXXXXCGGNGXXGCXTCXXGSTCXXXXXXXXXCL

SEQ ID NO: 46472 - protein, 269 aa, Thermothielavioides terrestris
ASGSGQSTRYWDCCKPSCAWPGKAAVSQPVYACDANFQRLSDFNVQSGCNGGSAYACADQTPWAVNDNLAYGFAATSIAGGSESSWCCACYALTFTSGPVAGKTMVVQSTSTGGDLGSNHFDIAMPGGGVGIFDGCSSQFGGLPGARYGGISSRDQCDSFPAPLKPGCQWRFDWFQNADNPTFTFQQVQCPAEIVARSGCKRNDDSSFPVFTPEPTPEPTPEPTPEPTPEPTCTSQKWAQCGGIGFSGCTTCVSGTTCQKLNDYYSQCL

SEQ ID NO: 46473 - protein, 269 aa, Thermothielavioides terrestris
ASGSGQSTRYWDCCKPSCAWPGKAAVSQPVYACDANFQRLSDFNVQSGCNGGSAYACADQTPWAVNDNLAYGFAATSIAGGSESSWCCACYALTFTSGPVAGKTMVVQSTSTGGDLGSNHFDIAMPGGGVGIFDGCSSQFGGLPGARYGGISSRDQCDSFPAPLKPGCQWRFDWFQNADNPTFTFQQVQCPAEIVARSGCKRNDDSSFPVFTPEPTPEPTPEPTPEPTPSPTCTSQKWAQCGGIGFSGCTTCVSGTTCQKLNDYYSQCL

SEQ ID NO: 46474 - protein, 239 aa, Thermothielavioides terrestris
ASGSGQSTRYWDCCKPSCAWPGKAAVSQPVYACDANFQRLSDFNVQSGCNGGSAYSCADQTPWAVNDNLAYGFAATSIAGGSESSWCCACYALTFTSGPVAGKTMVVQSTSTGGDLGSNHFDIAMPGGGVGIFNGCSSQFGGLPGAQYGGISSRDQCDSFPAPLKPGCQWRFDWFQNADNPTFTFQQVQCPAEIVARSGCKRNDDSSFPVFTPPPPPPPGCTAERWAQCGGNGWSGCTT

SEQ ID NO: 46475 - protein, 240 aa, Thermothielavioides terrestris
ASGSGQSTRYWDCCKPSCAWPGKAAVSQPVYACDANFQRLSDFNVQSGCNGGSAYSCADQTPWAVNDNLAYGFAATSIAGGSESSWCCACYALTFTSGPVAGKTMVVQSTSTGGDLGSNHFDIAMPGGGVGIFNGCSSQFGGLPGAQYGGISSRDQCDSFPAPLKPGCQWRFDWFQNADNPTFTFQQVQCPAEIVARSGCKRNDDSSFPVFTPEPTPEPTGCTSQKWAQCGGIGFSGCTT

SEQ ID NO: 46476 - protein, 235 aa, Thermothielavioides terrestris
ASGSGQSTRYWDCCKPSCAWPGKAAVSQPVYACDANFQRLSDFNVQSGCNGGSAYACADQTPWAVNDNLAYGFAATSIAGGSESSWCCACYALTFTSGPVAGKTMVVQSTSTGGDLGSNHFDIAMPGGGVGIFDGCSSQFGGLPGAQYGGISSRDECDSFPAPLKPGCYWRFDWFQNADNPTFTFQQVQCPAEIVARSGCKRNDDSSFPVFTPPPPCTAERWAQCGGNGWSGCTT

SEQ ID NO: 46477 - protein, 270 aa, Thermothielavioides terrestris
ASGSGQSTRYWDCCKPSCAWPGKAAVSQPVYACDANFQRLSDFNVQSGCNGGSAYACADQTPWAVNDNLAYGFAATSIAGGSESSWCCACYALTFTSGPVAGKTMVVQSTSTGGDLGSNHFDIAMPGGGVGIFDGCSSQFGGLPGARYGGISSRDQCDSFPAPLKPGCQWRFDWFQNADNPTFTFQQVQCPAEIVARSGCKRNDDSSFPVFTPEPTPEPTPEPTPEPTPEPTRCTSQKWAQCGGIGFSGCTTCVSGTTCQKLNDYYSQCL

SEQ ID NO: 46478 - protein, 270 aa, Thermothielavioides terrestris
ASGSGQSTRYWDCCKPSCAWPGKAAVSQPVYACDANFQRLSDFNVQSGCNGGSAYACADQTPWAVNDNLAYGFAATSIAGGSESSWCCACYALTFTSGPVAGKTMVVQSTSTGGDLGSNHFDIAMPGGGVGIFDGCSSQFGGLPGARYGGISSRDQCDSFPAPLKPGCQWRFDWFQNADNPTFTFQQVQCPAEIVARSGCKRNDDSSFPVFTPEPTPEPTPEPTPEPTPEPTTCTSQKWAQCGGIGFSGCTTCVSGTTCQKLNDYYSQCL

SEQ ID NO: 46479 - protein, 270 aa, Thermothielavioides terrestris
ASGSGQSTRYWDCCKPSCAWPGKAAVSQPVYACDANFQRLSDFNVQSGCNGGSAYACADQTPWAVNDNLAYGFAATSIAGGSESSWCCACYALTFTSGPVAGKTMVVQSTSTGGDLGSNHFDIAMPGGGVGIFDGCSSQFGGLPGARYGGISSRDQCDSFPAPLKPGCQWRFDWFQNADNPTFTFQQVQCPAEIVARSGCKRNDDSSFPVFTPEPTPEPTPEPTPEPTPRPTTCTSQKWAQCGGIGFSGCTTCVSGTTCQKLNDYYSQCL

SEQ ID NO: 46480 - protein, 270 aa, Thermothielavioides terrestris
ASGSGQSTRYWDCCKPSCAWPGKAAVSQPVYACDANFQRLSDFNVQSGCNGGSAYACADQTPWAVNDNLAYGFAATSIAGGSESSWCCACYALTFTSGPVAGKTMVVQSTSTGGDLGSNHFDIAMPGGGVGIFDGCSSQFGGLPGARYGGISSRDQCDSFPAPLKPGCQWRFDWFQNADNPTFTFQQVQCPAEIVARSGCKRNDDSSFPVFTPEPTPEPTPEPTPEPTPEPTDCTSQKWAQCGGIGFSGCTTCVSGTTCQKLNDYYSQCL

SEQ ID NO: 46481 - protein, 270 aa, Thermothielavioides terrestris
ASGSGQSTRYWDCCKPSCAWPGKAAVSQPVYACDANFQRLSDFNVQSGCNGGSAYACADQTPWAVNDNLAYGFAATSIAGGSESSWCCACYALTFTSGPVAGKTMVVQSTSTGGDLGSNHFDIAMPGGGVGIFDGCSSQFGGLPGAQYGGISSRDECDSFPAPLKPGCYWRFDWFQNADNPTFTFQQVQCPAEIVARSGCKRNDDSSFPVFTPEPTPEPTPEPTPEPTPEPTGCTSQKWAQCGGIGFSGCTTCVSGTTCQKLNDYYSQCL

SEQ ID NO: 46482 - protein, 240 aa, Thermothielavioides terrestris
ASGSGQSTRYWDCCKPSCAWPGKAAVSQPVYACDANFQRLSDFNVQSGCNGGSAYSCADQTPWAVNDNLAYGFAATSIAGGSESSWCCACYALTFTSGPVAGKTMVVQSTSTGGDLGSNHFDIAMPGGGVGIFNGCSSQFGGLPGAQYGGISSRDQCDSFPAPLKPGCQWRFDWFQNADNPTFTFQQVQCPAEIVARSGCKRNDDSSFPVFTPPPPPPPPGCTAERWAQCGGNGWSGCTT

SEQ ID NO: 46483 - protein, 239 aa, Thermothielavioides terrestris
ASGSGQSTRYWDCCKPSCAWPGKAAVSQPVYACDANFQRLSDFNVQSGCNGGSAYSCADQTPWAVNDNLAYGFAATSIAGGSESSWCCACYALTFTSGPVAGKTMVVQSTSTGGDLGSNHFDIAMPGGGVGIFNGCSSQFGGLPGAQYGGISSRDQCDSFPAPLKPGCQWRFDWFQNADNPTFTFQQVQCPAEIVARSGCKRNDDSSFPVFTPPPPPPPGCTSQKWAQCGGIGFSGCTT

SEQ ID NO: 46484 - protein, 240 aa, Thermothielavioides terrestris
ASGSGQSTRYWDCCKPSCAWPGKAAVSQPVYACDANFQRLSDFNVQSGCNGGSAYSCADQTPWAVNDNLAYGFAATSIAGGSESSWCCACYALTFTSGPVAGKTMVVQSTSTGGDLGSNHFDIAMPGGGVGIFDGCSSQFGGLPGARYGGISSRDQCDSFPAPLKPGCQWRFDWFQNADNPTFTFQQVQCPAEIVARSGCKRNDDSSFPVFTPEPTPEPTGCTAERWAQCGGNGWSGCTT

SEQ ID NO: 46485 - protein, 236 aa, Thermothielavioides terrestris
ASGSGQSTRYWDCCKPSCAWPGKAAVSQPVYACDANFQRLSDFNVQSGCNGGSAYACADQTPWAVNDNLAYGFAATSIAGGSESSWCCACYALTFTSGPVAGKTMVVQSTSTGGDLGSNHFDIAMPGGGVGIFDGCSSQFGGLPGAQYGGISSRDECDSFPAPLKPGCYWRFDWFQNADNPTFTFQQVQCPAEIVARSGCKRNDDSSFPVFTPPPPPCTAERWAQCGGNGWSGCTT

SEQ ID NO: 46486 - protein, 263 aa, Thermothielavioides terrestris
ASGSGQSTRYWDCCKPSCAWPGKAAVSQPVYACDANFQRLSDFNVQSGCNGGSAYSCADQTPWAVNDNLAYGFAATSIAGGSESSWCCACYALTFTSGPVAGKTMVVQSTSTGGDLGSNHFDIAMPGGGVGIFNGCSSQFGGLPGAQYGGISSRDQCDSFPAPLKPGCQWRFDWFQNADNPTFTFQQVQCPAEIVARSGCKRNDDSSFPVFTPPPPPPPPPPPPPGCTAERWAQCGGNGWSGCTTCVAGSTCTKINDWYHQCL

SEQ ID NO: 46487 - protein, 235 aa, Thermothielavioides terrestris
ASGSGQSTRYWDCCKPSCAWPGKAAVSQPVYACDANFQRLSDFNVQSGCNGGSAYACADQTPWAVNDNLAYGFAATSIAGGSESSWCCACYALTFTSGPVAGKTMVVQSTSTGGDLGSNHFDIAMPGGGVGIFDGCSSQFGGLPGAQYGGISSRDECDSFPAPLKPGCYWRFDWFQNADNPTFTFQQVQCPAEIVARSGCKRNDDSSFPVFTPPPPCTSQKWAQCGGIGFSGCTT

SEQ ID NO: 46488 - protein, 262 aa, Thermothielavioides terrestris
ASGSGQSTRYWDCCKPSCAWPGKAAVSQPVYACDANFQRLSDFNVQSGCNGGSAYSCADQTPWAVNDNLAYGFAATSIAGGSESSWCCACYALTFTSGPVAGKTMVVQSTSTGGDLGSNHFDIAMPGGGVGIFDGCSSQFGGLPGARYGGISSRDQCDSFPAPLKPGCQWRFDWFQNADNPTFTFQQVQCPAEIVARSGCKRNDDSSFPVFTPEPTPEPTPEPTGCTAERWAQCGGNGWSGCTTCVAGSTCTKINDWYHQCL

SEQ ID NO: 46489 - protein, 262 aa, Thermothielavioides terrestris
ASGSGQSTRYWDCCKPSCAWPGKAAVSQPVYACDANFQRLSDFNVQSGCNGGSAYACADQTPWAVNDNLAYGFAATSIAGGSESSWCCACYALTFTSGPVAGKTMVVQSTSTGGDLGSNHFDIAMPGGGVGIFNGCSSQFGGLPGARYGGISSRDQCDSFPAPLKPGCQWRFDWFQNADNPTFTFQQVQCPAEIVARSGCKRNDDSSFPVFTPEPTPEPTPEPTGCTAERWAQCGGNGWSGCTTCVAGSTCTKINDWYHQCL

SEQ ID NO: 46490 - protein, 262 aa, Thermothielavioides terrestris
ASGSGQSTRYWDCCKPSCAWPGKAAVSQPVYACDANFQRLSDFNVQSGCNGGSAYACADQTPWAVNDNLAYGFAATSIAGGSESSWCCACYALTFTSGPVAGKTMVVQSTSTGGDLGSNHFDIAMPGGGVGIFDGCSSQFGGLPGARYGGISSRDQCDSFPAPLKPGCQWRFDWFQNADNPTFTFQQVQCPAEIVARSGCKRNDDSSFPVFTTPTTPTTPTTPTGCTAERWAQCGGNGWSGCTTCVAGSTCTKINDWYHQCL

SEQ ID NO: 46491 - protein, 260 aa, Scytalidium indonesiacum
MRSSPLLRSAVVAALPVLALAADGKSTRYWDCCKPSCGWAKKAPVNQPVFSCNANFQRLYDFDAKSGCEPGGVAYSCADQTPWAVNDDFAFGFAATSIAGSNEAGWCCACYELTFTSGPVAGKKMVVQSTSTGGDLGSNHFDLNIPGGGVGIFDGCTPQFGGLPGQRYGGISSRNECERFPDALKPGCYWRFDWFKNADNPNFSFRQVQCPAELVARTGCRRNDDGNFPAVQIPSSSTSSPRIQNLGSTRMLSRSRRRRP

SEQ ID NO: 46492 - protein, 270 aa, Thermothielavioides terrestris
ASGSGQSTRYWDCCKPSCAWPGKAAVSQPVYSCDANFQRLSDFNVQSGCNGGSAYACADQTPWAVNDNLAYGFAATSIAGGSESSWCCACYALTFTSGPVAGKTMVVQSTSTGGDLGSNHFDIAMPGGGVGIFDGCSSQFGGLPGDRYGGISSRDQCDSFPAPLKPGCYWRFDWFQNADNPTVTFQQVQCPAEIVARSGCKRNDDSSFPVFTPSPTPSPTPSPTPSPTPSPTGCTSQKWAQCGGIGFSGCTTCVSGTTCQKLNDYYSQCL

SEQ ID NO: 46493 - protein, 242 aa, Thermothielavioides terrestris
ASGSGQSTRYWDCCKPSCAWPGKAAVSQPVYACDANFQRLSDFNVQSGCNGGSAYSCADQTPWAVNDNLAYGFAATSIAGGSESSWCCACYALTFTSGPVAGKTMVVQSTSTGGDLGSNHFDIAMPGGGVGIFNGCSSQFGGLPGAQYGGISSRDQCDSFPAPLKPGCQWRFDWFQNADNPTFTFQQVQCPAEIVARSGCKRNDDSSFPVFTTPTPTPTPTPGCTAERWAQCGGNGWSGCTT

SEQ ID NO: 46494 - protein, 241 aa, Thermothielavioides terrestris
ASGSGQSTRYWDCCKPSCAWPGKAAVSQPVYACDANFQRLSDFNVQSGCNGGSAYSCADQTPWAVNDNLAYGFAATSIAGGSESSWCCACYALTFTSGPVAGKTMVVQSTSTGGDLGSNHFDIAMPGGGVGIFNGCSSQFGGLPGAQYGGISSRDQCDSFPAPLKPGCQWRFDWFQNADNPTFTFQQVQCPAEIVARSGCKRNDDSSFPVFTPPPPPPPPPGCTAERWAQCGGNGWSGCTT

SEQ ID NO: 46495 - protein, 240 aa, Thermothielavioides terrestris
ASGSGQSTRYWDCCKPSCAWPGKAAVSQPVYACDANFQRLSDFNVQSGCNGGSAYSCADQTPWAVNDNLAYGFAATSIAGGSESSWCCACYALTFTSGPVAGKTMVVQSTSTGGDLGSNHFDIAMPGGGVGIFNGCSSQFGGLPGAQYGGISSRDQCDSFPAPLKPGCQWRFDWFQNADNPTFTFQQVQCPAEIVARSGCKRNDDSSFPVFTPPPPPPPPGCTSQKWAQCGGIGFSGCTT

SEQ ID NO: 46496 - protein, 240 aa, Thermothielavioides terrestris
ASGSGQSTRYWDCCKPSCAWPGKAAVSQPVYACDANFQRLSDFNVQSGCNGGSAYSCADQTPWAVNDNLAYGFAATSIAGGSESSWCCACYALTFTSGPVAGKTMVVQSTSTGGDLGSNHFDIAMPGGGVGIFDGCSSQFGGLPGARYGGISSRDQCDSFPAPLKPGCQWRFDWFQNADNPTFTFQQVQCPAEIVARSGCKRNDDSSFPVFTPEPTPEPTGCTSQKWAQCGGIGFSGCTT

SEQ ID NO: 46497 - protein, 240 aa, Thermothielavioides terrestris
ASGSGQSTRYWDCCKPSCAWPGKAAVSQPVYACDANFQRLSDFNVQSGCNGGSAYACADQTPWAVNDNLAYGFAATSIAGGSESSWCCACYALTFTSGPVAGKTMVVQSTSTGGDLGSNHFDIAMPGGGVGIFDGCSSQFGGLPGARYGGISSRDQCDSFPAPLKPGCQWRFDWFQNADNPTFTFQQVQCPAEIVARSGCKRNDDSSFPVFTPEPTPEPTPCTAERWAQCGGNGWSGCTT

SEQ ID NO: 46498 - protein, 240 aa, Thermothielavioides terrestris
ASGSGQSTRYWDCCKPSCAWPGKAAVSQPVYACDANFQRLSDFNVQSGCNGGSAYACADQTPWAVNDNLAYGFAATSIAGGSESSWCCACYALTFTSGPVAGKTMVVQSTSTGGDLGSNHFDIAMPGGGVGIFDGCSSQFGGLPGARYGGISSRDQCDSFPAPLKPGCQWRFDWFQNADNPTFTFQQVQCPAEIVARSGCKRNDDSSFPVFTPEPTPQPTGCTAERWAQCGGNGWSGCTT

SEQ ID NO: 46499 - protein, 240 aa, Thermothielavioides terrestris
ASGSGQSTRYWDCCKPSCAWPGKAAVSQPVYACDANFQRLSDFNVQSGCNGGSAYACADQTPWAVNDNLAYGFAATSIAGGSESSWCCACYALTFTSGPVAGKTMVVQSTSTGGDLGSNHFDIAMPGGGVGIFDGCSSQFGGLPGARYGGISSRDQCDSFPAPLKPGCQWRFDWFQNADNPTFTFQQVQCPAEIVARSGCKRNDDSSFPVFTPQPTPEPTGCTAERWAQCGGNGWSGCTT

SEQ ID NO: 46500 - protein, 240 aa, Thermothielavioides terrestris
ASGSGQSTRYWDCCKPSCAWPGKAAVSQPVYACDANFQRLSDFNVQSGCNGGSAYACADQTPWAVNDNLAYGFAATSIAGGSESSWCCACYALTFTSGPVAGKTMVVQSTSTGGDLGSNHFDIAMPGGGVGIFDGCSSQFGGLPGARYGGISSRDQCDSFPAPLKPGCQWRFDWFQNADNPTFTFQQVQCPAEIVARSGCKRNDDSSFPVFTPEPTPEPTRCTAERWAQCGGNGWSGCTT

SEQ ID NO: 46501 - protein, 240 aa, Thermothielavioides terrestris
ASGSGQSTRYWDCCKPSCAWPGKAAVSQPVYACDANFQRLSDFNVQSGCNGGSAYACADQTPWAVNDNLAYGFAATSIAGGSESSWCCACYALTFTSGPVAGKTMVVQSTSTGGDLGSNHFDIAMPGGGVGIFDGCSSQFGGLPGARYGGISSRDQCDSFPAPLKPGCQWRFDWFQNADNPTFTFQQVQCPAEIVARSGCKRNDDSSFPVFTPEPTPEPTGCTAERWAQCGGNGWSGCTT

SEQ ID NO: 46502 - protein, 240 aa, Thermothielavioides terrestris
ASGSGQSTRYWDCCKPSCAWPGKAAVSQPVYACDANFQRLSDFNVQSGCNGGSAYACADQTPWAVNDNLAYGFAATSIAGGSESSWCCACYALTFTSGPVAGKTMVVQSTSTGGDLGSNHFDIAMPGGGVGIFDGCSSQFGGLPGARYGGISSRDQCDSFPAPLKPGCQWRFDWFQNADNPTFTFQQVQCPAEIVARSGCKRNDDSSFPVFTPDPTPDPTGCTAERWAQCGGNGWSGCTT

SEQ ID NO: 46503 - protein, 240 aa, Thermothielavioides terrestris
ASGSGQSTRYWDCCKPSCAWPGKAAVSQPVYACDANFQRLSDFNVQSGCNGGSAYACADQTPWAVNDNLAYGFAATSIAGGSESSWCCACYALTFTSGPVAGKTMVVQSTSTGGDLGSNHFDIAMPGGGVGIFDGCSSQFGGLPGARYGGISSRDQCDSFPAPLKPGCQWRFDWFQNADNPTFTFQQVQCPAEIVARSGCKRNDDSSFPVFTPRPTPEPTGCTAERWAQCGGNGWSGCTT

SEQ ID NO: 46504 - protein, 240 aa, Thermothielavioides terrestris
ASGSGQSTRYWDCCKPSCAWPGKAAVSQPVYACDANFQRLSDFNVQSGCNGGSAYACADQTPWAVNDNLAYGFAATSIAGGSESSWCCACYALTFTSGPVAGKTMVVQSTSTGGDLGSNHFDIAMPGGGVGIFDGCSSQFGGLPGARYGGISSRDQCDSFPAPLKPGCQWRFDWFQNADNPTFTFQQVQCPAEIVARSGCKRNDDSSFPVFTPQPTPQPTGCTAERWAQCGGNGWSGCTT

SEQ ID NO: 46505 - protein, 240 aa, Thermothielavioides terrestris
ASGSGQSTRYWDCCKPSCAWPGKAAVSQPVYACDANFQRLSDFNVQSGCNGGSAYACADQTPWAVNDNLAYGFAATSIAGGSESSWCCACYALTFTSGPVAGKTMVVQSTSTGGDLGSNHFDIAMPGGGVGIFDGCSSQFGGLPGARYGGISSRDQCDSFPAPLKPGCQWRFDWFQNADNPTFTFQQVQCPAEIVARSGCKRNDDSSFPVFTPEPTPEPTECTAERWAQCGGNGWSGCTT

SEQ ID NO: 46506 - protein, 240 aa, Thermothielavioides terrestris
ASGSGQSTRYWDCCKPSCAWPGKAAVSQPVYACDANFQRLSDFNVQSGCNGGSAYACADQTPWAVNDNLAYGFAATSIAGGSESSWCCACYALTFTSGPVAGKTMVVQSTSTGGDLGSNHFDIAMPGGGVGIFDGCSSQFGGLPGARYGGISSRDQCDSFPAPLKPGCQWRFDWFQNADNPTFTFQQVQCPAEIVARSGCKRNDDSSFPVFTPEPTPRPTGCTAERWAQCGGNGWSGCTT

SEQ ID NO: 46507 - protein, 264 aa, Thermothielavioides terrestris
ASGSGQSTRYWDCCKPSCAWPGKAAVSQPVYACDANFQRLSDFNVQSGCNGGSAYSCADQTPWAVNDNLAYGFAATSIAGGSESSWCCACYALTFTSGPVAGKTMVVQSTSTGGDLGSNHFDIAMPGGGVGIFNGCSSQFGGLPGAQYGGISSRDQCDSFPAPLKPGCQWRFDWFQNADNPTFTFQQVQCPAEIVARSGCKRNDDSSFPVFTTTPTPPTPTPTPTPGCTAERWAQCGGNGWSGCTTCVAGSTCTKINDWYHQCL

SEQ ID NO: 46508 - protein, 237 aa, Thermothielavioides terrestris
ASGSGQSTRYWDCCKPSCAWPGKAAVSQPVYACDANFQRLSDFNVQSGCNGGSAYACADQTPWAVNDNLAYGFAATSIAGGSESSWCCACYALTFTSGPVAGKTMVVQSTSTGGDLGSNHFDIAMPGGGVGIFDGCSSQFGGLPGAQYGGISSRDECDSFPAPLKPGCYWRFDWFQNADNPTFTFQQVQCPAEIVARSGCKRNDDSSFPVFTPPPPPPCTAERWAQCGGNGWSGCTT

SEQ ID NO: 46509 - protein, 236 aa, Thermothielavioides terrestris
ASGSGQSTRYWDCCKPSCAWPGKAAVSQPVYACDANFQRLSDFNVQSGCNGGSAYACADQTPWAVNDNLAYGFAATSIAGGSESSWCCACYALTFTSGPVAGKTMVVQSTSTGGDLGSNHFDIAMPGGGVGIFDGCSSQFGGLPGAQYGGISSRDECDSFPAPLKPGCYWRFDWFQNADNPTFTFQQVQCPAEIVARSGCKRNDDSSFPVFTPPPPPCTSQKWAQCGGIGFSGCTT

SEQ ID NO: 46510 - protein, 262 aa, Thermothielavioides terrestris
ASGSGQSTRYWDCCKPSCAWPGKAAVSQPVYACDANFQRLSDFNVQSGCNGGSAYACADQTPWAVNDNLAYGFAATSIAGGSESSWCCACYALTFTSGPVAGKTMVVQSTSTGGDLGSNHFDIAMPGGGVGIFDGCSSQFGGLPGARYGGISSRDQCDSFPAPLKPGCQWRFDWFQNADNPTFTFQQVQCPAEIVARSGCKRNDDSSFPVFTPDPTPDPTPDPTGCTAERWAQCGGNGWSGCTTCVAGSTCTKINDWYHQCL

SEQ ID NO: 46511 - protein, 262 aa, Thermothielavioides terrestris
ASGSGQSTRYWDCCKPSCAWPGKAAVSQPVYACDANFQRLSDFNVQSGCNGGSAYACADQTPWAVNDNLAYGFAATSIAGGSESSWCCACYALTFTSGPVAGKTMVVQSTSTGGDLGSNHFDIAMPGGGVGIFDGCSSQFGGLPGARYGGISSRDQCDSFPAPLKPGCQWRFDWFQNADNPTFTFQQVQCPAEIVARSGCKRNDDSSFPVFTPKPTPEPTPKPTGCTAERWAQCGGNGWSGCTTCVAGSTCTKINDWYHQCL

SEQ ID NO: 46512 - protein, 262 aa, Thermothielavioides terrestris
ASGSGQSTRYWDCCKPSCAWPGKAAVSQPVYACDANFQRLSDFNVQSGCNGGSAYACADQTPWAVNDNLAYGFAATSIAGGSESSWCCACYALTFTSGPVAGKTMVVQSTSTGGDLGSNHFDIAMPGGGVGIFDGCSSQFGGLPGARYGGISSRDQCDSFPAPLKPGCQWRFDWFQNADNPTFTFQQVQCPAEIVARSGCKRNDDSSFPVFTPEPTPEPTPEPTGCTAERWAQCGGNGWSGCTTCVAGSTCTKINDWYHQCL

SEQ ID NO: 46513 - protein, 262 aa, Thermothielavioides terrestris
ASGSGQSTRYWDCCKPSCAWPGKAAVSQPVYACDANFQRLSDFNVQSGCNGGSAYACADQTPWAVNDNLAYGFAATSIAGGSESSWCCACYALTFTSGPVAGKTMVVQSTSTGGDLGSNHFDIAMPGGGVGIFDGCSSQFGGLPGARYGGISSRDQCDSFPAPLKPGCQWRFDWFQNADNPTFTFQQVQCPAEIVARSGCKRNDDSSFPVFTPRPTPEPTPRPTGCTAERWAQCGGNGWSGCTTCVAGSTCTKINDWYHQCL

SEQ ID NO: 46514 - protein, 262 aa, Thermothielavioides terrestris
ASGSGQSTRYWDCCKPSCAWPGKAAVSQPVYACDANFQRLSDFNVQSGCNGGSAYACADQTPWAVNDNLAYGFAATSIAGGSESSWCCACYALTFTSGPVAGKTMVVQSTSTGGDLGSNHFDIAMPGGGVGIFDGCSSQFGGLPGARYGGISSRDQCDSFPAPLKPGCQWRFDWFQNADNPTFTFQQVQCPAEIVARSGCKRNDDSSFPVFTSPSSPSSPSSPSGCTAERWAQCGGNGWSGCTTCVAGSTCTKINDWYHQCL

SEQ ID NO: 46515 - protein, 242 aa, Thermothielavioides terrestris
ASGSGQSTRYWDCCKPSCAWPGKAAVSQPVYACDANFQRLSDFNVQSGCNGGSAYSCADQTPWAVNDNLAYGFAATSIAGGSESSWCCACYALTFTSGPVAGKTMVVQSTSTGGDLGSNHFDIAMPGGGVGIFNGCSSQFGGLPGAQYGGISSRDQCDSFPAPLKPGCQWRFDWFQNADNPTFTFQQVQCPAEIVARSGCKRNDDSSFPVFTSPSPSPSPSPGCTAERWAQCGGNGWSGCTT

SEQ ID NO: 46516 - protein, 242 aa, Thermothielavioides terrestris
ASGSGQSTRYWDCCKPSCAWPGKAAVSQPVYACDANFQRLSDFNVQSGCNGGSAYSCADQTPWAVNDNLAYGFAATSIAGGSESSWCCACYALTFTSGPVAGKTMVVQSTSTGGDLGSNHFDIAMPGGGVGIFNGCSSQFGGLPGAQYGGISSRDQCDSFPAPLKPGCQWRFDWFQNADNPTFTFQQVQCPAEIVARSGCKRNDDSSFPVFTTPTPTPTPTPGCTSQKWAQCGGIGFSGCTT

SEQ ID NO: 46517 - protein, 242 aa, Thermothielavioides terrestris
ASGSGQSTRYWDCCKPSCAWPGKAAVSQPVYACDANFQRLSDFNVQSGCNGGSAYSCADQTPWAVNDNLAYGFAATSIAGGSESSWCCACYALTFTSGPVAGKTMVVQSTSTGGDLGSNHFDIAMPGGGVGIFNGCSSQFGGLPGAQYGGISSRDQCDSFPAPLKPGCQWRFDWFQNADNPTFTFQQVQCPAEIVARSGCKRNDDSSFPVFTPPPPPPPPPPGCTAERWAQCGGNGWSGCTT

SEQ ID NO: 46518 - protein, 241 aa, Thermothielavioides terrestris
ASGSGQSTRYWDCCKPSCAWPGKAAVSQPVYACDANFQRLSDFNVQSGCNGGSAYSCADQTPWAVNDNLAYGFAATSIAGGSESSWCCACYALTFTSGPVAGKTMVVQSTSTGGDLGSNHFDIAMPGGGVGIFNGCSSQFGGLPGAQYGGISSRDQCDSFPAPLKPGCQWRFDWFQNADNPTFTFQQVQCPAEIVARSGCKRNDDSSFPVFTPPPPPPPPPGCTSQKWAQCGGIGFSGCTT

SEQ ID NO: 46519 - protein, 266 aa, Thermothielavioides terrestris
ASGSGQSTRYWDCCKPSCAWPGKAAVSQPVYACDANFQRLSDFNVQSGCNGGSAYSCADQTPWAVNDNLAYGFAATSIAGGSESSWCCACYALTFTSGPVAGKTMVVQSTSTGGDLGSNHFDIAMPGGGVGIFNGCSSQFGGLPGAQYGGISSRDQCDSFPAPLKPGCQWRFDWFQNADNPTFTFQQVQCPAEIVARSGCKRNDDSSFPVFTPEPTPEPTPEPTPEPTGCTAERWAQCGGNGWSGCTTCVAGSTCTKINDWYHQCL

SEQ ID NO: 46520 - protein, 266 aa, Thermothielavioides terrestris
ASGSGQSTRYWDCCKPSCAWPGKAAVSQPVYACDANFQRLSDFNVQSGCNGGSAYSCADQTPWAVNDNLAYGFAATSIAGGSESSWCCACYALTFTSGPVAGKTMVVQSTSTGGDLGSNHFDIAMPGGGVGIFNGCSSQFGGLPGAQYGGISSRDQCDSFPAPLKPGCQWRFDWFQNADNPTFTFQQVQCPAEIVARSGCKRNDDSSFPVFTTTPTPTPPTPTPTPTPGCTAERWAQCGGNGWSGCTTCVAGSTCTKINDWYHQCL

SEQ ID NO: 46521 - protein, 266 aa, Thermothielavioides terrestris
ASGSGQSTRYWDCCKPSCAWPGKAAVSQPVYACDANFQRLSDFNVQSGCNGGSAYSCADQTPWAVNDNLAYGFAATSIAGGSESSWCCACYALTFTSGPVAGKTMVVQSTSTGGDLGSNHFDIAMPGGGVGIFNGCSSQFGGLPGAQYGGISSRDQCDSFPAPLKPGCQWRFDWFQNADNPTFTFQQVQCPAEIVARSGCKRNDDSSFPVFTPSPTPSPTPSPTPSPTGCTAERWAQCGGNGWSGCTTCVAGSTCTKINDWYHQCL

SEQ ID NO: 46522 - protein, 265 aa, Thermothielavioides terrestris
ASGSGQSTRYWDCCKPSCAWPGKAAVSQPVYACDANFQRLSDFNVQSGCNGGSAYACADQTPWAVNDNLAYGFAATSIAGGSESSWCCACYALTFTSGPVAGKTMVVQSTSTGGDLGSNHFDIAMPGGGVGIFDGCSSQFGGLPGARYGGISSRDQCDSFPAPLKPGCQWRFDWFQNADNPTFTFQQVQCPAEIVARSGCKRNDDSSFPVFTSPSSPSSPSSPSSPSGCTAERWAQCGGNGWSGCTTCVAGSTCTKINDWYHQCL

SEQ ID NO: 46523 - protein, 240 aa, Thermothielavioides terrestris
ASGSGQSTRYWDCCKPSCAWPGKAAVSQPVYACDANFQRLSDFNVQSGCNGGSAYACADQTPWAVNDNLAYGFAATSIAGGSESSWCCACYALTFTSGPVAGKTMVVQSTSTGGDLGSNHFDIAMPGGGVGIFDGCSSQFGGLPGARYGGISSRDQCDSFPAPLKPGCQWRFDWFQNADNPTFTFQQVQCPAEIVARSGCKRNDDSSFPVFTPEPTPQPTGCTSQKWAQCGGIGFSGCTT

SEQ ID NO: 46524 - protein, 240 aa, Thermothielavioides terrestris
ASGSGQSTRYWDCCKPSCAWPGKAAVSQPVYACDANFQRLSDFNVQSGCNGGSAYACADQTPWAVNDNLAYGFAATSIAGGSESSWCCACYALTFTSGPVAGKTMVVQSTSTGGDLGSNHFDIAMPGGGVGIFDGCSSQFGGLPGARYGGISSRDQCDSFPAPLKPGCQWRFDWFQNADNPTFTFQQVQCPAEIVARSGCKRNDDSSFPVFTPEPTPRPTGCTSQKWAQCGGIGFSGCTT

SEQ ID NO: 46525 - protein, 240 aa, Thermothielavioides terrestris
ASGSGQSTRYWDCCKPSCAWPGKAAVSQPVYACDANFQRLSDFNVQSGCNGGSAYACADQTPWAVNDNLAYGFAATSIAGGSESSWCCACYALTFTSGPVAGKTMVVQSTSTGGDLGSNHFDIAMPGGGVGIFDGCSSQFGGLPGARYGGISSRDQCDSFPAPLKPGCQWRFDWFQNADNPTFTFQQVQCPAEIVARSGCKRNDDSSFPVFTPRPTPEPTGCTSQKWAQCGGIGFSGCTT

SEQ ID NO: 46526 - protein, 240 aa, Thermothielavioides terrestris
ASGSGQSTRYWDCCKPSCAWPGKAAVSQPVYACDANFQRLSDFNVQSGCNGGSAYACADQTPWAVNDNLAYGFAATSIAGGSESSWCCACYALTFTSGPVAGKTMVVQSTSTGGDLGSNHFDIAMPGGGVGIFDGCSSQFGGLPGARYGGISSRDQCDSFPAPLKPGCQWRFDWFQNADNPTFTFQQVQCPAEIVARSGCKRNDDSSFPVFTPEPTPEPTPCTSQKWAQCGGIGFSGCTT

SEQ ID NO: 46527 - protein, 240 aa, Thermothielavioides terrestris
ASGSGQSTRYWDCCKPSCAWPGKAAVSQPVYACDANFQRLSDFNVQSGCNGGSAYACADQTPWAVNDNLAYGFAATSIAGGSESSWCCACYALTFTSGPVAGKTMVVQSTSTGGDLGSNHFDIAMPGGGVGIFDGCSSQFGGLPGARYGGISSRDQCDSFPAPLKPGCQWRFDWFQNADNPTFTFQQVQCPAEIVARSGCKRNDDSSFPVFTPEPTPEPTGCTSQKWAQCGGIGFSGCTT

SEQ ID NO: 46528 - protein, 240 aa, Thermothielavioides terrestris
ASGSGQSTRYWDCCKPSCAWPGKAAVSQPVYACDANFQRLSDFNVQSGCNGGSAYACADQTPWAVNDNLAYGFAATSIAGGSESSWCCACYALTFTSGPVAGKTMVVQSTSTGGDLGSNHFDIAMPGGGVGIFDGCSSQFGGLPGARYGGISSRDQCDSFPAPLKPGCQWRFDWFQNADNPTFTFQQVQCPAEIVARSGCKRNDDSSFPVFTPDPTPDPTGCTSQKWAQCGGIGFSGCTT

SEQ ID NO: 46529 - protein, 240 aa, Thermothielavioides terrestris
ASGSGQSTRYWDCCKPSCAWPGKAAVSQPVYACDANFQRLSDFNVQSGCNGGSAYACADQTPWAVNDNLAYGFAATSIAGGSESSWCCACYALTFTSGPVAGKTMVVQSTSTGGDLGSNHFDIAMPGGGVGIFDGCSSQFGGLPGARYGGISSRDQCDSFPAPLKPGCQWRFDWFQNADNPTFTFQQVQCPAEIVARSGCKRNDDSSFPVFTPQPTPEPTGCTSQKWAQCGGIGFSGCTT

SEQ ID NO: 46530 - protein, 240 aa, Thermothielavioides terrestris
ASGSGQSTRYWDCCKPSCAWPGKAAVSQPVYACDANFQRLSDFNVQSGCNGGSAYACADQTPWAVNDNLAYGFAATSIAGGSESSWCCACYALTFTSGPVAGKTMVVQSTSTGGDLGSNHFDIAMPGGGVGIFDGCSSQFGGLPGARYGGISSRDQCDSFPAPLKPGCQWRFDWFQNADNPTFTFQQVQCPAEIVARSGCKRNDDSSFPVFTPEPTPEPTECTSQKWAQCGGIGFSGCTT

SEQ ID NO: 46531 - protein, 240 aa, Thermothielavioides terrestris
ASGSGQSTRYWDCCKPSCAWPGKAAVSQPVYACDANFQRLSDFNVQSGCNGGSAYACADQTPWAVNDNLAYGFAATSIAGGSESSWCCACYALTFTSGPVAGKTMVVQSTSTGGDLGSNHFDIAMPGGGVGIFDGCSSQFGGLPGARYGGISSRDQCDSFPAPLKPGCQWRFDWFQNADNPTFTFQQVQCPAEIVARSGCKRNDDSSFPVFTPQPTPQPTGCTSQKWAQCGGIGFSGCTT

SEQ ID NO: 46532 - protein, 240 aa, Thermothielavioides terrestris
ASGSGQSTRYWDCCKPSCAWPGKAAVSQPVYACDANFQRLSDFNVQSGCNGGSAYACADQTPWAVNDNLAYGFAATSIAGGSESSWCCACYALTFTSGPVAGKTMVVQSTSTGGDLGSNHFDIAMPGGGVGIFDGCSSQFGGLPGARYGGISSRDQCDSFPAPLKPGCQWRFDWFQNADNPTFTFQQVQCPAEIVARSGCKRNDDSSFPVFTPEPTPEPTRCTSQKWAQCGGIGFSGCTT

SEQ ID NO: 46533 - protein, 238 aa, Thermothielavioides terrestris
ASGSGQSTRYWDCCKPSCAWPGKAAVSQPVYACDANFQRLSDFNVQSGCNGGSAYACADQTPWAVNDNLAYGFAATSIAGGSESSWCCACYALTFTSGPVAGKTMVVQSTSTGGDLGSNHFDIAMPGGGVGIFDGCSSQFGGLPGAQYGGISSRDECDSFPAPLKPGCYWRFDWFQNADNPTFTFQQVQCPAEIVARSGCKRNDDSSFPVFTPPPPPPPCTAERWAQCGGNGWSGCTT

SEQ ID NO: 46534 - protein, 262 aa, Thermothielavioides terrestris
ASGSGQSTRYWDCCKPSCAWPGKAAVSQPVYACDANFQRLSDFNVQSGCNGGSAYACADQTPWAVNDNLAYGFAATSIAGGSESSWCCACYALTFTSGPVAGKTMVVQSTSTGGDLGSNHFDIAMPGGGVGIFDGCSSQFGGLPGARYGGISSRDQCDSFPAPLKPGCQWRFDWFQNADNPTFTFQQVQCPAEIVARSGCKRNDDSSFPVFTPEPTPEPTPEPTPCTAERWAQCGGNGWSGCTTCVAGSTCTKINDWYHQCL

SEQ ID NO: 46535 - protein, 237 aa, Thermothielavioides terrestris
ASGSGQSTRYWDCCKPSCAWPGKAAVSQPVYACDANFQRLSDFNVQSGCNGGSAYACADQTPWAVNDNLAYGFAATSIAGGSESSWCCACYALTFTSGPVAGKTMVVQSTSTGGDLGSNHFDIAMPGGGVGIFDGCSSQFGGLPGAQYGGISSRDECDSFPAPLKPGCYWRFDWFQNADNPTFTFQQVQCPAEIVARSGCKRNDDSSFPVFTPPPPPPCTSQKWAQCGGIGFSGCTT

SEQ ID NO: 46536 - protein, 270 aa, Thermothielavioides terrestris
ASGSGQSTRYWDCCKPSCAWPGKAAVSQPVYSCDANFQRLSDFNVQSGCNGGSAYACADQTPWAVNDNLAYGFAATSIAGGSESSWCCACYALTFTSGPVAGKTMVVQSTSTGGDLGSNHFDIAMPGGGVGIFDGCSSQFGGLPGDRYGGISSRDQCDSFPAPLKPGCYWRFDWFQNADNPTVTFQQVQCPAEIVARSGCKRNDDSSFPVFTPEPTPEPTPEPTPEPTPEPTGCTSQKWAQCGGIGFSGCTTCVSGTTCQKLNDYYSQCL

SEQ ID NO: 46537 - protein, 268 aa, Thermothielavioides terrestris
ASGSGQSTRYWDCCKPSCAWPGKAAVSQPVYACDANFQRLSDFNVQSGCNGGSAYSCADQTPWAVNDNLAYGFAATSIAGGSESSWCCACYALTFTSGPVAGKTMVVQSTSTGGDLGSNHFDIAMPGGGVGIFNGCSSQFGGLPGAQYGGISSRDQCDSFPAPLKPGCQWRFDWFQNADNPTFTFQQVQCPAEIVARSGCKRNDDSSFPVFTTTPTPTPTPPTPTPTPTPGCTAERWAQCGGNGWSGCTTCVAGSTCTKINDWYHQCL

SEQ ID NO: 46538 - protein, 243 aa, Thermothielavioides terrestris
ASGSGQSTRYWDCCKPSCAWPGKAAVSQPVYACDANFQRLSDFNVQSGCNGGSAYSCADQTPWAVNDNLAYGFAATSIAGGSESSWCCACYALTFTSGPVAGKTMVVQSTSTGGDLGSNHFDIAMPGGGVGIFNGCSSQFGGLPGAQYGGISSRDQCDSFPAPLKPGCQWRFDWFQNADNPTFTFQQVQCPAEIVARSGCKRNDDSSFPVFTPPPPPPPPPPPGCTAERWAQCGGNGWSGCTT

SEQ ID NO: 46539 - protein, 242 aa, Thermothielavioides terrestris
ASGSGQSTRYWDCCKPSCAWPGKAAVSQPVYACDANFQRLSDFNVQSGCNGGSAYSCADQTPWAVNDNLAYGFAATSIAGGSESSWCCACYALTFTSGPVAGKTMVVQSTSTGGDLGSNHFDIAMPGGGVGIFNGCSSQFGGLPGAQYGGISSRDQCDSFPAPLKPGCQWRFDWFQNADNPTFTFQQVQCPAEIVARSGCKRNDDSSFPVFTPPPPPPPPPPGCTSQKWAQCGGIGFSGCTT

SEQ ID NO: 46540 - protein, 242 aa, Thermothielavioides terrestris
ASGSGQSTRYWDCCKPSCAWPGKAAVSQPVYACDANFQRLSDFNVQSGCNGGSAYSCADQTPWAVNDNLAYGFAATSIAGGSESSWCCACYALTFTSGPVAGKTMVVQSTSTGGDLGSNHFDIAMPGGGVGIFDGCSSQFGGLPGARYGGISSRDQCDSFPAPLKPGCQWRFDWFQNADNPTFTFQQVQCPAEIVARSGCKRNDDSSFPVFTTPTPTPTPTPGCTAERWAQCGGNGWSGCTT

SEQ ID NO: 46541 - protein, 242 aa, Thermothielavioides terrestris
ASGSGQSTRYWDCCKPSCAWPGKAAVSQPVYACDANFQRLSDFNVQSGCNGGSAYSCADQTPWAVNDNLAYGFAATSIAGGSESSWCCACYALTFTSGPVAGKTMVVQSTSTGGDLGSNHFDIAMPGGGVGIFNGCSSQFGGLPGAQYGGISSRDQCDSFPAPLKPGCQWRFDWFQNADNPTFTFQQVQCPAEIVARSGCKRNDDSSFPVFTSPSPSPSPSPGCTSQKWAQCGGIGFSGCTT

SEQ ID NO: 46542 - protein, 283 aa, Thermothielavioides terrestris
ASGSGQSTRYWDCCKPSCAWPGKAAVSQPVYACDANFQRLSDFNVQSGCNGGSAYACADQTPWAVNDNLAYGFAATSIAGGSESSWCCACYALTFTSGPVAGKTMVVQSTSTGGDLGSNHFDIAMPGGGVGIFDGCSSQFGGLPGARYGGISSRDQCDSFPAPLKPGCQWRFDWFQNADNPTFTFQQVQCPAEIVARSGCKRNDDSSFPVFTTPPTPPTPPTPPTPPTPPTPPTPPTPPTPPTPPGCTSQKWAQCGGIGFSGCTTCVSGTTCQKLNDYYSQCL

SEQ ID NO: 46543 - protein, 242 aa, Thermothielavioides terrestris
ASGSGQSTRYWDCCKPSCAWPGKAAVSQPVYACDANFQRLSDFNVQSGCNGGSAYACADQTPWAVNDNLAYGFAATSIAGGSESSWCCACYALTFTSGPVAGKTMVVQSTSTGGDLGSNHFDIAMPGGGVGIFDGCSSQFGGLPGARYGGISSRDQCDSFPAPLKPGCQWRFDWFQNADNPTFTFQQVQCPAEIVARSGCKRNDDSSFPVFTPSPNSPNSPNGCTAERWAQCGGNGWSGCTT

SEQ ID NO: 46544 - protein, 239 aa, Thermothielavioides terrestris
ASGSGQSTRYWDCCKPSCAWPGKAAVSQPVYACDANFQRLSDFNVQSGCNGGSAYACADQTPWAVNDNLAYGFAATSIAGGSESSWCCACYALTFTSGPVAGKTMVVQSTSTGGDLGSNHFDIAMPGGGVGIFDGCSSQFGGLPGAQYGGISSRDECDSFPAPLKPGCYWRFDWFQNADNPTFTFQQVQCPAEIVARSGCKRNDDSSFPVFTPPPPPPPGCTAERWAQCGGNGWSGCTT

SEQ ID NO: 46545 - protein, 238 aa, Thermothielavioides terrestris
ASGSGQSTRYWDCCKPSCAWPGKAAVSQPVYACDANFQRLSDFNVQSGCNGGSAYACADQTPWAVNDNLAYGFAATSIAGGSESSWCCACYALTFTSGPVAGKTMVVQSTSTGGDLGSNHFDIAMPGGGVGIFDGCSSQFGGLPGAQYGGISSRDECDSFPAPLKPGCYWRFDWFQNADNPTFTFQQVQCPAEIVARSGCKRNDDSSFPVFTPPPPPPPCTSQKWAQCGGIGFSGCTT

SEQ ID NO: 46546 - protein, 235 aa, Thielavia terrestris
ASGSGQSTRYWDCCKPSCAWPGKAAVSQPVYSCDANFQRLSDFNVQSGCNGGSAYACADQTPWAVNDNLAYGFAATSIAGGSESSWCCACYALTFTSGPVAGKTMVVQSTSTGGDLGSNHFDIAMPGGGVGIFDGCSSQFGGLPGDRYGGISSRDQCDSFPAPLKPGCYWRFDWFQNADNPTVTFQQVQCPAEIVARSGCKRNDDSSFPVFTPPPPCTTQKWGQCGGIGYTGCTN

SEQ ID NO: 46547 - protein, 268 aa, Thermothielavioides terrestris
ASGSGQSTRYWDCCKPSCAWPGKAAVSQPVYACDANFQRLSDFNVQSGCNGGSAYACADQTPWAVNDNLAYGFAATSIAGGSESSWCCACYALTFTSGPVAGKTMVVQSTSTGGDLGSNHFDIAMPGGGVGIFDGCSSQFGGLPGARYGGISSRDQCDSFPAPLKPGCQWRFDWFQNADNPTFTFQQVQCPAEIVARSGCKRNDDSSFPVFTTPTTPTTPTTPTTPTTPTGCTAERWAQCGGNGWSGCTTCVAGSTCTKINDWYHQCL

SEQ ID NO: 46548 - protein, 243 aa, Thermothielavioides terrestris
ASGSGQSTRYWDCCKPSCAWPGKAAVSQPVYACDANFQRLSDFNVQSGCNGGSAYSCADQTPWAVNDNLAYGFAATSIAGGSESSWCCACYALTFTSGPVAGKTMVVQSTSTGGDLGSNHFDIAMPGGGVGIFNGCSSQFGGLPGAQYGGISSRDQCDSFPAPLKPGCQWRFDWFQNADNPTFTFQQVQCPAEIVARSGCKRNDDSSFPVFTPPPPPPPPPPPGCTSQKWAQCGGIGFSGCTT

SEQ ID NO: 46549 - protein, 266 aa, Thermothielavioides terrestris
ASGSGQSTRYWDCCKPSCAWPGKAAVSQPVYACDANFQRLSDFNVQSGCNGGSAYSCADQTPWAVNDNLAYGFAATSIAGGSESSWCCACYALTFTSGPVAGKTMVVQSTSTGGDLGSNHFDIAMPGGGVGIFDGCSSQFGGLPGARYGGISSRDQCDSFPAPLKPGCQWRFDWFQNADNPTFTFQQVQCPAEIVARSGCKRNDDSSFPVFTPEPTPEPTPEPTPEPTGCTAERWAQCGGNGWSGCTTCVAGSTCTKINDWYHQCL

SEQ ID NO: 46550 - protein, 266 aa, Thermothielavioides terrestris
ASGSGQSTRYWDCCKPSCAWPGKAAVSQPVYACDANFQRLSDFNVQSGCNGGSAYACADQTPWAVNDNLAYGFAATSIAGGSESSWCCACYALTFTSGPVAGKTMVVQSTSTGGDLGSNHFDIAMPGGGVGIFDGCSSQFGGLPGARYGGISSRDQCDSFPAPLKPGCQWRFDWFQNADNPTFTFQQVQCPAEIVARSGCKRNDDSSFPVFTPQPTPEPTPQPTPEPTGCTAERWAQCGGNGWSGCTTCVAGSTCTKINDWYHQCL

SEQ ID NO: 46551 - protein, 266 aa, Thermothielavioides terrestris
ASGSGQSTRYWDCCKPSCAWPGKAAVSQPVYACDANFQRLSDFNVQSGCNGGSAYACADQTPWAVNDNLAYGFAATSIAGGSESSWCCACYALTFTSGPVAGKTMVVQSTSTGGDLGSNHFDIAMPGGGVGIFNGCSSQFGGLPGARYGGISSRDQCDSFPAPLKPGCQWRFDWFQNADNPTFTFQQVQCPAEIVARSGCKRNDDSSFPVFTPEPTPEPTPEPTPEPTGCTAERWAQCGGNGWSGCTTCVAGSTCTKINDWYHQCL

SEQ ID NO: 46552 - protein, 266 aa, Thermothielavioides terrestris
ASGSGQSTRYWDCCKPSCAWPGKAAVSQPVYACDANFQRLSDFNVQSGCNGGSAYACADQTPWAVNDNLAYGFAATSIAGGSESSWCCACYALTFTSGPVAGKTMVVQSTSTGGDLGSNHFDIAMPGGGVGIFDGCSSQFGGLPGARYGGISSRDQCDSFPAPLKPGCQWRFDWFQNADNPTFTFQQVQCPAEIVARSGCKRNDDSSFPVFTPQPTPQPTPQPTPQPTGCTAERWAQCGGNGWSGCTTCVAGSTCTKINDWYHQCL

SEQ ID NO: 46553 - protein, 278 aa, Thermothielavioides terrestris
ASGSGQSTRYWDCCKPSCAWPGKAAVSQPVYACDANFQRLSDFNVQSGCNGGSAYACADQTPWAVNDNLAYGFAATSIAGGSESSWCCACYALTFTSGPVAGKTMVVQSTSTGGDLGSNHFDIAMPGGGVGIFDGCSSQFGGLPGARYGGISSRDQCDSFPAPLKPGCQWRFDWFQNADNPTFTFQQVQCPAEIVARSGCKRNDDSSFPVFTPQPTPEPTPQPTPEPTPQPTPEPTPQPTGCTSQKWAQCGGIGFSGCTTCVSGTTCQKLNDYYSQCL

SEQ ID NO: 46554 - protein, 242 aa, Thermothielavioides terrestris
ASGSGQSTRYWDCCKPSCAWPGKAAVSQPVYACDANFQRLSDFNVQSGCNGGSAYSCADQTPWAVNDNLAYGFAATSIAGGSESSWCCACYALTFTSGPVAGKTMVVQSTSTGGDLGSNHFDIAMPGGGVGIFDGCSSQFGGLPGARYGGISSRDQCDSFPAPLKPGCQWRFDWFQNADNPTFTFQQVQCPAEIVARSGCKRNDDSSFPVFTTPTPTPTPTPGCTSQKWAQCGGIGFSGCTT

SEQ ID NO: 46555 - protein, 242 aa, Thermothielavioides terrestris
ASGSGQSTRYWDCCKPSCAWPGKAAVSQPVYACDANFQRLSDFNVQSGCNGGSAYACADQTPWAVNDNLAYGFAATSIAGGSESSWCCACYALTFTSGPVAGKTMVVQSTSTGGDLGSNHFDIAMPGGGVGIFDGCSSQFGGLPGARYGGISSRDQCDSFPAPLKPGCQWRFDWFQNADNPTFTFQQVQCPAEIVARSGCKRNDDSSFPVFTTPTPTPTPTPGCTAERWAQCGGNGWSGCTT

SEQ ID NO: 46556 - protein, 242 aa, Thermothielavioides terrestris
ASGSGQSTRYWDCCKPSCAWPGKAAVSQPVYACDANFQRLSDFNVQSGCNGGSAYACADQTPWAVNDNLAYGFAATSIAGGSESSWCCACYALTFTSGPVAGKTMVVQSTSTGGDLGSNHFDIAMPGGGVGIFNGCSSQFGGLPGARYGGISSRDQCDSFPAPLKPGCQWRFDWFQNADNPTFTFQQVQCPAEIVARSGCKRNDDSSFPVFTSPSPSPSPSPGCTAERWAQCGGNGWSGCTT

SEQ ID NO: 46557 - protein, 241 aa, Thermothielavioides terrestris
ASGSGQSTRYWDCCKPSCAWPGKAAVSQPVYACDANFQRLSDFNVQSGCNGGSAYACADQTPWAVNDNLAYGFAATSIAGGSESSWCCACYALTFTSGPVAGKTMVVQSTSTGGDLGSNHFDIAMPGGGVGIFDGCSSQFGGLPGARYGGISSRDQCDSFPAPLKPGCQWRFDWFQNADNPTFTFQQVQCPAEIVARSGCKRNDDSSFPVFTTPTTPTTPTGCTAERWAQCGGNGWSGCTT

SEQ ID NO: 46558 - protein, 241 aa, Thermothielavioides terrestris
ASGSGQSTRYWDCCKPSCAWPGKAAVSQPVYACDANFQRLSDFNVQSGCNGGSAYACADQTPWAVNDNLAYGFAATSIAGGSESSWCCACYALTFTSGPVAGKTMVVQSTSTGGDLGSNHFDIAMPGGGVGIFDGCSSQFGGLPGARYGGISSRDQCDSFPAPLKPGCQWRFDWFQNADNPTFTFQQVQCPAEIVARSGCKRNDDSSFPVFTSPSSPSSPSGCTAERWAQCGGNGWSGCTT

SEQ ID NO: 46559 - protein, 241 aa, Thermothielavioides terrestris
ASGSGQSTRYWDCCKPSCAWPGKAAVSQPVYACDANFQRLSDFNVQSGCNGGSAYACADQTPWAVNDNLAYGFAATSIAGGSESSWCCACYALTFTSGPVAGKTMVVQSTSTGGDLGSNHFDIAMPGGGVGIFDGCSSQFGGLPGARYGGISSRDQCDSFPAPLKPGCQWRFDWFQNADNPTFTFQQVQCPAEIVARSGCKRNDDSSFPVFTSPSPSPSPSPCTAERWAQCGGNGWSGCTT

SEQ ID NO: 46560 - protein, 241 aa, Thermothielavioides terrestris
ASGSGQSTRYWDCCKPSCAWPGKAAVSQPVYACDANFQRLSDFNVQSGCNGGSAYACADQTPWAVNDNLAYGFAATSIAGGSESSWCCACYALTFTSGPVAGKTMVVQSTSTGGDLGSNHFDIAMPGGGVGIFDGCSSQFGGLPGARYGGISSRDQCDSFPAPLKPGCQWRFDWFQNADNPTFTFQQVQCPAEIVARSGCKRNDDSSFPVFTPPPPPPPPPGCTAERWAQCGGNGWSGCTT

SEQ ID NO: 46561 - protein, 242 aa, Thermothielavioides terrestris
ASGSGQSTRYWDCCKPSCAWPGKAAVSQPVYACDANFQRLSDFNVQSGCNGGSAYACADQTPWAVNDNLAYGFAATSIAGGSESSWCCACYALTFTSGPVAGKTMVVQSTSTGGDLGSNHFDIAMPGGGVGIFDGCSSQFGGLPGARYGGISSRDQCDSFPAPLKPGCQWRFDWFQNADNPTFTFQQVQCPAEIVARSGCKRNDDSSFPVFTPSPNSPNSPNGCTSQKWAQCGGIGFSGCTT

SEQ ID NO: 46562 - protein, 239 aa, Thermothielavioides terrestris
ASGSGQSTRYWDCCKPSCAWPGKAAVSQPVYACDANFQRLSDFNVQSGCNGGSAYACADQTPWAVNDNLAYGFAATSIAGGSESSWCCACYALTFTSGPVAGKTMVVQSTSTGGDLGSNHFDIAMPGGGVGIFDGCSSQFGGLPGAQYGGISSRDECDSFPAPLKPGCYWRFDWFQNADNPTFTFQQVQCPAEIVARSGCKRNDDSSFPVFTPPPPPPPGCTSQKWAQCGGIGFSGCTT

SEQ ID NO: 46563 - protein, 238 aa, Thielavia terrestris
ASGSGQSTRYWDCCKPSCAWPGKAAVSQPVYSCDANFQRLSDFNVQSGCNGGSAYACADQTPWAVNDNLAYGFAATSIAGGSESSWCCACYALTFTSGPVAGKTMVVQSTSTGGDLGSNHFDIAMPGGGVGIFDGCSSQFGGLPGDRYGGISSRDQCDSFPAPLKPGCYWRFDWFQNADNPTVTFQQVQCPAEIVARSGCKRNDDSSFPVFTTPTTPTGCTTQKWGQCGGIGYTGCTN

SEQ ID NO: 46564 - protein, 236 aa, Thielavia terrestris
ASGSGQSTRYWDCCKPSCAWPGKAAVSQPVYSCDANFQRLSDFNVQSGCNGGSAYACADQTPWAVNDNLAYGFAATSIAGGSESSWCCACYALTFTSGPVAGKTMVVQSTSTGGDLGSNHFDIAMPGGGVGIFDGCSSQFGGLPGDRYGGISSRDQCDSFPAPLKPGCYWRFDWFQNADNPTVTFQQVQCPAEIVARSGCKRNDDSSFPVFTPPPPPCTTQKWGQCGGIGYTGCTN

SEQ ID NO: 46565 - protein, 280 aa, Thermothielavioides terrestris
ASGSGQSTRYWDCCKPSCAWPGKAAVSQPVYACDANFQRLSDFNVQSGCNGGSAYACADQTPWAVNDNLAYGFAATSIAGGSESSWCCACYALTFTSGPVAGKTMVVQSTSTGGDLGSNHFDIAMPGGGVGIFDGCSSQFGGLPGARYGGISSRDQCDSFPAPLKPGCQWRFDWFQNADNPTFTFQQVQCPAEIVARSGCKRNDDSSFPVFTSPPSPPSPPSPPSPPSPPSPPSPPSPPSPPGCTSQKWAQCGGIGFSGCTTCVSGTTCQKLNDYYSQCL

SEQ ID NO: 46566 - protein, 266 aa, Thermothielavioides terrestris
ASGSGQSTRYWDCCKPSCAWPGKAAVSQPVYACDANFQRLSDFNVQSGCNGGSAYACADQTPWAVNDNLAYGFAATSIAGGSESSWCCACYALTFTSGPVAGKTMVVQSTSTGGDLGSNHFDIAMPGGGVGIFDGCSSQFGGLPGARYGGISSRDQCDSFPAPLKPGCQWRFDWFQNADNPTFTFQQVQCPAEIVARSGCKRNDDSSFPVFTPEPTPKPTPEPTPKPTGCTAERWAQCGGNGWSGCTTCVAGSTCTKINDWYHQCL

SEQ ID NO: 46567 - protein, 266 aa, Thermothielavioides terrestris
ASGSGQSTRYWDCCKPSCAWPGKAAVSQPVYACDANFQRLSDFNVQSGCNGGSAYACADQTPWAVNDNLAYGFAATSIAGGSESSWCCACYALTFTSGPVAGKTMVVQSTSTGGDLGSNHFDIAMPGGGVGIFDGCSSQFGGLPGARYGGISSRDQCDSFPAPLKPGCQWRFDWFQNADNPTFTFQQVQCPAEIVARSGCKRNDDSSFPVFTPEPTPRPTPEPTPRPTGCTAERWAQCGGNGWSGCTTCVAGSTCTKINDWYHQCL

SEQ ID NO: 46568 - protein, 266 aa, Thermothielavioides terrestris
ASGSGQSTRYWDCCKPSCAWPGKAAVSQPVYACDANFQRLSDFNVQSGCNGGSAYACADQTPWAVNDNLAYGFAATSIAGGSESSWCCACYALTFTSGPVAGKTMVVQSTSTGGDLGSNHFDIAMPGGGVGIFDGCSSQFGGLPGARYGGISSRDQCDSFPAPLKPGCQWRFDWFQNADNPTFTFQQVQCPAEIVARSGCKRNDDSSFPVFTPEPTPQPTPEPTPQPTGCTAERWAQCGGNGWSGCTTCVAGSTCTKINDWYHQCL

SEQ ID NO: 46569 - protein, 266 aa, Thermothielavioides terrestris
ASGSGQSTRYWDCCKPSCAWPGKAAVSQPVYACDANFQRLSDFNVQSGCNGGSAYACADQTPWAVNDNLAYGFAATSIAGGSESSWCCACYALTFTSGPVAGKTMVVQSTSTGGDLGSNHFDIAMPGGGVGIFDGCSSQFGGLPGARYGGISSRDQCDSFPAPLKPGCQWRFDWFQNADNPTFTFQQVQCPAEIVARSGCKRNDDSSFPVFTPEPTPEPTPEPTPEPTGCTAERWAQCGGNGWSGCTTCVAGSTCTKINDWYHQCL

SEQ ID NO: 46570 - protein, 266 aa, Thermothielavioides terrestris
ASGSGQSTRYWDCCKPSCAWPGKAAVSQPVYACDANFQRLSDFNVQSGCNGGSAYACADQTPWAVNDNLAYGFAATSIAGGSESSWCCACYALTFTSGPVAGKTMVVQSTSTGGDLGSNHFDIAMPGGGVGIFDGCSSQFGGLPGARYGGISSRDQCDSFPAPLKPGCQWRFDWFQNADNPTFTFQQVQCPAEIVARSGCKRNDDSSFPVFTPSPTPSPTPSPTPSPTGCTAERWAQCGGNGWSGCTTCVAGSTCTKINDWYHQCL

SEQ ID NO: 46571 - protein, 265 aa, Thermothielavioides terrestris
ASGSGQSTRYWDCCKPSCAWPGKAAVSQPVYACDANFQRLSDFNVQSGCNGGSAYACADQTPWAVNDNLAYGFAATSIAGGSESSWCCACYALTFTSGPVAGKTMVVQSTSTGGDLGSNHFDIAMPGGGVGIFDGCSSQFGGLPGARYGGISSRDQCDSFPAPLKPGCQWRFDWFQNADNPTFTFQQVQCPAEIVARSGCKRNDDSSFPVFTSPPSPPSPPSPPSPPGCTAERWAQCGGNGWSGCTTCVAGSTCTKINDWYHQCL

SEQ ID NO: 46572 - protein, 242 aa, Thermothielavioides terrestris
ASGSGQSTRYWDCCKPSCAWPGKAAVSQPVYACDANFQRLSDFNVQSGCNGGSAYACADQTPWAVNDNLAYGFAATSIAGGSESSWCCACYALTFTSGPVAGKTMVVQSTSTGGDLGSNHFDIAMPGGGVGIFDGCSSQFGGLPGARYGGISSRDQCDSFPAPLKPGCQWRFDWFQNADNPTFTFQQVQCPAEIVARSGCKRNDDSSFPVFTSPSPSPSPPPGCTAERWAQCGGNGWSGCTT

SEQ ID NO: 46573 - protein, 242 aa, Thermothielavioides terrestris
ASGSGQSTRYWDCCKPSCAWPGKAAVSQPVYACDANFQRLSDFNVQSGCNGGSAYACADQTPWAVNDNLAYGFAATSIAGGSESSWCCACYALTFTSGPVAGKTMVVQSTSTGGDLGSNHFDIAMPGGGVGIFDGCSSQFGGLPGAQYGGISSRDECDSFPAPLKPGCYWRFDWFQNADNPTFTFQQVQCPAEIVARSGCKRNDDSSFPVFTTPTPTPTPTPGCTAERWAQCGGNGWSGCTT

SEQ ID NO: 46574 - protein, 242 aa, Thermothielavioides terrestris
ASGSGQSTRYWDCCKPSCAWPGKAAVSQPVYACDANFQRLSDFNVQSGCNGGSAYACADQTPWAVNDNLAYGFAATSIAGGSESSWCCACYALTFTSGPVAGKTMVVQSTSTGGDLGSNHFDIAMPGGGVGIFDGCSSQFGGLPGARYGGISSRDQCDSFPAPLKPGCQWRFDWFQNADNPTFTFQQVQCPAEIVARSGCKRNDDSSFPVFTSPSPSPSPSPSCTAERWAQCGGNGWSGCTT

SEQ ID NO: 46575 - protein, 242 aa, Thermothielavioides terrestris
ASGSGQSTRYWDCCKPSCAWPGKAAVSQPVYACDANFQRLSDFNVQSGCNGGSAYACADQTPWAVNDNLAYGFAATSIAGGSESSWCCACYALTFTSGPVAGKTMVVQSTSTGGDLGSNHFDIAMPGGGVGIFDGCSSQFGGLPGARYGGISSRDQCDSFPAPLKPGCQWRFDWFQNADNPTFTFQQVQCPAEIVARSGCKRNDDSSFPVFTSPSPSPSPSPPCTAERWAQCGGNGWSGCTT

SEQ ID NO: 46576 - protein, 242 aa, Thermothielavioides terrestris
ASGSGQSTRYWDCCKPSCAWPGKAAVSQPVYACDANFQRLSDFNVQSGCNGGSAYACADQTPWAVNDNLAYGFAATSIAGGSESSWCCACYALTFTSGPVAGKTMVVQSTSTGGDLGSNHFDIAMPGGGVGIFNGCSSQFGGLPGARYGGISSRDQCDSFPAPLKPGCYWRFDWFQNADNPTFTFQQVQCPAEIVARSGCKRNDDSSFPVFTSPSPSPSPSPGCTAERWAQCGGNGWSGCTT

SEQ ID NO: 46577 - protein, 242 aa, Thermothielavioides terrestris
ASGSGQSTRYWDCCKPSCAWPGKAAVSQPVYACDANFQRLSDFNVQSGCNGGSAYACADQTPWAVNDNLAYGFAATSIAGGSESSWCCACYALTFTSGPVAGKTMVVQSTSTGGDLGSNHFDIAMPGGGVGIFDGCSSQFGGLPGARYGGISSRDQCDSFPAPLKPGCQWRFDWFQNADNPTFTFQQVQCPAEIVARSGCKRNDDSSFPVFTSPSPSPSPSPGCTAERWAQCGGNGWSGCTT

SEQ ID NO: 46578 - protein, 242 aa, Thermothielavioides terrestris
ASGSGQSTRYWDCCKPSCAWPGKAAVSQPVYACDANFQRLSDFNVQSGCNGGSAYACADQTPWAVNDNLAYGFAATSIAGGSESSWCCACYALTFTSGPVAGKTMVVQSTSTGGDLGSNHFDIAMPGGGVGIFDGCSSQFGGLPGARYGGISSRDQCDSFPAPLKPGCQWRFDWFQNADNPTFTFQQVQCPAEIVARSGCKRNDDSSFPVFTSPSPSPSPSPNCTAERWAQCGGNGWSGCTT

SEQ ID NO: 46579 - protein, 242 aa, Thermothielavioides terrestris
ASGSGQSTRYWDCCKPSCAWPGKAAVSQPVYACDANFQRLSDFNVQSGCNGGSAYACADQTPWAVNDNLAYGFAATSIAGGSESSWCCACYALTFTSGPVAGKTMVVQSTSTGGDLGSNHFDIAMPGGGVGIFDGCSSQFGGLPGARYGGISSRDQCDSFPAPLKPGCQWRFDWFQNADNPTFTFQQVQCPAEIVARSGCKRNDDSSFPVFTTPTPTPTPTPGCTSQKWAQCGGIGFSGCTT

SEQ ID NO: 46580 - protein, 242 aa, Thermothielavioides terrestris
ASGSGQSTRYWDCCKPSCAWPGKAAVSQPVYACDANFQRLSDFNVQSGCNGGSAYACADQTPWAVNDNLAYGFAATSIAGGSESSWCCACYALTFTSGPVAGKTMVVQSTSTGGDLGSNHFDIAMPGGGVGIFDGCSSQFGGLPGARYGGISSRDQCDSFPAPLKPGCQWRFDWFQNADNPTFTFQQVQCPAEIVARSGCKRNDDSSFPVFTSPSPSPSPSPECTAERWAQCGGNGWSGCTT

SEQ ID NO: 46581 - protein, 242 aa, Thermothielavioides terrestris
ASGSGQSTRYWDCCKPSCAWPGKAAVSQPVYACDANFQRLSDFNVQSGCNGGSAYACADQTPWAVNDNLAYGFAATSIAGGSESSWCCACYALTFTSGPVAGKTMVVQSTSTGGDLGSNHFDIAMPGGGVGIFDGCSSQFGGLPGARYGGISSRDQCDSFPAPLKPGCQWRFDWFQNADNPTFTFQQVQCPAEIVARSGCKRNDDSSFPVFTSPSPSPSPKPGCTAERWAQCGGNGWSGCTT

SEQ ID NO: 46582 - protein, 242 aa, Thermothielavioides terrestris
ASGSGQSTRYWDCCKPSCAWPGKAAVSQPVYACDANFQRLSDFNVQSGCNGGSAYACADQTPWAVNDNLAYGFAATSIAGGSESSWCCACYALTFTSGPVAGKTMVVQSTSTGGDLGSNHFDIAMPGGGVGIFDGCSSQFGGLPGARYGGISSRDQCDSFPAPLKPGCQWRFDWFQNADNPTFTFQQVQCPAEIVARSGCKRNDDSSFPVFTSPSPSPSPSPKCTAERWAQCGGNGWSGCTT

SEQ ID NO: 46583 - protein, 242 aa, Thermothielavioides terrestris
ASGSGQSTRYWDCCKPSCAWPGKAAVSQPVYACDANFQRLSDFNVQSGCNGGSAYACADQTPWAVNDNLAYGFAATSIAGGSESSWCCACYALTFTSGPVAGKTMVVQSTSTGGDLGSNHFDIAMPGGGVGIFDGCSSQFGGLPGAQYGGISSRDECDSFPEPLKPGCQWRFDWFQNADNPTFTFQQVQCPAEIVARSGCKRNDDSSFPVFTTPTPTPTPTPGCTAERWAQCGGNGWSGCTT

SEQ ID NO: 46584 - protein, 242 aa, Thermothielavioides terrestris
ASGSGQSTRYWDCCKPSCAWPGKAAVSQPVYACDANFQRLSDFNVQSGCNGGSAYACADQTPWAVNDNLAYGFAATSIAGGSESSWCCACYALTFTSGPVAGKTMVVQSTSTGGDLGSNHFDIAMPGGGVGIFNGCSSQFGGLPGARYGGISSRDQCDSFPAPLKPGCQWRFDWFQNADNPTFTFQQVQCPAEIVARSGCKRNDDSSFPVFTSPSPSPSPSPGCTSQKWAQCGGIGFSGCTT

SEQ ID NO: 46585 - protein, 242 aa, Thermothielavioides terrestris
ASGSGQSTRYWDCCKPSCAWPGKAAVSQPVYACDANFQRLSDFNVQSGCNGGSAYACADQTPWAVNDNLAYGFAATSIAGGSESSWCCACYALTFTSGPVAGKTMVVQSTSTGGDLGSNHFDIAMPGGGVGIFDGCSSQFGGLPGARYGGISSRDQCDSFPAPLKPGCQWRFDWFQNADNPTFTFQQVQCPAEIVARSGCKRNDDSSFPVFTSPSPSPSPDPGCTAERWAQCGGNGWSGCTT

SEQ ID NO: 46586 - protein, 242 aa, Thermothielavioides terrestris
ASGSGQSTRYWDCCKPSCAWPGKAAVSQPVYACDANFQRLSDFNVQSGCNGGSAYACADQTPWAVNDNLAYGFAATSIAGGSESSWCCACYALTFTSGPVAGKTMVVQSTSTGGDLGSNHFDIAMPGGGVGIFDGCSSQFGGLPGARYGGISSRDQCDSFPAPLKPGCQWRFDWFQNADNPTFTFQQVQCPAEIVARSGCKRNDDSSFPVFTSPSPSPSPAPGCTAERWAQCGGNGWSGCTT

SEQ ID NO: 46587 - protein, 243 aa, Thermothielavioides terrestris
ASGSGQSTRYWDCCKPSCAWPGKAAVSQPVYACDANFQRLSDFNVQSGCNGGSAYACADQTPWAVNDNLAYGFAATSIAGGSESSWCCACYALTFTSGPVAGKTMVVQSTSTGGDLGSNHFDIAMPGGGVGIFDGCSSQFGGLPGARYGGISSRDQCDSFPAPLKPGCQWRFDWFQNADNPTFTFQQVQCPAEIVARSGCKRNDDSSFPVFTSPSPSPSPSPSGCTAERWAQCGGNGWSGCTT

SEQ ID NO: 46588 - protein, 243 aa, Thermothielavioides terrestris
ASGSGQSTRYWDCCKPSCAWPGKAAVSQPVYACDANFQRLSDFNVQSGCNGGSAYACADQTPWAVNDNLAYGFAATSIAGGSESSWCCACYALTFTSGPVAGKTMVVQSTSTGGDLGSNHFDIAMPGGGVGIFDGCSSQFGGLPGARYGGISSRDQCDSFPAPLKPGCQWRFDWFQNADNPTFTFQQVQCPAEIVARSGCKRNDDSSFPVFTSPSPSPSPSPGGCTAERWAQCGGNGWSGCTT

SEQ ID NO: 46589 - protein, 241 aa, Thermothielavioides terrestris
ASGSGQSTRYWDCCKPSCAWPGKAAVSQPVYACDANFQRLSDFNVQSGCNGGSAYACADQTPWAVNDNLAYGFAATSIAGGSESSWCCACYALTFTSGPVAGKTMVVQSTSTGGDLGSNHFDIAMPGGGVGIFDGCSSQFGGLPGARYGGISSRDQCDSFPAPLKPGCQWRFDWFQNADNPTFTFQQVQCPAEIVARSGCKRNDDSSFPVFTSPSSPSSPSGCTSQKWAQCGGIGFSGCTT

SEQ ID NO: 46590 - protein, 241 aa, Thermothielavioides terrestris
ASGSGQSTRYWDCCKPSCAWPGKAAVSQPVYACDANFQRLSDFNVQSGCNGGSAYACADQTPWAVNDNLAYGFAATSIAGGSESSWCCACYALTFTSGPVAGKTMVVQSTSTGGDLGSNHFDIAMPGGGVGIFDGCSSQFGGLPGARYGGISSRDQCDSFPAPLKPGCQWRFDWFQNADNPTFTFQQVQCPAEIVARSGCKRNDDSSFPVFTSPSPSPSPSPCTSQKWAQCGGIGFSGCTT

SEQ ID NO: 46591 - protein, 241 aa, Thermothielavioides terrestris
ASGSGQSTRYWDCCKPSCAWPGKAAVSQPVYACDANFQRLSDFNVQSGCNGGSAYACADQTPWAVNDNLAYGFAATSIAGGSESSWCCACYALTFTSGPVAGKTMVVQSTSTGGDLGSNHFDIAMPGGGVGIFDGCSSQFGGLPGARYGGISSRDQCDSFPAPLKPGCQWRFDWFQNADNPTFTFQQVQCPAEIVARSGCKRNDDSSFPVFTPPPPPPPPPGCTSQKWAQCGGIGFSGCTT

SEQ ID NO: 46592 - protein, 241 aa, Thermothielavioides terrestris
ASGSGQSTRYWDCCKPSCAWPGKAAVSQPVYACDANFQRLSDFNVQSGCNGGSAYACADQTPWAVNDNLAYGFAATSIAGGSESSWCCACYALTFTSGPVAGKTMVVQSTSTGGDLGSNHFDIAMPGGGVGIFDGCSSQFGGLPGARYGGISSRDQCDSFPAPLKPGCQWRFDWFQNADNPTFTFQQVQCPAEIVARSGCKRNDDSSFPVFTTPTTPTTPTGCTSQKWAQCGGIGFSGCTT

SEQ ID NO: 46593 - protein, 286 aa, Thermochaetoides thermophila
GKSTRYWDCCKPSCSWPGKASVNQPVYACDANFQRLSDFNVQSGCNGGSAYSCADQTPWAVNDNLAYGFAATSIAGGSESSWCCACYALTFTSGPVAGKTMVVQSTSTGGDLGSNHFDIAMPGGGVGIFNGCSSQFGGLPGAQYGGISSRDQCDSFPAPLKPGCQWRFDWFQNADNPTFTFQQVQCPAEIVARSGCKRNDDSSFPVFTPPSGDSPSSSSAAPTSTSTSQQPQQPTSSSSQASVPTSNPGGCTSQKWAQCGGIGFTGCTTCVSGTTCTKLNDWYSQC

SEQ ID NO: 46594 - protein, 261 aa, Thielavia terrestris
ASGSGQSTRYWDCCKPSCAWPGKAAVSQPVYSCDANFQRLSDFNVQSGCNGGSAYACADQTPWAVNDNLAYGFAATSIAGGSESSWCCACYALTFTSGPVAGKTMVVQSTSTGGDLGSNHFDIAMPGGGVGIFDGCSSQFGGLPGDRYGGISSRDQCDSFPAPLKPGCYWRFDWFQNADNPTVTFQQVQCPAEIVARSGCKRNDDSSFPVFTPRPTPEPTPRPTGCTTQKWGQCGGIGYTGCTNCVAGTTCTQLNPWYHQC

SEQ ID NO: 46595 - protein, 261 aa, Thielavia terrestris
ASGSGQSTRYWDCCKPSCAWPGKAAVSQPVYSCDANFQRLSDFNVQSGCNGGSAYACADQTPWAVNDNLAYGFAATSIAGGSESSWCCACYALTFTSGPVAGKTMVVQSTSTGGDLGSNHFDIAMPGGGVGIFDGCSSQFGGLPGDRYGGISSRDQCDSFPAPLKPGCYWRFDWFQNADNPTVTFQQVQCPAEIVARSGCKRNDDSSFPVFTPKPTPEPTPKPTGCTTQKWGQCGGIGYTGCTNCVAGTTCTQLNPWYHQC

SEQ ID NO: 46596 - protein, 261 aa, Thielavia terrestris
ASGSGQSTRYWDCCKPSCAWPGKAAVSQPVYSCDANFQRLSDFNVQSGCNGGSAYACADQTPWAVNDNLAYGFAATSIAGGSESSWCCACYALTFTSGPVAGKTMVVQSTSTGGDLGSNHFDIAMPGGGVGIFDGCSSQFGGLPGDRYGGISSRDQCDSFPAPLKPGCYWRFDWFQNADNPTVTFQQVQCPAEIVARSGCKRNDDSSFPVFTPEPTPEPTPEPTGCTTQKWGQCGGIGYTGCTNCVAGTTCTQLNPWYHQC

SEQ ID NO: 46597 - protein, 261 aa, Thielavia terrestris
ASGSGQSTRYWDCCKPSCAWPGKAAVSQPVYSCDANFQRLSDFNVQSGCNGGSAYACADQTPWAVNDNLAYGFAATSIAGGSESSWCCACYALTFTSGPVAGKTMVVQSTSTGGDLGSNHFDIAMPGGGVGIFDGCSSQFGGLPGDRYGGISSRDQCDSFPAPLKPGCYWRFDWFQNADNPTVTFQQVQCPAEIVARSGCKRNDDSSFPVFTPEPTPQPTPEPTGCTTQKWGQCGGIGYTGCTNCVAGTTCTQLNPWYHQC

SEQ ID NO: 46598 - protein, 261 aa, Thielavia terrestris
ASGSGQSTRYWDCCKPSCAWPGKAAVSQPVYSCDANFQRLSDFNVQSGCNGGSAYACADQTPWAVNDNLAYGFAATSIAGGSESSWCCACYALTFTSGPVAGKTMVVQSTSTGGDLGSNHFDIAMPGGGVGIFDGCSSQFGGLPGDRYGGISSRDQCDSFPAPLKPGCYWRFDWFQNADNPTVTFQQVQCPAEIVARSGCKRNDDSSFPVFTPDPTPDPTPDPTGCTTQKWGQCGGIGYTGCTNCVAGTTCTQLNPWYHQC

SEQ ID NO: 46599 - protein, 237 aa, Thielavia terrestris
ASGSGQSTRYWDCCKPSCAWPGKAAVSQPVYSCDANFQRLSDFNVQSGCNGGSAYACADQTPWAVNDNLAYGFAATSIAGGSESSWCCACYALTFTSGPVAGKTMVVQSTSTGGDLGSNHFDIAMPGGGVGIFDGCSSQFGGLPGDRYGGISSRDQCDSFPAPLKPGCYWRFDWFQNADNPTVTFQQVQCPAEIVARSGCKRNDDSSFPVFTPPPPPPCTTQKWGQCGGIGYTGCTN

SEQ ID NO: 46600 - protein, 268 aa, Thermothielavioides terrestris
ASGSGQSTRYWDCCKPSCAWPGKAAVSQPVYACDANFQRLSDFNVQSGCNGGSAYACADQTPWAVNDNLAYGFAATSIAGGSESSWCCACYALTFTSGPVAGKTMVVQSTSTGGDLGSNHFDIAMPGGGVGIFDGCSSQFGGLPGARYGGISSRDQCDSFPAPLKPGCQWRFDWFQNADNPTFTFQQVQCPAEIVARSGCKRNDDSSFPVFTTTPTPTPTPPTPTPTPTPGCTAERWAQCGGNGWSGCTTCVAGSTCTKINDWYHQCL

SEQ ID NO: 46601 - protein, 266 aa, Thermothielavioides terrestris
ASGSGQSTRYWDCCKPSCAWPGKAAVSQPVYACDANFQRLSDFNVQSGCNGGSAYACADQTPWAVNDNLAYGFAATSIAGGSESSWCCACYALTFTSGPVAGKTMVVQSTSTGGDLGSNHFDIAMPGGGVGIFDGCSSQFGGLPGAQYGGISSRDECDSFPEPLKPGCQWRFDWFQNADNPTFTFQQVQCPAEIVARSGCKRNDDSSFPVFTPEPTPEPTPEPTPEPTGCTAERWAQCGGNGWSGCTTCVAGSTCTKINDWYHQCL

SEQ ID NO: 46602 - protein, 266 aa, Thermothielavioides terrestris
ASGSGQSTRYWDCCKPSCAWPGKAAVSQPVYACDANFQRLSDFNVQSGCNGGSAYACADQTPWAVNDNLAYGFAATSIAGGSESSWCCACYALTFTSGPVAGKTMVVQSTSTGGDLGSNHFDIAMPGGGVGIFDGCSSQFGGLPGARYGGISSRDQCDSFPAPLKPGCQWRFDWFQNADNPTFTFQQVQCPAEIVARSGCKRNDDSSFPVFTPKPTPEPTPKPTPEPTGCTAERWAQCGGNGWSGCTTCVAGSTCTKINDWYHQCL

SEQ ID NO: 46603 - protein, 266 aa, Thermothielavioides terrestris
ASGSGQSTRYWDCCKPSCAWPGKAAVSQPVYACDANFQRLSDFNVQSGCNGGSAYACADQTPWAVNDNLAYGFAATSIAGGSESSWCCACYALTFTSGPVAGKTMVVQSTSTGGDLGSNHFDIAMPGGGVGIFDGCSSQFGGLPGAQYGGISSRDECDSFPAPLKPGCYWRFDWFQNADNPTFTFQQVQCPAEIVARSGCKRNDDSSFPVFTPEPTPEPTPEPTPEPTGCTAERWAQCGGNGWSGCTTCVAGSTCTKINDWYHQCL

SEQ ID NO: 46604 - protein, 264 aa, Thielavia terrestris
ASGSGQSTRYWDCCKPSCAWPGKAAVSQPVYSCDANFQRLSDFNVQSGCNGGSAYACADQTPWAVNDNLAYGFAATSIAGGSESSWCCACYALTFTSGPVAGKTMVVQSTSTGGDLGSNHFDIAMPGGGVGIFDGCSSQFGGLPGDRYGGISSRDQCDSFPAPLKPGCYWRFDWFQNADNPTVTFQQVQCPAEIVARSGCKRNDDSSFPVFTSPSSPSSPSSPSSPSGCTTQKWGQCGGIGYTGCTNCVAGTTCTQLNPWYHQC

SEQ ID NO: 46605 - protein, 242 aa, Thermothielavioides terrestris
ASGSGQSTRYWDCCKPSCAWPGKAAVSQPVYACDANFQRLSDFNVQSGCNGGSAYACADQTPWAVNDNLAYGFAATSIAGGSESSWCCACYALTFTSGPVAGKTMVVQSTSTGGDLGSNHFDIAMPGGGVGIFDGCSSQFGGLPGARYGGISSRDQCDSFPAPLKPGCQWRFDWFQNADNPTFTFQQVQCPAEIVARSGCKRNDDSSFPVFTSPSPSPSPSPGCTSQKWAQCGGIGFSGCTT

SEQ ID NO: 46606 - protein, 242 aa, Thermothielavioides terrestris
ASGSGQSTRYWDCCKPSCAWPGKAAVSQPVYACDANFQRLSDFNVQSGCNGGSAYACADQTPWAVNDNLAYGFAATSIAGGSESSWCCACYALTFTSGPVAGKTMVVQSTSTGGDLGSNHFDIAMPGGGVGIFDGCSSQFGGLPGARYGGISSRDQCDSFPAPLKPGCQWRFDWFQNADNPTFTFQQVQCPAEIVARSGCKRNDDSSFPVFTSPSPSPSPPPGCTSQKWAQCGGIGFSGCTT

SEQ ID NO: 46607 - protein, 242 aa, Thermothielavioides terrestris
ASGSGQSTRYWDCCKPSCAWPGKAAVSQPVYACDANFQRLSDFNVQSGCNGGSAYACADQTPWAVNDNLAYGFAATSIAGGSESSWCCACYALTFTSGPVAGKTMVVQSTSTGGDLGSNHFDIAMPGGGVGIFDGCSSQFGGLPGARYGGISSRDQCDSFPAPLKPGCQWRFDWFQNADNPTFTFQQVQCPAEIVARSGCKRNDDSSFPVFTSPSPSPSPSPNCTSQKWAQCGGIGFSGCTT

SEQ ID NO: 46608 - protein, 242 aa, Thermothielavioides terrestris
ASGSGQSTRYWDCCKPSCAWPGKAAVSQPVYACDANFQRLSDFNVQSGCNGGSAYACADQTPWAVNDNLAYGFAATSIAGGSESSWCCACYALTFTSGPVAGKTMVVQSTSTGGDLGSNHFDIAMPGGGVGIFDGCSSQFGGLPGARYGGISSRDQCDSFPAPLKPGCQWRFDWFQNADNPTFTFQQVQCPAEIVARSGCKRNDDSSFPVFTSPSPSPSPSPSCTSQKWAQCGGIGFSGCTT

SEQ ID NO: 46609 - protein, 242 aa, Thermothielavioides terrestris
ASGSGQSTRYWDCCKPSCAWPGKAAVSQPVYACDANFQRLSDFNVQSGCNGGSAYACADQTPWAVNDNLAYGFAATSIAGGSESSWCCACYALTFTSGPVAGKTMVVQSTSTGGDLGSNHFDIAMPGGGVGIFDGCSSQFGGLPGAQYGGISSRDECDSFPAPLKPGCYWRFDWFQNADNPTFTFQQVQCPAEIVARSGCKRNDDSSFPVFTTPTPTPTPTPGCTSQKWAQCGGIGFSGCTT

SEQ ID NO: 46610 - protein, 242 aa, Thermothielavioides terrestris
ASGSGQSTRYWDCCKPSCAWPGKAAVSQPVYACDANFQRLSDFNVQSGCNGGSAYACADQTPWAVNDNLAYGFAATSIAGGSESSWCCACYALTFTSGPVAGKTMVVQSTSTGGDLGSNHFDIAMPGGGVGIFNGCSSQFGGLPGARYGGISSRDQCDSFPAPLKPGCYWRFDWFQNADNPTFTFQQVQCPAEIVARSGCKRNDDSSFPVFTSPSPSPSPSPGCTSQKWAQCGGIGFSGCTT

SEQ ID NO: 46611 - protein, 242 aa, Thermothielavioides terrestris
ASGSGQSTRYWDCCKPSCAWPGKAAVSQPVYACDANFQRLSDFNVQSGCNGGSAYACADQTPWAVNDNLAYGFAATSIAGGSESSWCCACYALTFTSGPVAGKTMVVQSTSTGGDLGSNHFDIAMPGGGVGIFDGCSSQFGGLPGARYGGISSRDQCDSFPAPLKPGCQWRFDWFQNADNPTFTFQQVQCPAEIVARSGCKRNDDSSFPVFTSPSPSPSPAPGCTSQKWAQCGGIGFSGCTT

SEQ ID NO: 46612 - protein, 242 aa, Thermothielavioides terrestris
ASGSGQSTRYWDCCKPSCAWPGKAAVSQPVYACDANFQRLSDFNVQSGCNGGSAYACADQTPWAVNDNLAYGFAATSIAGGSESSWCCACYALTFTSGPVAGKTMVVQSTSTGGDLGSNHFDIAMPGGGVGIFDGCSSQFGGLPGARYGGISSRDQCDSFPAPLKPGCQWRFDWFQNADNPTFTFQQVQCPAEIVARSGCKRNDDSSFPVFTSPSPSPSPSPECTSQKWAQCGGIGFSGCTT

SEQ ID NO: 46613 - protein, 242 aa, Thermothielavioides terrestris
ASGSGQSTRYWDCCKPSCAWPGKAAVSQPVYACDANFQRLSDFNVQSGCNGGSAYACADQTPWAVNDNLAYGFAATSIAGGSESSWCCACYALTFTSGPVAGKTMVVQSTSTGGDLGSNHFDIAMPGGGVGIFDGCSSQFGGLPGARYGGISSRDQCDSFPAPLKPGCQWRFDWFQNADNPTFTFQQVQCPAEIVARSGCKRNDDSSFPVFTSPSPSPSPSPKCTSQKWAQCGGIGFSGCTT

SEQ ID NO: 46614 - protein, 242 aa, Thermothielavioides terrestris
ASGSGQSTRYWDCCKPSCAWPGKAAVSQPVYACDANFQRLSDFNVQSGCNGGSAYACADQTPWAVNDNLAYGFAATSIAGGSESSWCCACYALTFTSGPVAGKTMVVQSTSTGGDLGSNHFDIAMPGGGVGIFDGCSSQFGGLPGAQYGGISSRDECDSFPEPLKPGCQWRFDWFQNADNPTFTFQQVQCPAEIVARSGCKRNDDSSFPVFTTPTPTPTPTPGCTSQKWAQCGGIGFSGCTT

SEQ ID NO: 46615 - protein, 242 aa, Thermothielavioides terrestris
ASGSGQSTRYWDCCKPSCAWPGKAAVSQPVYACDANFQRLSDFNVQSGCNGGSAYACADQTPWAVNDNLAYGFAATSIAGGSESSWCCACYALTFTSGPVAGKTMVVQSTSTGGDLGSNHFDIAMPGGGVGIFDGCSSQFGGLPGARYGGISSRDQCDSFPAPLKPGCQWRFDWFQNADNPTFTFQQVQCPAEIVARSGCKRNDDSSFPVFTSPSPSPSPDPGCTSQKWAQCGGIGFSGCTT

SEQ ID NO: 46616 - protein, 242 aa, Thermothielavioides terrestris
ASGSGQSTRYWDCCKPSCAWPGKAAVSQPVYACDANFQRLSDFNVQSGCNGGSAYACADQTPWAVNDNLAYGFAATSIAGGSESSWCCACYALTFTSGPVAGKTMVVQSTSTGGDLGSNHFDIAMPGGGVGIFDGCSSQFGGLPGARYGGISSRDQCDSFPAPLKPGCQWRFDWFQNADNPTFTFQQVQCPAEIVARSGCKRNDDSSFPVFTSPSPSPSPSPPCTSQKWAQCGGIGFSGCTT

SEQ ID NO: 46617 - protein, 242 aa, Thermothielavioides terrestris
ASGSGQSTRYWDCCKPSCAWPGKAAVSQPVYACDANFQRLSDFNVQSGCNGGSAYACADQTPWAVNDNLAYGFAATSIAGGSESSWCCACYALTFTSGPVAGKTMVVQSTSTGGDLGSNHFDIAMPGGGVGIFDGCSSQFGGLPGARYGGISSRDQCDSFPAPLKPGCQWRFDWFQNADNPTFTFQQVQCPAEIVARSGCKRNDDSSFPVFTSPSPSPSPKPGCTSQKWAQCGGIGFSGCTT

SEQ ID NO: 46618 - protein, 242 aa, Thermothielavioides terrestris
ASGSGQSTRYWDCCKPSCAWPGKAAVSQPVYACDANFQRLSDFNVQSGCNGGSAYACADQTPWAVNDNLAYGFAATSIAGGSESSWCCACYALTFTSGPVAGKTMVVQSTSTGGDLGSNHFDIAMPGGGVGIFDGCSSQFGGLPGAQYGGISSRDECDSFPEPLKPGCQWRFDWFQNADNPTFTFQQVQCPAEIVARSGCKRNDDSSFPVFTSPSPSPSPSPGCTAERWAQCGGNGWSGCTT

SEQ ID NO: 46619 - protein, 243 aa, Thermothielavioides terrestris
ASGSGQSTRYWDCCKPSCAWPGKAAVSQPVYACDANFQRLSDFNVQSGCNGGSAYACADQTPWAVNDNLAYGFAATSIAGGSESSWCCACYALTFTSGPVAGKTMVVQSTSTGGDLGSNHFDIAMPGGGVGIFDGCSSQFGGLPGARYGGISSRDQCDSFPAPLKPGCQWRFDWFQNADNPTFTFQQVQCPAEIVARSGCKRNDDSSFPVFTSPSPSPSPSPSGCTSQKWAQCGGIGFSGCTT

SEQ ID NO: 46620 - protein, 243 aa, Thermothielavioides terrestris
ASGSGQSTRYWDCCKPSCAWPGKAAVSQPVYACDANFQRLSDFNVQSGCNGGSAYACADQTPWAVNDNLAYGFAATSIAGGSESSWCCACYALTFTSGPVAGKTMVVQSTSTGGDLGSNHFDIAMPGGGVGIFDGCSSQFGGLPGARYGGISSRDQCDSFPAPLKPGCQWRFDWFQNADNPTFTFQQVQCPAEIVARSGCKRNDDSSFPVFTSPSPSPSPSPGGCTSQKWAQCGGIGFSGCTT

SEQ ID NO: 46621 - protein, 261 aa, Thielavia terrestris
ASGSGQSTRYWDCCKPSCAWPGKAAVSQPVYSCDANFQRLSDFNVQSGCNGGSAYACADQTPWAVNDNLAYGFAATSIAGGSESSWCCACYALTFTSGPVAGKTMVVQSTSTGGDLGSNHFDIAMPGGGVGIFDGCSSQFGGLPGDRYGGISSRDQCDSFPAPLKPGCYWRFDWFQNADNPTVTFQQVQCPAEIVARSGCKRNDDSSFPVFTPEPTPEPTPEPTPCTTQKWGQCGGIGYTGCTNCVAGTTCTQLNPWYHQC

SEQ ID NO: 46622 - protein, 271 aa, Thermothielavioides terrestris
ASGSGQSTRYWDCCKPSCAWPGKAAVSQPVYACDANFQRLSDFNVQSGCNGGSAYACADQTPWAVNDNLAYGFAATSIAGGSESSWCCACYALTFTSGPVAGKTMVVQSTSTGGDLGSNHFDIAMPGGGVGIFDGCSSQFGGLPGARYGGISSRDQCDSFPAPLKPGCQWRFDWFQNADNPTFTFQQVQCPAEIVARSGCKRNDDSSFPVFTPPSSPSSPSSPSSPSSPSSPSGCTAERWAQCGGNGWSGCTTCVAGSTCTKINDWYHQCL

SEQ ID NO: 46623 - protein, 239 aa, Thielavia terrestris
ASGSGQSTRYWDCCKPSCAWPGKAAVSQPVYSCDANFQRLSDFNVQSGCNGGSAYACADQTPWAVNDNLAYGFAATSIAGGSESSWCCACYALTFTSGPVAGKTMVVQSTSTGGDLGSNHFDIAMPGGGVGIFDGCSSQFGGLPGDRYGGISSRDQCDSFPAPLKPGCYWRFDWFQNADNPTVTFQQVQCPAEIVARSGCKRNDDSSFPVFTPPPPPPPGCTAERWAQCGGNGWSGCTT

SEQ ID NO: 46624 - protein, 240 aa, Thielavia terrestris
ASGSGQSTRYWDCCKPSCAWPGKAAVSQPVYSCDANFQRLSDFNVQSGCNGGSAYACADQTPWAVNDNLAYGFAATSIAGGSESSWCCACYALTFTSGPVAGKTMVVQSTSTGGDLGSNHFDIAMPGGGVGIFDGCSSQFGGLPGDRYGGISSRDQCDSFPAPLKPGCYWRFDWFQNADNPTVTFQQVQCPAEIVARSGCKRNDDSSFPVFTPQPTPQPTGCTTQKWGQCGGIGYTGCTN

SEQ ID NO: 46625 - protein, 240 aa, Thielavia terrestris
ASGSGQSTRYWDCCKPSCAWPGKAAVSQPVYSCDANFQRLSDFNVQSGCNGGSAYACADQTPWAVNDNLAYGFAATSIAGGSESSWCCACYALTFTSGPVAGKTMVVQSTSTGGDLGSNHFDIAMPGGGVGIFDGCSSQFGGLPGDRYGGISSRDQCDSFPAPLKPGCYWRFDWFQNADNPTVTFQQVQCPAEIVARSGCKRNDDSSFPVFTPQPTPEPTGCTTQKWGQCGGIGYTGCTN

SEQ ID NO: 46626 - protein, 240 aa, Thielavia terrestris
ASGSGQSTRYWDCCKPSCAWPGKAAVSQPVYSCDANFQRLSDFNVQSGCNGGSAYACADQTPWAVNDNLAYGFAATSIAGGSESSWCCACYALTFTSGPVAGKTMVVQSTSTGGDLGSNHFDIAMPGGGVGIFDGCSSQFGGLPGDRYGGISSRDQCDSFPAPLKPGCYWRFDWFQNADNPTVTFQQVQCPAEIVARSGCKRNDDSSFPVFTPEPTPEPTRCTTQKWGQCGGIGYTGCTN

SEQ ID NO: 46627 - protein, 240 aa, Thielavia terrestris
ASGSGQSTRYWDCCKPSCAWPGKAAVSQPVYSCDANFQRLSDFNVQSGCNGGSAYACADQTPWAVNDNLAYGFAATSIAGGSESSWCCACYALTFTSGPVAGKTMVVQSTSTGGDLGSNHFDIAMPGGGVGIFDGCSSQFGGLPGDRYGGISSRDQCDSFPAPLKPGCYWRFDWFQNADNPTVTFQQVQCPAEIVARSGCKRNDDSSFPVFTPRPTPEPTGCTTQKWGQCGGIGYTGCTN

SEQ ID NO: 46628 - protein, 240 aa, Thielavia terrestris
ASGSGQSTRYWDCCKPSCAWPGKAAVSQPVYSCDANFQRLSDFNVQSGCNGGSAYACADQTPWAVNDNLAYGFAATSIAGGSESSWCCACYALTFTSGPVAGKTMVVQSTSTGGDLGSNHFDIAMPGGGVGIFDGCSSQFGGLPGDRYGGISSRDQCDSFPAPLKPGCYWRFDWFQNADNPTVTFQQVQCPAEIVARSGCKRNDDSSFPVFTPEPTPQPTGCTTQKWGQCGGIGYTGCTN

SEQ ID NO: 46629 - protein, 240 aa, Thielavia terrestris
ASGSGQSTRYWDCCKPSCAWPGKAAVSQPVYSCDANFQRLSDFNVQSGCNGGSAYACADQTPWAVNDNLAYGFAATSIAGGSESSWCCACYALTFTSGPVAGKTMVVQSTSTGGDLGSNHFDIAMPGGGVGIFDGCSSQFGGLPGDRYGGISSRDQCDSFPAPLKPGCYWRFDWFQNADNPTVTFQQVQCPAEIVARSGCKRNDDSSFPVFTPEPTPEPTPCTTQKWGQCGGIGYTGCTN

SEQ ID NO: 46630 - protein, 240 aa, Thielavia terrestris
ASGSGQSTRYWDCCKPSCAWPGKAAVSQPVYSCDANFQRLSDFNVQSGCNGGSAYACADQTPWAVNDNLAYGFAATSIAGGSESSWCCACYALTFTSGPVAGKTMVVQSTSTGGDLGSNHFDIAMPGGGVGIFDGCSSQFGGLPGDRYGGISSRDQCDSFPAPLKPGCYWRFDWFQNADNPTVTFQQVQCPAEIVARSGCKRNDDSSFPVFTPEPTPEPTGCTTQKWGQCGGIGYTGCTN

SEQ ID NO: 46631 - protein, 270 aa, Thermothielavioides terrestris
ASGSGQSTRYWDCCKPSCAWPGKAAVSQPVYACDANFQRLSDFNVQSGCNGGSAYSCADQTPWAVNDNLAYGFAATSIAGGSESSWCCACYALTFTSGPVAGKTMVVQSTSTGGDLGSNHFDIAMPGGGVGIFNGCSSQFGGLPGAQYGGISSRDQCDSFPAPLKPGCQWRFDWFQNADNPTFTFQQVQCPAEIVARSGCKRNDDSSFPVFTPEPTPEPTPEPTPEPTPEPTGCTAERWAQCGGNGWSGCTTCVAGSTCTKINDWYHQCL

SEQ ID NO: 46632 - protein, 238 aa, Thielavia terrestris
ASGSGQSTRYWDCCKPSCAWPGKAAVSQPVYSCDANFQRLSDFNVQSGCNGGSAYACADQTPWAVNDNLAYGFAATSIAGGSESSWCCACYALTFTSGPVAGKTMVVQSTSTGGDLGSNHFDIAMPGGGVGIFDGCSSQFGGLPGDRYGGISSRDQCDSFPAPLKPGCYWRFDWFQNADNPTVTFQQVQCPAEIVARSGCKRNDDSSFPVFTPPPPPPPCTTQKWGQCGGIGYTGCTN

SEQ ID NO: 46633 - protein, 237 aa, Thielavia terrestris
ASGSGQSTRYWDCCKPSCAWPGKAAVSQPVYSCDANFQRLSDFNVQSGCNGGSAYACADQTPWAVNDNLAYGFAATSIAGGSESSWCCACYALTFTSGPVAGKTMVVQSTSTGGDLGSNHFDIAMPGGGVGIFDGCSSQFGGLPGDRYGGISSRDQCDSFPAPLKPGCYWRFDWFQNADNPTVTFQQVQCPAEIVARSGCKRNDDSSFPVFTPPPPPPPGCTTQKWGQCGGIGYTGC

SEQ ID NO: 46634 - protein, 237 aa, Thielavia terrestris
ASGSGQSTRYWDCCKPSCAWPGKAAVSQPVYSCDANFQRLSDFNVQSGCNGGSAYACADQTPWAVNDNLAYGFAATSIAGGSESSWCCACYALTFTSGPVAGKTMVVQSTSTGGDLGSNHFDIAMPGGGVGIFDGCSSQFGGLPGDRYGGISSRDQCDSFPAPLKPGCYWRFDWFQNADNPTVTFQQVQCPAEIVARSGCKRNDDSSFPVFTPPPPPPPGCTTQKWGQCGGIGWTGC

SEQ ID NO: 46635 - protein, 242 aa, Thermothielavioides terrestris
ASGSGQSTRYWDCCKPSCAWPGKAAVSQPVYACDANFQRLSDFNVQSGCNGGSAYACADQTPWAVNDNLAYGFAATSIAGGSESSWCCACYALTFTSGPVAGKTMVVQSTSTGGDLGSNHFDIAMPGGGVGIFDGCSSQFGGLPGAQYGGISSRDECDSFPEPLKPGCQWRFDWFQNADNPTFTFQQVQCPAEIVARSGCKRNDDSSFPVFTSPSPSPSPSPGCTSQKWAQCGGIGFSGCTT

SEQ ID NO: 46636 - protein, 262 aa, Thielavia terrestris
ASGSGQSTRYWDCCKPSCAWPGKAAVSQPVYSCDANFQRLSDFNVQSGCNGGSAYACADQTPWAVNDNLAYGFAATSIAGGSESSWCCACYALTFTSGPVAGKTMVVQSTSTGGDLGSNHFDIAMPGGGVGIFDGCSSQFGGLPGDRYGGISSRDQCDSFPAPLKPGCYWRFDWFQNADNPTVTFQQVQCPAEIVARSGCKRNDDSSFPVFTPPPPPPPPPPPPPGCTTQKWGQCGGIGYTGCTNCVAGTTCTQLNPWYHQC

SEQ ID NO: 46637 - protein, 270 aa, Thermothielavioides terrestris
ASGSGQSTRYWDCCKPSCAWPGKAAVSQPVYACDANFQRLSDFNVQSGCNGGSAYACADQTPWAVNDNLAYGFAATSIAGGSESSWCCACYALTFTSGPVAGKTMVVQSTSTGGDLGSNHFDIAMPGGGVGIFDGCSSQFGGLPGARYGGISSRDQCDSFPAPLKPGCQWRFDWFQNADNPTFTFQQVQCPAEIVARSGCKRNDDSSFPVFTPSPTPSPTPSPTPSPTPSPTGCTAERWAQCGGNGWSGCTTCVAGSTCTKINDWYHQCL

SEQ ID NO: 46638 - protein, 239 aa, Thielavia terrestris
ASGSGQSTRYWDCCKPSCAWPGKAAVSQPVYSCDANFQRLSDFNVQSGCNGGSAYACADQTPWAVNDNLAYGFAATSIAGGSESSWCCACYALTFTSGPVAGKTMVVQSTSTGGDLGSNHFDIAMPGGGVGIFDGCSSQFGGLPGDRYGGISSRDQCDSFPAPLKPGCYWRFDWFQNADNPTVTFQQVQCPAEIVARSGCKRNDDSSFPVFTPPPPPPPGCTTQKWGQCGGIGWTGCTN

SEQ ID NO: 46639 - protein, 239 aa, Thielavia terrestris
ASGSGQSTRYWDCCKPSCAWPGKAAVSQPVYSCDANFQRLSDFNVQSGCNGGSAYACADQTPWAVNDNLAYGFAATSIAGGSESSWCCACYALTFTSGPVAGKTMVVQSTSTGGDLGSNHFDIAMPGGGVGIFDGCSSQFGGLPGDRYGGISSRDQCDSFPAPLKPGCYWRFDWFQNADNPTVTFQQVQCPAEIVARSGCKRNDDSSFPVFTPPPPPPPGCTTQKWGQCGGIGYTGCTN

SEQ ID NO: 46640 - protein, 267 aa, Thielavia terrestris
ASGSGQSTRYWDCCKPSCAWPGKAAVSQPVYSCDANFQRLSDFNVQSGCNGGSAYACADQTPWAVNDNLAYGFAATSIAGGSESSWCCACYALTFTSGPVAGKTMVVQSTSTGGDLGSNHFDIAMPGGGVGIFDGCSSQFGGLPGDRYGGISSRDQCDSFPAPLKPGCYWRFDWFQNADNPTVTFQQVQCPAEIVARSGCKRNDDSSFPVFTTPTTPTTPTTPTTPTTPTGCTTQKWGQCGGIGYTGCTNCVAGTTCTQLNPWYHQC

SEQ ID NO: 46641 - protein, 265 aa, Thielavia terrestris
ASGSGQSTRYWDCCKPSCAWPGKAAVSQPVYSCDANFQRLSDFNVQSGCNGGSAYACADQTPWAVNDNLAYGFAATSIAGGSESSWCCACYALTFTSGPVAGKTMVVQSTSTGGDLGSNHFDIAMPGGGVGIFDGCSSQFGGLPGDRYGGISSRDQCDSFPAPLKPGCYWRFDWFQNADNPTVTFQQVQCPAEIVARSGCKRNDDSSFPVFTPQPTPEPTPQPTPEPTGCTTQKWGQCGGIGYTGCTNCVAGTTCTQLNPWYHQC

SEQ ID NO: 46642 - protein, 265 aa, Thielavia terrestris
ASGSGQSTRYWDCCKPSCAWPGKAAVSQPVYSCDANFQRLSDFNVQSGCNGGSAYACADQTPWAVNDNLAYGFAATSIAGGSESSWCCACYALTFTSGPVAGKTMVVQSTSTGGDLGSNHFDIAMPGGGVGIFDGCSSQFGGLPGDRYGGISSRDQCDSFPAPLKPGCYWRFDWFQNADNPTVTFQQVQCPAEIVARSGCKRNDDSSFPVFTPQPTPQPTPQPTPQPTGCTTQKWGQCGGIGYTGCTNCVAGTTCTQLNPWYHQC

SEQ ID NO: 46643 - protein, 270 aa, Thermothielavioides terrestris
ASGSGQSTRYWDCCKPSCAWPGKAAVSQPVYACDANFQRLSDFNVQSGCNGGSAYSCADQTPWAVNDNLAYGFAATSIAGGSESSWCCACYALTFTSGPVAGKTMVVQSTSTGGDLGSNHFDIAMPGGGVGIFDGCSSQFGGLPGARYGGISSRDQCDSFPAPLKPGCQWRFDWFQNADNPTFTFQQVQCPAEIVARSGCKRNDDSSFPVFTPEPTPEPTPEPTPEPTPEPTGCTAERWAQCGGNGWSGCTTCVAGSTCTKINDWYHQCL

SEQ ID NO: 46644 - protein, 270 aa, Thermothielavioides terrestris
ASGSGQSTRYWDCCKPSCAWPGKAAVSQPVYACDANFQRLSDFNVQSGCNGGSAYACADQTPWAVNDNLAYGFAATSIAGGSESSWCCACYALTFTSGPVAGKTMVVQSTSTGGDLGSNHFDIAMPGGGVGIFNGCSSQFGGLPGARYGGISSRDQCDSFPAPLKPGCQWRFDWFQNADNPTFTFQQVQCPAEIVARSGCKRNDDSSFPVFTPEPTPEPTPEPTPEPTPEPTGCTAERWAQCGGNGWSGCTTCVAGSTCTKINDWYHQCL

SEQ ID NO: 46645 - protein, 270 aa, Thermothielavioides terrestris
ASGSGQSTRYWDCCKPSCAWPGKAAVSQPVYACDANFQRLSDFNVQSGCNGGSAYACADQTPWAVNDNLAYGFAATSIAGGSESSWCCACYALTFTSGPVAGKTMVVQSTSTGGDLGSNHFDIAMPGGGVGIFDGCSSQFGGLPGARYGGISSRDQCDSFPAPLKPGCQWRFDWFQNADNPTFTFQQVQCPAEIVARSGCKRNDDSSFPVFTPEPTPEPTPEPTPEPTPGPTGCTAERWAQCGGNGWSGCTTCVAGSTCTKINDWYHQCL

SEQ ID NO: 46646 - protein, 241 aa, Thermothielavioides terrestris NRRL 8126
ASGSGQSTRYWDCCKPSCAWPGKAAVSQPVYSCDANFQRLSDFNVQSGCNGGSAYACADQTPWAVNDNLAYGFAATSIAGGSESSWCCACYALTFTSGPVAGKTMVVQSTSTGGDLGSNHFDIAMPGGGVGIFDGCSSQFGGLPGDRYGGISSRDQCDSFPAPLKPGCYWRFDWFQNADNPTVTFQQVQCPAEIVARSGCKRNDDSSFPVFTSPSPSPSPSPCTTQGWGQCGGIGYTGCTN

SEQ ID NO: 46647 - protein, 242 aa, Thielavia terrestris
ASGSGQSTRYWDCCKPSCAWPGKAAVSQPVYSCDANFQRLSDFNVQSGCNGGSAYACADQTPWAVNDNLAYGFAATSIAGGSESSWCCACYALTFTSGPVAGKTMVVQSTSTGGDLGSNHFDIAMPGGGVGIFDGCSSQFGGLPGDRYGGISSRDQCDSFPAPLKPGCYWRFDWFQNADNPTVTFQQVQCPAEIVARSGCKRNDDSSFPVFTPSPNSPNSPNGCTTQKWGQCGGIGYTGCTN

SEQ ID NO: 46648 - protein, 253 aa, Thermothielavioides terrestris
ASGSGQSTRYWDCCKPSCAWPGKAAVSQPVYACDANFQRLSDFNVQSGCNGGSAYSCADQTPWAVNDNLAYGFAATSIAGGSESSWCCACYALTFTSGPVAGKTMVVQSTSTGGDLGSNHFDIAMPGGGVGIFDGCSSQFGGLPGARYGGISSRDQCDSFPAPLKPGCQWRFDWFQNADNPTFTFQQVQCPAEIVARSGCKRNDDSSFPVFTSPSPGCTAERWAQCGGNGWSGCTTCVAGSTCTKINDWYHQC

SEQ ID NO: 46649 - protein, 255 aa, Thermothielavioides terrestris
ASGSGQSTRYWDCCKPSCAWPGKAAVSQPVYACDANFQRLSDFNVQSGCNGGSAYACADQTPWAVNDNLAYGFAATSIAGGSESSWCCACYALTFTSGPVAGKTMVVQSTSTGGDLGSNHFDIAMPGGGVGIFDGCSSQFGGLPGARYGGISSRDQCDSFPAPLKPGCQWRFDWFQNADNPTFTFQQVQCPAEIVARSGCKRNDDSSFPVFTSPSSPSGCTAERWAQCGGNGWSGCTTCVAGSTCTKINDWYHQC

SEQ ID NO: 46650 - protein, 269 aa, Thermothielavioides terrestris
ASGSGQSTRYWDCCKPSCAWPGKAAVSQPVYACDANFQRLSDFNVQSGCNGGSAYACADQTPWAVNDNLAYGFAATSIAGGSESSWCCACYALTFTSGPVAGKTMVVQSTSTGGDLGSNHFDIAMPGGGVGIFDGCSSQFGGLPGARYGGISSRDQCDSFPAPLKPGCQWRFDWFQNADNPTFTFQQVQCPAEIVARSGCKRNDDSSFPVFTPEPTPEPTPEPTPEPTPETGCTAERWAQCGGNGWSGCTTCVAGSTCTKINDWYHQCL

SEQ ID NO: 46651 - protein, 240 aa, Thielavia terrestris
ASGSGQSTRYWDCCKPSCAWPGKAAVSQPVYSCDANFQRLSDFNVQSGCNGGSAYACADQTPWAVNDNLAYGFAATSIAGGSESSWCCACYALTFTSGPVAGKTMVVQSTSTGGDLGSNHFDIAMPGGGVGIFDGCSSQFGGLPGDRYGGISSRDQCDSFPAPLKPGCYWRFDWFQNADNPTVTFQQVQCPAEIVARSGCKRNDDSSFPVFTPPPPPPPPGCTTQKWGQCGGIGYTGCTN

SEQ ID NO: 46652 - protein, 268 aa, Thermothielavioides terrestris
ASGSGQSTRYWDCCKPSCAWPGKAAVSQPVYACDANFQRLSDFNVQSGCNGGSAYACADQTPWAVNDNLAYGFAATSIAGGSESSWCCACYALTFTSGPVAGKTMVVQSTSTGGDLGSNHFDIAMPGGGVGIFDGCSSQFGGLPGARYGGISSRDQCDSFPAPLKPGCQWRFDWFQNADNPTFTFQQVQCPAEIVARSGCKRNDDSSFPVFTPEPTPEPTPEPTPEPTPEPCTAERWAQCGGNGWSGCTTCVAGSTCTKINDWYHQCL

SEQ ID NO: 46653 - protein, 265 aa, Thielavia terrestris
ASGSGQSTRYWDCCKPSCAWPGKAAVSQPVYSCDANFQRLSDFNVQSGCNGGSAYACADQTPWAVNDNLAYGFAATSIAGGSESSWCCACYALTFTSGPVAGKTMVVQSTSTGGDLGSNHFDIAMPGGGVGIFDGCSSQFGGLPGDRYGGISSRDQCDSFPAPLKPGCYWRFDWFQNADNPTVTFQQVQCPAEIVARSGCKRNDDSSFPVFTPSPTPSPTPSPTPSPTGCTTQKWGQCGGIGYTGCTNCVAGTTCTQLNPWYHQC

SEQ ID NO: 46654 - protein, 265 aa, Thielavia terrestris
ASGSGQSTRYWDCCKPSCAWPGKAAVSQPVYSCDANFQRLSDFNVQSGCNGGSAYACADQTPWAVNDNLAYGFAATSIAGGSESSWCCACYALTFTSGPVAGKTMVVQSTSTGGDLGSNHFDIAMPGGGVGIFDGCSSQFGGLPGDRYGGISSRDQCDSFPAPLKPGCYWRFDWFQNADNPTVTFQQVQCPAEIVARSGCKRNDDSSFPVFTPEPTPKPTPEPTPKPTGCTTQKWGQCGGIGYTGCTNCVAGTTCTQLNPWYHQC

SEQ ID NO: 46655 - protein, 265 aa, Thielavia terrestris
ASGSGQSTRYWDCCKPSCAWPGKAAVSQPVYSCDANFQRLSDFNVQSGCNGGSAYACADQTPWAVNDNLAYGFAATSIAGGSESSWCCACYALTFTSGPVAGKTMVVQSTSTGGDLGSNHFDIAMPGGGVGIFDGCSSQFGGLPGDRYGGISSRDQCDSFPAPLKPGCYWRFDWFQNADNPTVTFQQVQCPAEIVARSGCKRNDDSSFPVFTPEPTPRPTPEPTPRPTGCTTQKWGQCGGIGYTGCTNCVAGTTCTQLNPWYHQC

SEQ ID NO: 46656 - protein, 265 aa, Thielavia terrestris
ASGSGQSTRYWDCCKPSCAWPGKAAVSQPVYSCDANFQRLSDFNVQSGCNGGSAYACADQTPWAVNDNLAYGFAATSIAGGSESSWCCACYALTFTSGPVAGKTMVVQSTSTGGDLGSNHFDIAMPGGGVGIFDGCSSQFGGLPGDRYGGISSRDQCDSFPAPLKPGCYWRFDWFQNADNPTVTFQQVQCPAEIVARSGCKRNDDSSFPVFTPEPTPEPTPEPTPEPTGCTTQKWGQCGGIGYTGCTNCVAGTTCTQLNPWYHQC

SEQ ID NO: 46657 - protein, 270 aa, Thermothielavioides terrestris
ASGSGQSTRYWDCCKPSCAWPGKAAVSQPVYACDANFQRLSDFNVQSGCNGGSAYACADQTPWAVNDNLAYGFAATSIAGGSESSWCCACYALTFTSGPVAGKTMVVQSTSTGGDLGSNHFDIAMPGGGVGIFDGCSSQFGGLPGARYGGISSRDQCDSFPAPLKPGCQWRFDWFQNADNPTFTFQQVQCPAEIVARSGCKRNDDSSFPVFTPEPTPEPTPEPTPEPTPEPTSCTAERWAQCGGNGWSGCTTCVAGSTCTKINDWYHQCL

SEQ ID NO: 46658 - protein, 270 aa, Thermothielavioides terrestris
ASGSGQSTRYWDCCKPSCAWPGKAAVSQPVYACDANFQRLSDFNVQSGCNGGSAYACADQTPWAVNDNLAYGFAATSIAGGSESSWCCACYALTFTSGPVAGKTMVVQSTSTGGDLGSNHFDIAMPGGGVGIFDGCSSQFGGLPGARYGGISSRDQCDSFPAPLKPGCQWRFDWFQNADNPTFTFQQVQCPAEIVARSGCKRNDDSSFPVFTPEPTPEPTPEPTPEPTPEPTGCTAERWAQCGGNGWSGCTTCVAGSTCTKINDWYHQCL

SEQ ID NO: 46659 - protein, 270 aa, Thermothielavioides terrestris
ASGSGQSTRYWDCCKPSCAWPGKAAVSQPVYACDANFQRLSDFNVQSGCNGGSAYACADQTPWAVNDNLAYGFAATSIAGGSESSWCCACYALTFTSGPVAGKTMVVQSTSTGGDLGSNHFDIAMPGGGVGIFDGCSSQFGGLPGARYGGISSRDQCDSFPAPLKPGCQWRFDWFQNADNPTFTFQQVQCPAEIVARSGCKRNDDSSFPVFTPEPTPEPTPEPTPEPTPDPTGCTAERWAQCGGNGWSGCTTCVAGSTCTKINDWYHQCL

SEQ ID NO: 46660 - protein, 270 aa, Thermothielavioides terrestris
ASGSGQSTRYWDCCKPSCAWPGKAAVSQPVYACDANFQRLSDFNVQSGCNGGSAYACADQTPWAVNDNLAYGFAATSIAGGSESSWCCACYALTFTSGPVAGKTMVVQSTSTGGDLGSNHFDIAMPGGGVGIFDGCSSQFGGLPGARYGGISSRDQCDSFPAPLKPGCQWRFDWFQNADNPTFTFQQVQCPAEIVARSGCKRNDDSSFPVFTPEPTPEPTPEPTPEPTPTPTGCTAERWAQCGGNGWSGCTTCVAGSTCTKINDWYHQCL

SEQ ID NO: 46661 - protein, 270 aa, Thermothielavioides terrestris
ASGSGQSTRYWDCCKPSCAWPGKAAVSQPVYACDANFQRLSDFNVQSGCNGGSAYACADQTPWAVNDNLAYGFAATSIAGGSESSWCCACYALTFTSGPVAGKTMVVQSTSTGGDLGSNHFDIAMPGGGVGIFDGCSSQFGGLPGARYGGISSRDQCDSFPAPLKPGCQWRFDWFQNADNPTFTFQQVQCPAEIVARSGCKRNDDSSFPVFTPEPTPEPTPEPTPEPTPSPTGCTAERWAQCGGNGWSGCTTCVAGSTCTKINDWYHQCL

SEQ ID NO: 46662 - protein, 242 aa, Thielavia terrestris
ASGSGQSTRYWDCCKPSCAWPGKAAVSQPVYSCDANFQRLSDFNVQSGCNGGSAYACADQTPWAVNDNLAYGFAATSIAGGSESSWCCACYALTFTSGPVAGKTMVVQSTSTGGDLGSNHFDIAMPGGGVGIFDGCSSQFGGLPGDRYGGISSRDQCDSFPAPLKPGCYWRFDWFQNADNPTVTFQQVQCPAEIVARSGCKRNDDSSFPVFTTPTPTPTPTPGCTTQKWGQCGGIGYTGCTN

SEQ ID NO: 46663 - protein, 269 aa, Thermothielavioides terrestris
ASGSGQSTRYWDCCKPSCAWPGKAAVSQPVYACDANFQRLSDFNVQSGCNGGSAYACADQTPWAVNDNLAYGFAATSIAGGSESSWCCACYALTFTSGPVAGKTMVVQSTSTGGDLGSNHFDIAMPGGGVGIFDGCSSQFGGLPGARYGGISSRDQCDSFPAPLKPGCQWRFDWFQNADNPTFTFQQVQCPAEIVARSGCKRNDDSSFPVFTPEPTPEPTPEPTPEPTPSPTCTAERWAQCGGNGWSGCTTCVAGSTCTKINDWYHQCL

SEQ ID NO: 46664 - protein, 269 aa, Thermothielavioides terrestris
ASGSGQSTRYWDCCKPSCAWPGKAAVSQPVYACDANFQRLSDFNVQSGCNGGSAYACADQTPWAVNDNLAYGFAATSIAGGSESSWCCACYALTFTSGPVAGKTMVVQSTSTGGDLGSNHFDIAMPGGGVGIFDGCSSQFGGLPGARYGGISSRDQCDSFPAPLKPGCQWRFDWFQNADNPTFTFQQVQCPAEIVARSGCKRNDDSSFPVFTPEPTPEPTPEPTPEPTPEPTCTAERWAQCGGNGWSGCTTCVAGSTCTKINDWYHQCL

SEQ ID NO: 46665 - protein, 241 aa, Thielavia terrestris
ASGSGQSTRYWDCCKPSCAWPGKAAVSQPVYSCDANFQRLSDFNVQSGCNGGSAYACADQTPWAVNDNLAYGFAATSIAGGSESSWCCACYALTFTSGPVAGKTMVVQSTSTGGDLGSNHFDIAMPGGGVGIFDGCSSQFGGLPGDRYGGISSRDQCDSFPAPLKPGCYWRFDWFQNADNPTVTFQQVQCPAEIVARSGCKRNDDSSFPVFTPPPPPPPPPGCTTQKWGQCGGIGYTGCTN

SEQ ID NO: 46666 - protein, 241 aa, Thielavia terrestris
ASGSGQSTRYWDCCKPSCAWPGKAAVSQPVYSCDANFQRLSDFNVQSGCNGGSAYACADQTPWAVNDNLAYGFAATSIAGGSESSWCCACYALTFTSGPVAGKTMVVQSTSTGGDLGSNHFDIAMPGGGVGIFDGCSSQFGGLPGDRYGGISSRDQCDSFPAPLKPGCYWRFDWFQNADNPTVTFQQVQCPAEIVARSGCKRNDDSSFPVFTSPSSPSSPSGCTTQKWGQCGGIGYTGCTN

SEQ ID NO: 46667 - protein, 255 aa, Thermothielavioides terrestris
ASGSGQSTRYWDCCKPSCAWPGKAAVSQPVYACDANFQRLSDFNVQSGCNGGSAYACADQTPWAVNDNLAYGFAATSIAGGSESSWCCACYALTFTSGPVAGKTMVVQSTSTGGDLGSNHFDIAMPGGGVGIFDGCSSQFGGLPGARYGGISSRDQCDSFPAPLKPGCQWRFDWFQNADNPTFTFQQVQCPAEIVARSGCKRNDDSSFPVFTTPTTPTGCTAERWAQCGGNGWSGCTTCVAGSTCTKINDWYHQC

SEQ ID NO: 46668 - protein, 255 aa, Thermothielavioides terrestris
ASGSGQSTRYWDCCKPSCAWPGKAAVSQPVYACDANFQRLSDFNVQSGCNGGSAYACADQTPWAVNDNLAYGFAATSIAGGSESSWCCACYALTFTSGPVAGKTMVVQSTSTGGDLGSNHFDIAMPGGGVGIFDGCSSQFGGLPGARYGGISSRDQCDSFPAPLKPGCQWRFDWFQNADNPTFTFQQVQCPAEIVARSGCKRNDDSSFPVFTTPPTPPGCTAERWAQCGGNGWSGCTTCVAGSTCTKINDWYHQC

SEQ ID NO: 46669 - protein, 286 aa, Humicola nigrescens
AFAADGRSTRYWDCCKPSCSWPGKALVNQPVYARNANFQRITDPNAKSGCDGGSAFSCADQTPWAVSDDFAYGFAATALAGQSESSWCCACYELTFTSGPVAGKKMAVQSTSTGGDLGSNHFDLNMPGGGVGIFDGCSPQVGGLAGQRYGGVSSRSECDSFPAALKPGCYWRYDWFKNADNPSFSFRQVQCPAELVARTGCRRNDDGNFPAVQIPSSSTSSPVNQPTSTSTTSTSTTSSPPVQPTTPSGCTAERWAQCGGNGWSGCTTCVAGSTCTKINDWYHQCL

SEQ ID NO: 46670 - protein, 265 aa, Thielavia terrestris
ASGSGQSTRYWDCCKPSCAWPGKAAVSQPVYSCDANFQRLSDFNVQSGCNGGSAYACADQTPWAVNDNLAYGFAATSIAGGSESSWCCACYALTFTSGPVAGKTMVVQSTSTGGDLGSNHFDIAMPGGGVGIFDGCSSQFGGLPGDRYGGISSRDQCDSFPAPLKPGCYWRFDWFQNADNPTVTFQQVQCPAEIVARSGCKRNDDSSFPVFTPKPTPEPTPKPTPEPTGCTTQKWGQCGGIGYTGCTNCVAGTTCTQLNPWYHQC

SEQ ID NO: 46671 - protein, 270 aa, Thermothielavioides terrestris
ASGSGQSTRYWDCCKPSCAWPGKAAVSQPVYACDANFQRLSDFNVQSGCNGGSAYACADQTPWAVNDNLAYGFAATSIAGGSESSWCCACYALTFTSGPVAGKTMVVQSTSTGGDLGSNHFDIAMPGGGVGIFDGCSSQFGGLPGARYGGISSRDQCDSFPAPLKPGCQWRFDWFQNADNPTFTFQQVQCPAEIVARSGCKRNDDSSFPVFTPEPTPEPTPEPTPEPTPEPTRCTAERWAQCGGNGWSGCTTCVAGSTCTKINDWYHQCL

SEQ ID NO: 46672 - protein, 270 aa, Thermothielavioides terrestris
ASGSGQSTRYWDCCKPSCAWPGKAAVSQPVYACDANFQRLSDFNVQSGCNGGSAYACADQTPWAVNDNLAYGFAATSIAGGSESSWCCACYALTFTSGPVAGKTMVVQSTSTGGDLGSNHFDIAMPGGGVGIFDGCSSQFGGLPGAQYGGISSRDECDSFPAPLKPGCYWRFDWFQNADNPTFTFQQVQCPAEIVARSGCKRNDDSSFPVFTPEPTPEPTPEPTPEPTPEPTGCTAERWAQCGGNGWSGCTTCVAGSTCTKINDWYHQCL

SEQ ID NO: 46673 - protein, 270 aa, Thermothielavioides terrestris
ASGSGQSTRYWDCCKPSCAWPGKAAVSQPVYACDANFQRLSDFNVQSGCNGGSAYACADQTPWAVNDNLAYGFAATSIAGGSESSWCCACYALTFTSGPVAGKTMVVQSTSTGGDLGSNHFDIAMPGGGVGIFDGCSSQFGGLPGARYGGISSRDQCDSFPAPLKPGCQWRFDWFQNADNPTFTFQQVQCPAEIVARSGCKRNDDSSFPVFTPEPTPEPTPEPTPEPTPEPTTCTAERWAQCGGNGWSGCTTCVAGSTCTKINDWYHQCL

SEQ ID NO: 46674 - protein, 270 aa, Thermothielavioides terrestris
ASGSGQSTRYWDCCKPSCAWPGKAAVSQPVYACDANFQRLSDFNVQSGCNGGSAYACADQTPWAVNDNLAYGFAATSIAGGSESSWCCACYALTFTSGPVAGKTMVVQSTSTGGDLGSNHFDIAMPGGGVGIFDGCSSQFGGLPGARYGGISSRDQCDSFPAPLKPGCQWRFDWFQNADNPTFTFQQVQCPAEIVARSGCKRNDDSSFPVFTPEPTPEPTPEPTPEPTPEPTDCTAERWAQCGGNGWSGCTTCVAGSTCTKINDWYHQCL

SEQ ID NO: 46675 - protein, 270 aa, Thermothielavioides terrestris
ASGSGQSTRYWDCCKPSCAWPGKAAVSQPVYACDANFQRLSDFNVQSGCNGGSAYACADQTPWAVNDNLAYGFAATSIAGGSESSWCCACYALTFTSGPVAGKTMVVQSTSTGGDLGSNHFDIAMPGGGVGIFDGCSSQFGGLPGARYGGISSRDQCDSFPAPLKPGCQWRFDWFQNADNPTFTFQQVQCPAEIVARSGCKRNDDSSFPVFTPEPTPEPTPEPTPEPTPRPTTCTAERWAQCGGNGWSGCTTCVAGSTCTKINDWYHQCL

SEQ ID NO: 46676 - protein, 282 aa, Thielavia terrestris. Staphylotrichum coccosporum. Chimeric. Synthetic construct
MRSTPVLRTTLAAALPLVASAASGSGQSTRYWDCCKPSCAWPGKAAVSQPVYACDANFQRLSDFNVQSGCNGGSAYSCADQTPWAVNDNLAYGFAATSIAGGSESSWCCACYALTFTSGPVAGKTMVVQSTSTGGDLGSNHFDIAMPGGGVGIFNGCSSQFGGLPGAQYGGISSRDQCDSFPAPLKPGCQWRFDWFQNADNPTFTFQQVQCPAEIVARSGCKRNDDGNFPVFTPPSGGQSSPSSPSSSAKPTSTSTSTTSTKATSTTSTASSQTSSSTGGGC

SEQ ID NO: 46677 - protein, 242 aa, Thielavia terrestris
ASGSGQSTRYWDCCKPSCAWPGKAAVSQPVYSCDANFQRLSDFNVQSGCNGGSAYACADQTPWAVNDNLAYGFAATSIAGGSESSWCCACYALTFTSGPVAGKTMVVQSTSTGGDLGSNHFDIAMPGGGVGIFDGCSSQFGGLPGDRYGGISSRDQCDSFPAPLKPGCYWRFDWFQNADNPTVTFQQVQCPAEIVARSGCKRNDDSSFPVFTPPPPPPPPPPGCTTQKWGQCGGIGYTGCTN

SEQ ID NO: 46678 - protein, 242 aa, Thielavia terrestris
ASGSGQSTRYWDCCKPSCAWPGKAAVSQPVYSCDANFQRLSDFNVQSGCNGGSAYACADQTPWAVNDNLAYGFAATSIAGGSESSWCCACYALTFTSGPVAGKTMVVQSTSTGGDLGSNHFDIAMPGGGVGIFDGCSSQFGGLPGDRYGGISSRDQCDSFPAPLKPGCYWRFDWFQNADNPTVTFQQVQCPAEIVARSGCKRNDDSSFPVFTSPSPSPSPAPGCTTQKWGQCGGIGYTGCTN

SEQ ID NO: 46679 - protein, 242 aa, Thielavia terrestris
ASGSGQSTRYWDCCKPSCAWPGKAAVSQPVYSCDANFQRLSDFNVQSGCNGGSAYACADQTPWAVNDNLAYGFAATSIAGGSESSWCCACYALTFTSGPVAGKTMVVQSTSTGGDLGSNHFDIAMPGGGVGIFDGCSSQFGGLPGDRYGGISSRDQCDSFPAPLKPGCYWRFDWFQNADNPTVTFQQVQCPAEIVARSGCKRNDDSSFPVFTSPSPSPSPSPNCTTQKWGQCGGIGYTGCTN

SEQ ID NO: 46680 - protein, 242 aa, Thielavia terrestris
ASGSGQSTRYWDCCKPSCAWPGKAAVSQPVYSCDANFQRLSDFNVQSGCNGGSAYACADQTPWAVNDNLAYGFAATSIAGGSESSWCCACYALTFTSGPVAGKTMVVQSTSTGGDLGSNHFDIAMPGGGVGIFDGCSSQFGGLPGDRYGGISSRDQCDSFPAPLKPGCYWRFDWFQNADNPTVTFQQVQCPAEIVARSGCKRNDDSSFPVFTSPSPSPSPSPPCTTQKWGQCGGIGYTGCTN

SEQ ID NO: 46681 - protein, 242 aa, Thielavia terrestris
ASGSGQSTRYWDCCKPSCAWPGKAAVSQPVYSCDANFQRLSDFNVQSGCNGGSAYACADQTPWAVNDNLAYGFAATSIAGGSESSWCCACYALTFTSGPVAGKTMVVQSTSTGGDLGSNHFDIAMPGGGVGIFDGCSSQFGGLPGDRYGGISSRDQCDSFPAPLKPGCYWRFDWFQNADNPTVTFQQVQCPAEIVARSGCKRNDDSSFPVFTSPSPSPSPDPGCTTQKWGQCGGIGYTGCTN

SEQ ID NO: 46682 - protein, 253 aa, Thermothielavioides terrestris
ASGSGQSTRYWDCCKPSCAWPGKAAVSQPVYACDANFQRLSDFNVQSGCNGGSAYACADQTPWAVNDNLAYGFAATSIAGGSESSWCCACYALTFTSGPVAGKTMVVQSTSTGGDLGSNHFDIAMPGGGVGIFDGCSSQFGGLPGAQYGGISSRDECDSFPEPLKPGCQWRFDWFQNADNPTFTFQQVQCPAEIVARSGCKRNDDSSFPVFTSPSPGCTAERWAQCGGNGWSGCTTCVAGSTCTKINDWYHQC

SEQ ID NO: 46683 - protein, 253 aa, Thermothielavioides terrestris
ASGSGQSTRYWDCCKPSCAWPGKAAVSQPVYACDANFQRLSDFNVQSGCNGGSAYACADQTPWAVNDNLAYGFAATSIAGGSESSWCCACYALTFTSGPVAGKTMVVQSTSTGGDLGSNHFDIAMPGGGVGIFDGCSSQFGGLPGAQYGGISSRDECDSFPAPLKPGCYWRFDWFQNADNPTFTFQQVQCPAEIVARSGCKRNDDSSFPVFTSPSPGCTAERWAQCGGNGWSGCTTCVAGSTCTKINDWYHQC

SEQ ID NO: 46684 - protein, 279 aa, Aspergillus oryzae
MRSSPLLRSAVVAALPVLALAADGRSTRYWDCCKPSCGWAKKAPVNQPVFSCNANFQRITDFDAKSGCEPGGVAYSCADQTPWAVNDDFALGFAATSIAGSNEAGWCCACYELTFTSGPVAGKKMVVQSTSTGGDLGSNHFDLNIPGGGVGIFDGCTPQFGGLPGQRYGGISSRNECDRFPDALKPGCYWRFDWFKNADNPSFSFRQVQCPAELVARTGCRRNDDGNFPAVQIPMRSSPLLRSAVVAALPVLALAKDDLAYSPPFYPSPWADGQGEWAE

SEQ ID NO: 46685 - protein, 282 aa, Thielavia terrestris. Staphylotrichum coccosporum. Chimeric. Synthetic construct
MRSTPVLRTTLAAALPLVASAASGSGQSTRYWDCCKPSCAWPGKAAVSQPVYACDANFQRLSDFNVQSGCNGGSAYSCADQTPWAVNDNLAYGFAATSIAGGSESSWCCACYALTFTSGPVAGKTMVVQSTSTGGDLGSNHFDIAMPGGGVGIFNGCSSQFGGLPGAQYGGISSRDQCDSFPAPLKPGCQWRFDWFQNADNPTFTFQQVQCPAEIVARSGCKRNDDGNFPVFTPPSGGQSSSSSSSSSAKPTSTSTSTTSTKATSTTSTASSQTSSSTGGGC

SEQ ID NO: 46686 - protein, 282 aa, Thielavia terrestris. Staphylotrichum coccosporum. Chimeric. Synthetic construct
MRSTPVLRTTLAAALPLVASAASGSGQSTRYWDCCKPSCAWPGKAAVSQPVYACDANFQRLSDFNVQSGCNGGSAYSCADQTPWAVNDNLAYGFAATSIAGGSESSWCCACYALTFTSGPVAGKTMVVQSTSTGGDLGSNHFDIAMPGGGVGIFNGCSSQFGGLPGAQYGGISSRDQCDSFPAPLKPGCQWRFDWFQNADNPTFTFQQVQCPAEIVARSGCKRNDDGNFPVFTPPSGGQSSSSSSSSSAKPTSTSTSTTSTKATSTTSTASSQTSPSTGGGC

SEQ ID NO: 46687 - protein, 270 aa, Thermothielavioides terrestris
ASGSGQSTRYWDCCKPSCAWPGKAAVSQPVYSCDANFQRLSDFNVQSGCNGGSAYACADQTPWAVNDNLAYGFAATSIAGGSESSWCCACYALTFTSGPVAGKTMVVQSTSTGGDLGSNHFDIAMPGGGVGIFDGCSSQFGGLPGDRYGGISSRDQCDSFPAPLKPGCYWRFDWFQNADNPTVTFQQVQCPAEIVARSGCKRNDDSSFPVFTPSPTPSPTPSPTPSPTPSPTGCTAERWAQCGGNGWSGCTTCVAGSTCTKINDWYHQCL

SEQ ID NO: 46688 - protein, 243 aa, Thielavia terrestris
ASGSGQSTRYWDCCKPSCAWPGKAAVSQPVYSCDANFQRLSDFNVQSGCNGGSAYACADQTPWAVNDNLAYGFAATSIAGGSESSWCCACYALTFTSGPVAGKTMVVQSTSTGGDLGSNHFDIAMPGGGVGIFDGCSSQFGGLPGDRYGGISSRDQCDSFPAPLKPGCYWRFDWFQNADNPTVTFQQVQCPAEIVARSGCKRNDDSSFPVFTPPPPPPPPPPPGCTTQKWGQCGGIGYTGCTN

SEQ ID NO: 46689 - protein, 253 aa, Thermothielavioides terrestris
ASGSGQSTRYWDCCKPSCAWPGKAAVSQPVYACDANFQRLSDFNVQSGCNGGSAYSCADQTPWAVNDNLAYGFAATSIAGGSESSWCCACYALTFTSGPVAGKTMVVQSTSTGGDLGSNHFDIAMPGGGVGIFDGCSSQFGGLPGARYGGISSRDQCDSFPAPLKPGCQWRFDWFQNADNPTFTFQQVQCPAEIVARSGCKRNDDSSFPVFTSPSPGCTSQKWAQCGGIGFSGCTTCVSGTTCQKLNDYYSQC

SEQ ID NO: 46690 - protein, 255 aa, Thermothielavioides terrestris
ASGSGQSTRYWDCCKPSCAWPGKAAVSQPVYACDANFQRLSDFNVQSGCNGGSAYACADQTPWAVNDNLAYGFAATSIAGGSESSWCCACYALTFTSGPVAGKTMVVQSTSTGGDLGSNHFDIAMPGGGVGIFDGCSSQFGGLPGARYGGISSRDQCDSFPAPLKPGCQWRFDWFQNADNPTFTFQQVQCPAEIVARSGCKRNDDSSFPVFTSPSSPSGCTSQKWAQCGGIGFSGCTTCVSGTTCQKLNDYYSQC

SEQ ID NO: 46691 - protein, 284 aa, Thielavia terrestris. Staphylotrichum coccosporum. Chimeric. Synthetic construct
MRSTPVLRTTLAAALPLVASAASGSGQSTRYWDCCKPSCAWPGKAAVSQPVYACDANFQRLSDFNVQSGCNGGSAYSCADQTPWAVNDNLAYGFAATSIAGGSESSWCCACYALTFTSGPVAGKTMVVQSTSTGGDLGSNHFDIAMPGGGVGIFNGCSSQFGGLPGAQYGGISSRDQCDSFPAPLKPGCQWRFDWFQNADNPTFTFQQVQCPAEIVARSGCKRNDDGNFPVFTPPSGGQSSSSSSSSSAKPTSTSTSTTSTKATSTTSTASSQTSSSTGGGCTS

SEQ ID NO: 46692 - protein, 269 aa, Thielavia terrestris
ASGSGQSTRYWDCCKPSCAWPGKAAVSQPVYSCDANFQRLSDFNVQSGCNGGSAYACADQTPWAVNDNLAYGFAATSIAGGSESSWCCACYALTFTSGPVAGKTMVVQSTSTGGDLGSNHFDIAMPGGGVGIFDGCSSQFGGLPGDRYGGISSRDQCDSFPAPLKPGCYWRFDWFQNADNPTVTFQQVQCPAEIVARSGCKRNDDSSFPVFTPEPTPEPTPEPTPEPTPGPTGCTTQKWGQCGGIGYTGCTNCVAGTTCTQLNPWYHQC

SEQ ID NO: 46693 - protein, 243 aa, Thielavia terrestris
ASGSGQSTRYWDCCKPSCAWPGKAAVSQPVYSCDANFQRLSDFNVQSGCNGGSAYACADQTPWAVNDNLAYGFAATSIAGGSESSWCCACYALTFTSGPVAGKTMVVQSTSTGGDLGSNHFDIAMPGGGVGIFDGCSSQFGGLPGDRYGGISSRDQCDSFPAPLKPGCYWRFDWFQNADNPTVTFQQVQCPAEIVARSGCKRNDDSSFPVFTSPSPSPSPSPGGCTTQKWGQCGGIGYTGCTN

SEQ ID NO: 46694 - protein, 267 aa, Thielavia terrestris
ASGSGQSTRYWDCCKPSCAWPGKAAVSQPVYSCDANFQRLSDFNVQSGCNGGSAYACADQTPWAVNDNLAYGFAATSIAGGSESSWCCACYALTFTSGPVAGKTMVVQSTSTGGDLGSNHFDIAMPGGGVGIFDGCSSQFGGLPGDRYGGISSRDQCDSFPAPLKPGCYWRFDWFQNADNPTVTFQQVQCPAEIVARSGCKRNDDSSFPVFTPEPTPEPTPEPTPEPTPEPCTTQKWGQCGGIGYTGCTNCVAGTTCTQLNPWYHQC

SEQ ID NO: 46695 - protein, 255 aa, Thermothielavioides terrestris
ASGSGQSTRYWDCCKPSCAWPGKAAVSQPVYACDANFQRLSDFNVQSGCNGGSAYACADQTPWAVNDNLAYGFAATSIAGGSESSWCCACYALTFTSGPVAGKTMVVQSTSTGGDLGSNHFDIAMPGGGVGIFDGCSSQFGGLPGARYGGISSRDQCDSFPAPLKPGCQWRFDWFQNADNPTFTFQQVQCPAEIVARSGCKRNDDSSFPVFTTPPTPPGCTSQKWAQCGGIGFSGCTTCVSGTTCQKLNDYYSQC

SEQ ID NO: 46696 - protein, 255 aa, Thermothielavioides terrestris
ASGSGQSTRYWDCCKPSCAWPGKAAVSQPVYACDANFQRLSDFNVQSGCNGGSAYACADQTPWAVNDNLAYGFAATSIAGGSESSWCCACYALTFTSGPVAGKTMVVQSTSTGGDLGSNHFDIAMPGGGVGIFDGCSSQFGGLPGARYGGISSRDQCDSFPAPLKPGCQWRFDWFQNADNPTFTFQQVQCPAEIVARSGCKRNDDSSFPVFTTPTTPTGCTSQKWAQCGGIGFSGCTTCVSGTTCQKLNDYYSQC

SEQ ID NO: 46697 - protein, 270 aa, Thermothielavioides terrestris
ASGSGQSTRYWDCCKPSCAWPGKAAVSQPVYSCDANFQRLSDFNVQSGCNGGSAYACADQTPWAVNDNLAYGFAATSIAGGSESSWCCACYALTFTSGPVAGKTMVVQSTSTGGDLGSNHFDIAMPGGGVGIFDGCSSQFGGLPGDRYGGISSRDQCDSFPAPLKPGCYWRFDWFQNADNPTVTFQQVQCPAEIVARSGCKRNDDSSFPVFTPEPTPEPTPEPTPEPTPEPTGCTAERWAQCGGNGWSGCTTCVAGSTCTKINDWYHQCL

SEQ ID NO: 46698 - protein, 283 aa, Thermothielavioides terrestris
ASGSGQSTRYWDCCKPSCAWPGKAAVSQPVYACDANFQRLSDFNVQSGCNGGSAYACADQTPWAVNDNLAYGFAATSIAGGSESSWCCACYALTFTSGPVAGKTMVVQSTSTGGDLGSNHFDIAMPGGGVGIFDGCSSQFGGLPGARYGGISSRDQCDSFPAPLKPGCQWRFDWFQNADNPTFTFQQVQCPAEIVARSGCKRNDDSSFPVFTTPPTPPTPPTPPTPPTPPTPPTPPTPPTPPTPPGCTAERWAQCGGNGWSGCTTCVAGSTCTKINDWYHQCL

SEQ ID NO: 46699 - protein, 269 aa, Thielavia terrestris
ASGSGQSTRYWDCCKPSCAWPGKAAVSQPVYSCDANFQRLSDFNVQSGCNGGSAYACADQTPWAVNDNLAYGFAATSIAGGSESSWCCACYALTFTSGPVAGKTMVVQSTSTGGDLGSNHFDIAMPGGGVGIFDGCSSQFGGLPGDRYGGISSRDQCDSFPAPLKPGCYWRFDWFQNADNPTVTFQQVQCPAEIVARSGCKRNDDSSFPVFTPEPTPEPTPEPTPEPTPEPTSCTTQKWGQCGGIGYTGCTNCVAGTTCTQLNPWYHQC

SEQ ID NO: 46700 - protein, 269 aa, Thielavia terrestris
ASGSGQSTRYWDCCKPSCAWPGKAAVSQPVYSCDANFQRLSDFNVQSGCNGGSAYACADQTPWAVNDNLAYGFAATSIAGGSESSWCCACYALTFTSGPVAGKTMVVQSTSTGGDLGSNHFDIAMPGGGVGIFDGCSSQFGGLPGDRYGGISSRDQCDSFPAPLKPGCYWRFDWFQNADNPTVTFQQVQCPAEIVARSGCKRNDDSSFPVFTPEPTPEPTPEPTPEPTPTPTGCTTQKWGQCGGIGYTGCTNCVAGTTCTQLNPWYHQC

SEQ ID NO: 46701 - protein, 269 aa, Thielavia terrestris
ASGSGQSTRYWDCCKPSCAWPGKAAVSQPVYSCDANFQRLSDFNVQSGCNGGSAYACADQTPWAVNDNLAYGFAATSIAGGSESSWCCACYALTFTSGPVAGKTMVVQSTSTGGDLGSNHFDIAMPGGGVGIFDGCSSQFGGLPGDRYGGISSRDQCDSFPAPLKPGCYWRFDWFQNADNPTVTFQQVQCPAEIVARSGCKRNDDSSFPVFTPEPTPEPTPEPTPEPTPSPTGCTTQKWGQCGGIGYTGCTNCVAGTTCTQLNPWYHQC

SEQ ID NO: 46702 - protein, 269 aa, Thielavia terrestris
ASGSGQSTRYWDCCKPSCAWPGKAAVSQPVYSCDANFQRLSDFNVQSGCNGGSAYACADQTPWAVNDNLAYGFAATSIAGGSESSWCCACYALTFTSGPVAGKTMVVQSTSTGGDLGSNHFDIAMPGGGVGIFDGCSSQFGGLPGDRYGGISSRDQCDSFPAPLKPGCYWRFDWFQNADNPTVTFQQVQCPAEIVARSGCKRNDDSSFPVFTPEPTPEPTPEPTPEPTPEPTGCTTQKWGQCGGIGYTGCTNCVAGTTCTQLNPWYHQC

SEQ ID NO: 46703 - protein, 269 aa, Thielavia terrestris
ASGSGQSTRYWDCCKPSCAWPGKAAVSQPVYSCDANFQRLSDFNVQSGCNGGSAYACADQTPWAVNDNLAYGFAATSIAGGSESSWCCACYALTFTSGPVAGKTMVVQSTSTGGDLGSNHFDIAMPGGGVGIFDGCSSQFGGLPGDRYGGISSRDQCDSFPAPLKPGCYWRFDWFQNADNPTVTFQQVQCPAEIVARSGCKRNDDSSFPVFTPEPTPEPTPEPTPEPTPDPTGCTTQKWGQCGGIGYTGCTNCVAGTTCTQLNPWYHQC

SEQ ID NO: 46704 - protein, 415 aa, Ascomycota
QKPGETKEVHPQLTTFRCTKRGGCKPATNFIVLDSLSHPIHRAEGLGPGGCGDWGNPPPKXXXXXXXXXXXXXXXXXXXXXXXXXXXXXXXXLRLQHILPDGRVPSPRVYLLDKTKRRYEMLHLTGFEFTFDVDATKLPCGMNSALYLSEMHPTGAKSKYNSGGAYYGTGYCDAQCFVTPFINGLGNIEGKGSCCNEMDIWEVNSRASHVVPHTCNKKGLYLCEGEECAFEGVCDKNGCGWNNYRVNVTDYYGRGEEFKVNTLKPFTVVTQFLANRRGKLEKIHRFYVQDGKVIESFYTNXXXXXXXXXXXXXXXXATGSRKYMELGATQGMGEALTRGMVLAMSIWWDQGGNMEWLDHGEAGPCAKGEGAPSNIVQVEPFPEVTYTNLRWGEIGSTYQEVQKPKPKPGHGPRSD

SEQ ID NO: 46705 - protein, 253 aa, Thermothielavioides terrestris
ASGSGQSTRYWDCCKPSCAWPGKAAVSQPVYACDANFQRLSDFNVQSGCNGGSAYACADQTPWAVNDNLAYGFAATSIAGGSESSWCCACYALTFTSGPVAGKTMVVQSTSTGGDLGSNHFDIAMPGGGVGIFDGCSSQFGGLPGAQYGGISSRDECDSFPAPLKPGCYWRFDWFQNADNPTFTFQQVQCPAEIVARSGCKRNDDSSFPVFTSPSPGCTSQKWAQCGGIGFSGCTTCVSGTTCQKLNDYYSQC

SEQ ID NO: 46706 - protein, 253 aa, Thermothielavioides terrestris
ASGSGQSTRYWDCCKPSCAWPGKAAVSQPVYACDANFQRLSDFNVQSGCNGGSAYACADQTPWAVNDNLAYGFAATSIAGGSESSWCCACYALTFTSGPVAGKTMVVQSTSTGGDLGSNHFDIAMPGGGVGIFDGCSSQFGGLPGAQYGGISSRDECDSFPEPLKPGCQWRFDWFQNADNPTFTFQQVQCPAEIVARSGCKRNDDSSFPVFTSPSPGCTSQKWAQCGGIGFSGCTTCVSGTTCQKLNDYYSQC

SEQ ID NO: 46707 - protein, 278 aa, Thermothielavioides terrestris
ASGSGQSTRYWDCCKPSCAWPGKAAVSQPVYACDANFQRLSDFNVQSGCNGGSAYACADQTPWAVNDNLAYGFAATSIAGGSESSWCCACYALTFTSGPVAGKTMVVQSTSTGGDLGSNHFDIAMPGGGVGIFDGCSSQFGGLPGARYGGISSRDQCDSFPAPLKPGCQWRFDWFQNADNPTFTFQQVQCPAEIVARSGCKRNDDSSFPVFTPQPTPEPTPQPTPEPTPQPTPEPTPQPTGCTAERWAQCGGNGWSGCTTCVAGSTCTKINDWYHQCL

SEQ ID NO: 46708 - protein, 269 aa, Thielavia terrestris
ASGSGQSTRYWDCCKPSCAWPGKAAVSQPVYSCDANFQRLSDFNVQSGCNGGSAYACADQTPWAVNDNLAYGFAATSIAGGSESSWCCACYALTFTSGPVAGKTMVVQSTSTGGDLGSNHFDIAMPGGGVGIFDGCSSQFGGLPGDRYGGISSRDQCDSFPAPLKPGCYWRFDWFQNADNPTVTFQQVQCPAEIVARSGCKRNDDSSFPVFTPEPTPEPTPEPTPEPTPEPTDCTTQKWGQCGGIGYTGCTNCVAGTTCTQLNPWYHQC

SEQ ID NO: 46709 - protein, 269 aa, Thielavia terrestris
ASGSGQSTRYWDCCKPSCAWPGKAAVSQPVYSCDANFQRLSDFNVQSGCNGGSAYACADQTPWAVNDNLAYGFAATSIAGGSESSWCCACYALTFTSGPVAGKTMVVQSTSTGGDLGSNHFDIAMPGGGVGIFDGCSSQFGGLPGDRYGGISSRDQCDSFPAPLKPGCYWRFDWFQNADNPTVTFQQVQCPAEIVARSGCKRNDDSSFPVFTPEPTPEPTPEPTPEPTPRPTTCTTQKWGQCGGIGYTGCTNCVAGTTCTQLNPWYHQC

SEQ ID NO: 46710 - protein, 269 aa, Thielavia terrestris
ASGSGQSTRYWDCCKPSCAWPGKAAVSQPVYSCDANFQRLSDFNVQSGCNGGSAYACADQTPWAVNDNLAYGFAATSIAGGSESSWCCACYALTFTSGPVAGKTMVVQSTSTGGDLGSNHFDIAMPGGGVGIFDGCSSQFGGLPGDRYGGISSRDQCDSFPAPLKPGCYWRFDWFQNADNPTVTFQQVQCPAEIVARSGCKRNDDSSFPVFTPEPTPEPTPEPTPEPTPEPTRCTTQKWGQCGGIGYTGCTNCVAGTTCTQLNPWYHQC

SEQ ID NO: 46711 - protein, 256 aa, Thielavia terrestris
ASGSGQSTRYWDCCKPSCAWPGKAAVSQPVYSCDANFQRLSDFNVQSGCNGGSAYACADQTPWAVNDNLAYGFAATSIAGGSESSWCCACYALTFTSGPVAGKTMVVQSTSTGGDLGSNHFDIAMPGGGVGIFDGCSSQFGGLPGDRYGGISSRDQCDSFPAPLKPGCYWRFDWFQNADNPTVTFQQVQCPAEIVARSGCKRNDDSSFPVFTPPPPPPPGCTTQKWGQCGGIGYTGCKNCVAGTTCTQLNPWYSQC

SEQ ID NO: 46712 - protein, 256 aa, Thielavia terrestris
ASGSGQSTRYWDCCKPSCAWPGKAAVSQPVYSCDANFQRLSDFNVQSGCNGGSAYACADQTPWAVNDNLAYGFAATSIAGGSESSWCCACYALTFTSGPVAGKTMVVQSTSTGGDLGSNHFDIAMPGGGVGIFDGCSSQFGGLPGDRYGGISSRDQCDSFPAPLKPGCYWRFDWFQNADNPTVTFQQVQCPAEIVARSGCKRNDDSSFPVFTPPPPPPPGCTTQKWGQCGGIGYTGCKNCEAGTTCTQLNPWYHQC

SEQ ID NO: 46713 - protein, 256 aa, Thielavia terrestris
ASGSGQSTRYWDCCKPSCAWPGKAAVSQPVYSCDANFQRLSDFNVQSGCNGGSAYACADQTPWAVNDNLAYGFAATSIAGGSESSWCCACYALTFTSGPVAGKTMVVQSTSTGGDLGSNHFDIAMPGGGVGIFDGCSSQFGGLPGDRYGGISSRDQCDSFPAPLKPGCYWRFDWFQNADNPTVTFQQVQCPAEIVARSGCKRNDDSSFPVFTPPPPPPPGCTTQKWGQCGGIGYTGCKNCENGTTCTQLNPWYHQC

SEQ ID NO: 46714 - protein, 256 aa, Thielavia terrestris
ASGSGQSTRYWDCCKPSCAWPGKAAVSQPVYSCDANFQRLSDFNVQSGCNGGSAYACADQTPWAVNDNLAYGFAATSIAGGSESSWCCACYALTFTSGPVAGKTMVVQSTSTGGDLGSNHFDIAMPGGGVGIFDGCSSQFGGLPGDRYGGISSRDQCDSFPAPLKPGCYWRFDWFQNADNPTVTFQQVQCPAEIVARSGCKRNDDSSFPVFTPPPPPPPGCTTQKWGQCGGIGYTGCRNCVAGTTCTQLNPWYSQC

SEQ ID NO: 46715 - protein, 280 aa, Thermothielavioides terrestris
ASGSGQSTRYWDCCKPSCAWPGKAAVSQPVYACDANFQRLSDFNVQSGCNGGSAYACADQTPWAVNDNLAYGFAATSIAGGSESSWCCACYALTFTSGPVAGKTMVVQSTSTGGDLGSNHFDIAMPGGGVGIFDGCSSQFGGLPGARYGGISSRDQCDSFPAPLKPGCQWRFDWFQNADNPTFTFQQVQCPAEIVARSGCKRNDDSSFPVFTSPPSPPSPPSPPSPPSPPSPPSPPSPPSPPGCTAERWAQCGGNGWSGCTTCVAGSTCTKINDWYHQCL

SEQ ID NO: 46716 - protein, 255 aa, Thielavia terrestris
ASGSGQSTRYWDCCKPSCAWPGKAAVSQPVYSCDANFQRLSDFNVQSGCNGGSAYACADQTPWAVNDNLAYGFAATSIAGGSESSWCCACYALTFTSGPVAGKTMVVQSTSTGGDLGSNHFDIAMPGGGVGIFDGCSSQFGGLPGDRYGGISSRDQCDSFPAPLKPGCYWRFDWFQNADNPTVTFQQVQCPAEIVARSGCKRNDDSSFPVFTTPPTPPGCTTQKWGQCGGIGYTGCTNCVAGTTCTQLNPWYHQC

SEQ ID NO: 46717 - protein, 274 aa, Thermochaetoides thermophila
GKSTRYWDCCKPSCSWPGKAAVSQPVFACDRNFNRLSDFNVQSGCNGGPAYSCADQTPWAVNDQFSYGFAATNIAGGNEASWCCACYKLTFTSGPVAGKVMVVQSTSTGGDLGNNHFDLNIPGGGVGIFDGCTPQFGGLPGERYGGISSRSQCDSFPDALKPGCYWRFDWFLNADNPNFTFERVQCPSELVARTGCKRNDDGNYPVFTPPSGGNGGTGTPTSTAPGSGQTSPGGGSGCTSQKWAQCGGIGFSGCTTCVSGTTCQKLNDYYSQCL

SEQ ID NO: 46718 - protein, 282 aa, Thielavia terrestris
ASGSGQSTRYWDCCKPSCAWPGKAAVSQPVYSCDANFQRLSDFNVQSGCNGGSAYACADQTPWAVNDNLAYGFAATSIAGGSESSWCCACYALTFTSGPVAGKTMVVQSTSTGGDLGSNHFDIAMPGGGVGIFDGCSSQFGGLPGDRYGGISSRDQCDSFPAPLKPGCYWRFDWFQNADNPTVTFQQVQCPAEIVARSGCKRNDDSSFPVFTTPPTPPTPPTPPTPPTPPTPPTPPTPPTPPTPPGCTTQKWGQCGGIGYTGCTNCVAGTTCTQLNPWYHQC

SEQ ID NO: 46719 - protein, 280 aa, Trichoderma reesei
ADGKSTRYWDCCKPSCGWAKKASVNQPVFSCNANFQRITDFDAKSGCEPGGVAYSCADQTPWAVNDDFAFGFAATSIAGSNEAGWCCACYELTFTSGPVAGKKMVVQSTSTGGDLGSNHFDLNIPGGGVGIFDGCTPQFGGLPGQRYGGISSRNECDRFPDALKPGCYWRFDWFKNADNPSFSFRQVQCPAELVARTGCRRNDDGNFPAVQIGNPSGGNPPGGNPPGTTTTRRPATTTGSSPGPTQSHYGQCGGIGYSGPTVCASGTTCQVLNPYYSQCL

SEQ ID NO: 46720 - protein, 432 aa, Remersonia thermophila
MARGVTLLGLSSLLLGLASAQKPGTTKEVHPKLTTFRCTRRGGCKPATNFIVLDSLAHPIHQATNDYGCGDWGNKPNATACPDVESCAKNCIMEGIPDYSQYGVTTDGTSLRLQHILPDGRVPSPRVYLLDRTERRYEMLHLTGFEFSFEVDATKLPCGMNSALYLSEMHPTGAQSRLNPGGAYYGTGYCDAQCFVTPFINGLGNIDGKGSCCNEMDIWEANSRASHVAPHTCNKKGLYLCEGEECAFEGVCDKNGCGWNPYRVNVTDYYGQGEQFKVNTKKPFTVVTQFHANRRGKLESIYRLYVQDGRVIESFVVNKEGLPEVDRITDEFCAATGSRKYMELGATQGMGEAMTRGMVLAMSIWWDQGGNMTWLDSGEAGPCGEGEGAPANIVKAEPFPEVTYTNLRWGEIGSTYSQKKPSHPFPGYKGPK

SEQ ID NO: 46721 - protein, 284 aa, Humicola insolens
AXGRXXRXXXXXXPXCGXAXKAPVNQPXFSCNANFQXITDFDAXXGXXPGGVAYXCAXXTPWAVXXXFALGFAXTSIAGSNEAGWCCACXELTFTXGPVXGXXMVVQSTXXXXDXXXXXFDLXIPGGGVGIFDGXTPQFGGLPGQRYGGISSRNECDRFPDALKPGCYWRFDWFRNADXPSFXFRQVQCPAELVARTGCRRNDDGNFPAVQIPSSSTSSPVNQPTSTSTTSTSTTSSPPVQPTTPSGCTAERWAQCGGNGWSGCTTCVAGSTCTKINDWYHQCL

SEQ ID NO: 46722 - protein, 274 aa, Thermochaetoides thermophila
GKSTRYWDCCKPSCSWPGKAAVSQPVFACDRNFNRIYDFGAKSGCEGGPAYSCADQTPWAVNDQFSYGFAATNIAGGNEASWCCACYKLTFTSGPVAGKVMVVQSTSTGGDLGNNHFDLNIPGGGVGIFDGCTPQFGGLPGERYGGISSRSQCDSFPDALKPGCYWRFDWFLNADNPNFTFERVQCPSELVARTGCKRNDDGNYPVFTPPSGGNGGTGTPTSTAPGSGQTSPGGGSGCTSQKWAQCGGIGFSGCTTCVSGTTCQKLNDYYSQCL

SEQ ID NO: 46723 - protein, 207 aa, Acremonium thermophilum
GKSTRYWDCCKPSCGWPGKASVNQPVFSCSADWQRISDFNAKSGCDGGSAYSCADQTPWAVNDNFSYGFAATAIAGGSESSWCCACYALTFNSGPVAGKTMVVQSTSTGGDLGSNQFDLAIPGGGVGIFNGCASQFGGLPGAQYGGISDRSQCSSFPAPLQPGCQWRFDWFQNADNPTFTFQRVQCPSELTSRTGCKRDDDASYPVF

SEQ ID NO: 46724 - protein, 212 aa, Acremonium thermophilum
GKSTRYWDCCKPSCGWAGKASVNQPVFSCSADWQRISDFNAKSGCDGGSAYSCADQTPWAVNDNFSYGFAATAIAGGSESSWCCACYALTFNSGPVAGKTMVVQSTSTGGDLGSNQFDLAIPGGGVGIFNGCASQFGGLPGAQYGGISDRSQCSSFPAPLQPGCQWRFDWFQNADNPTFTFQRVQCPSELTSRTGCKRDDDASYPVFNPPSG

SEQ ID NO: 46725 - protein, 207 aa, Staphylotrichum coccosporum
ADGKSTRYWDCCKPSCSWPGKASVNQPVFACSANFQRISDPNVKSGCDGGSAYACADQTPWAVNDNFSYGFAATSISGGNEASWCCGCYELTFTSGPVAGKTMVVQSTSTGGDLGTNHFDLAMPGGGVGIFDGCSPQFGGLAGDRYGGVSSRSQCDSFPAALKPGCYWRFDWFKNADNPTFTFRQVQCPSELVARTGCRRNDDGNFP

SEQ ID NO: 46726 - protein, 212 aa, Staphylotrichum coccosporum
GKSTRYWDCCKPSCSWPGKASVNQPVFACSANFQRISDPNVKSGCDGGSAYACADQTPWAVNDNFSYGFAATSISGGNEASWCCGCYELTFTSGPVAGKTMVVQSTSTGGDLGTNHFDLAMPGGGVGIFDGCSPQFGGLAGDRYGGVSSRSQCDSFPAALKPGCYWRFDWFKNADNPTFTFRQVQCPSELVARTGCRRNDDGNFPVFTPPSG

SEQ ID NO: 46727 - protein, 228 aa, unidentified
ADGKSTRYWDCCKPSCSWPGKASVNQPVFACSANFQRISDPNVKSGCDGGSAYACADQTPWAVNDNFSYGFAATSISGGNEASWCCGCYELTFTSGPVAGKTMVVQSTSTGGDLGTNHFDLAMPGGGVGIFDGCSPQFGGLAGDRYGGVSSRSQCDSFPAALKPGCYWRFDWFKNADNPTFTFRQVQCPSELVARTGCRRNDDGNFPAVQIPSSSTSSSPPVQPTTPS

SEQ ID NO: 46728 - protein, 208 aa, Staphylotrichum coccosporum
GKSTRYWDCCKPSCSWPGKASVNQPVFACSANFQRISDPNVKSGCDGGSAYACADQTPWAVNDNFSYGFAATSISGGNEASWCCGCYELTFTSGPVAGKTMVVQSTSTGGDLGTNHFDLAMPGGGVGIFDGCSPQFGGLAGDRYGGVSSRSQCDSFPAALKPGCYWRFDWFKNADNPTFTFRQVQCPSELVARTGCRRNDDGNFPVFT

SEQ ID NO: 46729 - protein, 213 aa, Thermochaetoides thermophila
ADGKSTRYWDCCKPSCSWPGKAAVSQPVFACDRNFNRIYDFGAKSGCEGGPAYSCADQTPWAVNDQFSYGFAATNIAGGNEASWCCACYKLTFTSGPVAGKVMVVQSTSTGGDLGNNHFDLNIPGGGVGIFDGCTPQFGGLPGERYGGISSRSQCDSFPDALKPGCYWRFDWFLNADNPNFTFERVQCPSELVARTGCKRNDDGNYPVFTPPS

SEQ ID NO: 46730 - protein, 228 aa, Synthetic construct
ADGKSTRYWDCCKPSCSWPGKASVNQPVFACSANFQRISDPNVKSGCDGGSAYACADQTPWAVNDNFSYGFAATSISGGNEASWCCGCYELTFTSGPVAGKTMVVQSTNTGGDLGTNHFDLAMPGGGVGIFDGCSPQFGGLAGDRYGGVSSRSQCDSFPAALKPGCYWRFDWFKNADNPTFTFRQVQCPSELVARTGCRRNDDGNFPAVQIPSSSTSSSPPVQPTTPS

SEQ ID NO: 46731 - protein, 235 aa, Acremonium thermophilum
MRSSPFLRAALAAALPLSAHALDGKSTRYWDCCKPSCGWAGKASVNQPVFSCSADWQRISDFNAKSGCDGGSAYSCADQTPWAVNDNFSYGFAATAIAGGSESSWCCACYALTFNSGPVAGKTMVVQSTSTGGDLGSNQFDLAIPGGGVGIFNGCASQFGGLPGAQYGGISDRSQCSSFPAPLQPGCQWRFDWFQNADNPTFTFQRVQCPSELTSRTGCKRDDDASYPVFNPPSG

SEQ ID NO: 46732 - protein, 213 aa, Staphylotrichum coccosporum
ADGKSTRYWDCCKPSCSWPGKASVNQPVFACSANFQRISDPNVKSGCDGGSAYACADQTPWAVNDNFSYGFAATSISGGNEASWCCGCYELTFTSGPVAGKTMVVQSTSTGGDLGTNHFDLAMPGGGVGIFDGCSPQFGGLAGDRYGGVSSRSQCDSFPAALKPGCYWRFDWFKNADNPTFTFRQVQCPSELVARTGCRRNDDGNFPVFTPPS

SEQ ID NO: 46733 - protein, 205 aa, Acremonium thermophilum
GKSTRYWDCCKPSCGWAGKASVNQPVFSCSADWQRISDFNAKSGCDGGNAYSCADQTPWAVNDNFSYGFAATAIAGGSEQSWCCACYALTFNSGPVAGKTMVVQSTSTGGDLGENHFDLAIPGGGVGIFNGCQSQFGGLPGAQYGGIQDRSQCSSFPAPLQPGCQWRFDWFQNADNPTFTFQRVQCPSELTSRTGCKRDDDANYP

SEQ ID NO: 46734 - protein, 208 aa, Melanocarpus albomyces
ANGQSTRYWDCCKPSCGWAGKGPVNQPVYSCDANFQRIHDFDAVSGCEGGPAFSCADHSPWAINDNLSYGFAATALSGQTEESWCCACYALTFTSGPVAGKTMVVQSTSTGGDLGSNHFDLNIPGGGVGLFDGCTPQFGGLPGARYGGISSRQECDSFPEPLKPGCQWRFDWFQNADNPSFTFERVQCPEELVARTGCRRHDDGGFPA

SEQ ID NO: 46735 - protein, 206 aa, Melanocarpus albomyces
ANGQSTRYWDCCKPSCGWAGKGPVNQPVYSCDANFQRIHDFDAVSGCEGGPAFSCADHSPWAINDNLSYGFAATALSGQTEESWCCACYALTFTSGPVAGKTMVVQSTSTGGDLGSNHFDLNIPGGGVGLFDGCTPQFGGLPGARYGGISSRQECDSFPEPLKPGCQWRFDWFQNADNPSFTFERVQCPEELVARTGCRRHDDGGF

SEQ ID NO: 46736 - protein, 206 aa, Melanocarpus albomyces
ANGQSTRYWDCCKPSCGWAGKAPVNQPVYSCDANFQRIHDFDAVSGCEGGPAFSCADHSPWAINDNLSYGFAATALSGQTEESWCCACYALTFTSGPVAGKTMVVQSTSTGGDLGSNHFDLAIPGGGVGLFDGCTPQFGGLPGARYGGISSRQECDSFPEPLKPGCQWRFDWFQNADNPSFTFERVQCPEELVARTGCRRHDDGGF

SEQ ID NO: 46737 - protein, 216 aa, Thermochaetoides thermophila
ADGKSTRYWDCCKPSCSWPGKAAVSQPVFACDRNFNRIYDFGAKSGCEGGPAYSCADQTPWAVNDQFSYGFAATNIAGGNEASWCCACYKLTFTSGPVAGKVMVVQSTSTGGDLGNNHFDLNIPGGGVGIFDGCTPQFGGLPGERYGGISSRSQCDSFPEALKPGCYWRFDWFLNADNPNFTFERVQCPSELVARTGCKRNDDGNYPVFTPPSGDS

SEQ ID NO: 46738 - protein, 293 aa, Thermocarpiscus australiensis
MRSPIFKTALAAVLPLGTYAASGSGQSTRYWDCCKPSCAWSGKASVSQPVYACDANFNRISDPNAKSGCDGGTAFSCADQTPWAVNDNLAYGFAATSISGGSESTWCCACYALTFTSGPVAGKTMVVQSTSTGGDLGSNQFDLAMPGGGVGIFNGCATQFGGLPGAQYGGISDRSQCASFPSPLQAGCYWRFDWFENADNPSFTFTQVQCPSELVSRTGCRRSDDSNFPVFSPPPAGGGSGSTRPSSTSPGTSPSGCVAQKWAQCGGIGFTGCTTCASGSTCTKQNDYYSQCL

SEQ ID NO: 46739 - protein, 287 aa, Trichothecium roseum
AFAADGRSTRYWDCCKPSCSWPDKAPVGSPVGTCDAGNSPLGDPLAKSGCEGGPSYTCANYQPWAVNDQLAYGFAATAINGGTEDSWCCACYKLTFTDGPASGKTMIVQSTNTGGDLSDNHFDLLIPGGGVGIFDGCTSQYGQALPGAQYGGVSSRAECDQMPEAIKAGCQWRYDWFKNADNPSFSFRQVQCPAELVARTGCRRNDDGNFPAVQIPSSSTSSPVNQPTSTSTTSTSTTSSPPVQPTTPSGCTAERWAQCGGNGWSGCTTCVAGSTCTKINDWYHQCL

SEQ ID NO: 46740 - protein, 204 aa, Melanocarpus albomyces
ANGQSTRYWDCCKPSCGWRGKGPVNQPVYSCDANFQRIHDFDAVSGCEGGPAFSCADHSPWAINDNLSYGFAATALSGQTEESWCCACYALTFTSGPVAGKTMVVQSTSTGGDLGSNHFDLNIPGGGVGLFDGCTPQFGGLPGARYGGISSRQECDSFPEPLKPGCQWRFDWFQNADNPSFTFERVQCPEELVARTGCRRHDDG

SEQ ID NO: 46741 - protein, 234 aa, Thermochaetoides thermophila
MRSTPVLRTALAAALPFTVLAADGKSTRYWDCCKPSCSWPGKAAVSQPVFACDRNFNRIYDFGAKSGCEGGPAYSCADQTPWAVNDQFSYGFAATNIAGGNEASWCCACYKLTFTSGPVAGKVMVVQSTSTGGDLGNNHFDLNIPGGGVGIFDGCTPQFGGLPGERYGGISSRSQCDSFPDALKPGCYWRFDWFLNADNPNFTFERVQCPSELVARTGCKRNDDGNYPVFTPPS

SEQ ID NO: 46742 - protein, 282 aa, Staphylotrichum coccosporum
GVSTRYWDCCKPSCSWPGKASVNQPVFACSANFQRISDPNVKSGCDGGSAYACADQTPWAVNDNFSYGFAATSISGGSEASWCCACYELTFTSGPVAGKTMVVQSTSTGGDLGTNHFDLAMPGGGVGIFDGCSPQFGGLAGDRYGGVSSRSECDSFPAPLKPGCYWRFDWFKNADNPTFTFRQVQCPSELVARTGCRRNDDSNFPVFTPPSGGQSSSSLSSSSAKPTSTSTSTASSQTSSSTGGGCAAQRWAQCGGIGFSGCTTCVSGTTCNKQNDWYSQCL

SEQ ID NO: 46743 - protein, 216 aa, Thermochaetoides thermophila
ADGKSTRYWDCCKPSCSWPGKAAVSQPVFACDRNFNRIYDFGAKSGCEGGPAYSCADQTPWAVNDQFSYGFAATNIAGGNEASWCCACYKLTFTSGPVAGKVMVVQSTSTGGDLGNNHFDLNIPGGGVGIFDGCTPQFGGLPGERYGGISSRSQCDSFPEALKPGCYWRFDWFLNADNPNFTEERVQCPSELVARTGCKRNDDGNYPVFTPPSGDS

SEQ ID NO: 46744 - protein, 286 aa, Cylindrocarpon sp.3
AFAADGRSTRYWDCCKPSCSWGDKASVSAPVLTCDKNDNPISDANAVSGCNGGTSYTCSNNSPWAVNDNLAYGFAATKLSGGSESSWCCACYALTFTTGPVKGKTMVVQSTNTGGDLGENHFDLQMPGGGVGIFDGCSSQWGGLGGAQYGGISSRSDCDSFPELLKDGCYWRYDWFKNADNPSFSFRQVQCPAELVARTGCRRNDDGNFPAVQIPSSSTSSPVNQPTSTSTTSTSTTSSPPVQPTTPSGCTAERWAQCGGNGWSGCTTCVAGSTCTKINDWYHQCL

SEQ ID NO: 46745 - protein, 215 aa, Melanocarpus albomyces
ANGQSTRYWDCCKPSCGWAGKGPVNQPVYSCDANFQRIHDFDAVSGCEGGPAFSCADHSPWAINDNLSYGFAATALSGQTEESWCCACYALTFTSGPVAGKTMVVQSTSTGGDLGSNHFDLNIPGGGVGLFDGCTPQFGGLPGARYGGISSRQECDSFPEPLKPGCQWRFDWFQNADNPSFTFERVQCPEELVARTGCRRHDDGGFPAVFKAPSA

SEQ ID NO: 46746 - protein, 274 aa, Acremonium thermophilum
GKSTRYWDCCKPSCGWPGKASVNQPVFSCSADWQRISDFNAKSGCDGGSAYSCADQTPWAVNDNFSYGFAATAIAGGSESSWCCACYALTFNSGPVAGKTMVVQSTSTGGDLGSNQFDLAIPGGGVGIFNGCASQFGGLPGAQYGGISDRSQCSSFPAPLQPGCQWRFDWFQNADNPTFTFQRVQCPSELTSRTGCKRDDDASYPVFNPPSGGSPSTTSTTTSSPSGPTGNPPGGGGCTAQKWAQCGGTGFTGCTTCVSGTTCQVQNQWYSQCL

SEQ ID NO: 46747 - protein, 288 aa, Fusarium anguioides
AFAADGRSTRYWDCCKPSCSWGGKAAVSAPALTCDKKDNPISNLNAVNGCEGGGSAFACTNYSPWAVNDNLAYGFAATKLAGGSEGSWCCACYALTFTTGPVKGKTMVVQSTNTGGDLGDNHFDLMMPGGGVGIFDGCTSQFGKALGGAQYGGISSRSECDSFPETLKDGCHWRFDWFKNADNPSFSFRQVQCPAELVARTGCRRNDDGNFPAVQIPSSSTSSPVNQPTSTSTTSTSTTSSPPVQPTTPSGCTAERWAQCGGNGWSGCTTCVAGSTCTKINDWYHQCL

SEQ ID NO: 46748 - protein, 212 aa, Thermochaetoides thermophila
GKSTRYWDCCKPSCSWPGKAAVSQPVFACDRNFNRIYDFGAKSGCEGGPAYSCADQTPWAVNDQFSYGFAATNIAGGNEASWCCACYKLTFTSGPVAGKVMVVQSTSTGGDLGNNHFDLNIPGGGVGIFDGCTPQFGGLPGERYGGISSRSQCDSFPDALKPGCYWRFDWFLNADNPNFTFERVQCPSELVARTGCKRNDDGNYPVFTPPSG

SEQ ID NO: 46749 - protein, 212 aa, Thermochaetoides thermophila
GKSTRYWDCCKPSCSWPGKAAVSQPVFACDRNFNRIYDFGAKSGCEGGPAYSCADQTPWAVNDQFSYGFAATNIAGGNEASWCCACYKLTFTSGPVAGKVMVVQSTSTGGDLGNNHFDLNIPGGGVGIFDGCTPQFGGLPGERYGGISSRSQCDSFPEALKPGCYWRFDWFLNADNPNFTFERVQCPSELVARTGCKRNDDGNYPVFTPPSG

SEQ ID NO: 46750 - protein, 232 aa, Staphylotrichum coccosporum
GVSTRYWDCCKPSCSWPGKASVNQPVFACGANFTRISDPNVKSGCDGGSAYACADQTPWAVNDNFSYGFAATSIMGGNEASWCCACYELTFTSGPVAGKTMVVQSTSTGGDLGVNHFDLAMPGGGVGIFDGCSPQFGGLPGDRYGGVSSRSQCDSFPAPLKPGCYWRFDWFKNADNPTFTFRQVQCPSELVARTGCRRNDDGNFPVFTPPSGGQSSSSSSSSSAKPTSTSTS

SEQ ID NO: 46751 - protein, 303 aa, Remersonia thermophila
MRSAPVLRTAVAAALPVLALAANGKSTRYWDCCKPSCSWPGKAPVNQPVYACNAQFQRISDPMAKSGCDGGPAYSCADHTPWAVNDEFSYGFAATSIAGGSESSWCCACYELTFTSGPVAGKKMVVQSTSTGGDLGSNHFDLNIPGGGVGLFDGCTPQFGGLPGQRYGGISSRAECERFPEALKPGCYWRFDWFKNADNPSFSFRQVQCPAELVARTGCRRNDDGNFPVVSPPSSQPSTTSTSSSSSSSTTSSSIQQPTQPTSPGGCVSQKWGQCGGNGWSGCTSCEAGSTCTKVNEWYSQCM

SEQ ID NO: 46752 - protein, 200 aa, Sordaria fimicola
GSGKSTRYWDCCKPSCAWSGKASVNRPVLACDANNNPLNDANVKSGCDGGSAYTCANNSPWAVNDNLAYGFAATKLSGGTESSWCCACYALTFTSGPVSGKTLVVQSTSTGGDLGSNHFDLNMPGGGVGLFDGCKREFGGLPGAQYGGISSRSECDSFPAALKPGCQWRFDWFKNADNPEFTFKQVQCPSELTSRTGCKR

SEQ ID NO: 46753 - protein, 286 aa, Clonostachys rosea f. catenulata
AFAADGRSTRYWDCCKPSCAWSGKASVSSPVRTCDANNSPLSDVDAKSACDGGVAYTCSNNAPWAVNDNLSYGFAATAINGGSESSWCCACYKLTFTSGPASGKVMVVQSTNTGYDLSNNHFDILMPGGGVGAFDGCSRQYGSIPGERYGGVTSRDQCDQMPSALKQGCYWRFDWFKNADNPSFSFRQVQCPAELVARTGCRRNDDGNFPAVQIPSSSTSSPVNQPTSTSTTSTSTTSSPPVQPTTPSGCTAERWAQCGGNGWSGCTTCVAGSTCTKINDWYHQCL

SEQ ID NO: 46754 - protein, 213 aa, Melanocarpus albomyces
ANGQSTRYWDCCKPSCGWAGKGPVNQPVYSCDANFQRIHDFDAVSGCEGGPAFSCADHSPWAINDNLSYGFAATALSGQTEESWCCACYALTFTSGPVAGKTMVVQSTSTGGDLGSNHFDLNIPGGGVGLFDGCTPQFGGLPGARYGGISSRQECDSFPEPLKPGCQWRFDWFQNADNPSFTFERVQCPEELVARTGCRRHDDGGFAFKAPSA

SEQ ID NO: 46755 - protein, 212 aa, Thermochaetoides thermophila
GKSTRYWDCCKPSCSWPGKAAVSQPVFACDRNFNRIYDFGAKSGCEGGPAYSCADQTPWAVNDQFSYGFAATNIAGGNEASWCCACYKLTFTSGPVAGKVMVVQSTSTGGDLGNNHFDLNIPGGGVGIFDGCTPQFGGLPGERYGGISSRSQCDSFPEALKPGCYWRFDWFLNADNPNFTEERVQCPSELVARTGCKRNDDGNYPVFTPPSG

SEQ ID NO: 46756 - protein, 282 aa, Staphylotrichum coccosporum
GKSTRYWDCCKPSCSWPGKASVNQPVFACYANFQRISDPNVKSGCDGGSAYACADQTPWAVNDNFSYGFAATSISGGNEASWCCGCYELTFTSGPVAGKKMVVQSTSTGGDLGTNHFDLAMPGGGVGIFDGCSPQFGGLPGDRYGGVSSRSQCDSFPAALKPGCYWRFDWFKNADNPTFTFRQVQCPSELVARTGCRRNDDSNFPHFTPPSGGQSSSSSSSSSAKPTSTSTSTTSSQTSSSTGGGCAAQRWAQCGGIGFSGCTTCVSGTTCNKQNDWYSQCL

SEQ ID NO: 46757 - protein, 235 aa, Thermochaetoides thermophila
MRSTPVLRTALAAALPFTVLAADGKSTRYWDCCKPSCSWPGKAAVSQPVFACDRNFNRIYDFGAKSGCEGGPAYSCADQTPWAVNDQFSYGFAATNIAGGNEASWCCACYKLTFTSGPVAGKVMVVQSTSTGGDLGNNHFDLNIPGGGVGIFDGCTPQFGGLPGERYGGISSRSQCDSFPDALKPGCYWRFDWFLNADNPNFTFERVQCPSELVARTGCKRNDDGNYPVFTPPSG

SEQ ID NO: 46758 - protein, 258 aa, Remersonia thermophila
HQPVYACNAQFQRISDPMAKSGCDGGPAYSCADHTPWAVNDEFSYGFAATSIAGGSESSWCCACYELTFTSGPVAGKKMVVQSTSTGGDLGSNHFDLNIPGGGVGLFDGCTPQFGGLPGQRYGGISSRAECERFPEALKPGCYWRFDWFKNADNPSFSFRQVQCPAELVARTGCRRNDDGNFPVVSPPSSQPSTTSTSSSSSSSTTSSSIQQPTQPTSPGGCVSQKWGQCGGNGWSGCTSCEAGSTCTKVNEWYSQCM

SEQ ID NO: 46759 - protein, 214 aa, Melanocarpus albomyces
ANGQSTRYWDCCKPSCGWAGKAPVNQPVYSCDANFQRIHDFDAVSGCEGGPAFSCADHSPWAINDNLSYGFAATALSGQTEESWCCACYALTFTSGPVAGKTMVVQSTSTGGDLGSNHFDLNIPGGGVGLFDGCTPQFGGLPGARYGGISSRQECDSFPEPLKPGCQWRFDWFQNADNPSFTFERVQCPEELVARTGCRRHDDGGFAVFKAPSA

SEQ ID NO: 46760 - protein, 214 aa, Melanocarpus albomyces
ANGQSTRYWDCCKPSCGWAGKGPVNQPVYSCDANFQRIHDFDAVSGCEGGPAFSCADHSPWAINDNLSYGFAATSLSGQTEESWCCACYALTFTSGPVAGKTMVVQSTSTGGDLGSNHFDLNIPGGGVGLFDGCTPQFGGLPGARYGGISSRQECDSFPEPLKPGCQWRFDWFQNADNPSFTFERVQCPEELVARTGCRRHDDGGFAVFKAPSA

SEQ ID NO: 46761 - protein, 214 aa, Melanocarpus albomyces
ANGQSTRYWDCCKPSCGWAGKGPVNQPVYSCDANFQRIHDFDAVSGCEGGPAYSCADHSPWAINDNLSYGFAATALSGQTEESWCCACYALTFTSGPVAGKTMVVQSTSTGGDLGSNHFDLNIPGGGVGLFDGCTPQFGGLPGARYGGISSRQECDSFPEPLKPGCQWRFDWFQNADNPSFTFERVQCPEELVARTGCRRHDDGGFAVFKAPSA

SEQ ID NO: 46762 - protein, 214 aa, Melanocarpus albomyces
ANGQSTRYWDCCKPSCGWAGKAPVNQPVYSCDANFQRIHDFDAVSGCEGGPAFSCADHSPWAINDNLSYGFAATALSGQTESSWCCACYALTFTSGPVAGKTMVVQSTSTGGDLGSNHFDLNIPGGGVGLFDGCTPQFGGLPGARYGGISSRQECDSFPEPLKPGCQWRFDWFQNADNPSFTFERVQCPEELVARTGCRRHDDGGFAVFKAPSA

SEQ ID NO: 46763 - protein, 214 aa, Melanocarpus albomyces
ANGQSTRYWDCCKPSCGWAGKAPVNQPVYSCDANFQRIHDFDAVSGCEGGPAFSCADHSPWAINDNLSYGFAATSLSGQTEESWCCACYALTFTSGPVAGKTMVVQSTSTGGDLGSNHFDLAIPGGGVGLFDGCTPQFGGLPGARYGGISSRQECDSFPEPLKPGCQWRFDWFQNADNPSFTFERVQCPEELVARTGCRRHDDGGFAVFKAPSA

SEQ ID NO: 46764 - protein, 271 aa, Synthetic construct
ASGSGQSTRYWDCCKPSCSWSGKASVNRPVLACDANNNPLSDASVKSGCDGGSAYTCANNSPWAVNDQLSYGFAATKLSGGTESSWCCACYALTFTSGPVAGKTMVVQSTSTGGDLGSNHFDINMPGGGVGLFDGCTRQFGGLPGAQYGGISSRSQCDSFPAALKPGCQWRFDWFQNADNPNFTFKQVQCPSELTSRTGCKRNDDSQFPVFTPPSGGGTNPSTPTTPPSSGGGSGCTADKYAQCGGSGWSGCTNCPSGSTCKTINDYYHQC

SEQ ID NO: 46765 - protein, 271 aa, unidentified
ASGSGQSTRYWDCCKPSCSWSGKASVNRPVLACDANNNPLSDASVKSGCDGGSAYTCANNSPWAVNDQLSYGFAATKLSGGTESSWCCACYALTFTSGPVAGKTMVVQSTSTGGDLGSNHFDINMPGGGVGLFDGCTRQFGGLPGAQYGGISSRSQCDSFPAALKPGCQWRFDWFQNADNPNFTFKQVQCPSELTSRTGCKRNDDSQFPVFTPPSGGGSNPSTPTTPPSSGGGSGCTADKYAQCGGSGWSGCTNCPSGSTCKTINDYYHQC

SEQ ID NO: 46766 - protein, 271 aa, Neurospora crassa
ASGSGQSTRYWDCCKPSCSWSGKAPVNRPVLACDANNNPLSDASVKSGCDGGSAYTCANNSPWAVNDQLSYGFAATKLSGGTESSWCCACYALTFTSGPVAGKTLVVQSTSTGGDLGSNHFDINMPGGGVGLFDGCKRQFGGLPGAQYGGISSRSQCDSFPAPLKPGCQWRFDWFQNADNPNFTFKQVQCPSELTSRTGCKRNDDSQFPVFTPPSGGGSNPSTPTTPPSSGGGSGCTADKYAQCGGSGWSGCTNCPSGSTCKTINDYYHQC

SEQ ID NO: 46767 - protein, 271 aa, Neurospora crassa
ASGSGQSTRYWDCCKPSCSWSGKAPVNRPVLACDANNNPLSDASVKSGCDGGSAYTCANNSPWAVNDQLSYGFAATKLSGGTESSWCCACYALTFTSGPVAGKTLVVQSTSTGGDLGSNHFDINMPGGGVGLFDGCKRQFGGLPGAQYGGISSRDQCDSFPAALKPGCQWRFDWFQNADNPNFTFKQVQCPSELTSRTGCKRNDDSQFPVFTPPSGGGSNPSTPTTPPSSGGGSGCTADKYAQCGGSGWSGCTNCPSGSTCKTINDYYHQC

SEQ ID NO: 46768 - protein, 271 aa, Alteromonas sp.
ASGSGQSTRYWDCCKPSCSWSGKAPVNRPVLACDANNNPLSDASVKSGCDGGSAYTCANNSPWAVNDQLAYGFAATKLSGGTESSWCCACYALTFTSGPVAGKTLVVQSTSTGGDLGSNHFDINMPGGGVGLFDGCKRQFGGLPGAQYGGISSRSQCDSFPAALKPGCQWRFDWFQNADNPNFTFKQVQCPSELTSRTGCKRNDDSQFPVFTPPSGGGSNPSTPTTPPSSGGGSGCTADKYAQCGGSGWSGCTNCPSGSTCKTINDYYHQC

SEQ ID NO: 46769 - protein, 213 aa, Melanocarpus albomyces
ANGQSTRYWDCCKPSCGWAGKGPVNQPVYSCDANFQRIHDFDAVSGCEGGPAFSCADHSPWAINDNLSYGFAATALSGQTEESWCCACYALTFTSGPVAGKTMVVQSTSTGGDLGSNHFDLNIPGGGVGLFDGCTPQFGGLPGARYGGISSRQECDSFPEPLKPGCQWRFDWFQNADNPSFTFERVQCPEELVARTGCRRHDDGGFVFKAPSA

SEQ ID NO: 46770 - protein, 281 aa, Staphylotrichum coccosporum
GVSTRYWDCCKPSCSWPGKASVNQPVFACSANFQRISDPNVVSGCDGGSAYACADQTPWAVNDNFSYGFAATSIKGGNEASWCCGCYALTFTSGPVAGKTMVVQSTSTGGDLGTNHFDLAMPGGGVGIFDGCTPQFGGLPGDRYGGVSSRSECDSFPAALKPGCYWRFDWFKNADNPTFTFRQVQCPSEVVARTGCRRNDDGNFPHFTPPSGGQSSSSLSSSSAKPTSTTSTTSSQTSSSTGGGCAAQRWAQCGGIGFSGCTTCVSGTTCNKQNDWYSQCL

SEQ ID NO: 46771 - protein, 282 aa, Staphylotrichum coccosporum
GKSTRYWDCCKPSCSWPGKASVNQPVFACSANFQRISDPNVKSGCDGGSAYACADQTPWAVNDNFSYGFAATSIMGGNEASWCCGCYELTFTSGPVAGKTMVVQSTSTGGDLGTNHFDLAMPGGGVGIFDGCSPQFGGLPGDRYGGVSSRSQCDSFPAALVPGCYWRFDWFKNADNPTFTFRQVQCPSELVARTGCRRNDDGNFPHFTPPSGGQSSSSSSSSSAKPTSTSASTTSSQTSSSTGGGCAAQRWAQCGGIGFSGCTTCVSGTTCNKQNDWYSQCL

SEQ ID NO: 46772 - protein, 282 aa, Staphylotrichum coccosporum
GVSTRYWDCCKPSCSWPGKASVNQPVFACSANFQRISDPNVVSGCDGGSAYACADQTPWAVNDNFSYGFAATSIKGGSEASWCCGCYELTFTSGPVAGKKMVVQSTSTGTDLGTNHFDLAMPGGGVGIFDGCTPQFGGLPGDRYGGVSSRSQCDSFPAALKPGCYWRFDWFKNADNPTFTFRQVQCPSEVVARTGCRRNDDGNFPVFTPPSGGQSSSSSSSSSAKPTSTSTSTASSQTSSSTGGGCAAQRWAQCGGIGFSGCTTCVSGTTCNKQNDWYSQCL

SEQ ID NO: 46773 - protein, 232 aa, Staphylotrichum coccosporum
GKSTRYWDCCKPSCSWPGKASVNQPVFACSANFQRISDPNVKSGCDGGSAYACADQTPWAVNDNFSYGFAATSISGGNEASWCCGCYELTFTSGPVAGKTMVVQSTSTGSDLGTNHFDLAMPGGGVGIFDGCSKQFGGLPGDRYGGVSSRSQCDSFPAALKPGCYWRFDWFKNADNPTFTFRQVQCPSELVARTGCRRNDDGNFPVFTPPSGGQMSSSMSSSSAKPTSTSTS

SEQ ID NO: 46774 - protein, 232 aa, Staphylotrichum coccosporum
GKSTRYWDCCKPSCSWPGKASVNQPVFACSANFQRISDPNVKSGCDGGSAYACADQTPWAVNDNFSYGFAATSISGGNEASWCCGCYELTFTSGPVAGKTMVVQSTSTGGDLGTNHFDLAMPGGGVGIFDGCSPQFGGLAGDRYGGVSSRSQCDSFPAALKPGCYWRFDWFKNADNPTFTFRQVQCPSELVARTGCRRNDDGNFPVFTPPSGGQSSSSSSSSSAKPTSTSTS

SEQ ID NO: 46775 - protein, 212 aa, Melanocarpus albomyces
ANGQSTRYWDCCKPSCGWAGKAPVNQPVYSCDANFQRIHDFDAVSGCEGGPAFSCADHSPWAINDNLSYGFAATALSGQTEESWCCACYALTFTSGPVAGKTMVVQSTSTGGDLGSNHFDLAIPGGGVGLFDGCTPQFGGLPGARYGGISSRQECDSFPEPLKPGCQWRFDWFQNADNPSFTFERVQCPEELVARTGCRRHDDGGFAVFKAP

SEQ ID NO: 46776 - protein, 212 aa, Melanocarpus albomyces
GQSTRYWDCCKPSCGWAGKAPVNQPVYSCDANFQRIHDFDAVSGCEGGPAFSCADHSPWAINDNLSYGFAATALSGQTEESWCCACYALTFTSGPVAGKTMVVQSTSTGGDLGSNHFDLAIPGGGVGLFDGCTPQFGGLPGARYGGISSRQECDSFPEPLKPGCQWRFDWFQNADNPSFTFERVQCPEELVARTGCRRHDDGGFAVFKAPSA

SEQ ID NO: 46777 - protein, 286 aa, Thermochaetoides thermophila
GKSTRYWDCCKPSCSWPGKAAVSQPVFACDRNFNRLSDFNVQSGCNGGPAYSCADQTPWAVNDQFSYGFAATNIAGGNEASWCCACYKLTFTSGPVAGKVMVVQSTSTGGDLGNNHFDLNIPGGGVGIFDGCTPQFGGLPGERYGGISSRSQCDSFPDALKPGCYWRFDWFLNADNPNFTFERVQCPSELVARTGCKRNDDGNYPVFTPPSGDSPSSSSAAPTSTSTSQQPQQPTSSSSQASVPTSNPGGCTSQKWAQCGGIGFTGCTTCVSGTTCTKLNDWYSQC

SEQ ID NO: 46778 - protein, 297 aa, Staphylotrichum coccosporum
MRSSPFLRAALAAALPLSAHALDGKSTRYWDCCKPSCGWPGKASVNQPVFSCSADWQRISDFNAKSGCDGGSAYSCADQTPWAVNDNFSYGFAATAIAGGSESSWCCACYALTFNSGPVAGKTMVVQSTSTGGDLGSNQFDLAIPGGGVGIFNGCASQFGGLPGAQYGGISDRSQCSSFPAPLQPGCQWRFDWFQNADNPTFTFQRVQCPSELTSRTGCKRDDDASYPVFNPPSGGSPSTTSTTTSSPSGPTGNPPGGGGCTAQKWAQCGGTGFTGCTTCVSGTTCQVQNQWYSQCL

SEQ ID NO: 46779 - protein, 231 aa, Staphylotrichum coccosporum
GKSTRYWDCCKPSCSWPGKASVNQPVFACSANFQRISDPNVKSGCDGGSAYACADQTPWAVNDNFSYGFAATSIMGGNEASWCCACYELTFTSGPVAGKTMVVQSTSTGGDLGTNHFDLAMPGGGVGIFDGCSEQFGGLAGDRYGGVSSRSQCDDFPAALKPGCYWRFWFKNADNPTFTFRQVQCPSELVARTGCRRNDDGNFPVFTPPSGGQSSSSLSSSSAKPTSTSTS

SEQ ID NO: 46780 - protein, 271 aa, Neurospora crassa
ASGSGQSTRYWDCCKPSCSWSGKAPVNRPVLACDANNTPLSDASVKSGCDGGSAYTCANNSPWAVNDQLSYGFAATKLSGGTESSWCCACYALTFTSGPVAGKTLVVQSTSTGGDLGSNHFDINMPGGGVGLFDGCKRQFGGLPGAQYGGISSRSQCDSFPAALKPGCQWRFDWFQNADNPNFTFKQVQCPSELTSRTGCKRNDDSQFPVFTPPSGGGSNPSTPTTPPSSGGGSGCTADKYAQCGGSGWSGCTNCPSGSTCKTINDYYHQC

SEQ ID NO: 46781 - protein, 271 aa, Synthetic construct
ASGSGQSTRYWDCCKPSCSWSGKASVNRPVLACDANNNPLSDASVKSGCDGGSAYTCANNSPWAVNDQLSYGFAATKLSGGTESSWCCACYALTFTSGPVAGKTMVVQSTSTGGDLGSNQFDINMPGGGVGLFDGCTRQFGGLPGAQYGGISSRSQCDSFPAALKPGCQWRFDWFQNADNPNFTFKQVQCPSELTSRTGCKRNDDSQFPVFTPPSGGGSNPSTPTTPPSSGGGSGCTADKYAQCGGSGWSGCTNCPSGSTCKTINDYYHQC

SEQ ID NO: 46782 - protein, 271 aa, Synthetic construct
ASGSGTSTRYWDCCKPSCSWSGKASVNRPVLACDANNNPLSDASVKSGCDGGSAYTCANNSPWAVNDQLSYGFAATKLSGGTESSWCCACYALTFTSGPVAGKTMVVQSTSTGGDLGSNHFDINMPGGGVGLFDGCTRQFGGLPGAQYGGISSRSQCDSFPAALKPGCQWRFDWFQNADNPNFTFKQVQCPSELTSRTGCKRNDDSQFPVFTPPSGGGTNPSTPTTPPSSGGGSGCTADKYAQCGGSGWSGCTNCPSGSTCKTINDYYHQC

SEQ ID NO: 46783 - protein, 271 aa, Synthetic construct
ASGSGTSTRYWDCCKPSCSWSGKASVNRPVLACDANNNPLSDASVKSGCDGGSAYTCANNSPWAVNDQLSYGFAATKLSGGTESSWCCACYALTFTSGPVAGKTMVVQSTSTGGDLGSNHFDINMPGGGVGLFDGCTRQFGGLPGAQYGGISSRSQCDSFPAALKPGCQWRFDWFQNADNPNFTFKQVQCPSELTSRTGCKRNDDSQFPVFTPPSGGGSNPSTPTTPPSSGGGSGCTADKYAQCGGSGWSGCTNCPSGSTCKTINDYYHQC

SEQ ID NO: 46784 - protein, 271 aa, Synthetic construct
ASGSGQSTRYWDCCKPSCSWSGKASVNRPVLACDANNNPLSDASVKSGCDGGSAYTCANNSPWAVNDQLSYGFAATKLSGGTESSWCCACYALTFTSGPVAGKTMVVQSTSTGGDLGSNHFDINMPGGGFGLFDGCTRQFGGLPGAQYGGISSRSQCDSFPAALKPGCQWRFDWFQNADNPNFTFKQVQCPSELTSRTGCKRNDDSQFPVFTPPSGGGSNPSTPTTPPSSGGGSGCTADKYAQCGGSGWSGCTNCPSGSTCKTINDYYHQC

SEQ ID NO: 46785 - protein, 271 aa, Synthetic construct
ASGSGQSTRYWDCCKPSCSWSGKASVNRPVLACDANNNPLSDASVKSGCDGGSAYTCANNSPWAVNDQLSYGFAATKLSGGTESSWCCACYALTFTSGPVAGKTMVVQSTSTGGDLGSNHFDINMPGGGVGLFDGCTRQFGGLPGAQYGGISSRSQCDSFPAALKPGCQWRFDWFQNASNPNFTFKQVQCPSELTSRTGCKRNDDSQFPVFTPPSGGGSNPSTPTTPPSSGGGSGCTADKYAQCGGSGWSGCTNCPSGSTCKTINDYYHQC

SEQ ID NO: 46786 - protein, 271 aa, Synthetic construct
ASGSGQSTRYWDCCKPSCSWSGKASVNRPVLACDANNNPLSDASVKSGCDGGSAYTCANNSPWAVNDQLSYGFAATKLSGGTESSWCCACYALTFTSGPVAGKTMVVQSTSTGGDLGSNQFDINMPGGGVGLFDGCTRQFGGLPGAQYGGISSRSQCDSFPAALKPGCQWRFDWFQNADNPNFTFKQVQCPSELTSRTGCKRNDDSQFPVFTPPSGGGTNPSTPTTPPSSGGGSGCTADKYAQCGGSGWSGCTNCPSGSTCKTINDYYHQC

SEQ ID NO: 46787 - protein, 271 aa, Synthetic construct
ASGSGQSTRYWDCCKPSCSWSGKASVNRPVLACDANNNPLSDASVKSGCDGGSAYTCANNSPWAVNDQLSYGFAATKLSGGTESSWCCACYALTFTSGPVAGKTMVVQSTNTGGDLGSNHFDINMPGGGVGLFDGCTRQFGGLPGAQYGGISSRSQCDSFPAALKPGCQWRFDWFQNADNPNFTFKQVQCPSELTSRTGCKRNDDSQFPVFTPPSGGGTNPSTPTTPPSSGGGSGCTADKYAQCGGSGWSGCTNCPSGSTCKTINDYYHQC

SEQ ID NO: 46788 - protein, 271 aa, Synthetic construct
ASGSGQSTRYWDCCKPSCSWSGKASVNRPVLACDANNNPLSDASVKSGCDGGSAYTCANNSPWAVNDQLSYGFAATKLSGGTESSWCCACYALTFTSGPVAGKTMVVQSTNTGGDLGSNHFDINMPGGGVGLFDGCTRQFGGLPGAQYGGISSRSQCDSFPAALKPGCQWRFDWFQNADNPNFTFKQVQCPSELTSRTGCKRNDDSQFPVFTPPSGGGSNPSTPTTPPSSGGGSGCTADKYAQCGGSGWSGCTNCPSGSTCKTINDYYHQC

SEQ ID NO: 46789 - protein, 271 aa, Synthetic construct
ASGSGQSTRYWDCCKPSCSWSGKASVNRPVLACDANNNPLSDASVKSGCDGGSAYTCANNSPWAVNDQLSYGFAATKLSGGTESSWCCACYALTFTSGPVAGKTMVVQSTSTGGDLGSNHFDINMPGGGVGLFDGCTRQFGGLPGAQYGGISSRSQCDSFPAALKPGCQWRFDWFQNASNPNFTFKQVQCPSELTSRTGCKRNDDSQFPVFTPPSGGGTNPSTPTTPPSSGGGSGCTADKYAQCGGSGWSGCTNCPSGSTCKTINDYYHQC

SEQ ID NO: 46790 - protein, 271 aa, Synthetic construct
ASGSGQSTRYWDCCKPSCSWSGKASVNRPVLACDANNNPLSDASVKSGCDGGSAYTCANNSPWAVNDQLSYGFAATKLSGGTESSWCCACYALTFTSGPVAGKTMVVQSTSTGGDLGSNHFDINMPGGGXGLFDGCTRQFGGLPGAQYGGISSRSQCDSFPAALKPGCQWRFDWFQNADNPNFTFKQVQCPSELTSRTGCKRNDDSQFPVFTPPSGGGSNPSTPTTPPSSGGGSGCTADKYAQCGGSGWSGCTNCPSGSTCKTINDYYHQC

SEQ ID NO: 46791 - protein, 271 aa, Synthetic construct
ASGSGQSTRYWDCCKPSCSWSGKASVNRPVLACDANNNPLSDASVKSGCDGGSAYTCANNSPWAVNDQLSYGFAATKLSGGTESSWCCACYALTFTSGPVAGKTMVVQSTSTGGDLGSNHFDINMPGGGLGLFDGCTRQFGGLPGAQYGGISSRSQCDSFPAALKPGCQWRFDWFQNADNPNFTFKQVQCPSELTSRTGCKRNDDSQFPVFTPPSGGGSNPSTPTTPPSSGGGSGCTADKYAQCGGSGWSGCTNCPSGSTCKTINDYYHQC

SEQ ID NO: 46792 - protein, 271 aa, Neurospora crassa
ASGSGQSTRYWDCCKPSCSWSGKAPVNRPVLACDANNNPLSDASVKSGCDGGSAYTCANNSPWAVNDQLSYGFAATKLSGGTESSWCCACYALTFTSGPVAGKTLVVQSTSTGGDLGSNHFDINMPGGGVGLFDGCKRQFGGLPGAQYGGISSRSQCDSFPAALKPGCQWRFDWFQNADNPNFTFKQVQCPSELTSRTGCKRNDDSQFPVFTPPSGGGSNPSTPTTPPSSGGGSGCTADKYAQCGGSGWSGCTNCPSGSTCKTINDYYHQC

SEQ ID NO: 46793 - protein, 271 aa, Synthetic construct
ASGSGQSTRYWDCCKPSCSWSGKASVNRPVLACDANNNPLSDASVKSGCDGGSAYTCANNSPWAVNDQLSYGFAATKLSGGTESSWCCACYALTFTSGPVAGKTMVVQSTSTGGDLGSNHFDINMPGGGVGLFDGCTRQFGGLPGARYGGISSRSQCDSFPAALKPGCQWRFDWFQNADNPNFTFKQVQCPSELTSRTGCKRNDDSQFPVFTPPSGGGSNPSTPTTPPSSGGGSGCTADKYAQCGGSGWSGCTNCPSGSTCKTINDYYHQC

SEQ ID NO: 46794 - protein, 271 aa, Synthetic construct
ASGSGQSTRYWDCCKPSCSWSGKASVNRPVLACDANNNPLSDASVKSGCDGGSAYTCANNSPWAVNDQLSYGFAATKLSGGTESSWCCACYALTFTSGPVAGKTMVVQSTSTGGDLGSNHFDINMPGGGVGLFDGCTRQFGGLPGARYGGISSRSQCDSFPAALKPGCQWRFDWFQNADNPNFTFKQVQCPSELTSRTGCKRNDDSQFPVFTPPSGGGTNPSTPTTPPSSGGGSGCTADKYAQCGGSGWSGCTNCPSGSTCKTINDYYHQC

SEQ ID NO: 46795 - protein, 205 aa, Melanocarpus albomyces
NGQSTRYWDCCKPSCGWAGKAPVNQPVYSCDANFQRIHDFDAVSGCEGGPAFSCADHSPWAINDNLSYGFAATALSGQTEESWCCACYALTFTSGPVAGKTMVVQSTSTGGDLGSNHFDLAIPGGGVGLFDGCTPQFGGLPGARYGGISSRQECDSFPEPLKPGCQWRFDWFQNADNPSFTFERVQCPEELVARTGCRRHDDGGF

SEQ ID NO: 46796 - protein, 214 aa, Melanocarpus albomyces
ANGQSTRYWDCCKPSCGWAGKGPVNQPVYSCDANFQRISDFDAVSGCEGGPAFSCADHSPWAINDNLSYGFAATALSGQTEESWCCACYALTFTSGPVAGKTMVVQSTSTGGDLGSNHFDLNIPGGGVGLFDGCTPQFGGLPGARYGGISSRQECDSFPEPLKPGCQWRFDWFQNADNPSFTFERVQCPEELVARTGCRRHDDGGFAVFKAPSA

SEQ ID NO: 46797 - protein, 214 aa, Melanocarpus albomyces
ARGQSTRYWDCCKPSCGWAGKAPVNQPVYSCDANFQRIHDFDAVSGCEGGPAFSCADHSPWAINDNLSYGFAATALSGQTEESWCCACYALTFTSGPVAGKTMVVQSTSTGGDLGSNHFDLAIPGGGVGLFDGCTPQFGGLPGARYGGISSRQECDSFPEPLKPGCQWRFDWFQNADNPSFTFERVQCPEELVARTGCRRHDDGGFAVFKAPSA

SEQ ID NO: 46798 - protein, 214 aa, Melanocarpus albomyces
ANGQSTRYWDCCKPSCGWAGKGPVNQPVYSCDANFQRIHDFDAVSGCEGGPAFSCADHSPWAINDNLSYGFAATALSGQTEESWCCACYALTFTSGPVAGKTMVVQSTSTGGDLGSNHFDLNIPGGGVGLFDGCTPQFGGLPGARYGGISSRQECDSFPEPLKPGCQWRFDWFQNADNPSFTFERVQCPEELVARTGCRRHDDGGFSVFKAPSA

SEQ ID NO: 46799 - protein, 214 aa, Melanocarpus albomyces
ANGQSTRYWDCCKPSCGWAGKAPVNQPVYSCDANFQRIHDFDAVSGCEGGPAFSCADHSPWAINDNLSYGFAATALSGQTEESWCCACYALTFTSGPVAGKTMVVQSTSTGGDLGSNHFDLAIPGGGVGLFDGCTPQFGGLPGARYGGISSRQECDSFPEPLKPGCQWRFDWFQNADNPSFTFERVQCPEELVARTGCRRHDDGGFAVFKAPSA

SEQ ID NO: 46800 - protein, 214 aa, Melanocarpus albomyces
ANGQSTRYWDCCKPSCGWAGKAPVNQPVYSCDANFQRIHDFDAVSGCEGGPAFSCADHSPWAINDNLSYGFAATRLSGQTEESWCCACYALTFTSGPVAGKTMVVQSTSTGGDLGSNHFDLAIPGGGVGLFDGCTPQFGGLPGARYGGISSRQECDSFPEPLKPGCQWRFDWFQNADNPSFTFERVQCPEELVARTGCRRHDDGGFAVFKAPSA

SEQ ID NO: 46801 - protein, 214 aa, Melanocarpus albomyces
ANGQSTRYWDCCKPSCGWAGKAPVNQPVYSCDANFQRIHDFDARSGCEGGPAFSCADHSPWAINDNLSYGFAATALSGQTEESWCCACYALTFTSGPVAGKTMVVQSTSTGGDLGSNHFDLAIPGGGVGLFDGCTPQFGGLPGARYGGISSRQECDSFPEPLKPGCQWRFDWFQNADNPSFTFERVQCPEELVARTGCRRHDDGGFAVFKAPSA

SEQ ID NO: 46802 - protein, 214 aa, Melanocarpus albomyces
ANGQSTRYWDCCKPSCGWAGKGPVNQPVYSCDANFQRIHDFDSVSGCEGGPAYSCADHSPWAINDNLSYGFAATALSGQTEESWCCACYALTFTSGPVAGKTMVVQSTSTGGDLGSNHFDLNIPGGGVGLFDGCTPQFGGLPGARYGGISSRQECDSFPEPLKPGCQWRFDWFQNADNPSFTFERVQCPEELVARTGCRRHDDGGFAVFKAPSA

SEQ ID NO: 46803 - protein, 214 aa, Melanocarpus albomyces
ANGQSTRYWDCCKPSCGWAGKGPVNQPVYSCDANFQRIHDFDAVSGCEGGPAFSCADHSPWAINDNLSYGFAATALSGQTEESWCCACYALTFTSGPVAGKTMVVQSTSTGGDLGSNHFDLNIPGGGVGLFDGCTPQFGGLPGARYGGISSRQECDSFPEPLKPGCQWRFDWFQNADNPSFTFERVQCPEELVARTGCRRHDDGRFAVFKAPSA

SEQ ID NO: 46804 - protein, 214 aa, Melanocarpus albomyces
ANGQSTRYWDCCKPSCGWAGKGPVNQPVYSCDANFQRIHDFDAVSGCEGGPAFSCADHSPWAINDNLSYGFAATALSGQTESSWCCACYALTFTSGPVAGKTMVVQSTSTGGDLGSNHFDLNIPGGGVGLFDGCTPQFGGLPGARYGGISSRQECDSFPEPLKPGCQWRFDWFQNADNPSFTFERVQCPEELVARTGCRRHDDGGFAVFKAPSA

SEQ ID NO: 46805 - protein, 214 aa, Melanocarpus albomyces
ANGQSTRYWDCCKPSCGWAGKAPVNQPVYSCDANFQRIHDFDAVSGCEGGPAFSCADHSPWAINDNLSYGFAATALSGQTERSWCCACYALTFTSGPVAGKTMVVQSTSTGGDLGSNHFDLAIPGGGVGLFDGCTPQFGGLPGARYGGISSRQECDSFPEPLKPGCQWRFDWFQNADNPSFTFERVQCPEELVARTGCRRHDDGGFAVFKAPSA

SEQ ID NO: 46806 - protein, 214 aa, Melanocarpus albomyces
ANGQSTRYWDCCKPSCGWAGKAPVNQPVYSCDANFQRIHDFDAWSGCEGGPAFSCADHSPWAINDNLSYGFAATALSGQTEESWCCACYALTFTSGPVAGKTMVVQSTSTGGDLGSNHFDLAIPGGGVGLFDGCTPQFGGLPGARYGGISSRQECDSFPEPLKPGCQWRFDWFQNADNPSFTFERVQCPEELVARTGCRRHDDGGFAVFKAPSA

SEQ ID NO: 46807 - protein, 214 aa, Melanocarpus albomyces
ANGQSTRYWDCCKPSCGWAGKGPVNQPVYSCDANFQRISDFDAQSGCEGGPAFSCADHSPWAINDNLSYGFAATALSGQTEESWCCACYALTFTSGPVAGKTMVVQSTSTGGDLGSNHFDLNIPGGGVGLFDGCTPQFGGLPGARYGGISSRQECDSFPEPLKPGCQWRFDWFQNADNPSFTFERVQCPEELVARTGCRRHDDGGFAVFKAPSA

SEQ ID NO: 46808 - protein, 214 aa, Melanocarpus albomyces
ANGQSTRYWDCCKPSCGWAGKGPVNQPVYSCDANFQRIHDFDAVSGCEGGPAFSCADHSPWAINDNLSYGFAATALSGQTEESWCCACYALTFTSGPVAGKTMVVQSTSTGGDLGSNHFDLNIPGGGVGGFDGCTPQFGGLPGARYGGISSRQECDSFPEPLKPGCQWRFDWFQNADNPSFTFERVQCPEELVARTGCRRHDDGGFAVFKAPSA

SEQ ID NO: 46809 - protein, 214 aa, Melanocarpus albomyces
ANGQSTRYWDCCKPSCGWAGKGPVNQPVYSCDANFQRIHDFDAVSGCEGGPAFSCADHSPWAINDNLSYGFAATALSGQTEESWCCACYALTFTSGPVAGKTMVVQSTSTGGDLGSNHFDLNIPGGGVGLFDGCTPQFGGLPGARYGGISSRQECDSFPEPLKPGCQWRFDWFQNADNPSFTFERVQCPEELVARTGCRRHDDGGFAVFKAPSA

SEQ ID NO: 46810 - protein, 214 aa, Melanocarpus albomyces
ANGQSTRYWDCCKPSCGWAGKAPVNQPVYSCDANFQRIHDFDARSGCDGGPAFSCADHSPWAINDNLSYGFAATALSGQTESSWCCACYALTFTSGPVAGKTMVVQSTSTGGDLGSNHFDLNIPGGGVGLFDGCTPQFGGLPGARYGGISSRQECDSFPEPLKPGCQWRFDWFQNADNPSFTFERVQCPEELVARTGCRRHDDGGFAVFKAPSA

SEQ ID NO: 46811 - protein, 214 aa, Melanocarpus albomyces
ANGQSTRYWDCCKPSCGWAGKGPVNQPVYSCDANFQRIHDFDAQSGCEGGPAFSCADHSPWAINDNLSYGFAATALSGQTEESWCCACYALTFTSGPVAGKTMVVQSTSTGGDLGSNHFDLNIPGGGVGLFDGCTPQFGGLPGARYGGISSRQECDSFPEPLKPGCQWRFDWFQNADNPSFTFERVQCPEELVARTGCRRHDDGGFAVFKAPSA

SEQ ID NO: 46812 - protein, 214 aa, Melanocarpus albomyces
ANGQSTRYWDCCKPSCGWAGKAPVNQPVYSCDANFQRIHDFDALSGCEGGPAFSCADHSPWAINDNLSYGFAATALSGQTEESWCCACYALTFTSGPVAGKTMVVQSTSTGGDLGSNHFDLAIPGGGVGLFDGCTPQFGGLPGARYGGISSRQECDSFPEPLKPGCQWRFDWFQNADNPSFTFERVQCPEELVARTGCRRHDDGGFAVFKAPSA

SEQ ID NO: 46813 - protein, 214 aa, Melanocarpus albomyces
ANGQSTRYWDCCKPSCGWAGKSPVNQPVYSCDANFQRIHDFDAVSGCEGGPAFSCADHSPWAINDNLSYGFAATALSGQTEESWCCACYALTFTSGPVAGKTMVVQSTSTGGDLGSNHFDLNIPGGGVGLFDGCTPQFGGLPGARYGGISSRQECDSFPEPLKPGCQWRFDWFQNADNPSFTFERVQCPEELVARTGCRRHDDGGFAVFKAPSA

SEQ ID NO: 46814 - protein, 214 aa, Melanocarpus albomyces
ANGQSTRYWDCCKPSCGWARKGPVNQPVYSCDANFQRIHDFDAVSGCEGGPAFSCADHSPWAINDNLSYGFAATALSGQTEESWCCACYALTFTSGPVAGKTMVVQSTSTGGDLGSNHFDLNIPGGGVGLFDGCTPQFGGLPGARYGGISSRQECDSFPEPLKPGCQWRFDWFQNADNPSFTFERVQCPEELVARTGCRRHDDGGFAVFKAPSA

SEQ ID NO: 46815 - protein, 214 aa, Melanocarpus albomyces
ANGQSTRYWDCCKPSCGWAGKVPVNQPVYSCDANFQRIHDFDAVSGCEGGPAFSCADHSPWAINDNLSYGFAATALSGQTEESWCCACYALTFTSGPVAGKTMVVQSTSTGGDLGSNHFDLNIPGGGVGLFDGCTPQFGGLPGARYGGISSRQECDSFPEPLKPGCQWRFDWFQNADNPSFTFERVQCPEELVARTGCRRHDDGGFAVFKAPSA

SEQ ID NO: 46816 - protein, 214 aa, Melanocarpus albomyces
ANGQSTRYWDCCKPSCGWAGKGPVNQPVYSCDANFQRIHDFDAVSGCEGGPAFSCADHSPWAINDNLSYGFAATALSGQTEESWCCACYALTFTSGPVAGKTMVVQSTSTGGDLGSNHFDLNIPGGGVGLFDGCTPQFGGLPGARYGGISSRQECDSFPEPLKPGCQWRFDWFQNADNPSFTFERVQCPEELVARTGCRRHDDGRFSVFKAPSA

SEQ ID NO: 46817 - protein, 214 aa, Melanocarpus albomyces
ANGQSTRYWDCCKPSCGWAGKGPVNQPVYSCDANFQRIPDFDAVSGCEGGPAFSCADHSPWAINDNLSYGFAATALSGQTEESWCCACYALTFTSGPVAGKTMVVQSTSTGGDLGSNHFDLNIPGGGVGLFDGCTPQFGGLPGARYGGISSRQECDSFPEPLKPGCQWRFDWFQNADNPSFTFERVQCPEELVARTGCRRHDDGGFAVFKAPSA

SEQ ID NO: 46818 - protein, 214 aa, Melanocarpus albomyces
ANGQSTRYWDCCKPSCGWAGKGPVNQPVYSCDANFQRIHDFDAVSGCEGGPAFSCADHSPWAINDNLSYGFAATALSGQTEESWCCACYALTFTSGPVAGKTMVVQSTSTGGDLGSNHFDLNIPGGGVGLFDGCTPQFGGLPGARYGGISSRQECDSFPEPLKPGCQWRFDWFHNADNPSFTFERVQCPEELVARTGCRRHDDGGFAVFKAPSA

SEQ ID NO: 46819 - protein, 214 aa, Melanocarpus albomyces
ANGQSTRYWDCCKPSCGWAGKGPVNQPVYSCDANFQRIHDFDAVSGCEGGPAFSCADHSPWAINDNLSYGFAATALSGQTEESWCCACYALTFTSGPVAGKTMVVQSTSTGGDLGSNHFDLNIPGGGVGLFDGCTPQFGGLPGARYGGISSRQECDSFPEPLKPGCQWRFDWFQNADNPSFTFERVQCPEELVARTGCRRHDDGGFRVFKAPSA

SEQ ID NO: 46820 - protein, 214 aa, Melanocarpus albomyces
ANGQSTRYWDCCKPSCGWAGKGPVNQPVYSCDANFQRIHDFDALSGCEGGPAFSCADHSPWAINDNLSYGFAATALSGQTEESWCCACYALTFTSGPVAGKTMVVQSTSTGGDLGSNHFDLNIPGGGVGLFDGCTPQFGGLPGARYGGISSRQECDSFPEPLKPGCQWRFDWFQNADNPSFTFERVQCPEELVARTGCRRHDDGGFAVFKAPSA

SEQ ID NO: 46821 - protein, 214 aa, Melanocarpus albomyces
ANGQSTRYWDCCKPSCGWAGKAPVNQPVYSCDANFQRIHDFDAVSGCEGGPAFSCADHSPWAINDNLSYGFAATALSGQTEESWCCACYALTFTSGPVAGKTMVVQSTSTGGDLGSNHFDLAIPGGGVGLFDGCTPQFGGLPGARYGGISSRQECDSFPEPLKPGCQWRFDWFQNADNPSFTFERVQCPEELVARTGCRRHDDGTFAVFKAPSA

SEQ ID NO: 46822 - protein, 214 aa, Melanocarpus albomyces
ANGQSTRYWDCCKPSCGWAGKGPVNQPVYSCDANFQRIHDFDAVSGCEGGPAFSCADHSPWAINDNLSYGFAATHLSGQTEESWCCACYALTFTSGPVAGKTMVVQSTSTGGDLGSNHFDLNIPGGGVGLFDGCTPQFGGLPGARYGGISSRQECDSFPEPLKPGCQWRFDWFQNADNPSFTFERVQCPEELVARTGCRRHDDGGFAVFKAPSA

SEQ ID NO: 46823 - protein, 214 aa, Melanocarpus albomyces
ANGQSTRYWDCCKPSCGWAGKGPVNQPVYSCDANFQRIHDFDAVSGCEGGPAFSCADHSPWAINDNLSYGFAATALSGQTEESWCCACYALTFTSGPVAGKTMVVQSTSTGGDLGSNHFDLNIPGGGVGLFDGCTPQFGGLPGARYGGISSRSECDSFPEPLKPGCQWRFDWFQNADNPSFTFERVQCPEELVARTGCRRHDDGGFAVFKAPSA

SEQ ID NO: 46824 - protein, 214 aa, Melanocarpus albomyces
ANGQSTRYWDCCKPSCGWAGKGPVNQPVYSCDANFQRIHDFDAVSGCEGGPAFSCADHSPWAINDNLSYGFAATALSGQTEESWCCACYALTFTSGPVAGKTMVVQSTSTGGDLGSNHFDLNIPGGGVGLFDGCTPQFGGLPGARYGGISSRQECDSFPEPLKPGCQWRFDWFQNADNPSFTFERVQCPEELVARTGCRRHDDGGFAVWKAPSA

SEQ ID NO: 46825 - protein, 214 aa, Melanocarpus albomyces
ANGQSTRYWDCCKPSCGWAGKAPVNQPVYSCDANFQRIHDFDAVSGCEGGPAFSCADHSPWAINDNLSYGFAATALSGQTEWSWCCACYALTFTSGPVAGKTMVVQSTSTGGDLGSNHFDLAIPGGGVGLFDGCTPQFGGLPGARYGGISSRQECDSFPEPLKPGCQWRFDWFQNADNPSFTFERVQCPEELVARTGCRRHDDGGFAVFKAPSA

SEQ ID NO: 46826 - protein, 214 aa, Melanocarpus albomyces
ANGQSTRYWDCCKPSCGWAGKGPVNQPVYSCDANFQRIHDFDAVSGCEGGPAFSCADHSPWAINDNLSYGFAATALSGQTEESWCCACYALTFTSGPVAGKTMVVQSTSTGGDLGSNHFDLNIPGGGVGLFDGCTPQFGGLPGARYGGISSRQECDSFPESLKPGCQWRFDWFQNADNPSFTFERVQCPEELVARTGCRRHDDGGFAVFKAPSA

SEQ ID NO: 46827 - protein, 214 aa, Melanocarpus albomyces
ANGQSTRYWDCCKPSCGWAGKAPVNQPVYSCDANFQRIHDFDAVSGCEGGPAFSCADHSPWAINDNLSYGFAATALSGQTEESWCCACYALTFTSGPVAGKTMVVQSTSTGGDLGSNHFDLAIPGGGVGLFDGCTPQFGGLPGARYGGISSRQECDSFPEPLKPGCQWRFDWFRNADNPSFTFERVQCPEELVARTGCRRHDDGGFAVFKAPSA

SEQ ID NO: 46828 - protein, 295 aa, Staphylotrichum coccosporum
ADGKSTRYWDCCKPSCSWPGKASVNQPVFACYANFQRISDPNVKSGCDGGSAYACADQTPWAVNDNFSYGFAATSISGGNEASWCCGCYELTFTSGPVAGKTMVVQSTSTGGDLGTNHFDLAMPGGGVGIFDGCSPQFGGLPGDRYGGVSSRSECDSFPAALVPGCYWRFDWFKNADNPTFTFRQVQCPSELVARTGCRRNDDGNFPVFTPPSGGQGSSSSSSSSARPTSTSASTTSTKATSTTSTASSQTSSSTGGGCAAQRWAQCGGIGFSGCTTCVSGTTCNKQNDWYSQCL

SEQ ID NO: 46829 - protein, 294 aa, Staphylotrichum coccosporum
ADGVSTRYWDCCKPSCSWPGKASVNQPVFACSANFQRISDPNVKSGCDGGTAYACADQTPWAVNDNFSYGFAATSISGGNEASWCCGCYELTFTSGPGAGKTMVVQSTSTGGDLGTNHFDLAMPGGGVGIFDGCTPQFGGLAGDRYGGVSSRSECDSFPAALKPGCYWRFWFKNADNPTFTFRQVQCPSELVARTGCRRNDDGNFPVFTPPSGGQSSSSSSSSSAKPTSTSASTTSTKATSTTSTASSQTSSSTGGGCAAQRWAQCGGIGFSGCTTCVSGTTCNKQNDWYSQCL

SEQ ID NO: 46830 - protein, 208 aa, Melanocarpus albomyces
NGQSTRYWDCCKPSCGWAGKAPVNQPVYSCDANFQRIHDFDAVSGCEGGPAFSCADHSPWAINDNLSYGFAATALSGQTEESWCCACYALTFTSGPVAGKTMVVQSTSTGGDLGSNHFDLAIPGGGVGLFDGCTPQFGGLPGARYGGISSRQECDSFPEPLKPGCQWRFDWFQNADNPSFTFERVQCPEELVARTGCRRHDDGGFAVF

SEQ ID NO: 46831 - protein, 232 aa, Staphylotrichum coccosporum
GKSTRYWDCCKPSCSWPGKASVNQPVFACSANFQRISDPNVKSGCDGGSAYACADQTPWAVNDNFSYGFAATSISGGNEASWCCGCYELTFTSGPVAGKTMVVQSTSTGGDLGTNHFDLAMPGGGVGIFDGCSPQFGGIAGDRYGGVSSRSQCDSFPAALKPGCYWRFDWFKNADNPTFTFRQVQCPSELVARTGCRRNDDGNFPVFTPPSGGQSSSSSSSSSAKPTSTSTS

SEQ ID NO: 46832 - protein, 286 aa, Humicola hyalothermophila
MRSSPILRKAVAAALPLGAYAASGNGQSTRYWDCCKPSCAWPEKAAVSQPVYACDANFQRISDPLVSSGCDGGQAFSCADHSPWALNDNLSYGFAATALAGGTEASWCCACYALTFTSGPVAGKTMVVQSTSTGGDLGNNHFDLNIPGGGVGLFDGCTPQFGGLPGAQYGGISSRSECDSFPEPLKAGCYWRFDWFQNADNPSFTFEQVQCPDELVARTGCRRNDDGNFPVFTPPAGGNDGEQPGNPGDCVAQKWEQCGGSGFSGCTTCASGSTCQVVNEWYSQCV

SEQ ID NO: 46833 - protein, 212 aa, Melanocarpus albomyces
NGQSTRYWDCCKPSCGWAGKAPVNQPVYSCDANFQRIHDFDAVSGCEGGPAFSCADHSPWAINDNLSYGFAATSLSGQTEESWCCACYALTFTSGPVAGKTMVVQSTSTGGDLGSNHFDLAIPGGGVGLFDGCTPQFGGLPGARYGGISSRQECDSFPEPLKPGCQWRFDWFQNADNPSFTFERVQCPEELVARTGCRRHDDGGFAVFKAPS

SEQ ID NO: 46834 - protein, 207 aa, Melanocarpus albomyces
NGQSTRYWDCCKPSCGWAGKAPVNQPVYSCDANFQRIHDFDAVSGCEGGPAFSCADHSPWAINDNLSYGFAATALSGQTEESWCCACYALTFTSGPVAGKTMVVQSTSTGGDLGSNHFDLAIPGGGVGLFDGCTPQFGGLPGARYGGISSRQECDSFPEPLKPGCQWRFDWFQNADNPSFTFERVQCPEELVARTGCRRHDDGGFAV

SEQ ID NO: 46835 - protein, 271 aa, Synthetic construct
ASGSGTSTRYWDCCKPSCSWSGKASVNRPVLACDANNNPLSDASVKSGCDGGSAYTCANNSPWAVNDQLSYGFAATKLSGGTESSWCCACYALTFTSGPVAGKTMVVQSTSTGGDLGSNQFDINMPGGGVGLFDGCTRQFGGLPGAQYGGISSRSQCDSFPAALKPGCQWRFDWFQNADNPNFTFKQVQCPSELTSRTGCKRNDDSQFPVFTPPSGGGSNPSTPTTPPSSGGGSGCTADKYAQCGGSGWSGCTNCPSGSTCKTINDYYHQC

SEQ ID NO: 46836 - protein, 271 aa, Neurospora crassa
ASGSGQSTRYWDCCKPSCSWSGKAPVNRPVLACDANNNPLSDASVKSGCDGGSAYTCANNSPWAVNDQLSYGFAATKLSGGTESSWCCACYALTFTSGPVAGKTLVVQSTSTGGDLGSNHFDINMPGGGVGLFDGCKRQFGGLPGAQYGGISSRSECDSFPAALKPGCQWRFDWFQNADNPNFTFKQVQCPSELTSRTGCKRNDDSQFPVFTPPSGGGSNPSTPTTPPSSGGGSGCTADKYAQCGGSGWSGCTNCPSGSTCKTINDYYHQC

SEQ ID NO: 46837 - protein, 271 aa, Synthetic construct
ASGSGQSTRYWDCCKPSCSWSGKASVNRPVLACDANNNPLSDASVKSGCDGGSAYTCANNSPWAVNDQLSYGFAATKLSGGTESSWCCACYALTFTSGPVAGKTMVVQSTNTGGDLGSNHFDINMPGGGVGLFDGCTRQFGGLPGAQYGGISSRSQCDSFPAALKPGCQWRFDWFQNASNPNFTFKQVQCPSELTSRTGCKRNDDSQFPVFTPPSGGGSNPSTPTTPPSSGGGSGCTADKYAQCGGSGWSGCTNCPSGSTCKTINDYYHQC

SEQ ID NO: 46838 - protein, 271 aa, Neurospora crassa
ASGSGQSTRYWDCCKPSCSWSGKAPVNRPVLACDANNNPLSDASVKSGCDGGSAYTCANNSPWAVNDQLSYGFAATKLSGGTESSWCCACYALTFTSGPVAGKTLVVQSTSTGTDLGSNHFDINMPGGGVGLFDGCKRQFGGLPGAQYGGISSRSQCDSFPAALKPGCQWRFDWFQNADNPNFTFKQVQCPSELTSRTGCKRNDDSQFPVFTPPSGGGSNPSTPTTPPSSGGGSGCTADKYAQCGGSGWSGCTNCPSGSTCKTINDYYHQC

SEQ ID NO: 46839 - protein, 271 aa, Synthetic construct
ASGSGTSTRYWDCCKPSCSWSGKASVNRPVLACDANNNPLSDASVKSGCDGGSAYTCANNSPWAVNDQLSYGFAATKLSGGTESSWCCACYALTFTSGPVAGKTMVVQSTSTGGDLGSNQFDINMPGGGVGLFDGCTRQFGGLPGAQYGGISSRSQCDSFPAALKPGCQWRFDWFQNADNPNFTFKQVQCPSELTSRTGCKRNDDSQFPVFTPPSGGGTNPSTPTTPPSSGGGSGCTADKYAQCGGSGWSGCTNCPSGSTCKTINDYYHQC

SEQ ID NO: 46840 - protein, 271 aa, Synthetic construct
ASGSGQSTRYWDCCKPSCSWSGKASVNRPVLACDANNNPLSDASVKSGCDGGSAYTCANNSPWAVNDQLSYGFAATKLSGGTESSWCCACYALTFTSGPVAGKTMVVQSTSTGGDLGSNQFDINMPGGGLGLFDGCTRQFGGLPGAQYGGISSRSQCDSFPAALKPGCQWRFDWFQNADNPNFTFKQVQCPSELTSRTGCKRNDDSQFPVFTPPSGGGSNPSTPTTPPSSGGGSGCTADKYAQCGGSGWSGCTNCPSGSTCKTINDYYHQC

SEQ ID NO: 46841 - protein, 271 aa, Synthetic construct
ASGSGTSTRYWDCCKPSCSWSGKASVNRPVLACDANNNPLSDASVKSGCDGGSAYTCANNSPWAVNDQLSYGFAATKLSGGTESSWCCACYALTFTSGPVAGKTMVVQSTSTGGDLGSNHFDINMPGGGVGLFDGCTRQFGGLPGARYGGISSRSQCDSFPAALKPGCQWRFDWFQNADNPNFTFKQVQCPSELTSRTGCKRNDDSQFPVFTPPSGGGTNPSTPTTPPSSGGGSGCTADKYAQCGGSGWSGCTNCPSGSTCKTINDYYHQC

SEQ ID NO: 46842 - protein, 271 aa, Synthetic construct
ASGSGQSTRYWDCCKPSCSWSGKASVNRPVLACDANNNPLSDASVKSGCDGGSAYTCANNSPWAVNDQLSYGFAATKLSGGTESSWCCACYALTFTSGPVAGKTMVVQSTNTGGDLGSNHFDINMPGGGVGLFDGCTRQFGGLPGARYGGISSRSQCDSFPAALKPGCQWRFDWFQNADNPNFTFKQVQCPSELTSRTGCKRNDDSQFPVFTPPSGGGSNPSTPTTPPSSGGGSGCTADKYAQCGGSGWSGCTNCPSGSTCKTINDYYHQC

SEQ ID NO: 46843 - protein, 271 aa, Synthetic construct
ASGSGTSTRYWDCCKPSCSWSGKASVNRPVLACDANNNPLSDASVKSGCDGGSAYTCANNSPWAVNDQLSYGFAATKLSGGTESSWCCACYALTFTSGPVAGKTMVVQSTSTGGDLGSNHFDINMPGGGVGLFDGCTRQFGGLPGARYGGISSRSQCDSFPAALKPGCQWRFDWFQNADNPNFTFKQVQCPSELTSRTGCKRNDDSQFPVFTPPSGGGSNPSTPTTPPSSGGGSGCTADKYAQCGGSGWSGCTNCPSGSTCKTINDYYHQC

SEQ ID NO: 46844 - protein, 271 aa, Synthetic construct
ASGSGTSTRYWDCCKPSCSWSGKASVNRPVLACDANNNPLSDASVKSGCDGGSAYTCANNSPWAVNDQLSYGFAATKLSGGTESSWCCACYALTFTSGPVAGKTMVVQSTSTGGDLGSNHFDINMPGGGVGLFDGCTRQFGGLPGAQYGGISSRSQCDSFPAALKPGCQWRFDWFQNASNPNFTFKQVQCPSELTSRTGCKRNDDSQFPVFTPPSGGGSNPSTPTTPPSSGGGSGCTADKYAQCGGSGWSGCTNCPSGSTCKTINDYYHQC

SEQ ID NO: 46845 - protein, 271 aa, Synthetic construct
ASGSGQSTRYWDCCKPSCSWSGKASVNRPVLACDANNNPLSDASVKSGCDGGSAYTCANNSPWAVNDQLSYGFAATKLSGGTESSWCCACYALTFTSGPVAGKTMVVQSTSTGGDLGSNHFDINMPGGGVGLFDGCTRQFGGLPGARYGGISSRSQCDSFPAALKPGCQWRFDWFQNASNPNFTFKQVQCPSELTSRTGCKRNDDSQFPVFTPPSGGGTNPSTPTTPPSSGGGSGCTADKYAQCGGSGWSGCTNCPSGSTCKTINDYYHQC

SEQ ID NO: 46846 - protein, 271 aa, Synthetic construct
ASGSGQSTRYWDCCKPSCSWSGKASVNRPVLACDANNNPLSDASVKSGCDGGSAYTCANNSPWAVNDQLSYGFAATKLSGGTESSWCCACYALTFTSGPVAGKTMVVQSTSTGGDLGSNHFDINMPGGGFGLFDGCTRQFGGLPGAQYGGISSRSQCDSFPAALKPGCQWRFDWFQNASNPNFTFKQVQCPSELTSRTGCKRNDDSQFPVFTPPSGGGSNPSTPTTPPSSGGGSGCTADKYAQCGGSGWSGCTNCPSGSTCKTINDYYHQC

SEQ ID NO: 46847 - protein, 271 aa, Synthetic construct
ASGSGQSTRYWDCCKPSCSWSGKASVNRPVLACDANNNPLSDASVKSGCDGGSAYTCANNSPWAVNDQLSYGFAATKLSGGTESSWCCACYALTFTSGPVAGKTMVVQSTSTGGDLGSNQFDINMPGGGVGLFDGCTRQFGGLPGAQYGGISSRSQCDSFPAALKPGCQWRFDWFQNASNPNFTFKQVQCPSELTSRTGCKRNDDSQFPVFTPPSGGGTNPSTPTTPPSSGGGSGCTADKYAQCGGSGWSGCTNCPSGSTCKTINDYYHQC

SEQ ID NO: 46848 - protein, 271 aa, Synthetic construct
ASGSGQSTRYWDCCKPSCSWSGKASVNRPVLACDANNNPLSDASVKSGCDGGSAYTCANNSPWAVNDQLSYGFAATKLSGGTESSWCCACYALTFTSGPVAGKTMVVQSTSTGGDLGSNQFDINMPGGGVGLFDGCTRQFGGLPGAQYGGISSRSQCDSFPAALKPGCQWRFDWFQNASNPNFTFKQVQCPSELTSRTGCKRNDDSQFPVFTPPSGGGSNPSTPTTPPSSGGGSGCTADKYAQCGGSGWSGCTNCPSGSTCKTINDYYHQC

SEQ ID NO: 46849 - protein, 271 aa, Synthetic construct
ASGSGTSTRYWDCCKPSCSWSGKASVNRPVLACDANNNPLSDASVKSGCDGGSAYTCANNSPWAVNDQLSYGFAATKLSGGTESSWCCACYALTFTSGPVAGKTMVVQSTNTGGDLGSNHFDINMPGGGVGLFDGCTRQFGGLPGAQYGGISSRSQCDSFPAALKPGCQWRFDWFQNADNPNFTFKQVQCPSELTSRTGCKRNDDSQFPVFTPPSGGGSNPSTPTTPPSSGGGSGCTADKYAQCGGSGWSGCTNCPSGSTCKTINDYYHQC

SEQ ID NO: 46850 - protein, 271 aa, Synthetic construct
ASGSGQSTRYWDCCKPSCSWSGKASVNRPVLACDANNNPLSDASVKSGCDGGSAYTCANNSPWAVNDQLSYGFAATKLSGGTESSWCCACYALTFTSGPVAGKTMVVQSTSTGGDLGSNQFDINMPGGGFGLFDGCTRQFGGLPGAQYGGISSRSQCDSFPAALKPGCQWRFDWFQNADNPNFTFKQVQCPSELTSRTGCKRNDDSQFPVFTPPSGGGSNPSTPTTPPSSGGGSGCTADKYAQCGGSGWSGCTNCPSGSTCKTINDYYHQC

SEQ ID NO: 46851 - protein, 271 aa, Synthetic construct
ASGSGQSTRYWDCCKPSCSWSGKASVNRPVLACDANNNPLSDASVKSGCDGGSAYTCANNSPWAVNDQLSYGFAATKLSGGTESSWCCACYALTFTSGPVAGKTMVVQSTNTGGDLGSNQFDINMPGGGVGLFDGCTRQFGGLPGAQYGGISSRSQCDSFPAALKPGCQWRFDWFQNADNPNFTFKQVQCPSELTSRTGCKRNDDSQFPVFTPPSGGGTNPSTPTTPPSSGGGSGCTADKYAQCGGSGWSGCTNCPSGSTCKTINDYYHQC

SEQ ID NO: 46852 - protein, 271 aa, Synthetic construct
ASGSGQSTRYWDCCKPSCSWSGKASVNRPVLACDANNNPLSDASVKSGCDGGSAYTCANNSPWAVNDQLSYGFAATKLSGGTESSWCCACYALTFTSGPVAGKTMVVQSTNTGGDLGSNHFDINMPGGGVGLFDGCTRQFGGLPGARYGGISSRSQCDSFPAALKPGCQWRFDWFQNADNPNFTFKQVQCPSELTSRTGCKRNDDSQFPVFTPPSGGGTNPSTPTTPPSSGGGSGCTADKYAQCGGSGWSGCTNCPSGSTCKTINDYYHQC

SEQ ID NO: 46853 - protein, 271 aa, Synthetic construct
ASGSGQSTRYWDCCKPSCSWSGKASVNRPVLACDANNNPLSDASVKSGCDGGSAYTCANNSPWAVNDQLSYGFAATKLSGGTESSWCCACYALTFTSGPVAGKTMVVQSTSTGGDLGSNQFDINMPGGGVGLFDGCTRQFGGLPGARYGGISSRSQCDSFPAALKPGCQWRFDWFQNADNPNFTFKQVQCPSELTSRTGCKRNDDSQFPVFTPPSGGGSNPSTPTTPPSSGGGSGCTADKYAQCGGSGWSGCTNCPSGSTCKTINDYYHQC

SEQ ID NO: 46854 - protein, 271 aa, Synthetic construct
ASGSGQSTRYWDCCKPSCSWSGKASVNRPVLACDANNNPLSDASVKSGCDGGSAYTCANNSPWAVNDQLSYGFAATKLSGGTESSWCCACYALTFTSGPVAGKTMVVQSTNTGGDLGSNQFDINMPGGGVGLFDGCTRQFGGLPGAQYGGISSRSQCDSFPAALKPGCQWRFDWFQNADNPNFTFKQVQCPSELTSRTGCKRNDDSQFPVFTPPSGGGSNPSTPTTPPSSGGGSGCTADKYAQCGGSGWSGCTNCPSGSTCKTINDYYHQC

SEQ ID NO: 46855 - protein, 271 aa, Synthetic construct
ASGSGTSTRYWDCCKPSCSWSGKASVNRPVLACDANNNPLSDASVKSGCDGGSAYTCANNSPWAVNDQLSYGFAATKLSGGTESSWCCACYALTFTSGPVAGKTMVVQSTNTGGDLGSNHFDINMPGGGVGLFDGCTRQFGGLPGAQYGGISSRSQCDSFPAALKPGCQWRFDWFQNADNPNFTFKQVQCPSELTSRTGCKRNDDSQFPVFTPPSGGGTNPSTPTTPPSSGGGSGCTADKYAQCGGSGWSGCTNCPSGSTCKTINDYYHQC

SEQ ID NO: 46856 - protein, 271 aa, Synthetic construct
ASGSGQSTRYWDCCKPSCSWSGKASVNRPVLACDANNNPLSDASVKSGCDGGSAYTCANNSPWAVNDQLSYGFAATKLSGGTESSWCCACYALTFTSGPVAGKTMVVQSTSTGGDLGSNHFDINMPGGGVGLFDGCTRQFGGLPGARYGGISSRSQCDSFPAALKPGCQWRFDWFQNASNPNFTFKQVQCPSELTSRTGCKRNDDSQFPVFTPPSGGGSNPSTPTTPPSSGGGSGCTADKYAQCGGSGWSGCTNCPSGSTCKTINDYYHQC

SEQ ID NO: 46857 - protein, 202 aa, Melanocarpus albomyces
NGQSTRYWDCCKPSCGWRGKGPVNQPVYSCDANFQRIHDFDAVSGCEGGPAFSCADHSPWAINDNLSYGFAATALSGQTEESWCCACYALTFTSGPVAGKTMVVQSTSTGGDLGSNHFDLNIPGGGVGLFDGCTPQFGGLPGARYGGISSRQECDSFPEPLKPGCQWRFDWFQNADNPSFTFERVQCPEELVARTGCRRHDD

SEQ ID NO: 46858 - protein, 234 aa, Melanocarpus albomyces
MRSTPVLRALLAAALPLGALAANGQSTRYWDCCKPSCGWAGKAPVNQPVYSCDANFQRIHDFDAVSGCEGGPAFSCADHSPWAINDNLSYGFAATALSGQTEESWCCACYALTFTSGPVAGKTMVVQSTSTGGDLGSNHFDLAIPGGGVGLFDGCTPQFGGLPGARYGGISSRQECDSFPEPLKPGCQWRFDWFQNADNPSFTFERVQCPEELVARTGCRRHDDGGFAVFKAPS

SEQ ID NO: 46859 - protein, 211 aa, Melanocarpus albomyces
GQSTRYWDCCKPSCGWAGKAPVNQPVYSCDANFQRIHDFDAVSGCEGGPAFSCADHSPWAINDNLSYGFAATALSGQTEESWCCACYALTFTSGPVAGKTMVVQSTSTGGDLGSNHFDLAIPGGGVGLFDGCTPQFGGLPGARYGGISSRQECDSFPEPLKPGCQWRFDWFQNADNPSFTFERVQCPEELVARTGCRRHDDGGFAVFKAPS

SEQ ID NO: 46860 - protein, 294 aa, Staphylotrichum coccosporum
ADGKSTRYWDCCKPSCSWPGKALVNQPVFACSANFQRISDPNVKSGCDGGSAYACADQTPWAVNDNFSYGFAATSISGGNEASWCCGCYELTFTSGPVAGKTMVVQSTSTGGDLGTNHFDLAMPGGGVGIFDGCSPQFGGLPGDRYGGVSSRSQCDSFPAALKPGCYWRFDWFKNADNPTFTFRQVQCPSELVARTGCRRNEDGNFPVFTPPSGGQSSSSSSSSSAKPTSTTSTTSTKATSTTSTASSQTSSSTGGGCAAQRWAQCGGIGFSGCTTCVSGTTCNKQNDWYSQCL

SEQ ID NO: 46861 - protein, 294 aa, Staphylotrichum coccosporum
ADGVSTRYWDCCKPSCSWPGKASVNQPVFACSANFQRISDPNVKSGCDGGSAYACADQTPWAVNDNFSYGFAATSIKGGNEASWCCGCYALTFTSGPVAGKTMVVQSTSTGGDLGTNHFDLAMPGGGVGIFDGCSPQFGGLPGDRYGGVSSRSQCDDFPAALKPGCYWRFDWFKNADNPTFTFRQVQCPSELVARTGCRRNDDGNFPVFTPPSGQGSSSSSSSSAKPTSTSASTTSDKATSTTSTASSQTSSSTGGGCAAQRWAQCGGIGFSGCTTCVSGTTCNKQNDWYSQCL

SEQ ID NO: 46862 - protein, 295 aa, Staphylotrichum coccosporum
ADGVSTRYWDCCKPSCSWPGKASVNQPVFACSANFQRISDPNVKSGCDGGSAYACADQTPWAVNDNFSYGFAATSIKGGNEASWCCGCYALTFTSGPVAGKTMVVQSTSTGGDLGTNHFDLAMPGGGVGIFDGCSPQFGGLPGDRYGGVSSRSQCDDFPAALKPGCYWRFDWFKNADNPTFTFRQVQCPSELVARTGCRRNDDGNFPVFTPPSGGQGSSSSSSSSAKPTSTSASTTSDKATSTTSTASSQTSSSTGGGCAAQRWAQCGGIGFSGCTTCVSGTTCNKQNDWYSQCL

SEQ ID NO: 46863 - protein, 255 aa, Chaetomium olivicolor
MRSTPVLRTALAAALPLAALAADGKSTRYWDCCKPSCSWPGKALVSQPVYACNAQFQRISDPNAKSGCDGGSAFSCADQTPWALNDDFSYGFAATSIAGGSEASWCCACYELTFTSGPVAGKKMVVQSTSTGGDLGSNHFDLNMPGGGVGIFDGCSPQFGGLPGARYGGVSSRSECDSFPAALKPGCYWRFDWFKNADNPNFTFRQVQCPAELVARTGCRRSDDGNFPVFTPPGGSTQPSSSSSSSSSSSSSSSS

SEQ ID NO: 46864 - protein, 214 aa, Melanocarpus albomyces
ANGQSTRYWDCCKPSCGWAGKGPVNQPVYSCDANFQRIHDFDAVSGCEGGPAFSCADHSPWAINDNLSYGFAATALSGQTEESWCCACYALTFTSGPVAGKTMVVQSTSTGGDLGSNHFDLNIPGGGVGLFDGCTPQFGGLPGARYGGISSRQECDSFPEPLKPGCQWRFDWFQNADNPSFTFERVQCPEELVARTGCRRHDDGGYAVFKAPSA

SEQ ID NO: 46865 - protein, 214 aa, Melanocarpus albomyces
ANGQSTRYWDCCKPSCGWAGKAPVNQPVYSCDANFQRIHDFDAVSGCEGGPAFTCADHSPWAINDNLSYGFAATALSGQTEESWCCACYALTFTSGPVAGKTMVVQSTSTGGDLGSNHFDLAIPGGGVGLFDGCTPQFGGLPGARYGGISSRQECDSFPEPLKPGCQWRFDWFQNADNPSFTFERVQCPEELVARTGCRRHDDGGFAVFKAPSA

SEQ ID NO: 46866 - protein, 214 aa, Melanocarpus albomyces
ANGQSTRYWDCCKPSCGWAGKGPVNQPVYSCDANFQRIHDFDARSGCDGGPAFSCADHSPWAINDNLSYGFAATALSGQTEESWCCACYALTFTSGPVAGKTMVVQSTSTGGDLGSNHFDLNIPGGGVGLFDGCTPQFGGLPGARYGGISSRQECDSFPEPLKPGCQWRFDWFQNADNPSFTFERVQCPEELVARTGCRRHDDGGFAVFKAPSA

SEQ ID NO: 46867 - protein, 214 aa, Melanocarpus albomyces
ANGQSTRYWDCCKPSCGWAGKGPVNQPVYSCDANFQRIHDFDAVSGCEGGPAFSCADHSPWAINDNLSYGFAATALSGQTEESWCCACYALTFTSGPVAGKTMVVQSTSTGGDLGSNHFDLNIPGGGVGLFDGCTSQFGGLPGARYGGISSRQECDSFPEPLKPGCQWRFDWFQNADNPSFTFERVQCPEELVARTGCRRHDDGGFAVFKAPSA

SEQ ID NO: 46868 - protein, 214 aa, Melanocarpus albomyces
ANGQSTRYWDCCKPSCGWAGKGPVNQPVYSCDANFQRIHDFDAVSGCEGGPAFSCADHSPWAINDNLSYGFAATALSGQTEESWCCACYALTFTSGPVAGKTMVVQSTSTGGDLGSNHFDLNIPGGGVGLFDGCTPQFGGLPGARYGGISSRQECDSFPEPLKPGCQWRFDWFQNAQNPSFTFERVQCPEELVARTGCRRHDDGGFAVFKAPSA

SEQ ID NO: 46869 - protein, 214 aa, Melanocarpus albomyces
ANGQSTRYWDCCKPSCGWAGKGPVNQPVYSCDANFQRIHDFDAVSGCEGGPAFSCADHSPWSINDNLSYGFAATALSGQTEESWCCACYALTFTSGPVAGKTMVVQSTSTGGDLGSNHFDLNIPGGGVGLFDGCTPQFGGLPGARYGGISSRQECDSFPEPLKPGCQWRFDWFQNADNPSFTFERVQCPEELVARTGCRRHDDGGFAVFKAPSA

SEQ ID NO: 46870 - protein, 214 aa, Melanocarpus albomyces
ANGQSTRYWDCCKPSCGWAGKGPVNQPVYSCDANFQRIHDFDAVSGCEGGPAFSCADHSPWAINDNLSYGFAATALSGQTEESWCCACYALTFTSGPVAGKTMVVQSTSTGGDLGSNHFDLIIPGGGVGLFDGCTPQFGGLPGARYGGISSRQECDSFPEPLKPGCQWRFDWFQNADNPSFTFERVQCPEELVARTGCRRHDDGGFAVFKAPSA

SEQ ID NO: 46871 - protein, 214 aa, Melanocarpus albomyces
ANGQSTRYWDCCKPSCGWAGKGPVNQPVYSCDANFQRIHDFDAVSGCEGGPAFSCADHSPWAINDNLSYGFAATALSGQTEESWCCACYALIFTSGPVAGKTMVVQSTSTGGDLGSNHFDLNIPGGGVGLFDGCTPQFGGLPGARYGGISSRQECDSFPEPLKPGCQWRFDWFQNADNPSFTFERVQCPEELVARTGCRRHDDGGFAVFKAPSA

SEQ ID NO: 46872 - protein, 214 aa, Melanocarpus albomyces
ANGQSTRYWDCCKPSCGWAGKGPVNQPVYSCDRNFQRIHDFDAVSGCEGGPAFSCADHSPWAINDNLSYGFAATALSGQTEESWCCACYALTFTSGPVAGKTMVVQSTSTGGDLGSNHFDLNIPGGGVGLFDGCTPQFGGLPGARYGGISSRQECDSFPEPLKPGCQWRFDWFQNADNPSFTFERVQCPEELVARTGCRRHDDGGFAVFKAPSA

SEQ ID NO: 46873 - protein, 214 aa, Melanocarpus albomyces
ANGQSTRYWDCCKPSCGWAGKAPVNQPVYSCDANFQRIHDFDAVSGCEGGPAFSCADHSPWAINDNLSYGFAATALSGQTEESWCCACYALTFTSGPVAGKTMVVQSTSTGGDLGSNHFDLAIPGGGVGLFDGCTPQFGGLPGARYGGISSRQECDSFPEPLKPGCQWRFDWFRNAENPSFTFERVQCPEELVARTGCRRHDDGGFAVFKAPSA

SEQ ID NO: 46874 - protein, 214 aa, Melanocarpus albomyces
ANGQSTRYWDCCKPSCGWAGKGPVNQPVYSCDANFQRIHDFDAVSGCEGGPAFSCADHSPWAINDNLSYGFAATALSGQTEESWCCACYALTFTSGPVAGKTMVVQSTSTGGDLGSNHFDLNIPGGGVGLFDGCTPQFGGLPGARYGGISSRQECDSFPEPLKPGCQWRFDWFQNADNPSFTFERVQCPEELVSRTGCRRHDDGGFAVFKAPSA

SEQ ID NO: 46875 - protein, 214 aa, Melanocarpus albomyces
ANGQSTRYWDCCKPSCGWAGKGPVNQPVYSCDANFQRIHDFDALSGCIGGPAFSCADHSPWAINDNLSYGFAATALSGQTEESWCCACYALTFTSGPVAGKTMVVQSTSTGGDLGSNHFDLNIPGGGVGLFDGCTPQFGGLPGARYGGISSRQECDSFPEPLKPGCQWRFDWFQNADNPSFTFERVQCPEELVARTGCRRHDDGGFAVFKAPSA

SEQ ID NO: 46876 - protein, 214 aa, Melanocarpus albomyces
ANGQSTRYWDCCKPSCGWAGKGPVNQPVYSCDANFQRIHDFDAVSGCEGGPAFSCADHSPWAINDNLSYGFAATALSGQTEESWCCACYALTFTSGPVAGKTMVVQSTSTGGDLGSNHFDLNIPGGGVGLFDGCTPQFGGLPGARYGGISSRQECDSFPEPLKPGCQWRFDWFQDADNPSFTFERVQCPEELVARTGCRRHDDGGFAVFKAPSA

SEQ ID NO: 46877 - protein, 214 aa, Melanocarpus albomyces
ANGQSTRYWDCCKPSCGWAGKGPVNQPVYSCDANMQRIHDFDAVSGCEGGPAFSCADHSPWAINDNLSYGFAATALSGQTEESWCCACYALTFTSGPVAGKTMVVQSTSTGGDLGSNHFDLNIPGGGVGLFDGCTPQFGGLPGARYGGISSRQECDSFPEPLKPGCQWRFDWFQNADNPSFTFERVQCPEELVARTGCRRHDDGGFAVFKAPSA

SEQ ID NO: 46878 - protein, 214 aa, Melanocarpus albomyces
ANGQSTRYWDCCKPSCGWRGKGPVNQPVYSCDANFQRIHDFDAVSGCEGGPAFSCADHSPWAINDNLSYGFAATALSGQTEESWCCACYALTFTSGPVAGKTMVVQSTSTGGDLGSNHFDLNIPGGGVGLFDGCTPQFGGLPGARYGGISSRQECDSFPEPLKPGCQWRFDWFQNADNPSFTFERVQCPEELVARTGCRRHDDGGFAVFKAPSA

SEQ ID NO: 46879 - protein, 214 aa, Melanocarpus albomyces
ANGQSTRYWDCCKPSCGWAGKGPVNQPVYLCDANFQRIHDFDAVSGCEGGPAFSCADHSPWAINDNLSYGFAATALSGQTEESWCCACYALTFTSGPVAGKTMVVQSTSTGGDLGSNHFDLNIPGGGVGLFDGCTPQFGGLPGARYGGISSRQECDSFPEPLKPGCQWRFDWFQNADNPSFTFERVQCPEELVARTGCRRHDDGGFAVFKAPSA

SEQ ID NO: 46880 - protein, 214 aa, Melanocarpus albomyces
ANGQSTRYWDCCKPSCGWAGKGPVNQPVYSCDANFHRIHDFDAVSGCEGGPAFSCADHSPWAINDNLSYGFAATALSGQTEESWCCACYALTFTSGPVAGKTMVVQSTSTGGDLGSNHFDLNIPGGGVGLFDGCTPQFGGLPGARYGGISSRQECDSFPEPLKPGCQWRFDWFQNADNPSFTFERVQCPEELVARTGCRRHDDGGFAVFKAPSA

SEQ ID NO: 46881 - protein, 214 aa, Melanocarpus albomyces
ANGQSTRYWDCCKPSCGWAGKGPVNQPVYSCDANFQRIHDFDAVSGCEGGPAFSCADHSPWAINDNLSYGFAATALSGQTEESWCCACYALTFTSGPVAGKTMVVQSTSTGGDLGSNHFDLVIPGGGVGLFDGCTPQFGGLPGARYGGISSRQECDSFPEPLKPGCQWRFDWFQNADNPSFTFERVQCPEELVARTGCRRHDDGGFAVFKAPSA

SEQ ID NO: 46882 - protein, 214 aa, Melanocarpus albomyces
ANGQSTRYWDCCKPSCGWAGKAPVNQPVYSCDANMQRIHDFDAVSGCEGGPAFSCADHSPWAINDNLSYGFAATALSGQTEESWCCACYALTFTSGPVAGKTMVVQSTSTGGDLGSNHFDLAIPGGGVGLFDGCTPQFGGLPGARYGGISSRQECDSFPEPLKPGCQWRFDWFQNADNPSFTFERVQCPEELVARTGCRRHDDGGFAVFKAPSA

SEQ ID NO: 46883 - protein, 214 aa, Melanocarpus albomyces
ANGQSTRYWDCCKPSCGWAGKGPVNQPVYPCDANFQRIHDFDAVSGCEGGPAFSCADHSPWAINDNLSYGFAATALSGQTEESWCCACYALTFTSGPVAGKTMVVQSTSTGGDLGSNHFDLNIPGGGVGLFDGCTPQFGGLPGARYGGISSRQECDSFPEPLKPGCQWRFDWFQNADNPSFTFERVQCPEELVARTGCRRHDDGGFAVFKAPSA

SEQ ID NO: 46884 - protein, 214 aa, Melanocarpus albomyces
ANGQSTRYWDCCKPSCGWAGQGPVNQPVYSCDANFQRIHDFDAVSGCEGGPAFSCADHSPWAINDNLSYGFAATALSGQTEESWCCACYALTFTSGPVAGKTMVVQSTSTGGDLGSNHFDLNIPGGGVGLFDGCTPQFGGLPGARYGGISSRQECDSFPEPLKPGCQWRFDWFQNADNPSFTFERVQCPEELVARTGCRRHDDGGFAVFKAPSA

SEQ ID NO: 46885 - protein, 214 aa, Melanocarpus albomyces
ANGQSTRYWDCCKPSCGWAGKGPVNQPVYSCDANFQRIHDFDAVSGCEGGPAFSCADHSPWAINDNLSYGFAATALSGQTEESWCCACYALTFTSGPVAGKTMVVQSTSTGGDLGSNHFDLNIPGGGVGLFDGCTPQFGGLPGARYGGISSRQECSSFPEPLKPGCQWRFDWFQNADNPSFTFERVQCPEELVARTGCRRHDDGGFAVFKAPSA

SEQ ID NO: 46886 - protein, 214 aa, Melanocarpus albomyces
ANGQSTRYWDCCKPSCGWAGKGPVNQPVYSCDANFRRIHDFDAVSGCEGGPAFSCADHSPWAINDNLSYGFAATALSGQTEESWCCACYALTFTSGPVAGKTMVVQSTSTGGDLGSNHFDLNIPGGGVGLFDGCTPQFGGLPGARYGGISSRQECDSFPEPLKPGCQWRFDWFQNADNPSFTFERVQCPEELVARTGCRRHDDGGFAVFKAPSA

SEQ ID NO: 46887 - protein, 214 aa, Melanocarpus albomyces
ANGQSTRYWDCCKPSCGWAGKGPVNQPVYSCDLNFQRIHDFDAVSGCEGGPAFSCADHSPWAINDNLSYGFAATALSGQTEESWCCACYALTFTSGPVAGKTMVVQSTSTGGDLGSNHFDLNIPGGGVGLFDGCTPQFGGLPGARYGGISSRQECDSFPEPLKPGCQWRFDWFQNADNPSFTFERVQCPEELVARTGCRRHDDGGFAVFKAPSA

SEQ ID NO: 46888 - protein, 214 aa, Melanocarpus albomyces
ANGQSTRYWDCCKPSCGWAGKGPVNQPVYSCDANFQRIHDFDAVSGCEGGPATSCADHSPWAINDNLSYGFAATALSGQTEESWCCACYALTFTSGPVAGKTMVVQSTSTGGDLGSNHFDLNIPGGGVGLFDGCTSQFGGLPGARYGGISSRQECDSFPEPLKPGCQWRFDWFQNADNPSFTFERVQCPEELVARTGCRRHDDGGFAVFKAPSA

SEQ ID NO: 46889 - protein, 214 aa, Melanocarpus albomyces
ANGQSTRYWDCCKPSCGWAGKAPVNQPVYSCDANFQRIHDFDAVSGCEGGPAFACADHSPWAINDNLSYGFAATALSGQTEESWCCACYALTFTSGPVAGKTMVVQSTSTGGDLGSNHFDLAIPGGGVGLFDGCTPQFGGLPGARYGGISSRQECDSFPEPLKPGCQWRFDWFQNADNPSFTFERVQCPEELVARTGCRRHDDGGFAVFKAPSA

SEQ ID NO: 46890 - protein, 214 aa, Melanocarpus albomyces
ANGQSTRYWDCCKPSCGWAGKAPVNQPVYSCDANFQRIHDFDAVSGCEGGPAFLCADHSPWAINDNLSYGFAATALSGQTEESWCCACYALTFTSGPVAGKTMVVQSTSTGGDLGSNHFDLAIPGGGVGLFDGCTPQFGGLPGARYGGISSRQECDSFPEPLKPGCQWRFDWFQNADNPSFTFERVQCPEELVARTGCRRHDDGGFAVFKAPSA

SEQ ID NO: 46891 - protein, 214 aa, Melanocarpus albomyces
ANGQSTRYWDCCKPSCGWAGKGPVNQPVYSCDANFQRIHDFDAVSGCEGGPAFSCADHSPWAINDNLSYGFAATALSGQTEESWCCACYALTFTSGPVAGKTMVVQSTSTGGDLGSNHFDLNIPGGGVGLFDGCTPQFGGLPGARYGGISSRQECDSFPEPLKPGCQWRFDWFQNADNPSFTFERVQCPEELIARTGCRRHDDGGFAVFKAPSA

SEQ ID NO: 46892 - protein, 214 aa, Melanocarpus albomyces
ANGQSTRYWDCCKPSCGWAGKGPVNQPVYSCDANFQRIHDFDAVSGCEGGPAFSCADHSPWAINDNLSYGFAATALSGQTEESWCCACYALTFTSGPVAGKTMVVQSTSTGGDLGSNHFDLNIPGGGVGLIDGCTPQFGGLPGARYGGISSRQECDSFPEPLKPGCQWRFDWFQNADNPSFTFERVQCPEELVARTGCRRHDDGGFAVFKAPSA

SEQ ID NO: 46893 - protein, 214 aa, Melanocarpus albomyces
ANGQSTRYWDCCKPSCGWAGKGPVNQPVYSCDANWQRIHDFDAVSGCEGGPAFSCADHSPWAINDNLSYGFAATALSGQTEESWCCACYALTFTSGPVAGKTMVVQSTSTGGDLGSNHFDLNIPGGGVGLFDGCTPQFGGLPGARYGGISSRQECDSFPEPLKPGCQWRFDWFQNADNPSFTFERVQCPEELVARTGCRRHDDGGFAVFKAPSA

SEQ ID NO: 46894 - protein, 214 aa, Melanocarpus albomyces
ANGQSTRYWDCCKPSCGWAGKGPVNQPVYSCDANFQRIHDFDAVSGCEGGPAFSCADHSPWAINDNLSYGFAATALSGQTEESWCCACYALTFTSGPVAGKTMVVQSTSTGGDLGSNHFDLNIPGGGVGLFDGCTPQFGGLPGARYGGISSRQECDSFPEPLKPGCQWRFDWFQNADNPSFTFERVQCPEELVQRTGCRRHDDGGFAVFKAPSA

SEQ ID NO: 46895 - protein, 214 aa, Melanocarpus albomyces
ANGQSTRYWDCCKPSCGWAGKGPVNQPVYSCDANFQRIHDFDAVSGCEGGPAFSCADHSPWAINDNLSYGFAATALSGQTEESWCCACYALTFTSGPVAGKTMVVQSTSTGGDLGSNHFDLNIPGGGVGLFDGCTPQFGGLPGARYGGISSRQECDSFPEPLKPGCQWRFDWFQNADNPSFTFERVQCPEELDARTGCRRHDDGGFAVFKAPSA

SEQ ID NO: 46896 - protein, 214 aa, Melanocarpus albomyces
ANGQSTRYWDCCKPSCGWAGKGPVNQPVYSCDANDQRIHDFDAVSGCEGGPAFSCADHSPWAINDNLSYGFAATALSGQTEESWCCACYALTFTSGPVAGKTMVVQSTSTGGDLGSNHFDLNIPGGGVGLFDGCTPQFGGLPGARYGGISSRQECDSFPEPLKPGCQWRFDWFQNADNPSFTFERVQCPEELVARTGCRRHDDGGFAVFKAPSA

SEQ ID NO: 46897 - protein, 214 aa, Melanocarpus albomyces
ANGQSTRYWDCCKPSCGWAGKGPVNQPVYSCDANFQRIHDFDSVSGCEGGPAFSCADHSPWAINDNLSYGFAATALSGQTEESWCCACYALTFTSGPVAGKTMVVQSTSTGGDLGSNHFDLNIPGGGVGLFDGCTPQFGGLPGARYGGISSRQECDSFPEPLKPGCQWRFDWFQNADNPSFTFERVQCPEELVARTGCRRHDDGGFAVFKAPSA

SEQ ID NO: 46898 - protein, 214 aa, Melanocarpus albomyces
ANGQSTRYWDCCKPSCGWAGKGPVNQPVYSCDANWQRIPDFDAVSGCEGGPAFSCADHSPWAINDNLSYGFAATALSGQTEESWCCACYALTFTSGPVAGKTMVVQSTSTGGDLGSNHFDLNIPGGGVGLFDGCTPQFGGLPGARYGGISSRQECDSFPEPLKPGCQWRFDWFQNADNPSFTFERVQCPEELVARTGCRRHDDGGFAVFKAPSA

SEQ ID NO: 46899 - protein, 214 aa, Melanocarpus albomyces
ANGQSTRYWDCCKPSCGWAGKGPVNQPVYSCDANFQRIHDFDAVSGCIGGPAFSCADHSPWAINDNLSYGFAATALSGQTEESWCCACYALTFTSGPVAGKTMVVQSTSTGGDLGSNHFDLNIPGGGVGLFDGCTPQFGGLPGARYGGISSRQECDSFPEPLKPGCQWRFDWFQNADNPSFTFERVQCPEELVARTGCRRHDDGGFAVFKAPSA

SEQ ID NO: 46900 - protein, 214 aa, Melanocarpus albomyces
ANGQSTRYWDCCKPSCGWAGKGPVNQPVYSCDANFQRIHDFDAVSGCEGGPAFSCADHSPWAINDNLSYGFAATALSGQTEESWCCACYALTFRSGPVAGKTMVVQSTSTGGDLGSNHFDLNIPGGGVGLFDGCTPQFGGLPGARYGGISSRQECDSFPEPLKPGCQWRFDWFQNADNPSFTFERVQCPEELVARTGCRRHDDGGFAVFKAPSA

SEQ ID NO: 46901 - protein, 214 aa, Melanocarpus albomyces
ANGQSTRYWDCCKPSCGWAGKGPVNQPVYSCDANFQRIHDFDAVSGCEGGPAFSCADHSPWAINDNLSYGFAATALSGQTEESWCCACYALTFTSGPVAGKTMVVQSTSTGGDLGSNHFDLSIPGGGVGLFDGCTPQFGGLPGARYGGISSRQECDSFPEPLKPGCQWRFDWFQNADNPSFTFERVQCPEELVARTGCRRHDDGGFAVFKAPSA

SEQ ID NO: 46902 - protein, 214 aa, Melanocarpus albomyces
ANGQSTRYWDCCKPSCGWAGKGPVNQPVYSCDANFQRIHDFDAVSGCEGGPAFSCADHSPWAINDNLSYGFAATALSGQTEESWCCACYALTFTSGPVQGKTMVVQSTSTGGDLGSNHFDLNIPGGGVGLFDGCTPQFGGLPGARYGGISSRQECDSFPEPLKPGCQWRFDWFQNADNPSFTFERVQCPEELVARTGCRRHDDGGFAVFKAPSA

SEQ ID NO: 46903 - protein, 214 aa, Melanocarpus albomyces
ANGQSTRYWDCCKPSCGWAGKAPVNQPVYSCDANFQRIHDFDAVSGCEGGPAFVCADHSPWAINDNLSYGFAATALSGQTEESWCCACYALTFTSGPVAGKTMVVQSTSTGGDLGSNHFDLAIPGGGVGLFDGCTPQFGGLPGARYGGISSRQECDSFPEPLKPGCQWRFDWFQNADNPSFTFERVQCPEELVARTGCRRHDDGGFAVFKAPSA

SEQ ID NO: 46904 - protein, 214 aa, Melanocarpus albomyces
ANGQSTRYWDCCKPSCGWAGKGRVNQPVYSCDANFQRIHDFDAVSGCEGGPAFSCADHSPWAINDNLSYGFAATALSGQTEESWCCACYALTFTSGPVAGKTMVVQSTSTGGDLGSNHFDLNIPGGGVGLFDGCTPQFGGLPGARYGGISSRQECDSFPEPLKPGCQWRFDWFQNADNPSFTFERVQCPEELVARTGCRRHDDGGFAVFKAPSA

SEQ ID NO: 46905 - protein, 214 aa, Melanocarpus albomyces
ANGQSTRYWDCCKPSCGWDGKGPVNQPVYSCDANFQRIHDFDAVSGCEGGPAFSCADHSPWAINDNLSYGFAATALSGQTEESWCCACYALTFTSGPVAGKTMVVQSTSTGGDLGSNHFDLNIPGGGVGLFDGCTPQFGGLPGARYGGISSRQECDSFPEPLKPGCQWRFDWFQNADNPSFTFERVQCPEELVARTGCRRHDDGGFAVFKAPSA

SEQ ID NO: 46906 - protein, 214 aa, Melanocarpus albomyces
ANGQSTRYWDCCKPSCGWAGKGPVNQPVYSCDANFQRIHDFDAVSGCEGGPAFSCADHSPWAINDNLSYGFAATALSGQTEESWCCACYALTFTSGPVAGKTMVVQSTSTGGDLGSNHFDLLIPGGGVGLFDGCTPQFGGLPGARYGGISSRQECDSFPEPLKPGCQWRFDWFQNADNPSFTFERVQCPEELVARTGCRRHDDGGFAVFKAPSA

SEQ ID NO: 46907 - protein, 214 aa, Melanocarpus albomyces
ANGQSTRYWDCCKPSCGWAGKGPVNQPVYSCDANFQRIHDFDAVSGCEGGPAFSCADHSPWAINDNLSYGFAATALSGQTEESWCCACYALTFTSGPVAGKTMVVQSTSTGGDLGSNHFDLTIPGGGVGLFDGCTPQFGGLPGARYGGISSRQECDSFPEPLKPGCQWRFDWFQNADNPSFTFERVQCPEELVARTGCRRHDDGGFAVFKAPSA

SEQ ID NO: 46908 - protein, 214 aa, Melanocarpus albomyces
ANGQSTRYWDCCKPSCGWAGKAPVNQPVYSCDANFQRIHDFDAVSGCEGGPAFSCADHSPWAINDNLSYGFAATALSGQTEESWCCACYALTFTSGPVAGKTMVVQSISTGGDLGSNHFDLAIPGGGVGLFDGCTPQFGGLPGARYGGISSRQECDSFPEPLKPGCQWRFDWFQNADNPSFTFERVQCPEELVARTGCRRHDDGGFAVFKAPSA

SEQ ID NO: 46909 - protein, 214 aa, Melanocarpus albomyces
ANGQSTRYWDCCKPSCGWAGKGPVNQPVYSCDANFQRIHDFDAVSGCEGGPAFSCADHSPWAINDNLSYGFAATALSGQTEESWCCACYALTFTSGPVAGKTMVVQSTSTGGDLGSNHFDLGIPGGGVGLFDGCTPQFGGLPGARYGGISSRQECDSFPEPLKPGCQWRFDWFQNADNPSFTFERVQCPEELVARTGCRRHDDGGFAVFKAPSA

SEQ ID NO: 46910 - protein, 214 aa, Melanocarpus albomyces
ANGQSTRYWDCCKPSCGWAGEGPVNQPVYSCDANFQRIHDFDAVSGCEGGPAFSCADHSPWAINDNLSYGFAATALSGQTEESWCCACYALTFTSGPVAGKTMVVQSTSTGGDLGSNHFDLNIPGGGVGLFDGCTPQFGGLPGARYGGISSRQECDSFPEPLKPGCQWRFDWFQNADNPSFTFERVQCPEELVARTGCRRHDDGGFAVFKAPSA

SEQ ID NO: 46911 - protein, 214 aa, Melanocarpus albomyces
ANGQSTRYWDCCKPSCGWAGKGPVNQPVYSCDANFQRIHDFDAVSGCEGGPAFSCADHSPWAINDNLSYGFAATALSGQTEESWCCACYALTFTSGPVAGKTMVVQSISTGGDLGSNHFDLNIPGGGVGLFDGCTPQFGGLPGARYGGISSRQECDSFPEPLKPGCQWRFDWFQNADNPSFTFERVQCPEELVARTGCRRHDDGGFAVFKAPSA

SEQ ID NO: 46912 - protein, 214 aa, Melanocarpus albomyces
ANGQSTRYWDCCKPSCGWAGKGPVNQPVYSCDANFQRIHDFDAVSGCEGGPAFSCADHSPWAINDNLSYGFAATALSGQTEESWCCACYALTFTSGPVAGKTMVVQSTSTGGDLGSNHFDLNIPGGGVGLFDGCTPQFGGLPGARYGGISSRQECDSFPEPLKPGCQWRFDWFQNADNPSFTFERCQCPEELVARTGCRRHDDGGFCVFKAPSA

SEQ ID NO: 46913 - protein, 214 aa, Melanocarpus albomyces
ANGQSTRYWDCCKPSCGWAGKGPVNQPVYSCDANFQRIHDFDAVSGCEGGPAFSCADHSPWAINDNLSYGFAATALSGQTEESWCCACYALTFTSGPVAGKTMVVQSTSTGGDLGSNHFDLNIPGGGVGLFDGCTPQFGGLPGARYGGISDRQECDSFPEPLKPGCQWRFDWFQNADNPSFTFERVQCPEELVARTGCRRHDDGGFAVFKAPSA

SEQ ID NO: 46914 - protein, 214 aa, Melanocarpus albomyces
ANGQSTRYWDCCKPSCGWAGKAPVNQPVYSCDANFQRIHDFDAVSGCEGGPAFSCADHSPWAINDNLSYGFAATALSGQTEESWCCACYALTFTSGPVAGKTMVVQSTSTGGDLGSNHFDLAIPGGGVGLFDGCTPQFGGLPGARYGGISSRQECDSFPEPLKPGCQWRFDWFQNADNPSFTFERVQCPEELVARTGCRRHDDGGHAVFKAPSA

SEQ ID NO: 46915 - protein, 214 aa, Melanocarpus albomyces
ANGQSTRYWDCCKPSCGWAGKGPVNQPVYSCDANFQRIHDFDAVSGCEGGPAFSCADHSPWAINDNLSYGFAATALSGQTEESWCCACYALTFTSGPVAGKTMVVQSTSTGGDLGSNHFDLAIPGGGVGLFDGCTPQFGGLPGARYGGISSRQECDSFPEPLKPGCQWRFDWFQNADNPSFTFERVQCPEELVARTGCRRHDDGGFAVFKAPSA

SEQ ID NO: 46916 - protein, 214 aa, Melanocarpus albomyces
ANGQSTRYWDCCKPSCGWAGKGPVNQPVYSCDANFQRIHDFDAVSGCEGGPAFSCADHSPWAINDNLSYGFAATALSGQTEESWCCACYALTFTSGPVAGKTMVVQSTSTGGDLGSNHFDLNIPGGGVGLFDGCTPQFGGLPGARYGGISSRQECDSFPEPLKPGCQWRFDWFQNADNPSFTFERVQCPEELTARTGCRRHDDGGFAVFKAPSA

SEQ ID NO: 46917 - protein, 271 aa, Synthetic construct
ASGSGTSTRYWDCCKPSCSWSGKASVNRPVLACDANNNPLSDASVKSGCDGGSAYTCANNSPWAVNDQLSYGFAATKLSGGTESSWCCACYALTFTSGPVAGKTMVVQSTSTGGDLGSNHFDINMPGGGVGLFDGCTRQFGGLPGARYGGISSRSQCDSFPAALKPGCQWRFDWFQNASNPNFTFKQVQCPSELTSRTGCKRNDDSQFPVFTPPSGGGSNPSTPTTPPSSGGGSGCTADKYAQCGGSGWSGCTNCPSGSTCKTINDYYHQC

SEQ ID NO: 46918 - protein, 271 aa, Synthetic construct
ASGSGTSTRYWDCCKPSCSWSGKASVNRPVLACDANNNPLSDASVKSGCDGGSAYTCANNSPWAVNDQLSYGFAATKLSGGTESSWCCACYALTFTSGPVAGKTMVVQSTNTGGDLGSNQFDINMPGGGVGLFDGCTRQFGGLPGAQYGGISSRSQCDSFPAALKPGCQWRFDWFQNADNPNFTFKQVQCPSELTSRTGCKRNDDSQFPVFTPPSGGGTNPSTPTTPPSSGGGSGCTADKYAQCGGSGWSGCTNCPSGSTCKTINDYYHQC

SEQ ID NO: 46919 - protein, 271 aa, Synthetic construct
ASGSGQSTRYWDCCKPSCSWSGKASVNRPVLACDANNNPLSDASVKSGCDGGSAYTCANNSPWAVNDQLSYGFAATKLSGGTESSWCCACYALTFTSGPVAGKTMVVQSTNTGGDLGSNQFDINMPGGGVGLFDGCTRQFGGLPGARYGGISSRSQCDSFPAALKPGCQWRFDWFQNADNPNFTFKQVQCPSELTSRTGCKRNDDSQFPVFTPPSGGGSNPSTPTTPPSSGGGSGCTADKYAQCGGSGWSGCTNCPSGSTCKTINDYYHQC

SEQ ID NO: 46920 - protein, 271 aa, Synthetic construct
ASGSGQSTRYWDCCKPSCSWSGKASVNRPVLACDANNNPLSDASVKSGCDGGSAYTCANNSPWAVNDQLSYGFAATKLSGGTESSWCCACYALTFTSGPVAGKTMVVQSTNTGGDLGSNQFDINMPGGGVGLFDGCTRQFGGLPGAQYGGISSRSQCDSFPAALKPGCQWRFDWFQNASNPNFTFKQVQCPSELTSRTGCKRNDDSQFPVFTPPSGGGSNPSTPTTPPSSGGGSGCTADKYAQCGGSGWSGCTNCPSGSTCKTINDYYHQC

SEQ ID NO: 46921 - protein, 271 aa, Synthetic construct
ASGSGTSTRYWDCCKPSCSWSGKASVNRPVLACDANNNPLSDASVKSGCDGGSAYTCANNSPWAVNDQLSYGFAATKLSGGTESSWCCACYALTFTSGPVAGKTMVVQSTNTGGDLGSNQFDINMPGGGVGLFDGCTRQFGGLPGAQYGGISSRSQCDSFPAALKPGCQWRFDWFQNADNPNFTFKQVQCPSELTSRTGCKRNDDSQFPVFTPPSGGGSNPSTPTTPPSSGGGSGCTADKYAQCGGSGWSGCTNCPSGSTCKTINDYYHQC

SEQ ID NO: 46922 - protein, 271 aa, Synthetic construct
ASGSGQSTRYWDCCKPSCSWSGKASVNRPVLACDANNNPLSDASVKSGCDGGSAYTCANNSPWAVNDQLSYGFAATKLSGGTESSWCCACYALTFTSGPVAGKTMVVQSTSTGGDLGSNQFDINMPGGGLGLFDGCTRQFGGLPGAQYGGISSRSQCDSFPAALKPGCQWRFDWFQNASNPNFTFKQVQCPSELTSRTGCKRNDDSQFPVFTPPSGGGSNPSTPTTPPSSGGGSGCTADKYAQCGGSGWSGCTNCPSGSTCKTINDYYHQC

SEQ ID NO: 46923 - protein, 271 aa, Synthetic construct
ASGSGTSTRYWDCCKPSCSWSGKASVNRPVLACDANNNPLSDASVKSGCDGGSAYTCANNSPWAVNDQLSYGFAATKLSGGTESSWCCACYALTFTSGPVAGKTMVVQSTSTGGDLGSNQFDINMPGGGVGLFDGCTRQFGGLPGARYGGISSRSQCDSFPAALKPGCQWRFDWFQNADNPNFTFKQVQCPSELTSRTGCKRNDDSQFPVFTPPSGGGSNPSTPTTPPSSGGGSGCTADKYAQCGGSGWSGCTNCPSGSTCKTINDYYHQC

SEQ ID NO: 46924 - protein, 271 aa, Synthetic construct
ASGSGQSTRYWDCCKPSCSWSGKASVNRPVLACDANNNPLSDASVKSGCDGGSAYTCANNSPWAVNDQLSYGFAATKLSGGTESSWCCACYALTFTSGPVAGKTMVVQSTNTGGDLGSNHFDINMPGGGVGLFDGCTRQFGGLPGARYGGISSRSQCDSFPAALKPGCQWRFDWFQNASNPNFTFKQVQCPSELTSRTGCKRNDDSQFPVFTPPSGGGTNPSTPTTPPSSGGGSGCTADKYAQCGGSGWSGCTNCPSGSTCKTINDYYHQC

SEQ ID NO: 46925 - protein, 271 aa, Synthetic construct
ASGSGQSTRYWDCCKPSCSWSGKASVNRPVLACDANNNPLSDASVKSGCDGGSAYTCANNSPWAVNDQLSYGFAATKLSGGTESSWCCACYALTFTSGPVAGKTMVVQSTSTGGDLGSNQFDINMPGGGFGLFDGCTRQFGGLPGAQYGGISSRSQCDSFPAALKPGCQWRFDWFQNASNPNFTFKQVQCPSELTSRTGCKRNDDSQFPVFTPPSGGGSNPSTPTTPPSSGGGSGCTADKYAQCGGSGWSGCTNCPSGSTCKTINDYYHQC

SEQ ID NO: 46926 - protein, 271 aa, Synthetic construct
ASGSGQSTRYWDCCKPSCSWSGKASVNRPVLACDANNNPLSDASVKSGCDGGSAYTCANNSPWAVNDQLSYGFAATKLSGGTESSWCCACYALTFTSGPVAGKTMVVQSTNTGGDLGSNQFDINMPGGGVGLFDGCTRQFGGLPGARYGGISSRSQCDSFPAALKPGCQWRFDWFQNADNPNFTFKQVQCPSELTSRTGCKRNDDSQFPVFTPPSGGGTNPSTPTTPPSSGGGSGCTADKYAQCGGSGWSGCTNCPSGSTCKTINDYYHQC

SEQ ID NO: 46927 - protein, 271 aa, Synthetic construct
ASGSGQSTRYWDCCKPSCSWSGKASVNRPVLACDANNNPLSDASVKSGCDGGSAYTCANNSPWAVNDQLSYGFAATKLSGGTESSWCCACYALTFTSGPVAGKTMVVQSTNTGGDLGSNHFDINMPGGGVGLFDGCTRQFGGLPGARYGGISSRSQCDSFPAALKPGCQWRFDWFQNASNPNFTFKQVQCPSELTSRTGCKRNDDSQFPVFTPPSGGGSNPSTPTTPPSSGGGSGCTADKYAQCGGSGWSGCTNCPSGSTCKTINDYYHQC

SEQ ID NO: 46928 - protein, 271 aa, Synthetic construct
ASGSGTSTRYWDCCKPSCSWSGKASVNRPVLACDANNNPLSDASVKSGCDGGSAYTCANNSPWAVNDQLSYGFAATKLSGGTESSWCCACYALTFTSGPVAGKTMVVQSTSTGGDLGSNQFDINMPGGGVGLFDGCTRQFGGLPGAQYGGISSRSQCDSFPAALKPGCQWRFDWFQNASNPNFTFKQVQCPSELTSRTGCKRNDDSQFPVFTPPSGGGSNPSTPTTPPSSGGGSGCTADKYAQCGGSGWSGCTNCPSGSTCKTINDYYHQC

SEQ ID NO: 46929 - protein, 271 aa, Synthetic construct
ASGSGQSTRYWDCCKPSCSWSGKASVNRPVLACDANNNPLSDASVKSGCDGGSAYTCANNSPWAVNDQLSYGFAATKLSGGTESSWCCACYALTFTSGPVAGKTMVVQSTSTGGDLGSNQFDINMPGGGVGLFDGCTRQFGGLPGARYGGISSRSQCDSFPAALKPGCQWRFDWFQNASNPNFTFKQVQCPSELTSRTGCKRNDDSQFPVFTPPSGGGSNPSTPTTPPSSGGGSGCTADKYAQCGGSGWSGCTNCPSGSTCKTINDYYHQC

SEQ ID NO: 46930 - protein, 271 aa, Synthetic construct
ASGSGTSTRYWDCCKPSCSWSGKASVNRPVLACDANNNPLSDASVKSGCDGGSAYTCANNSPWAVNDQLSYGFAATKLSGGTESSWCCACYALTFTSGPVAGKTMVVQSTNTGGDLGSNHFDINMPGGGVGLFDGCTRQFGGLPGARYGGISSRSQCDSFPAALKPGCQWRFDWFQNADNPNFTFKQVQCPSELTSRTGCKRNDDSQFPVFTPPSGGGSNPSTPTTPPSSGGGSGCTADKYAQCGGSGWSGCTNCPSGSTCKTINDYYHQC

SEQ ID NO: 46931 - protein, 271 aa, Synthetic construct
ASGSGTSTRYWDCCKPSCSWSGKASVNRPVLACDANNNPLSDASVKSGCDGGSAYTCANNSPWAVNDQLSYGFAATKLSGGTESSWCCACYALTFTSGPVAGKTMVVQSTNTGGDLGSNHFDINMPGGGVGLFDGCTRQFGGLPGAQYGGISSRSQCDSFPAALKPGCQWRFDWFQNASNPNFTFKQVQCPSELTSRTGCKRNDDSQFPVFTPPSGGGSNPSTPTTPPSSGGGSGCTADKYAQCGGSGWSGCTNCPSGSTCKTINDYYHQC

SEQ ID NO: 46932 - protein, 212 aa, Melanocarpus albomyces
NGQSTRYWDCCKPSCGWAGKAPVNQPVYSCDANFQRIHDFDARSGCDGGPAFSCADHSPWAINDNLSYGFAATALSGQTESSWCCACYALTFTSGPVAGKTMVVQSTSTGGDLGSNHFDLNIPGGGVGLFDGCTPQFGGLPGARYGGISSRQECDSFPEPLKPGCQWRFDWFQNADNPSFTFERVQCPEELVARTGCRRHDDGGFAVFKAPS

SEQ ID NO: 46933 - protein, 212 aa, Melanocarpus albomyces
NGQSTRYWDCCKPSCGWAGKAPVNQPVYSCDANFQRIHDFDAVSGCEGGPAFSCADHSPWAINDNLSYGFAATALSGQTEESWCCACYALTFTSGPVAGKTMVVQSTSTGGDLGSNHFDLAIPGGGVGLFDGCTPQFGGLPGARYGGISSRQECDSFPEPLKPGCQWRFDWFQNADNPSFTFERVQCPEELVARTGCRRHDDGTFAVFKAPS

SEQ ID NO: 46934 - protein, 212 aa, Melanocarpus albomyces
NGQSTRYWDCCKPSCGWAGKAPVNQPVYSCDANFQRIHDFDAWSGCEGGPAFSCADHSPWAINDNLSYGFAATALSGQTEESWCCACYALTFTSGPVAGKTMVVQSTSTGGDLGSNHFDLAIPGGGVGLFDGCTPQFGGLPGARYGGISSRQECDSFPEPLKPGCQWRFDWFQNADNPSFTFERVQCPEELVARTGCRRHDDGGFAVFKAPS

SEQ ID NO: 46935 - protein, 212 aa, Melanocarpus albomyces
NGQSTRYWDCCKPSCGWAGKAPVNQPVYSCDANFQRIHDFDAVSGCEGGPAFSCADHSPWAINDNLSYGFAATALSGQTEESWCCACYALTFTSGPVAGKTMVVQSTSTGGDLGSNHFDLAIPGGGVGLFDGCTPQFGGLPGARYGGISSRQECDSFPEPLKPGCQWRFDWFQNADNPSFTFERVQCPEELVARTGCRRHDDGGFAVFKAPS

SEQ ID NO: 46936 - protein, 212 aa, Melanocarpus albomyces
NGQSTRYWDCCKPSCGWAGKAPVNQPVYSCDANFQRIHDFDAVSGCEGGPAFSCADHSPWAINDNLSYGFAATALSGQTESSWCCACYALTFTSGPVAGKTMVVQSTSTGGDLGSNHFDLNIPGGGVGLFDGCTPQFGGLPGARYGGISSRQECDSFPEPLKPGCQWRFDWFQNADNPSFTFERVQCPEELVARTGCRRHDDGGFAVFKAPS

SEQ ID NO: 46937 - protein, 212 aa, Melanocarpus albomyces
NGQSTRYWDCCKPSCGWAGKGPVNQPVYSCDANFQRISDFDAQSGCEGGPAFSCADHSPWAINDNLSYGFAATALSGQTEESWCCACYALTFTSGPVAGKTMVVQSTSTGGDLGSNHFDLNIPGGGVGLFDGCTPQFGGLPGARYGGISSRQECDSFPEPLKPGCQWRFDWFQNADNPSFTFERVQCPEELVARTGCRRHDDGGFAVFKAPS

SEQ ID NO: 46938 - protein, 212 aa, Melanocarpus albomyces
NGQSTRYWDCCKPSCGWAGKAPVNQPVYSCDANFQRIHDFDARSGCEGGPAFSCADHSPWAINDNLSYGFAATALSGQTEESWCCACYALTFTSGPVAGKTMVVQSTSTGGDLGSNHFDLAIPGGGVGLFDGCTPQFGGLPGARYGGISSRQECDSFPEPLKPGCQWRFDWFQNADNPSFTFERVQCPEELVARTGCRRHDDGGFAVFKAPS

SEQ ID NO: 46939 - protein, 212 aa, Melanocarpus albomyces
NGQSTRYWDCCKPSCGWAGKAPVNQPVYSCDANFQRIHDFDAVSGCEGGPAFSCADHSPWAINDNLSYGFAATRLSGQTEESWCCACYALTFTSGPVAGKTMVVQSTSTGGDLGSNHFDLAIPGGGVGLFDGCTPQFGGLPGARYGGISSRQECDSFPEPLKPGCQWRFDWFQNADNPSFTFERVQCPEELVARTGCRRHDDGGFAVFKAPS

SEQ ID NO: 46940 - protein, 212 aa, Melanocarpus albomyces
NGQSTRYWDCCKPSCGWAGKAPVNQPVYSCDANFQRIHDFDALSGCEGGPAFSCADHSPWAINDNLSYGFAATALSGQTEESWCCACYALTFTSGPVAGKTMVVQSTSTGGDLGSNHFDLAIPGGGVGLFDGCTPQFGGLPGARYGGISSRQECDSFPEPLKPGCQWRFDWFQNADNPSFTFERVQCPEELVARTGCRRHDDGGFAVFKAPS

SEQ ID NO: 46941 - protein, 212 aa, Melanocarpus albomyces
NGQSTRYWDCCKPSCGWAGKAPVNQPVYSCDANFQRIHDFDAVSGCEGGPAFSCADHSPWAINDNLSYGFAATALSGQTERSWCCACYALTFTSGPVAGKTMVVQSTSTGGDLGSNHFDLAIPGGGVGLFDGCTPQFGGLPGARYGGISSRQECDSFPEPLKPGCQWRFDWFQNADNPSFTFERVQCPEELVARTGCRRHDDGGFAVFKAPS

SEQ ID NO: 46942 - protein, 212 aa, Melanocarpus albomyces
NGQSTRYWDCCKPSCGWAGKAPVNQPVYSCDANFQRIHDFDAVSGCEGGPAFSCADHSPWAINDNLSYGFAATALSGQTEWSWCCACYALTFTSGPVAGKTMVVQSTSTGGDLGSNHFDLAIPGGGVGLFDGCTPQFGGLPGARYGGISSRQECDSFPEPLKPGCQWRFDWFQNADNPSFTFERVQCPEELVARTGCRRHDDGGFAVFKAPS

SEQ ID NO: 46943 - protein, 295 aa, Staphylotrichum coccosporum
ADGKSTRYWDCCKPSCSWPGKASVNQPVFACSANFQRISDPNVKSGCDGGSAYACADQTPWAVNDNFSYGFAATSISGGNEASWCCGCYELTFTSGPVAGKKMVVQSTSTGGDLGTNHFDLAMPGGGVGIFDGCSPQFGGLPGDRYGGVSSRSECDSFPAALKPGCYWRFDWFKNADNPTFTFRQVQCPSELVARTGCRRNDDSNFPVFTPPSGGQSSSSSSSSSARPTSTSTSTTSTKATSTTSTASSQTSSSTGGGCAAQRWAQCGGIGFSGCTTCVSGTTCNKQNDWYSQCL

SEQ ID NO: 46944 - protein, 295 aa, Staphylotrichum coccosporum
ADGKSTRYWDCCKPSCSWPGKASVNQPVFACSADFQRISDPNVKSGCDGGTAYACADQTPWAVNDNFSYGFAATSISGGNEASWCCACYELTFTSGPVAGKKMVVQSTSTGGDLGVNHFDLAMPGGGVGIFDGCSEQFGGLAGDRYGGVSSRSECDSFPAPLKPGCYWRFDWFKNADNPTFTFRQVQCPSEVVARTGCRRNDDGNFPVFTPPSGGQSSSSSSSSSAKPTSTSASTTSDKATSTTSTASSQTSSSTGGGCAAQRWAQCGGIGFSGCTTCVSGTTCNKQNDWYSQCL

SEQ ID NO: 46945 - protein, 295 aa, Staphylotrichum coccosporum
ADGVSTRYWDCCKPSCSWPGKASVNQPVFACSANFTRISDPNVKSGCDGGTAYACADQTPWAVNDNFSYGFAATSISGGSEASWCCGCYELTFTSGPVAGKTMVVQSTSTGGDLGTNHFDLAMPGGGVGIFDGCTPQFGGLAGDRYGGVSSRSQCDDFPAALKPGCYWRFDWFKNADNPTFTFRQVQCPSELVARTGCRRNDDGNFPVFTPPSGGQSSSSSSSSSAKPTSTSASTTSTKATSTTSTASSQTSSSTGGGCAAQRWAQCGGIGFSGCTTCVSGTTCNKQNDWYSQCL

SEQ ID NO: 46946 - protein, 281 aa, Staphylotrichum coccosporum
GVSTRYWDCCKPSCSWPGKASVNQPVFACSANFTRISDPNVKSGCDGGSAYACADQTPWAVNDNFSYGFAATSIMGGNEASWCCGCYELTFTSGPVAGKKMVVQSTSTGGDLGTNHFDLAMPGGGVGIFDGCSPQFGGLAGDRYGGVSSRSECDSFPAALKPGCYWRFDWFKNADHPTFTFRQVQCPSELVARTGCRRNDDGNFPVFTPPSGGQSSSSSSSSKAKPTSTTSTASSQTSSSTGGGCAAQRWAQCGGIGFSGCTTCVSGTTCNKQNDWYSQCL

SEQ ID NO: 46947 - protein, 211 aa, Melanocarpus albomyces
NGQSTRYWDCCKPSCGWAGKAPVNQPVYSCDANFQRIHDFDAVSGCEGGPAFSCADHSPWAINDNLSYGFAATALSGQTEESWCCACYALTFTSGPVAGKTMVVQSTSTGGDLGSNHFDLAIPGGGVGLFDGCTPQFGGLPGARYGGISSRQECDSFPEPLKPGCQWRFDWFQNADNPSFTFERVQCPEELVARTGCRRHDDGGFAVFKAP

SEQ ID NO: 46948 - protein, 206 aa, Melanocarpus albomyces
NGQSTRYWDCCKPSCGWAGKGPVNQPVYSCDANFQRIHDFDAVSGCEGGPAFSCADHSPWAINDNLSYGFAATALSGQTEESWCCACYALTFTSGPVAGKTMVVQSTSTGGDLGSNHFDLNIPGGGVGLFDGCTPQFGGLPGARYGGISSRQECDSFPEPLKPGCQWRFDWFQNADNPSFTFERVQCPEELVARTGCRRHDDGGFP

SEQ ID NO: 46949 - protein, 295 aa, Staphylotrichum coccosporum
ADGKSTRYWDCCKPSCSWPGKASVNQPVFACSANFQRISDPNVKSGCDGGSAYACADQTPWAVNDNFSYGFAATSISGGNEASWCCGCYELTFTSGPVAGKTMVVQSTSTGGDLGTNHFDLAMPGGGVGIFDGCSPQFGGLAGDRYGGVSSRSQCDSFPAALKPGCYWRFDWFKNADNPTFTFRQVQCPSELVARTGCRRNDDGNFPVFTPSSGGQSSSSSSSSSAKPTSTSTSTTSTKATSTTSTASSQTSSSTGGGCAAQRWAQCGGIGFSGCTTCVSGTTCNKQNDWYSQCL

SEQ ID NO: 46950 - protein, 286 aa, Thermochaetoides thermophila
GKSTRYWDCCKPSCSWPGKADVNQPVFACDRNFNRLSDFNVQSGCNGGPAYSCADQTPWAVNDQFSYGFAATNIEGGNEASWCCACYKLTFTSGPVAGKVMVVQSTSTGGDLGNNHFDLNIPGGGVGIFDGCTPQFGGLPGERYGGISSRSQCDSFPDALKPGCYWRFDWFLNADNPNFTFERVQCPSELVARTGCKRNDDGNYPVFTPPSGDSPSSSSAAPTSTSTSQQPQQPTSSSSQASVPTSNPGGCTSQKWAQCGGIGFTGCTTCVSGTTCTKLNDWYSQC

SEQ ID NO: 46951 - protein, 202 aa, Humicola insolens
GKSTRYWDCCKPSCGWAKKAPVNQPVFSCNANFQRLTDFDAKSGCEPGGVAYSCADQTPWAVNDDFAFGFAATSIAGSNEAGWCCACYELTFTSGPVAGKKMVVQSTSTGGDLGSNHFDLNIPGGGVGIFDGCTPQFGGLPGQRYGGISSRNECDRFPDALKPGCYWRFDWFKNADNPSFSFRQVQCPAELVARTGCRRNDD

SEQ ID NO: 46952 - protein, 214 aa, Melanocarpus albomyces
ANGQSTRYWDCCKPSCGWAGKGPVNQPVYSCDANFQRIHDFDAVSGCEGGPAFMCADHSPWAINDNLSYGFAATALSGQTEESWCCACYALTFTSGPVAGKTMVVQSTSTGGDLGSNHFDLAIPGGGVGLFDGCTPQFGGLPGARYGGISSRQECDSFPEPLKPGCQWRFDWFQNADNPSFTFERVQCPEELVARTGCRRHDDGGFAVFKAPSA

SEQ ID NO: 46953 - protein, 214 aa, Melanocarpus albomyces
ANGQSTRYWDCCKPSCGWAGKGPVNQPVYSCDANFQRIHDFDAVSGCEGGPAFSCADHSPWAINDNLCYGFAATALSGQTEESWCCACYALTFTSGPVAGKTCVIQSTSTGGDLGSNHFDLNIPGGGVGLFDGCTPQFGGLPGARYGGISSRQECDSFPEPLKPGCQWRFDWFQNADNPSFTFERVQCPEELVARTGCRRHDDGGFAVFKAPSA

SEQ ID NO: 46954 - protein, 214 aa, Melanocarpus albomyces
ANGQSTRYWDCCKPSCGWAGKGPVNQPVYSCDANFQRIHDFDAVSGCEGGPAFSCADHSPWAINDNLSYGFAATALSGQTEESWCCACYALTFTSGPVAGKTMVVQSTSTGGDLGSNHFDLNICGGGVGLFDGCTPQFGGLPGARYGGISSRQECDSFPEPLKPCCQWRFDWFQNADNPSFTFERVQCPEELVARTGCRRHDDGGFAVFKAPSA

SEQ ID NO: 46955 - protein, 214 aa, Melanocarpus albomyces
ANGQSTRYWDCCKPSCGWAGKGPVNQPVYSCDANFQRIHDFDAVSGCEGGPAFSCADHSPWAINDNLSYGFAATALSGQTEESWCCACYALTFTSGPVAGKTMVVQSTSTGGDLGSNHFDLNIPGGGVGLFDGCTPQFGGLPGARYGGISSRQECDSFPEPLKPGCQWRFDWFQDAQNPSFTFERVQCPEELVARTGCRRHDDGGFAVFKAPSA

SEQ ID NO: 46956 - protein, 214 aa, Melanocarpus albomyces
ANGQSTRYWDCCKPSCGWAGKAPVNQPVYSCDANWQRIHDFDAVSGCEGGPAFSCADHSPWAINDNLSYGFAATHLSGQTEESWCCACYALTFTSGPVAGKTMVVQSISTGGDLGSNHFDLAIPGGGVGLFDGCTPQFGGLPGARYGGISSRQECDSFPEPLKPGCQWRFDWFQNADNPSFTFERVQCPEELVARTGCRRHDDGGFSVFKAPSA

SEQ ID NO: 46957 - protein, 214 aa, Melanocarpus albomyces
ANGQSTRYWDCCKPSCGWAGKGPVNQPVYSCDANFQRIHDFDAVSGCEGGPAFSCADHSPWAINDNLSYGFAATALSGQTEESWCCACYALIFRSGPVAGKTMVVQSTSTGGDLGSNHFDLNIPGGGVGLFDGCTPQFGGLPGARYGGISSRQECDSFPEPLKPGCQWRFDWFQNADNPSFTFERVQCPEELVARTGCRRHDDGGFAVFKAPSA

SEQ ID NO: 46958 - protein, 214 aa, Melanocarpus albomyces
ANGQSTRYWDCCKPSCGWAGKGPVNQPVYSCDANCQRIHDFDAVSGCEGGPAFSCCDHSPWAINDNLSYGFAATALSGQTEESWCCACYALTFTSGPVAGKTMVVQSTSTGGDLGSNHFDLNIPGGGVGLFDGCTPQFGGLPGARYGGISSRQECDSFPEPLKPGCQWRFDWFQNADNPSFTFERVQCPEELVARTGCRRHDDGGFAVFKAPSA

SEQ ID NO: 46959 - protein, 205 aa, Melanocarpus albomyces
NGQSTRYWDCCKPSCGWAGKGPVNQPVYSCDANFQRIHDFDAVSGCEGGPAFSCADHSPWAINDNLSYGFAATALSGQTEESWCCACYALTFTSGPVAGKTMVVQSTSTGGDLGSNHFDLNIPGGGVGLFDGCTPQFGGLPGARYGGISSRQECDSFPEPLKPGCQWRFDWFQNADNPSFTFERVQCPEELVARTGCRRHDDGGF

SEQ ID NO: 46960 - protein, 271 aa, Synthetic construct
ASGSGTSTRYWDCCKPSCSWSGKASVNRPVLACDANNNPLSDASVKSGCDGGSAYTCANNSPWAVNDQLSYGFAATKLSGGTESSWCCACYALTFTSGPVAGKTMVVQSTNTGGDLGSNQFDINMPGGGVGLFDGCTRQFGGLPGAQYGGISSRSQCDSFPAALKPGCQWRFDWFQNASNPNFTFKQVQCPSELTSRTGCKRNDDSQFPVFTPPSGGGSNPSTPTTPPSSGGGSGCTADKYAQCGGSGWSGCTNCPSGSTCKTINDYYHQC

SEQ ID NO: 46961 - protein, 271 aa, Synthetic construct
ASGSGQSTRYWDCCKPSCSWSGKASVNRPVLACDANNNPLSDASVKSGCDGGSAYTCANNSPWAVNDQLSYGFAATKLSGGTESSWCCACYALTFTSGPVAGKTMVVQSTNTGGDLGSNQFDINMPGGGVGLFDGCTRQFGGLPGARYGGISSRSQCDSFPAALKPGCQWRFDWFQNASNPNFTFKQVQCPSELTSRTGCKRNDDSQFPVFTPPSGGGSNPSTPTTPPSSGGGSGCTADKYAQCGGSGWSGCTNCPSGSTCKTINDYYHQC

SEQ ID NO: 46962 - protein, 271 aa, Synthetic construct
ASGSGTSTRYWDCCKPSCSWSGKASVNRPVLACDANNNPLSDASVKSGCDGGSAYTCANNSPWAVNDQLSYGFAATKLSGGTESSWCCACYALTFTSGPVAGKTMVVQSTNTGGDLGSNQFDINMPGGGVGLFDGCTRQFGGLPGAQYGGISSRSQCDSFPAALKPGCQWRFDWFQNASNPNFTFKQVQCPSELTSRTGCKRNDDSQFPVFTPPSGGGTNPSTPTTPPSSGGGSGCTADKYAQCGGSGWSGCTNCPSGSTCKTINDYYHQC

SEQ ID NO: 46963 - protein, 271 aa, Synthetic construct
ASGSGTSTRYWDCCKPSCSWSGKASVNRPVLACDANNNPLSDASVKSGCDGGSAYTCANNSPWAVNDQLSYGFAATKLSGGTESSWCCACYALTFTSGPVAGKTMVVQSTNTGGDLGSNQFDINMPGGGVGLFDGCTRQFGGLPGARYGGISSRSQCDSFPAALKPGCQWRFDWFQNADNPNFTFKQVQCPSELTSRTGCKRNDDSQFPVFTPPSGGGSNPSTPTTPPSSGGGSGCTADKYAQCGGSGWSGCTNCPSGSTCKTINDYYHQC

SEQ ID NO: 46964 - protein, 271 aa, Synthetic construct
ASGSGTSTRYWDCCKPSCSWSGKASVNRPVLACDANNNPLSDASVKSGCDGGSAYTCANNSPWAVNDQLSYGFAATKLSGGTESSWCCACYALTFTSGPVAGKTMVVQSTNTGGDLGSNQFDINMPGGGVGLFDGCTRQFGGLPGARYGGISSRSQCDSFPAALKPGCQWRFDWFQNADNPNFTFKQVQCPSELTSRTGCKRNDDSQFPVFTPPSGGGTNPSTPTTPPSSGGGSGCTADKYAQCGGSGWSGCTNCPSGSTCKTINDYYHQC

SEQ ID NO: 46965 - protein, 232 aa, Staphylotrichum coccosporum
GKSTRYWDCCKPSCSWPGKASVNQPVFACSANFQRISDPNVKSGCDGGSAYACADQTPWAVNDNFSYGFAATSIMGGNEASWCCGCYELTFTSGPVAGKTMVVQSTSTGGDLGTNHFDLAMPGGGVGIFDGCTPQFGGLAGDRYGGVSSRSECDSFPAALVPGCYWRFDWFKNADNPTFTFRQVQCPSELVARTGCRRNDDGNFPVFTPPSGGQSSSSSSSSSARPTSTSTS

SEQ ID NO: 46966 - protein, 231 aa, Staphylotrichum coccosporum
GKSTRYWDCCKPSCSWPGKASVNQPVFACSANFTRISDPNVKSGCDGGTAYACADQTPWAVNDNFSYGFAATSISGGNEASWCCGCYELTFTSGPGAGKTMVVQSTSTGGDLGVNHFDLAMPGGGVGIFDGCSPQFGGLPGDRYGGVSSRSQCDSFPAPLKPGCYWRFDWFKNADNPTFTFRQVQCPSELVARTGCRRNDDGNFPVFTPPSGGQSSSSSSSSSAKPTSTTS

SEQ ID NO: 46967 - protein, 270 aa, Thermothielavioides terrestris
SGSGQSTRYWDCCKPSCAWPGKAAVSQPVYACDANFQRLSDFNVQSGCNGGSAYACADQTPWAVNDNLAYGFAATSIAGGSESSWCCACYALTFTSGPVAGKTMVVQSTSTGGDLGSNHFDIAMPGGGVGIFDGCSSQFGGLPGARYGGISSRDQCDSFPAPLKPGCQWRFDWFQNADNPTFTFQQVQCPAEIVARSGCKRNDDSSFPVFTPPSSPSSPSSPSSPSSPSSPSGCTAERWAQCGGNGWSGCTTCVAGSTCTKINDWYHQCL

SEQ ID NO: 46968 - protein, 292 aa, Neurospora tetrasperma
MRSSTVLQTGLVAALPFAVQAASGSGQSTRYWDCCKPSCSWSGKASVNRPVLACDANNNPLSDASVKSGCDGGSAYTCANNSPWAVNDQLSYGFAATKLSGGTESSWCCACYALTFTSGPVAGKTMVVQSTSTGGDLGSNHFDINMPGGGVGLFDGCTRQFGGLPGAQYGGISSRSQCDSFPAALKPGCQWRFDWFQNADNPNFTFKQVQCPSELTSRTGCKRNDDSQFPVFTPPSGGGTNPSTPTTPPSSGGGSGCTADKYAQCGGSGWSGCTNCPSGSTCKTINDYYHQC

SEQ ID NO: 46969 - protein, 294 aa, Staphylotrichum coccosporum
ADGKSTRYWDCCKPSCSWPGKASVNQPVFACSANFQRISDPNVKSGCDGGSAYACADQTPWAVNDNFSYGFAATSIMGGNEASWCCACYELTFTSGPVHGKTMVVQSTSTGTDLGTNHFDLAMPGGGVGIFDGCSPQFGGLPGDRYGGVSSRSQCDSFPAALKPGCYWRFDWFKNADNPTFTFRQVQCPSELVARTGCRRNDDGNFPVFTPPSGGQSSSSSSSSSAKPTSTTSTASTKATSTTSTASSQTSSSTGGGCAAQRWAQCGGIGFSGCTTCVSGTTCNKQNDWYSQCL

SEQ ID NO: 46970 - protein, 295 aa, Staphylotrichum coccosporum
ADGKSTRYWDCCKPSCSWPGKASVNQPVFACSANFQRISDPNVKSGCDGGSAYACADQTPWAVNDNFSYGFAATSISGGNEASWCCGCYELTFTSGPVAGKTMVVQSTSTGGDLGTNHFDLAMPGGGVGIFDGCTPQFGGLAGDRYGGVSSRSQCDSFPAALKPGCYWRFDWFKNADNPTFTFRQVQCPSELVARTGCRRNDDGNFPVFTPPSGGQSSSSSSSSSAKPTSTSTSTTSTKATSTTSTASSQTSSSTGGGCAAQRWAQCGGIGFSGCTTCVSGTTCNKQNDWYSQCL

SEQ ID NO: 46971 - protein, 295 aa, Staphylotrichum coccosporum
ADGKSTRYWDCCKPSCSWPGKASVNQPVFACSANFQRISDPNVKSGCDGGSAYACADQTPWAVNDNFSYGFAATSISGGNEASWCCGCYELTFTSGPVAGKTMVVQSTSTGGDLGTNHFDLAMPGGGVGIFDGCTPQFGGLPGDRYGGVSSRSQCDSFPAALVPGCYWRFDWFKNADNPTFTFRQVQCPSELVARTGCRRNDDGNFPVFTPPSGGQSSSSSSSSSAKPTSTSTSTTSTKATSTTSTASSQTSSSTGGGCAAQRWAQCGGIGFSGCTTCVSGTTCNKQNDWYSQCL

SEQ ID NO: 46972 - protein, 295 aa, Staphylotrichum coccosporum
ADGKSTRYWDCCKPSCSWPGKASVNQPVFACDANFQRISDPNVKSGCDGGSAYACADQTPWAVNDNFSYGFAATSISGGNEASWCCGCYELTFTSGPVAGKTMVVQSTSTGGDLGTNHFDLAMPGGGVGIFDGCSPQFGGLPGDRYGGVSSRSQCDSFPAALKPGCYWRFDWFKNADNPTFTFRQVQCPSELVARTGCRRNDDGNFPVFTPPSGGQSSSSSSSSSAKPTSTSTSTTSTKATSTTSTASSQTSSSTGGGCAAQRWAQCGGIGFSGCTTCVSGTTCNKQNDWYSQCL

SEQ ID NO: 46973 - protein, 295 aa, Staphylotrichum coccosporum
ADGKSTRYWDCCKPSCSWPGKASVNQPVFACSANFQRISDPNVKSGCDGGSAYACADQTPWAVNDNFSYGFAATSISGGNEASWCCGCYELTFTSGPVAGKKMVVQSTSTGGDLGTNHFDLAMPGGGVGIFDGCSPQFGGLAGDRYGGVSSRSQCDSFPAALKPGCYWRFDWFKNADNPTFTFRQVQCPSELVARTGCRRNDDGNFPVFTPPSGGQSSSSSSSSSAKPTSTSTSTTSTKATSTTSTASSQTSSSTGGGCAAQRWAQCGGIGFSGCTTCVSGTTCNKQNDWYSQCL

SEQ ID NO: 46974 - protein, 295 aa, Staphylotrichum coccosporum
ADGKSTRYWDCCKPSCSWPGKASVNQPVFACSANFQRISDPNVKSGCDGGSAYACADQTPWAVNDNFSYGFAATSISGGNEASWCCACYELTFTSGPVAGKTMVVQSTSTGGDLGTNHFDLAMPGGGVGIFDGCSPQFGGLAGDRYGGVSSRSQCDSFPAALKPGCYWRFDWFKNADNPTFTFRQVQCPSELVARTGCRRNDDGNFPVFTPPSGGQSSSSSSSSSAKPTSTSTSTTSTKATSTTSTASSQTSSSTGGGCAAQRWAQCGGIGFSGCTTCVSGTTCNKQNDWYSQCL

SEQ ID NO: 46975 - protein, 295 aa, Staphylotrichum coccosporum
ADGKSTRYWDCCKPSCSWPGKASVNQPVFACSANFQRISDPNVKSGCDGGSAYACADQTPWAVNDNFSYGFAATSISGGNEASWCCGCYELTFTSGPVAGKTMVVQSTSTGGDLGTNHFDLAMPGGGVGIFDGCSPQFGGLPGDRYGGVSSRSQCDSFPAALKPGCYWRFDWFKNADNPTFTFRQVQCPSELVARTGCRRNDDGNFPVFTPPSGGQSSSSSSSSSAKPTSTSTSTTSTKATSTTSTASSQTSSSTGGGCAAQRWAQCGGIGFSGCTTCVSGTTCNKQNDWYSQCL

SEQ ID NO: 46976 - protein, 295 aa, Staphylotrichum coccosporum
ADGKSTRYWDCCKPSCSWPGKASVNQPVFACSANFQRISDPNVKSGCDGGSAYACADQTPWAVNDNFSYGFAATSIMGGNEASWCCGCYELTFTSGPVAGKKMVVQSTSTGGDLGVNHFDLAMPGGGVGIFDGCTPQFGGLAGDRYGGVSSRDQCDSFPAPLKPGCYWRFDWFKNADNPTFTFRQVQCPSELVARTGCRRNDDGNFPVFTPPSGGQSSSSSSSSSAKPTSTSTSTTSDKATSTTSTASSQTSSSTGGGCAAQRWAQCGGIGFSGCTTCVSGTTCNKQNDWYSQCL

SEQ ID NO: 46977 - protein, 295 aa, Staphylotrichum coccosporum
ADGKSTRYWDCCKPSCSWPGKASVNQPVFACSANFQRISDPNVKSGCDGGSAYACADQTPWAVNDNFSYGFAATSISGGNEASWCCGCYELTFTSGPVAGKTMVVQSTSTGGDLGTNHFDLAMPGGGVGIFDGCSPQFGGLAGDRYGGVSSRSECDSFPAALKPGCYWRFDWFKNADNPTFTFRQVQCPSELVARTGCRRNDDGNFPVFTPPSGGQSSSSSSSSSAKPTSTSTSTTSTKATSTTSTASSQTSSSTGGGCAAQRWAQCGGIGFSGCTTCVSGTTCNKQNDWYSQCL

SEQ ID NO: 46978 - protein, 212 aa, Melanocarpus albomyces
NGQSTRYWDCCKPSCGWAGKAPVNQPVYSCDANFQRIHDFDAVSGCEGGPAFTCADHSPWAINDNLSYGFAATALSGQTEESWCCACYALTFTSGPVAGKTMVVQSTSTGGDLGSNHFDLAIPGGGVGLFDGCTPQFGGLPGARYGGISSRQECDSFPEPLKPGCQWRFDWFQNADNPSFTFERVQCPEELVARTGCRRHDDGGFAVFKAPS

SEQ ID NO: 46979 - protein, 212 aa, Melanocarpus albomyces
NGQSTRYWDCCKPSCGWAGKAPVNQPVYSCDANFQRIHDFDAVSGCEGGPAFLCADHSPWAINDNLSYGFAATALSGQTEESWCCACYALTFTSGPVAGKTMVVQSTSTGGDLGSNHFDLAIPGGGVGLFDGCTPQFGGLPGARYGGISSRQECDSFPEPLKPGCQWRFDWFQNADNPSFTFERVQCPEELVARTGCRRHDDGGFAVFKAPS

SEQ ID NO: 46980 - protein, 212 aa, Melanocarpus albomyces
NGQSTRYWDCCKPSCGWAGKGPVNQPVYSCDANFQRIHDFDAVSGCEGGPAYSCADHSPWAINDNLSYGFAATALSGQTEESWCCACYALTFTSGPVAGKTMVVQSTSTGGDLGSNHFDLNIPGGGVGLFDGCTPQFGGLPGARYGGISSRQECDSFPEPLKPGCQWRFDWFQNADNPSFTFERVQCPEELVARTGCRRHDDGGFAVFKAPS

SEQ ID NO: 46981 - protein, 212 aa, Melanocarpus albomyces
NGQSTRYWDCCKPSCGWAGKGPVNQPVYSCDANFQRIHDFDAVSGCEGGPAFSCADHSPWAINDNLSYGFAATALSGQTEESWCCACYALTFTSGPVAGKTMVVQSTSTGGDLGSNHFDLAIPGGGVGLFDGCTPQFGGLPGARYGGISSRQECDSFPEPLKPGCQWRFDWFQNADNPSFTFERVQCPEELVARTGCRRHDDGGFAVFKAPS

SEQ ID NO: 46982 - protein, 212 aa, Melanocarpus albomyces
NGQSTRYWDCCKPSCGWAGKAPVNQPVYSCDANFQRIHDFDAVSGCEGGPAFSCADHSPWAINDNLSYGFAATALSGQTEESWCCACYALTFTSGPVAGKTMVVQSTSTGGDLGSNHFDLAIPGGGVGLFDGCTPQFGGLPGARYGGISSRQECDSFPEPLKPGCQWRFDWFQNADNPSFTFERVQCPEELVARTGCRRHDDGGHAVFKAPS

SEQ ID NO: 46983 - protein, 212 aa, Melanocarpus albomyces
NGQSTRYWDCCKPSCGWAGKGPVNQPVYSCDANFQRIHDFDAVSGCEGGPAFSCADHSPWAINDNLSYGFAATALSGQTESSWCCACYALTFTSGPVAGKTMVVQSTSTGGDLGSNHFDLNIPGGGVGLFDGCTPQFGGLPGARYGGISSRQECDSFPEPLKPGCQWRFDWFQNADNPSFTFERVQCPEELVARTGCRRHDDGGFAVFKAPS

SEQ ID NO: 46984 - protein, 212 aa, Melanocarpus albomyces
NGQSTRYWDCCKPSCGWAGKAPVNQPVYSCDANMQRIHDFDAVSGCEGGPAFSCADHSPWAINDNLSYGFAATALSGQTEESWCCACYALTFTSGPVAGKTMVVQSTSTGGDLGSNHFDLAIPGGGVGLFDGCTPQFGGLPGARYGGISSRQECDSFPEPLKPGCQWRFDWFQNADNPSFTFERVQCPEELVARTGCRRHDDGGFAVFKAPS

SEQ ID NO: 46985 - protein, 212 aa, Melanocarpus albomyces
NGQSTRYWDCCKPSCGWAGKAPVNQPVYSCDANFQRIHDFDAVSGCEGGPAFSCADHSPWAINDNLSYGFAATALSGQTEESWCCACYALTFTSGPVAGKTMVVQSTSTGGDLGSNHFDLAIPGGGVGLFDGCTPQFGGLPGARYGGISSRQECDSFPEPLKPGCQWRFDWFRNADNPSFTFERVQCPEELVARTGCRRHDDGGFAVFKAPS

SEQ ID NO: 46986 - protein, 212 aa, Melanocarpus albomyces
NGQSTRYWDCCKPSCGWAGKGPVNQPVYSCDANFQRIHDFDAVSGCEGGPAFSCADHSPWAINDNLSYGFAATSLSGQTEESWCCACYALTFTSGPVAGKTMVVQSTSTGGDLGSNHFDLNIPGGGVGLFDGCTPQFGGLPGARYGGISSRQECDSFPEPLKPGCQWRFDWFQNADNPSFTFERVQCPEELVARTGCRRHDDGGFAVFKAPS

SEQ ID NO: 46987 - protein, 212 aa, Melanocarpus albomyces
NGQSTRYWDCCKPSCGWAGKGPVNQPVYSCDANFQRIHDFDSVSGCEGGPAYSCADHSPWAINDNLSYGFAATALSGQTEESWCCACYALTFTSGPVAGKTMVVQSTSTGGDLGSNHFDLNIPGGGVGLFDGCTPQFGGLPGARYGGISSRQECDSFPEPLKPGCQWRFDWFQNADNPSFTFERVQCPEELVARTGCRRHDDGGFAVFKAPS

SEQ ID NO: 46988 - protein, 212 aa, Melanocarpus albomyces
NGQSTRYWDCCKPSCGWAGKGPVNQPVYSCDANFQRIHDFDAVSGCEGGPATSCADHSPWAINDNLSYGFAATALSGQTEESWCCACYALTFTSGPVAGKTMVVQSTSTGGDLGSNHFDLNIPGGGVGLFDGCTSQFGGLPGARYGGISSRQECDSFPEPLKPGCQWRFDWFQNADNPSFTFERVQCPEELVARTGCRRHDDGGFAVFKAPS

SEQ ID NO: 46989 - protein, 212 aa, Melanocarpus albomyces
NGQSTRYWDCCKPSCGWAGKAPVNQPVYSCDANFQRIHDFDAVSGCEGGPAFSCADHSPWAINDNLSYGFAATALSGQTEESWCCACYALTFTSGPVAGKTMVVQSTSTGGDLGSNHFDLNIPGGGVGLFDGCTPQFGGLPGARYGGISSRQECDSFPEPLKPGCQWRFDWFQNADNPSFTFERVQCPEELVARTGCRRHDDGGFAVFKAPS

SEQ ID NO: 46990 - protein, 212 aa, Melanocarpus albomyces
NGQSTRYWDCCKPSCGWAGKAPVNQPVYSCDANFQRIHDFDAVSGCEGGPAFACADHSPWAINDNLSYGFAATALSGQTEESWCCACYALTFTSGPVAGKTMVVQSTSTGGDLGSNHFDLAIPGGGVGLFDGCTPQFGGLPGARYGGISSRQECDSFPEPLKPGCQWRFDWFQNADNPSFTFERVQCPEELVARTGCRRHDDGGFAVFKAPS

SEQ ID NO: 46991 - protein, 212 aa, Melanocarpus albomyces
NGQSTRYWDCCKPSCGWAGKGPVNQPVYSCDANFQRIHDFDAVSGCEGGPAFSCADHSPWAINDNLSYGFAATALSGQTEESWCCACYALTFTSGPVAGKTMVVQSTSTGGDLGSNHFDLNIPGGGVGLFDGCTSQFGGLPGARYGGISSRQECDSFPEPLKPGCQWRFDWFQNADNPSFTFERVQCPEELVARTGCRRHDDGGFAVFKAPS

SEQ ID NO: 46992 - protein, 212 aa, Melanocarpus albomyces
NGQSTRYWDCCKPSCGWAGKGPVNQPVYSCDANFQRIHDFDAQSGCEGGPAFSCADHSPWAINDNLSYGFAATALSGQTEESWCCACYALTFTSGPVAGKTMVVQSTSTGGDLGSNHFDLNIPGGGVGLFDGCTPQFGGLPGARYGGISSRQECDSFPEPLKPGCQWRFDWFQNADNPSFTFERVQCPEELVARTGCRRHDDGGFAVFKAPS

SEQ ID NO: 46993 - protein, 212 aa, Melanocarpus albomyces
NGQSTRYWDCCKPSCGWAGKAPVNQPVYSCDANFQRIHDFDAVSGCEGGPAFSCADHSPWAINDNLSYGFAATALSGQTEESWCCACYALTFTSGPVAGKTMVVQSISTGGDLGSNHFDLAIPGGGVGLFDGCTPQFGGLPGARYGGISSRQECDSFPEPLKPGCQWRFDWFQNADNPSFTFERVQCPEELVARTGCRRHDDGGFAVFKAPS

SEQ ID NO: 46994 - protein, 212 aa, Melanocarpus albomyces
NGQSTRYWDCCKPSCGWAGKGPVNQPVYSCDANFQRISDFDAVSGCEGGPAFSCADHSPWAINDNLSYGFAATALSGQTEESWCCACYALTFTSGPVAGKTMVVQSTSTGGDLGSNHFDLNIPGGGVGLFDGCTPQFGGLPGARYGGISSRQECDSFPEPLKPGCQWRFDWFQNADNPSFTFERVQCPEELVARTGCRRHDDGGFAVFKAPS

SEQ ID NO: 46995 - protein, 212 aa, Melanocarpus albomyces
NGQSTRYWDCCKPSCGWAGKAPVNQPVYSCDANFQRIHDFDAVSGCEGGPAFVCADHSPWAINDNLSYGFAATALSGQTEESWCCACYALTFTSGPVAGKTMVVQSTSTGGDLGSNHFDLAIPGGGVGLFDGCTPQFGGLPGARYGGISSRQECDSFPEPLKPGCQWRFDWFQNADNPSFTFERVQCPEELVARTGCRRHDDGGFAVFKAPS

SEQ ID NO: 46996 - protein, 213 aa, Melanocarpus albomyces
NGQSTRYWDCCKPSCGWAGKGPVNQPVYSCDANFQRIHDFDAVSGCEGGPAFSCADHSPWAINDNLSYGFAATALSGQTEESWCCACYALTFTSGPVAGKTMVVQSTSTGGDLGSNHFDLNIPGGGVGLFDGCTPQFGGLPGARYGGISSRQECDSFPEPLKPGCQWRFDWFQNADNPSFTFERVQCPEELVARTGCRRHDDGGFPAVFKAPS

SEQ ID NO: 46997 - protein, 234 aa, Melanocarpus albomyces
MRSTPVLRALLAAALPLGALAANGQSTRYWDCCKPSCGWAGKGPVNQPVYSCDANFQRIHDFDAVSGCEGGPAFSCADHSPWAINDNLSYGFAATALSGQTEESWCCACYALTFTSGPVAGKTMVVQSTSTGGDLGSNHFDLNIPGGGVGLFDGCTPQFGGLPGARYGGISSRQECDSFPEPLKPGCQWRFDWFQNADNPSFTFERVQCPEELVARTGCRRHDDGGFAVFKAPS

SEQ ID NO: 46998 - protein, 234 aa, Melanocarpus albomyces
MRSTPVLRALLAAALPLGALAANGQSTRYWDCCKPSCGWRGKGPVNQPVYSCDANFQRIHDFDAVSGCEGGPAFSCADHSPWAINDNLSYGFAATALSGQTEESWCCACYALTFTSGPVAGKTMVVQSTSTGGDLGSNHFDLNIPGGGVGLFDGCTPQFGGLPGARYGGISSRQECDSFPEPLKPGCQWRFDWFQNADNPSFTFERVQCPEELVARTGCRRHDDGGFAVFKAPS

SEQ ID NO: 46999 - protein, 269 aa, Thermothielavioides terrestris
SGSGQSTRYWDCCKPSCAWPGKAAVSQPVYSCDANFQRLSDFNVQSGCNGGSAYACADQTPWAVNDNLAYGFAATSIAGGSESSWCCACYALTFTSGPVAGKTMVVQSTSTGGDLGSNHFDIAMPGGGVGIFDGCSSQFGGLPGDRYGGISSRDQCDSFPAPLKPGCYWRFDWFQNADNPTVTFQQVQCPAEIVARSGCKRNDDSSFPVFTPSPTPSPTPSPTPSPTPSPTGCTAERWAQCGGNGWSGCTTCVAGSTCTKINDWYHQCL

SEQ ID NO: 47000 - protein, 211 aa, Melanocarpus albomyces
NGQSTRYWDCCKPSCGWAGKGPVNQPVYSCDANFQRIHDFDAVSGCEGGPAFSCADHSPWAINDNLSYGFAATALSGQTEESWCCACYALTFTSGPVAGKTMVVQSTSTGGDLGSNHFDLNIPGGGVGLFDGCTPQFGGLPGARYGGISSRQECDSFPEPLKPGCQWRFDWFQNADNPSFTFERVQCPEELVARTGCRRHDDGGFVFKAPS

SEQ ID NO: 47001 - protein, 297 aa, Staphylotrichum coccosporum
LAADGKSTRYWDCCKPSCSWPGKASVNQPVFACSANFQRISDPNVKSGCDGGSAYACADQTPWAVNDNFSYGFAATSISGGNEASWCCGCYELTFTSGPVAGKTMVVQSTSTGGDLGTNHFDLAMPGGGVGIFDGCSPQFGGLAGDRYGGVSSRSQCDSFPAALKPGCYWRFDWFKNADNPTFTFRQVQCPSELVARTGCRRNDDGNFPVFTPPSGGQSSSSSSSSSAKPTSTSTSTTSTKATSTTSTASSQTSSSTGGGCAAQRWAQCGGIGFSGCTTCVSGTTCNKQNDWYSQCL

SEQ ID NO: 47002 - protein, 271 aa, Synthetic construct
ASGSGTSTRYWDCCKPSCSWSGKASVNRPVLACDANNNPLSDASVKSGCDGGSAYTCANNSPWAVNDQLSYGFAATKLSGGTESSWCCACYALTFTSGPVAGKTMVVQSTNTGGDLGSNQFDINMPGGGVGLFDGCTRQFGGLPGARYGGISSRSQCDSFPAALKPGCQWRFDWFQNASNPNFTFKQVQCPSELTSRTGCKRNDDSQFPVFTPPSGGGSNPSTPTTPPSSGGGSGCTADKYAQCGGSGWSGCTNCPSGSTCKTINDYYHQC

SEQ ID NO: 47003 - protein, 271 aa, Synthetic construct
ASGSGTSTRYWDCCKPSCSWSGKASVNRPVLACDANNNPLSDASVKSGCDGGSAYTCANNSPWAVNDQLSYGFAATKLSGGTESSWCCACYALTFTSGPVAGKTMVVQSTNTGGDLGSNQFDINMPGGGVGLFDGCTRQFGGLPGARYGGISSRSQCDSFPAALKPGCQWRFDWFQNASNPNFTFKQVQCPSELTSRTGCKRNDDSQFPVFTPPSGGGTNPSTPTTPPSSGGGSGCTADKYAQCGGSGWSGCTNCPSGSTCKTINDYYHQC

SEQ ID NO: 47004 - protein, 279 aa, Acremonium thermophilum
GKSTRYWDCCKPSCGWAGKASVNQPVFSCSADWQRISDFNAKSGCDGGNAYSCADQTPWAVNDNFSYGFAATAIAGGSEQSWCCACYALTFNSGPVAGKTMVVQSTSTGGDLGENHFDLAIPGGGVGIFNGCQSQFGGLPGAQYGGIQDRSQCSSFPAPLQPGCQWRFDWFQNADNPTFTFQRVQCPSELTSRTGCKRDDDANYPVFNPPSGNPSGGNPPGGNSTGTTTTRRPATTTGSSPGPTQSHYGQCGGIGYSGPTVCASGTTCQVLNPYYSQCL

SEQ ID NO: 47005 - protein, 296 aa, Staphylotrichum coccosporum
AADGKSTRYWDCCKPSCSWPGKASVNQPVFACSANFQRISDPNVKSGCDGGSAYACADQTPWAVNDNFSYGFAATSISGGNEASWCCGCYELTFTSGPVAGKTMVVQSTSTGGDLGTNHFDLAMPGGGVGIFDGCSPQFGGLAGDRYGGVSSRSQCDSFPAALKPGCYWRFDWFKNADNPTFTFRQVQCPSELVARTGCRRNDDGNFPVFTPPSGGQSSSSSSSSSAKPTSTSTSTTSTKATSTTSTASSQTSSSTGGGCAAQRWAQCGGIGFSGCTTCVSGTTCNKQNDWYSQCL

SEQ ID NO: 47006 - protein, 214 aa, Melanocarpus albomyces
ANGQSTRYWDCCKPSCGWAGKGPVNQPVYSCDLNMRRIHDFDAVSGCEGGPAFSCADHSPWAINDNLSYGFAATALSGQTEESWCCACYALTFTSGPVAGKTMVVQSTSTGGDLGSNHFDLNIPGGGVGLFDGCTPQFGGLPGARYGGISSRQECDSFPEPLKPGCQWRFDWFQNADNPSFTFERVQCPEELVARTGCRRHDDGGFAVFKAPSA

SEQ ID NO: 47007 - protein, 214 aa, Melanocarpus albomyces
ANGQCTRYWDCCKPSCGWAGKGPVNQPVYSCDANFQRIHDFDAVSGCEGGPAFSCADHSPWAINDNLSYGFAATALSGQTEESWCCACYALTFTSGPVAGKTMVIQSTSTGGDLGSNHCDLNIPGGGVGLFDGCTPQFGGLPGARYGGISSRQECDSFPEPLKPGCQWRFDWFQNADNPSFTFERVQCPEELVARTGCRRHDDGGFAVFKAPSA

SEQ ID NO: 47008 - protein, 292 aa, Neurospora tetrasperma
MRSSTVLQTGLVAALPFAVHAASGSGQSTRYWDCCKPSCSWSGKASVNRPVLACDANNNPLSDASVKSGCDGGSAYTCANNSPWAVNDQLAYGFAATKLSGGTESSWCCACYALTFTSGPVAGKTLVVQSTSTGGDLGSNHFDINMPGGGVGLFDGCTRQFGGLPGAQYGGISSRSQCDSFPAALKPGCQWRFDWFQNADNPNFTFKQVQCPSELTSRTGCKRNDDSQFPVFTAPSGGGTNPSTPTTPPSSGGGSGCTADKYAQCGGSGWSGCTNCPSGSTCKTINDYYHQC

SEQ ID NO: 47009 - protein, 292 aa, unidentified
MRSSTILQTGLVAALPFAVQAASGSGQSTRYWDCCKPSCSWSGKAPVNRPVLACDANNNPLSDASVKSGCDGGSAYTCANNSPWAVNDQLAYGFAATKLSGGTESSWCCACYALTFTSGPVAGKTLVVQSTSTGGDLGSNHFDINMPGGGVGLFDGCKRQFGGLPGAQYGGISSRSQCDSFPAALKPGCQWRFDWFQNADNPNFTFKQVQCPSELTSRTGCKRNDDSQFPVFTPPSGGGSNPSTPTTPPSSGGGSGCTADKYAQCGGSGWSGCTNCPSGSTCKTINDYYHQC

SEQ ID NO: 47010 - protein, 292 aa, Neurospora tetrasperma
MRSSTVLQTGLVAALPFAVQAASGSGQSTRYWDCCKPSCSWSGKASVNRPVLACDANNNPLSDASVKSGCDGGSAYTCANNSPWAVNDQLSYGFAATKLSGGTESSWCCACYALTFTSGPVAGKTMVVQSTSTGGDLGSNHFDINMPGGGVGLFDGCTRQFGGLPGAQYGGISSRSQCDSFPAALKPGCQWRFDWFQNADNPNFTFKQVQCPSELTSRTGCKRNDDSQFPVFTPPSGGGTNPSTPTTPPSSGGGSGCTADKYAQCGGSGWSGCTNCPSGSTCKTINDWYHQC

SEQ ID NO: 47011 - protein, 295 aa, Staphylotrichum coccosporum
ADGKSTRYWDCCKPSCSWPGKASVNQPVFACSANFQRISDPNVKSGCDGGSAYACADQTPWAVNDNFSYGFAATSISGGNEASWCCGCYELTFTSGPVAGKTMVVQSTSTGGDLGTNHFDLAMPGGGVGIFDGCSPQFGGLAGDRYGGVSSRSQCDSFPAALKPGCYWRFDWFKNADNPTFTFRQVQCPSELVARTGCRRNDDGNFPVFTPPSGGQSSSSSSSSSAKPTSTSTSTTSTKATSTTSTASSETSSSTGGGCAAQRWAQCGGIGFSGCTTCVSGTTCNKQNDWYSQCL

SEQ ID NO: 47012 - protein, 295 aa, Staphylotrichum coccosporum
ADGKSTRYWDCCKPSCSWPGKASVNQPVFACDANFQRISDPNVKSGCDGGSAYACADQTPWAVNDNFSYGFAATSISGGNEASWCCGCYELTFTSGPVAGKTMVVQSTSTGGDLGTNHFDLAMPGGGVGIFDGCSPQFGGLEGDRYGGVSSRSQCDSFPAALKPGCYWRFDWFKNADNPTFTFRQVQCPSELVARTGCRRNDDGNFPVFTPPSGGQSSSSSSSSSAKPTSTSTSTTSTKATSTTSTASSQTSSSTGGGCAAQRWAQCGGIGFSGCTTCVSGTTCNKQNDWYSQCL

SEQ ID NO: 47013 - protein, 295 aa, Staphylotrichum coccosporum
ADGKSTRYWDCCKPSCSWPGKASVNQPVFACSANFQRISDPNVKSGCDGGSAYACADQTPWAVNDNFSYGFAATSISGGNEASWCCGCYELTFTSGPVAGKTMVVQSTSTGGDLGTNHFDLAMPGGGVGIFDGCSPQFGGLAGDRYGGVSSRSQCDSFPAALKPGCYWRFDWFKNADNPTFTFRQVQCPSELVARTGCRRNDDGNFPVFTPPSGGQSSSSMSSSSAKPTSTSTSTTSTKATSTTSTASSQTSSSTGGGCAAQRWAQCGGIGFSGCTTCVSGTTCNKQNDWYSQCL

SEQ ID NO: 47014 - protein, 295 aa, Staphylotrichum coccosporum
ADGKSTRYWDCCKPSCSWPGKASVNQPVFACSANFQRISDPNVKSGCDGGTAYACADQTPWAVNDNFSYGFAATSISGGNEASWCCACYELTFTSGPVYGKTMVVQSTSTGGDLGTNHFDLAMPGGGVGIFDGCTPQFGGLAGDRYGGVSSRSQCDSFPAALKPGCYWRFDWFKNADNPTFTFRQVQCPSELVARTGCRRNDDGDFPVFTPPSGGQSSSSSSSSSAKPTSTSTSTTSDKATSTTSTASSQTSSSTGGGCAAQRWAQCGGIGFSGCTTCVSGTTCNKQNDWYSQCL

SEQ ID NO: 47015 - protein, 295 aa, Staphylotrichum coccosporum
ADGKSTRYWDCCKPSCSWPGKASVNQPVFACSANFQRISDPNVVSGCDGGSAYACADQTPWAVNDNFSYGFAATSISGGNEASWCCACYELTFTSGPVAGKTMVVQSTSTGGDLGTNHFDLAMPGGGVGIFDGCSPQFGGLAGDRYGGVSSRSECDSFPAPLKPGCYWRFDWFKNADNPTFTFRQVQCPSELVARTGCRRNDDGNFPVFTPPSGGQSSSSSSSSSAKPTSTSTSTTSTKATSTTSTASSQTSSSTGGGCAAQRWAQCGGIGFSGCTTCVSGTTCNKQNDWYSQCL

SEQ ID NO: 47016 - protein, 295 aa, Staphylotrichum coccosporum
ADGKSTRYWDCCKPSCSWPGKASVNQPVFACSANFQRISDPNVKSGCDGGSAYACADQTPWAVNDNFSYGFAATSISGGNEASWCCGCYELTFTSGPVAGKTMVVQSTSTGGDLGVNHFDLAMPGGGVGIFDGCSPQFGGLAGDRYGGVSSRSQCDSFPAALKPGCYWRFDWFKNADNPTFTFRQVQCPSELVARTGCRRNDDGNFPVFTPPSGGQSSSSSSSSSAKPTSTSTSTTSTKATSTTSTASSQTSSSTGGGCAAQRWAQCGGIGFSGCTTCVSGTTCNKQNDWYSQCL

SEQ ID NO: 47017 - protein, 295 aa, Staphylotrichum coccosporum
ADGKSTRYWDCCKPSCSWPGKASVNQPVFACSANFQRISDPNVKSGCDGGSAYACADQTPWAVNDNFSYGFAATSISGGNEASWCCGCYELTFTSGPVAGKTMVVQSTSTGGDLGTNHFDLAMPGGGVGIFDGCSPQFGGLEGDRYGGVSSRSQCDSFPAALKPGCYWRFDWFKNADNPTFTFRQVQCPSELVARTGCRRNDDGNFPVFTPPSGGQSSSSSSSSSAKPTSTSTSTTSTKATSTTSTASSQTSSSTGGGCAAQRWAQCGGIGFSGCTTCVSGTTCNKQNDWYSQCL

SEQ ID NO: 47018 - protein, 295 aa, Staphylotrichum coccosporum
ADGKSTRYWDCCKPSCSWPGKASVNQPVFACSANFQRISDPNVKSGCDGGTAYACADQTPWAVNDNFSYGFAATSISGGNEASWCCGCYELTFTSGPVAGKTMVVQSTSTGGDLGTNHFDLAMPGGGVGIFDGCSPQFGGLAGDRYGGVSSRSQCDSFPAALKPGCYWRFDWFKNADNPTFTFRQVQCPSELVARTGCRRNDDGNFPVFTPPSGGQSSSSSSSSSAKPTSTSTSTTSTKATSTTSTASSQTSSSTGGGCAAQRWAQCGGIGFSGCTTCVSGTTCNKQNDWYSQCL

SEQ ID NO: 47019 - protein, 295 aa, Staphylotrichum coccosporum
ADGKSTRYWDCCKPSCSWPGKASVNQPVFACYANFQRISDPNVKSGCDGGSAYACADQTPWAVNDNFSYGFAATSISGGNEASWCCGCYELTFTSGPVAGKTMVVQSTSTGGDLGTNHFDLAMPGGGVGIFDGCSPQFGGLAGDRYGGVSSRSQCDSFPAALKPGCYWRFDWFKNADNPTFTFRQVQCPSELVARTGCRRNDDGNFPVFTPPSGGQSSSSSSSSSAKPTSTSTSTTSTKATSTTSTASSQTSSSTGGGCAAQRWAQCGGIGFSGCTTCVSGTTCNKQNDWYSQCL

SEQ ID NO: 47020 - protein, 295 aa, Staphylotrichum coccosporum
ADGKSTRYWDCCKPSCSWPGKASVNQPVFACSANFQRISDPNVKSGCDGGSAYACADQTPWAVNDNFSYGFAATSISGGNEASWCCGCYELTFTSGPVAGKTMVVQSTSTGGDLGTNHFDLAMPGGGVGIFDGCSPQFGGLAGDRYGGVSSRSQCDSFPAALKPGCYWRFDWFKNADNPTFTFRQVQCPSELVARTGCRRNDDGNFPVFTPPSGGDSSSSSSSSSAKPTSTSTSTTSTKATSTTSTASSQTSSSTGGGCAAQRWAQCGGIGFSGCTTCVSGTTCNKQNDWYSQCL

SEQ ID NO: 47021 - protein, 295 aa, Staphylotrichum coccosporum
ADGKSTRYWDCCKPSCSWPGKASVNQPVFACSANFQRISDPNVKSGCDGGSAYACADQTPWAVNDNFSYGFAATSISGGNEASWCCGCYELTFTSGPVAGKTMVVQSTSTGGDLGTNHFDLAMPGGGVGIFDGCSPQFGGLAGDRYGGVSSRSQCDSFPAALKPGCYWRFDWFKNADNPTFTFRQVQCPSELVARTGCRRNDDGNFPVFTPPSGGQSSSSSSSSSAKPTSTSTSTTSTKATSTTSTASSQTSSSTGGGCAAQRWAQCGGIGFSGCTTCVSGTTCDKQNDWYSQCL

SEQ ID NO: 47022 - protein, 295 aa, Staphylotrichum coccosporum
ADGKSTRYWDCCKPSCSWPGKASVNQPVFACDANFQRISDPNVKSGCDGGSAYACADQTPWAVNDNFSYGFAATSISGGNEASWCCGCYELTFTSGPVYGKTMVVQSTSTGGDLGTNHFDLAMPGGGVGIFDGCSPQFGGLPGDRYGGVSSRSQCDSFPAELKPGCYWRFDWFKNADNPTFTFRQVQCPSELVARTGCRRNDDGNFPVFTPPSGGQSSSSSSSSSAKPTSTSTSTTSTKATSTTSTASPQTSSSTGGGCAAQRWAQCGGIGFSGCTTCVSGTTCNKQNDWYSQCL

SEQ ID NO: 47023 - protein, 295 aa, Staphylotrichum coccosporum
ADGKSTRYWDCCKPSCSWPGKASVNQPVFACSANFQRISDPNVKSGCDGGSAYACADQTPWAVNDNFSYGFAATSISGGNEASWCCGCYELTFTSGPVAGKTMVVQSTSTGGDLGTNHFDLAMPGGGVGIFDGCSPQFGGLAGDRYGGVSSRSQCDSFPAALKPGCYWRFDWFKNADNPTFTFRQVQCPSELVARTGCRRNDDGNFPVFTPPSGGVSSSSSSSSSAKPTSTSTSTTSTKATSTTSTASSQTSSSTGGGCAAQRWAQCGGIGFSGCTTCVSGTTCNKQNDWYSQCL

SEQ ID NO: 47024 - protein, 295 aa, Staphylotrichum coccosporum
ADGKSTRYWDCCKPSCSWPGKASVNQPVFACSANFQRISDPNVKSGCDGGSAYACADQTPWAVNDNFSYGFAATSISGGNEASWCCGCYELTFTSGPVAGKTMVVQSTSTGGDLGTNHFDLAMPGGGVGIFDGCSPQFGGLAGDRYGGVSSRSQCDSFPAALKPGCYWRFDWFKNADNPTFTFRQVQCPSELVARTGCRRNDDGNFPVFTPPSGGQSSSSLSSSSAKPTSTSTSTTSTKATSTTSTASSQTSSSTGGGCAAQRWAQCGGIGFSGCTTCVSGTTCNKQNDWYSQCL

SEQ ID NO: 47025 - protein, 295 aa, Staphylotrichum coccosporum
ADGKSTRYWDCCKPSCSWPGKASVNQPVFACSANFQRISDPNVKSGCDGGSAYACADQTPWAVNDNFSYGFAATSISGGNEASWCCGCYELTFTSGPVAGKTMVVQSTSTGGDLGTNHFDLAMPGGGVGIFDGCSPQFGGLAGDRYGGVSSRSQCDSFPAALKPGCYWRFDWFKNADNPTFTFRQVQCPSELVARTGCRRNDDGNFPVFTPPSGGQSSSSSSSSSARPTSTSTSTTSTKATSTTSTASSQTSSSTGGGCAAQRWAQCGGIGFSGCTTCVSGTTCNKQNDWYSQCL

SEQ ID NO: 47026 - protein, 295 aa, Staphylotrichum coccosporum
ADGKSTRYWDCCKPSCSWPGKASVNQPVFACSANFQRISDPNVKSGCDGGSAYACADQTPWAVNDNFSYGFAATSIMGGNEASWCCGCYELTFTSGPVAGKTMVVQSTSTGGDLGTNHFDLAMPGGGVGIFDGCSPQFGGLAGDRYGGVSSRSQCDSFPAALKPGCYWRFDWFKNADNPTFTFRQVQCPSELVARTGCRRNDDGNFPVFTPPSGGQSSSSSSSSSAKPTSTSTSTTSTKATSTTSTASSQTSSSTGGGCAAQRWAQCGGIGFSGCTTCVSGTTCNKQNDWYSQCL

SEQ ID NO: 47027 - protein, 295 aa, Staphylotrichum coccosporum
ADGKSTRYWDCCKPSCSWPGKASVNQPVFACSANFQRISDPNVKSGCDGGSAYACADQTPWAVNDNFSYGFAATSISGGNEASWCCGCYELTFTSGPVAGKTMVVQSTSTGGDLGTNHFDLAMPGGGVGIFDGCSPQFGGLAGDRYGGVSSRSQCDSFPAALKPGCYWRFDWFKNADNPTFTFRQVQCPSELVARTGCRRNDDGNFPHFTPPSGGQSSSSSSSSSAKPTSTSTSTTSTKATSTTSTASSQTSSSTGGGCAAQRWAQCGGIGFSGCTTCVSGTTCNKQNDWYSQCL

SEQ ID NO: 47028 - protein, 295 aa, Staphylotrichum coccosporum
ADGKSTRYWDCCKPSCSWPGKASVNQPVFACSANFQRISDPNVKSGCDGGSAYACADQTPWAVNDNFSYGFAATSISGGNEASWCCGCYELTFTSGPVAGKTMVVQSTSTGGDLGTNHFDLAMPGGGVGIFDGCSPQFGGLAGDRYGGVSSRSQCDSFPAALKPGCYWRFDWFKNADNPTFTFRQVQCPSELVARTGCRRNDDGNFPVFTPPSGGQSSSSSSSSSAKPTSTSTSTTSTKATSTTSTASSQTSSSTGGGCAAQRWAQCGGIGFSGCTTCVSGTTCNKQNDWYSQCL

SEQ ID NO: 47029 - protein, 295 aa, Staphylotrichum coccosporum
ADGKSTRYWDCCKPSCSWPGKASVNQPVFACSANFQRISDPNVKSGCDGGSAYACADQTPWAVNDNFSYGFAATSIKGGNEASWCCGCYELTFTSGPVAGKTMVVQSTSTGGDLGTNHFDLAMPGGGVGIFDGCSPQFGGLAGDRYGGVSSRSQCDSFPAALKPGCYWRFDWFKNADNPTFTFRQVQCPSELVARTGCRRNDDGNFPVFTPPSGGQSSSSSSSSSAKPTSTSTSTTSTKATSTTSTASSQTSSSTGGGCAAQRWAQCGGIGFSGCTTCVSGTTCNKQNDWYSQCL

SEQ ID NO: 47030 - protein, 295 aa, Staphylotrichum coccosporum
ADGKSTRYWDCCKPSCSWPGKASVNQPVFACSANFQRISDPNVKSGCDGGSAYACADQTPWAVNDNFSYGFAATSISGGNEASWCCGCYELTFTSGPVAGKTMVVQSTSTGGDLGTNHFDLAMPGGGVGIFDGCSPQFGGLAGDRYGGVSSRSQCDSFPAALKPGCYWRFDWFKNADNPTFTFRQVQCPSELVARTGCRRNDDGNFPVFTPPSGGQSTSSSSSSSAKPTSTSTSTTSTKATSTTSTASSQTSSSTGGGCAAQRWAQCGGIGFSGCTTCVSGTTCNKQNDWYSQCL

SEQ ID NO: 47031 - protein, 295 aa, Staphylotrichum coccosporum
ADGKSTRYWDCCKPSCSWPGKASVNQPVFACSANFQRISDPNVKSGCDGGSAYACADQTPWAVNDNFSYGFAATSISGGNEASWCCGCYELTFTSGPVAGKTMVVQSTSTGGDLGTNHFDLAMPGGGVGIFDGCSPQFGGLAGDRYGGVSSRSQCDSFPAALKPGCYWRFDWFKNADNPTFTFRQVQCPSELVARTGCRRNDDGNFPVFTPPSGGTSSSSSSSSSAKPTSTSTSTTSTKATSTTSTASSQTSSSTGGGCAAQRWAQCGGIGFSGCTTCVSGTTCNKQNDWYSQCL

SEQ ID NO: 47032 - protein, 295 aa, Staphylotrichum coccosporum
ADGKSTRYWDCCKPSCSWPGKASVNQPVFACSANFQRISDPNVKSGCDGGSAYACADQTPWAVNDNFSYGFAATSISGGNEASWCCGCYELTFTSGPVAGKTMVVQSTSTGGDLGTNHFDLAMPGGGVGIFDGCSPQFGGLAGDRYGGVSSRDQCDSFPAALKPGCYWRFDWFKNADNPTFTFRQVQCPSELVARTGCRRNDDGNFPVFTPPSGGQSSSSSSSSSAKPTSTSTSTTSTKATSTTSTASSQTSSSTGGGCAAQRWAQCGGIGFSGCTTCVSGTTCNKQNDWYSQCL

SEQ ID NO: 47033 - protein, 295 aa, Staphylotrichum coccosporum
ADGKSTRYWDCCKPSCSWPGKASVNQPVFACSANFQRISDPNVKSGCDGGSAYACADQTPWAVNDNFSYGFAATSISGGNEASWCCGCYELTFTSGPVAGKTMVVQSTSTGGDLGTNHFDLAMPGGGVGIFDGCSPQFGGLAGDRYGGVSSRSQCDSFPAALKPGCYWRFDWFKNADNPTFTFRQVQCPSELVARTGCRRNDDGNFPVFTPPSGGQSSSSSSSSKAKPTSTSTSTTSTKATSTTSTASSQTSSSTGGGCAAQRWAQCGGIGFSGCTTCVSGTTCNKQNDWYSQCL

SEQ ID NO: 47034 - protein, 295 aa, Staphylotrichum coccosporum
ADGKSTRYWDCCKPSCSWPGKASVNQPVFACDANFQRISDPNVKSGCDGGSAYACADQTPWAVNDNFSYGFAATSISGGNEASWCCGCYELTFTSGPVAGKTMVVQSTSTGGDLGTNHFDLAMPGGGVGIFDGCSPQFGGLEGDRYGGVSSRSQCDSFPAALKPGCYWRFDWFKNADNPTFTFRQVQCPSELVARTGCRRNDDGNFPKFTPPSGGQSSSSSSSSKAKPTSTSTSTTSTKARSTTSTASSQTSSSTGGGCAAQRWAQCGGIGFSGCTTCVSGTTCNKQNDWYSQCL

SEQ ID NO: 47035 - protein, 295 aa, Staphylotrichum coccosporum
ADGKSTRYWDCCKPSCSWPGKASVNQPVFACDANFTRISDPNVKSGCDGGSAYACADQTPWAVNDNFSYGFAATSIMGGNEASWCCGCYELTFTSGPVAGKTMVVQSTSTGGDLGTNHFDLAMPGGGVGIFDGCTPQFGGLPGDRYGGVSSRSQCDSFPAPLKPGCYWRFDWFKNADNPTFTFRQVQCPSELVARTGCRRNDDGNFPVFTPPSGGQSSSSSSSSSAKPTSTSTSTTSTKATSTTSTASSQTSSSTGGGCAAQRWAQCGGIGFSGCTTCVSGTTCNKQNDWYSQCL

SEQ ID NO: 47036 - protein, 295 aa, Staphylotrichum coccosporum
ADGKSTRYWDCCKPSCSWPGKASVNQPVFACSANFQRISDPNVKSGCDGGSAYACADQTPWAVNDNFSYGFAATSISGGNEASWCCGCYELTFTSGPVAGKTMVVQSTSTGGDLGTNHFDLAMPGGGVGIFDGCSPQFGGLAGDRYGGVSSRSQCDSFPGALKPGCYWRFDWFKNADNPTFTFRQVQCPSELVARTGCRRNDDGNFPVFTPPSGGQSSSSSSSSSAKPTSTSTSTTSTKATSTTSTASSQTSSSTGGGCAAQRWAQCGGIGFSGCTTCVSGTTCNKQNDWYSQCL

SEQ ID NO: 47037 - protein, 295 aa, Staphylotrichum coccosporum
ADGKSTRYWDCCKPSCSWPGKASVNQPVFACSANFQRISDPNVKSGCDGGSAYACADQTPWAVNDNFSYGFAATSISGGNEASWCCGCYELTFTSGPVAGKTMVVQSTSTGGDLGTNHFDLAMPGGGVGIFDGCSPQFGGLAGDRYGGVSSRSQCDSFPAALKPGCYWRFDWFKNADNPTFTFRQVQCPSELVARTGCRRNDDGNFPVFTPPSGGQMSSSSSSSSAKPTSTSTSTTSTKATSTTSTASSQTSSSTGGGCAAQRWAQCGGIGFSGCTTCVSGTTCNKQNDWYSQCL

SEQ ID NO: 47038 - protein, 295 aa, Staphylotrichum coccosporum
ADGKSTRYWDCCKPSCSWPGKASVNQPVFACSANFQRISDPNVKSGCDGGSAYACADQTPWAVNDNFSYGFAATSISGGNEASWCCGCYELTFTSGPVAGKTMVVQSTSTGGDLGTNHFDLAMPGGGVGIFDGCSPQFGGLAGDRYGGVSSRSQCDSFPAALKPGCYWRFDWFKNADNPTFTFRQVQCPSELVARTGCRRNDDGNFPVFTPPSGGGSSSSSSSSSAKPTSTSTSTTSTKATSTTSTASSQTSSSTGGGCAAQRWAQCGGIGFSGCTTCVSGTTCNKQNDWYSQCL

SEQ ID NO: 47039 - protein, 295 aa, Staphylotrichum coccosporum
ADGVSTRYWDCCKPSCSWPGKASVNQPVWACSANFQRISDPNVKSGCDGGTAYACADQTPWAVNDNFSYGFAATSISGGNEASWCCGCYELTFTSGPVAGKTMVVQSTSTGGDLGVNHFDLAMPGGGVGIFDGCTPQFGGLAGDRYGGVSSRSQCDSFPAALKPGCYWRFDWFKNADNPTFTFRQVQCPSELVARTGCRRNDDGNFPVFTPPSGGQSSSSLSSSKAKPTSTSTSTTSTKATSTTSTASSQTSSSTGGGCAAQRWAQCGGIGFSGCTTCVSGTTCNKQNDWYSQCL

SEQ ID NO: 47040 - protein, 295 aa, Staphylotrichum coccosporum
ADGKSTRYWDCCKPSCSWPGKASVNQPVFACSANFQRISDPNVKSGCDGGSAYACADQTPWAVNDNFSYGFAATSISGGNEASWCCGCYELTFTSGPVAGKTMVVQSTSTGGDLGTNHFDLAMPGGGVGIFDGCSPQFGGLAGDRYGGVSSRSQCDSFPAALKPGCYWRFDWFKNADNPTFTFRQVQCPSELVARTGCRRNDDGNFPVFTPPSGGSSSSSSSSSSAKPTSTSTSTTSTKATSTTSTASSQTSSSTGGGCAAQRWAQCGGIGFSGCTTCVSGTTCNKQNDWYSQCL

SEQ ID NO: 47041 - protein, 295 aa, Staphylotrichum coccosporum
ADGKSTRYWDCCKPSCSWPGKASVNQPVFACSANFQRISDPNVKSGCDGGSAYACADQTPWAVNDNFSYGFAATSISGGNEASWCCGCYELTFTSGPVAGKTMVVQSTSTGGDLGTNHFDLAMPGGGVGIFDGCSPQFGGLAGDRYGGVSSRSQCDSFPAALKPGCYWRFDWFKNADNPTFTFRQVQCPSELVARTGCRRNDDGNFPVFTPPSGGPSSSSSSSSSAKPTSTSTSTTSTKATSTTSTASSQTSSSTGGGCAAQRWAQCGGIGFSGCTTCVSGTTCNKQNDWYSQCL

SEQ ID NO: 47042 - protein, 295 aa, Staphylotrichum coccosporum
ADGKSTRYWDCCKPSCSWPGKASVNQPVFACSANFQRISDPNVKSGCDGGSAYACADQTPWAVNDNFSYGFAATSISGGNEASWCCGCYELTFTSGPVAGKTMVVQSTSTGGDLGTNHFDLAMPGGGVGIFDGCSPQFGGLAGDRYGGVSSRSQCDSFPAALKPGCYWRFDWFKNADNPTFTFRQVQCPSELVARTGCRRNDDGNFPVFTPPSGGESSSSSSSSSAKPTSTSTSTTSTKATSTTSTASSQTSSSTGGGCAAQRWAQCGGIGFSGCTTCVSGTTCNKQNDWYSQCL

SEQ ID NO: 47043 - protein, 295 aa, Staphylotrichum coccosporum
ADGKSTRYWDCCKPSCSWPGKASVNQPVFACSANFQRISDPNVKSGCDGGSAYACADQTPWAVNDNFSYGFAATSISGGNEASWCCGCYELTFTSGPVAGKTMVVQSTSTGGDLGTNHFDLAMPGGGVGIFDGCSPQFGGLAGDRYGGVSSRSQCDSFPAALKPGCYWRFDWFKNADNPTFTFRQVQCPSELVARTGCRRNDDGNFPVFTPPSGGQGSSSSSSSSAKPTSTSTSTTSTKATSTTSTASSQTSSSTGGGCAAQRWAQCGGIGFSGCTTCVSGTTCNKQNDWYSQCL

SEQ ID NO: 47044 - protein, 295 aa, Staphylotrichum coccosporum
ADGKSTRYWDCCKPSCSWPGKASVNQPVFACSANFQRISDPNVKSGCDGGSAYACADQTPWAVNDNFSYGFAATSISGGNEASWCCGCYELTFTSGPVAGKTMVVQSTSTGGDLGTNHFDLAMPGGGVGIFDGCSPQFGGLDGDRYGGVSSRSQCDSFPAALKPGCYWRFDWFKNADNPTFTFRQVQCPSELVARTGCRRNDDGNFPVFTPPSGGQSSSSSSSSSAKPTSTSTSTTSTKATSTTSTASSQTSSSTGGGCAAQRWAQCGGIGFSGCTTCVSGTTCNKQNDWYSQCL

SEQ ID NO: 47045 - protein, 295 aa, Staphylotrichum coccosporum
ADGKSTRYWDCCKPSCSWPNKASVNQPVFACSANFQRISDPNVKSGCDGGSAYACADQTPWAVNDNFSYGFAATSISGGNEASWCCGCYELTFTSGPVAGKTMVVQSTSTGGDLGTNHFDLAMPGGGVGIFDGCSPQFGGLAGDRYGGVSSRSQCDSFPAALKPGCYWRFDWFKNADNPTFTFRQVQCPSELVARTGCRRNDDGNFPVFTPPSGGQSSSSSSSSSAKPTSTSTSTTSTKATSTTSTASSQTSSSTGGGCAAQRWAQCGGIGFSGCTTCVSGTTCNKQNDWYSQCL

SEQ ID NO: 47046 - protein, 295 aa, Staphylotrichum coccosporum
ADGVSTRYWDCCKPSCSWPGKALVNQPVFACYANFQRISDPNVKSGCDGGSAYACADQTPWAVNDNFSYGFAATSISGGSEASWCCGCYELTFTSGPVAGKKMVVQSTSTGGDLGTNHFDLAMPGGGVGIFDGCSPQFGGLPGDRYGGVSSRSQCDSFPAPLKPGCYWRFDWFKNADNPTFTFRQVQCPSELVARTGCRRNDDGNFPVFTPPSGGQSSSSSSSSSAKPTSTSTSTTDTKATSTTSTASSQTSSSTGGGCAAQRWAQCGGIGFSGCTTCVSGTTCNKQNDWYSQCL

SEQ ID NO: 47047 - protein, 295 aa, Staphylotrichum coccosporum
ADGKSTRYWDCCKPSCSWPGKASVNQPVFACDANFQRISDPNVKSGCDGGSAYACADQTPWAVNDNFSYGFAATSISGGNEASWCCGCYELTFTSGPVAGKTMVVQSTSTGGDLGTNHFDLAMPGGGVGIFDGCSPQFGGLAGDRYGGVSSRSQCDSFPAALKPGCYWRFDWFKNADNPTFTFRQVQCPSELVARTGCRRNDDGNFPVFTPPSGGQSSSSSSSSSAKPTSTSTSTTSTKATSTTSTASSQTSSSTGGGCAAQRWAQCGGIGFSGCTTCVSGTTCNKQNDWYSQCL

SEQ ID NO: 47048 - protein, 295 aa, Staphylotrichum coccosporum
ADGKSTRYWDCCKPSCSWPGKASVNQPVFACSANFTRISDPNVKSGCDGGSAYACADQTPWAVNDNFSYGFAATSISGGNEASWCCGCYELTFTSGPVAGKTMVVQSTSTGGDLGTNHFDLAMPGGGVGIFDGCSEQFGGLPGDRYGGVSSRSQCDSFPAALKPGCYWRFDWFKNADNPTFTFRQVQCPSELVARTGCRRNDDGNFPVFTPPSGGQSSSSSSSSKAKPTSTSTSTTSTKATSTTSTASPQTSSSTGGGCAAQRWAQCGGIGFSGCTTCVSGTTCNKQNDWYSQCL

SEQ ID NO: 47049 - protein, 295 aa, Staphylotrichum coccosporum
ADGKSTRYWDCCKPSCSWPGKASVNQPVFACSANFQRISDPNVKSGCDGGSAYACADQTPWAVNDNFSYGFAATSISGGNEASWCCGCYELTFTSGPVAGKTMVVQSTSTGGDLGTNHFDLAMPGGGVGIFDGCSPQFGGLAGDRYGGVSSRSQCDDFPAALKPGCYWRFDWFKNADNPTFTFRQVQCPSELVARTGCRRNDDGNFPVFTPPSGGQSSSSSSSSSAKPTSTSTSTTSTKATSTTSTASSQTSSSTGGGCAAQRWAQCGGIGFSGCTTCVSGTTCNKQNDWYSQCL

SEQ ID NO: 47050 - protein, 295 aa, Staphylotrichum coccosporum
ADGVSTRYWDCCKPSCSWPGKASVNQPVFACSANFQRISDPNVKSGCDGGSAYACADQTPWAVNDNFSYGFAATSISGGNEASWCCGCYELTFTSGPVAGKTMVVQSTSTGSDLGTNHFDLAMPGGGVGIFDGCTPQFGGLPGDRYGGVSSRSQCDSFPAPLKPGCYWRFDWFKNADNPTFTFRQVQCPSELVARTGCRRNDDGNFPVFTPPSGGQSSSSSSSSSAKPTSTSTSTTSTKATSTTSTASSQTSSSTGGGCAAQRWAQCGGIGFSGCTTCVSGTTCNKQNDWYSQCL

SEQ ID NO: 47051 - protein, 295 aa, Staphylotrichum coccosporum
ADGKSTRYWDCCKPSCSWPGKASVNQPVFACSANFQRISDPNVKSGCDGGSAYACADQTPWAVNDNFSYGFAATSISGGNEASWCCGCYELTFTSGPVAGKTMVVQSTSTGGDLGTNHFDLAMPGGGVGIFDGCSPQFGGLAGDRYGGVSSRSQCDSFPAALKPGCYWRFDWFKNADNPTFTFRQVQCPSELVARTGCRRNDDGNFPVFVPPSGGQSSSSSSSSSAKPTSTSTSTTSTKATSTTSTASSQTSSSTGGGCAAQRWAQCGGIGFSGCTTCVSGTTCNKQNDWYSQCL

SEQ ID NO: 47052 - protein, 295 aa, Staphylotrichum coccosporum
ADGKSTRYWDCCKPSCSWPGKALVNQPVFACSANFQRISDPNVKSGCDGGSAYACADQTPWAVNDNFSYGFAATSISGGNEASWCCGCYELTFTSGPVAGKTMVVQSTSTGGDLGTNHFDLAMPGGGVGIFDGCSPQFGGLAGDRYGGVSSRSQCDSFPAALKPGCYWRFDWFKNADNPTFTFRQVQCPSELVARTGCRRNDDGNFPVFTPPSGGQSSSSSSSSSAKPTSTSTSTTSTKATSTTSTASSQTSSSTGGGCAAQRWAQCGGIGFSGCTTCVSGTTCNKQNDWYSQCL

SEQ ID NO: 47053 - protein, 295 aa, Staphylotrichum coccosporum
ADGKSTRYWDCCKPSCSWPGKASVNQPVFACSANFQRISDPNVKSGCDGGSAYACADQTPWAVNDNFSYGFAATSISGGNEASWCCGCYELTFTSGPVAGKTMVVQSTSTGGDLGTNHFDLAMPGGGVGIFDGCSPQFGGLQGDRYGGVSSRSQCDSFPAALKPGCYWRFDWFKNADNPTFTFRQVQCPSELVARTGCRRNDDGNFPVFTPPSGGQSSSSSSSSSAKPTSTSTSTTSTKATSTTSTASSQTSSSTGGGCAAQRWAQCGGIGFSGCTTCVSGTTCNKQNDWYSQCL

SEQ ID NO: 47054 - protein, 295 aa, Staphylotrichum coccosporum
ADGKSTRYWDCCKPSCSWPGKASVNQPVFACSANFQRISDPNVKSGCDGGSAYACADQTPWAVNDNFSYGFAATSISGGNEASWCCGCYELTFTSGPVAGKTMVVQSTSTGGDLGTNHFDLAMPGGGVGIFDGCSPQFGGLAGDRYGGVSSRSQCDSFPAALKPGCYWRFDWFKNADNPTFTFRQVQCPSELVARTGCRRNDDGNFPKFTPPSGGQSSSSSSSSSAKPTSTSTSTTSTKATSTTSTASSQTSSSTGGGCAAQRWAQCGGIGFSGCTTCVSGTTCNKQNDWYSQCL

SEQ ID NO: 47055 - protein, 295 aa, Staphylotrichum coccosporum
ADGVSTRYWDCCKPSCSWPGKASVNQPVFACSANFQRISDPNVKSGCDGGSAYACADQTPWAVNDNFSYGFAATSISGGNEASWCCGCYELTFTSGPVAGKTMVVQSTSTGGDLGTNHFDLAMPGGGVGIFDGCSPQFGGLAGDRYGGVSSRSQCDSFPAALKPGCYWRFDWFKNADNPTFTFRQVQCPSELVARTGCRRNDDGNFPVFTPPSGGQSSSSSSSSSAKPTSTSTSTTSTKATSTTSTASSQTSSSTGGGCAAQRWAQCGGIGFSGCTTCVSGTTCNKQNDWYSQCL

SEQ ID NO: 47056 - protein, 297 aa, unidentified
ADGKSTRYWDCCKPSCSWPGKASVNQPVFACSANFQRISDPNVKSGCDGGSAYACADQTPWAVNDNFSYGFAATSISGGNEASWCCGCYELTFTSGPVAGKTMVVQSTSTGGDLGTNHFDLAMPGGGVGIFDGCSPQFGGLAGDRYGGVSSRSQCDSFPAALKPGCYWRFDWFKNADNPTFTFRQVQCPSELVARTGCRRNDDGNFPVFTPPSGGQSSSSSSSSSSAKPTSTSTSTTSTKATSTTSTASSQTSSSTGGGCAAQRWACQCGGIGFSGCTTCVSGTTCNKQNDWYSQCL

SEQ ID NO: 47057 - protein, 235 aa, Melanocarpus albomyces
MRSTPVLRALLAAALPLGALAANGQSTRYWDCCKPSCGWAGKGPVNQPVYSCDANFQRIHDFDAVSGCEGGPAFSCADHSPWAINDNLSYGFAATALSGQTEESWCCACYALTFTSGPVAGKTMVVQSTSTGGDLGSNHFDLNIPGGGVGLFDGCTPQFGGLPGARYGGISSRQECDSFPEPLKPGCQWRFDWFQNADNPSFTFERVQCPEELVARTGCRRHDDGGFAVFKAPSA

SEQ ID NO: 47058 - protein, 235 aa, Melanocarpus albomyces
MRSTPVLRALLAAALPLGALAANGQSTRYWDCCKPSCGWAGKAPVNQPVYSCDANFQRIHDFDAVSGCEGGPAFSCADHSPWAINDNLSYGFAATALSGQTEESWCCACYALTFTSGPVAGKTMVVQSTSTGGDLGSNHFDLAIPGGGVGLFDGCTPQFGGLPGARYGGISSRQECDSFPEPLKPGCQWRFDWFQNADNPSFTFERVQCPEELVARTGCRRHDDGGFAVFKAPSA

SEQ ID NO: 47059 - protein, 269 aa, Thermothielavioides terrestris
SGSGQSTRYWDCCKPSCAWPGKAAVSQPVYACDANFQRLSDFNVQSGCNGGSAYACADQTPWAVNDNLAYGFAATSIAGGSESSWCCACYALTFTSGPVAGKTMVVQSTSTGGDLGSNHFDIAMPGGGVGIFDGCSSQFGGLPGARYGGISSRDQCDSFPAPLKPGCQWRFDWFQNADNPTFTFQQVQCPAEIVARSGCKRNDDSSFPVFTPSPTPSPTPSPTPSPTPSPTGCTAERWAQCGGNGWSGCTTCVAGSTCTKINDWYHQCL

SEQ ID NO: 47060 - protein, 273 aa, Acremonium thermophilum
GKSTRYWDCCKPSCGWAGKASVNQPVFSCSADWQRISDFNAKSGCDGGNAYSCADQTPWAVNDNFSYGFAATAIAGGSEQSWCCACYALTFNSGPVAGKTMVVQSTSTGGDLGENHFDLAIPGGGVGIFNGCQSQFGGLPGAQYGGIQDRSQCSSFPAPLQPGCQWRFDWFQNADNPTFTFQRVQCPSELTSRTGCKRDDDANYPVFPSGGNPPGGNPPGTTTTRRPATTTGSSPGPTQSHYGQCGGIGYSGPTVCASGTTCQVLNPYYSQCL

SEQ ID NO: 47061 - protein, 264 aa, Staphylotrichum coccosporum
GKSTRYWDCCKPSCSWPGKASVNQPVFACSANFQRISDPNVKSGCDGGSAYACADQTPWAVNDNFSYGFAATSISGGNEASWCCGCYELTFTSGPVAGKTMVVQSTSTGGDLGTNHFDLAMPGGGVGIFDGCSPQFGGLAGDRYGGVSSRSQCDSFPAALKPGCYWRFDWFKNADNPTFTFRQVQCPSELVARTGCRRNDDGNFPAVQIPSSSTSSSPPVQPTTPSGCTAERWAQCGGNGWSGCTTCVAGSTCTKINDWYHQCL

SEQ ID NO: 47062 - protein, 212 aa, Melanocarpus albomyces
NGQSTRYWDCCKPSCGWAGKGPVNQPVYSCDANFQRIHDFDAVSGCIGGPAFSCADHSPWAINDNLSYGFAATALSGQTEESWCCACYALTFTSGPVAGKTMVVQSTSTGGDLGSNHFDLNIPGGGVGLFDGCTPQFGGLPGARYGGISSRQECDSFPEPLKPGCQWRFDWFQNADNPSFTFERVQCPEELVARTGCRRHDDGGFAVFKAPS

SEQ ID NO: 47063 - protein, 212 aa, Melanocarpus albomyces
NGQSTRYWDCCKPSCGWAGKAPVNQPVYSCDANWQRIHDFDAVSGCEGGPAFSCADHSPWAINDNLSYGFAATHLSGQTEESWCCACYALTFTSGPVAGKTMVVQSISTGGDLGSNHFDLAIPGGGVGLFDGCTPQFGGLPGARYGGISSRQECDSFPEPLKPGCQWRFDWFQNADNPSFTFERVQCPEELVARTGCRRHDDGGFSVFKAPS

SEQ ID NO: 47064 - protein, 212 aa, Melanocarpus albomyces
NGQSTRYWDCCKPSCGWAGKGPVNQPVYSCDANFQRIHDFDAVSGCEGGPAFSCADHSPWAINDNLSYGFAATHLSGQTEESWCCACYALTFTSGPVAGKTMVVQSTSTGGDLGSNHFDLNIPGGGVGLFDGCTPQFGGLPGARYGGISSRQECDSFPEPLKPGCQWRFDWFQNADNPSFTFERVQCPEELVARTGCRRHDDGGFAVFKAPS

SEQ ID NO: 47065 - protein, 212 aa, Melanocarpus albomyces
NGQSTRYWDCCKPSCGWAGKGPVNQPVYSCDANFQRIHDFDAVSGCEGGPAFMCADHSPWAINDNLSYGFAATALSGQTEESWCCACYALTFTSGPVAGKTMVVQSTSTGGDLGSNHFDLAIPGGGVGLFDGCTPQFGGLPGARYGGISSRQECDSFPEPLKPGCQWRFDWFQNADNPSFTFERVQCPEELVARTGCRRHDDGGFAVFKAPS

SEQ ID NO: 47066 - protein, 212 aa, Melanocarpus albomyces
NGQSTRYWDCCKPSCGWAGKGPVNQPVYSCDANFQRIHDFDSVSGCEGGPAFSCADHSPWAINDNLSYGFAATALSGQTEESWCCACYALTFTSGPVAGKTMVVQSTSTGGDLGSNHFDLNIPGGGVGLFDGCTPQFGGLPGARYGGISSRQECDSFPEPLKPGCQWRFDWFQNADNPSFTFERVQCPEELVARTGCRRHDDGGFAVFKAPS

SEQ ID NO: 47067 - protein, 212 aa, Melanocarpus albomyces
NGQSTRYWDCCKPSCGWAGKGPVNQPVYSCDANFQRIPDFDAVSGCEGGPAFSCADHSPWAINDNLSYGFAATALSGQTEESWCCACYALTFTSGPVAGKTMVVQSTSTGGDLGSNHFDLNIPGGGVGLFDGCTPQFGGLPGARYGGISSRQECDSFPEPLKPGCQWRFDWFQNADNPSFTFERVQCPEELVARTGCRRHDDGGFAVFKAPS

SEQ ID NO: 47068 - protein, 212 aa, Melanocarpus albomyces
NGQSTRYWDCCKPSCGWAGKGPVNQPVYSCDANFQRIHDFDAVSGCEGGPAFSCADHSPWAINDNLSYGFAATALSGQTEESWCCACYALTFTSGPVAGKTMVVQSTSTGGDLGSNHFDLTIPGGGVGLFDGCTPQFGGLPGARYGGISSRQECDSFPEPLKPGCQWRFDWFQNADNPSFTFERVQCPEELVARTGCRRHDDGGFAVFKAPS

SEQ ID NO: 47069 - protein, 212 aa, Melanocarpus albomyces
NGQSTRYWDCCKPSCGWAGKGPVNQPVYPCDANFQRIHDFDAVSGCEGGPAFSCADHSPWAINDNLSYGFAATALSGQTEESWCCACYALTFTSGPVAGKTMVVQSTSTGGDLGSNHFDLNIPGGGVGLFDGCTPQFGGLPGARYGGISSRQECDSFPEPLKPGCQWRFDWFQNADNPSFTFERVQCPEELVARTGCRRHDDGGFAVFKAPS

SEQ ID NO: 47070 - protein, 212 aa, Melanocarpus albomyces
NGQSTRYWDCCKPSCGWDGKGPVNQPVYSCDANFQRIHDFDAVSGCEGGPAFSCADHSPWAINDNLSYGFAATALSGQTEESWCCACYALTFTSGPVAGKTMVVQSTSTGGDLGSNHFDLNIPGGGVGLFDGCTPQFGGLPGARYGGISSRQECDSFPEPLKPGCQWRFDWFQNADNPSFTFERVQCPEELVARTGCRRHDDGGFAVFKAPS

SEQ ID NO: 47071 - protein, 212 aa, Melanocarpus albomyces
NGQSTRYWDCCKPSCGWAGKGPVNQPVYSCDANFQRIHDFDALSGCIGGPAFSCADHSPWAINDNLSYGFAATALSGQTEESWCCACYALTFTSGPVAGKTMVVQSTSTGGDLGSNHFDLNIPGGGVGLFDGCTPQFGGLPGARYGGISSRQECDSFPEPLKPGCQWRFDWFQNADNPSFTFERVQCPEELVARTGCRRHDDGGFAVFKAPS

SEQ ID NO: 47072 - protein, 212 aa, Melanocarpus albomyces
NGQSTRYWDCCKPSCGWAGKGPVNQPVYSCDANFQRIHDFDAVSGCEGGPAFSCADHSPWAINDNLSYGFAATALSGQTEESWCCACYALTFTSGPVAGKTMVVQSTSTGGDLGSNHFDLIIPGGGVGLFDGCTPQFGGLPGARYGGISSRQECDSFPEPLKPGCQWRFDWFQNADNPSFTFERVQCPEELVARTGCRRHDDGGFAVFKAPS

SEQ ID NO: 47073 - protein, 212 aa, Melanocarpus albomyces
NGQSTRYWDCCKPSCGWAGKGPVNQPVYSCDANFQRIHDFDAVSGCEGGPAFSCADHSPWAINDNLSYGFAATALSGQTEESWCCACYALTFTSGPVAGKTMVVQSTSTGGDLGSNHFDLLIPGGGVGLFDGCTPQFGGLPGARYGGISSRQECDSFPEPLKPGCQWRFDWFQNADNPSFTFERVQCPEELVARTGCRRHDDGGFAVFKAPS

SEQ ID NO: 47074 - protein, 212 aa, Melanocarpus albomyces
NGQSTRYWDCCKPSCGWAGKSPVNQPVYSCDANFQRIHDFDAVSGCEGGPAFSCADHSPWAINDNLSYGFAATALSGQTEESWCCACYALTFTSGPVAGKTMVVQSTSTGGDLGSNHFDLNIPGGGVGLFDGCTPQFGGLPGARYGGISSRQECDSFPEPLKPGCQWRFDWFQNADNPSFTFERVQCPEELVARTGCRRHDDGGFAVFKAPS

SEQ ID NO: 47075 - protein, 212 aa, Melanocarpus albomyces
NGQSTRYWDCCKPSCGWRGKGPVNQPVYSCDANFQRIHDFDAVSGCEGGPAFSCADHSPWAINDNLSYGFAATALSGQTEESWCCACYALTFTSGPVAGKTMVVQSTSTGGDLGSNHFDLNIPGGGVGLFDGCTPQFGGLPGARYGGISSRQECDSFPEPLKPGCQWRFDWFQNADNPSFTFERVQCPEELVARTGCRRHDDGGFAVFKAPS

SEQ ID NO: 47076 - protein, 212 aa, Melanocarpus albomyces
NGQSTRYWDCCKPSCGWAGKGPVNQPVYSCDANFQRIHDFDAVSGCEGGPAFSCADHSPWAINDNLSYGFAATALSGQTEESWCCACYALTFTSGPVAGKTMVVQSTSTGGDLGSNHFDLSIPGGGVGLFDGCTPQFGGLPGARYGGISSRQECDSFPEPLKPGCQWRFDWFQNADNPSFTFERVQCPEELVARTGCRRHDDGGFAVFKAPS

SEQ ID NO: 47077 - protein, 212 aa, Melanocarpus albomyces
NGQSTRYWDCCKPSCGWAGKGPVNQPVYSCDANFQRIHDFDAVSGCEGGPAFSCADHSPWAINDNLSYGFAATALSGQTEESWCCACYALTFTSGPVAGKTMVVQSTSTGGDLGSNHFDLNIPGGGVGGFDGCTPQFGGLPGARYGGISSRQECDSFPEPLKPGCQWRFDWFQNADNPSFTFERVQCPEELVARTGCRRHDDGGFAVFKAPS

SEQ ID NO: 47078 - protein, 212 aa, Melanocarpus albomyces
NGQSTRYWDCCKPSCGWAGKGRVNQPVYSCDANFQRIHDFDAVSGCEGGPAFSCADHSPWAINDNLSYGFAATALSGQTEESWCCACYALTFTSGPVAGKTMVVQSTSTGGDLGSNHFDLNIPGGGVGLFDGCTPQFGGLPGARYGGISSRQECDSFPEPLKPGCQWRFDWFQNADNPSFTFERVQCPEELVARTGCRRHDDGGFAVFKAPS

SEQ ID NO: 47079 - protein, 212 aa, Melanocarpus albomyces
NGQSTRYWDCCKPSCGWAGKGPVNQPVYSCDANFQRIHDFDAVSGCEGGPAFSCADHSPWAINDNLSYGFAATALSGQTEESWCCACYALTFTSGPVAGKTMVVQSTSTGGDLGSNHFDLNIPGGGVGLFDGCTPQFGGLPGARYGGISSRQECDSFPEPLKPGCQWRFDWFQNADNPSFTFERVQCPEELVARTGCRRHDDGGFAVFKAPS

SEQ ID NO: 47080 - protein, 212 aa, Melanocarpus albomyces
NGQSTRYWDCCKPSCGWAGKGPVNQPVYSCDANFQRIHDFDAVSGCEGGPAFSCADHSPWAINDNLSYGFAATALSGQTEESWCCACYALTFTSGPVAGKTMVVQSTSTGGDLGSNHFDLNIPGGGVGLFDGCTPQFGGLPGARYGGISSRQECDSFPEPLKPGCQWRFDWFQNADNPSFTFERVQCPEELVARTGCRRHDDGRFSVFKAPS

SEQ ID NO: 47081 - protein, 212 aa, Melanocarpus albomyces
NGQSTRYWDCCKPSCGWAGKGPVNQPVYSCDANFQRIHDFDAVSGCEGGPAFSCADHSPWAINDNLSYGFAATALSGQTEESWCCACYALTFTSGPVAGKTMVVQSTSTGGDLGSNHFDLGIPGGGVGLFDGCTPQFGGLPGARYGGISSRQECDSFPEPLKPGCQWRFDWFQNADNPSFTFERVQCPEELVARTGCRRHDDGGFAVFKAPS

SEQ ID NO: 47082 - protein, 212 aa, Melanocarpus albomyces
NGQSTRYWDCCKPSCGWAGKGPVNQPVYSCDANFQRIHDFDAVSGCEGGPAFSCADHSPWAINDNLSYGFAATALSGQTEESWCCACYALTFTSGPVAGKTMVVQSTSTGGDLGSNHFDLNIPGGGVGLFDGCTPQFGGLPGARYGGISSRSECDSFPEPLKPGCQWRFDWFQNADNPSFTFERVQCPEELVARTGCRRHDDGGFAVFKAPS

SEQ ID NO: 47083 - protein, 212 aa, Melanocarpus albomyces
NGQSTRYWDCCKPSCGWAGKGPVNQPVYSCDANFQRIHDFDAVSGCEGGPAFSCADHSPWAINDNLSYGFAATALSGQTEESWCCACYALTFTSGPVAGKTMVVQSTSTGGDLGSNHFDLNIPGGGVGLFDGCTPQFGGLPGARYGGISSRQECDSFPEPLKPGCQWRFDWFQNADNPSFTFERVQCPEELVARTGCRRHDDGGFSVFKAPS

SEQ ID NO: 47084 - protein, 212 aa, Melanocarpus albomyces
NGQSTRYWDCCKPSCGWAGKGPVNQPVYSCDANFQRIHDFDAVSGCEGGPAFSCADHSPWAINDNLSYGFAATALSGQTEESWCCACYALTFTSGPVAGKTMVVQSTSTGGDLGSNHFDLNIPGGGVGLFDGCTPQFGGLPGARYGGISSRQECDSFPEPLKPGCQWRFDWFQNADNPSFTFERVQCPEELVARTGCRRHDDGGFRVFKAPS

SEQ ID NO: 47085 - protein, 212 aa, Melanocarpus albomyces
NGQSTRYWDCCKPSCGWAGKGPVNQPVYSCDANFQRIHDFDALSGCEGGPAFSCADHSPWAINDNLSYGFAATALSGQTEESWCCACYALTFTSGPVAGKTMVVQSTSTGGDLGSNHFDLNIPGGGVGLFDGCTPQFGGLPGARYGGISSRQECDSFPEPLKPGCQWRFDWFQNADNPSFTFERVQCPEELVARTGCRRHDDGGFAVFKAPS

SEQ ID NO: 47086 - protein, 212 aa, Melanocarpus albomyces
NGQSTRYWDCCKPSCGWAGKGPVNQPVYSCDANFQRIHDFDAVSGCEGGPAFSCADHSPWAINDNLSYGFAATALSGQTEESWCCACYALTFTSGPVAGKTMVVQSTSTGGDLGSNHFDLNIPGGGVGLFDGCTPQFGGLPGARYGGISSRQECDSFPEPLKPGCQWRFDWFQNADNPSFTFERVQCPEELVARTGCRRHDDGRFAVFKAPS

SEQ ID NO: 47087 - protein, 212 aa, Melanocarpus albomyces
NGQSTRYWDCCKPSCGWAGKGPVNQPVYSCDANFQRIHDFDARSGCDGGPAFSCADHSPWAINDNLSYGFAATALSGQTEESWCCACYALTFTSGPVAGKTMVVQSTSTGGDLGSNHFDLNIPGGGVGLFDGCTPQFGGLPGARYGGISSRQECDSFPEPLKPGCQWRFDWFQNADNPSFTFERVQCPEELVARTGCRRHDDGGFAVFKAPS

SEQ ID NO: 47088 - protein, 212 aa, Melanocarpus albomyces
NGQSTRYWDCCKPSCGWAGKGPVNQPVYLCDANFQRIHDFDAVSGCEGGPAFSCADHSPWAINDNLSYGFAATALSGQTEESWCCACYALTFTSGPVAGKTMVVQSTSTGGDLGSNHFDLNIPGGGVGLFDGCTPQFGGLPGARYGGISSRQECDSFPEPLKPGCQWRFDWFQNADNPSFTFERVQCPEELVARTGCRRHDDGGFAVFKAPS

SEQ ID NO: 47089 - protein, 212 aa, Melanocarpus albomyces
NGQSTRYWDCCKPSCGWAGKGPVNQPVYSCDANFQRIHDFDAVSGCEGGPAFSCADHSPWAINDNLSYGFAATALSGQTEESWCCACYALTFTSGPVAGKTMVVQSTSTGGDLGSNHFDLVIPGGGVGLFDGCTPQFGGLPGARYGGISSRQECDSFPEPLKPGCQWRFDWFQNADNPSFTFERVQCPEELVARTGCRRHDDGGFAVFKAPS

SEQ ID NO: 47090 - protein, 212 aa, Melanocarpus albomyces
NGQSTRYWDCCKPSCGWAGKAPVNQPVYSCDANFQRIHDFDAVSGCEGGPAFSCADHSPWAINDNLSYGFAATALSGQTEESWCCACYALTFTSGPVAGKTMVVQSTSTGGDLGSNHFDLAIPGGGVGLFDGCTPQFGGLPGARYGGISSRQECDSFPEPLKPGCQWRFDWFRNAENPSFTFERVQCPEELVARTGCRRHDDGGFAVFKAPS

SEQ ID NO: 47091 - protein, 212 aa, Melanocarpus albomyces
NGQSTRYWDCCKPSCGWAGKVPVNQPVYSCDANFQRIHDFDAVSGCEGGPAFSCADHSPWAINDNLSYGFAATALSGQTEESWCCACYALTFTSGPVAGKTMVVQSTSTGGDLGSNHFDLNIPGGGVGLFDGCTPQFGGLPGARYGGISSRQECDSFPEPLKPGCQWRFDWFQNADNPSFTFERVQCPEELVARTGCRRHDDGGFAVFKAPS

SEQ ID NO: 47092 - protein, 272 aa, Sordaria fimicola
ASGSGKSTRYWDCCKPSCAWSGKASVNRPVLACDANNNPLNDANVKSGCDGGSAYTCANNSPWAVNDNLAYGFAATKLSGGTESSWCCACYALTFTSGPVSGKTLVVQSTSTGGDLGSNHFDLNMPGGGVGLFDGCKREFGGLPGAQYGGISSRSECDSFPAALKPGCQWRFDWFKNADNPEFTFKQVQCPSELTSRTGCKRNDDSQFPAFTPPSGGGSNPSTPTTPPSSGGGGSGCAAAMYAQCGGSGFSGCTNCPSGSTCKAINDYYHQC

SEQ ID NO: 47093 - protein, 211 aa, Melanocarpus albomyces
NGQSTRYWDCCKPSCGWAGKGPVNQPVYSCDANFQRIHDFDAVSGCEGGPAFSCADHSPWAINDNLSYGFAATALSGQTEESWCCACYALTFTSGPVAGKTMVVQSTSTGGDLGSNHFDLNIPGGGVGLFDGCTPQFGGLPGARYGGISSRQECDSFPEPLKPGCQWRFDWFQNADNPSFTFERVQCPEELVARTGCRRHDDGGFAFKAPS

SEQ ID NO: 47094 - protein, 198 aa, Synthetic construct
GQSTRYWDCCKPSCAWPGKAAVSQPVYACDANFQRLSDFNVQSGCNGGSAYSCADQTPWAVNDNLAYGFAATSIAGGSESSWCCACYALTFTSGPVAGKTMVVQSTSTGGDLGSNHFDIAMPGGGVGIFNGCSSQFGGLPGAQYGGISSRDQCDSFPAPLKPGCQWRFDWFQNADNPTFTFQQVQCPAEIVARSGCKR

SEQ ID NO: 47095 - protein, 199 aa, Humicola insolens
GRSTRYWDCCKPSCGWAKKAPVNQPVFSCNANFQRITDFDAKSGCEPGGVAYSCADQTPWAVNDDFALGFAATSIAGSNEAGWCCACYELTFTSGPVAGKKMVVQSTSTGGDLGSNHFDLNIPGGGVGIFDGCTPQFGGLPGQRYGGISSRNECDRFPDALKPGCYWRFDWFKNADNPSFSFRQVQCPAELVARTGCRR

SEQ ID NO: 47096 - protein, 296 aa, unidentified
ACDGKSTRYWDCCKPSCSWPGKASVNQPVFACSANFQRISDPNVKSGCDGGSAYACADQTPWAVNDNFSYGFAATSISGGNEASWCCGCYELTFTSGPVAGKTMVVQSTSTGGDLGTNHFDLAMPGGGVGIFDGCSPQFGGLAGDRYGGVSSRSQCDSFPAALKPGCYWRFDWFKNADNPTFTFRQVQCPSELVARTGCRRNDDGNFPVFTPPSGGQSSSSSSSSSAKPTSTSTSTTSTKATSTTSTASSQTSSSTGGGCAAQRWAQCGGIGFSGCTTCVSGTTCNKQNDWYSQCL

SEQ ID NO: 47097 - protein, 278 aa, Acremonium thermophilum
GKSTRYWDCCKPSCGWAGKASVNQPVFSCSADWQRISDFNAKSGCDGGNAYSCADQTPWAVNDNFSYGFAATAIAGGSEQSWCCACYALTFNSGPVAGKTMVVQSTSTGGDLGENHFDLAIPGGGVGIFNGCQSQFGGLPGAQYGGIQDRSQCSSFPAPLQPGCQWRFDWFQNADNPTFTFQRVQCPSELTSRTGCKRDDDANYPVFPPSGNPSGGNPPGGNPPGTTTTRRPATTTGSSPGPTQSHYGQCGGIGYSGPTVCASGTTCQVLNPYYSQCL

SEQ ID NO: 47098 - protein, 292 aa, Neurospora crassa
MRSSTILQTGLVAALPFAVQAASGSGQSTRYWDCCKPSCSWSGKAPVNRPVLACDANNNPLSDASVKSGCDGGSAYTCANNSPWAVNDQLSYGFAATKLSGGTESSWCCACYALTFTSGPVAGKTLVVQSTSTGGDLGSNHFDINMPGGGVGLFDGCKRQFGGLPGAQYGGISSRSQCDSFPAALKPGCQWRFDWFQNADNPNFTFKQVQCPSELTSRTGCKRNDDSQFPVFTPPSGGGSNPSTPTTPPSSGGGSGCTADKYAQCGGSGWSGCTNCPSGSTCKTINDYYHQC

SEQ ID NO: 47099 - protein, 295 aa, Staphylotrichum coccosporum
ADGKSTRYWDCCKPSCSWPGKASVNQPVFACDANFTRISDPNVKSGCDGGSAYACADQTPWAVNDNFSYGFAATSISGGNEASWCCGCYELTFTSGPVAGKTMVVQSTSTGSDLGTNHFDLAMPGGGVGIFDGCSPQFGGLPGDRYGGVSSRSQCDSFPAALKPGCYWRFDWFKNADNPTFTFRQVQCPSELVARTGCRRNDDGNFPVFTPPSGGQSSSSSSSSSAKPTSTSTSTTSTKATSTTSTASSQTSSSTGGGCAAQRWAQCGGIGFSGCTTCVSGTTCNKQNDWYSQCL

SEQ ID NO: 47100 - protein, 295 aa, Staphylotrichum coccosporum
ADGKSTRYWDCCKPSCSWPGKASVNQPVFACSANFQRISDPNVKSGCDGGSAYACADQTPWAVNDNFSYGFAATSISGGNEASWCCGCYELTFTSGPVAGKTMVVQSTSTGGDLGTNHFDLAMPGGGVGIFDGCSPQSGGLAGDRYGGVSSRSQCDSFPAALKPGCYWRFDWFKNADNPTFTFRQVQCPSELVARTGCRRNDDGNFPVFTPPSGGQSSSSSSSSSAKPTSTSTSTTSTKATSTTSTASSQTSSSTGGGCAAQRWAQCGGIGFSGCTTCVSGTTCNKQNDWYSQCL

SEQ ID NO: 47101 - protein, 295 aa, Staphylotrichum coccosporum
ADGKSTRYWDCCKPSCSWPGKASVNQPVFACSANFQRISDPNVKSGCDGGSAYACADQTPWAVNDNFSYGFAATSISGGNEASWCCGCYELTFTSGPVAGKTMVVQSTSTGSDLGTNHFDLAMPGGGVGIFDGCSKQFGGLPGDRYGGVSSRSQCDSFPAALKPGCYWRFDWFKNADNPTFTFRQVQCPSELVARTGCRRNDDGNFPVFTPPSGGQMSSSMSSSSAKPTSTSTSTTSTKALSTTSTASSQTSSSTGKGCAAQRWAQCGGIGFSGCTTCVSGTTCNKQNDWYSQCL

SEQ ID NO: 47102 - protein, 295 aa, Staphylotrichum coccosporum
ADGKSTRYWDCCKPSCSWPGKASVNQPVFACSANFQRISDPNVKSGCDGGSAYACADQTPWAVNDNFSYGFAATSISGGNEASWCCGCYELTFTSGPVAGKTMVVQSTSTGSDLGTNHFDLAMPGGGVGIFDGCSPQFGGLAGDRYGGVSSRSQCDSFPAALKPGCYWRFDWFKNADNPTFTFRQVQCPSELVARTGCRRNDDGNFPVFTPPSGGQSSSSSSSSSAKPTSTSTSTTSTKATSTTSTASSQTSSSTGGGCAAQRWAQCGGIGFSGCTTCVSGTTCNKQNDWYSQCL

SEQ ID NO: 47103 - protein, 295 aa, Staphylotrichum coccosporum
ADGKSTRYWDCCKPSCSWPGKASVNQPVFACSANFQRISDPNVKSGCDGGSAYACADQTPWAVNDNFSYGFAATSISGGNEASWCCGCYELTFTSGPGAGKTMVVQSTSTGGDLGTNHFDLAMPGGGVGIFDGCSPQFGGLAGDRYGGVSSRSQCDSFPAALKPGCYWRFDWFKNADNPTFTFRQVQCPSELVARTGCRRNDDGNFPVFTPPSGGQSSSSSSSSSAKPTSTSTSTTSTKATSTTSTASSQTSSSTGGGCAAQRWAQCGGIGFSGCTTCVSGTTCNKQNDWYSQCL

SEQ ID NO: 47104 - protein, 295 aa, Staphylotrichum coccosporum
ADGKSTRYWDCCKPSCSWPGKASVNQPVFACSANFQRISDPNVKSGCDGGSAYACADQTPWAVNDNFSYGFAATSISGGNEASWCCGCYELTFTSGPVAGKTMVVQSTSTGVDLGTNHFDLAMPGGGVGIFDGCSPQFGGLAGDRYGGVSSRSQCDSFPAALKPGCYWRFDWFKNADNPTFTFRQVQCPSELVARTGCRRNDDGNFPVFTPPSGGQSSSSSSSSSAKPTSTSTSTTSTKATSTTSTASSQTSSSTGGGCAAQRWAQCGGIGFSGCTTCVSGTTCNKQNDWYSQCL

SEQ ID NO: 47105 - protein, 295 aa, Staphylotrichum coccosporum
ADGKSTRYWDCCKPSCSWPGKASVNQPVFACSANFQRISDPNVKSGCDGGSAYACADQTPWAVNDNFSYGFAATSISGGNEASWCCGCYELTFTSGPVAGKTMVVQSTSTGGDLGTNHFDIAMPGGGVGIFDGCSPQFGGLAGDRYGGVSSRSQCDSFPAALKPGCYWRFDWFKNADNPTFTFRQVQCPSELVARTGCRRNDDGNFPVFTPPSGGQSSSSSSSSSAKPTSTSTSTTSTKATSTTSTASSQTSSSTGGGCAAQRWAQCGGIGFSGCTTCVSGTTCDKQNDWYSQCL

SEQ ID NO: 47106 - protein, 295 aa, Staphylotrichum coccosporum
ADGKSTRYWDCCKPSCSWPGKASVNQPVFACSANFQRISDPNVKSGCDGGSAYACADQTPWAVNDNFSYGFAATSISGGNEASWCCGCYELTFTSGPVAGKTMVVQSTSTGGDVGTNHFDLAMPGGGVGIFDGCSPQFGGLAGDRYGGVSSRSQCDSFPAALKPGCYWRFDWFKNADNPTFTFRQVQCPSELVARTGCRRNDDGNFPVFTPPSGGQSSSSSSSSSAKPTSTSTSTTSTKATSTTSTASSQTSSSTGGGCAAQRWAQCGGIGFSGCTTCVSGTTCNKQNDWYSQCL

SEQ ID NO: 47107 - protein, 295 aa, Staphylotrichum coccosporum
ADGKSTRYWDCCKPSCSWPGKASVNQPVFACSANFQRISDPNVKSGCDGGSAYACADQTPWAVNDNFSYGFAATSISGGNEASWCCGCYELTFTSGPVAGKTMVVQSTSTGGDLGTNHFDLAMPGGGVGIFDGCSPQFGGLAGDRYGGVSSRSQCDSFPAALKPGCYWRFDWFKNADNPTFTFRQVQCPSELVSRTGCRRNDDGNFPVFTPPSGGQSSSSSSSSSAKPTSTSTSTTSTKATSTTSTASSQTSSSTGGGCAAQRWAQCGGIGFSGCTTCVSGTTCNKQNDWYSQCL

SEQ ID NO: 47108 - protein, 295 aa, Staphylotrichum coccosporum
ADGKSTRYWDCCKPSCSWPGKASVNQPVFACSANFQRISDPNVKSGCDGGSAYACADQTPWAVNDNFSYGFAATSISGGNEASWCCGCYELTFTSGPVAGKTMVVQSTSTGGDLGTNHFDLAMPGGGVGIFDGCSSQFGGLAGDRYGGVSSRSQCDSFPAALKPGCYWRFDWFKNADNPTFTFRQVQCPSELVARTGCRRNDDGNFPVFTPPSGGQSSSSSSSSSAKPTSTSTSTTSTKATSTTSTASSQTSSSTGGGCAAQRWAQCGGIGFSGCTTCVSGTTCNKQNDWYSQCL

SEQ ID NO: 47109 - protein, 295 aa, Staphylotrichum coccosporum
ADGKSTRYWDCCKPSCSWPGKASVNQPVFACSANFQRISDPNVKSGCDGGSAYACADQTPWAVNDNFSYGFAATSISGGNEASWCCGCYELTFTSGSVAGKTMVVQSTSTGGDLGTNHFDLAMPGGGVGIFDGCSPQFGGLAGDRYGGVSSRSQCDSFPAALKPGCYWRFDWFKNADNPTFTFRQVQCPSELVARTGCRRNDDGNFPVFTPPSGGQSSSSSSSSSAKPTSTSTSTTSTKATSTTSTASSQTSSSTGGGCAAQRWAQCGGIGFSGCTTCVSGTTCNKQNDWYSQCL

SEQ ID NO: 47110 - protein, 295 aa, Staphylotrichum coccosporum
ADGKSTRYWDCCKPSCSWPGKASVNQPVFACSANFTRISDPNVKSGCDGGSAYACADQTPWAVNDNFSYGFAATSISGGNEASWCCGCYELTFTSGPVAGKTMVVQSTSTGGDLGTNHFDLAMPGGGVGIFDGCSPQFGGLAGDRYGGVSSRSQCDSFPAALKPGCYWRFDWFKNADNPTFTFRQVQCPSELVARTGCRRNDDGNFPVFTPPSGGQSSSSSSSSSAKPTSTSTSTTSTKATSTTSTASSQTSSSTGGGCAAQRWAQCGGIGFSGCTTCVSGTTCNKQNDWYSQCL

SEQ ID NO: 47111 - protein, 295 aa, Staphylotrichum coccosporum
ADGKSTRYWDCCKPSCSWPGKASVNQPVFACSANFQRISDPNVKSGCDGGSAYACADQTPWAVNDNFSYGFAATSISGGNEASWCCGCYELTFTSGPVAGKTMVVQSTSTGGDLGTNHFDLAMPGGGVGIFDGCSPQFGGIAGDRYGGVSSRSQCDSFPAALKPGCYWRFDWFKNADNPTFTFRQVQCPSELVARTGCRRNDDGNFPVFTPPSGGQSSSSSSSSSAKPTSTSTSTTSTKATSTTSTASSQTSSSTGGGCAAQRWAQCGGIGFSGCTTCVSGTTCNKQNDWYSQCL

SEQ ID NO: 47112 - protein, 295 aa, Staphylotrichum coccosporum
ADGKSTRYWDCCKPSCSWPGKASVNQPVFACSANFTRISDPNVKSGCDGGSAYACADQTPWAVNDNFSYGFAATSIKGGNEASWCCACYELTFTSGPVAGKTMVVQSTSTGGDLGTNHFDLAMPGGGVGIFDGCSPQFGGLPGDRYGGVSSRDQCDSFPAPLKPGCYWRFDWFKNADNPTFTFRQVQCPSELVARTGCRRNDDSNFPVFTPPSGGQSSSSLSSSSAKPTSTSTSTTDTKATSTTSTASSQTSSSTGGGCAAQRWAQCGGIGFSGCTTCVSGTTCNKQNDWYSQCL

SEQ ID NO: 47113 - protein, 295 aa, Staphylotrichum coccosporum
ADGKSTRYWDCCKPSCSWPGKASVNQPVFACSANFQRISDPNVKSGCDGGSAYACADQTPWAVNDNFSYGFAATSISGGNEASWCCGCYELTFTSGPVAGKTMVVQSTSTGGDLGTNHFDLAMPGGGVGIFDGCSPQFGGLAGDRYGGVSSRSQCDSFPAALKPGCYWRFDWFKNADNPTFTFRQVQCPSELVARTGCRRNDDGNFPVFTPPSGGQSSSSSASSSAKPTSTSTSTTSTKATSTTSTASSQTSSSTGGGCAAQRWAQCGGIGFSGCTTCVSGTTCNKQNDWYSQCL

SEQ ID NO: 47114 - protein, 295 aa, Staphylotrichum coccosporum
ADGKSTRYWDCCKPSCSWPGKASVNQPVFACSANFQRISDPNVKSGCDGGSAYACADQTPWAVNDNFSYGFAATSISGGNEASWCCGCYALTFTSGPVAGKTMVVQSTSTGGDLGTNHFDLAMPGGGVGIFDGCSPQFGGLAGDRYGGVSSRSQCDSFPAALKPGCYWRFDWFKNADNPTFTFRQVQCPSELVARTGCRRNDDGNFPVFTPPSGGQSSSSSSSSSAKPTSTSTSTTSTKATSTTSTASSQTSSSTGGGCAAQRWAQCGGIGFSGCTTCVSGTTCNKQNDWYSQCL

SEQ ID NO: 47115 - protein, 295 aa, Staphylotrichum coccosporum
ADGKSTRYWDCCKPSCSWPGKASVNQPVFACSANFQRISDPNVKSGCDGGSAYACADQTPWAVNDNFSYGFAATSISGGNEASWCCGCYELTFTSGPVAHKTMVVQSTSTGGDLGTNHFDLAMPGGGVGIFDGCSPQFGGLAGDRYGGVSSRSQCDSFPAALKPGCYWRFDWFKNADNPTFTFRQVQCPSELVARTGCRRNDDGNFPVFTPPSGGQSSSSSSSSSAKPTSTSTSTTSTKATSTTSTASSQTSSSTGGGCAAQRWAQCGGIGFSGCTTCVSGTTCNKQNDWYSQCL

SEQ ID NO: 47116 - protein, 295 aa, Staphylotrichum coccosporum
ADGKSTRYWDCCKPSCSWPGKASVNQPVFACSANFQRISDPNVKSGCDGGSAYACADQTPWAVNDNFSYGFAATSISGGNEASWCCGCYELTFTSGPVAGKTMVVQSTSTGGDLGTNHFDLAMPGGGVGIFDGCSPQFGGLAGDRYGGVSSRSQCDSFPAAVKPGCYWRFDWFKNADNPTFTFRQVQCPSELVARTGCRRNDDGNFPVFTPPSGGQSSSSSSSSSAKPTSTSTSTTSTKATSTTSTASSQTSSSTGGGCAAQRWAQCGGIGFSGCTTCVSGTTCNKQNDWYSQCL

SEQ ID NO: 47117 - protein, 295 aa, Staphylotrichum coccosporum
ADGKSTRYWDCCKPSCSWPGKASVNQPVFACDANFTRISDPNVKSGCDGGSAYACADQTPWAVNDNFSYGFAATSISGGNEASWCCGCYELTFTSGPVAGKTMVVQSTSTGGDLGTNHFDLAMPGGGVGIFDGCSPQFGGLAGDRYGGVSSRSQCDSFPAALKPGCYWRFDWFKNADNPTFTFRQVQCPSELVARTGCRRNDDGNFPVFTPPSGGQSSSSLSSSKAKPTSTSTSTTSTKATSTTSTASSQTSSSTGGGCAAQRWAQCGGIGFSGCTTCVSGTTCNKQNDWYSQCL

SEQ ID NO: 47118 - protein, 295 aa, Staphylotrichum coccosporum
ADGKSTRYWDCCKPSCSWPGKASVNQPVWACSANFQRISDPNVKSGCDGGSAYACADQTPWAVNDNFSYGFAATSISGGNEASWCCGCYELTFTSGPVAGKTMVVQSTSTGGDLGTNHFDLAMPGGGVGIFDGCSPQFGGLAGDRYGGVSSRSQCDSFPAALKPGCYWRFDWFKNADNPTFTFRQVQCPSELVARTGCRRNDDGNFPVFTPPSGGQSSSSSSSSSAKPTSTSTSTTSTKATSTTSTASSQTSSSTGGGCAAQRWAQCGGIGFSGCTTCVSGTTCNKQNDWYSQCL

SEQ ID NO: 47119 - protein, 295 aa, Staphylotrichum coccosporum
ADGKSTRYWDCCKPSCSWPGKASVNQPVFACSANFQRISDPNVKSGCDGGSAYACADQTPWAVNDNFSYGFAATSISGGNEASWCCGCYELTFTSGPVYGKTMVVQSTSTGTDLGTNHFDLAMPGGGVGIFDGCTPQFGGLAGDRYGGVSSRDQCDSFPAALKPGCYWRFDWFKNADNPTFTFRQVQCPSELVARTGCRRNDDGNFPVFTPPSGGQSSSSSSSSSARPTSTSTSTTSTKATSTTSTASSQTSSSTGGGCAAQRWAQCGGIGFSGCTTCVSGTTCNKQNDWYSQCL

SEQ ID NO: 47120 - protein, 295 aa, Staphylotrichum coccosporum
ADGKSTRYWDCCKPSCSWPGKASVNQPVFACSANFQRISDPNVKSGCDGGSAYACADQTPWAVNDNFSYGFAATSISGGNEASWCCGCYELTFTSGPVAGKTMVVQSTSTGGDLGTNHFDLAMPGGGVGIFDGCSPQFGGLAGDRYGGVSSRSQCDSFPAALKPGCYWRFNWFKNADNPTFTFRQVQCPSELVARTGCRRNDDGNFPVFTPPSGGQSSSSSSSSSAKPTSTSTSTTSTKATSTTSTASSQTSSSTGGGCAAQRWAQCGGIGFSGCTTCVSGTTCNKQNDWYSQCL

SEQ ID NO: 47121 - protein, 295 aa, Staphylotrichum coccosporum
ADGKSTRYWDCCKPSCSWPGKASVNQPVFACSANFQRISDPNVKSGCDGGSAYACADQTPWAVNDNFSYGFAATSISGGNEASWCCGCYELTFTSGPVAGKTMVVQSTSTGGDLGTNHFDLAMPGGGVGIFDGCSPQFGGLAGDRYGGVSSRSQCDSFPAALKPGCYWRFDWFKNADNPTFTFRQVQCPSELVARTGCRRNDDSNFPVFTPPSGGQSSSSSSSSSAKPTSTSTSTTSTKATSTTSTASSQTSSSTGGGCAAQRWAQCGGIGFSGCTTCVSGTTCNKQNDWYSQCL

SEQ ID NO: 47122 - protein, 295 aa, Staphylotrichum coccosporum
ADGKSTRYWDCCKPSCSWPGKASVNQPVFACSANFQRISDPNVKSGCDGGSAYACADQTPWAVNDNFSYGFAATSISGGSEASWCCGCYELTFTSGPVAGKTMVVQSTSTGGDLGTNHFDLAMPGGGVGIFDGCSPQFGGLAGDRYGGVSSRSQCDSFPAALKPGCYWRFDWFKNADNPTFTFRQVQCPSELVARTGCRRNDDGNFPVFTPPSGGQSSSSSSSSSAKPTSTSTSTTSTKATSTTSTASSQTSSSTGGGCAAQRWAQCGGIGFSGCTTCVSGTTCNKQNDWYSQCL

SEQ ID NO: 47123 - protein, 295 aa, Staphylotrichum coccosporum
ADGKSTRYWDCCKPSCSWPGKASVNQPVFACSANFQRISDPNVKSGCDGGSAYACADQTPWAVNDNFSYGFAATSISGGNEASWCCGCYELTFTSGPVAGKTMVVQSTSTGGDLGTNHFDLAMPGGGVGIFDGCSPQFGGLAGDRYGGVSSRSQCDSFPAALKPGCYWRFDWFKNADNPTFTFRQVQCPSELVARTGCRRNDDGNFPVFTPPSGGQSSSSSSSSSAKPTSTTTSTTSTKATSTTSTASSQTSSSTGGGCAAQRWAQCGGIGFSGCTTCVSGTTCNKQNDWYSQCL

SEQ ID NO: 47124 - protein, 295 aa, Staphylotrichum coccosporum
ADGKSTRYWDCCKPSCSWPGKASVNQPVFACSANFQRISDPNVKSGCDGGSAYACADQTPWAVNDNFSYGFAATSISGGNEASWCCGCYELTFTSGPVAGKTMVVQSTSTGGDLGTNHFDLAMPGGGVGIFDGCSPQFGGLAGDRYGGVSSRSQCNSFPAALKPGCYWRFDWFKNADNPTFTFRQVQCPSELVARTGCRRNDDGNFPVFTPPSGGQSSSSSSSSSAKPTSTSTSTTSTKATSTTSTASSQTSSSTGGGCAAQRWAQCGGIGFSGCTTCVSGTTCNKQNDWYSQCL

SEQ ID NO: 47125 - protein, 295 aa, Staphylotrichum coccosporum
ADGKSTRYWDCCKPSCSWPGKASVNQPVFACSANFQRISDPNVKSGCDGGSAYACADQTPWAVNDNFSYGFAATSISGGNEASWCCGCYELTFTSGPVAGKTMVVQSTSTGGDLGTNHFDLAMPGGGVGIFDGCSPQFGGIAGDRYGGVSSRSQCDSFPAALKPGCYWRFDWFKNADNPTFTFRQVQCPSELVARTGCRRNDDGNFPVFTPPSGGQSSSSSSSSSAKPTSTSTSTTSTKATSTTSTASSETSSSTGGGCAAQRWAQCGGIGFSGCTTCVSGTTCNKQNDWYSQCL

SEQ ID NO: 47126 - protein, 295 aa, Staphylotrichum coccosporum
ADGKSTRYWDCCKPSCSWPGKASVNQPVFACSANFQRISDPNVKSGCDGGSAYACADQTPWAVNDNFSYGFAATSISGGNEASWCCGCYELTFTSGPVAGKTMVVQSTSTGGDLGTNHFDLAMPGGGVGIFDGCSPQFGGLAGDRYGGVSSRSQCDSMPAALKPGCYWRFDWFKNADNPTFTFRQVQCPSELVARTGCRRNDDGNFPVFTPPSGGQSSSSSSSSSAKPTSTSTSTTSTKATSTTSTASSQTSSSTGGGCAAQRWAQCGGIGFSGCTTCVSGTTCNKQNDWYSQCL

SEQ ID NO: 47127 - protein, 295 aa, Staphylotrichum coccosporum
ADGKSTRYWDCCKPSCSWPGKASVNQPVFACSANFQRISDPNVKSGCDGGSAYACADQTPWAVNDNFSYGFAATSISGGNEASWCCGCYELTFTSGPVAGKTMVVQSTSTGGDLGTNHFDIAMPGGGVGIFDGCSPQFGGLAGDRYGGVSSRSQCDSFPAALKPGCYWRFDWFKNADNPTFTFRQVQCPSELVARTGCRRNDDGNFPVFTPPSGGQSSSSSSSSSAKPTSTSTSTTSTKATSTTSTASSQTSSSTGGGCAAQRWAQCGGIGFSGCTTCVSGTTCNKQNDWYSQCL

SEQ ID NO: 47128 - protein, 295 aa, Staphylotrichum coccosporum
ADGKSTRYWDCCKPSCSWPGKASVNQPVFACSANFQRISDPNVKSGCDGGSAYACADQTPWAVNDNFSYGFAATSISGGNEASWCCGCYELTFTSGPVAGKTMVVQSTSTGTDLGTNHFDLAMPGGGVGIFDGCSPQFGGLAGDRYGGVSSRSQCDSFPAALKPGCYWRFDWFKNADNPTFTFRQVQCPSELVARTGCRRNDDGNFPVFTPPSGGQSSSSSSSSSAKPTSTSTSTTSTKATSTTSTASSQTSSSTGGGCAAQRWAQCGGIGFSGCTTCVSGTTCNKQNDWYSQCL

SEQ ID NO: 47129 - protein, 295 aa, Staphylotrichum coccosporum
ADGKSTRYWDCCKPSCSWPGKASVNQPVFACSANFQRISDPNVKSGCDGGSAYACADQTPWAVNDNFSYGFAATSISGGNEASWCCGCYELTFTSGPVAGKTMVVQSTSTGGDLGTNHFDLAMPGGGVGIFDGCSPQFGGLAGDRYGGVSSRSQCDSFPAALKPGCYWRFDWFKNADNPTFTFRQVQCPSELLARTGCRRNDDGNFPVFTPPSGGQSSSSSSSSSAKPTSTSTSTTSTKATSTTSTASSQTSSSTGGGCAAQRWAQCGGIGFSGCTTCVSGTTCNKQNDWYSQCL

SEQ ID NO: 47130 - protein, 295 aa, Staphylotrichum coccosporum
ADGKSTRYWDCCKPSCSWPGKASVNQPVFACSANFQRISDPNVKSGCDGGSAYACADQTPWAVNDNFSYGFAATSISGGNEASWCCGCYELTFTSGPVYGKTMVVQSTSTGGDLGTNHFDLAMPGGGVGIFDGCSPQFGGLAGDRYGGVSSRSQCDSFPAALKPGCYWRFDWFKNADNPTFTFRQVQCPSELVARTGCRRNDDGNFPVFTPPSGGQSSSSSSSSSAKPTSTSTSTTSTKATSTTSTASSQTSSSTGGGCAAQRWAQCGGIGFSGCTTCVSGTTCNKQNDWYSQCL

SEQ ID NO: 47131 - protein, 295 aa, Staphylotrichum coccosporum
ADGKSTRYWDCCKPSCSWPGKASVNQPVFACSANFQRISDPNVKSGCDGGSAYACADQTPWAVNDNFSYGFAATSISGGNEASWCCGCYELTFTSGPVAGKTMVVQSTSTGGDLGTNHFDLAMPGGGVGIFDGCSPQFGGLAGDRYGGVSSRSQCDSFPAALVPGCYWRFDWFKNADNPTFTFRQVQCPSELVARTGCRRNDDGNFPVFTPPSGGQSSSSSSSSSAKPTSTSTSTTSTKATSTTSTASSQTSSSTGGGCAAQRWAQCGGIGFSGCTTCVSGTTCNKQNDWYSQCL

SEQ ID NO: 47132 - protein, 295 aa, Staphylotrichum coccosporum
ADGKSTRYWDCCKPSCSWPGKASVNQPVFACSANFQRISDPNVKSGCDGGSAYACADQTPWAVNDNFSYGFAATSISGGNEASWCCGCYELTFTSGPVEGKTMVVQSTSTGGDLGTNHFDLAMPGGGVGIFDGCSPQFGGLAGDRYGGVSSRSQCDSFPAALKPGCYWRFDWFKNADNPTFTFRQVQCPSELVARTGCRRNDDGNFPVFTPPSGGQSSSSSSSSSAKPTSTSTSTTSTKATSTTSTASSQTSSSTGGGCAAQRWAQCGGIGFSGCTTCVSGTTCNKQNDWYSQCL

SEQ ID NO: 47133 - protein, 295 aa, Staphylotrichum coccosporum
ADGKSTRYWDCCKPSCSWPGKASVNQPVFACSANFQRISDPNVKSGCDGGSAYACADQTPWAVNDNFSYGFAATSISGGNEASWCCGCYELTFTSGPVAGKTMVVQSTSTGGDLGTNHFDLAMPGGGVGIFDGCSKQFGGLAGDRYGGVSSRSQCDSFPAALKPGCYWRFDWFKNADNPTFTFRQVQCPSELVARTGCRRNDDGNFPVFTPPSGGQSSSSSSSSSAKPTSTSTSTTSTKATSTTSTASSQTSSSTGGGCAAQRWAQCGGIGFSGCTTCVSGTTCNKQNDWYSQCL

SEQ ID NO: 47134 - protein, 295 aa, Staphylotrichum coccosporum
ADGKSTRYWDCCKPSCSWPGKASVNQPVFACSANFQRISDPNVKSGCDGGSAYACADQTPWAVNDNFSYGFAATSISGGNEASWCCGCYEITFTSGPVAGKTMVVQSTSTGGDLGTNHFDLAMPGGGVGIFDGCSPQFGGLAGDRYGGVSSRSQCDSFPAALKPGCYWRFDWFKNADNPTFTFRQVQCPSELVARTGCRRNDDGNFPVFTPPSGGQSSSSSSSSSAKPTSTSTSTTSTKATSTTSTASSQTSSSTGGGCAAQRWAQCGGIGFSGCTTCVSGTTCNKQNDWYSQCL

SEQ ID NO: 47135 - protein, 295 aa, Staphylotrichum coccosporum
ADGKSTRYWDCCKPSCSWPGKASVNQPVFACSANFQRISDPNVKSGCDGGSAYACADQTPWAVNDNFSYGFAATSISGGNEASWCCACYELTFTSGPVAGKTMVVQSTSTGGDLGTNHFDLAMPGGGVGIFDGCSPQFGGLPGDRYGGVSSRSQCDSFPAPLKPGCYWRFDWFKNADNPTFTFRQVQCPSEVVARTGCRRNDDSNFPVFTPPSGGQSSSSSSSSSAKPTSTSTSTTSTKAASTTSTASSQTSSSTGGGCAAQRWAQCGGIGFSGCTTCVSGTTCNKQNDWYSQCL

SEQ ID NO: 47136 - protein, 295 aa, Staphylotrichum coccosporum
ADGKSTRYWDCCKPSCSWPGKASVNQPVFACSANFQRISDPNVKSGCDGGSAYACADQTPWAVNDNFSYGFAATSISGGNEASWCCGCYELTFTSGPVAGKTMVVQSTSTGGDLGTNHFDLAMPGGGVGIFDGCSPQFGGLAGDRYGGVSSRSQCESFPAALKPGCYWRFDWFKNADNPTFTFRQVQCPSELVARTGCRRNDDGNFPVFTPPSGGQSSSSSSSSSAKPTSTSTSTTSTKATSTTSTASSQTSSSTGGGCAAQRWAQCGGIGFSGCTTCVSGTTCNKQNDWYSQCL

SEQ ID NO: 47137 - protein, 295 aa, Staphylotrichum coccosporum
ADGKSTRYWDCCKPSCSWPGKASVNQPVFACSANFQRISDPNVKSGCDGGSAYACADQTPWAVNDNFSYGFAATSISGGNEASWCCGCYELTFTSGPVAGKTMVVQSTSTGGDLGTNHFDLAMPGGGVGIFDGCSPQFGGLAGDRYGGVSSRSQCDSFPAALKPGCYWRFDWFKNADNPTFTFRQVQCPSELVARTGCRRNDDGNFPVFTPPSGGQSSSSSSSSSAKPTSTSTSTTSTKATSTTSTASSQTSSSTGGGCAAQRWAQCGGIGFSGCTTCVSGTTCNKQNDWYSQFL

SEQ ID NO: 47138 - protein, 295 aa, Staphylotrichum coccosporum
ADGKSTRYWDCCKPSCSWPGKASVNQPVFACSANFQRISDPNVKSGCDGGSAYACADQTPWAVNDNFSYGFAATSISGGNEASWCCGCYELTFTSGPVAGKTMVVQSTSTGGDVGTNHFDLAMPGGGVGIFDGCSPQFGGLAGDRYGGVSSRSQCDSFPGALKPGCYWRFDWFKNADNPTFTFRQVQCPSELVARTGCRRNDDGNFPVFTPPSGGQSSSSSSSSSAKPTSTSTSTTSTKATSTTSTASSQTSSSTGGGCAAQRWAQCGGIGFSGCTTCVSGTTCNKQNDWYSQCL

SEQ ID NO: 47139 - protein, 295 aa, Staphylotrichum coccosporum
ADGKSTRYWDCCKPSCSWPGKASVNQPVFACSANFQRISDPNVKSGCDGGSAYACADQTPWAVNDNFSYGFAATSISGGNEASWCCGCYELTFTSGPVAGKTMVVQSTSTGGDLGTNHFDLAMPGGGVGIFDGCSEQFGGLAGDRYGGVSSRSQCDSFPAALKPGCYWRFDWFKNADNPTFTFRQVQCPSELVARTGCRRNDDGNFPVFTPPSGGQSSSSSSSSSAKPTSTSTSTTSTKATSTTSTASSQTSSSTGGGCAAQRWAQCGGIGFSGCTTCVSGTTCNKQNDWYSQCL

SEQ ID NO: 47140 - protein, 295 aa, Staphylotrichum coccosporum
ADGKSTRYWDCCKPSCSWPGKASVNQPVFACSANFQRISDPNVKSGCDGGSAYACADQTPWAVNDNFSYGFAATSISGGNEASWCCGCYELTFTSGPVAGKTMVVQSTSTGGDLGTNHFDLAMPGGGVGIFDGCSPQFGGLAGDRYGGVSSRSQCDSFPAALKPGCYWRFDWFKNADNPTFTFRQVQCPSELVARTGCRRNDDGNFPVFTPPSGGQSSSSSSSSSAKPTSTSTSTTSTKATSTTSTASSQTSSSTGGGCAAQRWAQCGGIGFSGCTTCVSGTTCNKQNNWYSQCL

SEQ ID NO: 47141 - protein, 295 aa, Staphylotrichum coccosporum
ADGKSTRYWDCCKPSCSWPGKASVNQPVFACSANFQRISDPNVKSGCDGGSAYACADQTPWAVNDNFSYGFAATSISGGNEASWCCGCYELTFTSGPVAGKTMVVQSTSTGGDLGTNHFDLAMPGGGVGIFDGCSPQFGGLAGDRYGGVSSRSQCDSFPAALKPGCYWRFDWFKNADNPTFTFRQVQCPSQLVARTGCRRNDDGNFPVFTPPSGGQSSSSSSSSSAKPTSTSTSTTSTKATSTTSTASSQTSSSTGGGCAAQRWAQCGGIGFSGCTTCVSGTTCNKQNDWYSQCL

SEQ ID NO: 47142 - protein, 295 aa, Staphylotrichum coccosporum
ADGKSTRYWDCCKPSCSWPGKASVNQPVFACSANFQRISDPNVKSGCDGGSAYACADQTPWAVNDNFSYGFAATSISGGNEASWCCGCYELTFTSGPVAGKTMVVQSTSTGGDLGTNHFDLAMPGGGVGIFDGCSPQFGGLAGDRYGGVSSRSQCDSFPAALKPGCYWRFDWFKNADNPTFTFRQVQCPSEVVARTGCRRNDDGNFPVFTPPSGGQSSSSSSSSSAKPTSTSTSTTSTKATSTTSTASSQTSSSTGGGCAAQRWAQCGGIGFSGCTTCVSGTTCNKQNDWYSQCL

SEQ ID NO: 47143 - protein, 295 aa, Staphylotrichum coccosporum
ADGKSTRYWDCCKPSCSWPGKASVNQPVFACSANFQRISDPNVVSGCDGGSAYACADQTPWAVNDNFSYGFAATSISGGNEASWCCGCYELTFTSGPVAGKTMVVQSTSTGGDLGTNHFDLAMPGGGVGIFDGCSPQFGGLAGDRYGGVSSRSQCDSFPAALKPGCYWRFDWFKNADNPTFTFRQVQCPSELVARTGCRRNDDGNFPVFTPPSGGQSSSSSSSSSAKPTSTSTSTTSTKATSTTSTASSQTSSSTGGGCAAQRWAQCGGIGFSGCTTCVSGTTCNKQNDWYSQCL

SEQ ID NO: 47144 - protein, 295 aa, Staphylotrichum coccosporum
ADGKSTRYWDCCKPSCSWPGKASVNQPVWACSANFQRISDPNVKSGCDGGSAYACADQTPWAVNDNFSYGFAATSIMGGNEASWCCGCYELTFTSGPVEGKTMVVQSTSTGGDLGTNHFDLAMPGGGVGIFDGCSPQFGGLPGDRYGGVSSRSQCDSFPAALKPGCYWRFDWFKNADNPTFTFRQVQCPSELVARTGCRRNDDGNFPVFTPPSGGQSSSSSSSSSAKPTSTSTSTTSTKATSTTSTASSQTSSSTGGGCAAQRWAQCGGIGFSGCTTCVSGTTCNKQNDWYSQCL

SEQ ID NO: 47145 - protein, 295 aa, Staphylotrichum coccosporum
ADGVSTRYWDCCKPSCSWPGKASVNQPVFACSANFQRISDPNVKSGCDGGSAYACADQTPWAVNDNFSYGFAATSIKGGNEASWCCGCYELTFTSGPVAGKTMVVQSTSTGSDLGTNHFDLAMPGGGVGIFDGCSPQFGGLPGDRYGGVSSRSQCDSFPAALKPGCYWRFDWFKNADNPTFTFRQVQCPSELVSRTGCRRNDDGNFPVFTPPSGGQSSSSSSSSSAKPTSTSTSTTSTKATSTTSTASGQTSSSTGKGCAAQRWAQCGGIGFSGCTTCVSGTTCNKQNDWYSQCL

SEQ ID NO: 47146 - protein, 295 aa, Staphylotrichum coccosporum
ADGKSTRYWDCCKPSCSWPGKASVNQPVFACSANFQRISDPNVKSGCDGGSAYACADQTPWAVNDNFSYGFAATSLSGGNEASWCCGCYELTFTSGPVAGKTMVVQSTSTGGDLGTNHFDLAMPGGGVGIFDGCSPQFGGLAGDRYGGVSSRSQCDSFPAALKPGCYWRFDWFKNADNPTFTFRQVQCPSELVARTGCRRNDDGNFPVFTPPSGGQSSSSSSSSSAKPTSTSTSTTSTKATSTTSTASSQTSSSTGGGCAAQRWAQCGGIGFSGCTTCVSGTTCNKQNDWYSQCL

SEQ ID NO: 47147 - protein, 295 aa, Staphylotrichum coccosporum
ADGKSTRYWDCCKPSCSWPGKASVNQPVFACSANFQRISDPNVKSGCDGGSAYACADQTPWAVNDNFSYGFAATSISGGNEASWCCGCYELTFTSGPVAGKTMVVQSTSTGGDLGTNHFDLAMPGGGVGIFDGCSPQFGGLAGDRYGGVSSRSQCDSFPAPLKPGCYWRFDWFKNADNPTFTFRQVQCPSELVARTGCRRNDDGNFPVFTPPSGGQSSSSSSSSSAKPTSTSTSTTSTKATSTTSTASSQTSSSTGGGCAAQRWAQCGGIGFSGCTTCVSGTTCNKQNDWYSQCL

SEQ ID NO: 47148 - protein, 295 aa, Staphylotrichum coccosporum
ADGKSTRYWDCCKPSCSWPGKASVNQPVFACSANFQRISDPNVKSGCDGGSAYACADQTPWAVNDNFSYGFAATSISGGNEASWCCGCYELTFTSGPVAGKTMVVQSTSTGGDLGTNHFDLAMPGGGVGIFDGCSPQFGGIAGDRYGGVSSRSQCDSFPAALKPGCYWRFDWFKNADNPTFTFRQVQCPSELVARTGCRRNDDGNFPVFTPPSGGQSSSSSSSSSAKPTSTSTSTTSTKATSTTSTASSDTSSSTGGGCAAQRWAQCGGIGFSGCTTCVSGTTCNKQNDWYSQCL

SEQ ID NO: 47149 - protein, 295 aa, Staphylotrichum coccosporum
ADGKSTRYWDCCKPSCSWPGKASVNQPVFACSANFQRISDPNVKSGCDGGSAYACADQTPWAVNDNFSYGFAATSISGGNEASWCCGCYELTFTSGPVAGKTMVVQSTSTGGDLGTNHFDLAMPGGGVGIFDGCSPQFGGLAGDRYGGVSSRSQCDSFPAELKPGCYWRFDWFKNADNPTFTFRQVQCPSELVARTGCRRNDDGNFPVFTPPSGGQSSSSSSSSSAKPTSTSTSTTSTKATSTTSTASSQTSSSTGGGCAAQRWAQCGGIGFSGCTTCVSGTTCNKQNDWYSQCL

SEQ ID NO: 47150 - protein, 295 aa, Staphylotrichum coccosporum
ADGKSTRYWDCCKPSCSWPGKASVNQPVWACSANFQRISDPNVKSGCDGGSAYACADQTPWAVNDNFSYGFAATSISGGNEASWCCACYALTFTSGPVYGKTMVVQSTSTGGDLGTNHFDLAMPGGGVGIFDGCSPQFGGLPGDRYGGVSSRDQCDSFPAALKPGCYWRFDWFKNADNPTFTFRQVQCPSELVARTGCRRNDDGNFPVFTPPSGGQSSSSSSSSSARPTSTSTSTTDTKATSTTSTASSQTSSSTGGGCAAQRWAQCGGIGFSGCTTCVSGTTCNKQNDWYSQCL

SEQ ID NO: 47151 - protein, 295 aa, Staphylotrichum coccosporum
ADGKSTRYWDCCKPSCSWPGKASVNQPVFACSANFQRISDPNVKSGCDGGSAYACADQTPWAVNDNFSYGFAATSISGGNEASWCCGCYELTFTSGPVAGKTMVVQSTSTGGDIGTNHFDLAMPGGGVGIFDGCSPQFGGLAGDRYGGVSSRSQCDSFPGALKPGCYWRFDWFKNADNPTFTFRQVQCPSELVARTGCRRNDDGNFPVFTPPSGGQSSSSSSSSSAKPTSTSTSTTSTKATSTTSTASSQTSSSTGGGCAAQRWAQCGGIGFSGCTTCVSGTTCNKQNDWYSQCL

SEQ ID NO: 47152 - protein, 295 aa, Staphylotrichum coccosporum
ADGKSTRYWDCCKPSCSWPGKASVNQPVFACSANFQRISDPNVKSGCDGGSAYACADQTPWAVNDNFSYGFAATSISGGNQASWCCGCYELTFTSGPVAGKTMVVQSTSTGGDLGTNHFDLAMPGGGVGIFDGCSPQFGGLAGDRYGGVSSRSQCDSFPAALKPGCYWRFDWFKNADNPTFTFRQVQCPSELVARTGCRRNDDGNFPVFTPPSGGQSSSSSSSSSAKPTSTSTSTTSTKATSTTSTASSQTSSSTGGGCAAQRWAQCGGIGFSGCTTCVSGTTCNKQNDWYSQCL

SEQ ID NO: 47153 - protein, 276 aa, Acremonium thermophilum
GKSTRYWDCCKPSCGWAGASVNQPVFSCSADWQRISDFNAKSGCDGGNAYSCADQTPWAVNDNFSYGFAATAIAGGSEQSWCCACYALTFNSGPVAGKTMVVQSTSTGGDLGENHFDLAIPGGGVGIFNGCQSQFGGLPGAQYGGIQDRSQCSSFPAPLQPGCQWRFDWFQNADNPTFTFQRVQCPSELTSRTGCKRDDDANYPVFPPSGPSGGNPPGGNPPGTTTTRRPATTTGSSPGPTQSHYGQCGGIGYSGPTVCASGTTCQVLNPYYSQCL

SEQ ID NO: 47154 - protein, 316 aa, Staphylotrichum coccosporum
MRSSPVLRTALAAALPLAALAADGKSTRYWDCCKPSCSWPGKASVNQPVFACSANFQRISDPNVKSGCDGGSAYACADQTPWAVNDNFSYGFAATSISGGNEASWCCGCYELTFTSGPVAGKTMVVQSTSTGGDLGTNHFDLAMPGGGVGIFDGCSPQFGGLAGDRYGGVSSRSQCDSFPAALKPGCYWRFDWFKNADNPTFTFRQVQCPSELVARTGCRRNDDGNFPVFTPPSGGQSSSSSSSSSAKPTSTSTSTTSTKATSTTSTASSQTSSSTGGGCAAQRWAQCGGIGFSGCTTCVSGTTCNKQNDWYSQCL

SEQ ID NO: 47155 - protein, 317 aa, Fungi
MRSSPVLRTALAAALPLAALAADGKSTRYWDCCKPSCSWPGKASVNQPVFACSANFQRISDPNVKSGCDGGSAYACADQTPWAVNDNFSYGFAATSISGGNEASWCCGCYELTFTSGPVAGKTMVVQSTSTGGDLGTNHFDLAMPGGGVGIFDGCSPQFGGLAGDRYGGVSSRSQCDSFPAALKPGCYWRFDWFKNADNPTFTFRQVQCPSELVARTGCRRNDDGNFPVFTPPSGGQSSSSSSSSSAKPTSTSTSTTSTKATSTTSTASSQTSSSTGGGCAAQRWACQCGGIGFSGCTTCVSGTTCNKQNDWYSQCL

SEQ ID NO: 47156 - protein, 235 aa, Melanocarpus albomyces
MRSTPVLRALLAAALPLGALAANGQSTRYWDCCKPSCGWRGKGPVNQPVYSCDANFQRIHDFDAVSGCEGGPAFSCADHSPWAINDNLSYGFAATALSGQTEESWCCACYALTFTSGPVAGKTMVVQSTSTGGDLGSNHFDLNIPGGGVGLFDGCTPQFGGLPGARYGGISSRQECDSFPEPLKPGCQWRFDWFQNADNPSFTFERVQCPEELVARTGCRRHDDGGFAVFKAPSA

SEQ ID NO: 47157 - protein, 288 aa, Thermochaetoides thermophila
ADGKSTRYWDCCKPSCSWPGKAAVSQPVFACDRNFNRIYDFGAKSGCEGGPAYSCADQTPWAVNDQFSYGFAATNIAGGNEASWCCACYKLTFTSGPVAGKVMVVQSTSTGGDLGNNHFDLNIPGGGVGIFDGCTPQFGGLPGERYGGISSRSQCDSFPDALKPGCYWRFDWFLNADNPNFTFERVQCPSELVARTGCKRNDDGNYPVFTPPSGDSPSSSSAAPTSTSTSQQPQQPTSSSSQASVPTSNPGGCTSQKWAQCGGIGFTGCTTCVSGTTCTKLNDWYSQC

SEQ ID NO: 47158 - protein, 294 aa, Staphylotrichum coccosporum
ADGKSTRYWDCCKPSCSWPGKASVNQPVFACSANFTRISDPNVKSGCDGGSAYACADQTPWAVNDNFSYGFAATSIKGGNEASWCCACYELTFTSGPVAGKTMVVQSTSTGGDLGTNHFDLAMPGGGVGIFDGCSPQFGGLPGDRYGGVSSRDQCDSFPAPLKPGCYWRFDWFKNANPTFTFRQVQCPSELVARTGCRRNDDSNFPVFTPPSGGQSSSSLSSSSAKPTSTSTSTTDTKATSTTSTASSQTSSSTGGGCAAQRWAQCGGIGFSGCTTCVSGTTCNKQNDWYSQCL

SEQ ID NO: 47159 - protein, 206 aa, Humicola insolens
GRSTRYWDCCKPSCGWAKKAPVNQPVFSCNANFQRITDFDAKSGCEPGGVAYSCADQTPWAVNDDFALGFAATSIAGSNEAGWCCACYELTFTSGPVAGKKMVVQSTSTGGDLGSNHFDLNIPGGGVGIFDGCTPQFGGLPGQRYGGISSRNECDRFPDALKPGCYWRFDWFKNADNPSFSFRQVQCPAELVARTGCRRNDDGNFP

SEQ ID NO: 47160 - protein, 286 aa, Thermochaetoides thermophila
GKSTRYWDCCKPSCSWPGKAAVSQPVFACDRNFNRIYDFGAKSGCEGGPAYSCADQTPWAVNDQFSYGFAATNIAGGNEASWCCACYKLTFTSGPVAGKVMVVQSTSTGGDLGNNHFDLNIPGGGVGIFDGCTPQFGGLPGERYGGISSRSQCDSFPDALKPGCYWRFDWFLNADNPNFTFERVQCPSELVARTGCKRNDDGNYPVFTPPSGDSPSSSSAAPTSTSTSQQPQQPTSSSSQASVPTSNPGGCTSQKWAQCGGIGFTGCTTCVSGTTCTKLNDWYSQC

SEQ ID NO: 47161 - protein, 264 aa, Synthetic construct
GKSTRYWDCCKPSCSWPGKASVNQPVFACSANFQRISDPNVKSGCDGGSAYACADQTPWAVNDNFSYGFAATSISGGNEASWCCGCYELTFTSGPVAGKTMVVQSTNTGGDLGTNHFDLAMPGGGVGIFDGCSPQFGGLAGDRYGGVSSRSQCDSFPAALKPGCYWRFDWFKNADNPTFTFRQVQCPSELVARTGCRRNDDGNFPAVQIPSSSTSSSPPVQPTTPSGCTAERWAQCGGNGWSGCTTCVAGSTCTKINDWYHQCL

SEQ ID NO: 47162 - protein, 293 aa, Staphylotrichum coccosporum
ADGKSTRYWDCCKPSCSWPGKASVNQPVFACSANFQRISDPNVKSGCDGGTAYACADQTPWAVNDNFSYGFAATSISGGSEASWCCGCYELTFTSGPVAGKTMVVQSTSTGGDLGTNHFDLAMPGGGVGIFDGCSPQFGGLPGDRYGGVSSRSQCDSFPAALKPGCYWRFWFKNANPTFTFRQVQCPSEVVARTGCRRNDDGNFPHFTPPSGGQSSSSSSSSSAKPTSTSTSTTSTKATSTTSTASSQTSSSTGGGCAAQRWAQCGGIGFSGCTTCVSGTTCNKQNDWYSQCL

SEQ ID NO: 47163 - protein, 269 aa, Thermothielavioides terrestris
SGSGQSTRYWDCCKPSCAWPGKAAVSQPVYACDANFQRLSDFNVQSGCNGGSAYSCADQTPWAVNDNLAYGFAATSIAGGSESSWCCACYALTFTSGPVAGKTMVVQSTSTGGDLGSNHFDIAMPGGGVGIFDGCSSQFGGLPGARYGGISSRDQCDSFPAPLKPGCQWRFDWFQNADNPTFTFQQVQCPAEIVARSGCKRNDDSSFPVFTPEPTPEPTPEPTPEPTPEPTGCTAERWAQCGGNGWSGCTTCVAGSTCTKINDWYHQCL

SEQ ID NO: 47164 - protein, 269 aa, Thermothielavioides terrestris
SGSGQSTRYWDCCKPSCAWPGKAAVSQPVYSCDANFQRLSDFNVQSGCNGGSAYACADQTPWAVNDNLAYGFAATSIAGGSESSWCCACYALTFTSGPVAGKTMVVQSTSTGGDLGSNHFDIAMPGGGVGIFDGCSSQFGGLPGDRYGGISSRDQCDSFPAPLKPGCYWRFDWFQNADNPTVTFQQVQCPAEIVARSGCKRNDDSSFPVFTPEPTPEPTPEPTPEPTPEPTGCTAERWAQCGGNGWSGCTTCVAGSTCTKINDWYHQCL

SEQ ID NO: 47165 - protein, 269 aa, Thermothielavioides terrestris
SGSGQSTRYWDCCKPSCAWPGKAAVSQPVYACDANFQRLSDFNVQSGCNGGSAYACADQTPWAVNDNLAYGFAATSIAGGSESSWCCACYALTFTSGPVAGKTMVVQSTSTGGDLGSNHFDIAMPGGGVGIFDGCSSQFGGLPGARYGGISSRDQCDSFPAPLKPGCQWRFDWFQNADNPTFTFQQVQCPAEIVARSGCKRNDDSSFPVFTPEPTPEPTPEPTPEPTPTPTGCTAERWAQCGGNGWSGCTTCVAGSTCTKINDWYHQCL

SEQ ID NO: 47166 - protein, 269 aa, Thermothielavioides terrestris
SGSGQSTRYWDCCKPSCAWPGKAAVSQPVYACDANFQRLSDFNVQSGCNGGSAYACADQTPWAVNDNLAYGFAATSIAGGSESSWCCACYALTFTSGPVAGKTMVVQSTSTGGDLGSNHFDIAMPGGGVGIFDGCSSQFGGLPGAQYGGISSRDECDSFPAPLKPGCYWRFDWFQNADNPTFTFQQVQCPAEIVARSGCKRNDDSSFPVFTPEPTPEPTPEPTPEPTPEPTGCTAERWAQCGGNGWSGCTTCVAGSTCTKINDWYHQCL

SEQ ID NO: 47167 - protein, 268 aa, Acremonium thermophilum
GKSTRYWDCCKPSCGWAGKASVNQPVFSCSADWQRISDFNAKSGCDGGNAYSCADQTPWAVNDNFSYGFAATAIAGGSEQSWCCACYALTFNSGPVAGKTMVVQSTSTGGDLGENHFDLAIPGGGVGIFNGCQSQFGGLPGAQYGGIQDRSQCSSFPAPLQPGCQWRFDWFQNADNPTFTFQRVQCPSELTSRTGCKRDDDANYPVFPPGGNPPGTTTTRRPATTTGSSPGPTQSHYGQCGGIGYSGPTVCASGTTCQVLNPYYSQCL

SEQ ID NO: 47168 - protein, 308 aa, Thermochaetoides thermophila
MRSTPVLRTALAAALPFTVLAADGKSTRYWDCCKPSCSWPGKAAVSQPVFACDRNFNRIYDFGAKSGCEGGPAYSCADQTPWAVNDQFSYGFAATNIAGGNEASWCCACYKLTFTSGPVAGKVMVVQSTSTGGDLGNNHFDLNIPGGGVGIFDGCTPQFGGLPGERYGGISSRSQCDSFPDALKPGCYWRFDWFLNADNPNFTFERVQCPSELVARTGCKRNDDGNYPVFTPPSGDSPSSSSAAPTSTSTSQQPQQPTSSSSQASVPTSPGGCTSQKWAQCGGIGFTGCTTCVSGTTCTKLNDWYSQC

SEQ ID NO: 47169 - protein, 308 aa, Thermochaetoides thermophila
MRSTPVLRTALAAALPFTVLAADGKSTRYWDCCKPSCSWPGKAAVSQPVFACDRNFNRIYDFGAKSGCEGGPAYSCADQTPWAVNDQFSYGFAATNIAGGNEASWCCACYKLTFTSGPVAGKVMVVQSTSTGGDLGNNHFDLNIPGGGVGIFDGCTPQFGGLPGERYGGISSRSQCDSFPDALKPGCYWRFDWFLNADNPNFTFERVQCPSELVARTGCKRNDDGNYPVFTPPSGDSPSSSSAAPTSTSTSQQPQQPTSSSSQASVPTNPGGCTSQKWAQCGGIGFTGCTTCVSGTTCTKLNDWYSQC

SEQ ID NO: 47170 - protein, 276 aa, Thermochaetoides thermophila
ADGKSTRYWDCCKPSCSWPGKAAVSQPVFACDRNFNRIYDFGAKSGCEGGPAYSCADQTPWAVNDQFSYGFAATNIAGGNEASWCCACYKLTFTSGPVAGKVMVVQSTSTGGDLGNNHFDLNIPGGGVGIFDGCTPQFGGLPGERYGGISSRSQCDSFPDALKPGCYWRFDWFLNADNPNFTFERVQCPSELVARTGCKRNDDGNYPVFTPPSGGNGGTGTPTSTAPGSGQTSPGGGSGCTSQKWAQCGGIGFSGCTTCVSGTTCQKLNDYYSQCL

SEQ ID NO: 47171 - protein, 212 aa, Melanocarpus albomyces
NGQSTRYWDCCKPSCGWAGKGPVNQPVYSCDANFQRIHDFDAVSGCEGGPAFSCADHSPWAINDNLSYGFAATALSGQTEESWCCACYALTFTSGPVAGKTMVVQSTSTGGDLGSNHFDLNIPGGGVGLFDGCTPQFGGLPGARYGGISSRQECDSFPEPLKPGCQWRFDWFQNADNPSFTFERVQCPEELVARTGCRRHDDGGFAVWKAPS

SEQ ID NO: 47172 - protein, 212 aa, Melanocarpus albomyces
NGQSTRYWDCCKPSCGWAGKGPVNQPVYSCDANFQRIHDFDAVSGCEGGPAFSCADHSPWAINDNLSYGFAATALSGQTEESWCCACYALTFTSGPVAGKTMVVQSTSTGGDLGSNHFDLNIPGGGVGLFDGCTPQFGGLPGARYGGISSRQECDSFPESLKPGCQWRFDWFQNADNPSFTFERVQCPEELVARTGCRRHDDGGFAVFKAPS

SEQ ID NO: 47173 - protein, 212 aa, Melanocarpus albomyces
NGQSTRYWDCCKPSCGWAGKGPVNQPVYSCDANMQRIHDFDAVSGCEGGPAFSCADHSPWAINDNLSYGFAATALSGQTEESWCCACYALTFTSGPVAGKTMVVQSTSTGGDLGSNHFDLNIPGGGVGLFDGCTPQFGGLPGARYGGISSRQECDSFPEPLKPGCQWRFDWFQNADNPSFTFERVQCPEELVARTGCRRHDDGGFAVFKAPS

SEQ ID NO: 47174 - protein, 212 aa, Melanocarpus albomyces
NGQSTRYWDCCKPSCGWAGKGPVNQPVYSCDANFQRIHDFDAVSGCEGGPAFSCADHSPWAINDNLSYGFAATALSGQTEESWCCACYALTFTSGPVAGKTMVVQSTSTGGDLGSNHFDLNIPGGGVGLFDGCTPQFGGLPGARYGGISDRQECDSFPEPLKPGCQWRFDWFQNADNPSFTFERVQCPEELVARTGCRRHDDGGFAVFKAPS

SEQ ID NO: 47175 - protein, 212 aa, Melanocarpus albomyces
NGQSTRYWDCCKPSCGWAGKGPVNQPVYSCDANFQRIHDFDAVSGCEGGPAFSCADHSPWSINDNLSYGFAATALSGQTEESWCCACYALTFTSGPVAGKTMVVQSTSTGGDLGSNHFDLNIPGGGVGLFDGCTPQFGGLPGARYGGISSRQECDSFPEPLKPGCQWRFDWFQNADNPSFTFERVQCPEELVARTGCRRHDDGGFAVFKAPS

SEQ ID NO: 47176 - protein, 212 aa, Melanocarpus albomyces
NGQSTRYWDCCKPSCGWAGKGPVNQPVYSCDANFQRIHDFDAVSGCEGGPAFSCADHSPWAINDNLSYGFAATALSGQTEESWCCACYALTFTSGPVAGKTMVVQSTSTGGDLGSNHFDLNIPGGGVGLFDGCTPQFGGLPGARYGGISSRQECDSFPEPLKPGCQWRFDWFQNADNPSFTFERVQCPEELVARTGCRRHDDGGYAVFKAPS

SEQ ID NO: 47177 - protein, 212 aa, Melanocarpus albomyces
NGQSTRYWDCCKPSCGWAGKGPVNQPVYSCDANFQRIHDFDAVSGCEGGPAFSCADHSPWAINDNLSYGFAATALSGQTEESWCCACYALIFTSGPVAGKTMVVQSTSTGGDLGSNHFDLNIPGGGVGLFDGCTPQFGGLPGARYGGISSRQECDSFPEPLKPGCQWRFDWFQNADNPSFTFERVQCPEELVARTGCRRHDDGGFAVFKAPS

SEQ ID NO: 47178 - protein, 212 aa, Melanocarpus albomyces
NGQSTRYWDCCKPSCGWAGKGPVNQPVYSCDANFQRIHDFDAVSGCEGGPAFSCADHSPWAINDNLSYGFAATALSGQTEESWCCACYALTFTSGPVAGKTMVVQSTSTGGDLGSNHFDLNIPGGGVGLFDGCTPQFGGLPGARYGGISSRQECDSFPEPLKPGCQWRFDWFQDADNPSFTFERVQCPEELVARTGCRRHDDGGFAVFKAPS

SEQ ID NO: 47179 - protein, 212 aa, Melanocarpus albomyces
NGQSTRYWDCCKPSCGWAGKGPVNQPVYSCDANFQRIHDFDAVSGCEGGPAFSCADHSPWAINDNLSYGFAATALSGQTEESWCCACYALTFTSGPVAGKTMVVQSTSTGGDLGSNHFDLNIPGGGVGLFDGCTPQFGGLPGARYGGISSRQECDSFPEPLKPGCQWRFDWFQNADNPSFTFERVQCPEELIARTGCRRHDDGGFAVFKAPS

SEQ ID NO: 47180 - protein, 212 aa, Melanocarpus albomyces
NGQSTRYWDCCKPSCGWAGKGPVNQPVYSCDANFQRIHDFDAVSGCEGGPAFSCADHSPWAINDNLSYGFAATALSGQTEESWCCACYALTFTSGPVAGKTMVVQSTSTGGDLGSNHFDLNIPGGGVGLFDGCTPQFGGLPGARYGGISSRQECDSFPEPLKPGCQWRFDWFQNADNPSFTFERVQCPEELVSRTGCRRHDDGGFAVFKAPS

SEQ ID NO: 47181 - protein, 212 aa, Melanocarpus albomyces
NGQSTRYWDCCKPSCGWAGKGPVNQPVYSCDRNFQRIHDFDAVSGCEGGPAFSCADHSPWAINDNLSYGFAATALSGQTEESWCCACYALTFTSGPVAGKTMVVQSTSTGGDLGSNHFDLNIPGGGVGLFDGCTPQFGGLPGARYGGISSRQECDSFPEPLKPGCQWRFDWFQNADNPSFTFERVQCPEELVARTGCRRHDDGGFAVFKAPS

SEQ ID NO: 47182 - protein, 212 aa, Melanocarpus albomyces
NGQSTRYWDCCKPSCGWAGKGPVNQPVYSCDANFQRIHDFDAVSGCEGGPAFSCADHSPWAINDNLSYGFAATALSGQTEESWCCACYALTFTSGPVAGKTMVVQSTSTGGDLGSNHFDLNIPGGGVGLFDGCTPQFGGLPGARYGGISSRQECDSFPEPLKPGCQWRFDWFQNADNPSFTFERVQCPEELVQRTGCRRHDDGGFAVFKAPS

SEQ ID NO: 47183 - protein, 212 aa, Melanocarpus albomyces
NGQSTRYWDCCKPSCGWAGKGPVNQPVYSCDANFQRIHDFDAVSGCEGGPAFSCADHSPWAINDNLSYGFAATALSGQTEESWCCACYALTFTSGPVAGKTMVVQSTSTGGDLGSNHFDLNIPGGGVGLFDGCTPQFGGLPGARYGGISSRQECDSFPEPLKPGCQWRFDWFQNADNPSFTFERVQCPEELDARTGCRRHDDGGFAVFKAPS

SEQ ID NO: 47184 - protein, 212 aa, Melanocarpus albomyces
NGQSTRYWDCCKPSCGWAGKGPVNQPVYSCDANDQRIHDFDAVSGCEGGPAFSCADHSPWAINDNLSYGFAATALSGQTEESWCCACYALTFTSGPVAGKTMVVQSTSTGGDLGSNHFDLNIPGGGVGLFDGCTPQFGGLPGARYGGISSRQECDSFPEPLKPGCQWRFDWFQNADNPSFTFERVQCPEELVARTGCRRHDDGGFAVFKAPS

SEQ ID NO: 47185 - protein, 212 aa, Melanocarpus albomyces
NGQSTRYWDCCKPSCGWAGKGPVNQPVYSCDANWQRIHDFDAVSGCEGGPAFSCADHSPWAINDNLSYGFAATALSGQTEESWCCACYALTFTSGPVAGKTMVVQSTSTGGDLGSNHFDLNIPGGGVGLFDGCTPQFGGLPGARYGGISSRQECDSFPEPLKPGCQWRFDWFQNADNPSFTFERVQCPEELVARTGCRRHDDGGFAVFKAPS

SEQ ID NO: 47186 - protein, 212 aa, Melanocarpus albomyces
NGQSTRYWDCCKPSCGWARKGPVNQPVYSCDANFQRIHDFDAVSGCEGGPAFSCADHSPWAINDNLSYGFAATALSGQTEESWCCACYALTFTSGPVAGKTMVVQSTSTGGDLGSNHFDLNIPGGGVGLFDGCTPQFGGLPGARYGGISSRQECDSFPEPLKPGCQWRFDWFQNADNPSFTFERVQCPEELVARTGCRRHDDGGFAVFKAPS

SEQ ID NO: 47187 - protein, 212 aa, Melanocarpus albomyces
NGQSTRYWDCCKPSCGWAGKGPVNQPVYSCDANWQRIPDFDAVSGCEGGPAFSCADHSPWAINDNLSYGFAATALSGQTEESWCCACYALTFTSGPVAGKTMVVQSTSTGGDLGSNHFDLNIPGGGVGLFDGCTPQFGGLPGARYGGISSRQECDSFPEPLKPGCQWRFDWFQNADNPSFTFERVQCPEELVARTGCRRHDDGGFAVFKAPS

SEQ ID NO: 47188 - protein, 212 aa, Melanocarpus albomyces
NGQSTRYWDCCKPSCGWAGKGPVNQPVYSCDANFQRIHDFDAVSGCEGGPAFSCADHSPWAINDNLSYGFAATALSGQTEESWCCACYALTFTSGPVQGKTMVVQSTSTGGDLGSNHFDLNIPGGGVGLFDGCTPQFGGLPGARYGGISSRQECDSFPEPLKPGCQWRFDWFQNADNPSFTFERVQCPEELVARTGCRRHDDGGFAVFKAPS

SEQ ID NO: 47189 - protein, 212 aa, Melanocarpus albomyces
NGQSTRYWDCCKPSCGWAGQGPVNQPVYSCDANFQRIHDFDAVSGCEGGPAFSCADHSPWAINDNLSYGFAATALSGQTEESWCCACYALTFTSGPVAGKTMVVQSTSTGGDLGSNHFDLNIPGGGVGLFDGCTPQFGGLPGARYGGISSRQECDSFPEPLKPGCQWRFDWFQNADNPSFTFERVQCPEELVARTGCRRHDDGGFAVFKAPS

SEQ ID NO: 47190 - protein, 212 aa, Melanocarpus albomyces
NGQSTRYWDCCKPSCGWAGKGPVNQPVYSCDANFHRIHDFDAVSGCEGGPAFSCADHSPWAINDNLSYGFAATALSGQTEESWCCACYALTFTSGPVAGKTMVVQSTSTGGDLGSNHFDLNIPGGGVGLFDGCTPQFGGLPGARYGGISSRQECDSFPEPLKPGCQWRFDWFQNADNPSFTFERVQCPEELVARTGCRRHDDGGFAVFKAPS

SEQ ID NO: 47191 - protein, 212 aa, Melanocarpus albomyces
NGQSTRYWDCCKPSCGWAGKGPVNQPVYSCDLNFQRIHDFDAVSGCEGGPAFSCADHSPWAINDNLSYGFAATALSGQTEESWCCACYALTFTSGPVAGKTMVVQSTSTGGDLGSNHFDLNIPGGGVGLFDGCTPQFGGLPGARYGGISSRQECDSFPEPLKPGCQWRFDWFQNADNPSFTFERVQCPEELVARTGCRRHDDGGFAVFKAPS

SEQ ID NO: 47192 - protein, 212 aa, Melanocarpus albomyces
NGQSTRYWDCCKPSCGWAGKGPVNQPVYSCDANFQRIHDFDAVSGCEGGPAFSCADHSPWAINDNLSYGFAATALSGQTEESWCCACYALTFTSGPVAGKTMVVQSISTGGDLGSNHFDLNIPGGGVGLFDGCTPQFGGLPGARYGGISSRQECDSFPEPLKPGCQWRFDWFQNADNPSFTFERVQCPEELVARTGCRRHDDGGFAVFKAPS

SEQ ID NO: 47193 - protein, 212 aa, Melanocarpus albomyces
NGQSTRYWDCCKPSCGWAGKGPVNQPVYSCDANFQRIHDFDAVSGCEGGPAFSCADHSPWAINDNLSYGFAATALSGQTEESWCCACYALTFTSGPVAGKTMVVQSTSTGGDLGSNHFDLNIPGGGVGLFDGCTPQFGGLPGARYGGISSRQECDSFPEPLKPGCQWRFDWFQNADNPSFTFERCQCPEELVARTGCRRHDDGGFCVFKAPS

SEQ ID NO: 47194 - protein, 212 aa, Melanocarpus albomyces
NGQSTRYWDCCKPSCGWAGKGPVNQPVYSCDANFQRIHDFDAVSGCEGGPAFSCADHSPWAINDNLSYGFAATALSGQTEESWCCACYALTFTSGPVAGKTMVVQSTSTGGDLGSNHFDLNIPGGGVGLIDGCTPQFGGLPGARYGGISSRQECDSFPEPLKPGCQWRFDWFQNADNPSFTFERVQCPEELVARTGCRRHDDGGFAVFKAPS

SEQ ID NO: 47195 - protein, 212 aa, Melanocarpus albomyces
NGQSTRYWDCCKPSCGWAGKGPVNQPVYSCDANFQRIHDFDAVSGCEGGPAFSCADHSPWAINDNLSYGFAATALSGQTEESWCCACYALTFTSGPVAGKTMVVQSTSTGGDLGSNHFDLNIPGGGVGLFDGCTPQFGGLPGARYGGISSRQECDSFPEPLKPGCQWRFDWFQNADNPSFTFERVQCPEELTARTGCRRHDDGGFAVFKAPS

SEQ ID NO: 47196 - protein, 212 aa, Melanocarpus albomyces
NGQSTRYWDCCKPSCGWAGKGPVNQPVYSCDANFQRIHDFDAVSGCEGGPAFSCADHSPWAINDNLSYGFAATALSGQTEESWCCACYALTFTSGPVAGKTMVVQSTSTGGDLGSNHFDLNIPGGGVGLFDGCTPQFGGLPGARYGGISSRQECDSFPEPLKPGCQWRFDWFQNAQNPSFTFERVQCPEELVARTGCRRHDDGGFAVFKAPS

SEQ ID NO: 47197 - protein, 212 aa, Melanocarpus albomyces
NGQSTRYWDCCKPSCGWAGKGPVNQPVYSCDANFQRIHDFDAVSGCEGGPAFSCADHSPWAINDNLSYGFAATALSGQTEESWCCACYALTFTSGPVAGKTMVVQSTSTGGDLGSNHFDLNIPGGGVGLFDGCTPQFGGLPGARYGGISSRQECSSFPEPLKPGCQWRFDWFQNADNPSFTFERVQCPEELVARTGCRRHDDGGFAVFKAPS

SEQ ID NO: 47198 - protein, 212 aa, Melanocarpus albomyces
NGQSTRYWDCCKPSCGWAGKGPVNQPVYSCDANFQRIHDFDAVSGCEGGPAFSCADHSPWAINDNLSYGFAATALSGQTEESWCCACYALTFRSGPVAGKTMVVQSTSTGGDLGSNHFDLNIPGGGVGLFDGCTPQFGGLPGARYGGISSRQECDSFPEPLKPGCQWRFDWFQNADNPSFTFERVQCPEELVARTGCRRHDDGGFAVFKAPS

SEQ ID NO: 47199 - protein, 212 aa, Melanocarpus albomyces
NGQSTRYWDCCKPSCGWAGEGPVNQPVYSCDANFQRIHDFDAVSGCEGGPAFSCADHSPWAINDNLSYGFAATALSGQTEESWCCACYALTFTSGPVAGKTMVVQSTSTGGDLGSNHFDLNIPGGGVGLFDGCTPQFGGLPGARYGGISSRQECDSFPEPLKPGCQWRFDWFQNADNPSFTFERVQCPEELVARTGCRRHDDGGFAVFKAPS

SEQ ID NO: 47200 - protein, 212 aa, Melanocarpus albomyces
NGQSTRYWDCCKPSCGWAGKGPVNQPVYSCDANFQRIHDFDAVSGCEGGPAFSCADHSPWAINDNLSYGFAATALSGQTEESWCCACYALTFTSGPVAGKTMVVQSTSTGGDLGSNHFDLNIPGGGVGLFDGCTPQFGGLPGARYGGISSRQECDSFPEPLKPGCQWRFDWFHNADNPSFTFERVQCPEELVARTGCRRHDDGGFAVFKAPS

SEQ ID NO: 47201 - protein, 212 aa, Melanocarpus albomyces
NGQSTRYWDCCKPSCGWAGKGPVNQPVYSCDANFRRIHDFDAVSGCEGGPAFSCADHSPWAINDNLSYGFAATALSGQTEESWCCACYALTFTSGPVAGKTMVVQSTSTGGDLGSNHFDLNIPGGGVGLFDGCTPQFGGLPGARYGGISSRQECDSFPEPLKPGCQWRFDWFQNADNPSFTFERVQCPEELVARTGCRRHDDGGFAVFKAPS

SEQ ID NO: 47202 - protein, 295 aa, Staphylotrichum coccosporum
ADGKSTRYWDCCKPSCSWPGKASVNQPVFACSANFQRISDPNVKSGCDGGSAYACADQTPWAVNDNFSYGFAATSISGGNEASWCCGCYELTFTSGPVAGKTMVVQSTSTGGDLGTNHFDIAMPGGGVGIFDGCSPQFGGLAGDRYGGVSSRSQCDSFPAALKPGCYWRFDWFKNADNPTFTFRQVQCPSELVARTGCRRNDDGNFPVFTPPSGGQSSSSSSSSSAKPTSTSTSTTSTKATSTTSTASSQTSSSTGGGCAAQRWAQCGGIGFSGCTTCVSGTTCNKQNDWYSQCI

SEQ ID NO: 47203 - protein, 295 aa, Staphylotrichum coccosporum
ADGKSTRYWDCCKPSCSWPGKASVNQPVFACSANFQRISDPNVVSGCDGGSAYACADQTPWAVNDNFSYGFAATSISGGNEASWCCGCYELTFTSGPVAGKTMVVQSTSTGGDLGTNHFDLAMPGGGVGIFDGCSPQFGGLPGDRYGGVSSRSQCDSFPAPLVPGCYWRFDWFKNADNPTFTFRQVQCPSELVARTGCRRNDDGNFPVFTPPSGGQSSSSSSSSSARPTSTSTSTASTKATSTTSTASSQTSSSTGGGCAAQRWAQCGGIGFSGCTTCVSGTTCNKQNDWYSQCL

SEQ ID NO: 47204 - protein, 295 aa, Staphylotrichum coccosporum
ADGKSTRYWDCCKPSCSWPGKASVNQPVFACSANFQRISDPNVKSGCDGGSAYACADQTPWAVNDNFSYGFAATSISGGNEASWCCGCYELTFTSGPVAGKTMVVQSTSTGGDLGTNHFDLAMPGGGVGIFDGCSPQFGGIAGDRYGGVSSRSQCDSFPAALKPGCYWRFDWFKNADNPTFTFRQVQCPSDLVARTGCRRNDDGNFPVFTPPSGGQSSSSSSSSSAKPTSTSTSTTSTKATSTTSTASSQTSSSTGGGCAAQRWAQCGGIGFSGCTTCVSGTTCNKQNDWYSQCL

SEQ ID NO: 47205 - protein, 295 aa, Staphylotrichum coccosporum
ADGKSTRYWDCCKPSCSWPGKASVNQPVWACSANFTRISDPNVVSGCDGGSAYACADQTPWAVNDNFSYGFAATSISGGNEASWCCGCYELTFTSGPVAGKTMVVQSTSTGGDLGVNHFDLAMPGGGVGIFDGCTPQFGGLAGDRYGGVSSRSECDSFPAPLKPGCYWRFDWFKNADNPTFTFRQVQCPSELVARTGCRRNDDGNFPVFTPPSGGQGSSSLSSSKAKPTSTSTSTTSDKATSTTSTASSQTSSSTGGGCAAQRWAQCGGIGFSGCTTCVSGTTCNKQNDWYSQCL

SEQ ID NO: 47206 - protein, 295 aa, Staphylotrichum coccosporum
ADGKSTRYWDCCKPSCSWPGKASVNQPVFACSANFQRISDPNVKSGCDGGSAYACADQTPWAVNDNFSYGFAATSISGGNEASWCCGCYELTFTSGPVAGKTMVVQSTSTGGDLGTNHFDLAMPGGGVGIFDGCSPQFGGIAGDRYGGVSSRSQCDSFPAALKPGCYWRFDWFKNADNPTFTFRQVQCPSQLVARTGCRRNDDGNFPVFTPPSGGQSSSSSSSSSAKPTSTSTSTTSTKATSTTSTASSQTSSSTGGGCAAQRWAQCGGIGFSGCTTCVSGTTCNKQNDWYSQCL

SEQ ID NO: 47207 - protein, 295 aa, Staphylotrichum coccosporum
ADGKSTRYWDCCKPSCSWPGKASVNQPVFACDANFTRISDPNVKSGCDGGSAYACADQTPWAVNDNFSYGFAATSISGGNEASWCCGCYELTFTSGPVEGKTMVVQSTSTGGDLGTNHFDLAMPGGGVGIFDGCSKQFGGLPGDRYGGVSSRSQCDSFPAALKPGCYWRFDWFKNADNPTFTFRQVQCPSELVARTGCRRNDDGNFPVFTPPSGGQSSSSSSSSSAKPTSTSTSTTSTKATSTTSTASSQTSSSTGGGCAAQRWAQCGGIGFSGCTTCVSGTTCNKQNDWYSQCL

SEQ ID NO: 47208 - protein, 295 aa, Staphylotrichum coccosporum
ADGKSTRYWDCCKPSCSWPGKASVNQPVFACSANFQRISDPNVKSGCDGGSAYACADQTPWAVNDNFSYGFAATSISGGNEASWCCGCYEITFTSGPVAGKTMVVQSTSTGGDLGTNHFDLAMPGGGVGIFDGCSPQFGGIAGDRYGGVSSRSQCDSFPAALKPGCYWRFDWFKNADNPTFTFRQVQCPSELVARTGCRRNDDGNFPVFTPPSGGQSSSSSSSSSAKPTSTSTSTTSTKATSTTSTASSQTSSSTGGGCAAQRWAQCGGIGFSGCTTCVSGTTCNKQNDWYSQCL

SEQ ID NO: 47209 - protein, 295 aa, Staphylotrichum coccosporum
ADGKSTRYWDCCKPSCSWPGKASVNQPVFACSANFQRISDPNVKSGCDGGSAYACADQTPWAVNDNFSYGFAATSISGGNEASWCCGCYELTFTSGPVAGKTMVVQSTSTGGDLGTNHFDLAMPGGGVGIFDGCSPQFGGLAGDRYGGVSSRSQCDSFPAALKPGCYWRFDWFKNADNPTFTFRQVQCPSELLARTGCRRNDDGNFPVFTPPSGGQSSSSSSSSSAKPTSTSTSTTSTKATSTTSTASSQTSSSTGGGCAAQRWAQCGGIGFSGCTTCVSGTTCNKQNNWYSQCL

SEQ ID NO: 47210 - protein, 295 aa, Staphylotrichum coccosporum
ADGKSTRYWDCCKPSCSWPGKALVNQPVFACYANFQRISDPNVKSGCDGGSAYACADQTPWAVNDNFSYGFAATSISGGNEASWCCGCYELTFTSGPVAGKTMVVQSTSTGTDLGTNHFDLAMPGGGVGIFDGCSPQFGGLPGDRYGGVSSRSQCDSFPAPLKPGCYWRFDWFKNADNPTFTFRQVQCPSELVARTGCRRNDDSNFPVFTPPSGGQGSSSSSSSSARPTSTSTSTTDTKATSTTSTASSQTSSSTGGGCAAQRWAQCGGIGFSGCTTCVSGTTCNKQNDWYSQCL

SEQ ID NO: 47211 - protein, 295 aa, Staphylotrichum coccosporum
ADGKSTRYWDCCKPSCSWPGKASVNQPVFACSANFTRISDPNVKSGCDGGSAYACADQTPWAVNDNFSYGFAATSISGGNEASWCCGCYELTFTSGPYAGKTMVVQSTSTGGDLGTNHFDLAMPGGGVGIFDGCSPQFGGLPGDRYGGVSSRSQCDSFPAELKPGCYWRFDWFKNADNPTFTFRQVQCPSELVARTGCRRNDDGNFPVFTPPSGGQSSSSSSSSKAKPTSTSTSTTSTKATSTTSTASSQTSSSTGGGCAAQRWAQCGGIGFSGCTTCVSGTTCNKQNDWYSQCL

SEQ ID NO: 47212 - protein, 295 aa, Staphylotrichum coccosporum
ADGVSTRYWDCCKPSCSWPGKASVNQPVWACSANFQRISDPNVKSGCDGGSAYACADQTPWAVNDNFSYGFAATSIKGGNEASWCCGCYELTFTSGPVAGKKMVVQSTSTGGDLGTNHFDLAMPGGGVGIFDGCSEQFGGLAGDRYGGVSSRDQCDSFPAPLKPGCYWRFDWFKNADNPTFTFRQVQCPSELVARTGCRRNDDGNFPVFVPPSGGQSSSSSSSSSAKPTSTSTSTTSTKATSTTSTASSQTSSSTGGGCAAQRWAQCGGIGFSGCTTCVSGTTCNKQNDWYSQCL

SEQ ID NO: 47213 - protein, 295 aa, Staphylotrichum coccosporum
ADGKSTRYWDCCKPSCSWPGKASVNQPVFACSANFQRISDPNVKSGCDGGSAYACADQTPWAVNDNFSYGFAATSISGGNEASWCCGCYELTFTSGPVYGKTMVVQSTSTGGDLGTNHFDLAMPGGGVGIFDGCSEQFGGLPGDRYGGVSSRSQCDSFPAELKPGCYWRFDWFKNADNPTFTFRQVQCPSELVARTGCRRNDDGNFPVFTPPSGGQSSSSLSSSSAKPTSTSTSTTSTKATSTTSTASSQTSSSTGGGCAAQRWAQCGGIGFSGCTTCVSGTTCNKQNDWYSQCL

SEQ ID NO: 47214 - protein, 295 aa, Staphylotrichum coccosporum
ADGKSTRYWDCCKPSCSWPGKASVNQPVFACSANFQRISDPNVKSGCDGGSAYACADQTPWAVNDNFSYGFAATSISGGNEASWCCGCYELTFTSGPVAGKTMVVQSTSTGGDLGTNHFDLAMPGGGVGIFDGCSPQFGGLAGDRYGGVSSRSQCDSFPAALKPGCYWRFDWFKNADNPTFTFRQVQCPSELYARTGCRRNDDGNFPVFTPPSGGQSSSSSSSSSAKPTSTSTSTTSTKATSTTSTASSQTSSSTGGGCAAQRWAQCGGIGFSGCTTCVSGTTCNKQNNWYSQCL

SEQ ID NO: 47215 - protein, 295 aa, Staphylotrichum coccosporum
ADGKSTRYWDCCKPSCSWPGKASVNQPVFACSANFQRISDPNVKSGCDGGSAYACADQTPWAVNDNFSYGFAATSISGGNEASWCCGCYELTFTSGPVAGKTMVVQSTSTGGDLGTNHFDLAMPGGGVGIFDGCSPQSGGLAGDRYGGVSSRSQCESFPAALKPGCYWRFDWFKNADNPTFTFRQVQCPSELVARTGCRRNDDGNFPVFTPPSGGQSSSSSSSSSAKPTSTSTSTTSTKATSTTSTASSQTSSSTGGGCAAQRWAQCGGIGFSGCTTCVSGTTCNKQNDWYSQCL

SEQ ID NO: 47216 - protein, 295 aa, Staphylotrichum coccosporum
ADGVSTRYWDCCKPSCSWPGKASVNQPVFACSANFQRISDPNVKSGCDGGSAYACADQTPWAVNDNFSYGFAATSIMGGNEASWCCGCYELTFTSGPVAGKTMVVQSTSTGGDLGTNHFDLAMPGGGVGIFDGCSPQFGGLAGDRYGGVSSRSECDSFPAPLKPGCYWRFDWFKNADNPTFTFRQVQCPSEVVARTGCRRNDDGNFPHFTPPSGGQGSSSSSSSSAKPTSTSASTTDTKATSTTSTASSQTSSSTGGGCAAQRWAQCGGIGFSGCTTCVSGTTCNKQNDWYSQCL

SEQ ID NO: 47217 - protein, 295 aa, Staphylotrichum coccosporum
ADGVSTRYWDCCKPSCSWPGKASVNQPVFACSANFQRISDPNVKSGCDGGSAYACADQTPWAVNDNFSYGFAATSISGGNEASWCCGCYELTFTSGPVAGKTMVVQSTSTGGDLGTNHFDLAMPGGGVGIFDGCSEQFGGLAGDRYGGVSSRDQCDSFPAPLKPGCYWRFDWFKNADNPTFTFRQVQCPSELVARTGCRRNDDGNFPVFVPPSGGQSSSSSSSSSARPTSTSTSTTSTKATSTTSTASSQTSSSTGGGCAAQRWAQCGGIGFSGCTTCVSGTTCNKQNDWYSQCL

SEQ ID NO: 47218 - protein, 295 aa, Staphylotrichum coccosporum
ADGKSTRYWDCCKPSCSWPGKASVNQPVFACSANFQRISDPNVKSGCDGGSAYACADQTPWAVNDNFSYGFAATSISGGNEASWCCGCYELTFTSGPVAGKTMVVQSTSTGSDLGTNHFDLAMPGGGVGIFDGCSKQFGGLEGDRYGGVSSRSQCDSFPAALKPGCYWRFDWFKNADNPTFTFRQVQCPSELVARTGCRRNDDGNFPVFTPPSGGQSSSSSSSSSAKPTSTSTSTTSTKATSTTSTASSQTSSSTGGGCAAQRWAQCGGIGFSGCTTCVSGTTCNKQNDWYSQCL

SEQ ID NO: 47219 - protein, 316 aa, Staphylotrichum coccosporum
MRSSPVLRTALAAALPLAALAADGKSTRYWDCCKPSCSWPGKASVNQPVFACSANFQRISDPNVKSGCDGGSAYACADQTPWAVNDNFSYGFAATSISGGNEASWCCGCYELTFTSGPVAGKTMVVQSTSTGGDLGTNHFDLAMPGGGVGIFDGCSPQFGGLAGDRYGGVSSRSQCDSFPAALKPGCYWRFDWFKNADNPTFTFRQVQCPSELVARTGCRRNDDGNFPVFTPPSGGQSSSSSSSSSAKPTSTSTSTTSTKATSTTSTASSQTSSSTGGGCAAQRWAQCGGIGFSGCTTCVSGTTCNKQNDYYSQCL

SEQ ID NO: 47220 - protein, 198 aa, Unidentified
GQSTRYWDCCKPSCAWPGKAAVSQPVYACDANFQRLSDFNVQSGCNGGSAYSCADQTPWAVNDNLAYGFAATSIAGGSESSWCCACYALTFTSGPVAGKTMVVQSTSTGGDLGSNQFDIAMPGGGVGIFNGCSSQFGGLPGAQYGGISSRDQCDSFPAPLKPGCQWRFDWFQNADNPTFTFQQVQCPAEIVARSGCKR

SEQ ID NO: 47221 - protein, 199 aa, Synthetic construct
GRSTRYWDCCKPSCGWAKKAPVNQPVFSCNANFQRITDFDAKSGGEPGGVAYSCADQTPWAVNDDFALGFAATSIAGSNEAGWCCACYELTFTSGPVAGKKMVVQSTSTGGDLGSNHFDLNIPGGGVGIFDGCTPQFGGLPGQRYGGISSRNECDRFPDALKPGCYWRFDWFKNADNPSFSFRQVQCPAELVARTGCRR

SEQ ID NO: 47222 - protein, 295 aa, Staphylotrichum coccosporum
ADGKSTRYWDCCKPSCSWPGKASVNQPVFACSANFQRISDPNVKSGCDGGSAYACADQTPWAVNDNFSYGFAATSISGGNEASWCCGCYELTFTSGSVAGKTMVVQSTSTGVDLGTNHFDLAMPGGGVGIFDGCSSQFGGLPGDRYGGVSSRSQCDSFPAELVPGCYWRFDWFKNADNPTFTFRQVQCPSELVARTGCRRNDDGNFPVFTPSSGGQSSSSSASSSAKPTSTSTSTTSTKATSTTSTASSQTSSSTGGGCAAQRWAQCGGIGFSGCTTCVSGTTCNKQNDWYSQCL

SEQ ID NO: 47223 - protein, 273 aa, Acremonium thermophilum
GKSTRYWDCCKPSCGWAGKASVNQPVFSCSADWQRISDFNAKSGCDGGNAYSCADQTPWAVNDNFSYGFAATAIAGGSEQSWCCACYALTFNSGPVAGKTMVVQSTSTGGDLGENHFDLAIPGGGVGIFNGCQSQFGGLPGAQYGGIQDRSQCSSFPAPLQPGCQWRFDWFQNADNPTFTFQRVQCPSELTSRTGCKRDDDANYPVFPSGGSPPGGSPPGTTTTRMPATTTGSSPTPTQSHYGQCGGIGYSGPTVCASGTTCQVLNPYYSQCL

SEQ ID NO: 47224 - protein, 308 aa, Thermochaetoides thermophila
MRSTPVLRTALAAALPFTVLAADGKSTRYWDCCKPSCSWPGKAAVSQPVFACDRNFNRIYDFGAKSGCEGGPAYSCADQTPWAVNDQFSYGFAATNIAGGNEASWCCACYKLTFTSGPVAGKVMVVQSTSTGGDLGNNHFDLNIPGGGVGIFDGCTPQFGGLPGERYGGISSRSQCDSFPDALKPGCYWRFDWFLNADNPNFTFERVQCPSELVARTGCKRNDDGNYPVFTPPSGDSPSSSSAAPTSTSTSQQPQQPTSSSSQASVPTSNPGCTSQKWAQCGGIGFTGCTTCVSGTTCTKLNDWYSQC

SEQ ID NO: 47225 - protein, 308 aa, Thermochaetoides thermophila
MRSTPVLRTALAAALPFTVLAADGKSTRYWDCCKPSCSWPGKAAVSQPVFACDRNFNRIYDFGAKSGCEGGPAYSCADQTPWAVNDQFSYGFAATNIAGGNEASWCCACYKLTFTSGPVAGKVMVVQSTSTGGDLGNNHFDLNIPGGGVGIFDGCTPQFGGLPGERYGGISSRSQCDSFPDALKPGCYWRFDWFLNADNPNFTFERVQCPSELVARTGCKRNDDGNYPVFTPPSGDSPSSSSAAPTSTSTSQQPQQPTSSSSQASVPTSNGGCTSQKWAQCGGIGFTGCTTCVSGTTCTKLNDWYSQC

SEQ ID NO: 47226 - protein, 308 aa, Thermochaetoides thermophila
MRSTPVLRTALAAALPFTVLAADGKSTRYWDCCKPSCSWPGKAAVSQPVFACDRNFNRIYDFGAKSGCEGGPAYSCADQTPWAVNDQFSYGFAATNIAGGNEASWCCACYKLTFTSGPVAGKVMVVQSTSTGGDLGNNHFDLNIPGGGVGIFDGCTPQFGGLPGERYGGISSRSQCDSFPDALKPGCYWRFDWFLNADNPNFTFERVQCPSELVARTGCKRNDDGNYPVFTPPSGDSPSSSSAAPTSTSTSQQPQQPTSSSSQASVPSNPGGCTSQKWAQCGGIGFTGCTTCVSGTTCTKLNDWYSQC

SEQ ID NO: 47227 - protein, 269 aa, Thermothielavioides terrestris
SGSGQSTRYWDCCKPSCAWPGKAAVSQPVYACDANFQRLSDFNVQSGCNGGSAYACADQTPWAVNDNLAYGFAATSIAGGSESSWCCACYALTFTSGPVAGKTMVVQSTSTGGDLGSNHFDIAMPGGGVGIFDGCSSQFGGLPGARYGGISSRDQCDSFPAPLKPGCQWRFDWFQNADNPTFTFQQVQCPAEIVARSGCKRNDDSSFPVFTPEPTPEPTPEPTPEPTPEPTGCTAERWAQCGGNGWSGCTTCVAGSTCTKINDWYHQCL

SEQ ID NO: 47228 - protein, 269 aa, Thermothielavioides terrestris
SGSGQSTRYWDCCKPSCAWPGKAAVSQPVYACDANFQRLSDFNVQSGCNGGSAYACADQTPWAVNDNLAYGFAATSIAGGSESSWCCACYALTFTSGPVAGKTMVVQSTSTGGDLGSNHFDIAMPGGGVGIFDGCSSQFGGLPGARYGGISSRDQCDSFPAPLKPGCQWRFDWFQNADNPTFTFQQVQCPAEIVARSGCKRNDDSSFPVFTPEPTPEPTPEPTPEPTPDPTGCTAERWAQCGGNGWSGCTTCVAGSTCTKINDWYHQCL

SEQ ID NO: 47229 - protein, 269 aa, Thermothielavioides terrestris
SGSGQSTRYWDCCKPSCAWPGKAAVSQPVYACDANFQRLSDFNVQSGCNGGSAYACADQTPWAVNDNLAYGFAATSIAGGSESSWCCACYALTFTSGPVAGKTMVVQSTSTGGDLGSNHFDIAMPGGGVGIFDGCSSQFGGLPGARYGGISSRDQCDSFPAPLKPGCQWRFDWFQNADNPTFTFQQVQCPAEIVARSGCKRNDDSSFPVFTPEPTPEPTPEPTPEPTPSPTGCTAERWAQCGGNGWSGCTTCVAGSTCTKINDWYHQCL

SEQ ID NO: 47230 - protein, 269 aa, Thermothielavioides terrestris
SGSGQSTRYWDCCKPSCAWPGKAAVSQPVYACDANFQRLSDFNVQSGCNGGSAYACADQTPWAVNDNLAYGFAATSIAGGSESSWCCACYALTFTSGPVAGKTMVVQSTSTGGDLGSNHFDIAMPGGGVGIFDGCSSQFGGLPGARYGGISSRDQCDSFPAPLKPGCQWRFDWFQNADNPTFTFQQVQCPAEIVARSGCKRNDDSSFPVFTPEPTPEPTPEPTPEPTPGPTGCTAERWAQCGGNGWSGCTTCVAGSTCTKINDWYHQCL

SEQ ID NO: 47231 - protein, 278 aa, Acremonium thermophilum
GKSTRYWDCCKPSCGWAGKASVNQPVFSCSADWQRISDFNAKSGCDGGNAYSCADQTPWAVNDNFSYGFAATAIAGGSEQSWCCACYALTFNSGPVAGKTMVVQSTSTGGDLGENHFDLAIPGGGVGIFNGCQSQFGGLPGAQYGGIQDRSQCSSFPAPLQPGCQWRFDWFQNADNPTFTFQRVQCPSELTSRTGCKRDDDANYPVFPPSGNPSGGSPPGGSPPGTTTTRRPATTTGSSPTPTQSHYGQCGGIGYSGPTVCASGTTCQVLNPYYSQCL

SEQ ID NO: 47232 - protein, 295 aa, Staphylotrichum coccosporum
ADGKSTRYWDCCKPSCSWPGKASVNQPVFACSANFQRISDPNVKSGCDGGSAYACADQTPWAVNDNFSYGFAATSISGGNEASWCCGCYELTFTSGPVAGKTMVVQSTSTGGDLGTNHFDIAMPGGGVGIFDGCSPQFGGLAGDRYGGVSSRSQCDSFPAAIKPGCYWRFDWFKNADNPTFTFRQVQCPSELVARTGCRRNDDGNFPVFTPPSGGQSSSSSSSSSAKPTSTSTSTTSTKATSTTSTASSQTSSSTGGGCAAQRWAQCGGIGFSGCTTCVSGTTCNKQNNWYSQCL

SEQ ID NO: 47233 - protein, 295 aa, Staphylotrichum coccosporum
ADGKSTRYWDCCKPSCSWPGKASVNQPVFACSANFQRISDPNVKSGCDGGSAYACADQTPWAVNDNFSYGFAATSISGGNEASWCCGCYALTFTSGPVAGKTMVVQSTSTGTDLGTNHFDLAMPGGGVGIFDGCTPQFGGLAGDRYGGVSSRSQCDSFPAPLKPGCYWRFDWFKNADNPTFTFRQVQCPSELVARTGCRRNDDSNFPVFTPPSGGQSSSSSSSSSAKPTSTSTSTTSTKATSTTSTASSQTSSSTGGGCAAQRWAQCGGIGFSGCTTCVSGTTCNKQNDWYSQCL

SEQ ID NO: 47234 - protein, 295 aa, Staphylotrichum coccosporum
ADGKSTRYWDCCKPSCSWPGKASVNQPVFACSANFQRISDPNVKSGCDGGSAYACADQTPWAVNDNFSYGFAATSISGGNEASWCCGCYELTFTSGPVAGKTMVVQSTSTGGDLGTNHFDLAMPGGGVGIFDGCSPQFGGLAGDRYGGVSSRSQCDSFPAAVKPGCYWRFDWFKNADNPTFTFRQVQCPSELLARTGCRRNDDGNFPVFTPPSGGQSSSSSSSSSAKPTSTSTSTTSTKATSTTSTASSQTSSSTGGGCAAQRWAQCGGIGFSGCTTCVSGTTCNKQNNWYSQCL

SEQ ID NO: 47235 - protein, 295 aa, Staphylotrichum coccosporum
ADGKSTRYWDCCKPSCSWPGKASVNQPVFACSANFQRISDPNVKSGCDGGTAYACADQTPWAVNDNFSYGFAATSISGGNEASWCCGCYELTFTSGPVYGKTMVVQSTSTGGDLGTNHLDLAMPGGGVGIFDGCSEQFGGLAGDRYGGVSSRSECGSFPAALKPGCYWRFDWFKNADNPTFTFRQVQCPSELVARTGCRRNDDGNFPVFTPPSGGQGSSSSSSSSAKPTSTSTSTTSTKATSTTSTASSQTSSSTGGGCAAQRWAQCGGIGFSGCTTCVSGTTCNKQNDWYSQCL

SEQ ID NO: 47236 - protein, 295 aa, Staphylotrichum coccosporum
ADGVSTRYWDCCKPSCSWPGKASVNQPVFACSANFTRISDPNVKSGCDGGSAYACADQTPWAVNDNFSYGFAATSIKGGSEASWCCGCYELTFTSGPVAGKTMVVQSTSTGGDLGTNHFDLAMPGGGVGIFDGCSPQFGGLPGDRYGGVSSRSQCDSFPAALKPGCYWRFDWFKNADNPTFTFRQVQCPSEVVARTGCRRNDDSNFPVFVPPSGGQSSSSLSSSSAKPTSTSTSTTSTKATSTTSTASSQTSSSTGGGCAAQRWAQCGGIGFSGCTTCVSGTTCNKQNDWYSQCL

SEQ ID NO: 47237 - protein, 295 aa, Staphylotrichum coccosporum
ADGKSTRYWDCCKPSCSWPGKASVNQPVFACSANFQRISDPNVKSGCDGGTAYACADQTPWAVNDNFSYGFAATSIMGGNEASWCCGCYELTFTSGPVAGKTMVVQSTSTGGDLGTNHFDLAMPGGGVGIFDGCSEQFGGLAGDRYGGVSSRSQCDSFPAALVPGCYWRFDWFKNADNPTFTFRQVQCPSELVARTGCRRNDDSNFPVFVPPSGGQSSSSSSSSSARPTSTSTSTTSTKATSTTSTASSQTSSSTGGGCAAQRWAQCGGIGFSGCTTCVSGTTCNKQNDWYSQCL

SEQ ID NO: 47238 - protein, 295 aa, Staphylotrichum coccosporum
ADGKSTRYWDCCKPSCSWPGKASVNQPVFACSANFQRISDPNVKSGCDGGSAYACADQTPWAVNDNFSYGFAATSISGGNEASWCCGCYELTFTSGSVAGKTMVVQSTSTGVDLGTNHFDLAMPGGGVGIFDGCSSQFGGLAGDRYGGVSSRDQCDSFPAALKPGCYWRFDWFKNADNPTFTFRQVQCPSELVARTGCRRNDDGNFPVFTPPSGGQSSSSSSSSKAKPTSTSTSTTSTKARSTTSTASSQTSSSTGGGCAAQRWAQCGGIGFSGCTTCVSGTTCNKQNDWYSQCL

SEQ ID NO: 47239 - protein, 295 aa, Staphylotrichum coccosporum
ADGKSTRYWDCCKPSCSWPGKASVNQPVFACSANFQRISDPNVKSGCDGGSAYACADQTPWAVNDNFSYGFAATSISGGNEASWCCGCYELTFTSGPVAGKTMVVQSTSTGGDLGTNHFDIAMPGGGVGIFDGCSPQFGGLAGDRYGGVSSRSQCDSFPAAVKPGCYWRFDWFKNADNPTFTFRQVQCPSELVARTGCRRNDDGNFPVFTPPSGGQSSSSSSSSSAKPTSTSTSTTSTKATSTTSTASSQTSSSTGGGCAAQRWAQCGGIGFSGCTTCVSGTTCNKQNNWYSQCL

SEQ ID NO: 47240 - protein, 212 aa, Melanocarpus albomyces
NGQSTRYWDCCKPSCGWAGKGPVNQPVYSCDANFQRIHDFDAVSGCEGGPAFSCADHSPWAINDNLSYGFAATALSGQTEESWCCACYALTFTSGPVAGKTMVVQSTSTGGDLGSNHFDLNIPGGGVGLFDGCTPQFGGLPGARYGGISSRQECDSFPEPLKPGCQWRFDWFQDAQNPSFTFERVQCPEELVARTGCRRHDDGGFAVFKAPS

SEQ ID NO: 47241 - protein, 212 aa, Melanocarpus albomyces
NGQSTRYWDCCKPSCGWAGKGPVNQPVYSCDANFQRIHDFDAVSGCEGGPAFSCADHSPWAINDNLSYGFAATALSGQTEESWCCACYALIFRSGPVAGKTMVVQSTSTGGDLGSNHFDLNIPGGGVGLFDGCTPQFGGLPGARYGGISSRQECDSFPEPLKPGCQWRFDWFQNADNPSFTFERVQCPEELVARTGCRRHDDGGFAVFKAPS

SEQ ID NO: 47242 - protein, 212 aa, Melanocarpus albomyces
NGQSTRYWDCCKPSCGWAGKGPVNQPVYSCDANCQRIHDFDAVSGCEGGPAFSCCDHSPWAINDNLSYGFAATALSGQTEESWCCACYALTFTSGPVAGKTMVVQSTSTGGDLGSNHFDLNIPGGGVGLFDGCTPQFGGLPGARYGGISSRQECDSFPEPLKPGCQWRFDWFQNADNPSFTFERVQCPEELVARTGCRRHDDGGFAVFKAPS

SEQ ID NO: 47243 - protein, 212 aa, Melanocarpus albomyces
NGQSTRYWDCCKPSCGWAGKGPVNQPVYSCDANFQRIHDFDAVSGCEGGPAFSCADHSPWAINDNLSYGFAATALSGQTEESWCCACYALTFTSGPVAGKTMVVQSTSTGGDLGSNHFDLNICGGGVGLFDGCTPQFGGLPGARYGGISSRQECDSFPEPLKPCCQWRFDWFQNADNPSFTFERVQCPEELVARTGCRRHDDGGFAVFKAPS

SEQ ID NO: 47244 - protein, 212 aa, Melanocarpus albomyces
NGQSTRYWDCCKPSCGWAGKGPVNQPVYSCDANFQRIHDFDAVSGCEGGPAFSCADHSPWAINDNLCYGFAATALSGQTEESWCCACYALTFTSGPVAGKTCVIQSTSTGGDLGSNHFDLNIPGGGVGLFDGCTPQFGGLPGARYGGISSRQECDSFPEPLKPGCQWRFDWFQNADNPSFTFERVQCPEELVARTGCRRHDDGGFAVFKAPS

SEQ ID NO: 47245 - protein, 309 aa, Thermochaetoides thermophila
MRSTPVLRTALAAALPFTVLAADGKSTRYWDCCKPSCSWPGKAAVSQPVFACDRNFNRIYDFGAKSGCEGGPAYSCADQTPWAVNDQFSYGFAATNIAGGNEASWCCACYKLTFTSGPVAGKVMVVQSTSTGGDLGSNHFDLNIPGGGVGIFDGCTPQFGGLPGERYGGISSRSQCDSFPDALKPGCYWRFDWFLNADNPNFTFERVQCPSELVARTGCKRNDDGNYPVFTPPSGDSPSSSSAAPTSTSTSQQPQQPTSSSSQASVPTSNPGGCTSQKWAQCGGIGFTGCTTCVSGTTCTKLNDWYSQC

SEQ ID NO: 47246 - protein, 309 aa, Thermochaetoides thermophila
MRSTPVLRTALAAALPFTVLAADGKSTRYWDCCKPSCSWPGKAAVNQPVFACDRNFNRIYDFGAKSGCEGGPAYSCADQTPWAVNDQFSYGFAATNIAGGNEASWCCACYKLTFTSGPVAGKVMVVQSTSTGGDLGNNHFDLNIPGGGVGIFDGCTPQFGGLPGERYGGISSRSQCDSFPDALKPGCYWRFDWFLNADNPNFTFERVQCPSELVARTGCKRNDDGNYPVFTPPSGDSPSSSSAAPTSTSTSQQPQQPTSSSSQASVPTSNPGGCTSQKWAQCGGIGFTGCTTCVSGTTCTKLNDWYSQC

SEQ ID NO: 47247 - protein, 309 aa, Thermochaetoides thermophila
MRSTPVLRTALAAALPFTVLAADGKSTRYWDCCKPSCSWPGKAAVSQPVFACDRNFNRIYDFGAKSGCEGGPAYSCADQTPWAVNDQFSYGFAATNIAGGNEASWCCACYKLTFTSGPVAGKVMVVQSTSTGGDLGNNHFDLNIPGGGVGIFDGCTPQFGGLPGERYGGISSRSQCDSFPDALKPGCYWRFDWFLNADNPNFTFERVQCPAELVARTGCKRNDDGNYPVFTPPSGDSPSSSSAAPTSTSTSQQPQQPTSSSSQASVPTSNPGGCTSQKWAQCGGIGFTGCTTCVSGTTCTKLNDWYSQC

SEQ ID NO: 47248 - protein, 309 aa, Thermochaetoides thermophila
MRSTPVLRTALAAALPFTVLAADGKSTRYWDCCKPSCSWPGKAAVSQPVFACDRNFNRIYDFGAKSGCEGGPAYSCADQTPWAVNDQFSYGFAATNIAGGNEASWCCACYKLTFTSGPVAGKVMVVQSTSTGGDLGNNHFDLNIPGGGVGIFDGCTPQFGGLPGERYGGISSRSQCDSFPDALKPGCYWRFDWFLNADNPNFTFEQVQCPSELVARTGCKRNDDGNYPVFTPPSGDSPSSSSAAPTSTSTSQQPQQPTSSSSQASVPTSNPGGCTSQKWAQCGGIGFTGCTTCVSGTTCTKLNDWYSQC

SEQ ID NO: 47249 - protein, 309 aa, Thermochaetoides thermophila
MRSTPVLRTALAAALPFTVLAADGKSTRYWDCCKPSCSWPGKAAVSQPVFACDRNFNRIYDFGAKSGCEGGPAYSCADQTPWAVNDQFSYGFAATNIAGGNEASWCCACYKLTFTSGPVAGKVMVVQSTSTGGDLGNNHFDLNIPGGGVGIFDGCTPQFGGLPGERYGGISSRSQCDSFPDALKPGCYWRFDWFLNADNPNFTFERVQCPSELVARTGCKRNDDGNYPVFTPPSGDSPSSSSAAPTSTSTSSQPQQPTSSSSQASVPTSNPGGCTSQKWAQCGGIGFTGCTTCVSGTTCTKLNDWYSQC

SEQ ID NO: 47250 - protein, 308 aa, Thermochaetoides thermophila
MRSTPVLRTALAAALPFTVLAADGKSTRYWDCCKPSCSWPGKAAVSQPVFACDRNFNRIYDFGAKSGCEGGPAYSCADQTPWAVNDQFSYGFAATNIAGGNEASWCCACYKLTFTSGPVAGKVMVVQSTSTGGDLGNNHFDLNIPGGGVGIFDGCTPQFGGLPGERYGGISSRSQCDSFPDALKPGCYWRFDWFLNADNPNFTFERVQCPSELVARTGCKRNDDGNYPVFTPPSGDSPSSSSAAPTSTSTSQQPQQPTSSSSQASPTSNPGGCTSQKWAQCGGIGFTGCTTCVSGTTCTKLNDWYSQC

SEQ ID NO: 47251 - protein, 309 aa, Thermochaetoides thermophila
MRSTPVLRTALAAALPFTVLAADGKSTRYWDCCKPSCSWPGKAAVSQPVFACDRNFNRIYDFGAKSGCEGGPAYSCADQTPWAVNDQFSYGFAATSIAGGNEASWCCACYKLTFTSGPVAGKVMVVQSTSTGGDLGNNHFDLNIPGGGVGIFDGCTPQFGGLPGERYGGISSRSQCDSFPDALKPGCYWRFDWFLNADNPNFTFERVQCPSELVARTGCKRNDDGNYPVFTPPSGDSPSSSSAAPTSTSTSQQPQQPTSSSSQASVPTSNPGGCTSQKWAQCGGIGFTGCTTCVSGTTCTKLNDWYSQC

SEQ ID NO: 47252 - protein, 309 aa, Thermochaetoides thermophila
MRSTPVLRTALAAALPFTVLAADGKSTRYWDCCKPSCSWPGKAAVSQPVFACDRNFNRIYDFGAKSGCEGGPAYSCADQTPWAVNDQFSYGFAATNIAGGNEASWCCACYKLTFTSGPVAGKVMVVQSTSTGGDLGNNHFDLNIPGGGVGIFDGCTPQFGGLPGERYGGISSRSQCDSFPDALKPGCYWRFDWFLNADNPNFTFERVQCPSELVARTGCKRNDDGNFPVFTPPSGDSPSSSSAAPTSTSTSQQPQQPTSSSSQASVPTSNPGGCTSQKWAQCGGIGFTGCTTCVSGTTCTKLNDWYSQC

SEQ ID NO: 47253 - protein, 309 aa, Thermochaetoides thermophila
MRSTPVLRTALAAALPFTVLAADGKSTRYWDCCKPSCSWPGKAAVSQPVFACDRNFNRIYDFGAKSGCEGGPAYSCADQTPWAVNDQFSYGFAATNIAGGNEASWCCACYKLTFTSGPVAGKVMVVQSTSTGGDLGNNHFDLNIPGGGVGIFDGCTPQFGGLPGERYGGISSRSQCDSFPDALKPGCYWRFDWFLNADNPNFTFRRVQCPSELVARTGCKRNDDGNYPVFTPPSGDSPSSSSAAPTSTSTSQQPQQPTSSSSQASVPTSNPGGCTSQKWAQCGGIGFTGCTTCVSGTTCTKLNDWYSQC

SEQ ID NO: 47254 - protein, 309 aa, Thermochaetoides thermophila
MRSTPVLRTALAAALPFTVLAADGKSTRYWDCCKPSCGWPGKAAVSQPVFACDRNFNRIYDFGAKSGCEGGPAYSCADQTPWAVNDQFSYGFAATNIAGGNEASWCCACYKLTFTSGPVAGKVMVVQSTSTGGDLGNNHFDLNIPGGGVGIFDGCTPQFGGLPGERYGGISSRSQCDSFPDALKPGCYWRFDWFLNADNPNFTFERVQCPSELVARTGCKRNDDGNYPVFTPPSGDSPSSSSAAPTSTSTSQQPQQPTSSSSQASVPTSNPGGCTSQKWAQCGGIGFTGCTTCVSGTTCTKLNDWYSQC

SEQ ID NO: 47255 - protein, 309 aa, Thermochaetoides thermophila
MRSTPVLRTALAAALPFTALAADGKSTRYWDCCKPSCSWPGKAAVSQPVFACDRNFNRIYDFGAKSGCEGGPAYSCADQTPWAVNDQFSYGFAATNIAGGNEASWCCACYKLTFTSGPVAGKVMVVQSTSTGGDLGNNHFDLNIPGGGVGIFDGCTPQFGGLPGERYGGISSRSQCDSFPDALKPGCYWRFDWFLNADNPNFTFERVQCPSELVARTGCKRNDDGNYPVFTPPSGDSPSSSSAAPTSTSTSQQPQQPTSSSSQASVPTSNPGGCTSQKWAQCGGIGFTGCTTCVSGTTCTKLNDWYSQC

SEQ ID NO: 47256 - protein, 309 aa, Thermochaetoides thermophila
MRSTPVLRTALAAALPFTVLAADGKSTRYWDCCKPSCSWPGKAAVSQPVFACDANFNRIYDFGAKSGCEGGPAYSCADQTPWAVNDQFSYGFAATNIAGGNEASWCCACYKLTFTSGPVAGKVMVVQSTSTGGDLGNNHFDLNIPGGGVGIFDGCTPQFGGLPGERYGGISSRSQCDSFPDALKPGCYWRFDWFLNADNPNFTFERVQCPSELVARTGCKRNDDGNYPVFTPPSGDSPSSSSAAPTSTSTSQQPQQPTSSSSQASVPTSNPGGCTSQKWAQCGGIGFTGCTTCVSGTTCTKLNDWYSQC

SEQ ID NO: 47257 - protein, 309 aa, Thermochaetoides thermophila
MRSSPVLRTALAAALPFTVLAADGKSTRYWDCCKPSCSWPGKAAVSQPVFACDRNFNRIYDFGAKSGCEGGPAYSCADQTPWAVNDQFSYGFAATNIAGGNEASWCCACYKLTFTSGPVAGKVMVVQSTSTGGDLGNNHFDLNIPGGGVGIFDGCTPQFGGLPGERYGGISSRSQCDSFPDALKPGCYWRFDWFLNADNPNFTFERVQCPSELVARTGCKRNDDGNYPVFTPPSGDSPSSSSAAPTSTSTSQQPQQPTSSSSQASVPTSNPGGCTSQKWAQCGGIGFTGCTTCVSGTTCTKLNDWYSQC

SEQ ID NO: 47258 - protein, 308 aa, Thermochaetoides thermophila
MRSTPVLRTALAAALPFTVLAADGKSTRYWDCCKPSCSWPGKAAVSQPVFACDRNFNRIYDFGAKSGCEGGPAYSCADQTPWAVNDQFSYGFAATNIAGGNEASWCCACYKLTFTSGPVAGKVMVVQSTSTGGDLGNNHFDLNIPGGGVGIFDGCTPQFGGLPGERYGGISSRSQCDSFPDALKPGCYWRFDWFLNADNPNFTFERVQCPSELVARTGCKRNDDGNYPVFTPPSGDSPSSSSAAPTSTSTSQQPQQPTSSSSASVPTSNPGGCTSQKWAQCGGIGFTGCTTCVSGTTCTKLNDWYSQC

SEQ ID NO: 47259 - protein, 308 aa, Thermochaetoides thermophila
MRSTPVLRTALAAALPFTVLAADGKSTRYWDCCKPSCSWPGKAAVSQPVFACDRNFNRIYDFGAKSGCEGGPAYSCADQTPWAVNDQFSYGFAATNIAGGNEASWCCACYKLTFTSGPVAGKVMVVQSTSTGGDLGNNHFDLNIPGGGVGIFDGCTPQFGGLPGERYGGISSRSQCDSFPDALKPGCYWRFDWFLNADNPNFTFERVQCPSELVARTGCKRNDDGNYPVFTPPSGDSPSSSSAAPTSTSTSQQPQQPTSSSSQSVPTSNPGGCTSQKWAQCGGIGFTGCTTCVSGTTCTKLNDWYSQC

SEQ ID NO: 47260 - protein, 309 aa, Thermochaetoides thermophila
MRSTPVLRTALAAALPFTVLAADGKSTRYWDCCKPSCSWPGKAAVSQPVFACDRNFNRIYDFGAKSGCEGGPAYSCADQTPWAVNDQFAYGFAATNIAGGNEASWCCACYKLTFTSGPVAGKVMVVQSTSTGGDLGNNHFDLNIPGGGVGIFDGCTPQFGGLPGERYGGISSRSQCDSFPDALKPGCYWRFDWFLNADNPNFTFERVQCPSELVARTGCKRNDDGNYPVFTPPSGDSPSSSSAAPTSTSTSQQPQQPTSSSSQASVPTSNPGGCTSQKWAQCGGIGFTGCTTCVSGTTCTKLNDWYSQC

SEQ ID NO: 47261 - protein, 309 aa, Thermochaetoides thermophila
MRSTPVLRTALAAALPFTVLAADGKSTRYWDCCKPSCSWPGKAAVSQPVFACDRNFNRIYDFGAKSGCEGGPAYSCADQTPWAVNDQFSYGFAATNIAGGNEASWCCACYKLTFTSGPVAGKVMVVQSTSTGGDLGNNHFDLNIPGGGVGIFDGCTPQFGGLPGERYGGISSRSQCDSFPDALKPGCYWRFDWFLNADNPNFTFERVQCPSELVARTGCKRNDDGNYPVFTPPSGDSPSSSSAAPTSTSTSQQPQQPTSSSSQASVPTSNPGGCTSQKWAQCGGIGFSGCTTCVSGTTCTKLNDWYSQC

SEQ ID NO: 47262 - protein, 308 aa, Thermochaetoides thermophila
MRSTPVLRTALAAALPFTVLAADGKSTRYWDCCKPSCSWPGKAAVSQPVFACDRNFNRIYDFGAKSGCEGGPAYSCADQTPWAVNDQFSYGFAATNIAGGNEASWCCACYKLTFTSGPVAGKVMVVQSTSTGGDLGNNHFDLNIPGGGVGIFDGCTPQFGGLPGERYGGISSRSQCDSFPDALKPGCYWRFDWFLNADNPNFTFERVQCPSELVARTGCKRNDDGNYPVFTPPSGDSPSSSSAAPTSTSTSQQPQQPTSSSSQAVPTSNPGGCTSQKWAQCGGIGFTGCTTCVSGTTCTKLNDWYSQC

SEQ ID NO: 47263 - protein, 309 aa, Thermochaetoides thermophila
MRSTPVLRTALAAALPFTVLAADGKSTRYWDCCKPSCSWPGKAAVSQPVFACDRNFQRIYDFGAKSGCEGGPAYSCADQTPWAVNDQFSYGFAATNIAGGNEASWCCACYKLTFTSGPVAGKVMVVQSTSTGGDLGNNHFDLNIPGGGVGIFDGCTPQFGGLPGERYGGISSRSQCDSFPDALKPGCYWRFDWFLNADNPNFTFERVQCPSELVARTGCKRNDDGNYPVFTPPSGDSPSSSSAAPTSTSTSQQPQQPTSSSSQASVPTSNPGGCTSQKWAQCGGIGFTGCTTCVSGTTCTKLNDWYSQC

SEQ ID NO: 47264 - protein, 308 aa, Thermochaetoides thermophila
MRSTPVLRTALAAALPFTVLAADGKSTRYWDCCKPSCSWPGKAAVSQPVFACDRNFNRIYDFGAKSGCEGGPAYSCADQTPWAVNDQFSYGFAATNIAGGNEASWCCACYKLTFTSGPVAGKVMVVQSTSTGGDLGNNHFDLNIPGGGVGIFDGCTPQFGGLPGERYGGISSRSQCDSFPDALKPGCYWRFDWFLNADNPNFTFERVQCPSELVARTGCKRNDDGNYPVFTPPSGDSPSSSSAAPTSTSTSQQPQQPTSSSQASVPTSNPGGCTSQKWAQCGGIGFTGCTTCVSGTTCTKLNDWYSQC

SEQ ID NO: 47265 - protein, 269 aa, Thermothielavioides terrestris
SGSGQSTRYWDCCKPSCAWPGKAAVSQPVYACDANFQRLSDFNVQSGCNGGSAYACADQTPWAVNDNLAYGFAATSIAGGSESSWCCACYALTFTSGPVAGKTMVVQSTSTGGDLGSNHFDIAMPGGGVGIFDGCSSQFGGLPGARYGGISSRDQCDSFPAPLKPGCQWRFDWFQNADNPTFTFQQVQCPAEIVARSGCKRNDDSSFPVFTPEPTPEPTPEPTPEPTPEPTTCTAERWAQCGGNGWSGCTTCVAGSTCTKINDWYHQCL

SEQ ID NO: 47266 - protein, 269 aa, Thermothielavioides terrestris
SGSGQSTRYWDCCKPSCAWPGKAAVSQPVYACDANFQRLSDFNVQSGCNGGSAYACADQTPWAVNDNLAYGFAATSIAGGSESSWCCACYALTFTSGPVAGKTMVVQSTSTGGDLGSNHFDIAMPGGGVGIFDGCSSQFGGLPGARYGGISSRDQCDSFPAPLKPGCQWRFDWFQNADNPTFTFQQVQCPAEIVARSGCKRNDDSSFPVFTPEPTPEPTPEPTPEPTPRPTTCTAERWAQCGGNGWSGCTTCVAGSTCTKINDWYHQCL

SEQ ID NO: 47267 - protein, 253 aa, Fungi
MRSTPVIRTALAAALPLVASAADGKSTRYWDCCKPSCSWSGKASVNQPVFACHANFKRITDVNAKSGCDGGSAYSCADQTPWAVNDNLAYASRRHTSLAGPRRHGAAACYALTFTSGLYAGKTMVVQSTSTGGDLGNNHFDLAMPGGGVGILNGCSSQFGGLPGAQYGGISSRSECDSFPDALKPGCQWRFDWFKNADNPNFNFEQVQCPDELVARTGCRRDDDSRFPAFTPSGGSSSSKPSSAAPSPSSSSP

SEQ ID NO: 47268 - protein, 199 aa, Synthetic construct
GRSTRYWDCCKPSCGWAKKAPVNQPVFSCNANFQRITDFDAKSGCEPGGVAYSCADQTPWAVNDDFALGFAATSIAGSNEAGWCMACYELTFTSGPVAGKKMVVQSTSTGGDLGSNHFDLNIPGGGVGIFDGCTPQFGGLPGQRYGGISSRNECDRFPDALKPGCYWRFDWFKNADNPSFSFRQVQCPAELVARTGGRR

SEQ ID NO: 47269 - protein, 199 aa, Synthetic construct
GRSTRYWDCCKPSMGWAKKAPVNQPVFSCNANFQRITDFDAKSGCEPGGVAYSCADQTPWAVNDDFALGFAATSIAGSNEAGWGCACYELTFTSGPVAGKKMVVQSTSTGGDLGSNHFDLNIPGGGVGIFDGCTPQFGGLPGQRYGGISSRNECDRFPDALKPGCYWRFDWFKNADNPSFSFRQVQCPAELVARTGCRR

SEQ ID NO: 47270 - protein, 199 aa, Synthetic construct
GRSTRYWDCGKPSCGWAKKAPVNQPVFSCNANFQRITDFDAKSGMEPGGVAYSCADQTPWAVNDDFALGFAATSIAGSNEAGWCCACYELTFTSGPVAGKKMVVQSTSTGGDLGSNHFDLNIPGGGVGIFDGCTPQFGGLPGQRYGGISSRNECDRFPDALKPGCYWRFDWFKNADNPSFSFRQVQCPAELVARTGCRR

SEQ ID NO: 47271 - protein, 268 aa, Thermothielavioides terrestris
SGSGQSTRYWDCCKPSCAWPGKAAVSQPVYACDANFQRLSDFNVQSGCNGGSAYACADQTPWAVNDNLAYGFAATSIAGGSESSWCCACYALTFTSGPVAGKTMVVQSTSTGGDLGSNHFDIAMPGGGVGIFDGCSSQFGGLPGARYGGISSRDQCDSFPAPLKPGCQWRFDWFQNADNPTFTFQQVQCPAEIVARSGCKRNDDSSFPVFTPEPTPEPTPEPTPEPTPEPTCTAERWAQCGGNGWSGCTTCVAGSTCTKINDWYHQCL

SEQ ID NO: 47272 - protein, 268 aa, Thermothielavioides terrestris
SGSGQSTRYWDCCKPSCAWPGKAAVSQPVYACDANFQRLSDFNVQSGCNGGSAYACADQTPWAVNDNLAYGFAATSIAGGSESSWCCACYALTFTSGPVAGKTMVVQSTSTGGDLGSNHFDIAMPGGGVGIFDGCSSQFGGLPGARYGGISSRDQCDSFPAPLKPGCQWRFDWFQNADNPTFTFQQVQCPAEIVARSGCKRNDDSSFPVFTPEPTPEPTPEPTPEPTPETGCTAERWAQCGGNGWSGCTTCVAGSTCTKINDWYHQCL

SEQ ID NO: 47273 - protein, 269 aa, Thermothielavioides terrestris
SGSGQSTRYWDCCKPSCAWPGKAAVSQPVYACDANFQRLSDFNVQSGCNGGSAYACADQTPWAVNDNLAYGFAATSIAGGSESSWCCACYALTFTSGPVAGKTMVVQSTSTGGDLGSNHFDIAMPGGGVGIFDGCSSQFGGLPGARYGGISSRDQCDSFPAPLKPGCQWRFDWFQNADNPTFTFQQVQCPAEIVARSGCKRNDDSSFPVFTPEPTPEPTPEPTPEPTPEPTDCTAERWAQCGGNGWSGCTTCVAGSTCTKINDWYHQCL

SEQ ID NO: 47274 - protein, 269 aa, Thermothielavioides terrestris
SGSGQSTRYWDCCKPSCAWPGKAAVSQPVYACDANFQRLSDFNVQSGCNGGSAYSCADQTPWAVNDNLAYGFAATSIAGGSESSWCCACYALTFTSGPVAGKTMVVQSTSTGGDLGSNHFDIAMPGGGVGIFNGCSSQFGGLPGAQYGGISSRDQCDSFPAPLKPGCQWRFDWFQNADNPTFTFQQVQCPAEIVARSGCKRNDDSSFPVFTPEPTPEPTPEPTPEPTPEPTGCTAERWAQCGGNGWSGCTTCVAGSTCTKINDWYHQCL

SEQ ID NO: 47275 - protein, 269 aa, Thermothielavioides terrestris
SGSGQSTRYWDCCKPSCAWPGKAAVSQPVYACDANFQRLSDFNVQSGCNGGSAYACADQTPWAVNDNLAYGFAATSIAGGSESSWCCACYALTFTSGPVAGKTMVVQSTSTGGDLGSNHFDIAMPGGGVGIFNGCSSQFGGLPGARYGGISSRDQCDSFPAPLKPGCQWRFDWFQNADNPTFTFQQVQCPAEIVARSGCKRNDDSSFPVFTPEPTPEPTPEPTPEPTPEPTGCTAERWAQCGGNGWSGCTTCVAGSTCTKINDWYHQCL

SEQ ID NO: 47276 - protein, 206 aa, Acremonium thermophilum
DGKSTRYWDCCKPSCGWAGKASVNQPVFSCSADWQRISDFNAKSGCDGGNAYSCADQTPWAVNDNFSYGFAATAIAGGSEQSWCCACYALTFNSGPVAGKTMVVQSTSTGGDLGENHFDLAIPGGGVGIFNGCQSQFGGLPGAQYGGIQDRSQCSSFPAPLQPGCQWRFDWFQNADNPTFTFQRVQCPSELTSRTGCKRDDDANYP

SEQ ID NO: 47277 - protein, 211 aa, Humicola insolens
GKSTRYWDCCKPSCGWAKKAPVNQPVFSCNANFQRLTDFDAKSGCEPGGVAYSCADQTPWAVNDDFAFGFAATSIAGSNEAGWCCACYELTFTSGPVAGKKMVVQSTSTGGDLGSNHFDLNIPGGGVGIFDGCTPQFGGLPGQRYGGISSRNECDRFPDALKPGCYWRFDWFKNADNPSFSFRQVQCPAELVARTGCRRNDDGNFPAVQIP

SEQ ID NO: 47278 - protein, 310 aa, Thermochaetoides thermophila
MRSTPVLRTALAAALPFTVLAADGKSTRYWDCCKPSCSWPGKAAVSQPVFACDRNFNRIYDFGAKSGCEGGPAYSCADQTPWAVNDQFSYGFAATNIAGGNEASWCCACYKLTFTSGPVAGKVMVVQSTSTGGDLGNNHFDLNIPGGGVGIFDGCTPQFGGLPGERYGGISSRSQCDSFPDALKPGCYWRFDWFLNADNPNFTFERVQCPSELVARTGCKRNDDGNYPVFTPPSGDSPSSSSAAPTSTSTPQQPQQPTSSSSQASVPTSNPGGCTSQKWAQCGGIGFTGCTTCVSGTTCTKLNDWYSQCL

SEQ ID NO: 47279 - protein, 284 aa, Staphylotrichum coccosporum
ADGKSTRYWDCCKPSCSWPGKASVNQPVFACYANFQRISDPNVKSGCDGGSAYACADQTPWAVNDNFSYGFAATSISGGNEASWCCGCYELTFTSGPVAGKKMVVQSTSTGGDLGTNHFDLAMPGGGVGIFDGCSPQFGGLPGDRYGGVSSRSQCDSFPAALKPGCYWRFDWFKNADNPTFTFRQVQCPSELVARTGCRRNDDSNFPHFTPPSGGQSSSSSSSSSAKPTSTSTSTTSSQTSSSTGGGCAAQRWAQCGGIGFSGCTTCVSGTTCNKQNDWYSQCL

SEQ ID NO: 47280 - protein, 295 aa, Staphylotrichum coccosporum
ADGVSTRYWDCCKPSCSWPGKALVNQPVFACSANFTRISDPNVKSGCDGGSAYACADQTPWAVNDNFSYGFAATSIMGGNEASWCCGCYELTFTSGPVAGKTMVVQSTSTGTDLGTNHFDLAMPGGGVGIFDGCSPQFGGLAGDRYGGVSSRSQCDDFPAPLKPGCYWRFDWFKNADNPTFTFRQVQCPSEVVARTGCRRNDDGNFPVFTPPSGGQSSSSLSSSSAKPTSTSTSTTSTKATSTTSTASSQTSSSTGGGCAAQRWAQCGGIGFSGCTTCVSGTTCNKQNDWYSQCL

SEQ ID NO: 47281 - protein, 295 aa, Staphylotrichum coccosporum
ADGKSTRYWDCCKPSCSWPGKASVNQPVFACSANFQRISDPNVKSGCDGGSAYACADQTPWAVNDNFSYGFAATSISGGNEASWCCGCYELTFTSGSVAGKTMVVQSTSTGVDLGTNHFDLAMPGGGVGIFDGCSSQFGGLAGDRYGGVSSRDQCDSFPAELKPGCYWRFDWFKNADNPTFTFRQVQCPSELVARTGCRRNDDGNFPVFTPPSGGQSSSSSSSSKAKPTSTSTSTTSTKARSTTSTASSQTSSSTGGGCAAQRWAQCGGIGFSGCTTCVSGTTCNKQNDWYSQCL

SEQ ID NO: 47282 - protein, 295 aa, Staphylotrichum coccosporum
ADGKSTRYWDCCKPSCSWPGKASVNQPVFACSANFQRISDPNVKSGCDGGSAYACADQTPWAVNDNFSYGFAATSISGGNEASWCCGCYELTFTSGPVAGKTMVVQSTSTGGDLGTNHFDLAMPGGGVGIFDGCSPQFGGLAGDRYGGVSSRSQCDSFPAAIKPGCYWRFDWFKNADNPTFTFRQVQCPSEYLARTGCRRNDDGNFPVFTPPSGGQSSSSSSSSSAKPTSTSTSTTSTKATSTTSTASSQTSSSTGGGCAAQRWAQCGGIGFSGCTTCVSGTTCNKQNNWYSQCL

SEQ ID NO: 47283 - protein, 295 aa, Staphylotrichum coccosporum
ADGKSTRYWDCCKPSCSWPGKASVNQPVFACSANFQRISDPNVKSGCDGGSAYACADQTPWAVNDNFSYGFAATSISGGNEASWCCGCYELTFTSGPVAGKTMVVQSTSTGGDLGTNHFDLAMPGGGVGIFDGCSPQFGGLAGDRYGGVSSRSQCDSFPAAVKPGCYWRFDWFKNADNPTFTFRQVQCPSEYLARTGCRRNDDGNFPVFTPPSGGQSSSSSSSSSAKPTSTSTSTTSTKATSTTSTASSQTSSSTGGGCAAQRWAQCGGIGFSGCTTCVSGTTCNKQNNWYSQCL

SEQ ID NO: 47284 - protein, 309 aa, Thermochaetoides thermophila
MRSTPVLRTALAAALPFTVLAADGKSTRYWDCCKPSCSWPGKAAVSQPVFACDRNFNRIYDFGAKSGCEGGPAYSCADQTPWAVNDQFSYGFAATNIAGGNEASWCCACYKLTFTSGPVAGKVMVVQSTSTGGDLGNNHFDLNIPGGGVGIFDGCTPQFGGLPGERYGGISSRSQCDSFPDALKPGCYWRFDWFLNADNPNFTFERVQCPSELVARTGCKRNDDGNYPVFTPPSGDSPSSSSAAPTSTSTSQQPQQPTSSSSQASVPTSNPGGCTSQKWAQCGGIGFTGCTTCVSGHTCTKLNDWYSQC

SEQ ID NO: 47285 - protein, 309 aa, Thermochaetoides thermophila
MRSTPVLRTALAAALPFTVLAADGKSTRYWDCCKPSCSWPGKAAVSQPVFACDRNFNRIYDFGAKSGCEGGPAYSCADQTPWAVNDQFSYGFAATNIAGGNEASWCCACYKLTFTSGPVAGKVMVVQSTSTGGDLGNNHFDLNIPGGGVGIFDGCTPQFGGLPGERYGGISSRSQCDSFPDALKPGCYWRFDWFLNADNPNFTFERVQCPSELVARTGCKRNDDGNYPVFTPPSGDSPSSSSAAPTSTSTSQQPQQPTSSSSQASVPTSNPGGCTSQKWAQCGGIGFTGCTTCVSGTTCTKANDWYSQC

SEQ ID NO: 47286 - protein, 309 aa, Thermochaetoides thermophila
MRSTPVLRTALAAALPFTVLAADGKSTRYWDCCKPSCSWPGKAAVSQPVFACDRNFNRIYDFGAKSGCEGGPAYSCADQTPWAVNDQFSYGFAATNIAGGNEASWCCACYKLTFTSGPVAGKVMVVQSTSTGGDLGNNHFDLNIPGGGVGIFDGCTPQFGGLPGERYGGISSRSQCDSFPDALKPGCYWRFDWFQNADNPNFTFERVQCPSELVARTGCKRNDDGNYPVFTPPSGDSPSSSSAAPTSTSTSQQPQQPTSSSSQASVPTSNPGGCTSQKWAQCGGIGFTGCTTCVSGTTCTKLNDWYSQC

SEQ ID NO: 47287 - protein, 309 aa, Thermochaetoides thermophila
MRSTPVLRTALAAALPFTVLAADGKSTRYWDCCKPSCSWPGKAAVSQPVFACDRNFNRIYDFGAKSGCEGGPAYSCADQTPWAVNDQFSYGFAATNIAGGNEASWCCACYKLTFTSGPVAGKVMVVQSTSTGGDLGNNHFDLNIPGGGVGIFDGCTPQFGGLPGERYGGISSRSQCDSFPDALKPGCYWRFDWFLNADNPNFTFERVQCPSELVARTGCKRNDDGNYPVFTPPSGDSPSSSSAAPTSTSTSQQQQQPTSSSSQASVPTSNPGGCTSQKWAQCGGIGFTGCTTCVSGTTCTKLNDWYSQC

SEQ ID NO: 47288 - protein, 308 aa, Thermochaetoides thermophila
MRSTPVLRTALAAALPFTVLAADGKSTRYWDCCKPSCSWPGKAAVSQPVFACDRNFNRIYDFGAKSGCEGGPAYSCADQTPWAVNDQFSYGFAATNIAGGNEASWCCACYKLTFTSGPVAGKVMVVQSTSTGGDLGNNHFDLNIPGGGVGIFDGCTPQFGGLPGERYGGISSRSQCDSFPDALKPGCYWRFDWFLNADNPNFTFERVQCPSELVARTGCKRNDDGNYPVFTPPSGDSPSSSSAAPTSTSTSQQPQQPTSSSSQASVTSNPGGCTSQKWAQCGGIGFTGCTTCVSGTTCTKLNDWYSQC

SEQ ID NO: 47289 - protein, 309 aa, Thermochaetoides thermophila
MRSTPVLRTALAAALPFTVLAADGKSTRYWDCCKPSCSWPGKAAVSQPVFACDRNFNRIYDFGAKSGCEGGPAYSCADQTPWAVNDQFSYGFAATNIAGGNEASWCCACYKLTFTSGPVAGKVMVVQSTSTGGDLGNNHFDLNIPGGGVGIFDGCTPQFGGLPGERYGGISSRSQCDSFPDALKPGCYWRFDWFLNADNPNFTFTRVQCPSELVARTGCKRNDDGNYPVFTPPSGDSPSSSSAAPTSTSTSQQPQQPTSSSSQASVPTSNPGGCTSQKWAQCGGIGFTGCTTCVSGTTCTKLNDWYSQC

SEQ ID NO: 47290 - protein, 309 aa, Thermochaetoides thermophila
MRSTPVLRTALAAALPFTVLAADGKSTRYWDCCKPSCSWPGKAAVSQPVFACDRNFNRIYDFGAKSGCEGGPAYSCADQTPWAVNDQFSYGFAATNIAGGNEASWCCACYKLTFTSGPVAGKVMVVQSTSTGGDLGNNHFDLNIPGGGVGIFDGCTPQFGGLPGERYGGISSRSQCDSFPDALKPGCYWRFDWFLNADNPNFTFERVQCPSELVARTGCKRNDDGNYPVFTPPSGDSPSSSSAAPTSTSTSQQPQQPTSSSSQASVPTSNPGGCTSQKWAQCGGIGFTGCTTCVSGTTCTKLNDWYGQC

SEQ ID NO: 47291 - protein, 309 aa, Thermochaetoides thermophila
MRSTPVLRTALAAALPFTVLAADGKSTRYWDCCKPSCSWPGKAAVSQPVFACDRNFNRIYDFGAKSGCEGGEAYSCADQTPWAVNDQFSYGFAATNIAGGNEASWCCACYKLTFTSGPVAGKVMVVQSTSTGGDLGNNHFDLNIPGGGVGIFDGCTPQFGGLPGERYGGISSRSQCDSFPDALKPGCYWRFDWFLNADNPNFTFERVQCPSELVARTGCKRNDDGNYPVFTPPSGDSPSSSSAAPTSTSTSQQPQQPTSSSSQASVPTSNPGGCTSQKWAQCGGIGFTGCTTCVSGTTCTKLNDWYSQC

SEQ ID NO: 47292 - protein, 309 aa, Thermochaetoides thermophila
MRSTPVLRTALAAALPFTVLAADGKSTRYWDCCKPSCSWPGKAAVSQPVFACDRNFNRIYDFGAKSGCEGGPAYSCADQTPWAVNDTFSYGFAATNIAGGNEASWCCACYKLTFTSGPVAGKVMVVQSTSTGGDLGNNHFDLNIPGGGVGIFDGCTPQFGGLPGERYGGISSRSQCDSFPDALKPGCYWRFDWFLNADNPNFTFERVQCPSELVARTGCKRNDDGNYPVFTPPSGDSPSSSSAAPTSTSTSQQPQQPTSSSSQASVPTSNPGGCTSQKWAQCGGIGFTGCTTCVSGTTCTKLNDWYSQC

SEQ ID NO: 47293 - protein, 309 aa, Thermochaetoides thermophila
MRSTPVLRTALAAALPFTVLAADGKSTRYWDCCKPSCSWPGKAAVSQPVFACDRNFNRIYDFGAKSGCEGGPAYSCADQTPWAVNDQFSYGFAATNIAGGNEASWCCACYKLTFTSGPVAGKVMVVQSTSTGGDLGNNHFDLNIPGGGVGIFDGCTPQFGGLPGERYGGISSRSQCDSFPDALKPGCYWRFDWFLNADNPNFTFERVQCPSELVARTGCKRNDDGNYPVFTPPSGDSPSSSSAAPTSTSTSQQPQQPTSSSSQASVPTSNPGGCTSQKWAQCGGIGFTGCTTCVSGGTCTKLNDWYSQC

SEQ ID NO: 47294 - protein, 309 aa, Thermochaetoides thermophila
MRSTPVLRTALAAALPFTVLAADGKSTRYWDCCKPSCSWPGKAAVSQPVFACDRNFNRIYDFGAKSGCEGGPAYSCADQTPWAVNDQFSYGFAATNIAGGNEASWCCACYALTFTSGPVAGKVMVVQSTSTGGDLGNNHFDLNIPGGGVGIFDGCTPQFGGLPGERYGGISSRSQCDSFPDALKPGCYWRFDWFLNADNPNFTFERVQCPSELVARTGCKRNDDGNYPVFTPPSGDSPSSSSAAPTSTSTSQQPQQPTSSSSQASVPTSNPGGCTSQKWAQCGGIGFTGCTTCVSGTTCTKLNDWYSQC

SEQ ID NO: 47295 - protein, 309 aa, Thermochaetoides thermophila
MRSTPVLRTALAAALPFTVLAADGKSTRYWDCCKPSCSWPGKAAVSQPVFACDRNFNRISDFGAKSGCEGGPAYSCADQTPWAVNDQFSYGFAATNIAGGNEASWCCACYKLTFTSGPVAGKVMVVQSTSTGGDLGNNHFDLNIPGGGVGIFDGCTPQFGGLPGERYGGISSRSQCDSFPDALKPGCYWRFDWFLNADNPNFTFERVQCPSELVARTGCKRNDDGNYPVFTPPSGDSPSSSSAAPTSTSTSQQPQQPTSSSSQASVPTSNPGGCTSQKWAQCGGIGFTGCTTCVSGTTCTKLNDWYSQC

SEQ ID NO: 47296 - protein, 309 aa, Thermochaetoides thermophila
MRSTPVLRTALAAALPFTVLAADGKSTRYWDCCKPSCSWPGKAAVSQPVFACDRNFNRIYDFGAKSGCEGGPAYSCADQTPWAVNDQFSYGFAATNIAGGNEASWCCACYKLTFTSGPVAGKVMVVQSTSTGGDLGNNHFDLNIPGGGVGIFDGCTPQFGGLPGERYGGISSRSQCDSFPDALKPGCYWRFDWFLNADNPNFTFERVQCPSELVARTGCKRNDDGNYPVFTPPSGDSPSSSSAAPTSTSTSQQPQQPTSSSSQASVPTSNPGGCTSQKWAQCGGIGFTGCTTCVSGTTCTKLNDWYSQC

SEQ ID NO: 47297 - protein, 309 aa, Thermochaetoides thermophila
MRSTPVLRTALAAALPFTVLAADGKSTRYWDCCKPSCSWPGKAAVSQPVFACDRNFNRIYDFGAKSGCEGGPAYSCADQTPWAVNDQFSYGFAATNIAGGNEASWCCACYKLTFTSGPVAGKVMVVQSTSTGGDLGNNHFDLNIPGGGVGIFDGCTPQFGGLPGERYGGISSRSQCDSFPDALKPGCYWRFDWFLNADNPNFTFERVQCPSELVARTGCKRNDDGNYPVFTPPSGDSPSSSSAAPTSTSTSQQPQQPTSSSSQASVPTSNPGGCTSQKWAQCGGIGFTGCTTCVSGTTCTKXNDWYSQC

SEQ ID NO: 47298 - protein, 309 aa, Thermochaetoides thermophila
MRSTPVLRTALAAALPFTVLAADGKSTRYWDCCKPSCSWPGKAAVSQPVFACDRNFNRIYDFGAKSGCEGGPAYSCADQTPWAVNDQFSYGFAATNIAGGNEASWCCACYKLTFTSGPVAGKVMVVQSTSTGGDLGNNHFDLNIPGGGVGIFDGCTPQFGGLPGERYGGISSRSQCDSFPDALKPGCYWRFDWFLNADNPNFTFERVQCPSELVARTGCKRNDDGNYPVFTPPSGDSPSSSSAAPTSTSTSQQPQQPTSSSSQASVPTSNPGGCTSQKWAQCGGIGFTGCTTCVSGTTCTKSNDWYSQC

SEQ ID NO: 47299 - protein, 309 aa, Thermochaetoides thermophila
MRSTPVLRTALAAALPFTVLAADGKSTRYWDCCKPSCSWPGKAAVSQPVFACDRNFNRIYDFGAKSGCEGGPAYSCADQTPWAVNDNFSYGFAATNIAGGNEASWCCACYKLTFTSGPVAGKVMVVQSTSTGGDLGNNHFDLNIPGGGVGIFDGCTPQFGGLPGERYGGISSRSQCDSFPDALKPGCYWRFDWFLNADNPNFTFERVQCPSELVARTGCKRNDDGNYPVFTPPSGDSPSSSSAAPTSTSTSQQPQQPTSSSSQASVPTSNPGGCTSQKWAQCGGIGFTGCTTCVSGTTCTKLNDWYSQC

SEQ ID NO: 47300 - protein, 309 aa, Thermochaetoides thermophila
MRSTPVLRTALAAALPFTVLAADGKSTRYWDCCKPSCSWPGKAAVSQPVFACDRNFNRIYDFGAKSGCEGGPAYSCADQTPWAVNDQFSYGFAATNIAGGNEASWCCACYKLTFTSGPVAGKVMVVQSTSTGGDLGDNHFDLNIPGGGVGIFDGCTPQFGGLPGERYGGISSRSQCDSFPDALKPGCYWRFDWFLNADNPNFTFERVQCPSELVARTGCKRNDDGNYPVFTPPSGDSPSSSSAAPTSTSTSQQPQQPTSSSSQASVPTSNPGGCTSQKWAQCGGIGFTGCTTCVSGTTCTKLNDWYSQC

SEQ ID NO: 47301 - protein, 309 aa, Thermochaetoides thermophila
MRSTPVLRTALAAALPFTVLAADGKSTRYWDCCKPSCSWPGKAAVSQPVFACDRNFNRIYDFGAKSGCEGGPAYSCADQTPWAVNDQFSYGFAATNIAGGNEASWCCACYKLTFTSGPVAGKVMVVQSTSTGGDLGNNHFDLNIPGGGVGIFDGCTPQFGGLPGERYGGISSRSQCDSFPDALKPGCYWRFDWFLNADNPNFTFERVQCPSELVARTGCKRNDDGNYPVFTPPSGDSPSSSSAAPTSTSTSQQPQQPTSSSSQASVPTSNPGGCTSQKWAQCGGIGFTGCTTCVRGTTCTKLNDWYSQC

SEQ ID NO: 47302 - protein, 309 aa, Thermochaetoides thermophila
MRSTPVLRTALAAALPFTVLAADGKSTRYWDCCKPSCSWPGKAAVSQPVFACDRNFNRIYDFGAKSGCEGGPAYSCADQTPWAVNDQFSYGFAATNIAGGNEASWCCACYKLTFTSGPVAGKVMVVQSTSTGGDLGNNHFDLNIPGGGVGIFDGCTPQFGGLPGERYGGISSRSQCDSFPDALKPGCYWRFDWFLNADNPNFTFSRVQCPSELVARTGCKRNDDGNYPVFTPPSGDSPSSSSAAPTSTSTSQQPQQPTSSSSQASVPTSNPGGCTSQKWAQCGGIGFTGCTTCVSGTTCTKLNDWYSQC

SEQ ID NO: 47303 - protein, 309 aa, Thermochaetoides thermophila
MRSTPVLRTALAAALPFTVLAADGKSTRYWDCCKPSCSWPGKAAVSQPVFACDRNFNRIYDFGAKSGCEGGPAYSCADQTPWAVNDQFSYGFAATNIAGGNEASWCCACYKLTFTSGPVAGKVMVVQSTSTGGDLGNNHFDLNIPGGGVGIFDGCTPQFGGLPGERYGGISSRSQCDSFPDALKPGCYWRFDWFLNADNPNFTFERVQCPSELVARTGCKRNDDGNYPVFTPPSGXSPSSSSAAPTSTSTSQQPQQPTSSSSQASVPTSNPGGCTSQKWAQCGGIGFTGCTTCVSGTTCTKLNDWYSQC

SEQ ID NO: 47304 - protein, 309 aa, Thermochaetoides thermophila
MRSTPVLRTALAAALPFTVLAADGKSTRYWDCCKPSCSWPGKADVSQPVFACDRNFNRIYDFGAKSGCEGGPAYSCADQTPWAVNDQFSYGFAATNIAGGNEASWCCACYKLTFTSGPVAGKVMVVQSTSTGGDLGNNHFDLNIPGGGVGIFDGCTPQFGGLPGERYGGISSRSQCDSFPDALKPGCYWRFDWFLNADNPNFTFERVQCPSELVARTGCKRNDDGNYPVFTPPSGDSPSSSSAAPTSTSTSQQPQQPTSSSSQASVPTSNPGGCTSQKWAQCGGIGFTGCTTCVSGTTCTKLNDWYSQC

SEQ ID NO: 47305 - protein, 309 aa, Thermochaetoides thermophila
MRSTPVLRTALAAALPFTVLAADGKSTRYWDCCKPSCSWPGKAAVSQPVFACDRNFNRIYDFGAKSGCEGGPAYSCADQTPWAVNDQFSYGFAATNIAGGNEASWCCACYKLTFTSGPVAGKVMVVQSTSTGGDLGNNHFDLNIPGGGVGIFDGCTPQFGGLPGERYGGISSRSQCDSFPDALKPGCYWRFDWFLNADNPNFTFERVQCPSELVARTGCKRNDDGNYPVFTPPSGDSPSSSSAAPTSTSTSQQPQQPTSSSSQASVPTSNPGGCTSQKWAQCGGIGFTGCTTCVSGTTCTKENDWYSQC

SEQ ID NO: 47306 - protein, 309 aa, Thermochaetoides thermophila
MRSTPVLRTALAAALPLTVLAADGKSTRYWDCCKPSCSWPGKAAVSQPVFACDRNFNRIYDFGAKSGCEGGPAYSCADQTPWAVNDQFSYGFAATNIAGGNEASWCCACYKLTFTSGPVAGKVMVVQSTSTGGDLGNNHFDLNIPGGGVGIFDGCTPQFGGLPGERYGGISSRSQCDSFPDALKPGCYWRFDWFLNADNPNFTFERVQCPSELVARTGCKRNDDGNYPVFTPPSGDSPSSSSAAPTSTSTSQQPQQPTSSSSQASVPTSNPGGCTSQKWAQCGGIGFTGCTTCVSGTTCTKLNDWYSQC

SEQ ID NO: 47307 - protein, 309 aa, Thermochaetoides thermophila
MRSTPVLRTALAAALPFTVLAADGKSTRYWDCCKPSCSWPGKAAVSQPVFACDRNFNRIYDFGAKSGCEGGPAYSCADQTPWAVNDQFSYGFAATNIAGGNEASWCCACYKLTFTSGPVAGKVMVVQSTSTGGDLGNNHFDLNIPGGGVGIFDGCTPQFGGLPGERYGGISSRSQCDSFPDALKPGCYWRFDWFLNADNPNFTFQRVQCPSELVARTGCKRNDDGNYPVFTPPSGDSPSSSSAAPTSTSTSQQPQQPTSSSSQASVPTSNPGGCTSQKWAQCGGIGFTGCTTCVSGTTCTKLNDWYSQC

SEQ ID NO: 47308 - protein, 309 aa, Thermochaetoides thermophila
MRSTPVLRTALAAALPFTVLAADGKSTRYWDCCKPSCSWPGKAAVSQPVFACDRNFNRIYDFGAKSGCEGGPAYSCADQTPWAVNDQFSYGFAATNIAGGNEASWCCACYKLTFTSGPVAGKVMVVQSTSTGGDLGNNHFDLNIPGGGVGIFDGCTPQFGGLPGERYGGISSRSQCDSFPDALKPGCYWRFDWFLNADNPNFTFERVQCPSELVARTGCKRNDDGNYPVFTPPSGDSPSSSSAAPTSTSTGQQPQQPTSSSSQASVPTSNPGGCTSQKWAQCGGIGFTGCTTCVSGTTCTKLNDWYSQC

SEQ ID NO: 47309 - protein, 309 aa, Thermochaetoides thermophila
MRSTPVLRTALAAALPFTVLAADGKSTRYWDCCKPSCSWPGKAAVSQPVFACDRNFNRIYDFNAKSGCEGGPAYSCADQTPWAVNDQFSYGFAATNIAGGNEASWCCACYKLTFTSGPVAGKVMVVQSTSTGGDLGNNHFDLNIPGGGVGIFDGCTPQFGGLPGERYGGISSRSQCDSFPDALKPGCYWRFDWFLNADNPNFTFERVQCPSELVARTGCKRNDDGNYPVFTPPSGDSPSSSSAAPTSTSTSQQPQQPTSSSSQASVPTSNPGGCTSQKWAQCGGIGFTGCTTCVSGTTCTKLNDWYSQC

SEQ ID NO: 47310 - protein, 309 aa, Thermochaetoides thermophila
MRSTPVLRTALAAALPFTVLAADGKSTRYWDCCKPSCSWPGKAAVSQPVFACDRNFNRIYDFGAKSGCEGGPAYSCADQTPWAVNDQFSYGFAATNIAGGNEASWCCACYKLTFTSGPVAGKVMVVQSTSTGGDLGNNHFDLNIPGGGVGIFDGCTPQFGGLPGERYGGISSRSQCDSFPDALKPGCYWRFDWFLNADNPNFTFERVQCPSELVARTGCKRNDDGNYPVFTPPSGDSPSSSSAAPTSTSTSQQPQQPTSSSSQASVPTSNPGGCTSQKWAQCGGIGFTGCTTCVSGTTCTKKNDWYSQC

SEQ ID NO: 47311 - protein, 309 aa, Thermochaetoides thermophila
MRSTPVLRTALAAALPFTVLAADGKSTRYWDCCKPSCSWPGKAAVSQPVFACDRNFNRIYDFGAKSGCEGGPAYSCADQTPWAVNDQFSYGFAATNIAGGNEASWCCACYKLTFTSGPVAGKVMVVQSTSTGGDLGNNHFDLNIPGGGVGIFDGCTPQFGGLPGERYGGISSRSQCDSFPDALKPGCYWRFDWFLNADNPTFTFERVQCPSELVARTGCKRNDDGNYPVFTPPSGDSPSSSSAAPTSTSTSQQPQQPTSSSSQASVPTSNPGGCTSQKWAQCGGIGFTGCTTCVSGTTCTKLNDWYSQC

SEQ ID NO: 47312 - protein, 309 aa, Thermochaetoides thermophila
MRSTPVLRTALAAALPFTVLAADGKSTRYWDCCKPSCSWPGKAAVSQPVFACDRNFNRIYDFGAKSGCEGGPAYSCADQTPWAVNDQFSYGFAATNIAGGNEASWCCACYKLTFTSGPVAGKVMVVQSTSTGGDLGNNHFDLNIPGGGVGIFDGCTPQFGGLPGERYGGISSRSQCDSFPDALKPGCYWRFDWFLNADNPNFTFERVQCPSELVARTGCKRNDDGNYPVFTPPSGDSPSSSSAAPTSTSTSQQPQQPTSSSSQASVPTSNPGGCTSQKWAQCGGIGFTGCTTCVSGPTCTKLNDWYSQC

SEQ ID NO: 47313 - protein, 309 aa, Thermochaetoides thermophila
MRSTPVLRTALAAALPFTVLAADGKSTRYWDCCKPSCSWPGKAAVSQPVFACDRNFNRIYDFGAKSGCEGGTAYSCADQTPWAVNDQFSYGFAATNIAGGNEASWCCACYKLTFTSGPVAGKVMVVQSTSTGGDLGNNHFDLNIPGGGVGIFDGCTPQFGGLPGERYGGISSRSQCDSFPDALKPGCYWRFDWFLNADNPNFTFERVQCPSELVARTGCKRNDDGNYPVFTPPSGDSPSSSSAAPTSTSTSQQPQQPTSSSSQASVPTSNPGGCTSQKWAQCGGIGFTGCTTCVSGTTCTKLNDWYSQC

SEQ ID NO: 47314 - protein, 309 aa, Thermochaetoides thermophila
MRSTPVLRTALAAALPFTVLAADGKSTRYWDCCKPSCSWPGKASVSQPVFACDRNFNRIYDFGAKSGCEGGPAYSCADQTPWAVNDQFSYGFAATNIAGGNEASWCCACYKLTFTSGPVAGKVMVVQSTSTGGDLGNNHFDLNIPGGGVGIFDGCTPQFGGLPGERYGGISSRSQCDSFPDALKPGCYWRFDWFLNADNPNFTFERVQCPSELVARTGCKRNDDGNYPVFTPPSGDSPSSSSAAPTSTSTSQQPQQPTSSSSQASVPTSNPGGCTSQKWAQCGGIGFTGCTTCVSGTTCTKLNDWYSQC

SEQ ID NO: 47315 - protein, 309 aa, Thermochaetoides thermophila
MRSTPVLRTALAAALPFTVLAADGKSTRYWDCCKPSCSWPGKAAVSQPVFACDRNFNRIYDFGAKSGCEGGPAYSCADQTPWAVNDQFSYGFAATNIAGGNEASWCCACYKLTFTSGPVAGKVMVVQSTSTGGDLGNNHFDLNIPGGGVGIFDGCTPQFGGLPGERYGGISSRDQCDSFPDALKPGCYWRFDWFLNADNPNFTFERVQCPSELVARTGCKRNDDGNYPVFTPPSGDSPSSSSAAPTSTSTSQQPQQPTSSSSQASVPTSNPGGCTSQKWAQCGGIGFTGCTTCVSGTTCTKLNDWYSQC

SEQ ID NO: 47316 - protein, 309 aa, Thermochaetoides thermophila
MRSTPVLRTALAAALPFTVLAADGKSTRYWDCCKPSCSWPGKAAVSQPVFACDRNFNRIYDFGAKSGCEGGPAYSCADQTPWAVNDQFSYGFAATNIAGGNEASWCCACYKLTFTSGPVAGKVMVVQSTSTGGDLGNNHFDLNIPGGGVGIFDGCTPQFGGLPGERYGGISSRSQCDSFPDALKPGCYWRFDWFLNADNPNFTFARVQCPSELVARTGCKRNDDGNYPVFTPPSGDSPSSSSAAPTSTSTSQQPQQPTSSSSQASVPTSNPGGCTSQKWAQCGGIGFTGCTTCVSGTTCTKLNDWYSQC

SEQ ID NO: 47317 - protein, 309 aa, Thermochaetoides thermophila
MRSTPVLRTALAAALPFTVLAADGKSTRYWDCCKPSCSWPGKAAVSQPVFACDRNFNRIYDFGAKSGCEGGPAYSCADQTPWAVNDQFSYGFAATNIAGGNEASWCCACYKLTFTSGPVAGKVMVVQSTSTGGDLGNNHFDLNIPGGGVGIFDGCTPQFGGLPGERYGGISSRSQCDSFPDALKPGCYWRFDWFLNADNPNFTFERVQCPSELVARTGCKRNDDGNYPVFTPPSGDSGSSSSAAPTSTSTSQQPQQPTSSSSQASVPTSNPGGCTSQKWAQCGGIGFTGCTTCVSGTTCTKLNDWYSQC

SEQ ID NO: 47318 - protein, 309 aa, Thermochaetoides thermophila
MRSTPVLRTALAAALPFTVLAADGKSTRYWDCCKPSCSWPGKAAVSQPVFACDRNFNRIYDFGAKSGCEGGPAYSCADQTPWAVNDQFSYGFAATNIAGGNEASWCCACYKLTFTSGPVAGKVMVVQSTSTGGDLGNNHFDLNIPGGGVGIFDGCTPQFGGLPGERYGGISSRSQCDSFPDALKPGCYWRFDWFLNADNPNFTFERVQCPSELVARTGCKRNDDGNYPVFTPPSGDSPSSSSAAPTSTSTSQQPTQPTSSSSQASVPTSNPGGCTSQKWAQCGGIGFTGCTTCVSGTTCTKLNDWYSQC

SEQ ID NO: 47319 - protein, 309 aa, Thermochaetoides thermophila
MRSTPVLRTALAAALPFTVLAADGKSTRYWDCCKPSCSWPGKAAVSQPVFACDRNFNRIYDFGAKSGCEGGPAYSCADQTPWAVNDQFSYGFAATNIAGGNEASWCCACYKLTFTSGPVAGKQMVVQSTSTGGDLGNNHFDLNIPGGGVGIFDGCTPQFGGLPGERYGGISSRSQCDSFPDALKPGCYWRFDWFLNADNPNFTFERVQCPSELVARTGCKRNDDGNYPVFTPPSGDSPSSSSAAPTSTSTSQQPQQPTSSSSQASVPTSNPGGCTSQKWAQCGGIGFTGCTTCVSGTTCTKLNDWYSQC

SEQ ID NO: 47320 - protein, 309 aa, Thermochaetoides thermophila
MRSTPVLRTALAAALPFTVLAADGKSTRYWDCCKPSCSWPGKAAVSQPVFACDRNFNRIYDFGAKSGCEGGPAYSCADQTPWAVNDQFSYGFAATNIAGGNEASWCCACYKLTFTSGPVAGKVMVVQSTSTGGDLGNNHFDLNIPGGGVGIFDGCTPQFGGLPGERYGGISSRSQCDSFPDALKPGCYWRFDWFLNADNPNFTFERVQCPSELVARTGCKRNDDGNYPVFTPPSGDSPSSGSAAPTSTSTSQQPQQPTSSSSQASVPTSNPGGCTSQKWAQCGGIGFTGCTTCVSGTTCTKLNDWYSQC

SEQ ID NO: 47321 - protein, 309 aa, Thermochaetoides thermophila
MRSTPVLRTALAAALPFTVLAADGKSTRYWDCCKPSCSWPGKAAVSQPVFACDRNFNRIYDFGAKSGCEGGNAYSCADQTPWAVNDQFSYGFAATNIAGGNEASWCCACYKLTFTSGPVAGKVMVVQSTSTGGDLGNNHFDLNIPGGGVGIFDGCTPQFGGLPGERYGGISSRSQCDSFPDALKPGCYWRFDWFLNADNPNFTFERVQCPSELVARTGCKRNDDGNYPVFTPPSGDSPSSSSAAPTSTSTSQQPQQPTSSSSQASVPTSNPGGCTSQKWAQCGGIGFTGCTTCVSGTTCTKLNDWYSQC

SEQ ID NO: 47322 - protein, 309 aa, Thermochaetoides thermophila
MRSTPVLRTALAAALPFTVLAADGKSTRYWDCCKPSCSWPGKAAVSQPVFACDRNFNRIYDFGAKSGCEGGPAYSCADQTPWAVNDQFSYGFAATNIAGGNEASWCCACYKLTFTSGPVAGKVMVVQSTSTGGDLGNNHFDLNIPGGGVGIFDGCTPQFGGLPGERYGGISSRSQCDSFPDALKPGCYWRFDWFLNADNPNFTFERVQCPSELVARTGCKRNDDGNYPVFTPPSGGSPSSSSAAPTSTSTSQQPQQPTSSSSQASVPTSNPGGCTSQKWAQCGGIGFTGCTTCVSGTTCTKLNDWYSQC

SEQ ID NO: 47323 - protein, 309 aa, Thermochaetoides thermophila
MRSTPVLRTALAAALPFTVLAADGKSTRYWDCCKPSCSWPGKAAVSQPVFACDRNFNRIYDFGAKSGCEGGPAYSCADQTPWAVNDQFSYGFAATNIAGGNEASWCCACYKLTFTSGPVAGKVMVVQSTSTGGDLGNNHFDLNIPGGGVGIFDGCTPQFGGLPGERYGGISSRSQCDSFPDALKPGCYWRFDWFLNADNPNFTFKRVQCPSELVARTGCKRNDDGNYPVFTPPSGDSPSSSSAAPTSTSTSQQPQQPTSSSSQASVPTSNPGGCTSQKWAQCGGIGFTGCTTCVSGTTCTKLNDWYSQC

SEQ ID NO: 47324 - protein, 309 aa, Thermochaetoides thermophila
MRSTPVLRTALAAALPFTVLAADGKSTRYWDCCKPSCSWPGKAAVSQPVFACDRNFNRIYDFGAKSGCEGGPAYSCADQTPWAVNDQFSYGFAATNIAGGNEASWCCACYKLTFTSGPVAGKVMVVQSTSTGGDLGNNHFDLNIPGGGVGIFDGCTPQFGGLPGERYGGISSRSQCDSFPDALKPGCYWRFDWFLNADNPNFTFERVQCPSELVARTGCKRNDDGNYPVFTPPSGDSPSSSSAAPTSTSTSQQPQQPTSSSSQASVPTSNPGGCTSQKWAQCGGIGFTGCTTCVSGTTCTKGNDWYSQC

SEQ ID NO: 47325 - protein, 309 aa, Thermochaetoides thermophila
MRSTPVLRTALAAALPFTVLAADGKSTRYWDCCKPSCSWPGKAAVSQPVFACDRNFNRIYDFGAKSGCEGGPAYSCADQTPWAVNDQFSYGFAATNIAGGNEASWCCACYKLTFTSGPVAGKVMVVQSTSTGGDLGNNHFDLNIPGGGVGIFDGCTPQFGGLPGERYGGISSRSQCDSFPDALKPGCYWRFDWFLNADNPNFTFERVQCPSELVARTGCKRNDDGNYPVFTPPSGDSPSSSSAAPTSTSTSQGPQQPTSSSSQASVPTSNPGGCTSQKWAQCGGIGFTGCTTCVSGTTCTKLNDWYSQC

SEQ ID NO: 47326 - protein, 309 aa, Thermochaetoides thermophila
MRSTPVLRTALAAALPFTVLAADGKSTRYWDCCKPSCSWPGKAAVSQPVFACDRNFNRIYDFGAKSGCEGGPAYSCADQTPWAVNDQFSYGFAATNIAGGNEASWCCACYKLTFTSGPVAGKVMVVQSTSTGGDLGNNHFDLNIPGGGVGIFDGCTPQFGGLPGARYGGISSRSQCDSFPDALKPGCYWRFDWFLNADNPNFTFERVQCPSELVARTGCKRNDDGNYPVFTPPSGDSPSSSSAAPTSTSTSQQPQQPTSSSSQASVPTSNPGGCTSQKWAQCGGIGFTGCTTCVSGTTCTKLNDWYSQC

SEQ ID NO: 47327 - protein, 309 aa, Thermochaetoides thermophila
MRSTPVLRTALAAALPFTVLAADGKSTRYWDCCKPSCSWPGKAAVSQPVFACDRNFNRIYDFGAKSGCEGGPAYSCADQTPWAVNDQFSYGFAATNIAGGNEASWCCACYKLTFTSGPVAGKVMVVQSTSTGGDLGNNHFDLNIPGGGVGIFDGCTPQFGGLPGERYGGISSRSQCDSFPDALKPGCYWRFDWFLNADNPNFTFERVQCPSELVARTGCKRNDDGNYPVFTPPSGDSPSSSSATPTSTSTSQQPQQPTSSSSQASVPTSNPGGCTSQKWAQCGGIGFTGCTTCVSGTTCTKLNDWYSQC

SEQ ID NO: 47328 - protein, 309 aa, Thermochaetoides thermophila
MRSTPVLRTALAAALPFTVLAADGKSTRYWDCCKPSCSWPGKAAVSQPVFACDRNFNRIYDFGAKSGCEGGPAYSCADQTPWAVNDQFSYGFAATNIAGGNEASWCCACYKLTFTSGPVAGKVMVVQSTSTGGDLGNNHFDLNIPGGGVGIFDGCTPQFGGLPGERYGGISSRSQCDSFPDALKPGCYWRFDWFLNADNPNFTFNRVQCPSELVARTGCKRNDDGNYPVFTPPSGDSPSSSSAAPTSTSTSQQPQQPTSSSSQASVPTSNPGGCTSQKWAQCGGIGFTGCTTCVSGTTCTKLNDWYSQC

SEQ ID NO: 47329 - protein, 309 aa, Thermochaetoides thermophila
MRSTPVLRTALAAALPFTVLAADGKSTRYWDCCKPSCSWPGKAAVSQPVFACDRNFNRIYDFGAKSGCEGGPAYSCADQTPWAVNDQFSYGFAATNIAGGNEASWCCACYKLTFTSGPVAGKVMVVQSTSTGGDLGNNHFDLNIPGGGVGIFDGCTPQFGGLPGERYGGISSRSQCDSFPDALKPGCYWRFDWFLNADNPNFTFERVQCPSELVARTGCKRNDDGNYPVFTPPSGDSPSSSSAAPTSTSTSQQPQQPTSSSSQASVPTSNPGGCTSQKWAQCGGIGFTGCTTCVSGRTCTKLNDWYSQC

SEQ ID NO: 47330 - protein, 309 aa, Thermochaetoides thermophila
MRSTPVLRTALAAALPFAVLAADGKSTRYWDCCKPSCSWPGKAAVSQPVFACDRNFNRIYDFGAKSGCEGGPAYSCADQTPWAVNDQFSYGFAATNIAGGNEASWCCACYKLTFTSGPVAGKVMVVQSTSTGGDLGNNHFDLNIPGGGVGIFDGCTPQFGGLPGERYGGISSRSQCDSFPDALKPGCYWRFDWFLNADNPNFTFERVQCPSELVARTGCKRNDDGNYPVFTPPSGDSPSSSSAAPTSTSTSQQPQQPTSSSSQASVPTSNPGGCTSQKWAQCGGIGFTGCTTCVSGTTCTKLNDWYSQC

SEQ ID NO: 47331 - protein, 309 aa, Thermochaetoides thermophila
MRSTPVLRTALAAALPFTVLAADGKSTRYWDCCKPSCSWPGKAAVSQPVFACDRNFNRIYDFGAKSGCEGGPAYSCADQTPWAVNDQFSYGFAATNIAGGNEASWCCACYKLTFTSGPVAGKTMVVQSTSTGGDLGNNHFDLNIPGGGVGIFDGCTPQFGGLPGERYGGISSRSQCDSFPDALKPGCYWRFDWFLNADNPNFTFERVQCPSELVARTGCKRNDDGNYPVFTPPSGDSPSSSSAAPTSTSTSQQPQQPTSSSSQASVPTSNPGGCTSQKWAQCGGIGFTGCTTCVSGTTCTKLNDWYSQC

SEQ ID NO: 47332 - protein, 309 aa, Thermochaetoides thermophila
MRSTPVLRTALAAALPFTVLAADGKSTRYWDCCKPSCSWPGKAAVSQPVFACDRNFNRIYDFGAKSGCEGGPAYSCADQTPWAVNDQFSYGFAATNIAGGNEASWCCACYKLTFTSGPVAGKVMVVQSTSTGGDLGNNHFDLNIPGGGVGIFDGCTPQFGGLPGERYGGISSRSQCDSFPDALKPGCYWRFDWFLNADNPNFTFERVQCPSELVARTGCKRNDDGNYPVFTPPSGDSPSSSSAAPTSTSTSQQPQSPTSSSSQASVPTSNPGGCTSQKWAQCGGIGFTGCTTCVSGTTCTKLNDWYSQC

SEQ ID NO: 47333 - protein, 309 aa, Thermochaetoides thermophila
MRSTPVLRTALAAALPFTVLAADGKSTRYWDCCKPSCSWPGKAAVSQPVFACDRNFNRIYDFGAKSGCEGGPAYSCADQTPWAVNDQFSYGFAATNIAGGNEASWCCACYKLTFTSGPVAGKVMVVQSTSTGGDLGENHFDLNIPGGGVGIFDGCTPQFGGLPGERYGGISSRSQCDSFPDALKPGCYWRFDWFLNADNPNFTFERVQCPSELVARTGCKRNDDGNYPVFTPPSGDSPSSSSAAPTSTSTSQQPQQPTSSSSQASVPTSNPGGCTSQKWAQCGGIGFTGCTTCVSGTTCTKLNDWYSQC

SEQ ID NO: 47334 - protein, 309 aa, Thermochaetoides thermophila
MRSTPVLRTALAAALPFTVLAADGKSTRYWDCCKPSCSWPGKAAVSQPVFACDRNFNRIYDFGAKSGCEGGPAYSCADQTPWAVNDQFSYGFAATNIAGGNEASWCCACYKLTFTSGPVAGKVMVVQSTSTGGDLGNNHFDLNIPGGGVGIFDGCTPQFGGLPGERYGGISSRSQCDSFPDALKPGCYWRFDWFLNADNPNFTFERVQCPSELVARTGCKRNDDGNYPVFTPPSGDSPSSSSAAPTSTSTSQQPQQPTSGSSQASVPTSNPGGCTSQKWAQCGGIGFTGCTTCVSGTTCTKLNDWYSQC

SEQ ID NO: 47335 - protein, 309 aa, Thermochaetoides thermophila
MRSTPVLRTALAAALPFTVLAADGKSTRYWDCCKPSCSWPGKAAVSQPVFACDRNFNRIYDFGAKSGCEGGSAYSCADQTPWAVNDQFSYGFAATNIAGGNEASWCCACYKLTFTSGPVAGKVMVVQSTSTGGDLGNNHFDLNIPGGGVGIFDGCTPQFGGLPGERYGGISSRSQCDSFPDALKPGCYWRFDWFLNADNPNFTFERVQCPSELVARTGCKRNDDGNYPVFTPPSGDSPSSSSAAPTSTSTSQQPQQPTSSSSQASVPTSNPGGCTSQKWAQCGGIGFTGCTTCVSGTTCTKLNDWYSQC

SEQ ID NO: 47336 - protein, 309 aa, Thermochaetoides thermophila
MRSTPVLRTALAAALPFTVLAADGKSTRYWDCCKPSCSWPGKAAVSQPVFACDRNFNRIYDFGAKSGCEGGPAYSCADQTPWAVNDQFSYGFAATNIAGGNEASWCCACYKLTFTSGPVAGKRMVVQSTSTGGDLGNNHFDLNIPGGGVGIFDGCTPQFGGLPGERYGGISSRSQCDSFPDALKPGCYWRFDWFLNADNPNFTFERVQCPSELVARTGCKRNDDGNYPVFTPPSGDSPSSSSAAPTSTSTSQQPQQPTSSSSQASVPTSNPGGCTSQKWAQCGGIGFTGCTTCVSGTTCTKLNDWYSQC

SEQ ID NO: 47337 - protein, 309 aa, Thermochaetoides thermophila
MRSTPVLRTALAAALPFTVLAADGKSTRYWDCCKPSCSWPGKANVSQPVFACDRNFNRIYDFGAKSGCEGGPAYSCADQTPWAVNDQFSYGFAATNIAGGNEASWCCACYKLTFTSGPVAGKVMVVQSTSTGGDLGNNHFDLNIPGGGVGIFDGCTPQFGGLPGERYGGISSRSQCDSFPDALKPGCYWRFDWFLNADNPNFTFERVQCPSELVARTGCKRNDDGNYPVFTPPSGDSPSSSSAAPTSTSTSQQPQQPTSSSSQASVPTSNPGGCTSQKWAQCGGIGFTGCTTCVSGTTCTKLNDWYSQC

SEQ ID NO: 47338 - protein, 309 aa, Thermochaetoides thermophila
MRSTPVLRTALAAALPFTVLAADGKSTRYWDCCKPSCSWPGKAAVSQPVFACDRNFNRIYDFGAKSGCEGGPAYSCADQTPWAVNDQFSYGFAATNIAGGNEASWCCACYKLTFTSGPVAGKVMVVQSTSTGGDLGNNHFDLNIPGGGVGIFDGCTPQFGGLPGERYGGISSRSQCDSFPDALKPGCYWRFDWFLNADNPNFTFERVQCPSELVARTGCKRNDDGNYPVFTPPSGDSPSSSSAAPTSTSTSQQPQQPTSSSSQASVPTSNPGGCTSQKWAQCGGIGFTGCTTCVSGTTCTKLNDWYAQC

SEQ ID NO: 47339 - protein, 308 aa, Thermochaetoides thermophila
MRSTPVLRTALAAALPFTVLAADGKSTRYWDCCKPSCSWPGKAAVSQPVFACDRNFNRIYDFGAKSGCEGGPAYSCADQTPWAVNDQFSYGFAATNIAGGNEASWCCACYKLTFTSGPVAGKVMVVQSTSTGGDLGNNHFDLNIPGGGVGIFDGCTPQFGGLPGERYGGISSRSQCDSFPDALKPGCYWRFDWFLNADNPNFTFERVQCPSELVARTGCKRNDDGNYPVFTPPSGDSPSSSSAAPTSTSTSQQPQQPTSSSSQASVPTSNPGGCTSQKWAQCGGIGFTGCTTCVSGTTCTKLNDWYSQ

SEQ ID NO: 47340 - protein, 208 aa, Thermothielavioides terrestris
SGSGQSTRYWDCCKPSCAWPGKAAVSQPVYACDANFQRLSDFNVQSGCNGGSAYSCADQTPWAVNDNLAYGFAATSIAGGSESSWCCACYALTFTSGPVAGKTMVVQSTSTGGDLGSNHFDIAMPGGGVGIFNGCSSQFGGLPGAQYGGISSRDQCDSFPAPLKPGCQWRFDWFQNADNPTFTFQQVQCPAEIVARSGCKRNDDSSFP

SEQ ID NO: 47341 - protein, 212 aa, Melanocarpus albomyces
NGQCTRYWDCCKPSCGWAGKGPVNQPVYSCDANFQRIHDFDAVSGCEGGPAFSCADHSPWAINDNLSYGFAATALSGQTEESWCCACYALTFTSGPVAGKTMVIQSTSTGGDLGSNHCDLNIPGGGVGLFDGCTPQFGGLPGARYGGISSRQECDSFPEPLKPGCQWRFDWFQNADNPSFTFERVQCPEELVARTGCRRHDDGGFAVFKAPS

SEQ ID NO: 47342 - protein, 212 aa, Melanocarpus albomyces
NGQSTRYWDCCKPSCGWAGKGPVNQPVYSCDLNMRRIHDFDAVSGCEGGPAFSCADHSPWAINDNLSYGFAATALSGQTEESWCCACYALTFTSGPVAGKTMVVQSTSTGGDLGSNHFDLNIPGGGVGLFDGCTPQFGGLPGARYGGISSRQECDSFPEPLKPGCQWRFDWFQNADNPSFTFERVQCPEELVARTGCRRHDDGGFAVFKAPS

SEQ ID NO: 47343 - protein, 269 aa, Thermothielavioides terrestris
SGSGQSTRYWDCCKPSCAWPGKAAVSQPVYACDANFQRLSDFNVQSGCNGGSAYACADQTPWAVNDNLAYGFAATSIAGGSESSWCCACYALTFTSGPVAGKTMVVQSTSTGGDLGSNHFDIAMPGGGVGIFDGCSSQFGGLPGARYGGISSRDQCDSFPAPLKPGCQWRFDWFQNADNPTFTFQQVQCPAEIVARSGCKRNDDSSFPVFTPEPTPEPTPEPTPEPTPEPTRCTAERWAQCGGNGWSGCTTCVAGSTCTKINDWYHQCL

SEQ ID NO: 47344 - protein, 269 aa, Thermothielavioides terrestris
SGSGQSTRYWDCCKPSCAWPGKAAVSQPVYACDANFQRLSDFNVQSGCNGGSAYACADQTPWAVNDNLAYGFAATSIAGGSESSWCCACYALTFTSGPVAGKTMVVQSTSTGGDLGSNHFDIAMPGGGVGIFDGCSSQFGGLPGARYGGISSRDQCDSFPAPLKPGCQWRFDWFQNADNPTFTFQQVQCPAEIVARSGCKRNDDSSFPVFTPEPTPEPTPEPTPEPTPEPTSCTAERWAQCGGNGWSGCTTCVAGSTCTKINDWYHQCL

SEQ ID NO: 47345 - protein, 277 aa, Thermothielavioides terrestris
SGSGQSTRYWDCCKPSCAWPGKAAVSQPVYACDANFQRLSDFNVQSGCNGGSAYACADQTPWAVNDNLAYGFAATSIAGGSESSWCCACYALTFTSGPVAGKTMVVQSTSTGGDLGSNHFDIAMPGGGVGIFDGCSSQFGGLPGARYGGISSRDQCDSFPAPLKPGCQWRFDWFQNADNPTFTFQQVQCPAEIVARSGCKRNDDSSFPVFTPQPTPEPTPQPTPEPTPQPTPEPTPQPTGCTAERWAQCGGNGWSGCTTCVAGSTCTKINDWYHQCL

SEQ ID NO: 47346 - protein, 297 aa, Thermochaetoides thermophila
MRSTPVLRTALAAALPFTVLAADGKSTRYWDCCKPSCSWPGKAAVSQPVFACDRNFNRIYDFGAKSGCEGGPAYSCADQTPWAVNDQFSYGFAATNIAGGNEASWCCACYKLTFTSGPVAGKVMVVQSTSTGGDLGNNHFDLNIPGGGVGIFDGCTPQFGGLPGERYGGISSRSQCDSFPDALKPGCYWRFDWFLNADNPNFTFERVQCPSELVARTGCKRNDDGNYPVFTPPSGGNGGTGTPTSTAPGSGQTSPGGGSGCTSQKWAQCGGIGFSGCTTCVSGTTCQKLNDYYSQCL

SEQ ID NO: 47347 - protein, 268 aa, Thermothielavioides terrestris
SGSGQSTRYWDCCKPSCAWPGKAAVSQPVYACDANFQRLSDFNVQSGCNGGSAYACADQTPWAVNDNLAYGFAATSIAGGSESSWCCACYALTFTSGPVAGKTMVVQSTSTGGDLGSNHFDIAMPGGGVGIFDGCSSQFGGLPGARYGGISSRDQCDSFPAPLKPGCQWRFDWFQNADNPTFTFQQVQCPAEIVARSGCKRNDDSSFPVFTPEPTPEPTPEPTPEPTPSPTCTAERWAQCGGNGWSGCTTCVAGSTCTKINDWYHQCL

SEQ ID NO: 47348 - protein, 414 aa, Chaetomium olivicolor
MARGITLLGLATLLLGAANGQKPGQSKEVHPKLTTYRCSKHGCRPSTNFIVLDSLSHPIHQATNSYNCGDWGNKPNATACPDKESCAKNCIMEGIPDYSAYGVTTKGSSLRLQQLLNGKLVSPRVYLLDRSEREYEMMHLTGNEFAFEIDATKLPCGMNSALYLSEMDRTGARSKLNPGGAYYGTGYCDAQCFVTPFINGVGNIEGRGSCCNEMDIWEANSRAAHIAPHTCNKKGLYLCSGDECGADGVCDKNGCGWNPYRVNVTDYYGNSKRFKVDTSRPFTVVTQFPADRRGKLQKIHRLYVQDGKVIESYVVNAPGLPKTDSTTDEFCKATGASKFLELGGHQGMGEAMTRGMVLAMSIWWDEGGNMNWLDSGEAGPCDPYEGNPKNITKVEPNPEVTFSNLRWGDIGSTY

SEQ ID NO: 47349 - protein, 219 aa, Thielavia terrestris
SGSGQSTRYWDCCKPSCAWPGKAAVSQPVYSCDANFQRLSDFNVQSGCNGGSAYACADQTPWAVNDNLAYGFAATSIAGGSESSWCCACYALTFTSGPVAGKTMVVQSTSTGGDLGSNHFDIAMPGGGVGIFDGCSSQFGGLPGDRYGGISSRDQCDSFPAPLKPGCYWRFDWFQNADNPTVTFQQVQCPAEIVARSGCKRNDDSSFPVFTSPSSPSSP

SEQ ID NO: 47350 - protein, 310 aa, Thermochaetoides thermophila
MRSTPVLRTALAAALPFTVLAADGKSTRYWDCCKPSCSWPGKAAVSQPVFACDRNFNRIYDFGAKSGCEGGPAYSCADQTPWAVNDQFSYGFAATNIAGGNEASWCCACYKLTFTSGPVAGKVMVVQSTSTGGDLGNNHFDLNIPGGGVGIFDGCTPQFGGLPGERYGGISSRSQCDSFPDALKPGCYWRFDWFLNADNPNFTFERVQCPSELVARTGCKRNDDGNYPVFTPPSGDSPSSSSAAPTSTSTSQQPQQPTSSSSQASVPTSNPGGCTSQKWAQCGGIGFTGCTTCVSGTTCTKLNDWYSQCM

SEQ ID NO: 47351 - protein, 309 aa, Thermochaetoides thermophila
MRSTPVLRTALAAALPFTVLAADGKSTRYWDCCKPSCSWPGKAAVSQPVFACDRNFNRIYDFGAKSGCEGGPAYSCADQTPWAVNDQFSYGFAATNIAGGNEASWCCACYKLTFTSGPVAGKVMVVQSTSTGGDLGNNHFDLNIPGGGVGIFDGCTPQFGGLPGERYGGISSRSQCDSFPDALKPGCYWRFDWFLNADNPNFTFERVQCPSELVARTGCKRNDDGNYPVFTPPSGDSPSSSSAAPTSTSTSQQPQQPTSSSSQASVPTSNPGGCTSQKWAQCGGIGFTGCTTCDSGTTCTKLNDWYSQC

SEQ ID NO: 47352 - protein, 309 aa, Thermochaetoides thermophila
MRSTPVLRTALAAALPFTVLAADGKSTRYWDCCKPSCSWPGKAAVSQPVFACDRNFNRIYDFGAKSGCEGGPAYSCADQTPWAVNDQFSYGFAATNIAGGNEASWCCACYKLTFTSGPVAGKVMVVQSTSTGGDLGNNHFDLNIPGGGVGIFDGCTPQFGGLPGERYGGISSRSQCDSFPDALKSGCYWRFDWFLNADNPNFTFERVQCPSELVARTGCKRNDDGNYPVFTPPSGDSPSSSSAAPTSTSTSQQPQQPTSSSSQASVPTSNPGGCTSQKWAQCGGIGFTGCTTCVSGTTCTKLNDWYSQC

SEQ ID NO: 47353 - protein, 309 aa, Thermochaetoides thermophila
MRSTPVLRTALAAALPFTVLAADGKSTRYWDCCKPSCSWPGKAAVSQPVFACDRNFNRIYDFGAKSGCEGGPAYSCADQTPWAVNDQFSYGFAATNIEGGNEASWCCACYKLTFTSGPVAGKVMVVQSTSTGGDLGNNHFDLNIPGGGVGIFDGCTPQFGGLPGERYGGISSRSQCDSFPDALKPGCYWRFDWFLNADNPNFTFERVQCPSELVARTGCKRNDDGNYPVFTPPSGDSPSSSSAAPTSTSTSQQPQQPTSSSSQASVPTSNPGGCTSQKWAQCGGIGFTGCTTCVSGTTCTKLNDWYSQC

SEQ ID NO: 47354 - protein, 309 aa, Thermochaetoides thermophila
MRSTPVLRTALAAALPFTVLAADGKSTRYWDCCKPSCSWPGKAAVSQPVFACDRNFNRIYDFGAKSGCEGGPAYSCADQTPWAVNDQFSYGFAATNIAGGNEASWCCACYKLTFTSGPVAGKVMVVQSTSTGGDLGNNHFDLNIPGGGVGIFDGCTPQFGGLPGERYGGISSRSQCDSFPDALKPGCYWRFDWFLNADNPNFTFERVQCPSELVARTGCKRNDDGNYPVFTPPSGDSPSSSSAAPTSTSTSQQPQQPTSSSSQASVPTSNPGGCTSQKWAQCGGIGFTGCTTCGSGTTCTKLNDWYSQC

SEQ ID NO: 47355 - protein, 309 aa, Thermochaetoides thermophila
MRSTPVLRTALAAALPFTVLAADGKSTRYWDCCKPSCSWPGKAAVSQPVFACDRNFNRIYDFGAKSGCEGGPAYSCADQTPWAVNDQFSYGFAATNIAGGNEASWCCACYKLTFTSGPVAGKVMVVQSTSTGGDLGNNHFDLNIPGGGVGIFDGCTPQFGGLPGERYGGISSRSQCDSFPDALKPGCYWRFDWFLNADNPNFTFERVQCPSELVARTGCKRNDDGNYPVFTPPSGDSPSSSSAAPTSTSTSQQPQQPTSSSSQASVPTSNPGGCTSQKWAQCGGIGFTGCTTCVSGTTLTKLNDWYSQC

SEQ ID NO: 47356 - protein, 309 aa, Thermochaetoides thermophila
MRSTPVLRTALAAALPFTVLAADGKSTRYWDCCKPSCSWPGKAAVSQPVFACDRNFNRIYDFGAKSGCEGGPAYSCADQTPWAVNDQFSYGFAATNIAGGNEASWCCACYKLTFTSGPVAGKVMVVQSTSTGGDLGNNHFDLNIPGGGVGIFDGCTPQFGGLPGERYGGISSRSQCDSFPDALKPGCYWRFDWFLNADNPNFTFERVQCPSELVARTGCKRNDDGNYPVFTPPSGDSPSSSSAAPTSTSTSQQPQQPTSSSSQASVPTSNPGGCTSQKWAQCGGIGFTGCTTCXSGTTCTKLNDWYSQC

SEQ ID NO: 47357 - protein, 309 aa, Thermochaetoides thermophila
MRSTPVLRTALAAALPFTVLAADGKSTRYWDCCKPSCSWPGKAAVSQPVFACDRNFNRIYDFGAKSGCEGGPAYSCADQTPWAVNDQFSYGFAATNIAGGNESSWCCACYKLTFTSGPVAGKVMVVQSTSTGGDLGNNHFDLNIPGGGVGIFDGCTPQFGGLPGERYGGISSRSQCDSFPDALKPGCYWRFDWFLNADNPNFTFERVQCPSELVARTGCKRNDDGNYPVFTPPSGDSPSSSSAAPTSTSTSQQPQQPTSSSSQASVPTSNPGGCTSQKWAQCGGIGFTGCTTCVSGTTCTKLNDWYSQC

SEQ ID NO: 47358 - protein, 309 aa, Thermochaetoides thermophila
MRSTPVLRTALAAALPFTVLAADGKSTRYWDCCKPSCSWPGKAAVSQPVFACDRNFNRIYDFGAQSGCEGGPAYSCADQTPWAVNDQFSYGFAATNIAGGNEASWCCACYKLTFTSGPVAGKVMVVQSTSTGGDLGNNHFDLNIPGGGVGIFDGCTPQFGGLPGERYGGISSRSQCDSFPDALKPGCYWRFDWFLNADNPNFTFERVQCPSELVARTGCKRNDDGNYPVFTPPSGDSPSSSSAAPTSTSTSQQPQQPTSSSSQASVPTSNPGGCTSQKWAQCGGIGFTGCTTCVSGTTCTKLNDWYSQC

SEQ ID NO: 47359 - protein, 309 aa, Thermochaetoides thermophila
MRSTPVLRTALAAALPFTVLAADGKSTRYWDCCKPSCSWPGKAAVSQPVFACDRNFNRIYDFGEKSGCEGGPAYSCADQTPWAVNDQFSYGFAATNIAGGNEASWCCACYKLTFTSGPVAGKVMVVQSTSTGGDLGNNHFDLNIPGGGVGIFDGCTPQFGGLPGERYGGISSRSQCDSFPDALKPGCYWRFDWFLNADNPNFTFERVQCPSELVARTGCKRNDDGNYPVFTPPSGDSPSSSSAAPTSTSTSQQPQQPTSSSSQASVPTSNPGGCTSQKWAQCGGIGFTGCTTCVSGTTCTKLNDWYSQC

SEQ ID NO: 47360 - protein, 309 aa, Thermochaetoides thermophila
MRSTPVLRTALAAALPFTVLAADGKSTRYWDCCKPSCSWPGKAAVSQPVFACDRNFNRIYDFGAKSGCEGGPAYSCADQTPWAVNDQFSYGFAATNIAGGNEASWCCACYKLTFTSGPVAGKVMVVQSTSTGGDLGNNHFDLNIPGGGVGIFDGCTPQFGGLPGERYGGISSRSQCDSFPDALKPGCYWRFDWFLNADNPNFTFERVQCPSELVARTGCKRNDDGNYPVFTPPSGDSPSSSSAAPTSTSPSQQPQQPTSSSSQASVPTSNPGGCTSQKWAQCGGIGFTGCTTCVSGTTCTKLNDWYSQC

SEQ ID NO: 47361 - protein, 309 aa, Thermochaetoides thermophila
MRSTPVLRTALAAALPFTVLAADGKSTRYWDCCKPSCSWPGKAAVSQPVFACDRNFNRIYDFGAKSGCEGGPAYSCADQTPWAVNDQFSYGFAATNIAGGNEASWCCACYKLTFTSGPVAGKVMVVQSTSTGGDLGNNHFDLNIPGGGVGIFDGCTPQFGGLPGERYGGISSRSQCDSFPDALKPGCYWRFDWFLNADNPNFTFERVQCPSELVARTGCKRNDDGNYPVFTPPSGDSPSSSSAAPTSTSTSQQPQQPTSSSSQASVPTSNPGGCTSQKWAQCGGIGFTGCTTCVSGTDCTKLNDWYSQC

SEQ ID NO: 47362 - protein, 309 aa, Thermochaetoides thermophila
MRSTPVLRTALAAALPFTVLAADGKSTRYWDCCKPSCSWPGKAAVSQPVFACDRNFNRIYDFGAKSGCNGGPAYSCADQTPWAVNDQFSYGFAATNIAGGNEASWCCACYKLTFTSGPVAGKVMVVQSTSTGGDLGNNHFDLNIPGGGVGIFDGCTPQFGGLPGERYGGISSRSQCDSFPDALKPGCYWRFDWFLNADNPNFTFERVQCPSELVARTGCKRNDDGNYPVFTPPSGDSPSSSSAAPTSTSTSQQPQQPTSSSSQASVPTSNPGGCTSQKWAQCGGIGFTGCTTCVSGTTCTKLNDWYSQC

SEQ ID NO: 47363 - protein, 309 aa, Thermochaetoides thermophila
MRSTPVLRTALAAALPFTVLAADGKSTRYWDCCKPSCSWPGKAAVSQPVFACDRNFNRIYDFGAKSGCEGGPAYSCADQTPWAVNDQFSYGFAATNIAGGNEASWCCACYKLTFTSGPVAGKVMVVQSTSTGGDLGNNHFDLNIPGGGVGIFDGCTPQFGGLPGERYGGISSRSQCDSFPDALKPGCYWRFDWFLNADNPNFTFERVQCPSELVARTGCKRNDDGNYPVFTPPSGDSPSSSSAAPTSTSTSQQPQQPTSSSSQASVPTSNPGGCTSQKWAQCGGIGFTGCTTCVSGTTCTKLNDYYSQC

SEQ ID NO: 47364 - protein, 309 aa, Thermochaetoides thermophila
MRSTPVLRTALAAALPFTVLAADGKSTRYWDCCKPSCSWPGKAAVSQPVFACDRNFNRIYDFGAKSGCEGGPAYSCADQTPWAVNDQFSYGFAATNIAGGNEASWCCACYKLTFTSGPVAGKVMVVQSTSTGGDLGNNHFDLNIPGGGVGIFDGCTPQFGGLPGERYGGISSRSQCDSFPDALKPGCYWRFDWFLNADNPNFTFERVQCPSELVARTGCKRNDDGNYPVFTPPSGDSPSSSSAAPTSTSTSQQPQQPTSSSSQASVPTSNPGGCTSQKWAQCGGIGFTNCTTCVSGTTCTKLNDWYSQC

SEQ ID NO: 47365 - protein, 309 aa, Thermochaetoides thermophila
MRSTPVLRTALAAALPFTVLAADGKSTRYWDCCKPSCSWPGKAAVSQPVFACDRNFNRIYDFGAKSGCEGGPAYSCADQTPWAVNDQFSYGFAATNIAGGNEASWCCACYKLTFTSGPVAGKVMVVQSTSTGGDLGNNHFDLNIPGGGVGIFDGCTPQFGGLPGERYGGISSRSQCDSFPDALKPGCYWRFDWFLNADNPNFTFERVQCPSELVARTGCKRNDDGNYPVFTPPSGDSPSSSSAAPTSTSTSQQPQQPTSSSSQASVPTSNPGGCTSQKWAQCGGIGFTGCTTCVSGTTATKLNDWYSQC

SEQ ID NO: 47366 - protein, 309 aa, Thermochaetoides thermophila
MRSTPVLRTALAAALPFTVLAADGKSTRYWDCCKPSCSWPGKAAVSQPVFACDRNFNRIYDFGAKSGCEGGPAYSCADQTPWAVNDQFSYGFAATNIAGGNEASWCCACYKLTFTSGPVAGKVMVVQSTSTGGDLGNNHFDLNIPGGGVGIFDGCTPQFGGLPGERYGGISSRSQCDSFPDALKPGCYWRFDWFLNADNPNFTFERVQCPSELVARTGCKRNDDGNYPVFTPPSGDSPSSSSAAPTSTSTSQQPQQPTSSSSQASVPTSNPGGCTSQKWAQCGGIGFTGCTTCVSGTTCHKLNDWYSQC

SEQ ID NO: 47367 - protein, 309 aa, Thermochaetoides thermophila
MRSTPVLRTALAAALPFTVLAADGKSTRYWDCCKPSCSWPGKAAVSQPVFACDRNFNRIYDFGAKSGCEGGPAYSCADQTPWAVNDQFSYGFAATNIAGGNEASWCCACYKLTFTSGPVAGKVMVVQSTSTGGDLGNNHFDLNIPGGGVGIFDGCTPQFGGLPGERYGGISSRSQCDSFPDALKPGCYWRFDWFLNADNPNFTFERVQCPSELVARTGCKRNDDGNYPVFTPPSGDSPSSSSAAPTSTSTSQQPQQPTSSSSQASVPTSNPGGCTSQKWAQCGGIGFTGCTTCVSGTTCTKLNDXYSQC

SEQ ID NO: 47368 - protein, 309 aa, Thermochaetoides thermophila
MRSTPVLRTALAAALPFTVLAADGKSTRYWDCCKPSCSWPGKAAVSQPVFACDRNFNRIYDFGAKSGCEGGPAYSCADQTPWAVNDQFSYGFAATNIAGGNEASWCCACYKLTFTSGPVAGKVMVVQSTSTGGDLGNNHFDLNIPGGGVGIFDGCSPQFGGLPGERYGGISSRSQCDSFPDALKPGCYWRFDWFLNADNPNFTFERVQCPSELVARTGCKRNDDGNYPVFTPPSGDSPSSSSAAPTSTSTSQQPQQPTSSSSQASVPTSNPGGCTSQKWAQCGGIGFTGCTTCVSGTTCTKLNDWYSQC

SEQ ID NO: 47369 - protein, 309 aa, Thermochaetoides thermophila
MRSTPVLRTALAAALPFTVLAADGKSTRYWDCCKPSCSWPGKAAVSQPVFACDRNFNRIYDFGSKSGCEGGPAYSCADQTPWAVNDQFSYGFAATNIAGGNEASWCCACYKLTFTSGPVAGKVMVVQSTSTGGDLGNNHFDLNIPGGGVGIFDGCTPQFGGLPGERYGGISSRSQCDSFPDALKPGCYWRFDWFLNADNPNFTFERVQCPSELVARTGCKRNDDGNYPVFTPPSGDSPSSSSAAPTSTSTSQQPQQPTSSSSQASVPTSNPGGCTSQKWAQCGGIGFTGCTTCVSGTTCTKLNDWYSQC

SEQ ID NO: 47370 - protein, 309 aa, Thermochaetoides thermophila
MRSTPVLRTALAAALPFTVLAADGKSTRYWDCCKPSCSWPGKAAVSQPVFACDRNFNRIYDFGAKSGCEGGPAYSCADQTPWAVNDQFSYGFAATNIAGGNEASWCCACYKLTFTSGPVAGKVMVVQSTSTGGDLGNNHFDLNIPGGGVGIFDGCTPQFGGLPGERYGGISSRSQCDSFPDALKPGCYWRFDWFLNADNPNFTFERVQCPSELVARTGCKRNDDGNYPVFTPPSGDSPSSSSAAPTSTSTSQQPQQPTSSSSQASVPTSNPGGCTSQKWAQCGGIGFTGCTTCVSGTTCTKLNDMYSQC

SEQ ID NO: 47371 - protein, 309 aa, Thermochaetoides thermophila
MRSTPVLRTALAAALPFTVLAATGKSTRYWDCCKPSCSWPGKAAVSQPVFACDRNFNRIYDFGAKSGCEGGPAYSCADQTPWAVNDQFSYGFAATNIAGGNEASWCCACYKLTFTSGPVAGKVMVVQSTSTGGDLGNNHFDLNIPGGGVGIFDGCTPQFGGLPGERYGGISSRSQCDSFPDALKPGCYWRFDWFLNADNPNFTFERVQCPSELVARTGCKRNDDGNYPVFTPPSGDSPSSSSAAPTSTSTSQQPQQPTSSSSQASVPTSNPGGCTSQKWAQCGGIGFTGCTTCVSGTTCTKLNDWYSQC

SEQ ID NO: 47372 - protein, 309 aa, Thermochaetoides thermophila
MRSTPVLRTALAAALPFTVLAADGKSTRYWDCCKPSCSWPGKAAVSQPVFACDRNFNRIYDFGAKSGCEGGPAYSCADQTPWAVNDQFSYGFAATNIAGGNEASWCCACYKLTFTSGPVAGKVMVVQSTSTGGDLGNNHFDLNIPGGGVGIFDGCTPQFGGLPGERYGGISSRSQCDSFPDALKPGCYWRFDWFLNADNPNFTFERVQCPSELVARTGCKRNDDGNYPVFTPPSGDSPSSSSAAPTSTSTSQQPQQPTSSSSQASVPTSNPGGCTSQKWAQCGGIGFTGRTTCVSGTTCTKLNDWYSQC

SEQ ID NO: 47373 - protein, 309 aa, Thermochaetoides thermophila
MRSTPVLRTALAAALPFTVLAADGKSTRYWDCCKPSCSWPGKAAVSQPVFACDRNFNRIYDFGAKSGCEGGPAYSCADQTPWAVNDQFSYGFAATNIAGGNEASWCCACYKLTFTSGPVAGKVMVVQSTSTGGDLGNNHFDLNIPGGGVGIFDGCTPQFGGLPGERYGGISSRSQCDSFPDALKPGCYWRFDWFLNADNPNFTFERVQCPSELVARTGCKRNDDGNYPVFTPPSGDSPSSSSAAPTSTATSQQPQQPTSSSSQASVPTSNPGGCTSQKWAQCGGIGFTGCTTCVSGTTCTKLNDWYSQC

SEQ ID NO: 47374 - protein, 309 aa, Thermochaetoides thermophila
MRSTPVLRTALAAALPFTVLAADGKSTRYWDCCKPSCSWPGKAAVSQPVFACDRNFNRIYDFGAKSGCEGGPAYSCADQTPWAVNDQFSYGFAATNIAGGNEASWCCACYKLTFTSGPVAGKVMVVQSTSTGGDLGNNHFDLNIPGGGVGIFDGCTPQFGGLPGEQYGGISSRSQCDSFPDALKPGCYWRFDWFLNADNPNFTFERVQCPSELVARTGCKRNDDGNYPVFTPPSGDSPSSSSAAPTSTSTSQQPQQPTSSSSQASVPTSNPGGCTSQKWAQCGGIGFTGCTTCVSGTTCTKLNDWYSQC

SEQ ID NO: 47375 - protein, 309 aa, Thermochaetoides thermophila
MRSTPVLRTALAAALPFTVLAADGKSTRYWDCCKPSCSWPGKAAVSQPVFACDRNFNRIYDFGAKSGCEGGPAYSCADQTPWAVNDQFSYGFAATNIAGGNEASWCCACYKLTFTSGPVAGKVMVVQSTSTGGDLGNNHFDLNIPGGGVGIFDGCTPQFGGLPGERYGGISSRSQCDSFPDALKPGCYWRFDWFLNADNPNFTFERVQCPSELVARTGCKRNDDGNYPVFTPPSGDSPSSSSAAPTSTSTSQQPQQPTSSSSQASVPTSNPGGCTSQKWAQCGGIGFTGCTTCVSGTTCTKLNDWXSQC

SEQ ID NO: 47376 - protein, 309 aa, Thermochaetoides thermophila
MRSTPVLRTALAAALPFTVLAADGKSTRYWDCCKPSCSWPGKAAVSQPVFACDRNFNRIYDFGAKSGCEGGPAYSCADQTPWAVNDQFSYGFAATNIAGGNEASWCCACYKLTFTSGPVAGKVMVVQSTSTGGDLGNNHFDLNIPGGGVGIFDGCTPQFGGLPGERYGGISSRSQCDSFPDALKPGCYWRFDWFLNADNPNFTFERVQCPSELVARTGCKRNDDGNYPVFTPPSGDSPSSSSAAPTSTSTSQQPQQPTSSSSQASVPTSNPGGCTSQKWDQCGGIGFTGCTTCVSGTTCTKLNDWYSQC

SEQ ID NO: 47377 - protein, 309 aa, Thermochaetoides thermophila
MRSTPVLRTALAAALPFTVLAADGKSTRYWDCCKPSCSWPGKAAVSQPVFACDRNFNRIYDFGAKSGCEGGPAYSCADQTPWAVNDQFSYGFAATNIAGGNEASWCCACYKLTFTSGPVAGKVMVVQSTSTGGDLGNNHFDLNIPGGGVGIFDGCTPQFGGLPGERYGGISSRSQCDSFPDALKPGCYWRFDWFLNADNPNFTFERVQCPSELVARTGCKRNDDGNYPVFTPPSGDSPSSSSAAPTSTSTSQQPQQPTSSSSQASVPTSNPGGCTSQKWAQCGGIGFTGCXTCVSGTTCTKLNDWYSQC

SEQ ID NO: 47378 - protein, 309 aa, Thermochaetoides thermophila
MRSTPVLRTALAAALPFTVLAADGKSTRYWDCCKPSCSWPGKAAVSQPVFACDRNFNRIYDFGAKSGCEGGPAYSCADQTPWAVNDQFSYGFAATNIAGGNEASWCCACYKLTFTSGPVAGKVMVVQSTSTGGDLGNNHFDLAIPGGGVGIFDGCTPQFGGLPGERYGGISSRSQCDSFPDALKPGCYWRFDWFLNADNPNFTFERVQCPSELVARTGCKRNDDGNYPVFTPPSGDSPSSSSAAPTSTSTSQQPQQPTSSSSQASVPTSNPGGCTSQKWAQCGGIGFTGCTTCVSGTTCTKLNDWYSQC

SEQ ID NO: 47379 - protein, 309 aa, Thermochaetoides thermophila
MRSTPVLRTALAAALPFTVLAADGKSTRYWDCCKPSCSWPGKAAVSQPVFACDRNFNRIYDFGAKSGCEGGPAYSCADQTPWAVNDQFSYGFAATNIAGGNEASWCCACYKLTFTSGPVAGKVMVVQSTSTGGDLGNNHFDLNIPGGGVGIFDGCTPQFGGLPGERYGGISSRSQCDSFPDALKPGCYWRFDWFLNADNPNFTFERVQCPSELVXRTGCKRNDDGNYPVFTPPSGDSPSSSSAAPTSTSTSQQPQQPTSSSSQASVPTSNPGGCTSQKWAQCGGIGFTGCTTCVSGTTCTKLNDWYSQC

SEQ ID NO: 47380 - protein, 309 aa, Thermochaetoides thermophila
MRSTPVLRTALAAALPFTVLAADGKSTRYWDCCKPSCSWPGKAAVSQPVFACDRNFNRIYDFGAKSGCEGGPAYSCADQTPWAVNDQFSYGFAATNIAGGNEASWCCACYKLTFTSGPVAGKVMVVQSTSTGGDLGNNHFDLNIPGGGVGIFDGCTSQFGGLPGERYGGISSRSQCDSFPDALKPGCYWRFDWFLNADNPNFTFERVQCPSELVARTGCKRNDDGNYPVFTPPSGDSPSSSSAAPTSTSTSQQPQQPTSSSSQASVPTSNPGGCTSQKWAQCGGIGFTGCTTCVSGTTCTKLNDWYSQC

SEQ ID NO: 47381 - protein, 309 aa, Thermochaetoides thermophila
MRSTPVLRTALAAALPFTVLAADGKSTRYWDCCKPSCSWPGKAAVSQPVFACDRNFNRIYDFGAKSGCEGGPAYSCADQTPWAVNDQFSYGFAATNIAGGNEASWCCACYKLTFTSGPVAGKVMVVQSTSTGGDLGNNHFDLNIPGGGVGIFDGCTPQFGGLPGERYGGISSRSQCDSFPDALKPGCYWRFDWFLNADNPNFTFERVQCPSELVARTGCKRNDDGNYPVFTPPSGDSPSSSSAAPTSTSTSQQPQQPTSSSSQASVPTSNPGGCTSQKWAQCGGIGFTGCTTCVSGTTCTQLNDWYSQC

SEQ ID NO: 47382 - protein, 309 aa, Thermochaetoides thermophila
MRSTPVLRTALAAALPFTVLAADGKSTRYWDCCKPSCSWPGKAAVSQPVFACDRNFNRIYDFGAKSGCEGGPAYSCADQTPWAVNDQFSYGFAATNIAGGNEASWCCACYKLTFTSGPVAGKVMVVQSTSTGGDLGNNHFDLNIPGGGVGIFDGCTPQFGGLPGERYGGISSRSQCDSFPDALKPGCYWRFDWFLNADNPNFTFERVQCPSELVARTGCKRNDDGNYPVFTPPSGDSPSSSSAAPTSTSTSQQPQQPTSSSSQASVPTSNPGGCTSQKWXQCGGIGFTGCTTCVSGTTCTKLNDWYSQC

SEQ ID NO: 47383 - protein, 309 aa, Thermochaetoides thermophila
MRSTPVLRTALAAALPFTVLAADGKSTRYWDCCKPSCSWPGKAAVSQPVFACDRNFNRIYDFGAKSGCEGGPAYSCADQTPWAVNDQFSYGFAATNIAGGNEASWCCACYKLTFTSGPVAGKVMVVQSTSTGGDLGNNHFDLNIPGGGVGIFDGCTPQFGGLPGERYGGISSRSQCDSFPDALKPGCYWRFDWFLNADNPNFTFERVQCPSELVARTGCKRNDDGNYPVFTPPSGDSPSSSSAAPTSTSTSQQPQQPTSSSSQASVPTSNPGGCTSQKWAQCGGIGFTGCTTCVSGTTCTKLSDWYSQC

SEQ ID NO: 47384 - protein, 309 aa, Thermochaetoides thermophila
MRSTPVLRTALAAALPFTVLAADGKSTRYWDCCKPSCSWPGKAAVSQPVFACDRNFNRIYDFGAESGCEGGPAYSCADQTPWAVNDQFSYGFAATNIAGGNEASWCCACYKLTFTSGPVAGKVMVVQSTSTGGDLGNNHFDLNIPGGGVGIFDGCTPQFGGLPGERYGGISSRSQCDSFPDALKPGCYWRFDWFLNADNPNFTFERVQCPSELVARTGCKRNDDGNYPVFTPPSGDSPSSSSAAPTSTSTSQQPQQPTSSSSQASVPTSNPGGCTSQKWAQCGGIGFTGCTTCVSGTTCTKLNDWYSQC

SEQ ID NO: 47385 - protein, 309 aa, Thermochaetoides thermophila
MRSTPVLRTALAAALPFTVLAADGKSTRYWDCCKPSCSWPGKAAVSQPVFACDRNFNRIYDFGAKSGCEGGPAYSCADQTPWAVNDQLSYGFAATNIAGGNEASWCCACYKLTFTSGPVAGKVMVVQSTSTGGDLGNNHFDLNIPGGGVGIFDGCTPQFGGLPGERYGGISSRSQCDSFPDALKPGCYWRFDWFLNADNPNFTFERVQCPSELVARTGCKRNDDGNYPVFTPPSGDSPSSSSAAPTSTSTSQQPQQPTSSSSQASVPTSNPGGCTSQKWAQCGGIGFTGCTTCVSGTTCTKLNDWYSQC

SEQ ID NO: 47386 - protein, 309 aa, Thermochaetoides thermophila
MRSTPVLRTALAAALPFTVLAADGKSTRYWDCCKPSCSWPGKAAVSQPVFACDRNFNRIYDFGAKSGCEGGPAYSCADQTPWAVNDQFSYGFAATNIAGGNEASWCCACYKLTFTSGPVAGKVMVVQSTSTGGDLGNNHFDINIPGGGVGIFDGCTPQFGGLPGERYGGISSRSQCDSFPDALKPGCYWRFDWFLNADNPNFTFERVQCPSELVARTGCKRNDDGNYPVFTPPSGDSPSSSSAAPTSTSTSQQPQQPTSSSSQASVPTSNPGGCTSQKWAQCGGIGFTGCTTCVSGTTCTKLNDWYSQC

SEQ ID NO: 47387 - protein, 309 aa, Thermochaetoides thermophila
MRSTPVLRTALAAALPFTVLAADGKSTRYWDCCKPSCSWPGKAAVSQPVFACDRNFNRIYDFGAKSGCEGGPAYSCADQTPWAVNDQFSYGFAATNIAGGNEASWCCACYKLTFTSGPVAGKVMVVQSTSTGGDLGNNHFDLNIPGGGVGIFDGCTPQFGGLPGERYGGISSRSQCDSFPDALKPGCYWRFDWFLNADNPNFTFERVQCPSELVARTGCKRNDDGNYPVFTPPSGDSPSSSSAAPTSTSTSQQPQQPTSSSSQASVPTSNPGGCTSQKWAQCGGIGFTGCTTCVSGTTCTSLNDWYSQC

SEQ ID NO: 47388 - protein, 309 aa, Thermochaetoides thermophila
MRSTPVLRTALAAALPFTVLAADGKSTRYWDCCKPSCSWPGKAAVSQPVFACDRNFNRIYDFGAKSGCEGGPAYSCADQTPWAVNDQFSYGFAATNIAGGNEASWCCACYKLTFTSGPVAGKVMVVQSTSTGGDLGNNHFDLNIPGGGVGIFDGCTPQFGGLPGERYGGISSRSQCDSFPDALKPGCYWRFDWFLNADNPNFTFERVQCPSELVARTGCKRNDDGNYPVFTPPSGDSPSSSSAAPTSTSTSQQPQQPTSSSSQASVPTSNPGGCTSQKWAQCGGIGFTGCTTCVSNTTCTKLNDWYSQC

SEQ ID NO: 47389 - protein, 309 aa, Thermochaetoides thermophila
MRSTPVLRTALAAALPFTVLAADGKSTRYWDCCKPSCSWPGKAAVSQPVFACDRNFNRIYDFGVKSGCEGGPAYSCADQTPWAVNDQFSYGFAATNIAGGNEASWCCACYKLTFTSGPVAGKVMVVQSTSTGGDLGNNHFDLNIPGGGVGIFDGCTPQFGGLPGERYGGISSRSQCDSFPDALKPGCYWRFDWFLNADNPNFTFERVQCPSELVARTGCKRNDDGNYPVFTPPSGDSPSSSSAAPTSTSTSQQPQQPTSSSSQASVPTSNPGGCTSQKWAQCGGIGFTGCTTCVSGTTCTKLNDWYSQC

SEQ ID NO: 47390 - protein, 309 aa, Thermochaetoides thermophila
MRSTPVLRTALAAALPFTVLAADGKSTRYWDCCKPSCSWPGKAAVSQPVFACDRNFNRIYDFGAKSGCEGGPAYSCADQTPWAVNDQFSYGFAATNIAGGNEASWCCACYKLTFTSGPVAGKVMVVQSTSTGGDLGNNHFDLNIPGGGVGIFDGCTPQFGGLPGERYGGISSRSQCDSFPDALKPGCYWRFDWFLNADNPNFTFERVQCPSELVARTGCKRNDDGNYPVFTPPSGDSPSTSSAAPTSTSTSQQPQQPTSSSSQASVPTSNPGGCTSQKWAQCGGIGFTGCTTCVSGTTCTKLNDWYSQC

SEQ ID NO: 47391 - protein, 309 aa, Thermochaetoides thermophila
MRSTPVLRTALAAALPFTVLAADGKSTRYWDCCKPSCSWPGKAAVSQPVFACDRNFNRIYDFGAKSGCEGGPAYSCADQTPWAVNDQFSYGFAATNIAGGNEASWCCACYKLTFTSGPVAGKVMVVQSTSTGGDLGNNHFDLNIPGGGVGIFDGCTPQFGGLPGERYGGISSRSQCDSFPDALKPGCYWRFDWFLNADNPNFTFERVQCPSELVARTGCKRNDDGNYPVFTPPSGDSPSSSSAAPTSTSTSQQPQQPTSSSSQASVPTSNPGGCTSQKWAQCGGIGFTGCTTCVSGTLCTKLNDWYSQC

SEQ ID NO: 47392 - protein, 309 aa, Thermochaetoides thermophila
MRSTPVLRTALAAALPFTVLAADGKSTRYWDCCKPSCSWPGKAAVSQPVFACDRNFNRIYDFGAKSGCEGGPAYSCADQTPWAVNDQFSYGFAATNIAGGNEASWCCACYKLTFTSGPVAGKVMVVQSTSTGGDLGNNHFDLNIPGGGVGIFDGCTPQFGGLPGERYGGISSRSQCDSFPDALKPGCYWRFDWFLNADNPNFTFERVQCPSELVARTGCKRNDDGNYPVFTPPSGDSPSSSSAAPTSTSTSQQPQQPTSSSSQASVPTSNPGGCTSQKWAQCGGIGFTGCTTCVSGTTCTKLNDRYSQC

SEQ ID NO: 47393 - protein, 309 aa, Thermochaetoides thermophila
MRSTPVLRTALAAALPFTVLAADGKSTRYWDCCKPSCSWPGKAAVSQPVFACDRNFNRIYDFGAKSGCEGGPAYSCADQTPWAVNDQFSYGFAATNIAGGNEASWCCACYKLTFTSGPVAGKVMVVQSTSTGGDLGNNHFDLNIPGGGVGIFDGCTPQFGGLPGERYGGISSRSQCDSFPDALKPGCYWRFDWFLNADNPNFTFERVQCPSELVARTGCKRNDDGNYPVFTPPSGDSPSSSSAAPTSTSTSQQPQQPTSSSSQASVPTSNPGGCTSQKWAQCGGIGFTGCTTCVSGTTCTKLNXWYSQC

SEQ ID NO: 47394 - protein, 309 aa, Thermochaetoides thermophila
MRSTPVLRTALAAALPFTVLAADGKSTRYWDCCKPSCSWPGKAAVSQPVFACDRNFNRIYDFGAKSGCEGGPAYSCADQTPWAVNDQFSYGFAATNIAGGNEASWCCACYKLTFTSGPVAGKVMVVQSTSTGGDLGNNHFDLNIPGGGVGIFDGCTPQFGGLPGERYGGISSRSQCDSFPDALKPGCYWRFDWFLNADNPNFTFERVQCPSELVARTGCKRNDDGNYPVFTPPSGDSPSSSSAAPTSTSTSQQPQQPTSSSSQASVPTSNPGGCTSQKXAQCGGIGFTGCTTCVSGTTCTKLNDWYSQC

SEQ ID NO: 47395 - protein, 309 aa, Thermochaetoides thermophila
MRSTPVLRTALAAALPFTVLAADGKSTRYWDCCKPSCSWPGKAAVSQPVFACDRNFNRIYDFGAKSGCEGGPAYSCADQTPWAVNDQFSYGFAATNIAGGNEASWCCACYKLTFTSGPVAGKVMVVQSTSTGGDLGNNHFDLNIPGGGVGIFNGCTPQFGGLPGERYGGISSRSQCDSFPDALKPGCYWRFDWFLNADNPNFTFERVQCPSELVARTGCKRNDDGNYPVFTPPSGDSPSSSSAAPTSTSTSQQPQQPTSSSSQASVPTSNPGGCTSQKWAQCGGIGFTGCTTCVSGTTCTKLNDWYSQC

SEQ ID NO: 47396 - protein, 309 aa, Thermochaetoides thermophila
MRSTPVLRTALAAALPFTVLAANGKSTRYWDCCKPSCSWPGKAAVSQPVFACDRNFNRIYDFGAKSGCEGGPAYSCADQTPWAVNDQFSYGFAATNIAGGNEASWCCACYKLTFTSGPVAGKVMVVQSTSTGGDLGNNHFDLNIPGGGVGIFDGCTPQFGGLPGERYGGISSRSQCDSFPDALKPGCYWRFDWFLNADNPNFTFERVQCPSELVARTGCKRNDDGNYPVFTPPSGDSPSSSSAAPTSTSTSQQPQQPTSSSSQASVPTSNPGGCTSQKWAQCGGIGFTGCTTCVSGTTCTKLNDWYSQC

SEQ ID NO: 47397 - protein, 309 aa, Thermochaetoides thermophila
MRSTPVLRTALAAALPFTVLAADGKSTRYWDCCKPSCSWPGKAAVSQPVFACDRNFNRIYDFGAKSGCEGGPAYSCADQTPWAVNDQYSYGFAATNIAGGNEASWCCACYKLTFTSGPVAGKVMVVQSTSTGGDLGNNHFDLNIPGGGVGIFDGCTPQFGGLPGERYGGISSRSQCDSFPDALKPGCYWRFDWFLNADNPNFTFERVQCPSELVARTGCKRNDDGNYPVFTPPSGDSPSSSSAAPTSTSTSQQPQQPTSSSSQASVPTSNPGGCTSQKWAQCGGIGFTGCTTCVSGTTCTKLNDWYSQC

SEQ ID NO: 47398 - protein, 309 aa, Thermochaetoides thermophila
MRSTPVLRTALAAALPFTVLAADGKSTRYWDCCKPSCSWPGKAAVSQPVFACDRNFNRIYDFGTKSGCEGGPAYSCADQTPWAVNDQFSYGFAATNIAGGNEASWCCACYKLTFTSGPVAGKVMVVQSTSTGGDLGNNHFDLNIPGGGVGIFDGCTPQFGGLPGERYGGISSRSQCDSFPDALKPGCYWRFDWFLNADNPNFTFERVQCPSELVARTGCKRNDDGNYPVFTPPSGDSPSSSSAAPTSTSTSQQPQQPTSSSSQASVPTSNPGGCTSQKWAQCGGIGFTGCTTCVSGTTCTKLNDWYSQC

SEQ ID NO: 47399 - protein, 309 aa, Thermochaetoides thermophila
MRSTPVLRTALAAALPFTVLAADGKSTRYWDCCKPSCSWPGKAAVSQPVFACDRNFNRIYDFGAKSGCEGGPAYSCADQTPWAVNDQFSYGFAATNIAGGNEASWCCACYKLTFTSGPVAGKVMVVQSTSTGGDLGNNHFDLNIPGGGVGIFDGCTPQFGGLPGERYGGISSRSQCDSFPDALKPGCYWRFDWFLNADNPNFTFERVQCPSELVARTGCKRNDDGNYPVFTPPSGDNPSSSSAAPTSTSTSQQPQQPTSSSSQASVPTSNPGGCTSQKWAQCGGIGFTGCTTCVSGTTCTKLNDWYSQC

SEQ ID NO: 47400 - protein, 309 aa, Thermochaetoides thermophila
MRSTPVLRTALAAALPFTVLAADGKSTRYWDCCKPSCSWPGKAAVSQPVFACDRNFNRIYDFGAKSGCEGGPAYSCADQTPWAVNDQFSYGFAATNIAGGNEASWCCACYKLTFTSGPVAGKVMVVQSTSTGGDLGNNHFDLNIPGGGVGIFDGCTPQFGGLPGERYGGISSRSQCDSFPDALKPGCYWRFDWFLNADNPNFTFERVQCPSELVARTGCKRNDDGNYPVFTPPSGDSPSSSSAAPTSTSTSQQPQQPTSSSSQASVPTSNPGGCTSQKWAQCGGIGFTGCTECVSGTTCTKLNDWYSQC

SEQ ID NO: 47401 - protein, 309 aa, Thermochaetoides thermophila
MRSTPVLRTALAAALPFTVLAADGKSTRYWDCCKPSCSWPGKAAVSQPVFACDRNFNRIYDFGAKSGCEGGPAYSCADQTPWAVNDQFSYGFAATNIAGGNEASWCCACYKLTFTSGPVAGKVMVVQSTSTGGDLGNNHFDLNIPGGGVGIFDGCTPQFGGSPGERYGGISSRSQCDSFPDALKPGCYWRFDWFLNADNPNFTFERVQCPSELVARTGCKRNDDGNYPVFTPPSGDSPSSSSAAPTSTSTSQQPQQPTSSSSQASVPTSNPGGCTSQKWAQCGGIGFTGCTTCVSGTTCTKLNDWYSQC

SEQ ID NO: 47402 - protein, 309 aa, Thermochaetoides thermophila
MRSTPVLRTALAAALPFTVLAADGKSTRYWDCCKPSCSWPGKAAVSQPVFACDRNFNRIYDFGAKSGCEGGPAYSCADQTPWAVNDQFSYGFAATNIAGGNEASWCCACYKLTFTSGPVAGKVMVVQSTSTGGDLGNNHFDLNIPGGGVGIFDGCTPQFGGLPGERYGGISSRSQCDSFPDALKPGCYWRFDWFLNADNPNFTFERVQCPSELVARTGCKRNDDGNYPVFTPPSGDSPSSSSAAPTSTSTSQQPQQPTSSSSQASVPTSNPGGCTSQKWAQCGGIGFTGCTTCVSGTTCTKLNDWYSHC

SEQ ID NO: 47403 - protein, 309 aa, Thermochaetoides thermophila
MRSTPVLRTALAAALPFTVLAADGKSTRYWDCCKPSCSWPGKAAVSQPVFACDRNFNRIYDFGAKSGCEGGPAYSCADQTPWAVNDQFSYGFAATNIAGGNEASWCCACYKLTFTSGPVAGKVMVVQSTSTGGDLGNNHFDLNIPGGGVGIFDGCTPQFGGLPGERYGGISSRSQCDSFPDALKPGCYWRFDWFLNADNPNFTFERVQCPSELVARTGCKRNDDGNYPVFTPPSGDSPSSSSAAPTSTSTSQQPQQPTSSSSQASVPTSNPGGCTSQKWAQCGGIGFTGCTTCVSTTTCTKLNDWYSQC

SEQ ID NO: 47404 - protein, 309 aa, Thermochaetoides thermophila
MRSTPVLRTALAAALPFTVLAAFGKSTRYWDCCKPSCSWPGKAAVSQPVFACDRNFNRIYDFGAKSGCEGGPAYSCADQTPWAVNDQFSYGFAATNIAGGNEASWCCACYKLTFTSGPVAGKVMVVQSTSTGGDLGNNHFDLNIPGGGVGIFDGCTPQFGGLPGERYGGISSRSQCDSFPDALKPGCYWRFDWFLNADNPNFTFERVQCPSELVARTGCKRNDDGNYPVFTPPSGDSPSSSSAAPTSTSTSQQPQQPTSSSSQASVPTSNPGGCTSQKWAQCGGIGFTGCTTCVSGTTCTKLNDWYSQC

SEQ ID NO: 47405 - protein, 309 aa, Thermochaetoides thermophila
MRSTPVLRTALAAALPFTVLAADGKSTRYWDCCKPSCSWPGKAAVSQPVFACDRNFNRIYDFGAKSGCEGGPAYSCADQTPWAVNDQFSYGFAATNIAGGNEASWCCACYKLTFTSGPVAGKVMVVQSTSTGGDLGNNHFDLNIPGGGVGIFDGCTPQFGGLPGERYGGISSRSQCDSFPDALKPGCYWRFDWFLNADNPNFTFERVQCPSELVARTGCKRNDDGSYPVFTPPSGDSPSSSSAAPTSTSTSQQPQQPTSSSSQASVPTSNPGGCTSQKWAQCGGIGFTGCTTCVSGTTCTKLNDWYSQC

SEQ ID NO: 47406 - protein, 309 aa, Thermochaetoides thermophila
MRSTPVLRTALAAALPFTVLAADGKSTRYWDCCKPSCSWPGKAAVSQPVFACDRNFNRIYDFGAKSGCEGGPAYSCADQTPWAVNDQFSYGFAATNIAGGNEASWCCACYKLTFTSGPVAGKVMVVQSTSTGGDLGNNHFDLSIPGGGVGIFDGCTPQFGGLPGERYGGISSRSQCDSFPDALKPGCYWRFDWFLNADNPNFTFERVQCPSELVARTGCKRNDDGNYPVFTPPSGDSPSSSSAAPTSTSTSQQPQQPTSSSSQASVPTSNPGGCTSQKWAQCGGIGFTGCTTCVSGTTCTKLNDWYSQC

SEQ ID NO: 47407 - protein, 309 aa, Thermochaetoides thermophila
MRSTPVLRTALAAALPFTVLAADGKSTRYWDCCKPSCSWPGKAAVSQPVFACDRNFNRIYDFGAKSGCEGGPAYSCADQTPWAVNDQFSYGFAATNIAGGNEASWCCACYKLTFTSGPVAGKVMVVQSTSTGGDLGNNHFDLNIPGGGVGIFDGCTPQFGGLPGERYGGISSRSQCDSFPDALKPGCYWRFDWFLNADNPNFTFERVQCPSELVARTGCKRNDDGNYPVFTPPSGDSPSSSSAAPTSTSTSQQPQQPTGSSSQASVPTSNPGGCTSQKWAQCGGIGFTGCTTCVSGTTCTKLNDWYSQC

SEQ ID NO: 47408 - protein, 309 aa, Thermochaetoides thermophila
MRSTPVLRTALAAALPFTVLAADGKSTRYWDCCKPSCSWPGKAAVSQPVFACDRNFNRIYDFGAKSGCEGGPAYSCADQTPWAVNDQFSYGFAATNIAGGNEASWCCACYKLTFTSGPVAGKVMVVQSTSTGGDLGNNHFDLNIPGGGVGIFDGCTPQFGGLPGERYGGISSRSQCDSFPDALKPGCYWRFDWFLNADNPNFTFERVQCPSELVARTGCKRNDDGNYPVFTPPSGDSPSSSSAAPTSTSTSQQPQQPTSSSSQASVPTSNPGGCTSQKWAQCGGIGFTGCTTCVSGTTCPKLNDWYSQC

SEQ ID NO: 47409 - protein, 309 aa, Thermochaetoides thermophila
MRSTPVLRTALAAALPFTVLAADGKSTRYWDCCKPSCSWPGKAAVSQPVFACDRNFNRIYDFGAKSGCEGGPAYSCADQTPWAVNDQFSYGFAATNIAGGNEASWCCACYKLTFTSGPVAGKVMVVQSTSTGGDLGNNHFDLNIPGGGVGIFDGCTPQFGGLPGERYGGISSRSQCDSFPDALKPGCQWRFDWFLNADNPNFTFERVQCPSELVARTGCKRNDDGNYPVFTPPSGDSPSSSSAAPTSTSTSQQPQQPTSSSSQASVPTSNPGGCTSQKWAQCGGIGFTGCTTCVSGTTCTKLNDWYSQC

SEQ ID NO: 47410 - protein, 309 aa, Thermochaetoides thermophila
MRSTPVLRTALAAALPFTVLAADGKSTRYWDCCKPSCSWPGKAAVSQPVFACDRNFNRLYDFGAKSGCEGGPAYSCADQTPWAVNDQFSYGFAATNIAGGNEASWCCACYKLTFTSGPVAGKVMVVQSTSTGGDLGNNHFDLNIPGGGVGIFDGCTPQFGGLPGERYGGISSRSQCDSFPDALKPGCYWRFDWFLNADNPNFTFERVQCPSELVARTGCKRNDDGNYPVFTPPSGDSPSSSSAAPTSTSTSQQPQQPTSSSSQASVPTSNPGGCTSQKWAQCGGIGFTGCTTCVSGTTCTKLNDWYSQC

SEQ ID NO: 47411 - protein, 309 aa, Thermochaetoides thermophila
MRSTPVLRTALAAALPFTVLAADGKSTRYWDCCKPSCSWPGKAAVSQPVYACDRNFNRIYDFGAKSGCEGGPAYSCADQTPWAVNDQFSYGFAATNIAGGNEASWCCACYKLTFTSGPVAGKVMVVQSTSTGGDLGNNHFDLNIPGGGVGIFDGCTPQFGGLPGERYGGISSRSQCDSFPDALKPGCYWRFDWFLNADNPNFTFERVQCPSELVARTGCKRNDDGNYPVFTPPSGDSPSSSSAAPTSTSTSQQPQQPTSSSSQASVPTSNPGGCTSQKWAQCGGIGFTGCTTCVSGTTCTKLNDWYSQC

SEQ ID NO: 47412 - protein, 309 aa, Thermochaetoides thermophila
MRSTPVLRTALAAALPFTVLAADGKSTRYWDCCKPSCSWPGKAAVSQPVFACDRNFNRIYDFGAKSGCEGGPAYSCADQTPWAVNDQFSYGFAATNIAGGNEASWCCACYKLTFTSGPVAGKVMVVQSTSTGGDLGNNHFDLNIPGGGVGIFDGCTPQFGGLPGERYGGISSRSQCDSFPDALKPGCYWRFDWFLNADNPNFTFERVQCPSELVTRTGCKRNDDGNYPVFTPPSGDSPSSSSAAPTSTSTSQQPQQPTSSSSQASVPTSNPGGCTSQKWAQCGGIGFTGCTTCVSGTTCTKLNDWYSQC

SEQ ID NO: 47413 - protein, 309 aa, Thermochaetoides thermophila
MRSTPVLRTALAAALPFTVLAADGKSTRYWDCCKPSCSWPGKAAVSQPVFACDRNFNRIYDFGAKSGCEGGPAYSCADQTPWAVNDQFSYGFAATNIAGGNEASWCCACYKLTFTSGPVAGKVMVVQSTSTGGDLGNNHFDLNIPGGGVGIFDGCTPQFGGLPGERYGGISSRSQCDSFPDALKPGCYWRFDWFLNADNPNFTFERVQCPSELVASTGCKRNDDGNYPVFTPPSGDSPSSSSAAPTSTSTSQQPQQPTSSSSQASVPTSNPGGCTSQKWAQCGGIGFTGCTTCVSGTTCTKLNDWYSQC

SEQ ID NO: 47414 - protein, 309 aa, Thermochaetoides thermophila
MRSTPVLRTALAAALPFTVLAADGKSTRYWDCCKPSCSWPGKAAVSQPVFACDRNFNRIYDFGAKSGCEGGPAYSCADQTPWAVNDQFSYGFAATNIAGGNEASWCCACYKLTFTSGPVAGKVMVVQSTSTGGDLGNNHFDLNIPGGGVGIFDGCTPQFGGLPGERYGGISSRSQCDSFPDALKPGCYWRFDWFLNADNPNFTFERVQCPSELVARTGCKRNDDGNYPVFTPPSGDSPSSSSAAPTSTSTSQQPQQPTSSSSQASVPTSNPGGCTSQKWAQCGGIGFTGCTTCVSXTTCTKLNDWYSQC

SEQ ID NO: 47415 - protein, 309 aa, Thermochaetoides thermophila
MRSTPVLRTALAAALPFTVLAADGKSTRYWDCCKPSCSWPGKAAVSQPVFACDRNFNRIYDFGAKSGCEGGPAYSCADQTPWAVNDQFSYGFAATNIAGGNEASWCCACYKLTFTSGPVAGKVMVVQSTSTGGDLGNNHFDLNIPGGGVGIFDGCTPQFGGLPGERYGGISSRSQCDSFPDALKPGCYWRFDWFLNADNPNFTFERVQCPSELVARTGCKRNDDGNYPVFTPPSGDSPSSSSAAPTSTSTSQQPQQPTSSSSQASVPTSNPGGCTSQKWAQCGGIGFTGCTTCVSGTTXTKLNDWYSQC

SEQ ID NO: 47416 - protein, 309 aa, Thermochaetoides thermophila
MRSTPVLRTALAAALPFTVLAADGKSTRYWDCCKPSCSWPGKAAVSQPVFACDRNFNRIYDFGAKSGCEGGPAYSCADQTPWAVNDQFSYGFAATNIAGGNEASWCCACYKLTFTSGPVAGKVMVVQSTSTGGDLGNNHFDLNIPGGGVGIFDGCTPQFGGLPGERYGGISSRSQCDSFPAALKPGCYWRFDWFLNADNPNFTFERVQCPSELVARTGCKRNDDGNYPVFTPPSGDSPSSSSAAPTSTSTSQQPQQPTSSSSQASVPTSNPGGCTSQKWAQCGGIGFTGCTTCVSGTTCTKLNDWYSQC

SEQ ID NO: 47417 - protein, 309 aa, Thermochaetoides thermophila
MRSTPVLRTALAAALPFTVLAADGKSTRYWDCCKPSCSWPGKAAVSQPVFACDRNFNRIYDFGAKSGCEGGPAYSCADQTPWAVNDQFSYGFAATNIAGGNEASWCCACYKLTFTSGPVAGKVMVVQSTSTGGDLGNNHFDLNIPGGGVGIFDGCTPQFGGLPGERYGGISSRSQCDSFPDALKPGCYWRFDWFLNADNPNFTFERVQCPSELVARTGCKRNDDGNYPVFTPPSGDSPSSSSAAPTSTSTSQQPQQPTSSSSQASVPTSNPGGCTSQKRAQCGGIGFTGCTTCVSGTTCTKLNDWYSQC

SEQ ID NO: 47418 - protein, 309 aa, Thermochaetoides thermophila
MRSTPVLRTALAAALPFTVLAADGKSTRYWDCCKPSCSWPGKAAVSQPVFACDRNFNRIYDFGAKSGCEGGPAYSCADQTPWAVNDQFSYGFAATNIAGGNEASWCCACYKLTFTSGPVAGKVMVVQSTSTGGDLGNNHFDLNIPGGGVGIFDGCTPQFGGLPGERYGGISSRSQCDSFPDPLKPGCYWRFDWFLNADNPNFTFERVQCPSELVARTGCKRNDDGNYPVFTPPSGDSPSSSSAAPTSTSTSQQPQQPTSSSSQASVPTSNPGGCTSQKWAQCGGIGFTGCTTCVSGTTCTKLNDWYSQC

SEQ ID NO: 47419 - protein, 309 aa, Thermochaetoides thermophila
MRSTPVLRTALAAALPFTVLAADGKSTRYWDCCKPSCSWPGKAAVSQPVFACDRNFNRIYDFGAKSGCEGGPAYSCADQTPWAVNDQFSYGFAATNIAGGNEASWCCACYKLTFTSGPVAGKVMVVQSTSTGGDLGNNHFDLNIPGGGVGIFDGCTPQFGGLPGERYGGISSRSQCDSFPDALKPGCYWRFDWFLNADNPNFTFERVQCPSELVARTGCKRNDDGNYPVFTPPSGDSPSSSSAAPTSTSTSQQPQQPGSSSSQASVPTSNPGGCTSQKWAQCGGIGFTGCTTCVSGTTCTKLNDWYSQC

SEQ ID NO: 47420 - protein, 309 aa, Thermochaetoides thermophila
MRSTPVLRTALAAALPFTVLAADGKSTRYWDCCKPSCSWPGKAAVSQPVFACDRNFNRIYDFGAKSGCEGGPAYSCADQTPWAVNDQFSYGFAATNIAGGNEASWCCACYKLTFTSGPVAGKVMVVQSTSTGGDLGNNHFDLNIPGGGVGIFDGCTPQFGGLPGERYGGISSRSQCDSFPDALKPGCYWRFDWFLNADNPNFTFERVQCPSELVARTGCKRNDDSNYPVFTPPSGDSPSSSSAAPTSTSTSQQPQQPTSSSSQASVPTSNPGGCTSQKWAQCGGIGFTGCTTCVSGTTCTKLNDWYSQC

SEQ ID NO: 47421 - protein, 309 aa, Thermochaetoides thermophila
MRSTPVLRTALAAALPFTVLAADGKSTRYWDCCKPSCSWPGKAAVSQPVFACDRNFNRIYDFGLKSGCEGGPAYSCADQTPWAVNDQFSYGFAATNIAGGNEASWCCACYKLTFTSGPVAGKVMVVQSTSTGGDLGNNHFDLNIPGGGVGIFDGCTPQFGGLPGERYGGISSRSQCDSFPDALKPGCYWRFDWFLNADNPNFTFERVQCPSELVARTGCKRNDDGNYPVFTPPSGDSPSSSSAAPTSTSTSQQPQQPTSSSSQASVPTSNPGGCTSQKWAQCGGIGFTGCTTCVSGTTCTKLNDWYSQC

SEQ ID NO: 47422 - protein, 309 aa, Thermochaetoides thermophila
MRSTPVLRTALAAALPFTVLAAEGKSTRYWDCCKPSCSWPGKAAVSQPVFACDRNFNRIYDFGAKSGCEGGPAYSCADQTPWAVNDQFSYGFAATNIAGGNEASWCCACYKLTFTSGPVAGKVMVVQSTSTGGDLGNNHFDLNIPGGGVGIFDGCTPQFGGLPGERYGGISSRSQCDSFPDALKPGCYWRFDWFLNADNPNFTFERVQCPSELVARTGCKRNDDGNYPVFTPPSGDSPSSSSAAPTSTSTSQQPQQPTSSSSQASVPTSNPGGCTSQKWAQCGGIGFTGCTTCVSGTTCTKLNDWYSQC

SEQ ID NO: 47423 - protein, 309 aa, Thermochaetoides thermophila
MRSTPVLRTALAAALPFTVLAADGKSTRYWDCCKPSCSWPGKAAVSQPVFACDRNFNRIYDFGAKSGCEGGPAYSCADQTPWAVNDQFSYGFAATNIAGGNEASWCCACYKLTFTSGPVAGKVMVVQSTSTGGDLGNNHFDLNMPGGGVGIFDGCTPQFGGLPGERYGGISSRSQCDSFPDALKPGCYWRFDWFLNADNPNFTFERVQCPSELVARTGCKRNDDGNYPVFTPPSGDSPSSSSAAPTSTSTSQQPQQPTSSSSQASVPTSNPGGCTSQKWAQCGGIGFTGCTTCVSGTTCTKLNDWYSQC

SEQ ID NO: 47424 - protein, 309 aa, Thermochaetoides thermophila
MRSTPVLRTALAAALPFTVLAADGKSTRYWDCCKPSCSWPGKAAVSQPVFACDRNFNRIYDFGAKSGCEGGPAYSCADQTPWAVNDQFSYGFAATNIAGGNEASWCCACYKLTFTSGPVAGKVMVVQSTSTGGDLGNNHFDLNIPGGGVGIFDGCTPQFGGLPGERYGGISSRSQCDSFPDALKPGCYWRFDWFLNADNPNFTFERVQCPSEIVARTGCKRNDDGNYPVFTPPSGDSPSSSSAAPTSTSTSQQPQQPTSSSSQASVPTSNPGGCTSQKWAQCGGIGFTGCTTCVSGTTCTKLNDWYSQC

SEQ ID NO: 47425 - protein, 309 aa, Thermochaetoides thermophila
MRSTPVLRTALAAALPFTVLAADGKSTRYWDCCKPSCSWPGKAAVSQPVFACDRNFNRIYDFGAKSGCEGGPAYSCADQTPWAVNDQFSYGFAATNIAGGNEASWCCACYKLTFTSGPVAGKVMVVQSTSTGGDLGNNHFDLNIPGGGVGIFDGCTPQFGGLPGERYGGISSRSQCDSFPDALKPGCYWRFDWFLNADNPNFTFERVQCPSELVARTGCKRNDDGNYPVFTPPSGDSPSSSSAAPTSTSTSQQPQQPTSSSSQASVPTSNPGGCTSQKWAQCGGIGFTGCTTCVSGTECTKLNDWYSQC

SEQ ID NO: 47426 - protein, 309 aa, Thermochaetoides thermophila
MRSTPVLRTALAAALPFTVLAADGKSTRYWDCCKPSCSWPGKAAVSQPVFACDRNFNRIYDFGAKSGCEGGPAYTCADQTPWAVNDQFSYGFAATNIAGGNEASWCCACYKLTFTSGPVAGKVMVVQSTSTGGDLGNNHFDLNIPGGGVGIFDGCTPQFGGLPGERYGGISSRSQCDSFPDALKPGCYWRFDWFLNADNPNFTFERVQCPSELVARTGCKRNDDGNYPVFTPPSGDSPSSSSAAPTSTSTSQQPQQPTSSSSQASVPTSNPGGCTSQKWAQCGGIGFTGCTTCVSGTTCTKLNDWYSQC

SEQ ID NO: 47427 - protein, 309 aa, Thermochaetoides thermophila
MRSTPVLRTALAAALPFTVLAADGKSTRYWDCCKPSCSWPGKAAVSQPVFACDRNFNRIYDFGAKSGCEGGPAYSCADQTPWAVNDQFSYGFAATNIAGGNEASWCCACYKLTFTSGPVAGKVMVVQSTSTGGDLGNNHFDLNIPGGGVGIFDGCTPQFGGLPGERYGGISSRSQCDSFPDALKPGCYWRFDWFLNADNPNFTFERVQCPSELVARTGCKRNDDGNYPVFTPPSGDSPGSSSAAPTSTSTSQQPQQPTSSSSQASVPTSNPGGCTSQKWAQCGGIGFTGCTTCVSGTTCTKLNDWYSQC

SEQ ID NO: 47428 - protein, 309 aa, Thermochaetoides thermophila
MRSTPVLRTALAAALPFTVLAADGKSTRYWDCCKPSCSWPGKAAVSQPVFACDRNFNRIYDFGAKSGCEGGPAYSCADQTPWAVNDQFSYGFAATNIAGGNEASWCCACYKLTFTSGPVAGKVMVVQSTSTGGDLGNNHFDLNIPGGGVGIFDGCTPQFGGLPGERYGGISSRSQCDSFPDALKTGCYWRFDWFLNADNPNFTFERVQCPSELVARTGCKRNDDGNYPVFTPPSGDSPSSSSAAPTSTSTSQQPQQPTSSSSQASVPTSNPGGCTSQKWAQCGGIGFTGCTTCVSGTTCTKLNDWYSQC

SEQ ID NO: 47429 - protein, 309 aa, Thermochaetoides thermophila
MRSTPVLRTALAAALPFTVLAADGKSTRYWDCCKPSCSWPGKAAVSQPVFACDRNFNRIYDFGAKSGCEGGPAYSCADQTPWAVNDQFSYGFAATNIAGGNEASWCCACYKLTFTSGPVAGKVMVVQSTSTGGDLGNNHFDLNIPGGGVGIFDGCTPQFGGLPGERYGGISSRSQCDSFPDALKPGCYWRFDWFLNADNPNFTFERVQCPSELVARTGCKRNDDGNYPVFTPPSGDSPSSSSAAPTSTSTSQQPQQPTSSSSQASVPTSNPGGCTSQKSAQCGGIGFTGCTTCVSGTTCTKLNDWYSQC

SEQ ID NO: 47430 - protein, 309 aa, Thermochaetoides thermophila
MRSTPVLRTALAAALPFTVLAADGKSTRYWDCCKPSCSWPGKAAVSQPVFACDRNFNRIYDFGAKSGCEGGPAYSCADQTPWAVNDQFSYGFAATNIAGGNEASWCCACYKLTFTSGPVAGKVMVVQSTSTGGDLGNNHFDLNIPGGGVGIFDGCTPQFGGLPGERYGGISSRSQCDSFPDALKPGCYWRFDWFLNADNPNFTFERVQCPSELVARTGCKRNDDGNYPVFTPPSGDSPSSSSAAPTSTSTSQQPQQPTSSSSQASVPTSNPGGCTSQKWAQCGGIGFTGCTTCVSETTCTKLNDWYSQC

SEQ ID NO: 47431 - protein, 309 aa, Thermochaetoides thermophila
MRSTPVLRTALAAALPFTVLAADGKSTRYWDCCKPSCSWPGKAAVSQPVFACDRNFNRIYDFGAKSGCEGGPAYSCADQTPWAVNDQFSYGFAATNIAGGNEASWCCACYKLTFTSGPVAGKVMVVQSTSTGGDLGNNHFDLNIPGGGVGIFDGCTPQFGGLPGERYGGISSRSQCDSFPDALKPGCYWRFDWFLNADNPNFTFERVQCPSELVARTGCKRNDDGNYPVFTPPSGDSPSSSSAAPTSTSTSQQPQQPTSSSSQASVPTSNPGGCTSQKWAQCGGIGFTGCTTCVSGTTCQKLNDWYSQC

SEQ ID NO: 47432 - protein, 309 aa, Thermochaetoides thermophila
MRSTPVLRTALAAALPFTVLAADGKSTRYWDCCKPSCSWPGKAAVSQPVFACDRNFNRIYDFGAKSGCEGGPAYSCADQTPWAVNDQFSYGFAATNIAGGNEASWCCACYKLTFTSGPVAGKVMVVQSTSTGGDLGNNHFDLNIPGGGVGIFDGCTPQFGGLPGERYGGISSRSQCDSFPDALKPGCYWRFDWFLNADNPNFTFERVQCPSELVARTGCKRNDDGNYPVFTPPSGDSPSSSSAAPTSTSTSQQPQQPTSSSSQASVPTSNPGGCTSQKWAQCGGIGFTGCTTCVSGTTCTKLNDGYSQC

SEQ ID NO: 47433 - protein, 309 aa, Thermochaetoides thermophila
MRSTPVLRTALAAALPFTVLAADGKSTRYWDCCKPSCSWPGKAAVSQPVFACDRNFNRIYDFGAKSGCEGGPAYSCADQTPWAVNDQFSYGFAATNIAGGNEASWCCACYKLTFTSGPVAGKVMVVQSTSTGGDLGNNHFDLNIPGGGVGIFDGCTPQFGGLPGERYGGISSRSQCDSFPDALKPGCYWRFDWFLNADNPNFTFERVQCPSELVARTGCKRNDDGNYPVFTPPSGDSPSSSSAAPTSTSTSQQPQQPTSSSSQASVPTSNPGGCTSQKWAQCGGIGFTGSTTCVSGTTCTKLNDWYSQC

SEQ ID NO: 47434 - protein, 309 aa, Thermochaetoides thermophila
MRSTPVLRTALAAALPFTVLAAQGKSTRYWDCCKPSCSWPGKAAVSQPVFACDRNFNRIYDFGAKSGCEGGPAYSCADQTPWAVNDQFSYGFAATNIAGGNEASWCCACYKLTFTSGPVAGKVMVVQSTSTGGDLGNNHFDLNIPGGGVGIFDGCTPQFGGLPGERYGGISSRSQCDSFPDALKPGCYWRFDWFLNADNPNFTFERVQCPSELVARTGCKRNDDGNYPVFTPPSGDSPSSSSAAPTSTSTSQQPQQPTSSSSQASVPTSNPGGCTSQKWAQCGGIGFTGCTTCVSGTTCTKLNDWYSQC

SEQ ID NO: 47435 - protein, 309 aa, Thermochaetoides thermophila
MRSTPVLRTALAAALPFTVLAADGKSTRYWDCCKPSCSWPGKAAVSQPVFACDRNFNRIYDFGAKSGCEGGPAYSCADQTPWAVNDQFSYGFAATNIAGGNEASWCCACYKLTFTSGPVAGKVMVVQSTSTGGDLGNNHFDLNIPGGGVGIFDGCTPQFGGLPGERYGGISSRSQCDSFPDKLKPGCYWRFDWFLNADNPNFTFERVQCPSELVARTGCKRNDDGNYPVFTPPSGDSPSSSSAAPTSTSTSQQPQQPTSSSSQASVPTSNPGGCTSQKWAQCGGIGFTGCTTCVSGTTCTKLNDWYSQC

SEQ ID NO: 47436 - protein, 309 aa, Thermochaetoides thermophila
MRSTPVLRTALAAALPFTVLAADGKSTRYWDCCKPSCSWPGKAAVSQPVFACDRNFNRIYDFGAKSGCEGGPAYSCADQTPWAVNDQFSYGFAATNIAGGNEASWCCACYKLTFTSGPVAGKVMVVQSTSTGGDLGNNHFDLNIPGGGVGIFDGCTPQFGGLPGERYGGISSRSQCDSFPDALKPGCYWRFDWFLNADNPNFTFERVQCPSELVARTGCKRNDDGNYPVFTPPSGDSPSSSSAAPTSTSTSQQPQQPTSSSSQASVPTSNPGGCTSQKWAQCGGIGFTGCTTCVSATTCTKLNDWYSQC

SEQ ID NO: 47437 - protein, 309 aa, Thermochaetoides thermophila
MRSTPVLRTALAAALPFTVLAADGKSTRYWDCCKPSCSWPGKAAVSQPVFACDRNFNRIYDFGAKSGCEGGPAYSCADQTPWAVNDQFSYGFAATNIAGGNEASWCCACYKLTFTSGPVAGKVMVVQSTSTGGDLGNNHFDLNIPGGGVGIFDGCTPQFGGLPGERYGGISSRSQCDSFPDALKPGCYWRFDWFLNADNPNFTFERVQCPSELVARTGCKRNDDGNYPVFTPPSGDSPSSSSAAPTSTSTSQQPQQPTSSSSQASVPTSNPGGCTSQKWAQCGGIGFTGCTTCVSGTTCTKLEDWYSQC

SEQ ID NO: 47438 - protein, 309 aa, Thermochaetoides thermophila
MRSTPVLRTALAAALPFTVLAADGKSTRYWDCCKPSCSWPGKAAVSQPVFACDRNFNRIYDFGAKSGCEGGPAYSCADQTPWAVNDQFSYGFAATNIQGGNEASWCCACYKLTFTSGPVAGKVMVVQSTSTGGDLGNNHFDLNIPGGGVGIFDGCTPQFGGLPGERYGGISSRSQCDSFPDALKPGCYWRFDWFLNADNPNFTFERVQCPSELVARTGCKRNDDGNYPVFTPPSGDSPSSSSAAPTSTSTSQQPQQPTSSSSQASVPTSNPGGCTSQKWAQCGGIGFTGCTTCVSGTTCTKLNDWYSQC

SEQ ID NO: 47439 - protein, 309 aa, Thermochaetoides thermophila
MRSTPVLRTALAAALPFTVLAASGKSTRYWDCCKPSCSWPGKAAVSQPVFACDRNFNRIYDFGAKSGCEGGPAYSCADQTPWAVNDQFSYGFAATNIAGGNEASWCCACYKLTFTSGPVAGKVMVVQSTSTGGDLGNNHFDLNIPGGGVGIFDGCTPQFGGLPGERYGGISSRSQCDSFPDALKPGCYWRFDWFLNADNPNFTFERVQCPSELVARTGCKRNDDGNYPVFTPPSGDSPSSSSAAPTSTSTSQQPQQPTSSSSQASVPTSNPGGCTSQKWAQCGGIGFTGCTTCVSGTTCTKLNDWYSQC

SEQ ID NO: 47440 - protein, 309 aa, Thermochaetoides thermophila
MRSTPVLRTALAAALPFTVLAADGKSTRYWDCCKPSCSWPGKAAVSQPVFACDRNFNRIYDFGAKSGCEGGPAYSCADQTPWAVNDQFSYGFAATNIAGGNEASWCCACYKLTFTSGPVAGKVMVVQSTSTGGDLGNNHFDLNIPGGGVGIFDGCTPQFGGLPGERYGGISSRSQCDSFPDALKPGCYWRFDWFLNADNPNFTFERVQCPSELVARSGCKRNDDGNYPVFTPPSGDSPSSSSAAPTSTSTSQQPQQPTSSSSQASVPTSNPGGCTSQKWAQCGGIGFTGCTTCVSGTTCTKLNDWYSQC

SEQ ID NO: 47441 - protein, 309 aa, Thermochaetoides thermophila
MRSTPVLRTALAAALPFTVLAADGKSTRYWDCCKPSCSWPGKAAVSQPVFACDRNFNRIYDFGAKSGCEGGPAYSCADQTPWAVNDQFSYGFAATNIAGGNEASWCCACYKLTFTSGPVAGKVMVVQSTSTGGDLGNNHFDLNIPGGGVGIFDGCTPQFGGLPGERYGGISSRSQCDSFPDALKPGCYWRFDWFLNADNPNFTFERVQCPSELVARTGCKRNDDGNYPVFTPPSGDSPSSSSAAPTSTSTSQQPQQPTSSSSQASVPTSNPGGCTSQKWAQCGGIGFTGCTTCVSGTTCTKLNDWYSSC

SEQ ID NO: 47442 - protein, 309 aa, Thermochaetoides thermophila
MRSTPVLRTALAAALPFTVLAADGKSTRYWDCCKPSCSWPGKAAVSQPVFACDRNFNRIYDFGAKSGCEGGPAYSCADQTPWAVNDQFSYGFAATNIAGGSEASWCCACYKLTFTSGPVAGKVMVVQSTSTGGDLGNNHFDLNIPGGGVGIFDGCTPQFGGLPGERYGGISSRSQCDSFPDALKPGCYWRFDWFLNADNPNFTFERVQCPSELVARTGCKRNDDGNYPVFTPPSGDSPSSSSAAPTSTSTSQQPQQPTSSSSQASVPTSNPGGCTSQKWAQCGGIGFTGCTTCVSGTTCTKLNDWYSQC

SEQ ID NO: 47443 - protein, 309 aa, Thermochaetoides thermophila
MRSTPVLRTALAAALPFTVLAADGKSTRYWDCCKPSCSWPGKAAVSQPVFACDRNFNRIYDFGAKSGCEGGPAYSCADQTPWAVNDQFSYGFAATNIAGGNEASWCCACYKLTFTSGPVAGKVMVVQSTSTGGDLGNNHFDLNIPGGGVGIFDGCTPQFGGLPGERYGGISSRSQCDSFPDALKPGCYWRFDWFLNADNPNFTFERVQCPSELVARTGCKRNDDGNYPVFTPPSGDSPSSSSAAPTSTSTSQQPQQPTSSSSQASVPTSNPGGCTSQKWAQCGGIGFTGCTTCVSGTTCTKLNDTYSQC

SEQ ID NO: 47444 - protein, 211 aa, Humicola insolens
GRSTRYWDCCKPSCGWAKKAPVNQPVFSCNANFQRITDFDAKSGCEPGGVAYSCADQTPWAVNDDFALGFAATSIAGSNEAGWCCACYELTFTSGPVAGKKMVVQSTSTGGDLGSNHFDLNIPGGGVGIFDGCTPQFGGLPGQRYGGISSRNECDRFPDALKPGCYWRFDWFKNADNPSFSFRQVQCPAELVARTGCRRNDDGNFPAVQIP

SEQ ID NO: 47445 - protein, 214 aa, Thermothielavioides terrestris
SGSGQSTRYWDCCKPSCAWPGKAAVSQPVYACDANFQRLSDFNVQSGCNGGSAYSCADQTPWAVNDNLAYGFAATSIAGGSESSWCCACYALTFTSGPVAGKTMVVQSTSTGGDLGSNHFDIAMPGGGVGIFDGCSSQFGGLPGARYGGISSRDQCDSFPAPLKPGCQWRFDWFQNADNPTFTFQQVQCPAEIVARSGCKRNDDSSFPVFTSPS

SEQ ID NO: 47446 - protein, 214 aa, Thermothielavioides terrestris
SGSGQSTRYWDCCKPSCAWPGKAAVSQPVYACDANFQRLSDFNVQSGCNGGSAYACADQTPWAVNDNLAYGFAATSIAGGSESSWCCACYALTFTSGPVAGKTMVVQSTSTGGDLGSNHFDIAMPGGGVGIFDGCSSQFGGLPGAQYGGISSRDECDSFPAPLKPGCYWRFDWFQNADNPTFTFQQVQCPAEIVARSGCKRNDDSSFPVFTSPS

SEQ ID NO: 47447 - protein, 257 aa, Staphylotrichum coccosporum
GKSTRYWDCCKPSCSWPGKASVNQPVFACSANFTRISDPNVKSGCDGGSAYACADQTPWAVNDNFSYGFAATSIKGGNEASWCCACYELTFTSGPVAGKTMVVQSTSTGGDLGTNHFDLAMPGGGVGIFDGCSPQFGGLPGDRYGGVSSRDQCDSFPAPLKPGCYWRFDWFKNADNPTFTFRQVQCPSELVARTGCRRNDDSNFPVFTPPSGGQSSSSLSSSSAKPTSTSTSTTDTKATSTTSTASSQTSSSTGGGC

SEQ ID NO: 47448 - protein, 257 aa, Staphylotrichum coccosporum
GKSTRYWDCCKPSCSWPGKASVNQPVFACSANFQRISDPNVKSGCDGGSAYACADQTPWAVNDNFSYGFAATSISGGNEASWCCACYELTFTSGPVAGKTMVVQSTSTGGDLGTNHFDLAMPGGGVGIFDGCSPQFGGLPGDRYGGVSSRSQCDSFPAPLKPGCYWRFDWFKNADNPTFTFRQVQCPSEVVARTGCRRNDDSNFPVFTPPSGGQSSSSSSSSSAKPTSTSTSTTSTKAASTTSTASSQTSSSTGGGC

SEQ ID NO: 47449 - protein, 279 aa, Acremonium thermophilum
GKSTRYWDCCKPSCGWAGKASVNQPVFSCSADWQRISDFNAKSGCDGGNAYSCADQTPWAVNDNFSYGFAATAIAGGSEQSWCCACYALTFNSGPVAGKTMVVQSTSTGGDLGENHFDLAIPGGGVGIFNGCQSQFGGLPGAQYGGIQDRSQCSSFPAPLQPGCQWRFDWFQNADNPTFTFQRVQCPSELTSRTGCKRDDDANYPVFTPPSGTPSGGTPPGGTPPGTTTTRRPATTTGSSPTPTQSHYGQCGGIGYSGPTVCASGTTCQVLNPYYSQCL

SEQ ID NO: 47450 - protein, 279 aa, Acremonium thermophilum
GKSTRYWDCCKPSCGWAGKASVNQPVFSCSADWQRISDFNAKSGCDGGNAYSCADQTPWAVNDNFSYGFAATAIAGGSEQSWCCACYALTFNSGPVAGKTMVVQSTSTGGDLGENHFDLAIPGGGVGIFNGCQSQFGGLPGAQYGGIQDRSQCSSFPAPLQPGCQWRFDWFQNADNPTFTFQRVQCPSELTSRTGCKRDDDANYPVFNTPSGNPSGGNSSGGNPPGTTTTRRPATTTGSSPGPTQSHYGQCGGIGYSGPTVCASGTTCQVLNPYYSQCL

SEQ ID NO: 47451 - protein, 279 aa, Acremonium thermophilum
GKSTRYWDCCKPSCGWAGKASVNQPVFSCSADWQRISDFNAKSGCDGGNAYSCADQTPWAVNDNFSYGFAATAIAGGSEQSWCCACYALTFNSGPVAGKTMVVQSTSTGGDLGENHFDLAIPGGGVGIFNGCQSQFGGLPGAQYGGIQDRSQCSSFPAPLQPGCQWRFDWFQNADNPTFTFQRVQCPSELTSRTGCKRDDDANYPVFNPPSGNPSGGNPPGGNPPGTTTTSSPATTTGSSPGPTQSHYGQCGGIGYSGPTVCASGTTCQVLNPYYSQCL

SEQ ID NO: 47452 - protein, 279 aa, Acremonium thermophilum
GKSTRYWDCCKPSCGWAGKASVNQPVFSCSADWQRISDFNAKSGCDGGNAYSCADQTPWAVNDNFSYGFAATAIAGGSEQSWCCACYALTFNSGPVAGKTMVVQSTSTGGDLGENHFDLAIPGGGVGIFNGCQSQFGGLPGAQYGGIQDRSQCSSFPAPLQPGCQWRFDWFQNADNPTFTFQRVQCPSELTSRTGCKRDDDANYPVFTPPSGTPSGGEPPGGTPPGTTTTRRPATTTGSSPGPTQSHYGQCGGIGYSGPTVCASGTTCQVLNPYYSQCL

SEQ ID NO: 47453 - protein, 288 aa, Thermochaetoides thermophila
ADGKSTRYWDCCKPSCSWPGKADVNQPVFACDRNFNRLSDFNVQSGCNGGPAYSCADQTPWAVNDQFSYGFAATNIEGGNEASWCCACYKLTFTSGPVAGKVMVVQSTSTGGDLGNNHFDLNIPGGGVGIFDGCTPQFGGLPGERYGGISSRSQCDSFPDALKPGCYWRFDWFLNADNPNFTFERVQCPSELVARTGCKRNDDGNYPVFTPPSGDSPSSSSAAPTSTSTSQQPQQPTSSSSQASVPTSNPGGCTSQKWAQCGGIGFTGCTTCVSGTTCTKLNDWYSQC

SEQ ID NO: 47454 - protein, 288 aa, Thermochaetoides thermophila
ADGKSTRYWDCCKPSCSWPGKAAVSQPVFACDRNFNRLSDFNVQSGCNGGPAYSCADQTPWAVNDQFSYGFAATNIAGGNEASWCCACYKLTFTSGPVAGKVMVVQSTSTGGDLGNNHFDLNIPGGGVGIFDGCTPQFGGLPGERYGGISSRSQCDSFPDALKPGCYWRFDWFLNADNPNFTFERVQCPSELVARTGCKRNDDGNYPVFTPPSGDSPSSSSAAPTSTSTSQQPQQPTSSSSQASVPTSNPGGCTSQKWAQCGGIGFTGCTTCVSGTTCTKLNDWYSQC

SEQ ID NO: 47455 - protein, 304 aa, Melanocarpus albomyces
MRSTPVLRALLAAALPLGALAANGQSTRYWDCCKPSCGWAGKAPVNQPVYSCDANFQRIHDFDAVSGCEGGPAFSCADHSPWAINDNLSYGFAATALSGQTEESWCCACYALTFTSGPVAGKTMVVQSTSTGGDLGSNHFDLAIPGGGVGLFDGCTPQFGGLPGARYGGISSRQECDSFPEPLKPGCQWRFDWFQNADNPSFTFERVQCPEELVARTGCRRHDDGGFPAVQIPSSTGNPSGGNPPGGNPPGTTTTRRPATTTGSSPGPTQSHYGQCGGIGYSGPTVCASGTTCQVLNPYYSQCL

SEQ ID NO: 47456 - protein, 213 aa, Thermothielavioides terrestris
SGSGQSTRYWDCCKPSCAWPGKAAVSQPVYACDANFQRLSDFNVQSGCNGGSAYACADQTPWAVNDNLAYGFAATSIAGGSESSWCCACYALTFTSGPVAGKTMVVQSTSTGGDLGSNHFDIAMPGGGVGIFDGCSSQFGGLPGAQYGGISSRDECDSFPAPLKPGCYWRFDWFQNADNPTFTFQQVQCPAEIVARSGCKRNDDSSFPVFTPP

SEQ ID NO: 47457 - protein, 213 aa, Thielavia terrestris
SGSGQSTRYWDCCKPSCAWPGKAAVSQPVYSCDANFQRLSDFNVQSGCNGGSAYACADQTPWAVNDNLAYGFAATSIAGGSESSWCCACYALTFTSGPVAGKTMVVQSTSTGGDLGSNHFDIAMPGGGVGIFDGCSSQFGGLPGDRYGGISSRDQCDSFPAPLKPGCYWRFDWFQNADNPTVTFQQVQCPAEIVARSGCKRNDDSSFPVFTTP

SEQ ID NO: 47458 - protein, 213 aa, Thielavia terrestris
SGSGQSTRYWDCCKPSCAWPGKAAVSQPVYSCDANFQRLSDFNVQSGCNGGSAYACADQTPWAVNDNLAYGFAATSIAGGSESSWCCACYALTFTSGPVAGKTMVVQSTSTGGDLGSNHFDIAMPGGGVGIFDGCSSQFGGLPGDRYGGISSRDQCDSFPAPLKPGCYWRFDWFQNADNPTVTFQQVQCPAEIVARSGCKRNDDSSFPVFTPP

SEQ ID NO: 47459 - protein, 256 aa, Staphylotrichum coccosporum
GKSTRYWDCCKPSCSWPGKASVNQPVFACSANFTRISDPNVKSGCDGGSAYACADQTPWAVNDNFSYGFAATSIKGGNEASWCCACYELTFTSGPVAGKTMVVQSTSTGGDLGTNHFDLAMPGGGVGIFDGCSPQFGGLPGDRYGGVSSRDQCDSFPAPLKPGCYWRFDWFKNANPTFTFRQVQCPSELVARTGCRRNDDSNFPVFTPPSGGQSSSSLSSSSAKPTSTSTSTTDTKATSTTSTASSQTSSSTGGGC

SEQ ID NO: 47460 - protein, 276 aa, Thermochaetoides thermophila
ADGKSTRYWDCCKPSCSWPGKAAVSQPVFACDRNFNRLSDFNVQSGCNGGPAYSCADQTPWAVNDQFSYGFAATNIAGGNEASWCCACYKLTFTSGPVAGKVMVVQSTSTGGDLGNNHFDLNIPGGGVGIFDGCTPQFGGLPGERYGGISSRSQCDSFPDALKPGCYWRFDWFLNADNPNFTFERVQCPSELVARTGCKRNDDGNYPVFTPPSGGNGGTGTPTSTAPGSGQTSPGGGSGCTSQKWAQCGGIGFSGCTTCVSGTTCQKLNDYYSQCL

SEQ ID NO: 47461 - protein, 208 aa, Acremonium thermophilum
ALDGKSTRYWDCCKPSCGWPGKASVNQPVFSCSADWQRISDFNAKSGCDGGSAYSCADQTPWAVNDNFSYGFAATAIAGGSESSWCCACYALTFNSGPVAGKTMVVQSTSTGGDLGSNQFDLAIPGGGVGIFNGCASQFGGLPGAQYGGISDRSQCSSFPAPLQPGCQWRFDWFQNADNPTFTFQRVQCPSELTSRTGCKRDDDASYP

SEQ ID NO: 47462 - protein, 221 aa, Thielavia terrestris
SGSGQSTRYWDCCKPSCAWPGKAAVSQPVYSCDANFQRLSDFNVQSGCNGGSAYACADQTPWAVNDNLAYGFAATSIAGGSESSWCCACYALTFTSGPVAGKTMVVQSTSTGGDLGSNHFDIAMPGGGVGIFDGCSSQFGGLPGDRYGGISSRDQCDSFPAPLKPGCYWRFDWFQNADNPTVTFQQVQCPAEIVARSGCKRNDDSSFPVFTSPSPSPSPSP

SEQ ID NO: 47463 - protein, 222 aa, Thermothielavioides terrestris
SGSGQSTRYWDCCKPSCAWPGKAAVSQPVYACDANFQRLSDFNVQSGCNGGSAYACADQTPWAVNDNLAYGFAATSIAGGSESSWCCACYALTFTSGPVAGKTMVVQSTSTGGDLGSNHFDIAMPGGGVGIFDGCSSQFGGLPGARYGGISSRDQCDSFPAPLKPGCQWRFDWFQNADNPTFTFQQVQCPAEIVARSGCKRNDDSSFPVFTSPSSPSSPSSP

SEQ ID NO: 47464 - protein, 308 aa, Thermochaetoides thermophila
MRSTPVLRTALAAALPFTVLAADGKSTRYWDCCKPSCSWPGKAAVSQPVFACDRNFNRIYDFGAKSGCEGGPAYSCADQTPWAVNDQFSYGFAATNIAGGNEASWCCACYKLTFTSGPVAGKVMVVQSTSTGGDLGNNHFDLNIPGGGVGIFDGCTPQFGGLPGERYGGISSRSQCDSFPDALKPGCYWRFDWFLNADNPNFTFERVQCPSELVARTGCKRNDDGNYPVFTPPSGDSPSSSAAPTSTSTSQQPQQPTSSSSQASVPTSNPGGCTSQKWAQCGGIGFTGCTTCVSGTTCTKLNDWYSQC

SEQ ID NO: 47465 - protein, 308 aa, Thermochaetoides thermophila
MRSTPVLRTALAAALPFTVLAADGKSTRYWDCCKPSCSWPGKAAVSQPVFACDRNFNRIYDFGAKSGCEGGPAYSCADQTPWAVNDQFSYGFAATNIAGGNEASWCCACYKLTFTSGPVAGKVMVVQSTSTGGDLGNNHFDLNIPGGGVGIFDGCTPQFGGLPGERYGGISSRSQCDSFPDALKPGCYWRFDWFLNADNPNFTFERVQCPSELVARTGCKRNDDGNYPVFTPPSGDSPSSSSAPTSTSTSQQPQQPTSSSSQASVPTSNPGGCTSQKWAQCGGIGFTGCTTCVSGTTCTKLNDWYSQC

SEQ ID NO: 47466 - protein, 284 aa, Staphylotrichum coccosporum
ADGKSTRYWDCCKPSCSWPGKASVNQPVFACSANFQRISDPNVKSGCDGGSAYACADQTPWAVNDNFSYGFAATSIMGGNEASWCCGCYELTFTSGPVAGKTMVVQSTSTGGDLGTNHFDLAMPGGGVGIFDGCSPQFGGLPGDRYGGVSSRSQCDSFPAALVPGCYWRFDWFKNADNPTFTFRQVQCPSELVARTGCRRNDDGNFPHFTPPSGGQSSSSSSSSSAKPTSTSASTTSSQTSSSTGGGCAAQRWAQCGGIGFSGCTTCVSGTTCNKQNDWYSQCL

SEQ ID NO: 47467 - protein, 284 aa, Staphylotrichum coccosporum
ADGVSTRYWDCCKPSCSWPGKASVNQPVFACSANFQRISDPNVKSGCDGGSAYACADQTPWAVNDNFSYGFAATSISGGSEASWCCACYELTFTSGPVAGKTMVVQSTSTGGDLGTNHFDLAMPGGGVGIFDGCSPQFGGLAGDRYGGVSSRSECDSFPAPLKPGCYWRFDWFKNADNPTFTFRQVQCPSELVARTGCRRNDDSNFPVFTPPSGGQSSSSLSSSSAKPTSTSTSTASSQTSSSTGGGCAAQRWAQCGGIGFSGCTTCVSGTTCNKQNDWYSQCL

SEQ ID NO: 47468 - protein, 284 aa, Staphylotrichum coccosporum
ADGVSTRYWDCCKPSCSWPGKASVNQPVFACSANFQRISDPNVVSGCDGGSAYACADQTPWAVNDNFSYGFAATSIKGGSEASWCCGCYELTFTSGPVAGKKMVVQSTSTGTDLGTNHFDLAMPGGGVGIFDGCTPQFGGLPGDRYGGVSSRSQCDSFPAALKPGCYWRFDWFKNADNPTFTFRQVQCPSEVVARTGCRRNDDGNFPVFTPPSGGQSSSSSSSSSAKPTSTSTSTASSQTSSSTGGGCAAQRWAQCGGIGFSGCTTCVSGTTCNKQNDWYSQCL

SEQ ID NO: 47469 - protein, 219 aa, Thermothielavioides terrestris
SGSGQSTRYWDCCKPSCAWPGKAAVSQPVYACDANFQRLSDFNVQSGCNGGSAYACADQTPWAVNDNLAYGFAATSIAGGSESSWCCACYALTFTSGPVAGKTMVVQSTSTGGDLGSNHFDIAMPGGGVGIFDGCSSQFGGLPGARYGGISSRDQCDSFPAPLKPGCQWRFDWFQNADNPTFTFQQVQCPAEIVARSGCKRNDDSSFPVFTSPSSPSSP

SEQ ID NO: 47470 - protein, 215 aa, Thermothielavioides terrestris
SGSGQSTRYWDCCKPSCAWPGKAAVSQPVYACDANFQRLSDFNVQSGCNGGSAYACADQTPWAVNDNLAYGFAATSIAGGSESSWCCACYALTFTSGPVAGKTMVVQSTSTGGDLGSNHFDIAMPGGGVGIFDGCSSQFGGLPGARYGGISSRDQCDSFPAPLKPGCQWRFDWFQNADNPTFTFQQVQCPAEIVARSGCKRNDDSSFPVFTSPSS

SEQ ID NO: 47471 - protein, 279 aa, Acremonium thermophilum
GKSTRYWDCCKPSCGWAGKASVNQPVFSCSADWQRISDFNAKSGCDGGNAYSCADQTPWAVNDNFSYGFAATAIAGGSEQSWCCACYALTFNSGPVAGKTMVVQSTSTGGDLGENHFDLAIPGGGVGIFNGCQSQFGGLPGAQYGGIQDRSQCSSFPAPLQPGCQWRFDWFQNADNPTFTFQRVQCPSELTSRTGCKRDDDANYPVFNPPSGNPSGGNPPGGNPPGTTTTRRPATTTGSSPGPTQHKYGQCGGIGYSGPTVCASGTTCQVLNPYYSQCL

SEQ ID NO: 47472 - protein, 279 aa, Acremonium thermophilum
GKSTRYWDCCKPSCGWAGKASVNQPVFSCSADWQRISDFNAKSGCDGGNAYSCADQTPWAVNDNFSYGFAATAIAGGSEQSWCCACYALTFNSGPVAGKTMVVQSTSTGGDLGENHFDLAIPGGGVGIFNGCQSQFGGLPGAQYGGIQDRSQCSSFPAPLQPGCQWRFDWFQNADNPTFTFQRVQCPSELTSRTGCKRDDDANYPVFNPPSGNPGGGGPPGGGPPGTTTTRRPATTTGSSPSPTQSHYGQCGGIGYSGPTVCASGTTCQVLNPYYSQCL

SEQ ID NO: 47473 - protein, 279 aa, Acremonium thermophilum
GKSTRYWDCCKPSCGWAGKASVNQPVFSCSADWQRISDFNAQSGCTGGNAYSCADQTPWAVNDNFSYGFAATAIAGGSEQSWCCACYALTFNSGPVAGKTMVVQSTSTGGDLGENHFDLAIPGGGVGIFNGCQSQFGGLPGAQYGGIQDRSQCSSFPAPLQPGCQWRFDWFQNADNPTFTFQRVQCPSELTSRTGCKRDDDANYPVFNPPSGNPSGGNPPGGNPPGTTTTRRPATTTGSSPGPTQSHYGQCGGIGYSGPTVCASGTTCQVLNPYYSQCL

SEQ ID NO: 47474 - protein, 257 aa, Staphylotrichum coccosporum
GKSTRYWDCCKPSCSWPGKALVNQPVFACYANFQRISDPNVKSGCDGGSAYACADQTPWAVNDNFSYGFAATSISGGNEASWCCGCYELTFTSGPVAGKTMVVQSTSTGTDLGTNHFDLAMPGGGVGIFDGCSPQFGGLPGDRYGGVSSRSQCDSFPAPLKPGCYWRFDWFKNADNPTFTFRQVQCPSELVARTGCRRNDDSNFPVFTPPSGGQGSSSSSSSSARPTSTSTSTTDTKATSTTSTASSQTSSSTGGGC

SEQ ID NO: 47475 - protein, 257 aa, Staphylotrichum coccosporum
GKSTRYWDCCKPSCSWPGKASVNQPVWACSANFQRISDPNVKSGCDGGSAYACADQTPWAVNDNFSYGFAATSISGGNEASWCCACYALTFTSGPVYGKTMVVQSTSTGGDLGTNHFDLAMPGGGVGIFDGCSPQFGGLPGDRYGGVSSRDQCDSFPAALKPGCYWRFDWFKNADNPTFTFRQVQCPSELVARTGCRRNDDGNFPVFTPPSGGQSSSSSSSSSARPTSTSTSTTDTKATSTTSTASSQTSSSTGGGC

SEQ ID NO: 47476 - protein, 236 aa, Madurella mycetomatis
MHSAPVLRAALIATLPLAAHAASGSGQSTRYWDCCKPSCSWPGKAPVNQPVFACDANFQRINDFGATSGCDGGSAYSCADHAPWAINDNLSYGFAATALSGETESSWCCACYALTFTSGPVAGKTMVVQSTSTGGDLGSNHFDLNIPGGGVGLFDGCTPQFGGLPGAQYGGISDRSQCSSFPSQLQPGCNWRFDWFMNADNPSFTFDQVQCPDELVARTGCRRSDDANFPAFSPPS

SEQ ID NO: 47477 - protein, 218 aa, Thielavia terrestris
SGSGQSTRYWDCCKPSCAWPGKAAVSQPVYSCDANFQRLSDFNVQSGCNGGSAYACADQTPWAVNDNLAYGFAATSIAGGSESSWCCACYALTFTSGPVAGKTMVVQSTSTGGDLGSNHFDIAMPGGGVGIFDGCSSQFGGLPGDRYGGISSRDQCDSFPAPLKPGCYWRFDWFQNADNPTVTFQQVQCPAEIVARSGCKRNDDSSFPVFTSPSPSPS

SEQ ID NO: 47478 - protein, 214 aa, Thermothielavioides terrestris
SGSGQSTRYWDCCKPSCAWPGKAAVSQPVYACDANFQRLSDFNVQSGCNGGSAYACADQTPWAVNDNLAYGFAATSIAGGSESSWCCACYALTFTSGPVAGKTMVVQSTSTGGDLGSNHFDIAMPGGGVGIFDGCSSQFGGLPGAQYGGISSRDECDSFPEPLKPGCQWRFDWFQNADNPTFTFQQVQCPAEIVARSGCKRNDDSSFPVFTSPS

SEQ ID NO: 47479 - protein, 293 aa, Sordaria fimicola
MRSSTILQTGLVAVLPFAVQAASGSGKSTRYWDCCKPSCAWSGKASVNRPVLACDANNNPLNDANVKSGCDGGSAYTCANNSPWAVNDNLAYGFAATKLSGGTESSWCCACYALTFTSGPVSGKTLVVQSTSTGGDLGSNHFDLNMPGGGVGLFDGCKREFGGLPGAQYGGISSRSECDSFPAALKPGCQWRFDWFKNADNPEFTFKQVQCPSELTSRTGCKRNDDSQFPAFTPPSGGGSNPSTPTTPPSSGGGGSGCAAAMYAQCGGSGFSGCTNCPSGSTCKAINDYYHQC

SEQ ID NO: 47480 - protein, 277 aa, Thermothielavioides terrestris
SGSGQSTRYWDCCKPSCAWPGKAAVSQPVYACDANFQRLSDFNVQSGCNGGSAYACADQTPWAVNDNLAYGFAATSIAGGSESSWCCACYALTFTSGPVAGKTMVVQSTSTGGDLGSNHFDIAMPGGGVGIFDGCSSQFGGLPGARYGGISSRDQCDSFPAPLKPGCQWRFDWFQNADNPTFTFQQVQCPAEIVARSGCKRNDDSSFPVFTPPSGGPGGPGTPTSTAPGSGPTSPGGGSGCTAERWAQCGGNGWSGCTTCVAGSTCTKINDWYHQCL

SEQ ID NO: 47481 - protein, 278 aa, Acremonium thermophilum
GKSTRYWDCCKPSCGWAGKASVNQPVFSCSADWQRISDFNAKSGCDGGNAYSCADQTPWAVNDNFSYGFAATAIAGGSEQSWCCACYALTFNSGPVAGKTMVVQSTSTGGDLGENHFDLAIPGGGVGIFNGCQSQFGGLPGAQYGGIQDRSQCSSFPAPLQPGCQWRFDWFQNADNPTFTFQRVQCPSELTSRTGCKRDDDANYPVFPPSGNPSGGSPPGGSPPGTTTTRPPATTTGSSPTPTQSHYGQCGGIGYSGPTVCASGTTCQVLNPYYSQCL

SEQ ID NO: 47482 - protein, 213 aa, Thermothielavioides terrestris
SGSGQSTRYWDCCKPSCAWPGKAAVSQPVYACDANFQRLSDFNVQSGCNGGSAYACADQTPWAVNDNLAYGFAATSIAGGSESSWCCACYALTFTSGPVAGKTMVVQSTSTGGDLGSNHFDIAMPGGGVGIFDGCSSQFGGLPGARYGGISSRDQCDSFPAPLKPGCQWRFDWFQNADNPTFTFQQVQCPAEIVARSGCKRNDDSSFPVFTTP

SEQ ID NO: 47483 - protein, 309 aa, Thermochaetoides thermophila
MRSTPVLRTALAAALPFTVLAADGKSTRYWDCCKPSCLSPGNVQVSQNVFACDRNFNRIYDFGAKSGCEGGPAYSCADQTPWAVNDQFSYGFAATNIAGGNEASWCCACYKLTFTSGPVAGKVMVVQSTSTGGDLGNNHFDLNIPGGGVGIFDGCTPQFGGLPGERYGGISSRSQCDSFPDALKPGCYWRFDWFLNADNPNFTFERVQCPSELVARTGCKRNDDGNYPVFTPPSGDSPSSSSAAPTSTSTSQQPQQPTSSSSQASVPTSNPGGCTSEKWAQCGGIGFTGCTTCVSGTTCTKLNDWYSQC

SEQ ID NO: 47484 - protein, 309 aa, Thermochaetoides thermophila
MRSTPVLRTALAAALPFTVLAADGKSTRYWDCCKPSCLSPGNAQVSQNVFACDRNFNRIYDFGAKSGCEGGPAYSCADQTPWAVNDQFSYGFAATNIAGGNEASWCCACYKLTFTSGPVAGKVMVVQSTSTGGDLGNNHFDLNIPGGGVGIFDGCTPQFGGLPGERYGGISSRSQCDSFPDALKPGCYWRFDWFLNADNPNFTFERVQCPSELVARTGCKRNDDGNYPVFTPPSGDSPSSSSAAPTSTSTSQQPQQPTSSSSQASVPTSNPGGCTSQKWAQCGGIGFTGCTTCVSGTTCTKLNDWYSQC

SEQ ID NO: 47485 - protein, 309 aa, Thermochaetoides thermophila
MRSTPVLRTALAAALPFTVLAADGKSTRYWDCCKPSCLSPGNVQVSQNVFACDRNFNRIYDFGAKSGCEGGPAYSCADQTPWAVNDQFSYGFAATNIAGGNEASWCCACYKLTFTSGPVAGKVMVVQSTSTGGDLGNNHFDLNIPGGGVGIFDGCTPQFGGLPGERYGGISSRSQCDSFPDALKPGCYWRFDWFLNADNPNFTFERVQCPSELVARTGCKRNDDGNYPVFTPPSGDSPSSSSAAPTSTSTSQQPQQPSSSSSQASVPTSNPGGCTSQKWAQCGGIGFTGCTTCVSGTTCTKLNDWYSQC

SEQ ID NO: 47486 - protein, 309 aa, Thermochaetoides thermophila
MRSTPVLRTALAAALPFTVLAADGKSTRYWDCCKPSCLSPGNVQVSQNVFACDTNFNRIYDFGAKSGCEGGPAYSCADQTPWAVNDQFSYGFAATNIAGGNEASWCCACYKLTFTSGPVAGKVMVVQSTSTGGDLGNNHFDLNIPGGGVGIFDGCTPQFGGLPGERYGGISSRSQCDSFPDALKPGCYWRFDWFLNADNPNFTFERVQCPSELVARTGCKRNDDGNYPVFTPPSGDSPSSSSAAPTSTSTSQQPQQPSSSSSQASVPTSNPGGCTSQKWAQCGGIGFTGCTTCVSGTTCTKLNDWYSQC

SEQ ID NO: 47487 - protein, 309 aa, Thermochaetoides thermophila
MRSTPVLRTALAAALPGTVLAANGKSTRYWDCCKPSCLSPGNVQVSQNVFACDTNFNRIYDFGAKSGCEGGPAYSCADQTPWAVNDQFSYGFAATNIAGGNEASWCCACYKLTFTSGPVAGKVMVVQSTSTGGDLGNNHFDLNIPGGGVGIFDGCTPQFGGLPGERYGGISSRSQCDSFPDALKPGCYWRFDWFLNADNPNFTFERVQCPSELVARTGCKRNDDGNYPVFTPPSGDSPSSSSAAPTSTSTSQQPQQPSSSSSQASVPTSNPGGCTSEKWAQCGGIGFTGCTTCVSGTTCTKLNDWYSQC

SEQ ID NO: 47488 - protein, 298 aa, Chimera: Myceliophthora thermophila
ALPVLALDQLSGIGQTTRYWDCCKPSCAWPGKGPSSPVQACDKNDNPLNDGGSTRSGCDAGGSAYMCSSQSPWAVSDELSYGWAAVKLAGSSESQWCCACYELTFTSGPVAGKKMIVQATNTGGDLGDNHFDLAIPGGGVGIFNACTDQYGAPPNGWGDRYGGIHSKEECESFPEALKPGCNWRFDWFQNADNPSVTFQEVACPSELTSKSGCSRNDDGNFPAVQIPSSSTSSPVNQPTSTSTTSTSTTSSPPVQPTTPSGCTAERWAQCGGNGWSGCTTCVAGSTCTKINDWYHQCL

SEQ ID NO: 47489 - protein, 283 aa, Staphylotrichum coccosporum
ADGVSTRYWDCCKPSCSWPGKASVNQPVFACSANFQRISDPNVVSGCDGGSAYACADQTPWAVNDNFSYGFAATSIKGGNEASWCCGCYALTFTSGPVAGKTMVVQSTSTGGDLGTNHFDLAMPGGGVGIFDGCTPQFGGLPGDRYGGVSSRSECDSFPAALKPGCYWRFDWFKNADNPTFTFRQVQCPSEVVARTGCRRNDDGNFPHFTPPSGGQSSSSLSSSSAKPTSTTSTTSSQTSSSTGGGCAAQRWAQCGGIGFSGCTTCVSGTTCNKQNDWYSQCL

SEQ ID NO: 47490 - protein, 221 aa, Thermothielavioides terrestris
SGSGQSTRYWDCCKPSCAWPGKAAVSQPVYACDANFQRLSDFNVQSGCNGGSAYACADQTPWAVNDNLAYGFAATSIAGGSESSWCCACYALTFTSGPVAGKTMVVQSTSTGGDLGSNHFDIAMPGGGVGIFNGCSSQFGGLPGARYGGISSRDQCDSFPAPLKPGCYWRFDWFQNADNPTFTFQQVQCPAEIVARSGCKRNDDSSFPVFTSPSPSPSPSP

SEQ ID NO: 47491 - protein, 221 aa, Thermothielavioides terrestris
SGSGQSTRYWDCCKPSCAWPGKAAVSQPVYACDANFQRLSDFNVQSGCNGGSAYACADQTPWAVNDNLAYGFAATSIAGGSESSWCCACYALTFTSGPVAGKTMVVQSTSTGGDLGSNHFDIAMPGGGVGIFDGCSSQFGGLPGARYGGISSRDQCDSFPAPLKPGCQWRFDWFQNADNPTFTFQQVQCPAEIVARSGCKRNDDSSFPVFTSPSPSPSPSP

SEQ ID NO: 47492 - protein, 221 aa, Thermothielavioides terrestris
SGSGQSTRYWDCCKPSCAWPGKAAVSQPVYACDANFQRLSDFNVQSGCNGGSAYACADQTPWAVNDNLAYGFAATSIAGGSESSWCCACYALTFTSGPVAGKTMVVQSTSTGGDLGSNHFDIAMPGGGVGIFDGCSSQFGGLPGAQYGGISSRDECDSFPEPLKPGCQWRFDWFQNADNPTFTFQQVQCPAEIVARSGCKRNDDSSFPVFTSPSPSPSPSP

SEQ ID NO: 47493 - protein, 212 aa, Acremonium thermophilum
DGKSTRYWDCCKPSCGWAGKASVNQPVFSCSADWQRISDFNAKSGCDGGSAYSCADQTPWAVNDNFSYGFAATAIAGGSESSWCCACYALTFNSGPVAGKTMVVQSTSTGGDLGSNQFDLAIPGGGVGIFNGCASQFGGLPGAQYGGISDRSQCSSFPAPLQPGCQWRFDWFQNADNPTFTFQRVQCPSELTSRTGCKRDDDASYPVFNPPS

SEQ ID NO: 47494 - protein, 258 aa, Acremonium thermophilum
GKSTRYWDCCKPSCGWAGKASVNQPVFSCSADWQRISDFNAKSGCDGGSAYSCADQTPWAVNDNFSYGFAATAIAGGSESSWCCACYALTFNSGPVAGKTMVVQSTSTGGDLGSNQFDLAIPGGGVGIFNGCASQFGGLPGAQYGGISDRSQCSSFPAPLQPGCQWRFDWFQNADNPTFTFQRVQCPSELTSRTGCKRDDDASYPVFNPPSVPGLDGSNPGNPTTTVVPPASTSTSRPTSSTSSPVSTPTGQPGGCTT

SEQ ID NO: 47495 - protein, 188 aa, Chaetomium sp.
NQPVYACDANFQRISDPGTKSGCDGGSAYSCADHSPWAVNDSFSYGFAATALSGGTEASWCCACYALTFTSGPVAGKTMVVQSTSTGGDLGSNHFDLNIPGGGVGLFDGCTPQFGGLPGARYGGISSRSQCDSFPGPLKAGCYWGFYWFKNADHPNFTFQQVRCPNELVERTGCPRAYEGPFPDFTLP

SEQ ID NO: 47496 - protein, 279 aa, Acremonium thermophilum
GKSTRYWDCCKPSCGWAGKASVNQPVFSCSADWQRISDFNAKSGCDGGNAYSCADQTPWAVNDNFSYGFAATAIAGGSEQSWCCACYALTFNSGPVAGKTMVVQSTSTGGDLGENHFDLAIPGGGVGIFNGCQSQFGGLPGAQYGGIQDRSQCSSFPAPLQPGCQWRFDWFQNADNPTFTFQRVQCPSELTSRTGCKRDDDANYPVFNPPSGSPSGGNPPGGNPPGTTTTRRPATTTGSSPGPTQSHYGQCGGIGYSGPTVCASGTTCQVLNPYYSQCL

SEQ ID NO: 47497 - protein, 279 aa, Acremonium thermophilum
GKSTRYWDCCKPSCGWRGKASVNQPVFSCSADWQRISDFNAKSGCDGGNAYSCADQTPWAVNDNFSYGFAATAIAGGSERSWCCACYALTFNSGPVAGKTMVVQSTSTGGDLGENHFDLAIPGGGVGIFNGCQSQFGGLPGAQYGGIQDRSQCSSFPAPLQPGCQWRFDWFQNADNPTFTFQRVQCPSELTSRTGCKRDDDANYPVFNPPSGNPSGGNPPGGNPPGTTTTRRPATTTGSSPGPTQSHYGQCGGIGYSGPTVCASGTTCQVLNPYYSQCL

SEQ ID NO: 47498 - protein, 279 aa, Acremonium thermophilum
GKSTRYWDCCKPSCGWAGKASVNQPVFSCSADWQRISDFNAKSGCDGGNAYSCADQTPWAVNDNFSYGFAATAIAGGSEQSWCCACYALTFNSGPVAGKTMVVQSTSTGGDLGENHFDLAIPGGGVGIFNGCQSQFGGLPGAQYGGIQDRSQCSSFPAPLQPGCQWRFDWFQNADNPTFTFQRVQCPSELTSRTGCKRDDDANYPVFNPPSGRPSGGNPPGGNPPGTTTTRRPATTTGSSPGPTQSHYGQCGGIGYSGPTVCASGTTCQVLNPYYSQCL

SEQ ID NO: 47499 - protein, 279 aa, Acremonium thermophilum
GKSTRYWDCCKPSCGWAGKASVNQPVFSCSADWQRISDFNAKSGCDGGNAYSCADQTPWAVNDNFSYGFAATAIAGGSEQSWCCACYALTFNSGPVAGKTMVVQSTSTGGDLGENHFDLAIPGGGVGIFNGCQSQFGGLPGAQYGGIQDRSQCSSFPAPLQPGCQWRFDWFQNADNPTFTFQRVQCPSELTSRTGCKRDDDANYPVFNPPSGNPSGGSPPGGNPPGTTTTRRPATTTGSSPGPTQSHYGQCGGIGYSGPTVCASGTTCQVLNPYYSQCL

SEQ ID NO: 47500 - protein, 279 aa, Acremonium thermophilum
GKSTRYWDCCKPSCGWAGKASVNQPVFSCSADWQRISDFNAKSGCDGGNAYSCADQTPWAVNDNFSYGFAATAIAGGSEQSWCCACYALTFNSGPVAGKTMVVQSTSTGGDLGENHFDLAIPGGGVGIFNGCQSQFGGLPGAQYGGIQSRSQCSSFPAPLQQGCQWRFDWFQNADNPTFTFQRVQCPSELTSRTGCKRDDDANYPVFNPPSGNPSGGNPPGGNPPGTTTTRRPATTTGSSPGPTQSHYGQCGGIGYSGPTVCASGTTCQVLNPYYSQCL

SEQ ID NO: 47501 - protein, 279 aa, Acremonium thermophilum
GKSTRYWDCCKPSCGWAGKASVNQPVFSCSADWQRISDFNAKSGCDGGNAYSCADQTPWAVNDNFSYGFAATAIAGGSETSWCCACYALTFNSGPVAGKTMVVQSTSTGGDLGENHFDLAIPGGGVGIFNGCQSQFGGLPGAQYGGIQDRSQCSSFPAPLQPGCQWRFDWFQNADNPTFTFQRVQCPSELTSRTGCKRDDDANYPVFNPPSGNPSGGNPPGGNPPGTTTTRRPATTTGSSPGPTQSHYGQCGGIGYSGPTVCASGTTCQVLNPYYSQCL

SEQ ID NO: 47502 - protein, 279 aa, Acremonium thermophilum
GKSTRYWDCCKPSCGWAGKASVNQPVFSCSQDWQRISDFNAKSGCDGGNAYSCADQTPWAVNDNFSYGFAATSIAGGSEQSWCCACYALTFNSGPVAGKTMVVQSTSTGGDLGENHFDLAIPGGGVGIFNGCQSQFGGLPGAQYGGIQDRSQCSSFPAPLQPGCQWRFDWFQNADNPTFTFQRVQCPSELTSRTGCKRDDDANYPVFNPPSGNPSGGNPPGGNPPGTTTTRRPATTTGSSPGPTQSHYGQCGGIGYSGPTVCASGTTCQVLNPYYSQCL

SEQ ID NO: 47503 - protein, 279 aa, Acremonium thermophilum
GHSTRYWDCCKPSCGWAGKASVNQPVFSCSADWQRISDFNAKSGCDGGNAYSCADQTPWAVNDNFSYGFAATAIAGGSEQSWCCACYALTFNSGPVAGKTMVVQSTSTGGDLGDNHFDLAIPGGGVGIFNGCQSQFGGLPGAQYGGIQDRSQCSSFPAPLQPGCQWRFDWFQNADNPTFTFQRVQCPSELTSRTGCKRDDDANYPVFNPPSGNPSGGNPPGGNPPGTTTTRRPATTTGSSPGPTQSHYGQCGGIGYSGPTVCASGTTCQVLNPYYSQCL

SEQ ID NO: 47504 - protein, 279 aa, Acremonium thermophilum
GKSTRYWDCCKPSCGWAGKAPVNQPVFSCSADWQRISDFNANSGCSGGNAYSCADQTPWAVNEQFSYGFAATAISGGSEQSWCCACYALTFNSGPVAGKTMVVQSTSTGGDLGENHFDLAIPGGGVGIFNGCQSQFGGLPGAQYGGIQDRSQCSSFPAPLQPGCYWRFDWFQNADNPTFTFQRVQCPSELISRTGCKRDDDANYPVFNPPSGNPSGGTPPGGNPPGTTTTRRPATTTGSSPGCTQSRYGQCGGIGYSGCTVCASGTTCQVLNPYYSQCL

SEQ ID NO: 47505 - protein, 279 aa, Acremonium thermophilum
GKSTRYWDCCKPSCGWAGKASVNQPVFSCSADWQRISDFNANSGCSGGNAYSCADQTPWAVNDNFSYGFAATAIAGGSEQSWCCACYALTFNSGPVAGKTMVVQSTSTGGDLGENHFDLAIPGGGVGIFNGCQSQFGGLPGAQYGGIQDRSQCSSFPAPLQPGCQWRFDWFQNADNPTFTFQRVQCPSELTSRTGCKRDDDANYPVFNPPSGNPSGGNPPGGNPPGTTTTRRPATTTGSSPGPTQSHYGQCGGIGYSGPTVCASGTTCQVLNPYYSQCL

SEQ ID NO: 47506 - protein, 279 aa, Acremonium thermophilum
GKSTRYWDCCKPSCGWAGKASVNQPVFSCSADWQRISDFNAKSGCDGGNAYSCADQTPWAVNDNFSYGFAATAIAGGSERSWCCACYALTFNSGPVAGKTMVVQSTSTGGDLGENHFDLAIPGGGVGIFNGCQSQFGGLPGAQYGGIQDRSQCSSFPAPLQPGCQWRFDWFQNADNPTFTFQRVQCPSELTSRTGCKRDDDANYPVFNPPSGNPSGGNPPGGNPPGTTTTRRPATTTGSSPGPTQSHYGQCGGIGYSGPTVCASGTTCQVLNPYYSQCL

SEQ ID NO: 47507 - protein, 279 aa, Acremonium thermophilum
GKSTRYWDCCKPSCGWAGKASVNQPVFSCSADWQRISDFNAKSGCDGGNAYSCADQTPWAVNDNFSYGFAATAIAGGSEQSWCCACYALTFNSGPVAGKTMVVQSTSTGGDLGENHFDLAIPGGGVGIFNGCQSQFGGLPGAQYGGIQDRSQCSSFPAPLQPGCQWRFDWFQNADNPTFTFQRVQCPSELTSRTGCKRDDDANYPVFNPPSGNPSGGNPPGGNPPGTTTTRRPATTTGSSPTPTQSHYGQCGGIGYSGPTVCASGTTCQVLNPYYSQCL

SEQ ID NO: 47508 - protein, 279 aa, Acremonium thermophilum
GKSTRYWDCCKPSCGWAGKASVNQPVFSCSADWQRISDFNAKSGCDGGNAYSCADQTPWAVNDNFSYGFAATAIAGGSEQSWCCACYALTFNSGPVAGKTMVVQSTSTGGDLGENHFDLAIPGGGVGIFNGCQSQFGGLPGAQYGGIQDRSQCSSFPAPLQPGCQWRFDWFQNADNPTFTFQRVQCPSELTSRTGCKRDDDANYPVFSPPSGSPSGGNPPGGNPPGTTTTRMPATTTGSSPTPTQSHYGQCGGIGYSGPTVCASGTTCQVLNPYYSQCL

SEQ ID NO: 47509 - protein, 279 aa, Acremonium thermophilum
GKSTRYWDCCKPSCGWAGKASVNQPVFSCSADWQRISDFNAKSGCDGGNAYSCADQTPWAVNDNFSYGFAATAIAGGSEQSWCCACYALTFNSGPVAGKTMVVQSTSTGGDLGENHFDLAIPGGGVGIFNGCQSQFGGLPGAQYGGIQDRSQCSSFPAPLQPGCQWRFDWFQNADNPTFTFQRVQCPSELTSRTGCKRDDDANYPVFNPPSGNPSGGNPPGGNPPGTTTTRRPATTTGSSPGPTQSHYGQCGGIGYSGPTVCASGTTCQVLNPYYSQCL

SEQ ID NO: 47510 - protein, 279 aa, Acremonium thermophilum
GKSTRYWDCCKPSCGWAGKASVNQPVFSCSADWQRISDFNAKSGCDGGNAYSCADQTPWAVNDNFSYGFAATAIAGGSEQSWCCACYALTFNSGPVAGKTMVVQSTSTGGDLGENHFDLAIPGGGVGIFNGCQSQFGGLPGAQYGGIQDRSQCSSFPAPLQPGCQWRFDWFQNADNPTFTFQRVQCPSELTSRTGCKRDDDANYPVFNPPSGNPQGGQPPGGNPPGTTTTRRPATTTGSSPGPTQSHYGQCGGIGYSGPTVCASGTTCQVLNPYYSQCL

SEQ ID NO: 47511 - protein, 279 aa, Acremonium thermophilum
GKSTRYWDCCKPSCGWAGKASVNQPVFSCSADWQRISDFNRKSGCDGGNAYSCADQTPWAVNDNFSYGFAATAIAGGSEQSWCCACYALTFNSGPVAGKTMVVQSTSTGGDLGENHFDLAIPGGGVGIFNGCQSQFGGLPGAQYGGIQDRRQCSSFPAPLQPGCQWRFDWFQNADNPTFTFQRVQCPSELTSRTGCKRDDDANYPVFNPPSGNPSGGNPPGGNPPGTTTTRRPATTTGSSPGPTQSHYGQCGGIGYSGPTVCASGTTCQVLNPYYSQCL

SEQ ID NO: 47512 - protein, 279 aa, Acremonium thermophilum
GKSTRYWDCCKPSCGWAGKASVNQPVFSCSADWQRISDFNAKSGCDGGNAYSCADQTPWAVNDNFSYGFAATAIAGGSEQSWCCACYALTFNSGPVAGKTMVVQSTSTGGDLGENHFDLAIPGGGVGIFNGCQSQFGGLPGAQYGGIQDRSQCSSFPAPLQPGCQWRFDWFQNADNPTFTFQRVQCPSELTSRTGCKRDDDANYPVFNPPSGNPSGGEPPGGQPPGTTTTRRPATTTGSSPGPTQSHYGQCGGIGYSGPTVCASGTTCQVLNPYYSQCL

SEQ ID NO: 47513 - protein, 279 aa, Acremonium thermophilum
GKSTRYWDCCKPSCGWAGKASVNQPVFSCSADWQRISDFNAKSGCDGGNAYSCADQTPWAVNDNFSYGFAATAIAGGSEQSWCCACYALTFNSGPVAGKTMVVQSTSTGGDLGENHFDLAIPGGGVGIFNGCQSQFGGLPGAQYGGIQDRSQCSSFPAPLQPGCQWRFDWFQNADNPTFTFQRVQCPSELTSRTGCKRDDDANYPVFNTPSGSPSGGNTPGGNTPGTTTTRRPATTTGSSPGPTQSHYGQCGGIGYSGPTVCASGTTCQVLNPYYSQCL

SEQ ID NO: 47514 - protein, 279 aa, Acremonium thermophilum
GKSTRYWDCCKPSCGWAGKASVNQPVFSCSADWQRISDFNAKSGCDGGNAYSCADQTPWAVNDNFSYGFAATAIAGGSEQSWCCACYALTFNSGPVAGKTMVVQSTSTGGDLGENHFDLAIPGGGVGIFNGCQSQFGGLPGAQYGGIQDRSQCSSFPAPLQPGCQWRFDWFQNADNPTFTFQRVQCPSELTSRTGCKRDDDANYPVFNPPSGNPSGGNPPGGNPPGTTTTRRPATTTGSSPGPTQSHYGQCGGIGHSGPTVCQSGTTCQVLNPYYSQCL

SEQ ID NO: 47515 - protein, 279 aa, Acremonium thermophilum
GKSTRYWDCCKPSCGWAGKASVNQPVFSCSADWQRISDFNAKSGCDGGNAYSCADQTPWAVNDNFSYGFAATAIAGGSEQSWCCACYALTFNSGPVAGKTMVVQSTSTGGDLGENHFDLAIPGGGVGIFNGCQSQFGGLPGAQYGGIQDRSQCSSFPAPLQPGCQWRFDWFQNADNPTFTFQRVQCPSELTSRTGCKRDDDANYPVFSPPSGSPSGGSPPGGSPPGTTTTRPPATTTGSSPTPTQSHYGQCGGIGYSGPTVCASGTTCQVLNPYYSQCL

SEQ ID NO: 47516 - protein, 279 aa, Acremonium thermophilum
GKSTRYWDCCKPSCGWAGKASVNQPVFSCSADWQRISDFNAKSGCDGGNAYSCADQTPWAVNDNFSYGFAATAIAGGSEQSWCCACYALTFNSGPVAGKTMVVQSTSTGGDLGENHFDLAIPGGGVGIFNGCQSQFGGLPGAQYGGIQDRSQCSSFPAPLQPGCQWRFDWFQNADNPTFTFQRVQCPSELTSRTGCKRDDDANYPVFWPPSGNPSGGNPPGGNPPGTTTTRRPATTTGSSPGPTQSHYGQCGGIGYSGPTVCASGTTCQVLNPYYSQCL

SEQ ID NO: 47517 - protein, 279 aa, Acremonium thermophilum
GKSTRYWDCCKPSCGWAGKASVNQPVFSCSADWQRISDFNAKSGCDGGNAYSCADQTPWAVNDNFSYGFAATAIAGGSEQSWCCACYALTFNSGPVAGKTMVVQSTSTGGDLGENHFDLAIPGGGVGIFNGCQSQFGGLPGAQYGGIQDRSQCSSFPAPLQPGCQWRFDWFQNADNPTFTFQRVQCPSELTSRTGCKRDDDANYPVFSPPSGSPSGGSPPGGSPPGTTTTRRPATTTGSSPGPTQSHYGQCGGIGYSGPTVCASGTTCQVLNPYYSQCL

SEQ ID NO: 47518 - protein, 279 aa, Acremonium thermophilum
GKSTRYWDCCKPSCGWAGKASVNQPVFSCSADWQRISDFNAKSGCDGGNAYSCADQTPWAVNDNFSYGFAATAIAGGSEQSWCCACYALTFNSGPVAGKTMVVQSTSTGGDLGENHFDLAIPGGGVGIFNGCQSQFGGLPGAQYGGIQDRSQCSSFPAPLQPGCQWRFDWFQNADNPTFTFQRVQCPSELTSRTGCKRDDDANYPVFNPPSGNPSGGNPPGGNPPGTTTTRRPATTTGSSPGPTQNHYGQCGGIGYSGPTVCASGTTCQQLNPYYSQCL

SEQ ID NO: 47519 - protein, 279 aa, Acremonium thermophilum
GKSTRYWDCCKPSCGWAGKASVNQPVFSCSADWQRISDFNAKSGCDGGNAYSCADQTPWAVNDNFSYGFAATAIAGGSEQSWCCACYALTFNSGPVAGKTMVVQSTSTGGDLGENHFDLAIPGGGVGIFNGCQSQFGGLPGAQYGGIQDRSQCSSFPAPLQPGCQWRFDWFQNADNPTFTFQRVQCPSELTSRTGCKRDDDANYPVFNPPSGNPSGGNPPGGNPPGNTTTRRPATTTGQSPGPTQSHYGQCGGIGYSGPTVCASGTTCQVLNPYYSQCL

SEQ ID NO: 47520 - protein, 279 aa, Acremonium thermophilum
GKSTRYWDCCKPSCGWAGKASVNQPVFSCSADWQRISDFNAKSGCDGGNAYSCADQTPWAVNDNFSYGFAATAIAGGSEQSWCCACYALTFNSGPVAGKTMVVQSTSTGGDLGENHFDLAIPGGGVGIFNGCQSQFGGLPGAQYGGIQDRSQCSSFPAPLQPGCQWRFDWFQNADNPTFTFQRVQCPSELTSRTGCKRDDDANYPVFQAPSGSSSGGEAPGGSAPGTTTTRRPATTTGSSPGPTQSHYGQCGGIGYSGPTVCASGTTCQVLNPYYSQCL

SEQ ID NO: 47521 - protein, 279 aa, Acremonium thermophilum
GKSTRYWDCCKPSCGWRGKASVNQPVFSCSADWQRISDFNAKSGCDGGNAYSCADQTPWAVNDNFSYGFAATAIAGGSEQSWCCACYALTFNSGPVAGKTMVVQSTSTGGDLGENHFDLAIPGGGVGIFNGCQSQFGGLPGAQYGGIQDRSQCSSFPAPLQPGCQWRFDWFQNADNPTFTFQRVQCPSELTSRTGCKRDDDANYPVFNPPSGNPSGGNPPGGNPPGTTTTRRPATTTGSSPGPTQSHYGQCGGIGYSGPTVCASGTTCQVLNPYYSQCL

SEQ ID NO: 47522 - protein, 279 aa, Acremonium thermophilum
GKSTRYWDCCKPSCGWAGKASVNQPVFSCSADWQRISDFNAKSGCDGGNAYSCADQTPWAVNDNFSYGFAATAIAGGSEQSWCCACYALTFNSGPVAGKTMVVQSTSTGGDLGENHFDLAIPGGGVGIFNGCQSQFGGLPGAQYGGIQDRSQCSSFPAPLQPGCQWRFDWFQNADNPTFTFQRVQCPSELTSRTGCKRDDDANYPVFNPPSGNPSGGNPPGGSPPGTTTTRRPATTTGSSPGPTQSHYGQCGGIGYSGPTVCASGTTCQVLNPYYSQCL

SEQ ID NO: 47523 - protein, 279 aa, Acremonium thermophilum
GKSTRYWDCCKPSCGWAGKASVNQPVFSCSADWQRISDFNAKSGCDGGNAYSCADQTPWAVNDNFSYGFAATAIAGGSEQSWCCACYALTFNSGPVAGKTMVVQSTSTGGDLGENHFDLAIPGGGVGIFNGCQSQFGGLPGAQYGGIQDRSQCSSFPAPLQPGCQWRFDWFQNADNPTFTFQRVQCPSELTSRTGCKRDDDANYPVFWPPSGRPSGGNPPGGDPPGTTTTRRPATTTGSSPGPTQSHYGQCGGIGYSGPTVCASGTTCQVLNPYYSQCL

SEQ ID NO: 47524 - protein, 279 aa, Acremonium thermophilum
GKSTRYWDCCKPSCGWAGKASVNQPVFSCSADWQRISDFNAKSGCDGGNAYSCADQTPWAVNDNFSYGFAATAIAGGSEQSWCCACYALTFNSGPVAGKTMVVQSTSTGGDLGENHFDLAIPGGGVGIFNGCQSQFGGLPGAQYGGIQDRSQCSSFPAPLQPGCQWRFDWFQNADNPTFTFQRVQCPSELTSRTGCKRDDDANYPVFSPPSGNPSGGNPPGGNPPGTTTTRRPATTTGSSPGPTQSHYGQCGGIGYSGPTVCASGTTCQVLNPYYSQCL

SEQ ID NO: 47525 - protein, 279 aa, Acremonium thermophilum
GKSTRYWDCCKPSCGWAGKASVNQPVFSCSADWQRISDFNAKSGCDGGNAYSCADQTPWAVNDNFSYGFAATAIAGGSEQSWCCACYALTFNSGPVAGKTMVVQSTSTGGDLGENHFDLAIPGGGVGIFNGCQSQFGGLPGAQYGGIQDRSQCSSFPAPLQPGCQWRFDWFQNADNPTFTFQRVQCPSELTSRTGCKRDDDANYPVFSTPSGSTSGGSTPGGSTPGTTTTRRPATTTGSSPGPTQSHYGQCGGIGYSGPTVCASGTTCQVLNPYYSQCL

SEQ ID NO: 47526 - protein, 279 aa, Acremonium thermophilum
GKSTRYWDCCKPSCGWAGKASVNQPVFSCSADWQRISDFNAKSGCDGGNAYSCADQTPWAVNDNFSYGFAATAIAGGSEQSWCCACYALTFNSGPVAGKTMVVQSTSTGGDLGENHFDLAIPGGGVGIFNGCQSQFGGLPGAQYGGIQDRSQCSSFPAPLQPGCQWRFDWFQNADNPTFTFQRVQCPSELTSRTGCKRDDDANYPVFSPPSGSPSGGSPPGGSPPGTTTTRRPATTTGSSPTPTQSHYGQCGGIGYSGPTVCASGTTCQVLNPYYSQCL

SEQ ID NO: 47527 - protein, 279 aa, Acremonium thermophilum
GKSTRYWDCCKPSCGWAGKASVNQPVFSCSADWQRISDFNRKSGCTGGNAYSCADQTPWAVNDNFSYGFAATAIAGGSEQSWCCACYALTFNSGPVAGKTMVVQSTSTGGDLGENHFDLAIPGGGVGIFNGCQSQFGGLPGAQYGGIQDRSQCSSFPAPLQPGCQWRFDWFQNADNPTFTFQRVQCPSELTSRTGCKRDDDANYPVFNPPSGNPSGGNPPGGNPPGTTTTRRPATTTGSSPGPTQSHYGQCGGIGYSGPTVCASGTTCQVLNPYYSQCL

SEQ ID NO: 47528 - protein, 279 aa, Acremonium thermophilum
GKSTRYWDCCKPSCGWAGKASVNQPVFSCSADWQRISDFNARSGCDGGNAYSCADQTPWAVNDNFSYGFAATAIAGGSEQSWCCACYALTFNSGPVAGKTMVVQSTSTGGDLGENHFDLAIPGGGVGIFNGCQSQFGGLPGAQYGGIQDRSQCRSFPAPLQPGCQWRFDWFQNADNPTFTFQRVQCPSELTSRTGCKRDDDANYPVFNPPSGNPSGGNPPGGNPPGTTTTRRPATTTGSSPGPTQSHYGQCGGIGYSGPTVCASGTTCQVLNPYYSQCL

SEQ ID NO: 47529 - protein, 279 aa, Acremonium thermophilum
GKSTRYWDCCKPSCGWAGKASVNQPVFSCSADWQRISDFNAKSGCDGGNAYSCADQTPWAVNDNFSYGFAATAIAGGSEQSWCCACYALTFNSGPVAGKTMVVQSTSTGGDLGENHFDLAIPGGGVGIFNGCQSQFGGLPGAQYGGIQDRSQCSSFPAPLQPGCQWRFDWFQNADNPTFTFQRVQCPSELTSRTGCKRDDDANYPVFEPPSGSPSGGEPPGGSPPGTTTTRRPATTTGSSPGPTQSHYGQCGGIGYSGPTVCASGTTCQVLNPYYSQCL

SEQ ID NO: 47530 - protein, 279 aa, Acremonium thermophilum
GKSTRYWDCCKPSCGWAGKASVNQPVFSCSADWQRISDFNAKSGCDGGNAYSCADQTPWAVNDNFSYGFAATAIAGGSEQSWCCACYALTFNSGPVAGKTMVVQSTSTGGDLGENHFDLAIPGGGVGIFNGCQSQFGGLPGAQYGGIQDRSQCSSFPAPLQPGCQWRFDWFQNADNPTFTFQRVQCPSELTSRTGCKRDDDANYPVFSPPSGNPSGGNPPGGNPPGTTTTRRPATTTGSSPTPTQSHYGQCGGIGYSGPTVCASGTTCQVLNPYYSQCL

SEQ ID NO: 47531 - protein, 279 aa, Acremonium thermophilum
GKSTRYWDCCKPSCGWAGKASVNQPVFSCSADWQRISDFNAKSGCDGGNAYSCADQTPWAVNDNFSYGFAATAIAGGSEQSWCCACYALTFNSGPVAGKTMVVQSTSTGGDLGENHFDLAIPGGGVGIFNGCQSQFGGLPGAQYGGIQDRSQCSSFPAPLQPGCQWRFDWFQNADNPTFTFQRVQCPSELTSRTGCKRDDDANYPVFSPPSGSPSGGSPPGGSPPGTTTTRMPATTTGSSPTPTQSHYGQCGGIGYSGPTVCASGTTCQVLNPYYSQCL

SEQ ID NO: 47532 - protein, 279 aa, Acremonium thermophilum
GKSTRYWDCCKPSCGWAGKASVNQPVFSCSADWQRISDFNAKSGCDGGNAYSCADQTPWAVNDNFSYGFAATAIAGGSEQSWCCACYALTFNSGPVAGKTMVVQSTSTGGDLGENHFDLAIPGGGVGIFNGCQSQFGGLPGAQYGGIQDRSQCSSFPAPLQPGCQWRFDWFQNADNPTFTFQRVQCPSELTSRTGCKRDDDANYPVFNPPSGNPSGGNPPGGNPPGTTTTRRPATTTGSSPGPTQSHYGQCGGIGYSGPTQCQSGTTCQVLNPYYSQCL

SEQ ID NO: 47533 - protein, 279 aa, Acremonium thermophilum
GKSTRYWDCCKPSCGWAGKAPVNQPVFSCSADWQRISDFNAKSGCDGGNAYSCADQTPWAVNDNFSYGFAATAIAGGSEQSWCCACYALTFNSGPVAGKTMVVQSTSTGGDLGENHFDLAIPGGGVGIFNGCQSQFGGLPGAQYGGIQDRSQCSSFPAPLQPGCQWRFDWFQNADNPTFTFQRVQCPSELTSRTGCKRDDDANYPVFNPPSGNPSGGNPPGGNPPGTTTTRRPATTTGSSPGPTQSHYGQCGGIGYSGPTVCASGTTCQVLNPYYSQCL

SEQ ID NO: 47534 - protein, 279 aa, Acremonium thermophilum
GKSTRYWDCCKPSCGWAGKASVNQPVFSCSADWQRISDFNAKSGCDGGNAYSCADQTPWAVNDNFSYGFAATAIAGGSEQSWCCACYALTFNSGPVAGKTMVVQSTSTGGDLGENHFDLAIPGGGVGIFNGCQSQFGGLPGAQYGGIQDRSQCSSFPAPLQPGCQWRFDWFQNADNPTFTFQRVQCPSELTSRTGCKRDDDANYPVFNPPSGNPSGGNPPGGNPPGTTTTRMPATTTGSSPGPTQSHYGQCGGIGYSGPTVCASGTTCQVLNPYYSQCL

SEQ ID NO: 47535 - protein, 279 aa, Acremonium thermophilum
GKSTRYWDCCKPSCGWAGKASVNQPVFSCSADWQRISDFNAKSGCDGGNAYSCADQTPWAVNDNFSYGFAATAIAGGSEQSWCCACYALTFNSGPVAGKTMVVQSTSTGGDLGENHFDLAIPGGGVGIFNGCQSQFGGLPGAQYGGIQDRSQCSSFPAPLQPGCQWRFDWFQNADNPTFTFQRVQCPSELTSRTGCKRDDDANYPVFSPPSGRPSGGSPPGGSPPGTTTTRRPATTTGSSPGPTQSHYGQCGGIGYSGPTVCASGTTCQVLNPYYSQCL

SEQ ID NO: 47536 - protein, 279 aa, Acremonium thermophilum
GKSTRYWDCCKPSCGWAGKASVNQPVFSCSADWQRISDFNAKSGCDGGNAYSCADQTPWAVNDNFSYGFAATAIAGGSEQSWCCACYALTFNSGPVAGKTMVVQSTSTGGDLGENHFDLAIPGGGVGIFNGCQSQFGGLPGAQYGGIQDRSQCSSFPAPLQPGCQWRFDWFQNADNPTFTFQRVQCPSELTSRTGCKRDDDANYPVFQPPSGSPSGGEPPGGSPPGTTTTRRPATTTGSSPGPTQSHYGQCGGIGYSGPTVCASGTTCQVLNPYYSQCL

SEQ ID NO: 47537 - protein, 279 aa, Acremonium thermophilum
GKSTRYWDCCKPSCGWAGKAPVNQPVFSCSADWQRISDFNAKSGCDGGNAYSCADQTPWAVNDNFSYGFAATAIAGGSEQSWCCACYALTFNSGPVAGKTMVVQSTSTGGDLGENHFDLAIPGGGVGIFNGCQSQFGGLPGAQYGGIQDRSQCSSFPAPLQPGCQWRFDWFQNADNPTFTFQRVQCPSELISRTGCKRDDDANYPVFNPPSGNPSGGNPPGGNPPGTTTTRRPATTTGSSPGPTQSHYGQCGGIGYSGPTVCASGTTCQVLNPYYSQCL

SEQ ID NO: 47538 - protein, 279 aa, Acremonium thermophilum
GKSTRYWDCCKPSCGWAGKASVNQPVFSCSADWQRISDFNAKSGCDGGNAYSCADQTPWAVNDNFSYGFAATAIAGGSEQSWCCACYALTFNSGPVAGKTMVVQSTSTGGDLGENHFDLAIPGGGVGIFNGCQSQFGGLPGAQYGGIQDRSQCSSFPAPLQPGCQWRFDWFQNADNPTFTFQRVQCPSELTSRTGCKRDDDANYPVFNTPSGNTSGGNTPGGNTPGTTTTRRPATTTGSSPGPTQSHYGQCGGIGYSGPTVCASGTTCQVLNPYYSQCL

SEQ ID NO: 47539 - protein, 279 aa, Acremonium thermophilum
GKSTRYWDCCKPSCGWAGKASVNQPVFSCSADWQRISDFNAKSGCDGGNAYSCADQTPWAVNDNFSYGFAATAIAGGSEQSWCCACYALTFNSGPVAGKTMVVQSTSTGGDLGENHFDLAIPGGGVGIFNGCQSQFGGLPGAQYGGIQDRSQCSSFPAPLQPGCQWRFDWFQNADNPTFTFQRVQCPSELTSRTGCKRDDDANYPVFNPPSGNPTGGEPPGGNPPGTTTTRRPATTTGSSPGPTQSHYGQCGGIGYSGPTVCASGTTCQVLNPYYSQCL

SEQ ID NO: 47540 - protein, 279 aa, Acremonium thermophilum
GKSTRYWDCCKPSCGWAGKASVNQPVFSCSADWQRISDFNAKSGCDGGNAYSCADQTPWAVNDNFSYGFAATAIAGGSERSWCCACYALTFNSGPVAGKTMVVQSTSTGGDLGHNHFDLAIPGGGVGIFNGCQSQFGGLPGAQYGGIQDRSQCSSFPAPLQPGCQWRFDWFQNADNPTFTFQRVQCPSELTSRTGCKRDDDANYPVFNPPSGNPSGGNPPGGNPPGTTTTRRPATTTGSSPGPTQSHYGQCGGIGYSGPTVCASGTTCQVLNPYYSQCL

SEQ ID NO: 47541 - protein, 279 aa, Acremonium thermophilum
GKSTRYWDCCKPSCGWAGKASVNQPVFSCSADWQRISDFNARSGCEGGNAYSCADQTPWAVNDNFSYGFAATAIAGGSEQSWCCACYALTFNSGPVAGKTMVVQSTSTGGDLGENHFDLAIPGGGVGIFNGCQSQFGGLPGAQYGGIQDRSQCSSFPAPLQPGCQWRFDWFQNADNPTFTFQRVQCPSELTSRTGCKRDDDANYPVFNPPSGNPSGGNPPGGNPPGTTTTRRPATTTGSSPGPTQSHYGQCGGIGYSGPTVCASGTTCQVLNPYYSQCL

SEQ ID NO: 47542 - protein, 279 aa, Acremonium thermophilum
GKSTRYWDCCKPSCGWAGKASVNQPVFSCSADWQRISDFNAKSGCDGGNAYSCADQTPWAVNDNFSYGFAATAIAGGSEQSWCCACYALTFNSGPVAGKTMVVQSTSTGGDLGENHFDLAIPGGGVGIFNGCQSQFGGLPGAQYGGIQDRSQCSSFPAPLQPGCQWRFDWFQNADNPTFTFQRVQCPSELTSRTGCKRDDDANYPVFNPPSGNPSGGNPPGGDPPGTTTTRRPATTTGSSPGPTQSHYGQCGGIGYSGPTVCASGTTCQVLNPYYSQCL

SEQ ID NO: 47543 - protein, 279 aa, Acremonium thermophilum
GKSTRYWDCCKPSCGWAGKASVNQPVFSCSADWQRISDFNAKSGCDGGNAYSCADQTPWAVNDNFSYGFAATAIAGGSEQSWCCACYALTFNSGPVAGKTMVVQSTSTGGDLGENHFDLAIPGGGVGIFNGCQSQFGGLPGAQYGGIQDRSQCSSFPAPLQPGCQWRFDWFQNADNPTFTFQRVQCPSELTSRTGCKRDDDANYPVFNPPSGNPSGSNPPGGNPPGTTTTRRPATTTGSSPGPTQSHYGQCGGIGYSGPTVCASGTTCQVLNPYYSQCL

SEQ ID NO: 47544 - protein, 279 aa, Acremonium thermophilum
GKSTRYWDCCKPSCGWAGKASVNQPVFSCSADWQRISDFNAKSGCDGGNAYSCADQTPWAVNDNFSYGFAATAIAGGSEQSWCCACYALTFNSGPVAGKTMVVQSTSTGGDLGENHFDLAIPGGGVGIFNGCQSQFGGLPGAQYGGIQDRSQCSSFPAPLQPGCQWRFDWFQNADNPTFTFQRVQCPSELTSRTGCKRDDDANYPVFSPPSGRPSGGNPPGGNPPGTTTTRRPATTTGSSPTPTQSHYGQCGGIGYSGPTVCASGTTCQVLNPYYSQCL

SEQ ID NO: 47545 - protein, 279 aa, Acremonium thermophilum
GKSTRYWDCCKPSCGWAGKASVNQPVFSCSADWQRISDFNAKSGCDGGNAYSCADQTPWAVNDNFSYGFAATAIAGGSEQSWCCACYALTFNSGPVAGKTMVVQSTSTGGDLGENHFDLAIPGGGVGIFNGCQSQFGGLPGAQYGGIQDRSQCSSFPAPLQPGCQWRFDWFQNADNPTFTFQRVQCPSELTSRTGCKRDDDANYPVFSPPSGSPSGGNPPGGNPPGTTTTRRPATTTGSSPTPTQSHYGQCGGIGYSGPTVCASGTTCQVLNPYYSQCL

SEQ ID NO: 47546 - protein, 219 aa, Thermothielavioides terrestris
SGSGQSTRYWDCCKPSCAWPGKAAVSQPVYACDANFQRLSDFNVQSGCNGGSAYACADQTPWAVNDNLAYGFAATSIAGGSESSWCCACYALTFTSGPVAGKTMVVQSTSTGGDLGSNHFDIAMPGGGVGIFDGCSSQFGGLPGARYGGISSRDQCDSFPAPLKPGCQWRFDWFQNADNPTFTFQQVQCPAEIVARSGCKRNDDSSFPVFTPQPTPQPT

SEQ ID NO: 47547 - protein, 219 aa, Thermothielavioides terrestris
SGSGQSTRYWDCCKPSCAWPGKAAVSQPVYACDANFQRLSDFNVQSGCNGGSAYSCADQTPWAVNDNLAYGFAATSIAGGSESSWCCACYALTFTSGPVAGKTMVVQSTSTGGDLGSNHFDIAMPGGGVGIFDGCSSQFGGLPGARYGGISSRDQCDSFPAPLKPGCQWRFDWFQNADNPTFTFQQVQCPAEIVARSGCKRNDDSSFPVFTPEPTPEPT

SEQ ID NO: 47548 - protein, 219 aa, Thermothielavioides terrestris
SGSGQSTRYWDCCKPSCAWPGKAAVSQPVYACDANFQRLSDFNVQSGCNGGSAYACADQTPWAVNDNLAYGFAATSIAGGSESSWCCACYALTFTSGPVAGKTMVVQSTSTGGDLGSNHFDIAMPGGGVGIFDGCSSQFGGLPGARYGGISSRDQCDSFPAPLKPGCQWRFDWFQNADNPTFTFQQVQCPAEIVARSGCKRNDDSSFPVFTPEPTPQPT

SEQ ID NO: 47549 - protein, 297 aa, Thielavia terrestris. Staphylotrichum coccosporum. Chimeric. Synthetic construct
MRSSPVLRTALAAALPLAALAADGKSTRYWDCCKPSCSWPGKASVNQPVFACSANFQRISDPNVKSGCDGGSAYACADQTPWAVNDNFSYGFAATSISGGNEASWCCGCYELTFTSGPVAGKTMVVQSTSTGGDLGTNHFDLAMPGGGVGIFDGCSPQFGGLAGDRYGGVSSRSQCDSFPAALKPGCYWRFDWFKNADNPTFTFRQVQCPSELVARTGCRANDDSSFPVFTPPSGGNGGTGTPTSTAPGSGQTSPGGGSGCTSQKWAQCGGIGFSGCTTCVSGTTCQKLNDYYSQCL

SEQ ID NO: 47550 - protein, 257 aa, Staphylotrichum coccosporum
GVSTRYWDCCKPSCSWPGKALVNQPVFACYANFQRISDPNVKSGCDGGSAYACADQTPWAVNDNFSYGFAATSISGGSEASWCCGCYELTFTSGPVAGKKMVVQSTSTGGDLGTNHFDLAMPGGGVGIFDGCSPQFGGLPGDRYGGVSSRSQCDSFPAPLKPGCYWRFDWFKNADNPTFTFRQVQCPSELVARTGCRRNDDGNFPVFTPPSGGQSSSSSSSSSAKPTSTSTSTTDTKATSTTSTASSQTSSSTGGGC

SEQ ID NO: 47551 - protein, 257 aa, Staphylotrichum coccosporum
GKSTRYWDCCKPSCSWPGKASVNQPVFACDANFQRISDPNVKSGCDGGSAYACADQTPWAVNDNFSYGFAATSISGGNEASWCCGCYELTFTSGPVAGKTMVVQSTSTGGDLGTNHFDLAMPGGGVGIFDGCSPQFGGLPGDRYGGVSSRSQCDSFPAALKPGCYWRFDWFKNADNPTFTFRQVQCPSELVARTGCRRNDDGNFPVFTPPSGGQSSSSSSSSSAKPTSTSTSTTSTKATSTTSTASSQTSSSTGGGC

SEQ ID NO: 47552 - protein, 244 aa, Humicola sp.
MRSSPILRKAVAAALPLGAYAASGNGQSTRYWDCCKPSCAWPEKAAVSQPVYACDANFQRISDPLVSSGCDGGQAFSCADHSPWALNDNLSYGFAATALAGGTEASWCCACYALTFTSGPVAGKTMVVQSTSTGGDLGNNHFDLNIPGGGVGLFDGCTPQFGGLPGAQYGGISSRSECDSFPEPLKAGCYWRFDWFQNADNPSFTFEQVQCPDELVARTGCRRNDDGNFPVFTPPAGGNDGEQP

SEQ ID NO: 47553 - protein, 199 aa, Neurospora crassa
YAXVSLQLLGITRWLTFTAALTFTSGPVAGKTLVVQSTSTGGDLGSNHFDINMPGGGVGLFDGCKRQFGGLPGAQYGGISSRSQCDSFPAALKPGCQWRFDWFQNADNPNFTFKQVQCPSELTSRTGCKRNDDSQFPVFTPPSGGGSNPSTPTTPPSSGGGSGCTADKYAQCGGSGWSGCTNCPSGSTCKTINDYYHQC

SEQ ID NO: 47554 - protein, 277 aa, Thermothielavioides terrestris
SGSGQSTRYWDCCKPSCAWPGKAAVSQPVYACDANFQRLSDFNVQSGCNGGSAYACADQTPWAVNDNLAYGFAATSIAGGSESSWCCACYALTFTSGPVAGKTMVVQSTSTGGDLGSNHFDIAMPGGGVGIFDGCSSQFGGLPGARYGGISSRDQCDSFPAPLKPGCQWRFDWFQNADNPTFTFQQVQCPAEIVARSGCKRNDDSSFPVFTPPPGGPGGTGTPTSTAPGSGPTSPGGGSGCTAERWAQCGGNGWSGCTTCVAGSTCTKINDWYHQCL

SEQ ID NO: 47555 - protein, 277 aa, Thermothielavioides terrestris
SGSGQSTRYWDCCKPSCAWPGKAAVSQPVYACDANFQRLSDFNVQSGCNGGSAYACADQTPWAVNDNLAYGFAATSIAGGSESSWCCACYALTFTSGPVAGKTMVVQSTSTGGDLGSNHFDIAMPGGGVGIFDGCSSQFGGLPGARYGGISSRDQCDSFPAPLKPGCQWRFDWFQNADNPTFTFQQVQCPAEIVARSGCKRNDDSSFPVFTPPPGGPGGPGTPTSTAPGSGPTSPGGGSGCTAERWAQCGGNGWSGCTTCVAGSTCTKINDWYHQCL

SEQ ID NO: 47556 - protein, 278 aa, Acremonium thermophilum
GKSTRYWDCCKPSCGWAGKASVNQPVFSCSADWQRISDFNAKSGCDGGNAYSCADQTPWAVNDNFSYGFAATAIAGSEQSWCCACYALTFNSGPVAGKTMVVQSTSTGGDLGENHFDLAIPGGGVGIFNGCQSQFGGLPGAQYGGIQDRSQCSSFPAPLQPGCQWRFDWFQNADNPTFTFQRVQCPSELTSRTGCKRDDDANYPVFNPPSGNPSGGNPPGGNPPGTTTTRRPATTTGSSPGPTQSHYGQCGGIGYSGPTVCASGTTCQVLNPYYSQCL

SEQ ID NO: 47557 - protein, 218 aa, Thermothielavioides terrestris
SGSGQSTRYWDCCKPSCAWPGKAAVSQPVYACDANFQRLSDFNVQSGCNGGSAYACADQTPWAVNDNLAYGFAATSIAGGSESSWCCACYALTFTSGPVAGKTMVVQSTSTGGDLGSNHFDIAMPGGGVGIFDGCSSQFGGLPGAQYGGISSRDECDSFPAPLKPGCYWRFDWFQNADNPTFTFQQVQCPAEIVARSGCKRNDDSSFPVFTPPPPCTS

SEQ ID NO: 47558 - protein, 218 aa, Thermothielavioides terrestris
SGSGQSTRYWDCCKPSCAWPGKAAVSQPVYACDANFQRLSDFNVQSGCNGGSAYACADQTPWAVNDNLAYGFAATSIAGGSESSWCCACYALTFTSGPVAGKTMVVQSTSTGGDLGSNHFDIAMPGGGVGIFDGCSSQFGGLPGARYGGISSRDQCDSFPAPLKPGCQWRFDWFQNADNPTFTFQQVQCPAEIVARSGCKRNDDSSFPVFTSPSPSPS

SEQ ID NO: 47559 - protein, 309 aa, Thermochaetoides thermophila
MRSTPVLRTALAAALPFTVLAADGKSTRYWDCCKPSCLSPGNTQVSQNVFACDRNFNRIYDFGAKSGCEGGPAYSCADQTPWAVNDQFSYGFAATNIAGGNEASWCCACYKLTFTSGPVAGKVMVVQSTSTGGDLGNNHFDLNIPGGGVGIFDGCTPQFGGLPGERYGGISSRSQCDSFPDALKPGCYWRFDWFLNADNPNFTFERVQCPSELVARTGCKRNDDGNYPVFTPPSGDSPSSSSAAPTSTSTSQQPQQPTSSSSQASVPTSNPGGCTSQKWAQCGGIGFTGCTTCVSGTTCTKLNDWYSQC

SEQ ID NO: 47560 - protein, 309 aa, Thermochaetoides thermophila
MRSTPVLRTALAAALPFTVLAADGKSTRYWDCCKPSCLSPGNLQVSQNVFACDRNFNRIYDFGAKSGCEGGPAYSCADQTPWAVNDQFSYGFAATNIAGGNEASWCCACYKLTFTSGPVAGKVMVVQSTSTGGDLGNNHFDLNIPGGGVGIFDGCTPQFGGLPGERYGGISSRSQCDSFPDALKPGCYWRFDWFLNADNPNFTFERVQCPSELVARTGCKRNDDGNYPVFTPPSGDSPSSSSAAPTSTSTSQQPQQPTSSSSQASVPTSNPGGCTSQKWAQCGGIGFTGCTTCVSGTTCTKLNDWYSQC

SEQ ID NO: 47561 - protein, 309 aa, Thermochaetoides thermophila
MRSTPVLRTALAAALPFTVLAADGKSTRYWDCCKPSCLSPGNVQVSQNVFACDRNFNRIYDFGAKSGCEGGPAYSCADQTPWAVNDQFSYGFAATNIAGGNEASWCCACYKLTFTSGPVAGKVMVVQSTSTGGDLGNNHFDLNIPGGGVGIFDGCTPQFGGLPGERYGGISSRSQCDSFPDALKPGCYWRFDWFLNADNPNFTFERVQCPSELVARTGCKRNDDGNYPVFTPPSGDSPSSSSAAPTSTSTSQQPQQPTSSSSQASVPTRNPGGCTSQKWAQCGGIGFTGCTTCVSGTTCTKLNDWYSQC

SEQ ID NO: 47562 - protein, 309 aa, Thermochaetoides thermophila
MRSTPVLRTALAAALPFTVLAADGKSTRYWDCCKPSCLSPGNVQVSQNVFACDTNFNRIYDFGAKSGCEGGPAYSCADQTPWAVNDQFSYGFAATNIAGGNQASWCCACYKLTFTDGPVAGKVMVVQSTSTGGDLGNNHFDLNIPGGGVGIFDGCTPQFGGLPGERYGGISSRSQCDSFPDALKPGCYWRFDWFLNADNPNFTFERVQCPSELVARTGCKRNDDGNYPVFTPPSGDSPSSSSAAPTSTSTSQQPQQPSSSSSQASVPTSNPGGCTSEKWAQCGGIGFTGCTTCVSGTTCTKLNDWYSQC

SEQ ID NO: 47563 - protein, 309 aa, Thermochaetoides thermophila
MRSTPVLRTALAAALPFTVLAADGNSTRYWDCCKPSCLSPGNVQVSQNVFACDRNFNRIYDFGAKSGCEGGPAYSCADQTPWAVNDQFSYGFAATNIAGGNEASWCCACYKLTFTSGPVAGKVMVVQSTSTGGDLGNNHFDLNIPGGGVGIFDGCTPQFGGLPGERYGGISSRSQCDSFPDALKPGCYWRFDWFLNADNPNFTFERVQCPSELVARTGCKRNDDGNYPVFTPPSGDSPSSSSAAPTSTSTSQQPQQPTSSSSQASVPTSNPGGCTSQKWAQCGGIGFTGCTTCVSGTTCTKLNDWYSQC

SEQ ID NO: 47564 - protein, 309 aa, Thermochaetoides thermophila
MRSTPVLRTALAAALPFTVLAADGKSTRYWDCCKPSCLSPGNVQVSQNVFACDRNFNRIYDFGAKSGCEGGPAYSCADQTPWAVNDQFSYGFAATNIAGGNEASWCCACYKLTFTSGPVAGKVMVVQSTSTGGDLGNNHFDLNIPGGGVGIFDGCTPQFGGLPGERYGGISSRSQCDSFPDALKPGCYWRFDWFLNADNPNFTFERVQCPSELVARTGCKRNDDGNYPVFTPPSGDSPSSSSAAPTSTSTSQQPQQPTSSSSQASVPTSNPGGCTSQKWAQCGGIGFTGCTTCVSGTTCTKLNDWYSQC

SEQ ID NO: 47565 - protein, 309 aa, Thermochaetoides thermophila
MRSTPVLRTALAAALPFTVLAADGKSTRYWDCCKPSCLSPGNVQVSQNVFECDRNFNRIYDFGAKSGCEGGPAYSCADQTPWAVNDQFSYGFAATNIAGGNEASWCCACYKLTFTSGPVAGKVMVVQSTSTGGDLGNNHFDLNIPGGGVGIFDGCTPQFGGLPGERYGGISSRSQCDSFPDALKPGCYWRFDWFLNADNPNFTFERVQCPSELVARTGCKRNDDGNYPVFTPPSGDSPSSSSAAPTSTSTSQQPQQPTSSSSQASVPTSNPGGCTSQKWAQCGGIGFTGCTTCVSGTTCTKLNDWYSQC

SEQ ID NO: 47566 - protein, 309 aa, Thermochaetoides thermophila
MRSTPVLRTALAAALPFTVLAADGKSTRYWDCCKPSCSWPGKAAVSQPVFACDRNFNRLSDFNVQSGCNGGPAYSCADQTPWAVNDQFSYGFAATNIAGGNEASWCCACYKLTFTSGPVAGKVMVVQSTSTGGDLGNNHFDLNIPGGGVGIFDGCTPQFGGLPGERYGGISSRSQCDSFPDALKPGCYWRFDWFLNADNPNFTFERVQCPSELVARTGCKRNDDGNYPVFTPPSGDSPSSSSAAPTSTSTSQQPQQPTSSSSQASVPTSNPGGCTSQKWAQCGGIGFTGCTTCVSGTTCTKLNDWYSQC

SEQ ID NO: 47567 - protein, 309 aa, Thermochaetoides thermophila
MRSTPVLRTALAAALPFTVLAADGKSTRYWDCCKPSCLSPGNVQVSQNVFACDRNFNRIYDFGAKSGCEGGPAYSCADQTPWAVNDQFSYGFAATNIAGGNEASWCCACYKLTFTSGPVAGKVMVVQSTSTGGDLGNNHFDLNIPGGGVGIFDGCTPQFGGLPGERYGGISSRSQCDSFPDALKPGCYWRFDWFLNADNPNFTFERVQCPSELVARTGCKRNDDGNYPVFTPPSGDSPSSSSAAPTSTSTSQQPQQPSSSSSQASVPTSNPGGCTSQKWAQCGGIGFTGCATCVSGTTCTKLNDWYSQC

SEQ ID NO: 47568 - protein, 309 aa, Thermochaetoides thermophila
MRSTPVLRTALAAALPFTVLAADGKSTRYWDCCKPSCLSPGNVQVSQNVFACDRNFNRIYDFGAKSGCEGGPAYSCADQTPWAVNDQFSYGFAATNIAGGNEASWCCACYKLTFTSGPVAGKVMVVQSTSTGGDLGNNHFDLNIPGGGVGIFDGCTPQFGGLPGERYGGISSRSQCDSFPDALKPGCYWRFDWFLNADNPNFTFERVQCPSELVARTGCKRNDDGNYPVFTPPSGDSPSSSSAAPTSTSTSQQPQQPTSSSSQASVPTSNPGGCTHQXWAQCGGIGFTGCTTCVSGTTCTKLNDWYSQC

SEQ ID NO: 47569 - protein, 309 aa, Thermochaetoides thermophila
MRSTPVLRTALAAALPFTVLAADGKSTRYWDCCKPSCLSPGNVEVSQNVFACDRNFNRIYDFGAKSGCEGGPAYSCADQTPWAVNDQFSYGFAATNIAGGNEASWCCACYKLTFTSGPVAGKVMVVQSTSTGGDLGNNHFDLNIPGGGVGIFDGCTPQFGGLPGERYGGISSRSQCDSFPDALKPGCYWRFDWFLNADNPNFTFERVQCPSELVARTGCKRNDDGNYPVFTPPSGDSPSSSSAAPTSTSTSQQPQQPTSSSSQASVPTSNPGGCTSQKWAQCGGIGFTGCTTCVSGTTCTKLNDWYSQC

SEQ ID NO: 47570 - protein, 309 aa, Thermochaetoides thermophila
MRSTPVLRTALAAALPGTVLAADGKSTRYWDCCKPSCLSPGNVQVSQNVFACDRNFNRIYDFGAKSGCEGGPAYSCADQTPWAVNDQFSYGFAATNIAGGNEASWCCACYKLTFTSGPVAGKVMVVQSTSTGGDLGNNHFDLNIPGGGVGIFDGCTPQFGGLPGERYGGISSRSQCDSFPDALKPGCYWRFDWFLNADNPNFTFERVQCPSELVARTGCKRNDDGNYPVFTPPSGDSPSSSSAAPTSTSTSQQPQQPTSSSSQASVPTSNPGGCTSQKWAQCGGIGFTGCTTCVSGTTCTKLNDWYSQC

SEQ ID NO: 47571 - protein, 309 aa, Thermochaetoides thermophila
MRSTPVLRTALAAALPFTVLAADGKSTRYWDCCKPSCLSPGNAEVSQNVFACDTNFNRIYDFGAKSGCEGGPAYSCADQTPWAVNDQFSYGFAATNIAGGNEASWCCACYKLTFTSGPVAGAVMVVQSTSTGGDLGNNHFDLNIPGGGVGIFDGCTPQFGGLPGERYGGISSRSQCDSFPDALKPGCYWRFDWFLNADNPNFTFERVQCPSELVARTGCKRNDDGNYPVFTPPSGDSPSSSSAAPTSTSTSQQPQQPTSSSSQASVPTSNPGGCTSQKWAQCGGIGFTGCTTCVSGTTCTKLNDWYSQC

SEQ ID NO: 47572 - protein, 309 aa, Thermochaetoides thermophila
MRSTPVLRTALAAALPFTVLAADGKSTRYWDCCKPSCLSPGNEQVSQNVFACDRNFNRIYDFGAKSGCEGGPAYSCADQTPWAVNDQFSYGFAATNIAGGNEASWCCACYKLTFTSGPVAGKVMVVQSTSTGGDLGNNHFDLNIPGGGVGIFDGCTPQFGGLPGERYGGISSRSQCDSFPDALKPGCYWRFDWFLNADNPNFTFERVQCPSELVARTGCKRNDDGNYPVFTPPSGDSPSSSSAAPTSTSTSQQPQQPTSSSSQASVPTSNPGGCTSQKWAQCGGIGFTGCTTCVSGTTCTKLNDWYSQC

SEQ ID NO: 47573 - protein, 309 aa, Thermochaetoides thermophila
MRSTPVLRTALAAALPGTVLAADGKSTRYWDCCKPSCLSPGNSEVSQNVFACDTNFNRIYDFGAKSGCEGGPAYSCADQTPWAVNDQFSYGFAATNIAGGNEASWCCACYKLTFTSGPVAGKVMVVQSTSTGGDLGNNHFDLNIPGGGVGIFDGCTPQFGGLPGERYGGISSRSQCDSFTDALKPGCYWRFDWFLNADNPNFTFERVQCPSELVARTGCKRNDDGNYPVFTPPSGDSPSSSSAAPTSTSTSQQPQQPSDSSSQASVPTSNPGGCTSQKWAQCGGIGFTGCTTCVSGTTCTKLNDWYSQC

SEQ ID NO: 47574 - protein, 309 aa, Thermochaetoides thermophila
MRSTPVLRTALAAALPFTVLAADGKSTRYWDCCKPSCLSPGNVQVSQNVFTCDRNFNRIYDFGAKSGCEGGPAYSCADQTPWAVNDQFSYGFAATNIAGGNEASWCCACYKLTFTSGPVAGKVMVVQSTSTGGDLGNNHFDLNIPGGGVGIFDGCTPQFGGLPGERYGGISSRSQCDSFPDALKPGCYWRFDWFLNADNPNFTFERVQCPSELVARTGCKRNDDGNYPVFTPPSGDSPSSSSAAPTSTSTSQQPQQPTSSSSQASVPTSNPGGCTSQKWAQCGGIGFTGCTTCVSGTTCTKLNDWYSQC

SEQ ID NO: 47575 - protein, 309 aa, Thermochaetoides thermophila
MRSTPVLRTALAAALPFTVLAADGKSTRYWDCCKPSCSWPGKADVNQPVFACDRNFNRLSDFNVQSGCNGGPAYSCADQTPWAVNDQFSYGFAATNIEGGNEASWCCACYKLTFTSGPVAGKVMVVQSTSTGGDLGNNHFDLNIPGGGVGIFDGCTPQFGGLPGERYGGISSRSQCDSFPDALKPGCYWRFDWFLNADNPNFTFERVQCPSELVARTGCKRNDDGNYPVFTPPSGDSPSSSSAAPTSTSTSQQPQQPTSSSSQASVPTSNPGGCTSQKWAQCGGIGFTGCTTCVSGTTCTKLNDWYSQC

SEQ ID NO: 47576 - protein, 309 aa, Thermochaetoides thermophila
MRSTPVLRTALAAALPGTVLAADGKSTRYWDCCKPSCLSPGNVQVSQNVFACDTNFNRIYDFGAKSGCEGGPAYSCADQTPWAVNDQFSYGFAATNIAGGNEASWCCACYKLTFTSGPVAGKVMVVQSTSTGGDLGNNHFDLNIPGGGVGIFDGCTPQFGGLPGERYGGISSRSQCDSFPDALKPGCYWRFDWFLNADNPNFTFERVQCPSELVARTGCKRNDDGNYPVFTPPSGDSPSSSSAAPTSTSTSQQPQQPTSSSSQASVPTSNPGGCTSQKWAQCGGIGFTGCTTCVSGTTCTKLNDWYSQC

SEQ ID NO: 47577 - protein, 309 aa, Thermochaetoides thermophila
MRSTPVLRTALAAALPFTVLAADGKSTRYWDCCKPSCLSPGNVQVSQNVFACDRNFNRIYDFGAKSGCEGGPAYSCADQTPWAVNDQFSYGFAATNIAGGNEASWCCACYKLTFTSGPVAGKVMVVQSTSTGGDLGNNHFDLNIPGGGVGIFDGCTPQFGGLPGERYGGISSRSQCDSFPDALKPGCYWRFDWFLNADNPNFTFERVQCPSELVARTGCKRNDDGNYPVFTPPSGDSPSSSSAAPTSTSTSQQPQQPTSSSSQASVPTSNPGGCTSDKWAQCGGIGFTGCTTCVSGTTCTKLNDWYSQC

SEQ ID NO: 47578 - protein, 309 aa, Thermochaetoides thermophila
MRSTPVLRTALAAALPFTVLAADGKSTRYWDCCKPSCLSPGNVQVSQNVFNCDRNFNRIYDFGAKSGCEGGPAYSCADQTPWAVNDQFSYGFAATNIAGGNEASWCCACYKLTFTSGPVAGKVMVVQSTSTGGDLGNNHFDLNIPGGGVGIFDGCTPQFGGLPGERYGGISSRSQCDSFPDALKPGCYWRFDWFLNADNPNFTFERVQCPSELVARTGCKRNDDGNYPVFTPPSGDSPSSSSAAPTSTSTSQQPQQPTSSSSQASVPTSNPGGCTSQKWAQCGGIGFTGCTTCVSGTTCTKLNDWYSQC

SEQ ID NO: 47579 - protein, 309 aa, Thermochaetoides thermophila
MRSTPVLRTALAAALPFTVLAADGKSTRYWDCCKPSCLSPGNSQVSQNVFACDRNFNRIYDFGAKSGCEGGPAYSCADQTPWAVNDQFSYGFAATNIAGGNEASWCCACYKLTFTSGPVAGKVMVVQSTSTGGDLGNNHFDLNIPGGGVGIFDGCTPQFGGLPGERYGGISSRSQCDSFPDALKPGCYWRFDWFLNADNPNFTFERVQCPSELVARTGCKRNDDGNYPVFTPPSGDSPSSSSAAPTSTSTSQQPQQPTSSSSQASVPTSNPGGCTSQKWAQCGGIGFTGCTTCVSGTTCTKLNDWYSQC

SEQ ID NO: 47580 - protein, 309 aa, Thermochaetoides thermophila
MRSTPVLRTALAAALPFTVLAADGKSTRYWDCCKPSCLSPGNVQVSQNVFACDRNFNRIYDFGAKSGCEGGPAYSCADQTPWAVNDQFSYGFAATNIAGGNEASWCCACYKLTFTSGPVAGKVMVVQSTSTGGDLGNNHFDLNIPGGGVGIFDGCTPQFGGLPGERYGGISSRSQCDSFPDALKPGCYWRFDWFLNADNPNFTFERVQCPSELVARTGCKRNDDGNYPVFTPPSGDSPSSSSAAPTSTSTSQQPQQPTSSSSQASVPNSNPGGCTSQKWAQCGGIGFTGCTTCVSGTTCTKLNDWYSQC

SEQ ID NO: 47581 - protein, 309 aa, Thermochaetoides thermophila
MRSTPVLRTALAAALPFTVLAADGKSTRYWDCCKPSCLSPGNVQVSQNVFACDRNFNRIYDFGAKSGCEGGPAYSCADQTPWAVNDQFSYGFAATNIAGGNEASWCCACYKLTFTSGPVAGKVMVVQSTSTGGDLGNNHFDLNIPGGGVGIFDGCTPQFGGLPGERYGGISSRSQCDSFPDALKPGCYWRFDWFLNADNPNFTFERVQCPSELVARTGCKRNDDGNYPVFTPPSGDSPSSSSAAPTSTSTSQQPQQPTSSSSQASVPTSXPGGCTSQKWAQCGGIGFTGCTTCVSGTTCTKLNDWYSQC

SEQ ID NO: 47582 - protein, 309 aa, Thermochaetoides thermophila
MRSTPVLRTALAAALPFTVLAADGKSTRYWDCCKPSCLSPGNVQVSQNVFACDTNFNRIYDFGAKSGCEGGPAYSCADQTPWAVNDQFSYGFAATNIAGGNEASWCCACYKLTFTSGPVAGKVMVVQSTSTGGDLGNNHFDLNIPGGGVGIFDGCTPQFGGLPGERYGGISSRSQCDSFPDALKPGCYWRFDWFLNADNPNFTFERVQCPSELVARTGCKRNDDGNYPVFTPPSGDSPSSSSAAPTSTSTSQQPQQPTSSSSQASVPTSNPGGCTSQKWAQCGGIGFTGCTTCVSGTTCTKLNDWYSQC

SEQ ID NO: 47583 - protein, 309 aa, Thermochaetoides thermophila
MRSTPVLRTALAAALPFTVLAADGKSTRYWDCCKPSCLSPGNLEVSQNVFACDRNFNRIYDFGAKSGCEGGPAYSCADQTPWAVNDQFSYGFAATNIAGGNEASWCCACYKLTFTSGPVAGKVMVVQSTSTGGDLGNNHFDLNIPGGGVGIFDGCTPQFGGLPGERYGGISSRSQCDSFPDALKPGCYWRFDWFLNADNPNFTFERVQCPSELVARTGCKRNDDGNYPVFTPPSGDSPSSSSAAPTSTSTSQQPQQPTSSSSQASVPTSNPGGCTSQKWAQCGGIGFTGCTTCVSGTTCTKLNDWYSQC

SEQ ID NO: 47584 - protein, 225 aa, Thielavia terrestris
SGSGQSTRYWDCCKPSCAWPGKAAVSQPVYSCDANFQRLSDFNVQSGCNGGSAYACADQTPWAVNDNLAYGFAATSIAGGSESSWCCACYALTFTSGPVAGKTMVVQSTSTGGDLGSNHFDIAMPGGGVGIFDGCSSQFGGLPGDRYGGISSRDQCDSFPAPLKPGCYWRFDWFQNADNPTVTFQQVQCPAEIVARSGCKRNDDSSFPVFTPSPNSPNSPNGCTT

SEQ ID NO: 47585 - protein, 283 aa, Staphylotrichum coccosporum
ADGVSTRYWDCCKPSCSWPGKASVNQPVFACSANFTRISDPNVKSGCDGGSAYACADQTPWAVNDNFSYGFAATSIMGGNEASWCCGCYELTFTSGPVAGKKMVVQSTSTGGDLGTNHFDLAMPGGGVGIFDGCSPQFGGLAGDRYGGVSSRSECDSFPAALKPGCYWRFDWFKNADHPTFTFRQVQCPSELVARTGCRRNDDGNFPVFTPPSGGQSSSSSSSSKAKPTSTTSTASSQTSSSTGGGCAAQRWAQCGGIGFSGCTTCVSGTTCNKQNDWYSQCL

SEQ ID NO: 47586 - protein, 279 aa, Thermothielavioides terrestris
SGSGQSTRYWDCCKPSCAWPGKAAVSQPVYACDANFQRLSDFNVQSGCNGGSAYACADQTPWAVNDNLAYGFAATSIAGGSESSWCCACYALTFTSGPVAGKTMVVQSTSTGGDLGSNHFDIAMPGGGVGIFDGCSSQFGGLPGARYGGISSRDQCDSFPAPLKPGCQWRFDWFQNADNPTFTFQQVQCPAEIVARSGCKRNDDSSFPVFTSPPSPPSPPSPPSPPSPPSPPSPPSPPSPPGCTAERWAQCGGNGWSGCTTCVAGSTCTKINDWYHQCL

SEQ ID NO: 47587 - protein, 217 aa, Thielavia terrestris
SGSGQSTRYWDCCKPSCAWPGKAAVSQPVYSCDANFQRLSDFNVQSGCNGGSAYACADQTPWAVNDNLAYGFAATSIAGGSESSWCCACYALTFTSGPVAGKTMVVQSTSTGGDLGSNHFDIAMPGGGVGIFDGCSSQFGGLPGDRYGGISSRDQCDSFPAPLKPGCYWRFDWFQNADNPTVTFQQVQCPAEIVARSGCKRNDDSSFPVFTTPTTPT

SEQ ID NO: 47588 - protein, 213 aa, Thermothielavioides terrestris
SGSGQSTRYWDCCKPSCAWPGKAAVSQPVYACDANFQRLSDFNVQSGCNGGSAYSCADQTPWAVNDNLAYGFAATSIAGGSESSWCCACYALTFTSGPVAGKTMVVQSTSTGGDLGSNHFDIAMPGGGVGIFNGCSSQFGGLPGAQYGGISSRDQCDSFPAPLKPGCQWRFDWFQNADNPTFTFQQVQCPAEIVARSGCKRNDDSSFPVFTPP

SEQ ID NO: 47589 - protein, 308 aa, Thermochaetoides thermophila
MRSTPVLRTALAAALPFTVLAADGKSTRYWDCCKPSCLSPGNVQVSQNVFACDRNFNRIYDFGAKSGCEGGPAYSCADQTPWAVNDQFSYGFAATNIAGGNEASWCCACYKLTFTSGPVAGKVMVVQSTSTGGDLGNNHFDLNIPGGGVGIFDGCTPQFGGLPGERYGGISSRSQCDSFDALKPGCYWRFDWFLNADNPNFTFERVQCPSELVARTGCKRNDDGNYPVFTPPSGDSPSSSSAAPTSTSTSQQPQQPTSSSSQASVPTSNPGGCTSQKWAQCGGIGFTGCTTCVSGTTCTKLNDWYSQC

SEQ ID NO: 47590 - protein, 308 aa, Thermochaetoides thermophila
MRSTPVLRTALAAALPFTVLAADGKSTRYWDCCKPSCLSPGNVQVSQNVFACDRNFNRIYDFGAKSGCEGGPAYSCADQTPWAVNDQFSYGFAATNIAGGNEASWCCACYKLTFTSGPVAGKVMVVQSTSTGGDLGNNHFDLNIPGGGVGIFDGCTPQFGGLPGERYGGISSRSQCDSFPDALKPGCYWRFDWFLNADNPNFTFERVQCPSELVARTGCKRNDDGNYPVFTPPSGDSPSSSSAAPTSTSTSQQPQQPTSSSSQASVPTSNPGGCTSQKWAQCGGIGFTGCTCVSGTTCTKLNDWYSQC

SEQ ID NO: 47591 - protein, 220 aa, Thermothielavioides terrestris
SGSGQSTRYWDCCKPSCAWPGKAAVSQPVYACDANFQRLSDFNVQSGCNGGSAYACADQTPWAVNDNLAYGFAATSIAGGSESSWCCACYALTFTSGPVAGKTMVVQSTSTGGDLGSNHFDIAMPGGGVGIFDGCSSQFGGLPGARYGGISSRDQCDSFPAPLKPGCQWRFDWFQNADNPTFTFQQVQCPAEIVARSGCKRNDDSSFPVFTSPSPSPSPP

SEQ ID NO: 47592 - protein, 221 aa, Thermothielavioides terrestris
SGSGQSTRYWDCCKPSCAWPGKAAVSQPVYACDANFQRLSDFNVQSGCNGGSAYSCADQTPWAVNDNLAYGFAATSIAGGSESSWCCACYALTFTSGPVAGKTMVVQSTSTGGDLGSNHFDIAMPGGGVGIFNGCSSQFGGLPGAQYGGISSRDQCDSFPAPLKPGCQWRFDWFQNADNPTFTFQQVQCPAEIVARSGCKRNDDSSFPVFTSPSPSPSPSP

SEQ ID NO: 47593 - protein, 221 aa, Thermothielavioides terrestris
SGSGQSTRYWDCCKPSCAWPGKAAVSQPVYACDANFQRLSDFNVQSGCNGGSAYACADQTPWAVNDNLAYGFAATSIAGGSESSWCCACYALTFTSGPVAGKTMVVQSTSTGGDLGSNHFDIAMPGGGVGIFNGCSSQFGGLPGARYGGISSRDQCDSFPAPLKPGCQWRFDWFQNADNPTFTFQQVQCPAEIVARSGCKRNDDSSFPVFTSPSPSPSPSP

SEQ ID NO: 47594 - protein, 279 aa, Acremonium thermophilum
GKSTRYWDCCKPSCGWAGRASVNQPVFSCSADWQRISDFNRKSGCDGGNAYSCADQTPWAVNDNFSYGFAATAIAGGSEQSWCCACYALTFNSGPVAGKTMVVQSTSTGGDLGENHFDLAIPGGGVGIFNGCQSQFGGLPGAQYGGIQDRSQCSSFPAPLQPGCQWRFDWFQNADNPTFTFQRVQCPSELTSRTGCKRDDDANYPVFNPPSGNPSGGNPPGGNPPGTTTTRRPATTTGSSPGPTQSHYGQCGGIGYSGPTVCASGTTCQVLNPYYSQCL

SEQ ID NO: 47595 - protein, 279 aa, Acremonium thermophilum
GKSTRYWDCCKPSCGWAGKASVNQPVFSCSADWQRISDFNAKSGCDGGNAYSCADQTPWAVNDQFSYGFAATAIAGGSEQSWCCACYALTFNSGPVAGKTMVVQSTSTGGDLGENHFDLAIPGGGVGIFNGCQSQFGGLPGAQYGGIQDRSQCSSFPAPLQPGCQWRFDWFQNADNPTFTFQRVQCPSELTSRTGCKRDDDANYPVFNPPSGNPSGGNPPGGNPPGTTTTRRPATTTGSSPGPTQSHYGQCGGIGYSGPTVCASGTTCQVLNPYYSQCL

SEQ ID NO: 47596 - protein, 279 aa, Acremonium thermophilum
GKSTRYWDCCKPSCGWAGKASVNQPVFSCSADWQRISDFNAKSGCDGGNAYSCADQTPWAVNDNFSYGFAATAIAGGSEQSWCCACYALTFNSGPVAGKTMVVQSTSTGGDLGENHFDLAIPGGGVGIFNGCQSQFGGLPGAQYGGIQDRSQCSSFPAPLQPGCQWRFDWFQNADNPTFTFQRVQCPSELTSRTGCKRDDDANYPVFQAPSGSTSGGQAPGGSTPGTTTTRRPATTTGSSPGPTQSHYGQCGGIGYSGPTVCASGTTCQVLNPYYSQCL

SEQ ID NO: 47597 - protein, 279 aa, Acremonium thermophilum
GKSTRYWDCCKPSCGWRGKASVNQPVFSCSADWQRISDFNAKSGCDGGNAYSCADQTPWAVNDNFSYGFAATAIAGGSERSWCCACYALTFNSGPVAGKTMVVQSTSTGGDLGENHFDLAIPGGGVGIFNGCQSQFGGLPGAQYGGIQDRSQCSSFPAPLQPGCQWRFDWFQNADNPTFTFQRVQCPSELTSRTGCKRDDDANYPVFWPPSGRPSGGNPPGGDPPGTTTTRMPATTTGSSPTPTQSHYGQCGGIGYSGPTVCAEGTTCQVLNPYYSQCL

SEQ ID NO: 47598 - protein, 279 aa, Acremonium thermophilum
GKSTRYWDCCKPSCGWAGKASVNQPVFSCSADWQRISDFNAKSGCDGGNAYSCADQTPWAVNDNFSYGFAATAIAGGSEQSWCCACYALTFNSGPVAGKTMVVQSTSTGGDLGENHFDLAIPGGGVGIFNGCQSQFGGLPGAQYGGIQDRSQCSSFPAPLQPGCYWRFDWFQNADNPTFTFQRVQCPSELTSRTGCKRDDDANYPVFNPPSGNPSGGNPPGGNPPGTTTTRRPATTTGSSPGPTQSHYGQCGGIGYSGPTVCASGTTCQVLNPYYSQCL

SEQ ID NO: 47599 - protein, 279 aa, Acremonium thermophilum
GKSTRYWDCCKPSCGWAGKASVNQPVFSCSADWQRISDFNAKSGCDGGNAYSCADQTPWAVNDNFSYGFAATAIAGGSEQSWCCACYALTFNSGPVAGKTMVVQSTSTGGDLGENHFDLAIPGGGVGIFNGCQSQFGGLPGAQYGGIQDRSQCSSFPAPLQPGCQWRFDWFQNADNPTFTFQRVQCPSELTSRTGCKRDDDANYPVFNIPSGNTSGGEPPGGNTPGTTTTRRPATTTGSSPGPTQSHYGQCGGIGYSGPTVCASGTTCQVLNPYYSQCL

SEQ ID NO: 47600 - protein, 279 aa, Acremonium thermophilum
GKSTRYWDCCKPSCGWAGKAPVNQPVFSCSADWQRISDFNANSGCSGGNAYSCADQTPWAVNDNFSYGFAATAISGGSEQSWCCACYALTFNSGPVAGKTMVVQSTSTGGDLGENHFDLAIPGGGVGIFNGCQSQFGGLPGAQYGGIQDRSQCSSFPAPLQPGCQWRFDWFQNADNPTFTFQRVQCPSELTSRTGCKRDDDANYPVFSPPSGSPSGGSPPGGSPPGTTTTRRPATTTGSSPTPTQSHYGQCGGIGYSGPTVCASGTTCQVLNPYYSQCL

SEQ ID NO: 47601 - protein, 279 aa, Acremonium thermophilum
GKSTRYWDCCKPSCGWAGKAPVNQPVFSCSADWQRISDFNANSGCDGGNAYSCADQTPWAVNDNFSYGFAATAIAGGSEQSWCCACYALTFNSGPVAGKTMVVQSTSTGGDLGENHFDLAIPGGGVGIFNGCQSQFGGLPGAQYGGIQDRSQCSSFPAPLQPGCYWRFDWFQNADNPTFTFQRVQCPSELTSRTGCKRDDDANYPVFSPPSGSPSGGSPPGGSPPGTTTTRRPATTTGSSPTPTQSHYGQCGGIGYSGPTVCASGTTCQVLNPYYSQCL

SEQ ID NO: 47602 - protein, 279 aa, Acremonium thermophilum
GKSTRYWDCCKPSCGWAGKASVNQPVFSCSADWQRISDFNAKSGCDGGNAYSCADQTPWAVNENFSYGFAATAIAGGSEQSWCCACYALTFNSGPVAGKTMVVQSTSTGGDLGENHFDLAIPGGGVGIFNGCQSQFGGLPGAQYGGIQDRSQCSSFPAPLQPGCQWRFDWFQNADNPTFTFQRVQCPSELTSRTGCKRDDDANYPVFNPPSGNPSGGNPPGGNPPGTTTTRRPATTTGSSPGPTQSHYGQCGGIGYSGPTVCASGTTCQVLNPYYSQCL

SEQ ID NO: 47603 - protein, 279 aa, Acremonium thermophilum
GKSTRYWDCCKPSCGWAGKASVNQPVFSCSRDWQRISDFNAKSGCDGGEAYSCADQTPWAVNDNFSYGFAATAIAGGSEQSWCCACYALTFNSGPVAGKTMVVQSTSTGGDLGENHFDLAIPGGGVGIFNGCQSQFGGLPGAQYGGIQDRSQCSSFPAPLQPGCQWRFDWFQNADNPTFTFQRVQCPSELTSRTGCKRDDDANYPVFNPPSGNPSGGNPPGGNPPGTTTTRRPATTTGSSPGPTQSHYGQCGGIGYSGPTVCASGTTCQVLNPYYSQCL

SEQ ID NO: 47604 - protein, 279 aa, Acremonium thermophilum
GKSTRYWDCCKPSCGWAGKASVNQPVFSCSADWQRISDFNAKSGCDGGNAYSCADQTPWAVNDNFSYGFAATAIAGGSEQSWCCACYALTFNSGPVAGKTMVVQSTSTGGDLGENHFDLAIPGGGVGIFNGCQSQFGGLPGAQYGGIQDRSQCSSFPAPLQPGCQWRFDWFQNADNPTFTFQRVQCPSELTSRTGCKRDDDANYPVFNPPSGNPDGGEPPGGDPPGDTTTRRPATTTGSSPSPTQSHYGQCGGIGYSGPTVCASGTTCQVLNPYYSQCL

SEQ ID NO: 47605 - protein, 279 aa, Acremonium thermophilum
GKSTRYWDCCKPSCGWAGKAPVNQPVFSCSADWQRISDFNANSGCDGGNAYSCADQTPWAVNDNFSYGFAATAIAGGSEQSWCCACYALTFNSGPVAGKTMVVQSTSTGGDLGENHFDLAIPGGGVGIFNGCQSQFGGLPGAQYGGIQDRSQCSSFPAPLQPGCYWRFDWFQNADNPTFTFQRVQCPSELTSRTGCKRDDDANYPVFSPPSGRPSGGSPPGGSPPGTTTTRRPATTTGSSPGPTQSHYGQCGGIGYSGPTVCASGTTCQVLNPYYSQCL

SEQ ID NO: 47606 - protein, 279 aa, Acremonium thermophilum
GKSTRYWDCCKPSCGWAGKASVNQPVFSCSADWQRISDFNAKSGCDGGNAYSCADQTPWAVNDNFSYGFAATAIAGGSEQSWCCACYALTFNSGPVAGKTMVVQSTSTGGDLGENHFDLAIPGGGVGIFNGCQSQFGGLPGAQYGGIQDRSQCSSFPAPLQPGCQWRFDWFQNADNPTFTFQRVQCPSELTSRTGCKRDDDANYPVFNPPSGNPSGGNPPGGNPPGTTTTRRPATTTGSSPGPTQWHYGQCLGIGYSGPTVCASGTTCQVLNPYYSQCL

SEQ ID NO: 47607 - protein, 279 aa, Acremonium thermophilum
GKSTRYWDCCKPSCGWAGKASVNQPVFSCSADWQRISDFNAKSGCDGGNAYSCADQTPWAVNDNFSYGFAATAIAGGSEQSWCCACYALTFNSGPVAGKTMVVQSTSTGGDLGENHFDLGIPGGGVGIFNGCQSQFGGLPGAQYGGIQDRSQCSSFPAPLQPGCQWRFDWFQNADNPTFTFQRVQCPSELTSRTGCKRDDDANYPVFNPPSGNPSGGNPPGGNPPGTTTTRRPATTTGSSPGPTQSHYGQCGGIGYSGPTVCASGTTCQVLNPYYSQCL

SEQ ID NO: 47608 - protein, 279 aa, Acremonium thermophilum
GKSTRYWDCCKPSCGWAGKASVNQPVFSCSADWQRISDFNAKSGCDGGNAYSCADQTPWAVNDNFSYGFAATAISGGSEQSWCCACYALTFNSGPVAGKTMVVQSTSTGGDLGENHFDLAIPGGGVGIFNGCQSQFGGLPGAQYGGIQDRSQCSSFPAPLQPGCQWRFDWFQNADNPTFTFQRVQCPSELTSRTGCKRDDDANYPVFNPPSGNPSGGNPPGGNPPGTTTTRRPATTTGSSPGPTQSHYGQCGGIGYSGPTVCASGTTCQVLNPYYSQCL

SEQ ID NO: 47609 - protein, 279 aa, Acremonium thermophilum
GKSTRYWDCCKPSCGWAGKASVNQPVFSCSADWQRISDFNAKSGCDGGNAYSCADQTPWAVNDNFSYGFAATAIAGGSEQSWCCACYALTFNSGPVAGKTMVVQSTSTGGDLGENHFDLAIPGGGVGIFNGCQSQFGGLPGAQYGGIQDRSQCSSFPAPLQPGCQWRFDWFQNADNPTFTFQRVQCPSELTSRTGCKRDDDANYPVFNPPSGNPSGGNPPGGNPPGTTTTRMPATTTGSSPTPTQSHYGQCGGIGYSGPTVCAEGTTCQVLNPYYSQCL

SEQ ID NO: 47610 - protein, 279 aa, Acremonium thermophilum
GKSTRYWDCCKPSCGWAGKASVNQPVFSCSADWQRISDFNAKSGCDGGNAYSCADQTPWAVNDNFSYGFAATAIAGGSEQSWCCACYALTFNSGPVAGKTMVVQSTSTGGDLGENHFDLAIPGGGVGIFNGCQSQFGGLPGAQYGGIQDRSQCSSFPAPLQPGCQWRFDWFQNADNPTFTFQRVQCPSELTSRTGCKRDDDANYPVFNPPSGNPSGGNPPGGNPPGTTTTRRPATTTGSSPGPTQSHYGQCGGIGYSGPTVCAEGTTCQVLNPYYSQCL

SEQ ID NO: 47611 - protein, 279 aa, Acremonium thermophilum
GKSTRYWDCCKPSCGWAGKAPVNQPVFSCSADWQRISDFNAKSGCDGGNAYSCADQTPWAVNDNFSYGFAATAIAGGSEQSWCCACYALTFNSGPVAGKTMVVQSTSTGGDLGENHFDLAIPGGGVGIFNGCQSQFGGLPGAQYGGIQDRSQCSSFPAPLQPGCYWRFDWFQNADNPTFTFQRVQCPSELTSRTGCKRDDDANYPVFSPPSGRPSGGSPPGGSPPGTTTTRRPATTTGSSPGPTQSHYGQCGGIGYSGPTVCASGTTCQVLNPYYSQCL

SEQ ID NO: 47612 - protein, 279 aa, Acremonium thermophilum
GKSTRYWDCCKPSCGWAGKASVNQPVFSCSADWQRISDFNAKSGCDGGNAYSCADQTPWAVNDNFSYGFAATAIAGGSEQSWCCACYALTFNSGPVAGKTMVVQSTSTGGDLGENHFDLAIPGGGVGIFNGCQSQFGGLPGAQYGGIQDRSQCSSFPAPLQPGCQWRFDWFQNADNPEFTFQRVQCPVELTSRTGCKRDDDANYPVFNPPSGNPSGGNPPGGNPPGTTTTRRPATTTGSSPGPTQSHYGQCGGIGYSGPTVCASGTTCQVLNPYYSQCL

SEQ ID NO: 47613 - protein, 279 aa, Acremonium thermophilum
GKSTRYWDCCKPSCGWAGKASVNQPVFSCSADWQRISDFNAKSGCDGGNAYSCADQTPWAVNDNFSYGFAATAIAGGSEQSWCCACYALTFNSGPVAGKTMVVQSTSTGGDLGENHFDLAIPGGGVGIFNGCQSQFGGLPGAQYGGIQDRSQCSSFPASLQPGCQWRFDWFQNADNPTFTFQRVQCPSELTSRTGCKRDDDNNYPVFNPPSGNPSGGNPPGGNPPGTTTTRRPATTTGSSPGPTQSHYGQCGGIGYSGPTVCASGTTCQVLNPYYSQCL

SEQ ID NO: 47614 - protein, 279 aa, Acremonium thermophilum
GKSTRYWDCCKPSCGWAGKASVNQPVFSCSADWQRISDFNAKSGCDGGNAYSCADQTPWAVNDNFSYGFAATAIAGGSEQSWCCACYALTFNSGPVAGKTMVVQSTSTGGDLGENHFDLAIPGGGVGIHNGCQSQFGGLPGAQYGGIQDRSQCSSFPAPLQPGCQWRFDWFQNADNPTFTFQRVQCPSELTSRTGCKRDDDANYPVFNPPSGNPSGGNPPGGNPPGTTTTRRPATTTGSSPGPTQSHYGQCGGIGYSGPTVCASGTTCQVLNPYYSQCL

SEQ ID NO: 47615 - protein, 279 aa, Acremonium thermophilum
GKSTRYWDCCKPSCGWAGKASVNQPVFSCSADWQRISDFNAKSGCDGGNAYSCADQTPWAVNDNFSYGFAATAIAGGSEQSWCCACYALTFNSGPVAGKTMVVQSTSTGGDLGENHFDLAIPGGGVGIFNGCQSQFGGLPGAQYGGIQDRSQCSSFPAPLQPGCYWRFDWFQNADNPTFTFQRVQCPSELTSRTGCKRDDDANYPVFSPPSGSPSGGSPPGGSPPGTTTTRRPATTTGSSPTPTQSHYGQCGGIGYSGPTVCASGTTCQVLNPYYSQCL

SEQ ID NO: 47616 - protein, 279 aa, Acremonium thermophilum
GKSTRYWDCCKPSCGWRGKASVNQPVFSCSADWQRISDFNAKSGCDGGNAYSCADQTPWAVNDNFSYGFAATAIAGGSEQSWCCACYALTFNSGPVAGKTMVVQSTSTGGDLGENHFDLAIPGGGVGIFNGCQSQFGGLPGAQYGGIQDRSQCSSFPAPLQPGCQWRFDWFQNADNPTFTFQRVQCPSELTSRTGCKRDDDANYPVFNPPSGNPSGGNPPGGNPPGTTTTRRPATTTGSSPTPTQSHYGQCGGIGYSGPTVCAEGTTCQVLNPYYSQCL

SEQ ID NO: 47617 - protein, 279 aa, Acremonium thermophilum
GKSTRYWDCCKPSCGWAGKASVNQPVFSCSADWQRISDFNAKSGCDGGNAYSCADQTPWAVNDNFSYGFAATAIAGGSEQSWCCACYALTFNSGPVAGKTMVVQSTSTGGDLGENHFDLAIPGGGVGIFNGCQSQFGGLPGAQYGGIQDRSQCSSFPAPLQPGCQWRFDWFQNADNPTFTFQRVQCPSELTSRTGCKRDDDANYPVFNPPSGNPSGGNPPGGNPPGTTTTRRPATTTGSSPGPTQSHYGQCGGIGYSGHTVCASGTTCQVLNPYWSQCL

SEQ ID NO: 47618 - protein, 279 aa, Acremonium thermophilum
GKSTRYWDCCKPSCGWAGKASVNQPVFSCSADWQRISDFNAKSGCDGGNAYSCADQTPWAVNDNFSYGFAATAIAGGSEQSWCCACYALTFNSGPVAGKTMVVQSTSTGGDLGENHFDLSIPGGGVGIFNGCQSQFGGLPGAQYGGIQDRSQCSSFPAPLQPGCQWRFDWFQNADNPTFTFQRVQCPSELTSRTGCKRDDDANYPVFNPPSGNPSGGNPPGGNPPGTTTTRRPATTTGSSPGPTQSHYGQCGGIGYSGPTVCASGTTCQVLNPYYSQCL

SEQ ID NO: 47619 - protein, 279 aa, Acremonium thermophilum
GKSTRYWDCCKPSCGWAGKASVNQPVFLCSADWQRISEFNAKSGCDGGNAYSCADQTPWAVNDNFSYGFAATAIAGGSEQSWCCACYALTFNSGPVAGKTMVVQSTSTGGDLGENHFDLAIPGGGVGIFNGCQSQFGGLPGAQYGGIQDRSQCSSFPAPLQPGCQWRFDWFQNADNPTFTFQRVQCPSELTSRTGCKRDDDANYPVFNPPSGNPSGGNPPGGNPPGTTTTRRPATTTGSSPGPTQSHYGQCGGIGYSGPTVCASGTTCQVLNPYYSQCL

SEQ ID NO: 47620 - protein, 279 aa, Acremonium thermophilum
GKSTRYWDCCKPSCGWAGKASVNQPVFSCSADWQRISDFNAKSGCDGGNAYSCADQTPWAVNDNFSYGFAATAIAGGSEQSWCCACYALTFNSGPVAGKTMVVQSTSTGGDLGENHFDLAIPGGGVGIFNGCQSQFGGLPGAQYGGIQDRSQCSSFPAPLQPGCQWRFDWFQNADNPTFTFQRVQCPSELTSRTGCKRDDDANYPVFNPPSGNPSGGNPPGGNPPGTTTTRRPATTTGSSPGPTQSRYGQCGGRGYSGPTVCASGTTCQVLNPYYSQCL

SEQ ID NO: 47621 - protein, 279 aa, Acremonium thermophilum
GKSTRYWDCCKPSCGWAGKAPVNQPVFSCSADWQRISDFNAKSGCDGGNAYSCADQTPWAVNDNFSYGFAATAISGGSEQSWCCACYALTFNSGPVAGKTMVVQSTSTGGDLGENHFDLAIPGGGVGIFNGCQSQFGGLPGAQYGGIQDRSQCSSFPAPLQPGCQWRFDWFQNADNPTFTFQRVQCPSELTSRTGCKRDDDANYPVFSPPSGSPSGGSPPGGSPPGTTTTRRPATTTGSSPTPTQSHYGQCGGIGYSGPTVCASGTTCQVLNPYYSQCL

SEQ ID NO: 47622 - protein, 279 aa, Acremonium thermophilum
GKSTRYWDCCKPSCGWAGKAPVNQPVFSCSADWQRISDFNAKSGCDGGNAYSCADQTPWAVNDNFSYGFAATAISGGSEQSWCCACYALTFNSGPVAGKTMVVQSTSTGGDLGENHFDLAIPGGGVGIFNGCQSQFGGLPGAQYGGIQDRSQCSSFPAPLQPGCQWRFDWFQNADNPTFTFQRVQCPSELTSRTGCKRDDDANYPVFNPPSGNPSGGNPPGGNPPGTTTTRRPATTTGSSPGPTQSRYGQCGGIGYSGPTVCASGTTCQVLNPYYSQCL

SEQ ID NO: 47623 - protein, 279 aa, Acremonium thermophilum
GKSTRYWDCCKPSCGWAGKARMNQPVFSCSADWQRISDFNAKSGCDGGNAYSCADQTPWAVNDNFSYGFAATAIAGGSEQSWCCACYALTFNSGPVAGKTMVVQSTSTGGDLGENHFDLAIPGGGVGIFNGCQSQFGGLPGAQYGGIQDRSQCSSFPAPLQPGCQWRFDWFQNADNPTFTFQRVQCPSELTSRTGCKRDDDANYPVFNPPSGNPSGGNPPGGNPPGTTTTRRPATTTGSSPGPTQSHYGQCGGIGYSGPTVCASGTTCQVLNPYYSQCL

SEQ ID NO: 47624 - protein, 279 aa, Acremonium thermophilum
GKSTRYWDCCKPSCGWAGKASVNQPVFSCSADWQRISDFNAKSGCDGGNAYSCADQTPWAVNDNFSYGFAATAIAGGSEQSWCCACYALTFNSGPVAGKTMVVQSTSTGGDLGENHFDLAIPGGGVGIFNGCQSQFGGLPGAQYGGIQDRSQCSSFPAPLQPGCQWRFDWFQNADNPTFTFQRVQCPSELTSRTGCKRDDDANYPVFNPPSGNPSGGNPPGGNPPGTTTTRRPATTTGSSPGPTQSHYGECGGIGHSGPTVCASGTTCQVLNPYYSQCL

SEQ ID NO: 47625 - protein, 279 aa, Acremonium thermophilum
GKSTRYWDCCKPSCCWAGKASVNQPCFSCSADWQRISDFNAKSGCDGGNAYSCADQTPWAVNDNFSYGFAATAIAGGSEQSWCCACYALTFNSGPVAGKTMVVQSTSTGGDLGENHFDLAIPGGGVGIFNGCQSQFGGLPGAQYGGIQDRSQCSSFPAPLQPGCQWRFDWFQNADNPTFTFQRVQCPSELTSRTGCKRDDDANYPVFNPPSGNPSGGNPPGGNPPGTTTTRRPATTTGSSPGPTQSHYGQCGGIGYSGPTVCASGTTCQVLNPYYSQCL

SEQ ID NO: 47626 - protein, 279 aa, Acremonium thermophilum
GKSTRYWDCCKPSCGWAGKASVNQPVFSCSADWQRISDFNAKSGCDGGNAYSCADQTPWAVNDNFSYGFAATAIAGGSEQSWCCACYALTFNSGPVAGKTMVVQSTSTGGDLGENHFDLAIPGGGVGIFNGCQSQFGGLPGAQYGGIQDRSQCSSFPAPLQPGCYWRFDWFQNADNPTFTFQRVQCPSELTSRTGCKRDDDANYPVFSPPSGRPSGGSPPGGSPPGTTTTRRPATTTGSSPGPTQSHYGQCGGIGYSGPTVCASGTTCQVLNPYYSQCL

SEQ ID NO: 47627 - protein, 297 aa, Thermochaetoides thermophila
MRSTPVLRTALAAALPFTVLAADGKSTRYWDCCKPSCSWPGKAAVSQPVFACDRNFNRLSDFNVQSGCNGGPAYSCADQTPWAVNDQFSYGFAATNIAGGNEASWCCACYKLTFTSGPVAGKVMVVQSTSTGGDLGNNHFDLNIPGGGVGIFDGCTPQFGGLPGERYGGISSRSQCDSFPDALKPGCYWRFDWFLNADNPNFTFERVQCPSELVARTGCKRNDDGNYPVFTPPSGGNGGTGTPTSTAPGSGQTSPGGGSGCTSQKWAQCGGIGFSGCTTCVSGTTCQKLNDYYSQCL

SEQ ID NO: 47628 - protein, 257 aa, Staphylotrichum coccosporum
GKSTRYWDCCKPSCSWPGKASVNQPVFACSANFQRISDPNVKSGCDGGSAYACADQTPWAVNDNFSYGFAATSISGGNEASWCCGCYELTFTSGPVAGKTMVVQSTSTGGDLGTNHFDLAMPGGGVGIFDGCSPQFGGLAGDRYGGVSSRSQCDSFPAPLKPGCYWRFDWFKNADNPTFTFRQVQCPSELVARTGCRRNDDGNFPVFTPPSGGQSSSSSSSSSAKPTSTSTSTTSTKATSTTSTASSQTSSSTGGGC

SEQ ID NO: 47629 - protein, 257 aa, Staphylotrichum coccosporum
GVSTRYWDCCKPSCSWPGKASVNQPVFACSANFTRISDPNVKSGCDGGSAYACADQTPWAVNDNFSYGFAATSIKGGSEASWCCGCYELTFTSGPVAGKTMVVQSTSTGGDLGTNHFDLAMPGGGVGIFDGCSPQFGGLPGDRYGGVSSRSQCDSFPAALKPGCYWRFDWFKNADNPTFTFRQVQCPSEVVARTGCRRNDDSNFPVFVPPSGGQSSSSLSSSSAKPTSTSTSTTSTKATSTTSTASSQTSSSTGGGC

SEQ ID NO: 47630 - protein, 257 aa, Staphylotrichum coccosporum
GKSTRYWDCCKPSCSWPGKASVNQPVFACSANFQRISDPNVKSGCDGGSAYACADQTPWAVNDNFSYGFAATSISGGNEASWCCGCYALTFTSGPVAGKTMVVQSTSTGGDLGTNHFDLAMPGGGVGIFDGCSPQFGGLAGDRYGGVSSRSQCDSFPAALKPGCYWRFDWFKNADNPTFTFRQVQCPSELVARTGCRRNDDGNFPVFTPPSGGQSSSSSSSSSAKPTSTSTSTTSTKATSTTSTASSQTSSSTGGGC

SEQ ID NO: 47631 - protein, 257 aa, Staphylotrichum coccosporum
GKSTRYWDCCKPSCSWPGKASVNQPVFACSANFQRISDPNVKSGCDGGSAYACADQTPWAVNDNFSYGFAATSISGGNEASWCCGCYELTFTSGPVAGKTMVVQSTSTGGDLGTNHFDIAMPGGGVGIFDGCSPQFGGLAGDRYGGVSSRSQCDSFPAALKPGCYWRFDWFKNADNPTFTFRQVQCPSELVARTGCRRNDDGNFPVFTPPSGGQSSSSSSSSSAKPTSTSTSTTSTKATSTTSTASSQTSSSTGGGC

SEQ ID NO: 47632 - protein, 257 aa, Staphylotrichum coccosporum
GVSTRYWDCCKPSCSWPGKASVNQPVFACSANFQRISDPNVKSGCDGGSAYACADQTPWAVNDNFSYGFAATSIKGGNEASWCCGCYALTFTSGPVAGKTMVVQSTSTGGDLGTNHFDLAMPGGGVGIFDGCSPQFGGLPGDRYGGVSSRSQCDDFPAALKPGCYWRFDWFKNADNPTFTFRQVQCPSELVARTGCRRNDDGNFPVFTPPSGGQGSSSSSSSSAKPTSTSASTTSDKATSTTSTASSQTSSSTGGGC

SEQ ID NO: 47633 - protein, 257 aa, Staphylotrichum coccosporum
GKSTRYWDCCKPSCSWPGKASVNQPVFACSANFQRISDPNVKSGCDGGSAYACADQTPWAVNDNFSYGFAATSISGGSEASWCCGCYELTFTSGPVAGKTMVVQSTSTGGDLGTNHFDLAMPGGGVGIFDGCSPQFGGLAGDRYGGVSSRSQCDSFPAALKPGCYWRFDWFKNADNPTFTFRQVQCPSELVARTGCRRNDDGNFPVFTPPSGGQSSSSSSSSSAKPTSTSTSTTSTKATSTTSTASSQTSSSTGGGC

SEQ ID NO: 47634 - protein, 257 aa, Staphylotrichum coccosporum
GVSTRYWDCCKPSCSWPGKASVNQPVFACSANFQRISDPNVKSGCDGGSAYACADQTPWAVNDNFSYGFAATSISGGNEASWCCGCYELTFTSGPVAGKTMVVQSTSTGGDLGTNHFDLAMPGGGVGIFDGCSEQFGGLAGDRYGGVSSRDQCDSFPAPLKPGCYWRFDWFKNADNPTFTFRQVQCPSELVARTGCRRNDDGNFPVFVPPSGGQSSSSSSSSSARPTSTSTSTTSTKATSTTSTASSQTSSSTGGGC

SEQ ID NO: 47635 - protein, 257 aa, Staphylotrichum coccosporum
GKSTRYWDCCKPSCSWPGKASVNQPVFACSANFQRISDPNVKSGCDGGSAYACADQTPWAVNDNFSYGFAATSISGGNEASWCCGCYELTFTSGPVAGKTMVVQSTSTGGDLGTNHFDLAMPGGGVGIFDGCSPQFGGLAGDRYGGVSSRSQCDSFPAALKPGCYWRFDWFKNADNPTFTFRQVQCPSELVARTGCRRNDDSNFPVFTPPSGGQSSSSSSSSSAKPTSTSTSTTSTKATSTTSTASSQTSSSTGGGC

SEQ ID NO: 47636 - protein, 257 aa, Staphylotrichum coccosporum
GKSTRYWDCCKPSCSWPGKASVNQPVFACSANFQRISDPNVVSGCDGGSAYACADQTPWAVNDNFSYGFAATSISGGNEASWCCGCYELTFTSGPVAGKTMVVQSTSTGGDLGTNHFDLAMPGGGVGIFDGCSPQFGGLPGDRYGGVSSRSQCDSFPAPLVPGCYWRFDWFKNADNPTFTFRQVQCPSELVARTGCRRNDDGNFPVFTPPSGGQSSSSSSSSSARPTSTSTSTASTKATSTTSTASSQTSSSTGGGC

SEQ ID NO: 47637 - protein, 257 aa, Staphylotrichum coccosporum
GKSTRYWDCCKPSCSWPGKASVNQPVFACDANFTRISDPNVKSGCDGGSAYACADQTPWAVNDNFSYGFAATSIMGGNEASWCCGCYELTFTSGPVAGKTMVVQSTSTGGDLGTNHFDLAMPGGGVGIFDGCTPQFGGLPGDRYGGVSSRSQCDSFPAPLKPGCYWRFDWFKNADNPTFTFRQVQCPSELVARTGCRRNDDGNFPVFTPPSGGQSSSSSSSSSAKPTSTSTSTTSTKATSTTSTASSQTSSSTGGGC

SEQ ID NO: 47638 - protein, 257 aa, Staphylotrichum coccosporum
GKSTRYWDCCKPSCSWPGKASVNQPVFACDANFQRISDPNVKSGCDGGSAYACADQTPWAVNDNFSYGFAATSISGGNEASWCCGCYELTFTSGPVAGKTMVVQSTSTGGDLGTNHFDLAMPGGGVGIFDGCSPQFGGLEGDRYGGVSSRSQCDSFPAALKPGCYWRFDWFKNADNPTFTFRQVQCPSELVARTGCRRNDDGNFPVFTPPSGGQSSSSSSSSSAKPTSTSTSTTSTKATSTTSTASSQTSSSTGGGC

SEQ ID NO: 47639 - protein, 257 aa, Staphylotrichum coccosporum
GKSTRYWDCCKPSCSWPGKASVNQPVFACDANFQRISDPNVKSGCDGGSAYACADQTPWAVNDNFSYGFAATSISGGNEASWCCGCYELTFTSGPVAGKTMVVQSTSTGGDLGTNHFDLAMPGGGVGIFDGCSPQFGGLAGDRYGGVSSRSQCDSFPAALKPGCYWRFDWFKNADNPTFTFRQVQCPSELVARTGCRRNDDGNFPVFTPPSGGQSSSSSSSSSAKPTSTSTSTTSTKATSTTSTASSQTSSSTGGGC

SEQ ID NO: 47640 - protein, 257 aa, Staphylotrichum coccosporum
GKSTRYWDCCKPSCSWPGKASVNQPVFACSANFQRISDPNVKSGCDGGSAYACADQTPWAVNDNFSYGFAATSISGGNEASWCCGCYELTFTSGPVAGKTMVVQSTSTGGDLGTNHFDLAMPGGGVGIFDGCSSQFGGLAGDRYGGVSSRSQCDSFPAALKPGCYWRFDWFKNADNPTFTFRQVQCPSELVARTGCRRNDDGNFPVFTPPSGGQSSSSSSSSSAKPTSTSTSTTSTKATSTTSTASSQTSSSTGGGC

SEQ ID NO: 47641 - protein, 257 aa, Staphylotrichum coccosporum
GKSTRYWDCCKPSCSWPGKASVNQPVFACDANFQRISDPNVKSGCDGGSAYACADQTPWAVNDNFSYGFAATSISGGNEASWCCGCYELTFTSGPVYGKTMVVQSTSTGGDLGTNHFDLAMPGGGVGIFDGCSPQFGGLPGDRYGGVSSRSQCDSFPAELKPGCYWRFDWFKNADNPTFTFRQVQCPSELVARTGCRRNDDGNFPVFTPPSGGQSSSSSSSSSAKPTSTSTSTTSTKATSTTSTASPQTSSSTGGGC

SEQ ID NO: 47642 - protein, 257 aa, Staphylotrichum coccosporum
GKSTRYWDCCKPSCSWPGKASVNQPVFACSANFQRISDPNVKSGCDGGSAYACADQTPWAVNDNFSYGFAATSISGGNEASWCCGCYELTFTSGPVAGKTMVVQSTSTGGDLGTNHFDLAMPGGGVGIFDGCSPQFGGLPGDRYGGVSSRSQCDSFPAALKPGCYWRFDWFKNADNPTFTFRQVQCPSELVARTGCRRNDDGNFPVFTPPSGGQSSSSSSSSSAKPTSTSTSTTSTKATSTTSTASSQTSSSTGGGC

SEQ ID NO: 47643 - protein, 257 aa, Staphylotrichum coccosporum
GKSTRYWDCCKPSCSWPGKASVNQPVFACSANFQRISDPNVKSGCDGGSAYACADQTPWAVNDNFSYGFAATSISGGNEASWCCACYELTFTSGPVAGKTMVVQSTSTGGDLGTNHFDLAMPGGGVGIFDGCSPQFGGLAGDRYGGVSSRSQCDSFPAALKPGCYWRFDWFKNADNPTFTFRQVQCPSELVARTGCRRNDDGNFPVFTPPSGGQSSSSSSSSSAKPTSTSTSTTSTKATSTTSTASSQTSSSTGGGC

SEQ ID NO: 47644 - protein, 257 aa, Staphylotrichum coccosporum
GKSTRYWDCCKPSCSWPGKASVNQPVFACSANFQRISDPNVKSGCDGGSAYACADQTPWAVNDNFSYGFAATSISGGNEASWCCGCYELTFTSGPVAGKTMVVQSTSTGGDLGTNHFDLAMPGGGVGIFDGCSPQFGGLAGDRYGGVSSRDQCDSFPAALKPGCYWRFDWFKNADNPTFTFRQVQCPSELVARTGCRRNDDGNFPVFTPPSGGQSSSSSSSSSAKPTSTSTSTTSTKATSTTSTASSQTSSSTGGGC

SEQ ID NO: 47645 - protein, 257 aa, Staphylotrichum coccosporum
GKSTRYWDCCKPSCSWPGKASVNQPVFACSANFQRISDPNVKSGCDGGSAYACADQTPWAVNDNFSYGFAATSISGGNEASWCCGCYALTFTSGPVAGKTMVVQSTSTGTDLGTNHFDLAMPGGGVGIFDGCTPQFGGLAGDRYGGVSSRSQCDSFPAPLKPGCYWRFDWFKNADNPTFTFRQVQCPSELVARTGCRRNDDSNFPVFTPPSGGQSSSSSSSSSAKPTSTSTSTTSTKATSTTSTASSQTSSSTGGGC

SEQ ID NO: 47646 - protein, 257 aa, Staphylotrichum coccosporum
GKSTRYWDCCKPSCSWPGKASVNQPVFACSANFQRISDPNVKSGCDGGSAYACADQTPWAVNDNFSYGFAATSISGGNEASWCCGCYELTFTSGPVAGKTMVVQSTSTGGDLGTNHFDLAMPGGGVGIFDGCSPQFGGLAGDRYGGVSSRSQCDSFPAALKPGCYWRFDWFKNADNPTFTFRQVQCPSELVARTGCRRNDDGNFPVFTPPSGGQGSSSSSSSSAKPTSTSTSTTSTKATSTTSTASSQTSSSTGGGC

SEQ ID NO: 47647 - protein, 257 aa, Staphylotrichum coccosporum
GKSTRYWDCCKPSCSWPGKASVNQPVFACSANFQRISDPNVVSGCDGGSAYACADQTPWAVNDNFSYGFAATSISGGNEASWCCACYELTFTSGPVAGKTMVVQSTSTGGDLGTNHFDLAMPGGGVGIFDGCSPQFGGLAGDRYGGVSSRSECDSFPAPLKPGCYWRFDWFKNADNPTFTFRQVQCPSELVARTGCRRNDDGNFPVFTPPSGGQSSSSSSSSSAKPTSTSTSTTSTKATSTTSTASSQTSSSTGGGC

SEQ ID NO: 47648 - protein, 280 aa, Staphylotrichum coccosporum
MRSSPVLRTALAAALPLAALAADGKSTRYWDCCKPSCSWPGKASVNQPVFACSANFQRISDPNVKSGCDGGSAYACADQTPWAVNDNFSYGFAATSISGGNEASWCCGCYELTFTSGPVAGKTMVVQSTSTGGDLGTNHFDLAMPGGGVGIFDGCSPQFGGLAGDRYGGVSSRSQCDSFPAALKPGCYWRFDWFKNADNPTFTFRQVQCPSELVARTGCRRNDDGNFPVFTPPSGGQSSSSSSSSSAKPTSTSTSTTSTKATSTTSTASSQTSSSTGGGC

SEQ ID NO: 47649 - protein, 223 aa, Thielavia terrestris
SGSGQSTRYWDCCKPSCAWPGKAAVSQPVYSCDANFQRLSDFNVQSGCNGGSAYACADQTPWAVNDNLAYGFAATSIAGGSESSWCCACYALTFTSGPVAGKTMVVQSTSTGGDLGSNHFDIAMPGGGVGIFDGCSSQFGGLPGDRYGGISSRDQCDSFPAPLKPGCYWRFDWFQNADNPTVTFQQVQCPAEIVARSGCKRNDDSSFPVFTPQPTPQPTGCTT

SEQ ID NO: 47650 - protein, 223 aa, Thielavia terrestris
SGSGQSTRYWDCCKPSCAWPGKAAVSQPVYSCDANFQRLSDFNVQSGCNGGSAYACADQTPWAVNDNLAYGFAATSIAGGSESSWCCACYALTFTSGPVAGKTMVVQSTSTGGDLGSNHFDIAMPGGGVGIFDGCSSQFGGLPGDRYGGISSRDQCDSFPAPLKPGCYWRFDWFQNADNPTVTFQQVQCPAEIVARSGCKRNDDSSFPVFTPEPTPQPTGCTT

SEQ ID NO: 47651 - protein, 223 aa, Thermothielavioides terrestris
SGSGQSTRYWDCCKPSCAWPGKAAVSQPVYACDANFQRLSDFNVQSGCNGGSAYSCADQTPWAVNDNLAYGFAATSIAGGSESSWCCACYALTFTSGPVAGKTMVVQSTSTGGDLGSNHFDIAMPGGGVGIFDGCSSQFGGLPGARYGGISSRDQCDSFPAPLKPGCQWRFDWFQNADNPTFTFQQVQCPAEIVARSGCKRNDDSSFPVFTPEPTPEPTPEPT

SEQ ID NO: 47652 - protein, 219 aa, Thermothielavioides terrestris
SGSGQSTRYWDCCKPSCAWPGKAAVSQPVYACDANFQRLSDFNVQSGCNGGSAYACADQTPWAVNDNLAYGFAATSIAGGSESSWCCACYALTFTSGPVAGKTMVVQSTSTGGDLGSNHFDIAMPGGGVGIFDGCSSQFGGLPGAQYGGISSRDECDSFPAPLKPGCYWRFDWFQNADNPTFTFQQVQCPAEIVARSGCKRNDDSSFPVFTSPSPGCTS

SEQ ID NO: 47653 - protein, 219 aa, Thermothielavioides terrestris
SGSGQSTRYWDCCKPSCAWPGKAAVSQPVYACDANFQRLSDFNVQSGCNGGSAYSCADQTPWAVNDNLAYGFAATSIAGGSESSWCCACYALTFTSGPVAGKTMVVQSTSTGGDLGSNHFDIAMPGGGVGIFDGCSSQFGGLPGARYGGISSRDQCDSFPAPLKPGCQWRFDWFQNADNPTFTFQQVQCPAEIVARSGCKRNDDSSFPVFTSPSPGCTS

SEQ ID NO: 47654 - protein, 219 aa, Thermothielavioides terrestris
SGSGQSTRYWDCCKPSCAWPGKAAVSQPVYACDANFQRLSDFNVQSGCNGGSAYACADQTPWAVNDNLAYGFAATSIAGGSESSWCCACYALTFTSGPVAGKTMVVQSTSTGGDLGSNHFDIAMPGGGVGIFDGCSSQFGGLPGARYGGISSRDQCDSFPAPLKPGCQWRFDWFQNADNPTFTFQQVQCPAEIVARSGCKRNDDSSFPVFTPRPTPEPT

SEQ ID NO: 47655 - protein, 219 aa, Thermothielavioides terrestris
SGSGQSTRYWDCCKPSCAWPGKAAVSQPVYACDANFQRLSDFNVQSGCNGGSAYACADQTPWAVNDNLAYGFAATSIAGGSESSWCCACYALTFTSGPVAGKTMVVQSTSTGGDLGSNHFDIAMPGGGVGIFDGCSSQFGGLPGARYGGISSRDQCDSFPAPLKPGCQWRFDWFQNADNPTFTFQQVQCPAEIVARSGCKRNDDSSFPVFTPEPTPEPT

SEQ ID NO: 47656 - protein, 219 aa, Thermothielavioides terrestris
SGSGQSTRYWDCCKPSCAWPGKAAVSQPVYACDANFQRLSDFNVQSGCNGGSAYACADQTPWAVNDNLAYGFAATSIAGGSESSWCCACYALTFTSGPVAGKTMVVQSTSTGGDLGSNHFDIAMPGGGVGIFDGCSSQFGGLPGARYGGISSRDQCDSFPAPLKPGCQWRFDWFQNADNPTFTFQQVQCPAEIVARSGCKRNDDSSFPVFTPQPTPEPT

SEQ ID NO: 47657 - protein, 219 aa, Thermothielavioides terrestris
SGSGQSTRYWDCCKPSCAWPGKAAVSQPVYACDANFQRLSDFNVQSGCNGGSAYACADQTPWAVNDNLAYGFAATSIAGGSESSWCCACYALTFTSGPVAGKTMVVQSTSTGGDLGSNHFDIAMPGGGVGIFDGCSSQFGGLPGARYGGISSRDQCDSFPAPLKPGCQWRFDWFQNADNPTFTFQQVQCPAEIVARSGCKRNDDSSFPVFTPDPTPDPT

SEQ ID NO: 47658 - protein, 219 aa, Thermothielavioides terrestris
SGSGQSTRYWDCCKPSCAWPGKAAVSQPVYACDANFQRLSDFNVQSGCNGGSAYACADQTPWAVNDNLAYGFAATSIAGGSESSWCCACYALTFTSGPVAGKTMVVQSTSTGGDLGSNHFDIAMPGGGVGIFDGCSSQFGGLPGARYGGISSRDQCDSFPAPLKPGCQWRFDWFQNADNPTFTFQQVQCPAEIVARSGCKRNDDSSFPVFTPEPTPRPT

SEQ ID NO: 47659 - protein, 309 aa, Thermochaetoides thermophila
MRSTPVLRTALAAALPFTVLAADGKSTRYWDCCKPSCLSPGNVQVSQNVFACDRNFNRIYDFGAKSGCEGGPAYSCADQTPWAVNDQFSYGFAATNIAGGNEASWCCACYKLTFTSGPVAGKVMVVQSTSTGGDLGNNHFDLNIPGGGVGIFDGCTPQFGGLPSERYGGISSRSQCDSFPDALKPGCYWRFDWFLNADNPNFTFERVQCPSELVARTGCKRNDDGNYPVFTPPSGDSPSSSSAAPTSTSTSQQPQQPTSSSSQASVPTSNPGGCTSQKWAQCGGIGFTGCTTCVSGTTCTKLNDWYSQC

SEQ ID NO: 47660 - protein, 309 aa, Thermochaetoides thermophila
MRSTPVLRTALAAALPFTVLAADGKSTRYWDCCKPSCLSPGNVQVSQNVFACDTNFNRIYDFGAKSGCEGGPAYSCADQTPWAVNDQFSYGFAATNIAGGNEASWCCACYKLTFTDGPVAGKVMVVQSTSTGGDLGNNHFDLNIPGGGVGIFDGCTPQFGGLPGERYGGISSRSQCDSFPDALKPGCYWRFDWFLNADNPNFTFERVQCPSELVARTGCKRNDDGNYPVFTPPSGDSPSSSSAAPTSTSTSQQPQQPTSSSSQASVPTSNPGGCTSQKWAQCGGIGFTGCTTCVSGTTCTKLNDWYSQC

SEQ ID NO: 47661 - protein, 309 aa, Thermochaetoides thermophila
MRSTPVLRTALAAALPFTVLAADGKSTRYWDCCKPSCLSPGNVQVSQNVFACDRNFNRIYDFGAKSGCEGGPAYSCADQTPWAVNDQFSYGFAATNIAGGNEASWCCACYKLTFTSGPVAGKVMVVQSTSTGGDLGNNHFDLNIPGGGVGIFDGCTPQFGGLPGERYGGISSRSQCDSFPDALKPGCYWRFDWFLNADNPNFTFERVQCPSELVARTGCKRNDDGNYPVFTPPSGDSPSSSSAAPTSTSTSQQPQQPTSSSSQASVPTSNPGXCTSQKWAQCGGIGFTGCTTCVSGTTCTKLNDWYSQC

SEQ ID NO: 47662 - protein, 309 aa, Thermochaetoides thermophila
MRSTPVLRTALAAALPFTVLAADGKSTRYWDCCKPSCLSPGNVQVSQNVFACDRNFNRIYDFGAKSGCEGGPAYSCADQTPWAVNDQFSYGFAATNIAGGNQASWCCACYKLTFTSGPVAGKVMVVQSTSTGGDLGNNHFDLNIPGGGVGIFDGCTPQFGPLPGERYGGISSRSQCDSFPDALKPGCYWRFDWFLNADNPNFTFERVQCPSELVARTGCKRNDDGNYPVFTPPSGDSPSSSSAAPTSTSTSQQPQQPSSSSSQASVPTSNPGGCTSQKWAQCGGIGFTGCTTCVSGTTCTKLNDWYSQC

SEQ ID NO: 47663 - protein, 309 aa, Thermochaetoides thermophila
MRSTPVLRTALAAALPFTVLAADGNSTRYWDCCKPSCLSPGNVQVSQNVFACDRNFNRIYDFGAKSGCEGGPAYSCADQTPWAVNDQFSYGFAATNIAGGNEASWCCACYKLTFTSGPVAGKVMVVQSTSTGGDLGNNHFDLNIPGGGVGIFDGCTPQFGGLPGERYGGISSRSQCDSFTDALKPGCYWRFDWFLNADNPNFTFERVQCPSELVARTGCKRNDDGNYPVFTPPSGDSPSSSSAAPTSTSTSQQPQQPTSSSSQASVPTSNPGGCTSQKWAQCGGIGFTGCTTCVSGTTCTKLNDWYSQC

SEQ ID NO: 47664 - protein, 309 aa, Thermochaetoides thermophila
MRSTPVLRTALAAALPFTVLAADGKSTRYWDCCKPSCLSPGNVQVSQNVFACDTNFNRIYDFGAKSGCEGGPAYSCADQTPWAVNDQFSYGFAATNIAGGNEASWCCACYKLTFTSGPVAGKVMVVQSTSTGGDLGNNHFDLNIPGGGVGIFDGCTPQFGGLPGERYGGISSRSQCDSFPDALKPGCYWRFDWFLNADNPNFTFERVQCPSELVARTGCKRNDDGNYPVFTPPSGDSPSSSSAAPTSTSTSQQPQQPTSSSSQASVPTSNPGGCESQKWAQCGGXGFTGCTTCVSGTTCTKLNDWYSQC

SEQ ID NO: 47665 - protein, 309 aa, Thermochaetoides thermophila
MRSTPVLRTALAAALPFTVLAADGKSTRYWDCCKPSCLSPGNVQVSQNVFACDTNFNRIYDFGAKSGCEGGPAYSCADQTPWAVNDQFSYGFAATNIAGGNEASWCCACYKLTFTSGPVAGKVMVVQSTSTGGDLGNNHFDLNIPGGGVGIFDGCTPQFGGLPGERYGGISSRSQCDSFPDALKPGCYWRFDWFLNADNPNFTFERVQCPSELVARTGCKRNDDGNYPVFTPPSGDSPSSSSAAPTSTSTSQQPQQPTSSSSQASVPTSNPGGCTSQKWAQCGGIGFTGCATCVSGTTCTKLNDWYSQC

SEQ ID NO: 47666 - protein, 309 aa, Thermochaetoides thermophila
MRSTPVLRTALAAALPFTVLAADGKSTRYWDCCKPSCLSPGNVQVSQNVFACDTNFNRIYDFGAKSGCEGGPAYSCADQTPWAVNDQFSYGFAATNIAGGNQASWCCACYKLTFTSGPVAGKVMVVQSTSTGGDLGNNHFDLNIPGGGVGIFDGCTPQFGGLPGERYGGISSRSQCDSFPDALKPGCYWRFDWFLNADNPNFTFERVQCPSELVARTGCKRNDDGNYPVFTPPSGDSPSSSSAAPTSTSTSQQPQQPSSSSSQASVPTSNPGGCTSDKWAQSGGIGFTGCTTCVSGTTCTKLNDWYSQC

SEQ ID NO: 47667 - protein, 309 aa, Thermochaetoides thermophila
MRSTPVLRTALAAALPFTVLAADGKSTRYWDCCKPSCLSPGNAQVSQNVFACDTNFNRIYDFGAKSGCEGGPAYSCADQTPWAVNDQFSYGFAATNIAGGNEASWCCACYKLTFTDGPVAGKVMVVQSTSTGGDLGNNHFSLNIPGGGVGIFDGCTPQFGGLPGERYGGISSRSQCDSFPDALKPGCYWRFDWFLNADNPNFTFERVQCPSELVARTGCKRNDDGNYPVFTPPSGDSPSSSSAAPTSTSTSQQPQQPTSSSSQASVPTSNPGGCTSQKWAQCGGIGFTGCTTCVSGTTCTKLNDWYSQC

SEQ ID NO: 47668 - protein, 309 aa, Thermochaetoides thermophila
MRSTPVLRTALAAALPFTVLAADGKSTRYWDCCKPSCLSPGNVQVSQNVFACDRNFNRIYDFGAKSGCEGGPAYSCADQTPWAVNDQFSYGFAATNIAGGNEASWCCACYKLTFTSGPVAGKVMVVQSTSTGGDLGNNHFDLNIPGGGVGIFDGCTPQFGGLPGERYGGISSRSQCDSFPDALKPGCYWRFDWTLNADNPNFTFERVQCPSELVARTGCKRNDDGNYPVFTPPSGDSPSSSSAAPTSTSTSQQPQQPTSSSSQASVPTSNPGGCTSQKWAQCGGIGFTGCTTCVSGTTCTKLNDWYSQC

SEQ ID NO: 47669 - protein, 309 aa, Thermochaetoides thermophila
MRSTPVLRTALAAALPFTVLAADGKSTRYWDCCKPSCLSPGNVQVSQNVFACDRNFNRIYDFGAKSGCEGGPAYSCADQTPWAVNDQFSYGFAATNIAGGNEASWCCACYKLTFTSGPVAGKVMVVQSTSTGGDLGNNHFDLNIPGGGVGIFDGCTPQFGGLPGERYGGISSRSQCDSFPDALKPGCYWRFDWFLNADNPNFTFERVQCPSELVARTGCKRNDDGNYPVFTPPSGDSPSSSSAAPTSTSTSQQPQQPTSSSSQASVPTSNPGGCTSQKWASCGGIGHTGCTTCVSGTTCTKLNDWYSQC

SEQ ID NO: 47670 - protein, 309 aa, Thermochaetoides thermophila
MQSTPVLRTALAAALPFTVLAADGKSTRYWDCCKPSCLSPGNVQVSQNVFACDRNFNRIYDFGAKSGCEGGPAYSCADQTPWAVNDQFSYGFAATNIAGGNEASWCCACYKLTFTSGPVAGKVMVVQSTSTGGDLGNNHFDLNIPGGGVGIFDGCTPQFGGLPGERYGGISSRSQCDSFPDALKPGCYWRFDWFLNADNPNFTFERVQCPSELVARTGCKRNDDGNYPVFTPPSGDSPSSSSAAPTSTSTSQQPQQPTSSSSQASVPTSNPGGCTSQKWAQCGGIGFTGCTTCVSGTTCTKLNDWYSQC

SEQ ID NO: 47671 - protein, 309 aa, Thermochaetoides thermophila
MRSTPVLRTALAAALPFTVLAANGKSTRYWDCCKPSCLSPGNVQVSQNVFACDRNFNRIYDFGAKSGCEGGPAYSCADQTPWAVNDQFSYGFAATNIAGGNEASWCCACYKLTFTSGPVAGKVMVVQSTSTGGDLGNNHFDLNIPGGGVGIFDGCTPQFGGLPGERYGGISSRSQCDSFPDALKPGCYWRFDWFLNADNPNFTFERVQCPSELVARTGCKRNDDGNYPVFTPPSGDSPSSSSAAPTSTSTSQQPQQPTSSSSQASVPTSNPGGCTSQKWAQCGGIGFTGCTTCVSGTTCTKLNDWYSQC

SEQ ID NO: 47672 - protein, 309 aa, Thermochaetoides thermophila
MRSTPVLRTALAAALPFTVLAADGKSTRYWDCCKPSCLSPGNEQVSQNVFACDTNFNRIYDFGAKSGCEGGPAYSCADQTPWAVNDQFSYGFAATNIAGGNEASWCCACYKLTFTEGPVAGKVMVVQSTSTGGDLGNNHFDLNIPGGGVGIFDGCTPQFGGLPGERYGGISSRSQCDSFPDALKPGCYWRFDWFLNADNPNFTFERVQCPSELVARTGCKRNDDGNYPVFTPPSGDSPSSSSAAPTSTSTSQQPQQPSDSSSQASVPTSNPGGCESDKWAQCGGIGFTGCTTCVSGTTCTKLNDWYSQC

SEQ ID NO: 47673 - protein, 309 aa, Thermochaetoides thermophila
MRSTPVLRTALAAALPGTVLAADGKSTRYWDCCKPSCLSPGNVEVSQNVFACDTNFNRIYDFGAKSGCEGGPAYSCADQTPWAVNDQFSYGFAATNIAGGNEASWCCACYKLTFTSGPVAGSVMVVQSTSTGGDLGNNHFDLNIPGGGVGIFDGCTPQFGGLPGERYGGISSRSQCDSFPDALKPGCYWRFDWFLNADNPNFTFERVQCPSELVARTGCKRNDDGNYPVFTPPSGDSPSSSSAAPTSTSTSQQPQQPTSSSSQASVPTSNPGGCTSQKWAQCGGIGFTGCTTCVSGTTCTKLNDWYSQC

SEQ ID NO: 47674 - protein, 309 aa, Thermochaetoides thermophila
MRSTPVLRTALAAALPFTVLAADGNSTRYWDCCKPSCLSPGNVQVSQNVFACDRNFNRIYDFGAKSGCEGGPAYSCADQTPWAVNDQFSYGFAATNIAGGNEASWCCACYKLTFTSGPVAGKVMVVQSTSTGGDLGNNHFDLNIPGGGVGIFDGCTPQFGPLPGERYGGISSRSQCDSFPDALKPGCYWRFDWFLNADNPNFTFERVQCPSELVARTGCKRNDDGNYPVFTPPSGDSPSSSSAAPTSTSTSQQPQQPTSSSSQASVPTSNPGGCTSQKWAQCGGIGFTGCTTCVSGTTCTKLNDWYSQC

SEQ ID NO: 47675 - protein, 309 aa, Thermochaetoides thermophila
MRSTPVLRTALAAALPFTVLAADGKSTRYWDCCKPSCLSPGNVQVSQNVFACDRNFNRIYDFGAKSGCEGGPAYSCADQTPWAVNDQFSYGFAATNIAGGNEASWCCACYKLTFTSGPVAGKVMVVQSTSTGGDLGNNHFDLNIPGGGVGIFDGCTPQFGGLPGERYGGISSRSQCDSFPDALKPGCYWRFDWFLNADNPNFTFERVQCPSELVARTGCKRNDDGNYPVFTPPSGDSPSSSSAAPTSTSTSQQPQQPTSSSSQASVPTSNPGGCTSQKWAQCGTIGFTGCTTCVSGTTCTKLNDWYSQC

SEQ ID NO: 47676 - protein, 309 aa, Thermochaetoides thermophila
MRSTPVLRTALAAALPGTVLAADGKSTRYWDCCKPSCLSPGNVQVSQNVFACDTNFNRIYDFGAKSGCEGGPAYSCADQTPWAVNDQFSYGFAATNIAGGNQASWCCACYKLTFTSGPVAGKVMVVQSTSTGGDLGNNHFDLNIPGGGVGIFDGCTPQFGGLPGERYGGISSRSQCDSFPDALKPGCYWRFDWFLNADNPNFTFERVQCPSELVARTGCKRNDDGNYPVFTPPSGDSPSSSSAAPTSTSTSQQPQQPSSSSSQASVPTSNPGGCTSQKWAECGGIGFTGCTTCVSGTTCTKLNDWYSQC

SEQ ID NO: 47677 - protein, 309 aa, Thermochaetoides thermophila
MRSTPVLRTALAAALPFTVLAADGKSTRYWDCCKPSCLSPGNVQVSQNVFACDRNFNRIYDFGAKSGCEGGPAYSCADQTPWAVNDQFSYGFAATNIAGGNEASWCCACYKLTFTSGPVAGKVMVVQSTSTGGDLGNNHFDLNIPGGGVGIFDGCTPQFGGLPGERYGGISSRSQCDSFPDALAPGCYWRFDWFLNADNPNFTFERVQCPSELVARTGCKRNDDGNYPVFTPPSGDSPSSSSAAPTSTSTSQQPQQPTSSSSQASVPTSNPGGCTSQKWAQCGGIGFTGCTTCVSGTTCTKLNDWYSQC

SEQ ID NO: 47678 - protein, 309 aa, Thermochaetoides thermophila
MRSTPVLRTALAAALPFTVLAADGKSTRYWDCCKPSCLSPGNVQVSQNVFACDRNFNRIYDFGAKSGCEGGPAYSCADQTPWAVNDQFSYGFAATNIAGGNEASWCCACYKLTFTDGPVAGKVMVVQSTSTGGDLGNNHFDLNIPGGGVGIFDGCTPQFGGLPGERYGGISSRSQCDSFPDALKPGCYWRFDWFLNADNPNFTFERVQCPSELVARTGCKRNDDGNYPVFTPPSGDSPSSSSAAPTSTSTSQQPQQPTSSSSQASVPTSNPGGCTSQKWAQCGGIGFTGCTTCVSGTTCTKLNDWYSQC

SEQ ID NO: 47679 - protein, 309 aa, Thermochaetoides thermophila
MRSTPVLRTALAAALPFTVLAADGKSTRYWDCCKPSCLSPGNVQVSQNVFACDRNFNRIYDFGAKSGCEGGPAYSCADQTPWAVNDQFSYGFAATNIAGGNQASWCCACYKLTFTSGPVAGKVMVVQSTSTGGDLGNNHFDLNIPGGGVGIFDGCTPQFGGLPGERYGGISSRSQCDSFPDALKPGCYWRFDWFLNADNPNFTFERVQCPSELVARTGCKRNDDGNYPVFTPPSGDSPSSSSAAPTSTSTSQQPQQPSSSSSQASVPTSNPGGCTSQKWAQCGGIGFTGCQTCVSGTTCTKLNDWYSQC

SEQ ID NO: 47680 - protein, 309 aa, Thermochaetoides thermophila
MRSTPVLRTALAAALPFTVLAADGKSTRYWDCCKPSCLSPGNVQVSQNVFACDRNFNRIYDFGAKSGCEGGPAYSCADQTPWAVNDQFSYGFAATNIAGGNEASWCCACYKLTFTSGPVAGKVMVVQSTSTGGDLGNNHFDLNIPGGGVGIFDGCTPQFGGLPGERYGGISSRSQCDSFPDALKPGCYWRFDWFLNADNPNFTFERVQCPSELVARTGCKRNDDGNYPVFTPPSGDSPSSSSAAPTSTSTSQQPQQPTSSSSQASVPTSNPGGCXSQKWAQCGGIGFTGCTTCVSGTTCTKLNDWYSQC

SEQ ID NO: 47681 - protein, 309 aa, Thermochaetoides thermophila
MRSTPVLRTALAAALPFTVLAADGKSTRYWDCCKPSCLSPGNVEVSQNVFACDTNFNRIYDFGAKSGCEGGPAYSCADQTPWAVNDQFSYGFAATNIAGGNEASWCCACYKLTFTSGPVAGKVMVVQSTSTGGDLGNNHFSLNIPGGGVGIFDGCTPQFGGLPGERYGGISSRSQCDSFPDALKPGCYWRFDWFLNADNPNFTFERVQCPSELVARTGCKRNDDGNYPVFTPPSGDSPSSSSAAPTSTSTSQQPQQPTSSSSQASVPTSNPGGCTSQKWAQCGGIGFTGCTTCVSGTTCTKLNDWYSQC

SEQ ID NO: 47682 - protein, 309 aa, Thermochaetoides thermophila
MRSTPVLRTALAAALPGTVLAADGKSTRYWDCCKPSCLSPGNVQVSQNVFACDTNFNRIYDFGAKSGCEGGPAYSCADQTPWAVNDQFSYGFAATNIAGGNEASWCCACYKLTFTEGPVAGKVMVVQSTSTGGDLGNNHFDLNIPGGGVGIFDGCTPQFGGLPGERYGGISSRSQCDSFPDALKPGCYWRFDWFLNADNPNFTFERVQCPSELVARTGCKRNDDGNYPVFTPPSGDSPSSSSAAPTSTSTSQQPQQPTSSSSQASVPTSNPGGCTSQKWAQCGGIGFTGCTTCVSGTTCTKLNDWYSQC

SEQ ID NO: 47683 - protein, 309 aa, Thermochaetoides thermophila
MRSTPVLRTALAAALPFTVLAADGKSTRYWDCCKPSCLSPGNVQVSQNVFACDRNFNRIYDFGAKSGCEGGPAYSCADQTPWAVNDQFSYGFAATNIAGGNEASWCCACYKLTFTSGPVAGKVMVVQSTSTGGDLGNNHFDLNIPGGGVGIFDGCTPQFGGLPGERYGGISSRSQCDSFPDALTPGCYWRFDWFLNADNPNFTFERVQCPSELVARTGCKRNDDGNYPVFTPPSGDSPSSSSAAPTSTSTSQQPQQPTSSSSQASVPTSNPGGCTSQKWAQCGGIGFTGCTTCVSGTTCTKLNDWYSQC

SEQ ID NO: 47684 - protein, 309 aa, Thermochaetoides thermophila
MRSTPVLRTALAAALPFTVLAADGKSTRYWDCCKPSCLSPGNVQVSQNVFACDRNFNRIYDFGAKSGCEGGPAYSCADQTPWAVNDQFSYGFAATNIAGGNEASWCCACYKLTFTSGPVAGKVMVVQSTSTGGDLGNNHFDLNIPGGGVGIFDGCTPQFGGLPGERYGGISSRSQCDSFPDALSPGCYWRFDWFLNADNPNFTFERVQCPSELVARTGCKRNDDGNYPVFTPPSGDSPSSSSAAPTSTSTSQQPQQPTSSSSQASVPTSNPGGCTSQKWAQCGGIGFTGCTTCVSGTTCTKLNDWYSQC

SEQ ID NO: 47685 - protein, 309 aa, Thermochaetoides thermophila
MRSTPVLRTALAAALPFTVLAADGNSTRYWDCCKPSCLSPGNVQVSQNVFACDRNFNRIYDFGAKSGCEGGPAYSCEDQTPWAVNDQFSYGFAATNIAGGNEASWCCACYKLTFTSGPVAGKVMVVQSTSTGGDLGNNHFDLNIPGGGVGIFDGCTPQFGGLPGERYGGISSRSQCDSFPDALKPGCYWRFDWFLNADNPNFTFERVQCPSELVARTGCKRNDDGNYPVFTPPSGDSPSSSSAAPTSTSTSQQPQQPTSSSSQASVPTSNPGGCTSQKWAQCGGIGFTGCTTCVSGTTCTKLNDWYSQC

SEQ ID NO: 47686 - protein, 309 aa, Thermochaetoides thermophila
MRSTPVLRTALAAALPFTVLAADGKSTRYWDCCKPSCLSPGNVQVSQNVFACDRNFNRIYDFGAKSGCEGGPAYSCADQTPWAVNDQFSYGFAATNIAGGNEASWCCACYKLTFTSGPVAGKVMVVQSTSTGGDLGNNHFDLNIPGGGVGIFDGCTPQFGGLPGERYGGISSRSQCDSFPDALKPGCYWRFDWFLNADNPNFTFERVQCPSELVARTGCKRNDDGNYPVFTPPSGDSPSSSSAAPTSTSTSQQPQQPTSSSSQASVPTSNPGGCTSQKWAKCGGIGFTGCTTCVSGTTCTKLNDWYSQC

SEQ ID NO: 47687 - protein, 309 aa, Thermochaetoides thermophila
MRSTPVLRTALAAALPGTVLAADGKSTRYWDCCKPSCLSPGNVQVSQNVFACDRNFNRIYDFGAKSGCEGGPAYSCADQTPWAVNDQFSYGFAATNIAGGNEASWCCACYKLTFTSGPVAGSVMVVQSTSTGGDLGNNHFDLNIPGGGVGIFDGCTPQFGGLPGERYGGISSRSQCDSFPDALKPGCYWRFDWFLNADNPNFTFERVQCPSELVARTGCKRNDDGNYPVFTPPSGDSPSSSSAAPTSTSTSQQPQQPTSSSSQASVPTSNPGGCTSQKWAQCGGIGFTGCTTCVSGTTCTKLNDWYSQC

SEQ ID NO: 47688 - protein, 309 aa, Thermochaetoides thermophila
MRSTPVLRTALAAALPFTVLAANGNSTRYWDCCKPSCLSPGNVQVSQNVFACDRNFNRIYDFGAKSGCEGGPAYSCADQTPWAVNDQFSYGFAATNIAGGNEASWCCACYKLTFTSGPVAGKVMVVQSTSTGGDLGNNHFDLNIPGGGVGIFDGCTPQFGGLPGERYGGISSRSQCDSFPDALKPGCYWRFDWFLNADNPNFTFERVQCPSELVARTGCKRNDDGNYPVFTPPSGDSPSSSSAAPTSTSTSQQPQQPTSSSSQASVPTSNPGGCTSQKWAQCGGIGFTGCTTCVSGTTCTKLNDWYSQC

SEQ ID NO: 47689 - protein, 309 aa, Thermochaetoides thermophila
MRSTPVLRTALAAALPFTVLAADGKSTRYWDCCKPSCLSPGNVQVSQNVFACDRNFNRIYDFGAKSGCEGGPAYSCADQTPWAVNDQFSYGFAATNIAGGNEASWCCACYKLTFTSGPVAGKVMVVQSTSTGGDLGNNHFSLNIPGGGVGIFDGCTPQFGGLPGERYGGISSRSQCDSFPDALKPGCYWRFDWFLNADNPNFTFERVQCPSELVARTGCKRNDDGNYPVFTPPSGDSPSSSSAAPTSTSTSQQPQQPTSSSSQASVPTSNPGGCTSQKWAQCGGIGFTGCTTCVSGTTCTKLNDWYSQC

SEQ ID NO: 47690 - protein, 309 aa, Thermochaetoides thermophila
MRSTPVLRTALAAALPFTVLAADGKSTRYWDCCKPSCLSPGNVQVSQNVFACDRNFNRIYDFGAKSGCEGGPAYSCADQTPWAVNDQFSYGFAATNIAGGNEASWCCACYKLTFTSGPVAGKVMVVQSTSTGGDLGNNHFDLNIPGGGVGIFDGCTPQFGPLPGERYGGISSRSQCDSFPDALKPGCYWRFDWFLNADNPNFTFERVQCPSELVARTGCKRNDDGNYPVFTPPSGDSPSSSSAAPTSTSTSQQPQQPTSSSSQASVPTSNPGGCTSQKWAQCGGIGFTGCTTCVSGTTCTKLNDWYSQC

SEQ ID NO: 47691 - protein, 309 aa, Thermochaetoides thermophila
MRSTPVLRTALAAALPFTVLAADGKSTRYWDCCKPSCLSPGNVQVSQNVFACDRNFNRIYDFGAKSGCEGGPAYSCADQTPWAVNDQFSYGFAATNIAGGNEASWCCACYKLTFTSGPVAGKVMVVQSTSTGGDLGNNHFDLNIPGGGVGIFDGCTPQFGGLPGERYGGISSRSQCDSFPDALKPGCYWRFDWFLNADNPNFTFERVQCPSELVARTGCKRNDDGNYPVFTPPSGDSPSSSSAAPTSTSTSQQPQQPTDSSSQASVPTSNPGGCTSQKWAQCGGIGFTGCTTCVSGTTCTKLNDWYSQC

SEQ ID NO: 47692 - protein, 309 aa, Thermochaetoides thermophila
MRSTPVLRTALAAALPFTVLAADGKSTRYWDCCKPSCLSPGNVQVSQNVFACDRNFNRIYDFGAKSGCEGGPAYSCADQTPWAVNDQFSYGFAATNIAGGNEASWCCACYKLTFTSGPVAGKVMVVQSTSTGGDLGNNHFDLNIPGGGVGIFDGCTPQFGGLPGERYGGISSRSQCDSFPDALKPGCYWRFDWFLNADNPNFTFERVQCPSELVARTGCKRNDDGNYPVFTPPSGDSPSSSSAAPTSTSTSQQPQQPTSSSSQASVPTSNPGGCTSQKWAGCGGIGFTGCTTCVSGTTCTKLNDWYSQC

SEQ ID NO: 47693 - protein, 309 aa, Thermochaetoides thermophila
MRSTPVLRTALAAALPFTVLAADGKSTRYWDCCKPSCLSPGNVQVSQNVFACDRNFNRIYDFGAKSGCEGGPAYSCADQTPWAVNDQFSYGFAATNIAGGNEASWCCACYKLTFTSGPVAGKVMVVQSTSTGGDLGNNHFDLNIPGGGVGIFDGCTPQFGGLPGERYGGISSRSQCDSFPDALKPGCYWRFDWFLNADNPNFTFERVQCPSELVARTGCKRNDDGNYPVFTPPSGDSPSSSSAAPTSTSTSQQPQQPTSSSSQASVPTSNPGGCTSQKWAQCGGIGFTGCQTCVSGTTCTKLNDWYSQC

SEQ ID NO: 47694 - protein, 309 aa, Thermochaetoides thermophila
MRSTPVLRTALAAALPFTVLAADGKSTRYWDCCKPSCLSPGNVQVSQNVFACDRNFNRIYDFGAKSGCEGGPAYSCADQTPWAVNDQFSYGFAATNIAGGNEASWCCACYKLTFTSGPVAGKVMVVQSTSTGGDLGNNHFDLNIPGGGVGIFDGCTPQFGGLPGERYGGISSRSQCDSFPDALKPGCYWRFDWFLNADNPNFTFERVQCPSELVARTGCKRNDDGNYPVFTPPSGDSPSSSSAAPTSTSTSQQPQQPTSSSSQASVPTSNPGGCTSQKWAECGGIGFTGCTTCVSGTTCTKLNDWYSQC

SEQ ID NO: 47695 - protein, 309 aa, Thermochaetoides thermophila
MRSTPVLRTALAAALPGTVLAADGKSTRYWDCCKPSCLSPGNEQVSQNVFACDRNFNRIYDFGAKSGCEGGPAYSCADQTPWAVNDQFSYGFAATNIAGGNEASWCCACYKLTFTSGPVAGKVMVVQSTSTGGDLGNNHFSLNIPGGGVGIFDGCTPQFGGLPGERYGGISSRSQCDSFPDALKPGCYWRFDWFLNADNPNFTFERVQCPSELVARTGCKRNDDGNYPVFTPPSGDSPSSSSAAPTSTSTSQQPQQPTSSSSQASVPTSNPGGCTSQKWAQCGGIGFTGCTTCVSGTTCTKLNDWYSQC

SEQ ID NO: 47696 - protein, 309 aa, Thermochaetoides thermophila
MRSTPVLRTALAAALPFTVLAADGKSTRYWDCCKPSCLSPGNVQVSQNVFACDRNFNRIYDFGAKSGCEGGPAYSCADQTPWAVNDQFSYGFAATNIAGGNEASWCCACYKLTFTSGPVAGKVMVVQSTSTGGDLGNNHFDLNIPGGGVGIFDGCTPQFGGLPGERYGGISSRSQCDSFPDALKPGCYWRFDWFLNADNPNFTFERVQCPSELVARTGCKRNDDGNYPVFTPPSGDSPSSSSAAPTSTSTSQQPQQPRSSSSQASVPTSNPGGCTSQKWAQCGGIGFTGCTTCVSGTTCTKLNDWYSQC

SEQ ID NO: 47697 - protein, 309 aa, Thermochaetoides thermophila
MRSTPVLRTALAAALPFTVLAADGKSTRYWDCCKPSCLSPGNAEVSQNVFACDTNFNRIYDFGAKSGCEGGPAYSCADQTPWAVNDQFSYGFAATNIAGGNEASWCCACYKLTFTDGPVAGKVMVVQSTSTGGDLGNNHFDLNIPGGGVGIFDGCTPQFGGLPGERYGGISSRSQCDSFPDALKPGCYWRFDWFLNADNPNFTFERVQCPSELVARTGCKRNDDGNYPVFTPPSGDSPSSSSAAPTSTSTSQQPQQPSSSSSQASVPTSNPGGCTSQKWAQCGMIGFTGCQTCVSGTTCTKLNDWYSQC

SEQ ID NO: 47698 - protein, 309 aa, Thermochaetoides thermophila
MRSTPVLRTALAAALPFTVLAADGKSTRYWDCCKPSCLSPGNVQVSQNVFACDRNFNRIYDFGAKSGCEGGPAYSCADQTPWAVNDQFSYGFAATNIAGGNEASWCCACYKLTFTSGPVAGKVMVVQSTSTGGDLGNNHFDLNIPGGGVGIFDGCTPQFGGLPGERYGGISSRSQCDSFPDALKPGCYWRFDWFLNADNPNFTFERVQCPSELVARTGCKRNDDGNYPVFTPPSGDSPSSSSAAPTSTSTSQQPQQPTSSSSQASVPTSNPGGCTSQKWAQCGGIGFTGCTTTVSGTTCTKLNDWYSQC

SEQ ID NO: 47699 - protein, 309 aa, Thermochaetoides thermophila
MRSTPVLRTALAAALPFTVLAADGKSTRYWDCCKPSCLSPGNVQVSQNVFACDTNFNRIYDFGAKSGCEGGPAYSCADQTPWAVNDQFSYGFAATNIAGGNEASWCCACYKLTFTSGPVAGKVMVVQSTSTGGDLGNNHFDLNIPGGGVGIFDGCTPQFGGLPGERYGGISSRSQCDSFPDALKPGCYWRFDWFLNADNPNFTFERVQCPSELVARTGCKRNDDGNYPVFTPPSGDSPSSSSAAPTSTSTSQQPQQPTSSSSQASVPTSNPGGCTSQKWAECGGIGFTGCTTCVSGTTCTKLNDWYSQC

SEQ ID NO: 47700 - protein, 309 aa, Thermochaetoides thermophila
MRSTPVLRTALAAALPFTVLAADGKSTRYWDCCKPSCLSPGNVQVSQNVFACDTNFNRIYDFGAKSGCEGGPAYSCADQTPWAVNDQFSYGFAATNIAGGNEASWCCACYKLTFTSGPVAGKVMVVQSTSTGGDLGNNHFSLNIPGGGVGIFDGCTPQFGGLPGERYGGISSRSQCDSFPDALKPGCYWRFDWFLNADNPNFTFERVQCPSELVARTGCKRNDDGNYPVFTPPSGDSPSSSSAAPTSTSTSQQPQQPTSSSSQASVPTSNPGGCTSQKWAQCGGIGFTGCTTCVSGTTCTKLNDWYSQC

SEQ ID NO: 47701 - protein, 309 aa, Thermochaetoides thermophila
MFSTPVLRTALAAALPFTVLAADGKSTRYWDCCKPSCLSPGNVQVSQNVFACDRNFNRIYDFGAKSGCEGGPAYSCADQTPWAVNDQFSYGFAATNIAGGNEASWCCACYKLTFTSGPVAGKVMVVQSTSTGGDLGNNHFDLNIPGGGVGIFDGCTPQFGGLPGERYGGISSRSQCDSFPDALKPGCYWRFDWFLNADNPNFTFERVQCPSELVARTGCKRNDDGNYPVFTPPSGDSPSSSSAAPTSTSTSQQPQQPTSSSSQASVPTSNPGGCTSQKWAQCGGIGFTGCTTCVSGTTCTKLNDWYSQC

SEQ ID NO: 47702 - protein, 309 aa, Thermochaetoides thermophila
MRSTPVLRTALAAALPFTVLAADGKSTRYWDCCKPSCLSPGNVQVSQNVFACDRNFNRIYDFGAKSGCEGGPAYSCADQTPWAVNDQFSYGFAATNIAGGNEASWCCACYKLTFTSGPVAGKVMVVQSTSTGGDLGNNHFDLNIPGGGVGIFDGCTPQFGGLPGERYGGISSRSQCDSFPDALRPGCYWRFDWFLNADNPNFTFERVQCPSELVARTGCKRNDDGNYPVFTPPSGDSPSSSSAAPTSTSTSQQPQQPTSSSSQASVPTSNPGGCTSQKWAQCGGIGFTGCTTCVSGTTCTKLNDWYSQC

SEQ ID NO: 47703 - protein, 309 aa, Thermochaetoides thermophila
MTSTPVLRTALAAALPFTVLAADGKSTRYWDCCKPSCLSPGNVQVSQNVFACDRNFNRIYDFGAKSGCEGGPAYSCADQTPWAVNDQFSYGFAATNIAGGNEASWCCACYKLTFTSGPVAGKVMVVQSTSTGGDLGNNHFDLNIPGGGVGIFDGCTPQFGGLPGERYGGISSRSQCDSFPDALKPGCYWRFDWFLNADNPNFTFERVQCPSELVARTGCKRNDDGNYPVFTPPSGDSPSSSSAAPTSTSTSQQPQQPTSSSSQASVPTSNPGGCTSQKWAQCGGIGFTGCTTCVSGTTCTKLNDWYSQC

SEQ ID NO: 47704 - protein, 309 aa, Thermochaetoides thermophila
MRSTPVLRTALAAALPFTVLAADGKSTRYWDCCKPSCLSPGNVQVSQNVFACDRNFNRIYDFGAKSGCEGGPAYSCADQTPWAVNDQFSYGFAATNIAGGNEASWCCACYKLTFTSGPVAGKVMVVQSTSTGGDLGNNHFDLNIPGGGVGIFDGCTPQFGGLPGERYGGISSRSQCDSFPDALKPGCYWRFDWFLNADNPNFTFERVQCPSELVARTGCKRNDDGNYPVFTPPSGDSPSSSSAAPTSTSTSQQPQQPTSSSSQASVPTSNPGGCTSQKWAQCGRIGFTGCTTCVSGTTCTKLNDWYSQC

SEQ ID NO: 47705 - protein, 309 aa, Thermochaetoides thermophila
MRSTPVLRTALAAALPFTVLAADGKSTRYWDCCKPSCLSPGNVQVSQNVFACDRNFNRIYDFGAKSGCEGGPAYSCADQTPWAVNDQFSYGFAATNIAGGNEASWCCACYKLTFTSGPVAGKVMVVQSTSTGGDLGNNHFDLNIPGGGVGIFDGCTPQFGGLPGERYGGISSRSQCDSFPDALKPGCYWRFDWFLNADNPNFTFERVQCPSELVARTGCKRNDDGNYPVFTPPSGDSPSSSSAAPTSTSTSQQPQQPTSSSSQASVPTSNEGGCTSQKWAQCGGIGFTGCTTCVSGTTCTKLNDWYSQC

SEQ ID NO: 47706 - protein, 309 aa, Thermochaetoides thermophila
MRSTPVLRTALAAALPFTVLAADGKSTRYWDCCKPSCLSPGNVQVSQNVFACDRNFNRIYDFGAKSGCEGGPAYSCADQTPWAVNDQFSYGFAATNIAGGNEASWCCACYKLTFTSGPVAGKVMVVQSTSTGGDLGNNHFDLNIPGGGVGIFDGCTPQFGGLPGERYGGISSRSQCDSFPDALNPGCYWRFDWFLNADNPNFTFERVQCPSELVARTGCKRNDDGNYPVFTPPSGDSPSSSSAAPTSTSTSQQPQQPTSSSSQASVPTSNPGGCTSQKWAQCGGIGFTGCTTCVSGTTCTKLNDWYSQC

SEQ ID NO: 47707 - protein, 309 aa, Thermochaetoides thermophila
MRSTPVLRTALAAALPFTVLAADGKSTRYWDCCKPSCLSPGNVQVSQNVFACDRNFNRIYDFGAKSGCEGGPAYSCADQTPWAVNDQFSYGFAATNIAGGNEASWCCACYKLTFTSGPVAGKVMVVQSTSTGGDLGNNHFDLNIPGGGVGIFDGCTPQFGGLPGERYGGISSRSQCDSFPDALKPGCYWRFDWFLNADNPNFTFERVQCPSELVARTGCKRNDDGNYPVFTPPSGDSPSSSSAAPTSTSTSQQPQQPTSSSSQASVPTSNPGGCTSQKWAQCGMIGFTGCTTCVSGTTCTKLNDWYSQC

SEQ ID NO: 47708 - protein, 309 aa, Thermochaetoides thermophila
MRSTPVLRTALAAALPFTVLAADGKSTRYWDCCKPSCLSPGNVQVSQNVFACDRNFNRIYDFGAKSGCEGGPAYSCADQTPWAVNDQFSYGFAATNIAGGNEASWCCACYKLTFTSGPVAGKVMVVQSTSTGGDLGNNHFDLNIPGGGVGIFDGCTPQFGGLPGERYGGISSRSQCDSFPDALKPGCYWRFDWFLNADNPNFTFERVQCPSELVARTGCKRNDDGNYPVFTPPSGDSPSSSSAAPTSTSTSQQPQQPTSSSSQASVPTSNPGGCTSQKWAQCGGIGFTGCTTVVSGTTCTKLNDWYSQC

SEQ ID NO: 47709 - protein, 309 aa, Thermochaetoides thermophila
MRSTPVLRTALAAALPFTVLAADGKSTRYWDCCKPSCLSPGNVQVSQNVFACDRNFNRIYDFGAKSGCEGGPAYSCADQTPWAVNDQFSYGFAATNIAGGNEASWCCACYKLTFTSGPVAGKVMVVQSTSTGGDLGNNHFDLNIPGGGVGIFDGCTPQFGGLPGERYGGISSRSQCDSFPDALKPGCYWRFDWFLNADNPNFTFERVQCPSELVARTGCKRNDDGNYPVFTPPSGDSPSSSSAAPTSTSTSQQPQQPTSSSSQASVPTSNPGGCTSQKWAQCGGIGFTGCTTNVSGTTCTKLNDWYSQC

SEQ ID NO: 47710 - protein, 309 aa, Thermochaetoides thermophila
MRSTPVLRTALAAALPFTVLAADGKSTRYWDCCKPSCLSPGNVQVSQNVFACDRNFNRIYDFGAKSGCEGGPAYSCEDQTPWAVNDQFSYGFAATNIAGGNEASWCCACYKLTFTSGPVAGKVMVVQSTSTGGDLGNNHFDLNIPGGGVGIFDGCTPQFGGLPGERYGGISSRSQCDSFPDALKPGCYWRFDWFLNADNPNFTFERVQCPSELVARTGCKRNDDGNYPVFTPPSGDSPSSSSAAPTSTSTSQQPQQPTSSSSQASVPTSNPGGCTSQKWAQCGGIGFTGCTTCVSGTTCTKLNDWYSQC

SEQ ID NO: 47711 - protein, 309 aa, Thermochaetoides thermophila
MRSTPVLRTALAAALPGTVLAADGKSTRYWDCCKPSCLSPGNSQVSQNVFACDTNFNRIYDFGAKSGCEGGPAYSCADQTPWAVNDQFSYGFAATNIAGGNEASWCCACYKLTFTSGPVAGKVMVVQSTSTGGDLGNNHFSLNIPGGGVGIFDGCTPQFGGLPGERYGGISSRSQCDSFPDALKPGCYWRFDWFLNADNPNFTFERVQCPSELVARTGCKRNDDGNYPVFTPPSGDSPSSSSAAPTSTSTSQQPQQPTSSSSQASVPTSNPGGCTSQKWAQCGGIGFTGCTTCVSGTTCTKLNDWYSQC

SEQ ID NO: 47712 - protein, 309 aa, Thermochaetoides thermophila
MRSTPVLRTALAAALPGTVLAADGKSTRYWDCCKPSCLSPGNVQVSQNVFACDTNFNRIYDFGAKSGCEGGPAYSCADQTPWAVNDQFSYGFAATNIAGGNEASWCCACYKLTFTDGPVAGKVMVVQSTSTGGDLGNNHFDLNIPGGGVGIFDGCTPQFGGLPGERYGGISSRSQCDSFPDALKPGCYWRFDWFLNADNPNFTFERVQCPSELVARTGCKRNDDGNYPVFTPPSGDSPSSSSAAPTSTSTSQQPQQPTSSSSQASVPTSNPGGCTSQKWAQCGGIGFTGCTTCVSGTTCTKLNDWYSQC

SEQ ID NO: 47713 - protein, 309 aa, Thermochaetoides thermophila
MRSTPVLRTALAAALPGTVLAADGKSTRYWDCCKPSCLSPGNAQVSQNVFACDRNFNRIYDFGAKSGCEGGPAYSCADQTPWAVNDQFSYGFAATNIAGGNEASWCCACYKLTFTSGPVAGSVMVVQSTSTGGDLGNNHFSLNIPGGGVGIFDGCTPQFGGLPGERYGGISSRSQCDSFPDALKPGCYWRFDWFLNADNPNFTFERVQCPSELVARTGCKRNDDGNYPVFTPPSGDSPSSSSAAPTSTSTSQQPQQPTSSSSQASVPTSNPGGCTSQKWAQCGGIGFTGCTTCVSGTTCTKLNDWYSQC

SEQ ID NO: 47714 - protein, 309 aa, Thermochaetoides thermophila
MRSTPVLRTALAAALPFTVLAADGKSTRYWDCCKPSCLSPGNVQVSQNVFACDRNFNRIYDFGAKSGCEGGPAYSCADQTPWAVNDQFSYGFAATNIAGGNQASWCCACYKLTFTSGPVAGKVMVVQSTSTGGDLGNNHFDLNIPGGGVGIFDGCTPQFGGLPGERYGGISSRSQCDSFPDALKPGCYWRFDWFLNADNPNFTFERVQCPSELVARTGCKRNDDGNYPVFTPPSGDSPSSSSAAPTSTSTSQQPQQPTSSSSQASVPTSNPGGCTSQKWAQCGGIGFTGCTTCVSGTTCTKLNDWYSQC

SEQ ID NO: 47715 - protein, 309 aa, Thermochaetoides thermophila
MRSTPVLRTALAAALPFTVLAADGKSTRYWDCCKPSCLSPGNVQVSQNVFACDRNFNRIYDFGAKSGCEGGPAYSCADQTPWAVNDQFSYGFAATNIAGGNEASWCCACYKLTFTSGPVAGKVMVVQSTSTGGDLGNNHFDLNIPGGGVGIFDGCTPQFGGLPGERYGGISSRSQCDSFPDALKPGCYWRFDWFLNADNPNFTFERVQCPSELVARTGCKRNDDGNYPVFTPPSGDSPSSSSAAPTSTSTSQQPQQPTSSSSQASVPTSNPGGCTSQKWAQSGGIGFTGCTTCVSGTTCTKLNDWYSQC

SEQ ID NO: 47716 - protein, 309 aa, Thermochaetoides thermophila
MRSTPVLRTALAAALPFTVLAADGKSTRYWDCCKPSCLSPGNVQVSQNVFACDRNFNRIYDFGAKSGCEGGPAYSCADQTPWAVNDQFSYGFAATNIAGGNEASWCCACYKLTFTSGPVAGAVMVVQSTSTGGDLGNNHFDLNIPGGGVGIFDGCTPQFGGLPGERYGGISSRSQCDSFPDALKPGCYWRFDWFLNADNPNFTFERVQCPSELVARTGCKRNDDGNYPVFTPPSGDSPSSSSAAPTSTSTSQQPQQPTSSSSQASVPTSNPGGCTSQKWAQCGGIGFTGCTTCVSGTTCTKLNDWYSQC

SEQ ID NO: 47717 - protein, 309 aa, Thermochaetoides thermophila
MRSTPVLRTALAAALPFTVLAADGNSTRYWDCCKPSCLSPGNEQVSQNVFACDTNFNRIYDFGAKSGCEGGPAYSCADQTPWAVNDQFSYGFAATNIAGGNEASWCCACYKLTFTSGPVAGKVMVVQSTSTGGDLGNNHFDLNIPGGGVGIFDGCTPQFGGLPGERYGGISSRSQCDSFTDALKPGCYWRFDWFLNADNPNFTFERVQCPSELVARTGCKRNDDGNYPVFTPPSGDSPSSSSAAPTSTSTSQQPQQPSSSSSQASVPTSNPGGCESQKWAQCGGIGFTGCTTCVSGTTCTKLNDWYSQC

SEQ ID NO: 47718 - protein, 309 aa, Thermochaetoides thermophila
MRSTPVLRTALAAALPFTVLAADGKSTRYWDCCKPSCLSPGNSQVSQNVFACDRNFNRIYDFGAKSYCEGGPAYSCADQTPWAVNDQFSYGFAATNIAGGNEASWCCACYKLTFTSGPVAGKVMVVQSTSTGGDLGNNHFDLNIPGGGVGIFDGCTPQFGGLPGERYGGISSRSQCDSFPDALKPGCYWRFDWFLNADNPNFTFERVQCPSELVARTGCKRNDDGNYPVFTPPSGDSPSSSSAAPTSTSTSQQPQQPTSSSSQASVPTSNPGGCTSQKWAQCGGIGFTGCTTCVSGTTCTKLNDWYSQC

SEQ ID NO: 47719 - protein, 309 aa, Thermochaetoides thermophila
MRSTPVLRTALAAALPFTVLAADGKSTRYWDCCKPSCLSPGNVQVSQNVFACDRNFNRIYDFGAKSGCEGGPAYSCQDQTPWAVNDQFSYGFAATNIAGGNEASWCCACYKLTFTSGPVAGKVMVVQSTSTGGDLGNNHFDLNIPGGGVGIFDGCTPQFGGLPGERYGGISSRSQCDSFPDALKPGCYWRFDWFLNADNPNFTFERVQCPSELVARTGCKRNDDGNYPVFTPPSGDSPSSSSAAPTSTSTSQQPQQPTSSSSQASVPTSNPGGCTSQKWAQCGGIGFTGCTTCVSGTTCTKLNDWYSQC

SEQ ID NO: 47720 - protein, 309 aa, Thermochaetoides thermophila
MRSTPVLRTALAAALPFTVLAADGKSTRYWDCCKPSCLSPGNAEVSQNVFACDRNFNRIYDFGAKSGCEGGPAYSCADQTPWAVNDQFSYGFAATNIAGGNEASWCCACYKLTFTDGPVAGKVMVVQSTSTGGDLGNNHFSLNIPGGGVGIFDGCTPQFGGLPGERYGGISSRSQCDSFPDALKPGCYWRFDWFLNADNPNFTFERVQCPSELVARTGCKRNDDGNYPVFTPPSGDSPSSSSAAPTSTSTSQQPQQPTSSSSQASVPTSNPGGCTSQKWAQCGGIGFTGCTTCVSGTTCTKLNDWYSQC

SEQ ID NO: 47721 - protein, 309 aa, Thermochaetoides thermophila
MESTPVLRTALAAALPFTVLAADGKSTRYWDCCKPSCLSPGNVQVSQNVFACDRNFNRIYDFGAKSGCEGGPAYSCADQTPWAVNDQFSYGFAATNIAGGNEASWCCACYKLTFTSGPVAGKVMVVQSTSTGGDLGNNHFDLNIPGGGVGIFDGCTPQFGGLPGERYGGISSRSQCDSFPDALKPGCYWRFDWFLNADNPNFTFERVQCPSELVARTGCKRNDDGNYPVFTPPSGDSPSSSSAAPTSTSTSQQPQQPTSSSSQASVPTSNPGGCTSQKWAQCGGIGFTGCTTCVSGTTCTKLNDWYSQC

SEQ ID NO: 47722 - protein, 309 aa, Thermochaetoides thermophila
MRSTPVLRTALAAALPFTVLAADGKSTRYWDCCKPSCLSPGNVQVSQNVFACDRNFNRIYDFGAKSGCEGGPAYSCADQTPWAVNDQFSYGFAATNIAGGNEASWCCACYKLTFTSGPVAGKVMVVQSTSTGGDLGNNHFDLNIPGGGVGIFDGCTPQFGGLPGERYGGISSRSQCDSFTDALKPGCYWRFDWFLNADNPNFTFERVQCPSELVARTGCKRNDDGNYPVFTPPSGDSPSSSSAAPTSTSTSQQPQQPTSSSSQASVPTSNPGGCTSQKWAQCGGIGFTGCTTCVSGTTCTKLNDWYSQC

SEQ ID NO: 47723 - protein, 309 aa, Thermochaetoides thermophila
MRSTPVLRTALAAALPFTVLAADGKSTRYWDCCKPSCLSPGNVQVSQNVFACDRNFNRIYDFGAKSGCEGGPAYSCADQTPWAVNDQFSYGFAATNIAGGNEASWCCACYKLTFTSGPVAGKVMVVQSTSTGGDLGNNHFDLNIPGGGVGIFDGCTPQFGGLPGERYGGISSRSQCDSFPDALKPGCYWRFDWFLNADNPNFTFERVQCPSELVARTGCKRNDDGNYPVFTPPSGDSPSSSSAAPTSTSTSQQPQQPXSSSSQASVPTSNPGGCTSQKWAQCGGIGFTGCTTCVSGTTCTKLNDWYSQC

SEQ ID NO: 47724 - protein, 309 aa, Thermochaetoides thermophila
MRSTPVLRTALAAALPFTVLAADGKSTRYWDCCKPSCLSPGNVQVSQNVFACDRNFNRIYDFGAKSGCEGGPAYSCADQTPWAVNDQFSYGFAATNIAGGNEASWCCACYKLTFTSGPVAGKVMVVQSTSTGGDLGNNHFDLNIPGGGVGIFDGCTPQFGGLPGERYGGISSRSQCDSFPDALKPGCYWRFDWFLNADNPNFTFERVQCPSELVARTGCKRNDDGNYPVFTPPSGDSPSSSSAAPTSTSTSQQPQQPTXSSSQASVPTSNPGGCTSQKWAQCGGIGFTGCTTCVSGTTCTKLNDWYSQC

SEQ ID NO: 47725 - protein, 309 aa, Thermochaetoides thermophila
MRSTPVLRTALAAALPFTVLAADGKSTRYWDCCKPSCLSPGNVQVSQNVFACDRNFNRIYDFGAKSGCEGGPAYSCADQTPWAVNDQFSYGFAATNIAGGNEASWCCACYKLTFTSGPVAGKVMVVQSTSTGGDLGNNHFDLNIPGGGVGIFDGCTPQFGGLPGERYGGISSRSQCDSFPDALKPGCYWRFDWFLNADNPNFTFERVQCPSELVARTGCKRNDDGNYPVFTPPSGDSPSSSSAAPTSTSTSQQPQQPTSSSSQASVPTSNPGGCNSQKWAQCGGIGFTGCTTCVSGTTCTKLNDWYSQC

SEQ ID NO: 47726 - protein, 309 aa, Thermochaetoides thermophila
MSSTPVLRTALAAALPFTVLAADGKSTRYWDCCKPSCLSPGNVQVSQNVFACDRNFNRIYDFGAKSGCEGGPAYSCADQTPWAVNDQFSYGFAATNIAGGNEASWCCACYKLTFTSGPVAGKVMVVQSTSTGGDLGNNHFDLNIPGGGVGIFDGCTPQFGGLPGERYGGISSRSQCDSFPDALKPGCYWRFDWFLNADNPNFTFERVQCPSELVARTGCKRNDDGNYPVFTPPSGDSPSSSSAAPTSTSTSQQPQQPTSSSSQASVPTSNPGGCTSQKWAQCGGIGFTGCTTCVSGTTCTKLNDWYSQC

SEQ ID NO: 47727 - protein, 309 aa, Thermochaetoides thermophila
MRSTPVLRTALAAALPFTVLAADGKSTRYWDCCKPSCLSPGNVQVSQNVFACDRNFNRIYDFGAKSGCEGGPAYSCADQTPWAVNDQFSYGFAATNIAGGNEASWCCACYKLTFTDGPVAGKVMVVQSTSTGGDLGNNHFDLNIPGGGVGIFDGCTPQFGGLPGERYGGISSRSQCDSFPDALKPGCYWRFDWFLNADNPNFTFERVQCPSELVARTGCKRNDDGNYPVFTPPSGDSPSSSSAAPTSTSTSQQPQQPSSSSSQASVPTSNPGGCTSQKWAGCGGIGFTGCTTCVSGTTCTKLNDWYSQC

SEQ ID NO: 47728 - protein, 309 aa, Thermochaetoides thermophila
MRSTPVLRTALAAALPFTVLAADGKSTRYWDCCKPSCLSPGNVQVSQNVFACDRNFNRIYDFGAKSGCEGGPAYSCADQTPWAVNDQFSYGFAATNIAGGNEASWCCACYKLTFTSGPVAGKVMVVQSTSTGGDLGNNHFDLNIPGGGVGIFDGCTPQFGGLPGERYGGISSRSQCDSFPDALKPGCYWRFDWFLNADNPNFTFERVQCPSELVARTGCKRNDDGNYPVFTPPSGDSPSSSSAAPTSTSTSQQPQQPTSSSSQASVPTSNPGGCTSQKWAQCGGIAFTGCTTCVSGTTCTKLNDWYSQC

SEQ ID NO: 47729 - protein, 309 aa, Thermochaetoides thermophila
MRSTPVLRTALAAALPFTVLAANGKSTRYWDCCKPSCLSPGNVQVSQNVFACDRNFNRIYDFGAKSGCEGGPAYSCADQTPWAVNDQFSYGFAATNIAGGNEASWCCACYKLTFTSGPVAGKVMVVQSTSTGGDLGNNHFDLNIPGGGVGIFDGCTPQFGGLPGERYGGISSRSQCDSFPDALKPGCYWRFDWFLNADNPNFTFERVQCPSELVARTGCKRNDDGNYPVFTPPSGDSPSSSSAAPTSTSTSQQPQQPTSSSSQASVPTSNPGGCTSEKWAQCGMIGFTGCTTCVSGTTCTKLNDWYSQC

SEQ ID NO: 47730 - protein, 309 aa, Thermochaetoides thermophila
MRSTPVLRTALAAALPFTVLAADGKSTRYWDCCKPSCLSPGNVQVSQNVFACDRNFNRIYDFGAKSGCEGGPAYSCADQTPWAVNDQFSYGFAATNIAGGNEASWCCACYKLTFTSGPVAGKVMVVQSTSTGGDLGNNHFDLNIPGGGVGIFDGCTPQFGGLPGERYGGISSRSQCDSFPDALKPGCYWRFDWFLNADNPNFTFERVQCPSELVARTGCKRNDDGNYPVFTPPSGDSPSSSSAAPTSTSTSQQPQQPTSSSSQASVPTSNPGGCTSQKWAQCGXIGFTGCTTCVSGTTCTKLNDWYSQC

SEQ ID NO: 47731 - protein, 309 aa, Thermochaetoides thermophila
MRSTPVLRTALAAALPFTVLAADGKSTRYWDCCKPSCLSPGNVQVSQNVFACDRNFNRIYDFGAKSGCEGGPAYSCADQTPWAVNDQFSYGFAATNIAGGNEASWCCACYKLTFTSGPVAGKVMVVQSTSTGGDLGNNHFDLNIPGGGVGIFDGCTPQFGGLPGERYGGISSRSQCDSFPDALKPGCYWRFDWFLNADNPNFTFERVQCPSELVARTGCKRNDDGNYPVFTPPSGDSPSSSSAAPTSTSTSQQPQQPTSSSSQASVPTSNPGGCTSQKWAQCXGIGFTGCTTCVSGTTCTKLNDWYSQC

SEQ ID NO: 47732 - protein, 309 aa, Thermochaetoides thermophila
MRSTPVLRTALAAALPFTVLAADGKSTRYWDCCKPSCLSPGNVQVSQNVFACDTNFNRIYDFGAKSGCEGGPAYSCADQTPWAVNDQFSYGFAATNIAGGNQASWCCACYKLTFTDGPVAGKVMVVQSTSTGGDLGNNHFDLNIPGGGVGIFDGCTPQFGGLPGERYGGISSRSQCDSFPDALKPGCYWRFDWFLNADNPNFTFERVQCPSELVARTGCKRNDDGNYPVFTPPSGDSPSSSSAAPTSTSTSQQPQQPSSSSSQASVPTSNPGGCTSEKWAGCGGIGFTGCTTCVSGTTCTKLNDWYSQC

SEQ ID NO: 47733 - protein, 309 aa, Thermochaetoides thermophila
MRSTPVLRTALAAALPGTVLAADGKSTRYWDCCKPSCLSPGNEQVSQNVFACDTNFNRIYDFGAKSGCEGGPAYSCADQTPWAVNDQFSYGFAATNIAGGNEASWCCACYKLTFTSGPVAGSVMVVQSTSTGGDLGNNHFDLNIPGGGVGIFDGCTPQFGGLPGERYGGISSRSQCDSFPDALKPGCYWRFDWFLNADNPNFTFERVQCPSELVARTGCKRNDDGNYPVFTPPSGDSPSSSSAAPTSTSTSQQPQQPTSSSSQASVPTSNPGGCTSQKWAQCGGIGFTGCTTCVSGTTCTKLNDWYSQC

SEQ ID NO: 47734 - protein, 309 aa, Thermochaetoides thermophila
MRSTPVLRTALAAALPFTVLAADGKSTRYWDCCKPSCLSPGNVQVSQNVFACDTNFNRIYDFGAKSGCEGGPAYSCADQTPWAVNDQFSYGFAATNIAGGNEASWCCACYKLTFTSGPVAGAVMVVQSTSTGGDLGNNHFDLNIPGGGVGIFDGCTPQFGGLPGERYGGISSRSQCDSFPDALKPGCYWRFDWFLNADNPNFTFERVQCPSELVARTGCKRNDDGNYPVFTPPSGDSPSSSSAAPTSTSTSQQPQQPTSSSSQASVPTSNPGGCTSQKWAQCGGIGFTGCTTCVSGTTCTKLNDWYSQC

SEQ ID NO: 47735 - protein, 282 aa, Melanocarpus albomyces
NGQSTRYWDCCKPSCGWRGKGPVNQPVYSCDANFQRIHDFDAVSGCEGGPAFSCADHSPWAINDNLSYGFAATALSGQTEESWCCACYALTFTSGPVAGKTMVVQSTSTGGDLGSNHFDLNIPGGGVGLFDGCTPQFGGLPGARYGGISSRQECDSFPEPLKPGCQWRFDWFQNADNPSFTFERVQCPEELVARTGCRRHDDGGFPAVQIPSSTGNPSGGNPPGGNPPGTTTTRRPATTTGSSPGPTQSHYGQCGGIGYSGPTVCASGTTCQVLNPYYSQCL

SEQ ID NO: 47736 - protein, 226 aa, Thermothielavioides terrestris
SGSGQSTRYWDCCKPSCAWPGKAAVSQPVYACDANFQRLSDFNVQSGCNGGSAYACADQTPWAVNDNLAYGFAATSIAGGSESSWCCACYALTFTSGPVAGKTMVVQSTSTGGDLGSNHFDIAMPGGGVGIFDGCSSQFGGLPGARYGGISSRDQCDSFPAPLKPGCQWRFDWFQNADNPTFTFQQVQCPAEIVARSGCKRNDDSSFPVFTSPSSPSSPSSPSSPS

SEQ ID NO: 47737 - protein, 218 aa, Thermothielavioides terrestris
SGSGQSTRYWDCCKPSCAWPGKAAVSQPVYACDANFQRLSDFNVQSGCNGGSAYACADQTPWAVNDNLAYGFAATSIAGGSESSWCCACYALTFTSGPVAGKTMVVQSTSTGGDLGSNHFDIAMPGGGVGIFDGCSSQFGGLPGAQYGGISSRDECDSFPAPLKPGCYWRFDWFQNADNPTFTFQQVQCPAEIVARSGCKRNDDSSFPVFTPPPPCTA

SEQ ID NO: 47738 - protein, 308 aa, Thermochaetoides thermophila
MRSTPVLRTALAAALPFTVLAADGKSTRYWDCCKPSCLSPGNLQVSQNVFACDRNFNRIYDFGAKSGCEGGPAYSCADQTPWAVNDQFSYGFAATNIAGGNEASWCCACYKLTFTSGPVAGKVMVVQSTSTGGDLGNNHFDLNIPGGGVGIFDGCTPQFGPLPGERYGGISSRSQCDSFPDALKPGCYWRFDWLNADNPNFTFERVQCPSELVARTGCKRNDDGNYPVFTPPSGDSPSSSSAAPTSTSTSQQPQQPTSSSSQASVPTSNPGGCTSQKWAQCGGIGFTGCTTCVSGTTCTKLNDWYSQC

SEQ ID NO: 47739 - protein, 308 aa, Thermochaetoides thermophila
MRSTPVLRTALAAALPFTVLAADGKSTRYWDCCKPSCLSPGNVQVSQNVFACDRNFNRIYDFGAKSGCEGGPAYSCQDQTPWAVNDQFSYGFAATNIAGGNEASWCCACYKLTFTSGPVAGKVMVVQSTSTGGDLGNNHFDLNIPGGGVGIFDGCTPQFGGLPGERYGGISSRSQCDSFDALKPGCYWRFDWFLNADNPNFTFERVQCPSELVARTGCKRNDDGNYPVFTPPSGDSPSSSSAAPTSTSTSQQPQQPTSSSSQASVPTSNPGGCTSQKWAQCGGIGFTGCTTCVSGTTCTKLNDWYSQC

SEQ ID NO: 47740 - protein, 308 aa, Thermochaetoides thermophila
MRSTPVLRTALAAALPFTVLAADGNSTRYWDCCKPSCLSPGNTEVSQNVFACDRNFNRIYDFGAKSGCEGGPAYSCEDQTPWAVNDQFSYGFAATNIAGGNEASWCCACYKLTFTSGPVAGKVMVVQSTSTGGDLGNNHFLNIPGGGVGIFDGCTPQFGGLPGERYGGISSRSQCDSFPDALKPGCYWRFDWFLNADNPNFTFERVQCPSELVARTGCKRNDDGNYPVFTPPSGDSPSSSSAAPTSTSTSQQPQQPTSSSSQASVPTSNPGGCTSQKWAQCGGIGFTGCTTCVSGTTCTKLNDWYSQC

SEQ ID NO: 47741 - protein, 225 aa, Thermothielavioides terrestris
SGSGQSTRYWDCCKPSCAWPGKAAVSQPVYACDANFQRLSDFNVQSGCNGGSAYACADQTPWAVNDNLAYGFAATSIAGGSESSWCCACYALTFTSGPVAGKTMVVQSTSTGGDLGSNHFDIAMPGGGVGIFDGCSSQFGGLPGARYGGISSRDQCDSFPAPLKPGCQWRFDWFQNADNPTFTFQQVQCPAEIVARSGCKRNDDSSFPVFTSPSPSPSPKPGCTS

SEQ ID NO: 47742 - protein, 225 aa, Thermothielavioides terrestris
SGSGQSTRYWDCCKPSCAWPGKAAVSQPVYACDANFQRLSDFNVQSGCNGGSAYACADQTPWAVNDNLAYGFAATSIAGGSESSWCCACYALTFTSGPVAGKTMVVQSTSTGGDLGSNHFDIAMPGGGVGIFDGCSSQFGGLPGARYGGISSRDQCDSFPAPLKPGCQWRFDWFQNADNPTFTFQQVQCPAEIVARSGCKRNDDSSFPVFTSPSPSPSPSPSCTS

SEQ ID NO: 47743 - protein, 281 aa, Acremonium thermophilum
MRSSPFLRAALAAALPLSAHALDGKSTRYWDCCKPSCGWAGKASVNQPVFSCSADWQRISDFNAKSGCDGGSAYSCADQTPWAVNDNFSYGFAATAIAGGSESSWCCACYALTFNSGPVAGKTMVVQSTSTGGDLGSNQFDLAIPGGGVGIFNGCASQFGGLPGAQYGGISDRSQCSSFPAPLQPGCQWRFDWFQNADNPTFTFQRVQCPSELTSRTGCKRDDDASYPVFNPPSVPGLDGSNPGNPTTTVVPPASTSTSRPTSSTSSPVSTPTGQPGGCTT

SEQ ID NO: 47744 - protein, 297 aa, Thermochaetoides thermophila
MRSTPVLRTALAAALPFTVLAADGKSTRYWDCCKPSCSWPGKADVSQPVFACDRNFNRLSDFNVQSGCNGGPAYTCADQTPWAVNDQFSYGFAATNIAGGNEASWCCACYKLTFTSGPVAGKVMVVQSTSTGGDLGDNHFDLNIPGGGVGIFDGCTPQFGGLPGERYGGISSRSQCDSFPDALKPGCYWRFDWFLNADNPNFTFERVQCPSELVARTGCKRNDDGNYPVFTPPSGGNGGTGTPTSTAPGSGQTSPGGGSGCTSQKWAQCGGIGFSGCTTCVSGTTCQKLNDYYSQCL

SEQ ID NO: 47745 - protein, 297 aa, Thermochaetoides thermophila
MRSTPVLRTALAAALPFTVLAADGKSTRYWDCCKPSCSWPGKAAVSQPVFACDRNFNRLSDFNVQSGCNGGPAYSCADQTPWAVNDQFSYGFAATNIAGGMEASWCCACYKLTFTSGPVAGKVMVVQSTSTGGDLGNNHFDLNIPGGGVGIFDGCTPQFGGLPGERYGGISSRSQCDSFPDALKPGCYWRFDWFLNADNPNFTFERVQCPSELVARTGCKRNDDGNYPVFTPPSGGNGGTGTPTSTAPGSGQTSPGGGSGCTSQKWAQCGGIGFSGCTTCVSGTTCQKLNDYYSQCL

SEQ ID NO: 47746 - protein, 217 aa, Thermothielavioides terrestris
SGSGQSTRYWDCCKPSCAWPGKAAVSQPVYACDANFQRLSDFNVQSGCNGGSAYACADQTPWAVNDNLAYGFAATSIAGGSESSWCCACYALTFTSGPVAGKTMVVQSTSTGGDLGSNHFDIAMPGGGVGIFDGCSSQFGGLPGARYGGISSRDQCDSFPAPLKPGCQWRFDWFQNADNPTFTFQQVQCPAEIVARSGCKRNDDSSFPVFTTPTTPT

SEQ ID NO: 47747 - protein, 279 aa, Acremonium thermophilum
GKSTRYWDCCKPSCGWAGKASVNQPVFSCSADWQRISDFNAKSGCDGGNAYSCADQTPWAVNDNFSYGFAATAISGGSEQSWCCACYALTFNSGPVAGKTMVVQSTSTGGDLGENHFDLAIPGGGVGIFNGCQSQFGGLPGAQYGGIQDRSQCSSFPAPLQPGCYWRFDWFQNADNPTFTFQRVQCPSELTSRTGCKRDDDANYPVFNPPSGNPSGGNPPGGNPPGTTTTRRPATTTGSSPGPTQSHYGQCGGIGYSGPTVCASGTTCQVLNPYYSQCL

SEQ ID NO: 47748 - protein, 279 aa, Acremonium thermophilum
GKSTRYWDCCKPSCGWAGKASVNQPVFSCSADWQRISDFNAKSGCDGGNAYSCADQIPWAVNDQFSYGFAATAIAGGSEQSWCCACYALTFNSGPVAGKTMVVQSTSTGGDLGENHFDLAIPGGGVGIFNGCQSQFGGLPGAQYGGIQDRSQCSSFPAPLQPGCQWRFDWFQNADNPTFTFQRVQCPSELTSRTGCKRDDDANYPVFNPPSGNPSGGNPPGGNPPGTTTTRRPATTTGSSPGPTQSHYGQCGGIGYSGPTVCASGTTCQVLNPYYSQCL

SEQ ID NO: 47749 - protein, 279 aa, Acremonium thermophilum
GKSTRYWDCCKPSCGWAGKASVNQPVFSCSADWQRISDFNAKSGCDGGNAYSCADQTPWAVNEQFSYGFAATAIAGGSEQSWCCACYALTFNSGPVAGKTMVVQSTSTGGDLGENHFDLAIPGGGVGIFNGCQSQFGGLPGAQYGGIQDRSQCSSFPAPLQPGCQWRFDWFQNADNPTFTFQRVQCPSELTSRTGCKRDDDANYPVFNPPSGNPQGGQPPGGNPPGNTTTRRPATTTGQSPGPTQSHYGQCGGIGYSGPTVCASGTTCQVLNPYYSQCL

SEQ ID NO: 47750 - protein, 279 aa, Acremonium thermophilum
GKSTRYWDCCKPSCGWAGKASVNQPVFSCSADWQRISDFNAKSGCDGGNAYSCCDQTPWAVNDNFSYGFAATAIAGGSEQSWCCACYALTFNSGPVAGKTMVVQSTSTGGDLGENHFDLAIPGGGVGIFNGCQSQFGGLPGAQYGGIQDRSQCSSFPACLQPGCQWRFDWFQNADNPTFTFQRVQCPSELTSRTGCKRDDDANYPVFNPPSGNPSGGNPPGGNPPGTTTTRRPATTTGSSPGPTQSHYGQCGGIGYSGPTVCASGTTCQVLNPYYSQCL

SEQ ID NO: 47751 - protein, 279 aa, Acremonium thermophilum
GKSTRYWDCCKPSCGWAGKASVNQPVFSCSADWQRISDFNAKSGCDGGNAYSCADQTPWAVNEQFSYGFAATAIAGGSEQSWCCACYALTFNSGPVAGKTMVVQSTSTGGDLGENHFDLAIPGGGVGIFNGCQSQFGGLPGAQYGGIQDRSQCSSFPAPLQPGCQWRFDWFQNADNPTFTFQRVQCPSELTSRTGCKRDDDANYPVFSPPSGSPSGGSPPGGSPPGTTTTRRPATTTGSSPTPTQSHYGQCGGIGYSGPTVCASGTTCQVLNPYYSQCL

SEQ ID NO: 47752 - protein, 279 aa, Acremonium thermophilum
GKSTRYWDCCKPSCGWAGKASVNQPVFSCSADWQRISDFNANSGCSGGNAYSCADQTPWAVNEQFSYGFAATAIAGGSEQSWCCACYALTFNSGPVAGKTMVVQSTSTGGDLGENHFDLAIPGGGVGIFNGCQSQFGGLPGAQYGGIQDRSQCSSFPAPLQPGCQWRFDWFQNADNPTFTFQRVQCPSELTSRTGCKRDDDANYPVFSPPSGSPSGGSPPGGSPPGTTTTRRPATTTGSSPTPTQSHYGQCGGIGYSGPTVCASGTTCQVLNPYYSQCL

SEQ ID NO: 47753 - protein, 279 aa, Acremonium thermophilum
GKSTRYWDCCKPSCGWAGKASVNQPVFSCSADWQRISDFNAKSGCDGGNAYSCADQTPWAVNDNFSYGFAATAIAGGSEQSWCCACYALTFNSGPVAGKTMVVQSTSTGGDLGENHFDLAIPGGGVGIFNGCQSQFGGLPGAQYGGIQDRSQCSSFPAPLQPGCQWRFDWFQNADNPTFTFQRVQCPSELTSRTGCKRDDDANYPVFNPPSGNPSGGNPPGGNPPGTTTTRRPATTTGSSPGPTQSHYGQCGGIGYSGPTVCASGTTCRVQNPYYSQCL

SEQ ID NO: 47754 - protein, 279 aa, Acremonium thermophilum
GKSTRYWDCCKPSCGWAGKASVNQPVFSCSADWQRISDFNAKSGCDGGNAYSCADQTPWAVNDNFSYGFAATAIAGGSEQSWCCACYALTFNSGPVAGKTMVVQSTSTGGDLGENHFDLAIPGGGVGIFNGCQSQFGGLPGAQYGGIQDRSQCSSFPAPLQPGCYWRFDWFQNADNPTFTFQRVQCPSELISRTGCKRDDDANYPVFNPPSGNPSGGNPPGGNPPGTTTTRRPATTTGSSPGPTQSHYGQCGGRGYSGPTVCASGTTCQVLNPYYSQCL

SEQ ID NO: 47755 - protein, 279 aa, Acremonium thermophilum
GKSTRYWDCCKPSCGWAGKASVNQPVFSCSADWQRISDFNAKSGCDGGNAYSCADQTPWAVNDNFSYGFAATAIAGGSEQSWCCACYALTFNSGPVAGKTMVVQSTSTGGDLGENHFDLAIPGGGVGNFNGCQSQFGGLPGQQYGGIQDRSQCSSFPAPLQPGCQWRFDWFQNADNPTFTFQRVQCPSELTSRTGCKRDDDANYPVFNPPSGNPSGGNPPGGNPPGTTTTRRPATTTGSSPGPTQSHYGQCGGIGYSGPTVCASGTTCQVLNPYYSQCL

SEQ ID NO: 47756 - protein, 279 aa, Acremonium thermophilum
GKSTRYWDCCKPSCGWAGKASVNQPVFSCSADWQRISDFNAKSGCDGGNAYSCADQTPWAVNDNFSYGFAATAIAGGSDQSWCCACYALTFNSGPVAGKTMVVQSTSHGGDLGENHFDLAIPGGGVGIFNGCQSQFGGLPGAQYGGIQDRSQCSSFPAPLQPGCQWRFDWFQNADNPTFTFQRVQCPSELTSRTGCKRDDDANYPVFNPPSGNPSGGNPPGGNPPGTTTTRRPATTTGSSPGPTQSHYGQCGGIGYSGPTVCASGTTCQVLNPYYSQCL

SEQ ID NO: 47757 - protein, 279 aa, Acremonium thermophilum
GKSTRYWDCCKPSCGWAGKASVNQPVFSCSADWQRISDFNAKSGCDGGNAYSCADQTPWAVNDNFSYGFAATAIAGGSEQSWCCACYALTFNSGPVAGKTMVVQSTSTGGDLGENHFDLAIPGGGVGIFNGCQSQFGGLPGAQWGGIQDRSQCSSFPAPLQPGCQWRFDWFQNADNPTFTFHRVQCPSELTSRTGCKRDDDANYPVFNPPSGNPSGGNPPGGNPPGTTTTRRPATTTGSSPGPTQSHYGQCGGIGYSGPTVCASGTTCQVLNPYYSQCL

SEQ ID NO: 47758 - protein, 279 aa, Acremonium thermophilum
GKSTRYWDCCKPSCGWAGKASINQPVFSCSADWQRISDFNAKSGCDGGNAYSCADQTPWAVNDNFSYGFAATAIAGGSEQSWCCACYALTFNSGPVAGKTMVVQSTSTGGDLGENHFDLAIPGGGVGIFNGCQHQFGGLPGAQYGGIQDRSQCSSFPAPLQPGCQWRFDWFQNADNPTFTFQRVQCPSELTSRTGCKRDDDANYPVFNPPSGNPSGGNPPGGNPPGTTTTRRPATTTGSSPGPTQSHYGQCGGIGYSGPTVCASGTTCQVLNPYYSQCL

SEQ ID NO: 47759 - protein, 279 aa, Acremonium thermophilum
GKSTRYWDCCKPSCGWAGKASVNQPVFSCSADWQRISDFNAKSGCDGGNAYMCADQTPWAVNDNFSYGFAATAIAGGSEQSWCCACYALTFNSGPVAGKTMVVQSISTGGDLGENHFDLAIPGGGVGIFNGCQSQFGGLPGAQYGGIQDRSQCSSFPAPLQPGCQWRFDWFQNADNPTFTFQRVQCPSELTSRTGCKRDDDANYPVFNPPSGNPSGGNPPGGNPPGTTTTRRPATTTGSSPGPTQSHYGQCGGIGYSGPTVCASGTTCQVLNPYYSQCL

SEQ ID NO: 47760 - protein, 279 aa, Acremonium thermophilum
GKSTRYWDCCKPSCGWAGKAPVNQPVFSCSADWQRISDFNANSGCSGGNAYSCADQTPWAVNDNFSYGFAATAISGGSEQSWCCACYALTFNSGPVAGKTMVVQSTSTGGDLGENHFDLAIPGGGVGIFNGCQSQFGGLPGAQYGGIQDRSQCSSFPAPLQPGCYWRFDWFQNADNPTFTFQRVQCPSELISRTGCKRDDDANYPVFNPPSGNPSGGNPPGGNPPGTTTTRRPATTTGSSPGPTQSHYGQCGGIGYSGPTVCASGTTCQVLNPYYSQCL

SEQ ID NO: 47761 - protein, 279 aa, Acremonium thermophilum
GKSTRYWDCCKPSCGWAGKASVNQPVFSCSADWQRISDFNAKSGCDGGNAYSCADQTPWAVNDNFSYGFAATAIAGGSEQSWCCACYALTFNSGPVAGKTMVVQSTSTGGDLGENHFDLAIPGGGVGIFNGCQSQFGGLPGAQYGGIQDRSQCSSFPAPLQPGCQWRFDWFQNADNPTFTFQRVQCPSELTSRTGCKRDDDANYPVFNPPSGNPSGGNPPGGNPPGTTTTRRPATTTGSSPGPTQSHYGQCGGIGYSGPRVCASATTCQVLNPYYSQCL

SEQ ID NO: 47762 - protein, 279 aa, Acremonium thermophilum
GKSTRYWDCCKPSCGWAGKASVNQPVFSCSKDWQRISDFNAKSGCDGGNAYSCADQTPWAVNDNFSYGFAATAIAGGSEQSWCCACYALTFNSGPVAGKTMVVQSTSTGADLGENHFDLAIPGGGVGIFNGCQSQFGGLPGAQYGGIQDRSQCSSFPAPLQPGCQWRFDWFQNADNPTFTFQRVQCPSELTSRTGCKRDDDANYPVFNPPSGNPSGGNPPGGNPPGTTTTRRPATTTGSSPGPTQSHYGQCGGIGYSGPTVCASGTTCQVLNPYYSQCL

SEQ ID NO: 47763 - protein, 279 aa, Acremonium thermophilum
GKSTRYWDCCKPSCGWAGKASVNQPVFSCSADWQRISDFNAKSGCDGGNAYSCADQTPWAVNDNFSYGFAATAIAGGSEQSWCCACYALTFNSGPVAGKTMVVQSTSTGGDLGENHFDLAIPGGGVGIFNGCQSQFGGLPGAQYGGIQDRSQCSSFPAPLQPGCQWRFDWFQNADNPTFTFQRVQCPSELTSRTGCKRDDDANYPDWNPPSGNPSGGNPPGGNPPGTTTTRRPATTTGSSPGPTQSHYGQCGGIGYSGPTVCASGTTCQVLNPYYSQCL

SEQ ID NO: 47764 - protein, 279 aa, Acremonium thermophilum
GKSTRYWDCCKPSCGWAGKAPVNQPVFSCSADWQRISDFNAKSGCDGGNAYSCADQTPWAVNEQFSYGFAATAIAGGSETSWCCACYALTFNSGPVAGKTMVVQSTSTGGDLGENHFDLAIPGGGVGIFNGCQSQFGGLPGAQYGGIQDRSQCSSFPAPLQPGCQWRFDWFQNADNPTFTFQRVQCPSELISRTGCKRDDDANYPVFNPPSGNPSGGNPPGGNPPGTTTTRRPATTTGSSPGPTQSHYGQCGGIGYSGPTVCASGTTCQVLNPYYSQCL

SEQ ID NO: 47765 - protein, 279 aa, Acremonium thermophilum
GKSTRYWDCCKPSCGWAGKASVNQPVFSCSADWQRISDFNAKSGCDGGNAYSCADQTPWAVNDNFSYGFAATAIAGGSEQSWCCACYALEFNSGPVAGKTMVVQSTSTGGDLGENHFDLAIPGGGVGIFNGCQSQFGGLPGAQYGGIQDRSQCSSFPAPLQPGCQWRFDWFQNADNPTFTFRRVQCPSELTSRTGCKRDDDANYPVFNPPSGNPSGGNPPGGNPPGTTTTRRPATTTGSSPGPTQSHYGQCGGIGYSGPTVCASGTTCQVLNPYYSQCL

SEQ ID NO: 47766 - protein, 279 aa, Acremonium thermophilum
GKSTRYWDCCKPSCGWAGKASVNQPVFSCSADWQRISDFNAKSGCDGGNAYSCADQTPWAVNEQFSYGFAATAIAGGSEQSWCCACYALTFNSGPVAGKTMVVQSTSTGGDLGENHFDLAIPGGGVGIFNGCQSQFGGLPGAQYGGIQDRSQCSSFPAPLQPGCQWRFDWFQNADNPTFTFQRVQCPSELTSRTGCKRDDDANYPVFNPPSGNPSGGNPPGGNPPGTTTTRRPATTTGSSPGPTQSHYGQCGGIGYSGPTVCASGTTCQVLNPYYSQCL

SEQ ID NO: 47767 - protein, 279 aa, Acremonium thermophilum
GKSTRYWDCCKPSCGWAGKARVNQPVFSCSADWQRISDFNAKSGCDGGNAYSCADQTPWAVNDNFSYGFAATAISGGSETSWCCACYALTFNSGPVAGKTMVVQSTSTGGDLGENHFDLAIPGGGVGIFNGCQSQFGGLPGAQYGGIQDRSQCSSFPAPLQPGCYWRFDWFQNADNPTFTFQRVQCPSELISRTGCKRDDDANYPVFNPPSGNPSGGNPPGGNPPGTTTTRRPATTTGSSPGPTQSHYGQCGGIGYSGPTVCASGTTCQVLNPYYSQCL

SEQ ID NO: 47768 - protein, 279 aa, Acremonium thermophilum
GKSTRYWDCCKPSCGWAGKASVNQPVFSCSADWQRISDFNAKSGCDGGNAYSCADQTPWAVNDNFSYGFAATAIAGGSEQSWCCACYALTFNSGPVAGKTMVVQSTSTGGDLGENHFDLAIPGGGVGIFNGCQSQFGGLPGAQYGGIQDRSQCSSFPAPLQPGCQWRFDWFQNADNPTFTFQRVQCPSELTSRTGCKRDDDANYPVFNPPSGNPSGGNPPGGNPPGTTTTRRPATTTGSSPGPTQSHYGQCGGIGYSGPTVCASGTTCIVINPYYSQCL

SEQ ID NO: 47769 - protein, 279 aa, Acremonium thermophilum
GKSTRYWDCCKPSCGWAGKASVNQPVFSCSADWQRISDFNAKSGCDGGNAYSCADQTPWAVNDNFSYGFAATAIAGGSEQSWCCACYALTFNSGPVSGKTMVVQSTSTGGDLGENHFDLAIPGGGVGIFNACQSQFGGLPGAQYGGIQDRSQCSSFPAPLQPGCQWRFDWFQNADNPTFTFQRVQCPSELTSRTGCKRDDDANYPVFNPPSGNPSGGNPPGGNPPGTTTTRRPATTTGSSPGPTQSHYGQCGGIGYSGPTVCASGTTCQVLNPYYSQCL

SEQ ID NO: 47770 - protein, 279 aa, Acremonium thermophilum
GKSTRYWDCCKPSCGWAGKASVNQPVFSCSADWQRISDFNAKSGCDGGNAYSCADQTPWAVNDNFSYGFAATAIAGGSEQSWCCACYALTFNSGPVAGKTMVVQSTSTGGDLGENHFDLAIPGGGVGIFNGCQSQFGGLPGAQYGGIQDRSQCSSFPAPLQTGCQWRFDWFQNADNPTFTFERVQCPSELTSRTGCKRDDDANYPVFNPPSGNPSGGNPPGGNPPGTTTTRRPATTTGSSPGPTQSHYGQCGGIGYSGPTVCASGTTCQVLNPYYSQCL

SEQ ID NO: 47771 - protein, 279 aa, Acremonium thermophilum
GKSTRYWDCCKPSCGWAGKASVNQPVFSCSADWQRISDFNAKSGCDGGNAYSCADQTPWAVNDNFSYGFAATAIAGGSEQSWCCACYALTFNSGPVAGKTMVVQSTSTGGDLGENHFDLMIPGGGVGIFNGCQSMFGGLPGAQYGGIQDRSQCSSFPAPLQPGCQWRFDWFQNADNPTFTFQRVQCPSELTSRTGCKRDDDANYPVFNPPSGNPSGGNPPGGNPPGTTTTRRPATTTGSSPGPTQSHYGQCGGIGYSGPTVCASGTTCQVLNPYYSQCL

SEQ ID NO: 47772 - protein, 279 aa, Acremonium thermophilum
GKSTRYWDCCKPSCGWAGKASVNQPVFSCSADWQRISDFNAKSGCDGGNAYSCMDQTPWAVNDNFSYGFAATAIAGGSEQSWCCACYALTFNSGPVAGKTMVVQSTSTGGDLGENHFDLAIPGGGVGIFNGCQSQFGGLPGAQYGGIQDRSQCSSFPAPLQPGCAWRFDWFQNADNPTFTFQRVQCPSELTSRTGCKRDDDANYPVFNPPSGNPSGGNPPGGNPPGTTTTRRPATTTGSSPGPTQSHYGQCGGIGYSGPTVCASGTTCQVLNPYYSQCL

SEQ ID NO: 47773 - protein, 279 aa, Acremonium thermophilum
GKSTRYWDCCKPSCGWAGKASVNQPVFSCSADWQRISDFNAQSGCTGGNAYSCADQTPWAVNDNFSYGFAATAIAGGSEQSWCCACYALEFNSGPVAGKTMVVQSTNTGGDLGENHFDLAIPGGGVGIFNGCQSQFGGLPGAQYGGIQDRSQCSSFPAPLQPGCQWRFDWFQNADNPTFTFRRVQCPSELTSRTGCKRDDDANYPVFNPPSGNPSGGNPPGGNPPGTTTTRRPATTTGSSPGPTQSHYGQCGGIGYSGPTVCASGTTCQVLNPYYSQCL

SEQ ID NO: 47774 - protein, 279 aa, Acremonium thermophilum
GKSTRYWDCCKPSCGWAGKASVNQPVFSCSADWQRISDFNAKSGCDGGNAYSCADQTPWAVNDNFSKGFAATAIAGGSEQSWCCACYALTFNSGPVAGKTMVVQSTSTGGDLGENHFDLAIPGGGVGIFNGCQSQFGGLPGAQYGGIQDRSQCSSFPAPLQPGCQWRFDWFQNADNPTFTFQRVQCPSDLTSRTGCKRDDDANYPVFNPPSGNPSGGNPPGGNPPGTTTTRRPATTTGSSPGPTQSHYGQCGGIGYSGPTVCASGTTCQVLNPYYSQCL

SEQ ID NO: 47775 - protein, 279 aa, Acremonium thermophilum
GKSTRYWDCCKPSCGWAGKAPVNQPVFSCSADWQRISDFNANSGCSGGNAYSCADQTPWAVNDNFSYGFAATAISGGSEQSWCCACYALTFNSGPVAGKTMVVQSTSTGGDLGENHFDLAIPGGGVGIFNGCQSQFGGLPGAQYGGIQDRSQCSSFPAPLQPGCYWRFDWFQNADNPTFTFQRVQCPSELTSRTGCKRDDDANYPVFSPPSGSPSGGSPPGGSPPGTTTTRRPATTTGSSPTPTQSHYGQCGGIGYSGPTVCASGTTCQVLNPYYSQCL

SEQ ID NO: 47776 - protein, 279 aa, Acremonium thermophilum
GKSTRYWDCCKPSCGWAGKASVNQPVFSCSADWQRISDFNAKSGCDGGNAYSCADQTPWAVNDNFSYGFAATAIAGGSEQSWCCACYALTFNSGPVAGKTMVVQSTSTGGDLGENHFDLAIPGGGVGIFNGCQSQFGGLPGAQYGGIQDRSQCSSFPAPLQPGCQWRFDWFQNADNPTFTFQRVQCPSELTSRTGCKRDDDANYPVFNPPSGNPSGGNPPGGNPPGTTTTRRPATTTGSSPGPTQSHYGQCRGIGYSGPIVCASGTTCQVLNPYYSQCL

SEQ ID NO: 47777 - protein, 301 aa, Chaetomium olivicolor
MRSTPVLRTALAAALPLAALAADGKSTRYWDCCKPSCSWPGKALVSQPVYACNAQFQRISDPNAKSGCDGGSAFSCADQTPWALNDDFSYGFAATSIAGGSEASWCCACYELTFTSGPVAGKKMVVQSTSTGGDLGSNHFDLNMPGGGVGIFDGCSPQFGGLPGARYGGVSSRSECDSFPAALKPGCYWRFDWFKNADNPNFTFRQVQCPAELVARTGCRRSDDGNFPVFTPPGGSTQPSSSSSSSSSSSSSSSSTIKPTSTSVSPAKPTSTSTSAAVSSAKPSSTDGGACPAPSATSCVA

SEQ ID NO: 47778 - protein, 257 aa, Staphylotrichum coccosporum
GVSTRYWDCCKPSCSWPGKASVNQPVWACSANFQRISDPNVKSGCDGGSAYACADQTPWAVNDNFSYGFAATSIKGGNEASWCCGCYELTFTSGPVAGKKMVVQSTSTGGDLGTNHFDLAMPGGGVGIFDGCSEQFGGLAGDRYGGVSSRDQCDSFPAPLKPGCYWRFDWFKNADNPTFTFRQVQCPSELVARTGCRRNDDGNFPVFVPPSGGQSSSSSSSSSAKPTSTSTSTTSTKATSTTSTASSQTSSSTGGGC

SEQ ID NO: 47779 - protein, 257 aa, Staphylotrichum coccosporum
GKSTRYWDCCKPSCSWPGKASVNQPVWACSANFQRISDPNVKSGCDGGSAYACADQTPWAVNDNFSYGFAATSISGGNEASWCCGCYELTFTSGPVAGKTMVVQSTSTGGDLGTNHFDLAMPGGGVGIFDGCSPQFGGLAGDRYGGVSSRSQCDSFPAALKPGCYWRFDWFKNADNPTFTFRQVQCPSELVARTGCRRNDDGNFPVFTPPSGGQSSSSSSSSSAKPTSTSTSTTSTKATSTTSTASSQTSSSTGGGC

SEQ ID NO: 47780 - protein, 257 aa, Staphylotrichum coccosporum
GKSTRYWDCCKPSCSWPGKASVNQPVFACDANFQRISDPNVKSGCDGGSAYACADQTPWAVNDNFSYGFAATSISGGNEASWCCGCYELTFTSGPVAGKTMVVQSTSTGGDLGTNHFDLAMPGGGVGIFDGCSPQFGGLEGDRYGGVSSRSQCDSFPAALKPGCYWRFDWFKNADNPTFTFRQVQCPSELVARTGCRRNDDGNFPKFTPPSGGQSSSSSSSSKAKPTSTSTSTTSTKARSTTSTASSQTSSSTGGGC

SEQ ID NO: 47781 - protein, 257 aa, Staphylotrichum coccosporum
GKSTRYWDCCKPSCSWPGKASVNQPVFACSANFQRISDPNVKSGCDGGSAYACADQTPWAVNDNFSYGFAATSISGGNEASWCCGCYELTFTSGPVAGKTMVVQSTSTGGDLGTNHFDLAMPGGGVGIFDGCSPQFGGLDGDRYGGVSSRSQCDSFPAALKPGCYWRFDWFKNADNPTFTFRQVQCPSELVARTGCRRNDDGNFPVFTPPSGGQSSSSSSSSSAKPTSTSTSTTSTKATSTTSTASSQTSSSTGGGC

SEQ ID NO: 47782 - protein, 257 aa, Staphylotrichum coccosporum
GKSTRYWDCCKPSCSWPGKASVNQPVFACSANFQRISDPNVKSGCDGGSAYACADQTPWAVNDNFSYGFAATSISGGNEASWCCGCYELTFTSGPVAGKKMVVQSTSTGGDLGTNHFDLAMPGGGVGIFDGCSPQFGGLPGDRYGGVSSRSECDSFPAALKPGCYWRFDWFKNADNPTFTFRQVQCPSELVARTGCRRNDDSNFPVFTPPSGGQSSSSSSSSSARPTSTSTSTTSTKATSTTSTASSQTSSSTGGGC

SEQ ID NO: 47783 - protein, 257 aa, Staphylotrichum coccosporum
GKSTRYWDCCKPSCSWPGKASVNQPVFACSANFQRISDPNVKSGCDGGSAYACADQTPWAVNDNFSYGFAATSISGGNEASWCCGCYELTFTSGPVAGKTMVVQSTSTGGDLGTNHFDLAMPGGGVGIFDGCSPQFGGLAGDRYGGVSSRSQCDSFPAALKPGCYWRFDWFKNADNPTFTFRQVQCPSELVARTGCRRNDDGNFPVFTPPSGGTSSSSSSSSSAKPTSTSTSTTSTKATSTTSTASSQTSSSTGGGC

SEQ ID NO: 47784 - protein, 257 aa, Staphylotrichum coccosporum
GKSTRYWDCCKPSCSWPGKASVNQPVFACSANFQRISDPNVKSGCDGGSAYACADQTPWAVNDNFSYGFAATSISGGNEASWCCGCYELTFTSGPVAGKTMVVQSTSTGGDLGTNHFDLAMPGGGVGIFDGCSPQFGGLAGDRYGGVSSRSQCDSFPAALKPGCYWRFDWFKNADNPTFTFRQVQCPSELVARTGCRRNDDGNFPVFTPPSGGGSSSSSSSSSAKPTSTSTSTTSTKATSTTSTASSQTSSSTGGGC

SEQ ID NO: 47785 - protein, 257 aa, Staphylotrichum coccosporum
GKSTRYWDCCKPSCSWPGKASVNQPVFACSANFQRISDPNVKSGCDGGSAYACADQTPWAVNDNFSYGFAATSISGGNEASWCCGCYELTFTSGPVAGKTMVVQSTSTGGDLGTNHFDLAMPGGGVGIFDGCSPQFGGLAGDRYGGVSSRSQCDSFPAALKPGCYWRFDWFKNADNPTFTFRQVQCPSELVARTGCRRNDDGNFPVFTPPSGGQSSSSSSSSKAKPTSTSTSTTSTKATSTTSTASSQTSSSTGGGC

SEQ ID NO: 47786 - protein, 257 aa, Staphylotrichum coccosporum
GKSTRYWDCCKPSCSWPGKASVNQPVFACSANFTRISDPNVKSGCDGGSAYACADQTPWAVNDNFSYGFAATSISGGNEASWCCGCYELTFTSGPVAGKTMVVQSTSTGGDLGTNHFDLAMPGGGVGIFDGCSEQFGGLPGDRYGGVSSRSQCDSFPAALKPGCYWRFDWFKNADNPTFTFRQVQCPSELVARTGCRRNDDGNFPVFTPPSGGQSSSSSSSSKAKPTSTSTSTTSTKATSTTSTASPQTSSSTGGGC

SEQ ID NO: 47787 - protein, 257 aa, Staphylotrichum coccosporum
GKSTRYWDCCKPSCSWPGKASVNQPVFACSANFQRISDPNVKSGCDGGSAYACADQTPWAVNDNFSYGFAATSISGGNEASWCCGCYELTFTSGPVAGKTMVVQSTSTGGDLGTNHFDLAMPGGGVGIFDGCSPQFGGLAGDRYGGVSSRSQCDSFPAALKPGCYWRFDWFKNADNPTFTFRQVQCPSELVARTGCRRNDDGNFPVFTPPSGGVSSSSSSSSSAKPTSTSTSTTSTKATSTTSTASSQTSSSTGGGC

SEQ ID NO: 47788 - protein, 257 aa, Staphylotrichum coccosporum
GKSTRYWDCCKPSCSWPGKASVNQPVFACSANFQRISDPNVKSGCDGGSAYACADQTPWAVNDNFSYGFAATSISGGNEASWCCGCYELTFTSGPVAGKTMVVQSTSTGGDLGTNHFDLAMPGGGVGIFDGCSKQFGGLAGDRYGGVSSRSQCDSFPAALKPGCYWRFDWFKNADNPTFTFRQVQCPSELVARTGCRRNDDGNFPVFTPPSGGQSSSSSSSSSAKPTSTSTSTTSTKATSTTSTASSQTSSSTGGGC

SEQ ID NO: 47789 - protein, 257 aa, Staphylotrichum coccosporum
GKSTRYWDCCKPSCSWPGKASVNQPVFACSANFQRISDPNVKSGCDGGSAYACADQTPWAVNDNFSYGFAATSISGGNEASWCCGCYELTFTSGSVAGKTMVVQSTSTGVDLGTNHFDLAMPGGGVGIFDGCSSQFGGLAGDRYGGVSSRDQCDSFPAALKPGCYWRFDWFKNADNPTFTFRQVQCPSELVARTGCRRNDDGNFPVFTPPSGGQSSSSSSSSKAKPTSTSTSTTSTKARSTTSTASSQTSSSTGGGC

SEQ ID NO: 47790 - protein, 257 aa, Staphylotrichum coccosporum
GKSTRYWDCCKPSCSWPGKASVNQPVFACSANFQRISDPNVKSGCDGGSAYACADQTPWAVNDNFSYGFAATSISGGNEASWCCGCYELTFTSGPVAGKTMVVQSTSTGGDLGTNHFDLAMPGGGVGIFDGCSPQFGGLAGDRYGGVSSRSQCDSFPAALKPGCYWRFDWFKNADNPTFTFRQVQCPSELVARTGCRRNDDGNFPVFTPPSGGQSSSSSSSSSARPTSTSTSTTSTKATSTTSTASSQTSSSTGGGC

SEQ ID NO: 47791 - protein, 257 aa, Staphylotrichum coccosporum
GKSTRYWDCCKPSCSWPGKASVNQPVFACSANFQRISDPNVKSGCDGGSAYACADQTPWAVNDNFSYGFAATSISGGNEASWCCGCYELTFTSGPVAGKTMVVQSTSTGGDLGTNHFDLAMPGGGVGIFDGCSPQFGGLQGDRYGGVSSRSQCDSFPAALKPGCYWRFDWFKNADNPTFTFRQVQCPSELVARTGCRRNDDGNFPVFTPPSGGQSSSSSSSSSAKPTSTSTSTTSTKATSTTSTASSQTSSSTGGGC

SEQ ID NO: 47792 - protein, 257 aa, Staphylotrichum coccosporum
GKSTRYWDCCKPSCSWPGKASVNQPVFACSANFQRISDPNVKSGCDGGSAYACADQTPWAVNDNFSYGFAATSISGGNEASWCCGCYELTFTSGPVAGKTMVVQSTSTGGDLGVNHFDLAMPGGGVGIFDGCSPQFGGLAGDRYGGVSSRSQCDSFPAALKPGCYWRFDWFKNADNPTFTFRQVQCPSELVARTGCRRNDDGNFPVFTPPSGGQSSSSSSSSSAKPTSTSTSTTSTKATSTTSTASSQTSSSTGGGC

SEQ ID NO: 47793 - protein, 257 aa, Staphylotrichum coccosporum
GKSTRYWDCCKPSCSWPGKASVNQPVFACDANFTRISDPNVKSGCDGGSAYACADQTPWAVNDNFSYGFAATSISGGNEASWCCGCYELTFTSGPVAGKTMVVQSTSTGSDLGTNHFDLAMPGGGVGIFDGCSPQFGGLPGDRYGGVSSRSQCDSFPAALKPGCYWRFDWFKNADNPTFTFRQVQCPSELVARTGCRRNDDGNFPVFTPPSGGQSSSSSSSSSAKPTSTSTSTTSTKATSTTSTASSQTSSSTGGGC

SEQ ID NO: 47794 - protein, 257 aa, Staphylotrichum coccosporum
GKSTRYWDCCKPSCSWPGKASVNQPVFACSANFQRISDPNVKSGCDGGSAYACADQTPWAVNDNFSYGFAATSISGGNEASWCCGCYELTFTSGPVAGKTMVVQSTSTGGDLGTNHFDLAMPGGGVGIFDGCSPQFGGLAGDRYGGVSSRSQCDSFPAALKPGCYWRFDWFKNADNPTFTFRQVQCPSELVARTGCRRNDDGNFPVFTPPSGGQSSSSSASSSAKPTSTSTSTTSTKATSTTSTASSQTSSSTGGGC

SEQ ID NO: 47795 - protein, 257 aa, Staphylotrichum coccosporum
GKSTRYWDCCKPSCSWPGKASVNQPVFACSANFQRISDPNVKSGCDGGSAYACADQTPWAVNDNFSYGFAATSIMGGNEASWCCGCYELTFTSGPVAGKKMVVQSTSTGGDLGVNHFDLAMPGGGVGIFDGCTPQFGGLAGDRYGGVSSRDQCDSFPAPLKPGCYWRFDWFKNADNPTFTFRQVQCPSELVARTGCRRNDDGNFPVFTPPSGGQSSSSSSSSSAKPTSTSTSTTSDKATSTTSTASSQTSSSTGGGC

SEQ ID NO: 47796 - protein, 257 aa, Staphylotrichum coccosporum
GKSTRYWDCCKPSCSWPGKASVNQPVFACSANFQRISDPNVKSGCDGGSAYACADQTPWAVNDNFSYGFAATSISGGNEASWCCGCYELTFTSGPVAGKTMVVQSTSTGGDLGTNHFDIAMPGGGVGIFDGCSPQFGGLAGDRYGGVSSRSQCDSFPAAIKPGCYWRFDWFKNADNPTFTFRQVQCPSELVARTGCRRNDDGNFPVFTPPSGGQSSSSSSSSSAKPTSTSTSTTSTKATSTTSTASSQTSSSTGGGC

SEQ ID NO: 47797 - protein, 257 aa, Staphylotrichum coccosporum
GKSTRYWDCCKPSCSWPGKASVNQPVFACSANFQRISDPNVKSGCDGGSAYACADQTPWAVNDNFSYGFAATSISGGNEASWCCGCYELTFTSGPVAGKTMVVQSTSTGGDLGTNHFDLAMPGGGVGIFDGCSPQFGGLAGDRYGGVSSRSQCDSFPAALKPGCYWRFDWFKNADNPTFTFRQVQCPSELVARTGCRRNDDGNFPVFTPPSGGQMSSSSSSSSAKPTSTSTSTTSTKATSTTSTASSQTSSSTGGGC

SEQ ID NO: 47798 - protein, 257 aa, Staphylotrichum coccosporum
GKSTRYWDCCKPSCSWPGKASVNQPVWACSANFQRISDPNVKSGCDGGSAYACADQTPWAVNDNFSYGFAATSIMGGNEASWCCGCYELTFTSGPVEGKTMVVQSTSTGGDLGTNHFDLAMPGGGVGIFDGCSPQFGGLPGDRYGGVSSRSQCDSFPAALKPGCYWRFDWFKNADNPTFTFRQVQCPSELVARTGCRRNDDGNFPVFTPPSGGQSSSSSSSSSAKPTSTSTSTTSTKATSTTSTASSQTSSSTGGGC

SEQ ID NO: 47799 - protein, 257 aa, Staphylotrichum coccosporum
GKSTRYWDCCKPSCSWPGKASVNQPVFACSANFQRISDPNVKSGCDGGSAYACADQTPWAVNDNFSYGFAATSISGGNEASWCCGCYELTFTSGPVAGKTMVVQSTSTGGDLGTNHFDLAMPGGGVGIFDGCSPQFGGLAGDRYGGVSSRSQCDSFPAALKPGCYWRFDWFKNADNPTFTFRQVQCPSELVARTGCRRNDDGNFPVFTPPSGGQSSSSMSSSSAKPTSTSTSTTSTKATSTTSTASSQTSSSTGGGC

SEQ ID NO: 47800 - protein, 257 aa, Staphylotrichum coccosporum
GKSTRYWDCCKPSCSWPGKASVNQPVFACSANFQRISDPNVKSGCDGGSAYACADQTPWAVNDNFSYGFAATSISGGNEASWCCGCYELTFTSGPVAGKTMVVQSTSTGGDLGTNHFDLAMPGGGVGIFDGCSPQFGGLAGDRYGGVSSRSQCDSFPAALKPGCYWRFDWFKNADNPTFTFRQVQCPSEVVARTGCRRNDDGNFPVFTPPSGGQSSSSSSSSSAKPTSTSTSTTSTKATSTTSTASSQTSSSTGGGC

SEQ ID NO: 47801 - protein, 257 aa, Staphylotrichum coccosporum
GKSTRYWDCCKPSCSWPGKASVNQPVFACDANFTRISDPNVKSGCDGGSAYACADQTPWAVNDNFSYGFAATSISGGNEASWCCGCYELTFTSGPVAGKTMVVQSTSTGGDLGTNHFDLAMPGGGVGIFDGCSPQFGGLAGDRYGGVSSRSQCDSFPAALKPGCYWRFDWFKNADNPTFTFRQVQCPSELVARTGCRRNDDGNFPVFTPPSGGQSSSSLSSSKAKPTSTSTSTTSTKATSTTSTASSQTSSSTGGGC

SEQ ID NO: 47802 - protein, 257 aa, Staphylotrichum coccosporum
GKSTRYWDCCKPSCSWPGKASVNQPVFACSANFQRISDPNVKSGCDGGSAYACADQTPWAVNDNFSYGFAATSISGGNEASWCCGCYELTFTSGPVAGKTMVVQSTSTGGDLGTNHFDLAMPGGGVGIFDGCSEQFGGLAGDRYGGVSSRSQCDSFPAALKPGCYWRFDWFKNADNPTFTFRQVQCPSELVARTGCRRNDDGNFPVFTPPSGGQSSSSSSSSSAKPTSTSTSTTSTKATSTTSTASSQTSSSTGGGC

SEQ ID NO: 47803 - protein, 257 aa, Staphylotrichum coccosporum
GKSTRYWDCCKPSCSWPGKASVNQPVFACSANFQRISDPNVKSGCDGGSAYACADQTPWAVNDNFSYGFAATSIMGGNEASWCCGCYELTFTSGPVAGKTMVVQSTSTGGDLGTNHFDLAMPGGGVGIFDGCSPQFGGLAGDRYGGVSSRSQCDSFPAALKPGCYWRFDWFKNADNPTFTFRQVQCPSELVARTGCRRNDDGNFPVFTPPSGGQSSSSSSSSSAKPTSTSTSTTSTKATSTTSTASSQTSSSTGGGC

SEQ ID NO: 47804 - protein, 257 aa, Staphylotrichum coccosporum
GKSTRYWDCCKPSCSWPGKASVNQPVFACSANFQRISDPNVKSGCDGGSAYACADQTPWAVNDNFSYGFAATSIKGGNEASWCCGCYELTFTSGPVAGKTMVVQSTSTGGDLGTNHFDLAMPGGGVGIFDGCSPQFGGLAGDRYGGVSSRSQCDSFPAALKPGCYWRFDWFKNADNPTFTFRQVQCPSELVARTGCRRNDDGNFPVFTPPSGGQSSSSSSSSSAKPTSTSTSTTSTKATSTTSTASSQTSSSTGGGC

SEQ ID NO: 47805 - protein, 257 aa, Staphylotrichum coccosporum
GKSTRYWDCCKPSCSWPGKALVNQPVFACSANFQRISDPNVKSGCDGGSAYACADQTPWAVNDNFSYGFAATSISGGNEASWCCGCYELTFTSGPVAGKTMVVQSTSTGGDLGTNHFDLAMPGGGVGIFDGCSPQFGGLAGDRYGGVSSRSQCDSFPAALKPGCYWRFDWFKNADNPTFTFRQVQCPSELVARTGCRRNDDGNFPVFTPPSGGQSSSSSSSSSAKPTSTSTSTTSTKATSTTSTASSQTSSSTGGGC

SEQ ID NO: 47806 - protein, 257 aa, Staphylotrichum coccosporum
GKSTRYWDCCKPSCSWPGKASVNQPVFACSANFQRISDPNVKSGCDGGSAYACADQTPWAVNDNFSYGFAATSISGGNEASWCCGCYELTFTSGPVAGKTMVVQSTSTGGDLGTNHFDLAMPGGGVGIFDGCSPQFGGLAGDRYGGVSSRSQCDSFPAELKPGCYWRFDWFKNADNPTFTFRQVQCPSELVARTGCRRNDDGNFPVFTPPSGGQSSSSSSSSSAKPTSTSTSTTSTKATSTTSTASSQTSSSTGGGC

SEQ ID NO: 47807 - protein, 257 aa, Staphylotrichum coccosporum
GVSTRYWDCCKPSCSWPGKASVNQPVFACSANFQRISDPNVKSGCDGGSAYACADQTPWAVNDNFSYGFAATSISGGNEASWCCGCYELTFTSGPVAGKTMVVQSTSTGSDLGTNHFDLAMPGGGVGIFDGCTPQFGGLPGDRYGGVSSRSQCDSFPAPLKPGCYWRFDWFKNADNPTFTFRQVQCPSELVARTGCRRNDDGNFPVFTPPSGGQSSSSSSSSSAKPTSTSTSTTSTKATSTTSTASSQTSSSTGGGC

SEQ ID NO: 47808 - protein, 257 aa, Staphylotrichum coccosporum
GKSTRYWDCCKPSCSWPGKASVNQPVFACSANFQRISDPNVVSGCDGGSAYACADQTPWAVNDNFSYGFAATSISGGNEASWCCGCYELTFTSGPVAGKTMVVQSTSTGGDLGTNHFDLAMPGGGVGIFDGCSPQFGGLAGDRYGGVSSRSQCDSFPAALKPGCYWRFDWFKNADNPTFTFRQVQCPSELVARTGCRRNDDGNFPVFTPPSGGQSSSSSSSSSAKPTSTSTSTTSTKATSTTSTASSQTSSSTGGGC

SEQ ID NO: 47809 - protein, 257 aa, Staphylotrichum coccosporum
GKSTRYWDCCKPSCSWPGKASVNQPVFACSANFQRISDPNVKSGCDGGSAYACADQTPWAVNDNFSYGFAATSISGGNEASWCCGCYELTFTSGPVAGKTMVVQSTSTGGDLGTNHFDIAMPGGGVGIFDGCSPQFGGLAGDRYGGVSSRSQCDSFPAAVKPGCYWRFDWFKNADNPTFTFRQVQCPSELVARTGCRRNDDGNFPVFTPPSGGQSSSSSSSSSAKPTSTSTSTTSTKATSTTSTASSQTSSSTGGGC

SEQ ID NO: 47810 - protein, 257 aa, Staphylotrichum coccosporum
GKSTRYWDCCKPSCSWPGKASVNQPVFACSANFQRISDPNVKSGCDGGSAYACADQTPWAVNDNFSYGFAATSISGGNEASWCCGCYELTFTSGPVAGKTMVVQSTSTGGDLGTNHFDLAMPGGGVGIFDGCSPQFGGLAGDRYGGVSSRSQCDSFPAALKPGCYWRFDWFKNADNPTFTFRQVQCPSELVARTGCRRNDDGNFPVFTPPSGGQSSSSSSSSSAKPTSTTTSTTSTKATSTTSTASSQTSSSTGGGC

SEQ ID NO: 47811 - protein, 257 aa, Staphylotrichum coccosporum
GKSTRYWDCCKPSCSWPGKASVNQPVFACDANFTRISDPNVKSGCDGGSAYACADQTPWAVNDNFSYGFAATSISGGNEASWCCGCYELTFTSGPVEGKTMVVQSTSTGGDLGTNHFDLAMPGGGVGIFDGCSKQFGGLPGDRYGGVSSRSQCDSFPAALKPGCYWRFDWFKNADNPTFTFRQVQCPSELVARTGCRRNDDGNFPVFTPPSGGQSSSSSSSSSAKPTSTSTSTTSTKATSTTSTASSQTSSSTGGGC

SEQ ID NO: 47812 - protein, 257 aa, Staphylotrichum coccosporum
GKSTRYWDCCKPSCSWPGKASVNQPVFACSANFQRISDPNVKSGCDGGSAYACADQTPWAVNDNFSYGFAATSISGGNEASWCCGCYELTFTSGPVYGKTMVVQSTSTGGDLGTNHFDLAMPGGGVGIFDGCSEQFGGLPGDRYGGVSSRSQCDSFPAELKPGCYWRFDWFKNADNPTFTFRQVQCPSELVARTGCRRNDDGNFPVFTPPSGGQSSSSLSSSSAKPTSTSTSTTSTKATSTTSTASSQTSSSTGGGC

SEQ ID NO: 47813 - protein, 257 aa, Staphylotrichum coccosporum
GKSTRYWDCCKPSCSWPGKASVNQPVFACSANFQRISDPNVKSGCDGGSAYACADQTPWAVNDNFSYGFAATSISGGNEASWCCGCYELTFTSGPVAGKTMVVQSTSTGGDLGTNHFDLAMPGGGVGIFDGCSPQFGGLAGDRYGGVSSRSQCDSFPAALKPGCYWRFDWFKNADNPTFTFRQVQCPSELVARTGCRRNDDGNFPVFTPPSGGPSSSSSSSSSAKPTSTSTSTTSTKATSTTSTASSQTSSSTGGGC

SEQ ID NO: 47814 - protein, 257 aa, Staphylotrichum coccosporum
GKSTRYWDCCKPSCSWPGKASVNQPVFACSANFQRISDPNVKSGCDGGSAYACADQTPWAVNDNFSYGFAATSISGGNEASWCCGCYELTFTSGPVAGKTMVVQSTSTGGDLGTNHFDLAMPGGGVGIFDGCSPQFGGLEGDRYGGVSSRSQCDSFPAALKPGCYWRFDWFKNADNPTFTFRQVQCPSELVARTGCRRNDDGNFPVFTPPSGGQSSSSSSSSSAKPTSTSTSTTSTKATSTTSTASSQTSSSTGGGC

SEQ ID NO: 47815 - protein, 257 aa, Staphylotrichum coccosporum
GKSTRYWDCCKPSCSWPGKASVNQPVFACYANFQRISDPNVKSGCDGGSAYACADQTPWAVNDNFSYGFAATSISGGNEASWCCGCYELTFTSGPVAGKTMVVQSTSTGGDLGTNHFDLAMPGGGVGIFDGCSPQFGGLAGDRYGGVSSRSQCDSFPAALKPGCYWRFDWFKNADNPTFTFRQVQCPSELVARTGCRRNDDGNFPVFTPPSGGQSSSSSSSSSAKPTSTSTSTTSTKATSTTSTASSQTSSSTGGGC

SEQ ID NO: 47816 - protein, 257 aa, Staphylotrichum coccosporum
GKSTRYWDCCKPSCSWPGKASVNQPVFACSANFQRISDPNVKSGCDGGSAYACADQTPWAVNDNFSYGFAATSISGGNEASWCCGCYELTFTSGSVAGKTMVVQSTSTGVDLGTNHFDLAMPGGGVGIFDGCSSQFGGLAGDRYGGVSSRDQCDSFPAELKPGCYWRFDWFKNADNPTFTFRQVQCPSELVARTGCRRNDDGNFPVFTPPSGGQSSSSSSSSKAKPTSTSTSTTSTKARSTTSTASSQTSSSTGGGC

SEQ ID NO: 47817 - protein, 257 aa, Staphylotrichum coccosporum
GKSTRYWDCCKPSCSWPGKASVNQPVFACSANFQRISDPNVKSGCDGGSAYACADQTPWAVNDNFSYGFAATSISGGNEASWCCGCYELTFTSGPVAGKTMVVQSTSTGGDLGTNHFDLAMPGGGVGIFDGCSPQFGGLAGDRYGGVSSRSQCDSFPAALKPGCYWRFDWFKNADNPTFTFRQVQCPSELVARTGCRRNDDGNFPVFTPPSGGDSSSSSSSSSAKPTSTSTSTTSTKATSTTSTASSQTSSSTGGGC

SEQ ID NO: 47818 - protein, 257 aa, Staphylotrichum coccosporum
GVSTRYWDCCKPSCSWPGKASVNQPVFACSANFQRISDPNVKSGCDGGSAYACADQTPWAVNDNFSYGFAATSISGGNEASWCCGCYELTFTSGPVAGKTMVVQSTSTGGDLGTNHFDLAMPGGGVGIFDGCSPQFGGLAGDRYGGVSSRSQCDSFPAALKPGCYWRFDWFKNADNPTFTFRQVQCPSELVARTGCRRNDDGNFPVFTPPSGGQSSSSSSSSSAKPTSTSTSTTSTKATSTTSTASSQTSSSTGGGC

SEQ ID NO: 47819 - protein, 257 aa, Staphylotrichum coccosporum
GKSTRYWDCCKPSCSWPGKASVNQPVFACSANFQRISDPNVKSGCDGGSAYACADQTPWAVNDNFSYGFAATSISGGNEASWCCGCYELTFTSGPVAGKTMVVQSTSTGGDLGTNHFDLAMPGGGVGIFDGCSPQFGGLAGDRYGGVSSRSQCDSFPAALKPGCYWRFDWFKNADNPTFTFRQVQCPSELVARTGCRRNDDGNFPVFTPPSGGESSSSSSSSSAKPTSTSTSTTSTKATSTTSTASSQTSSSTGGGC

SEQ ID NO: 47820 - protein, 257 aa, Staphylotrichum coccosporum
GKSTRYWDCCKPSCSWPGKASVNQPVFACSANFQRISDPNVKSGCDGGSAYACADQTPWAVNDNFSYGFAATSISGGNEASWCCGCYELTFTSGPVAGKTMVVQSTSTGGDLGTNHFDLAMPGGGVGIFDGCSPQFGGLAGDRYGGVSSRSQCDSFPAALKPGCYWRFDWFKNADNPTFTFRQVQCPSELVARTGCRRNDDGNFPVFTPPSGGQSSSSLSSSSAKPTSTSTSTTSTKATSTTSTASSQTSSSTGGGC

SEQ ID NO: 47821 - protein, 257 aa, Staphylotrichum coccosporum
GKSTRYWDCCKPSCSWPGKASVNQPVFACSANFQRISDPNVKSGCDGGSAYACADQTPWAVNDNFSYGFAATSISGGNEASWCCGCYELTFTSGPVAGKTMVVQSTSTGGDLGTNHFDLAMPGGGVGIFDGCSPQFGGLAGDRYGGVSSRSQCDSFPAALKPGCYWRFDWFKNADNPTFTFRQVQCPSELVARTGCRRNDDGNFPVFTPPSGGQSTSSSSSSSAKPTSTSTSTTSTKATSTTSTASSQTSSSTGGGC

SEQ ID NO: 47822 - protein, 257 aa, Staphylotrichum coccosporum
GKSTRYWDCCKPSCSWPGKASVNQPVFACSANFQRISDPNVKSGCDGGSAYACADQTPWAVNDNFSYGFAATSISGGNEASWCCGCYELTFTSGPVAGKTMVVQSTSTGGDLGTNHFDLAMPGGGVGIFDGCSPQFGGLAGDRYGGVSSRSQCDSFPAALKPGCYWRFDWFKNADNPTFTFRQVQCPSELVARTGCRRNDDGNFPVFTPPSGGSSSSSSSSSSAKPTSTSTSTTSTKATSTTSTASSQTSSSTGGGC

SEQ ID NO: 47823 - protein, 257 aa, unidentified
GKSTRYWDCCKPSCSWPGKASVNQPVFACSANFQRISDPNVKSGCDGGSAYACADQTPWAVNDNFSYGFAATSISGGNEASWCCGCYELTFTSGPVAGKTMVVQSTSTGGDLGTNHFDLAMPGGGVGIFDGCSPQFGGLAGDRYGGVSSRSQCDSFPAALKPGCYWRFDWFKNADNPTFTFRQVQCPSELVARTGCRRNDDGNFPVFTPPSGGQSSSSSSSSSAKPTSTSTSTTSTKATSTTSTASSQTSSSTGGGC

SEQ ID NO: 47824 - protein, 309 aa, Thermochaetoides thermophila
MRSTPVLRTALAAALPGTVLAADGKSTRYWDCCKPSCLSPGNVQVSQNVFACDTNFNRIYDFGAKSGCEGGPAYSCEDQTPWAVNDQFSYGFAATNIAGGNQASWCCACYKLTFTSGPVAGKVMVVQSTSTGGDLGNNHFDLNIPGGGVGIFDGCTPQFGGLPGERYGGISSRSQCDSFPDALKPGCYWRFDWFLNADNPNFTFERVQCPSELVARTGCKRNDDGNYPVFTPPSGDSPSSSSAAPTSTSTSQQPQQPTSSSSQASVPTSNPGGCTSQKWAQCGGIGFTGCTTCVSGTTCTKLNDWYSQC

SEQ ID NO: 47825 - protein, 309 aa, Thermochaetoides thermophila
MRSTPVLRTALAAALPFTVLAADGKSTRYWDCCKPSCLSPGNVQVSQNVFACDRNFNRIYDFGAKSGCEGGPAYSCADQTPWAVNDQFSYGFAATNIAGGNRASWCCACYKLTFTSGPVAGKVMVVQSTSTGGDLGNNHFDLNIPGGGVGIFDGCTPQFGGLPGERYGGISSRSQCDSFTDALKPGCYWRFDWFLNADNPNFTFERVQCPSELVARTGCKRNDDGNYPVFTPPSGDSPSSSSAAPTSTSTSQQPQQPTSSSSQASVPTSNPGGCTSQKWAQCGGIGFTGCTTCVSGTTCTKLNDWYSQC

SEQ ID NO: 47826 - protein, 309 aa, Thermochaetoides thermophila
MRSTPVLRTALAAALPFTVLAADGNSTRYWDCCKPSCLSPGNVQVSQNVFACDRNFNRIYDFGAKSGCEGGPAYSCEDQTPWAVNDQFSYGFAATNIAGGNEASWCCACYKLTFTSGPVAGKVMVVQSTSTGGDLGNNHFDLNIPGGGVGIFDGCTPQFGGLPGERYGGISSRSQCDSFTDALKPGCYWRFDWFLNADNPNFTFERVQCPSELVARTGCKRNDDGNYPVFTPPSGDSPSSSSAAPTSTSTSQQPQQPTSSSSQASVPTSNPGGCTSQKWAQCGGIGFTGCTTCVSGTTCTKLNDWYSQC

SEQ ID NO: 47827 - protein, 309 aa, Thermochaetoides thermophila
MRSTPVLRTALAAALPFTVLAADGKSTRYWDCCKPSCLSPGNVQVSQNVFACDRNFNRIYDFGAKSGCEGGPAYSCADQTPWAVNDQFSYGFAATNIAGGNEASWCCACYKLTFTSGPVAGKVMVVQSTSTGGDLGNNHFDLNIPGGGVGIFDGCTPQFGGLPGERYGGISSRSQCDSFPDALKPGCYWRFDWFLNADNPNFTFERVQCPSELVARTGCKRNDDGNYPVFTPPSGDSPSSSSAAPTSTSTSQQPQQPTSSSSQASVPTSNPGGCTGQKWSXCGGIGFTGCTTCVSGTTCTKLNDWYSQC

SEQ ID NO: 47828 - protein, 309 aa, Thermochaetoides thermophila
MRSTPVLRTALAAALPFTVLAADGNSTRYWDCCKPSCLSPGNVQVSQNVFACDRNFNRIYDFGAKSGCEGGPAYSCQDQTPWAVNDQFSYGFAATNIAGGNEASWCCACYKLTFTSGPVAGKVMVVQSTSTGGDLGNNHFDLNIPGGGVGIFDGCTPQFGGLPGERYGGISSRSQCDSFTDALKPGCYWRFDWTLNADNPNFTFERVQCPSELVARTGCKRNDDGNYPVFTPPSGDSPSSSSAAPTSTSTSQQPQQPSSSSSQASVPTSNPGGCTSQKWAQCGGIGFTGCTTCVSGTTCTKLNDWYSQC

SEQ ID NO: 47829 - protein, 309 aa, Thermochaetoides thermophila
MRSTPVLRTALAAALPFTVLAANGKSTRYWDCCKPSCLSPGNVQVSQNVFACDTNFNRIYDFGAKSGCEGGPAYSCADQTPWAVNDQFSYGFAATNIAGGNQASWCCACYKLTFTSGPVAGKVMVVQSTSTGGDLGNNHFDLNIPGGGVGIFDGCTPQFGGLPGERYGGISSRSQCDSFPDALKPGCYWRFDWFLNADNPNFTFERVQCPSELVARTGCKRNDDGNYPVFTPPSGDSPSSSSAAPTSTSTSQQPQQPSSSSSQASVPTSNPGGCTSDKWAECGGIGFTGCTTCVSGTTCTKLNDWYSQC

SEQ ID NO: 47830 - protein, 309 aa, Thermochaetoides thermophila
MRSTPVLRTALAAALPFTVLAADGKSTRYWDCCKPSCLSPGNVEVSQNVFACDRNFNRIYDFGAKSGCEGGPAYSCADQTPWAVNDQFSYGFAATNIAGGNEASWCCACYKLTFTSGPVAGKVMVVQSTSTGGDLGNNHFDLNIPGGGVGIFDGCTPQFGGLPGERYGGISSRSQCDSFPDALKPGCYWRFDWFLNADNPNFTFERVQCPSELVARTGCKRNDDGNYPVFTPPSGDSPSSSSAAPTSTSTSQQPQQPTSSSSQASVPTSNPGGCTSQKWAQCGGIAFTGCATCVSGTTCTKLNDWYSQC

SEQ ID NO: 47831 - protein, 309 aa, Thermochaetoides thermophila
MRSTPVLRTALAAALPFTVLAADGKSTRYWDCCKPSCLSPGNEQVSQNVFACDTNFNRIYDFGAKSGCEGGPAYSCADQTPWAVNDQFSYGFAATNIAGGNEASWCCACYKLTFTEGPVAGKVMVVQSTSTGGDLGNNHFSLNIPGGGVGIFDGCTPQFGGLPGERYGGISSRSQCDSFPDALKPGCYWRFDWFLNADNPNFTFERVQCPSELVARTGCKRNDDGNYPVFTPPSGDSPSSSSAAPTSTSTSQQPQQPTSSSSQASVPTSNPGGCTSQKWAQCGGIGFTGCTTCVSGTTCTKLNDWYSQC

SEQ ID NO: 47832 - protein, 309 aa, Thermochaetoides thermophila
MRSTPVLRTALAAALPGTVLAADGKSTRYWDCCKPSCLSPGNVQVSQNVFACDTNFNRIYDFGAKSGCEGGPAYSCADQTPWAVNDQFSYGFAATNIAGGNEASWCCACYKLTFTEGPVAGKVMVVQSTSTGGDLGNNHFSLNIPGGGVGIFDGCTPQFGGLPGERYGGISSRSQCDSFPDALKPGCYWRFDWFLNADNPNFTFERVQCPSELVARTGCKRNDDGNYPVFTPPSGDSPSSSSAAPTSTSTSQQPQQPTSSSSQASVPTSNPGGCTSQKWAQCGGIGFTGCTTCVSGTTCTKLNDWYSQC

SEQ ID NO: 47833 - protein, 309 aa, Thermochaetoides thermophila
MRSTPVLRTALAAALPFTVLAADGNSTRYWDCCKPSCLSPGNVQVSQNVFACDTNFNRIYDFGAKSGCEGGPAYSCQDQTPWAVNDQFSYGFAATNIAGGNEASWCCACYKLTFTDGPVAGKVMVVQSTSTGGDLGNNHFDLNIPGGGVGIFDGCTPQFGGLPGERYGGISSRSQCDSFPDALKPGCYWRFDWFLNADNPNFTFERVQCPSELVARTGCKRNDDGNYPVFTPPSGDSPSSSSAAPTSTSTSQQPQQPSDSSSQASVPTSNPGGCTSQKWAGCGGIGFTGCTTCVSGTTCTKLNDWYSQC

SEQ ID NO: 47834 - protein, 309 aa, Thermochaetoides thermophila
MRSTPVLRTALAAALPFTVLAADGKSTRYWDCCKPSCLSPGNVQVSQNVFACDTNFNRIYDFGAKSGCEGGPAYSCEDQTPWAVNDQFSYGFAATNIAGGNEASWCCACYKLTFTSGPVAGKVMVVQSTSTGGDLGNNHFDLNIPGGGVGIFDGCTPQFGGLPGERYGGISSRSQCDSFPDALKPGCYWRFDWFLNADNPNFTFERVQCPSELVARTGCKRNDDGNYPVFTPPSGDSPSSSSAAPTSTSTSQQPQQPTSSSSQASVPTSNPGGCTSEKWAECGGIAFTGCTTCVSGTTCTKLNDWYSQC

SEQ ID NO: 47835 - protein, 309 aa, Thermochaetoides thermophila
MRSTPVLRTALAAALPFTVLAADGKSTRYWDCCKPSCLSPGNVQVSQNVFACDRNFNRIYDFGAKSYCEGGPAYSCADQTPWAVNDQFSYGFAATNIAGGNEASWCCACYKLTFTSGPVAGKVMVVQSTSTGGDLGNNHFDLNIPGGGVGIFDGCTPQFGGLPGERYGGISSRSQCDSFTDALKPGCYWRFDWFLNADNPNFTFERVQCPSELVARTGCKRNDDGNYPVFTPPSGDSPSSSSAAPTSTSTSQQPQQPTSSSSQASVPTSNPGGCTSQKWAQCGGIGFTGCTTCVSGTTCTKLNDWYSQC

SEQ ID NO: 47836 - protein, 309 aa, Thermochaetoides thermophila
MRSTPVLRTALAAALPFTVLAANGKSTRYWDCCKPSCLSPGNVQVSQNVFACDRNFNRIYDFGAKSGCEGGPAYSCADQTPWAVNDQFSYGFAATNIAGGNEASWCCACYKLTFTSGPVAGKVMVVQSTSTGGDLGNNHFDLNIPGGGVGIFDGCTPQFGGLPGERYGGISSRSQCDSFTDALKPGCYWRFDWFLNADNPNFTFERVQCPSELVARTGCKRNDDGNYPVFTPPSGDSPSSSSAAPTSTSTSQQPQQPTSSSSQASVPTSNPGGCTSQKWAQCGGIGFTGCTTCVSGTTCTKLNDWYSQC

SEQ ID NO: 47837 - protein, 309 aa, Thermochaetoides thermophila
MRSTPVLRTALAAALPFTVLAADGKSTRYWDCCKPSCLSPGNVQVSQNVFACDTNFNRIYDFGAKSGCEGGPAYSCEDQTPWAVNDQFSYGFAATNIAGGNEASWCCACYKLTFTSGPVAGKVMVVQSTSTGGDLGNNHFDLNIPGGGVGIFDGCTPQFGGLPGERYGGISSRSQCDSFPDALKPGCYWRFDWFLNADNPNFTFERVQCPSELVARTGCKRNDDGNYPVFTPPSGDSPSSSSAAPTSTSTSQQPQQPSSSSSQASVPTSNPGGCTSDKWAQCGMIGFTGCATCVSGTTCTKLNDWYSQC

SEQ ID NO: 47838 - protein, 309 aa, Thermochaetoides thermophila
MRSTPVLRTALAAALPGTVLAADGKSTRYWDCCKPSCLSPGNAQVSQNVFACDRNFNRIYDFGAKTYCEGGPAYSCADQTPWAVNDQFSYGFAATNIAGGNEASWCCACYKLTFTSGPVAGKVMVVQSTSTGGDLGNNHFDLNIPGGGVGIFDGCTPQFGGLPGERYGGISSRSQCDSFPDALKPGCYWRFDWFLNADNPNFTFERVQCPSELVARTGCKRNDDGNYPVFTPPSGDSPSSSSAAPTSTSTSQQPQQPTSSSSQASVPTSNPGGCTSDKWAGCGGIGFTGCTTCVSGTTCTKLNDWYSQC

SEQ ID NO: 47839 - protein, 309 aa, Thermochaetoides thermophila
MRSTPVLRTALAAALPFTVLAADGKSTRYWDCCKPSCLSPGNSQVSQNVFACDTNFNRIYDFGAKSGCEGGPAYSCADQTPWAVNDQFSYGFAATNIAGGNEASWCCACYKLTFTDGPVAGKVMVVQSTSTGGDLGNNHFDLNIPGGGVGIFDGCTPQFGGLPGERYGGISSRSQCDSFPDALKPGCYWRFDWFLNADNPNFTFERVQCPSELVARTGCKRNDDGNYPVFTPPSGDSPSSSSAAPTSTSTSQQPQQPSSSSSQASVPTSNPGGCTSQKWAECGGIGFTGCQTCVSGTTCTKLNDWYSQC

SEQ ID NO: 47840 - protein, 309 aa, Thermochaetoides thermophila
MRSTPVLRTALAAALPFTVLAANGKSTRYWDCCKPSCLSPGNSEVSQNVFACDTNFNRIYDFGAKSGCEGGPAYSCEDQTPWAVNDQFSYGFAATNIAGGNEASWCCACYKLTFTSGPVAGKVMVVQSTSTGGDLGNNHFSLNIPGGGVGIFDGCTPQFGGLPGERYGGISSRSQCDSFPDALKPGCYWRFDWFLNADNPNFTFERVQCPSELVARTGCKRNDDGNYPVFTPPSGDSPSSSSAAPTSTSTSQQPQQPSSSSSQASVPTSNPGGCTSQKWAQCGGIGFTGCTTCVSGTTCTKLNDWYSQC

SEQ ID NO: 47841 - protein, 309 aa, Thermochaetoides thermophila
MRSTPVLRTALAAALPFTVLAADGNSTRYWDCCKPSCLSPGNVQVSQNVFACDRNFNRIYDFGAKSGCEGGPAYSCADQTPWAVNDQFSYGFAATNIAGGNEASWCCACYKLTFTDGPVAGKVMVVQSTSTGGDLGNNHFDLNIPGGGVGIFDGCTPQFGGLPGERYGGISSRSQCDSFPDALKPGCYWRFDWTLNADNPNFTFERVQCPSELVARTGCKRNDDGNYPVFTPPSGDSPSSSSAAPTSTSTSQQPQQPSDSSSQASVPTSNPGGCTSQKWAQCGGIGFTGCTTTVSGTTCTKLNDWYSQC

SEQ ID NO: 47842 - protein, 309 aa, Thermochaetoides thermophila
MRSTPVLRTALAAALPFTVLAADGNSTRYWDCCKPSCLSPGNVQVSQNVFACDRNFNRIYDFGAKSYCEGGPAYSCADQTPWAVNDQFSYGFAATNIAGGNEASWCCACYKLTFTSGPVAGKVMVVQSTSTGGDLGNNHFDLNIPGGGVGIFDGCTPQFGGLPGERYGGISSRSQCDSFTDALKPGCYWRFDWFLNADNPNFTFERVQCPSELVARTGCKRNDDGNYPVFTPPSGDSPSSSSAAPTSTSTSQQPQQPTSSSSQASVPTSNPGGCTSQKWAQCGGIGFTGCTTCVSGTTCTKLNDWYSQC

SEQ ID NO: 47843 - protein, 309 aa, Thermochaetoides thermophila
MRSTPVLRTALAAALPFTVLAANGKSTRYWDCCKPSCLSPGNVQVSQNVFACDTNFNRIYDFGAKSGCEGGPAYSCADQTPWAVNDQFSYGFAATNIAGGNEASWCCACYKLTFTSGPVAGKVMVVQSTSTGGDLGNNHFDLNIPGGGVGIFDGCTPQFGGLPGERYGGISSRSQCDSFPDALKPGCYWRFDWFLNADNPNFTFERVQCPSELVARTGCKRNDDGNYPVFTPPSGDSPSSSSAAPTSTSTSQQPQQPSDSSSQASVPTSNPGGCTSQKWAKSGGIGFTGCTTCVSGTTCTKLNDWYSQC

SEQ ID NO: 47844 - protein, 309 aa, Thermochaetoides thermophila
MRSTPVLRTALAAALPFTVLAADGKSTRYWDCCKPSCLSPGNVQVSQNVFACDTNFNRIYDFGAKSGCEGGPAYSCADQTPWAVNDQFSYGFAATNIAGGNEASWCCACYKLTFTSGPVAGSVMVVQSTSTGGDLGNNHFSLNIPGGGVGIFDGCTPQFGGLPGERYGGISSRSQCDSFPDALKPGCYWRFDWFLNADNPNFTFERVQCPSELVARTGCKRNDDGNYPVFTPPSGDSPSSSSAAPTSTSTSQQPQQPTSSSSQASVPTSNPGGCTSQKWAQCGGIGFTGCTTCVSGTTCTKLNDWYSQC

SEQ ID NO: 47845 - protein, 309 aa, Thermochaetoides thermophila
MRSTPVLRTALAAALPFTVLAADGNSTRYWDCCKPSCLSPGNVQVSQNVFACDTNFNRIYDFGAKSGCEGGPAYSCADQTPWAVNDQFSYGFAATNIAGGNEASWCCACYKLTFTSGPVAGKVMVVQSTSTGGDLGNNHFSLNIPGGGVGIFDGCTPQFGGLPGERYGGISSRSQCDSFTDALKPGCYWRFDWFLNADNPNFTFERVQCPSELVARTGCKRNDDGNYPVFTPPSGDSPSSSSAAPTSTSTSQQPQQPRDSSSQASVPTSNPGGCTSQKWAQCGGIGFTGCTTCVSGTTCTKLNDWYSQC

SEQ ID NO: 47846 - protein, 309 aa, Thermochaetoides thermophila
MRSTPVLRTALAAALPFTVLAADGKSTRYWDCCKPSCLSPGNVQVSQNVFACDTNFNRIYDFGAKSGCEGGPAYSCADQTPWAVNDQFSYGFAATNIAGGNQASWCCACYKLTFTDGPVAGKVMVVQSTSTGGDLGNNHFDLNIPGGGVGIFDGCTPQFGGLPGERYGGISSRSQCDSFPDALKPGCYWRFDWFLNADNPNFTFERVQCPSELVARTGCKRNDDGNYPVFTPPSGDSPSSSSAAPTSTSTSQQPQQPSSSSSQASVPTSNPGGCTSQKWAQCGGIGFTGCQTCVSGTTCTKLNDWYSQC

SEQ ID NO: 47847 - protein, 309 aa, Thermochaetoides thermophila
MRSTPVLRTALAAALPFTVLAADGKSTRYWDCCKPSCLSPGNVQVSQNVFACDRNFNRIYDFGAKSGCEGGPAYSCADQTPWAVNDQFSYGFAATNIAGGNEASWCCACYKLTFTSGPVAGKVMVVQSTSTGGDLGNNHFDLNIPGGGVGIFDGCTPQFGGLPGERYGGISSRSQCDSFPDALKPGCYWRFDWFLNADNPNFTFERVQCPSELVARTGCKRNDDGNYPVFTPPSGDSPSSSSAAPTSTSTSQQPQQPTSSSSQASVPTSNPGGCTSEKWAESGGIGFTGCATCVSGTTCTKLNDWYSQC

SEQ ID NO: 47848 - protein, 309 aa, Thermochaetoides thermophila
MRSTPVLRTALAAALPFTVLAADGKSTRYWDCCKPSCLSPGNVQVSQNVFACDRNFNRIYDFGAKSGCEGGPAYSCQDQTPWAVNDQFSYGFAATNIAGGNEASWCCACYKLTFTSGPVAGKVMVVQSTSTGGDLGNNHFDLNIPGGGVGIFDGCTPQFGGLPGERYGGISSRSQCDSFTDALKPGCYWRFDWFLNADNPNFTFERVQCPSELVARTGCKRNDDGNYPVFTPPSGDSPSSSSAAPTSTSTSQQPQQPTSSSSQASVPTSNPGGCTSQKWAQCGGIGFTGCTTCVSGTTCTKLNDWYSQC

SEQ ID NO: 47849 - protein, 309 aa, Thermochaetoides thermophila
MRSTPVLRTALAAALPGTVLAADGKSTRYWDCCKPSCLSPGNVQVSQNVFACDTNFNRIYDFGAKSGCEGGPAYSCADQTPWAVNDQFSYGFAATNIAGGNEASWCCACYKLTFTSGPVAGKVMVVQSTSTGGDLGNNHFDLNIPGGGVGIFDGCTPQFGGLPGERYGGISSRSQCDSFPDALKPGCYWRFDWFLNADNPNFTFERVQCPSELVARTGCKRNDDGNYPVFTPPSGDSPSSSSAAPTSTSTSQQPQQPSSSSSQASVPTSNPGGCTSQKWAGSGGIGFTGCATCVSGTTCTKLNDWYSQC

SEQ ID NO: 47850 - protein, 309 aa, Thermochaetoides thermophila
MRSTPVLRTALAAALPGTVLAADGKSTRYWDCCKPSCLSPGNAQVSQNVFACDTNFNRIYDFGAKSGCEGGPAYSCADQTPWAVNDQFSYGFAATNIAGGNEASWCCACYKLTFTEGPVAGSVMVVQSTSTGGDLGNNHFSLNIPGGGVGIFDGCTPQFGGLPGERYGGISSRSQCDSFPDALKPGCYWRFDWFLNADNPNFTFERVQCPSELVARTGCKRNDDGNYPVFTPPSGDSPSSSSAAPTSTSTSQQPQQPTSSSSQASVPTSNPGGCTSQKWAQCGGIGFTGCTTCVSGTTCTKLNDWYSQC

SEQ ID NO: 47851 - protein, 309 aa, Thermochaetoides thermophila
MRSTPVLRTALAAALPFTVLAADGKSTRYWDCCKPSCLSPGNVQVSQNVFACDRNFNRIYDFGAKSGCEGGPAYSCADQTPWAVNDQFSYGFAATNIAGGNEASWCCACYKLTFTSGPVAGKVMVVQSTSTGGDLGNNHFDLNIPGGGVGIFDGCTPQFGGLPGERYGGISSRSQCDSFPDALKPGCYWRFDWFLNADNPNFTFERVQCPSELVARTGCKRNDDGNYPVFTPPSGDSPSSSSAAPTSTSTSQQPQQPTSSSSQASVPTSNPGGCTSQKWAQCGMIGFTGCQTCVSGTTCTKLNDWYSQC

SEQ ID NO: 47852 - protein, 309 aa, Thermochaetoides thermophila
MRSTPVLRTALAAALPFTVLAADGNSTRYWDCCKPSCLSPGNAEVSQNVFACDRNFNRIYDFGAKSGCEGGPAYSCADQTPWAVNDQFSYGFAATNIAGGNEASWCCACYKLTFTSGPVAGKVMVVQSTSTGGDLGNNHFDLNIPGGGVGIFDGCTPQFGPLPGERYGGISSRSQCDSFPDALKPGCYWRFDWTLNADNPNFTFERVQCPSELVARTGCKRNDDGNYPVFTPPSGDSPSSSSAAPTSTSTSQQPQQPTSSSSQASVPTSNPGGCESDKWAQCGGIGFTGCTTCVSGTTCTKLNDWYSQC

SEQ ID NO: 47853 - protein, 309 aa, Thermochaetoides thermophila
MRSTPVLRTALAAALPFTVLAADGKSTRYWDCCKPSCLSPGNVQVSQNVFACDRNFNRIYDFGAKSGCEGGPAYSCADQTPWAVNDQFSYGFAATNIAGGNEASWCCACYKLTFTSGPVAGKVMVVQSTSTGGDLGNNHFSLNIPGGGVGIFDGCTPQFGGLPGERYGGISSRSQCDSFPDALKPGCYWRFDWFLNADNPNFTFERVQCPSELVARTGCKRNDDGNYPVFTPPSGDSPSSSSAAPTSTSTSQQPQQPRSSSSQASVPTSNPGGCTSQKWAQCGGIGFTGCTTCVSGTTCTKLNDWYSQC

SEQ ID NO: 47854 - protein, 309 aa, Thermochaetoides thermophila
MRSTPVLRTALAAALPFTVLAADGNSTRYWDCCKPSCLSPGNVQVSQNVFACDRNFNRIYDFGAKSGCEGGPAYSCADQTPWAVNDQFSYGFAATNIAGGNEASWCCACYKLTFTSGPVAGKVMVVQSTSTGGDLGNNHFDLNIPGGGVGIFDGCTPQFGKLPGERYGGISSRSQCDSFTDALKPGCYWRFDWFLNADNPNFTFERVQCPSELVARTGCKRNDDGNYPVFTPPSGDSPSSSSAAPTSTSTSQQPQQPTSSSSQASVPTSNPGGCTSQKWAQCGGIGFTGCTTCVSGTTCTKLNDWYSQC

SEQ ID NO: 47855 - protein, 309 aa, Thermochaetoides thermophila
MRSTPVLRTALAAALPFTVLAANGKSTRYWDCCKPSCLSPGNVQVSQNVFACDTNFNRIYDFGAKSGCEGGPAYSCADQTPWAVNDQFSYGFAATNIAGGNQASWCCACYKLTFTSGPVAGKVMVVQSTSTGGDLGNNHFDLNIPGGGVGIFDGCTPQFGGLPGERYGGISSRSQCDSFPDALKPGCYWRFDWFLNADNPNFTFERVQCPSELVARTGCKRNDDGNYPVFTPPSGDSPSSSSAAPTSTSTSQQPQQPSSSSSQASVPTSNPGGCTSQKWAQSGGIGFTGCTTCVSGTTCTKLNDWYSQC

SEQ ID NO: 47856 - protein, 309 aa, Thermochaetoides thermophila
MRSTPVLRTALAAALPGTVLAADGKSTRYWDCCKPSCLSPGNSQVSQNVFACDTNFNRIYDFGAKSGCEGGPAYSCADQTPWAVNDQFSYGFAATNIAGGNEASWCCACYKLTFTDGPVAGKVMVVQSTSTGGDLGNNHFSLNIPGGGVGIFDGCTPQFGGLPGERYGGISSRSQCDSFPDALKPGCYWRFDWFLNADNPNFTFERVQCPSELVARTGCKRNDDGNYPVFTPPSGDSPSSSSAAPTSTSTSQQPQQPTSSSSQASVPTSNPGGCTSQKWAQCGGIGFTGCTTCVSGTTCTKLNDWYSQC

SEQ ID NO: 47857 - protein, 309 aa, Thermochaetoides thermophila
MRSTPVLRTALAAALPGTVLAADGKSTRYWDCCKPSCLSPGNVQVSQNVFACDRNFNRIYDFGAKSGCEGGPAYSCADQTPWAVNDQFSYGFAATNIAGGNEASWCCACYKLTFTSGPVAGKVMVVQSTSTGGDLGNNHFDLNIPGGGVGIFDGCTPQFGGLPGERYGGISSRSQCDSFTDALKPGCYWRFDWFLNADNPNFTFERVQCPSELVARTGCKRNDDGNYPVFTPPSGDSPSSSSAAPTSTSTSQQPQQPTSSSSQASVPTSNPGGCTSEKWAQCGRIGFTGCTTTVSGTTCTKLNDWYSQC

SEQ ID NO: 47858 - protein, 305 aa, Thielavia hyrcaniae
MRSTPVLRTAIAAALPLVAFAADGKSTRYWDCCKPSCAWSGKAAVSAPVYACSANFQRLSDPNAKSGCDGGSAYTCADQTPWAINDNLSYGFAATSISGGSEASWCCACYELTFNSGPVAGKKMVVQSTSTGGDLGTNHFDLNIPGGGVGLFDGCKNQFGGLPGAQYGGISSRSQCDSFPEALKPGCYWRFDWFQNADNPTFTFRQVQCPSELVARTGCRRNDDSSFPVFTPGTSGSSSTAKPASSSTRATSTKTSAPATQTSSTGGGCVAQKWAQCGGSGFSGCTTCAAGSTCTKQNDYYSQCL

SEQ ID NO: 47859 - protein, 309 aa, Thermochaetoides thermophila
MRSTPVLRTALAAALPFTVLAADGKSTRYWDCCKPSCLSPGNAEVSQNVFACDTNFNRIYDFGAKSGCEGGPAYSCADQTPWAVNDQFSYGFAATNIAGGNEASWCCACYKLTFTEGPVAGSVMVVQSTSTGGDLGNNHFSLNIPGGGVGIFDGCTPQFGGLPGERYGGISSRSQCDSFPDALKPGCYWRFDWFLNADNPNFTFERVQCPSELVARTGCKRNDDGNYPVFTPPSGDSPSSSSAAPTSTSTSQQPQQPTSSSSQASVPTSNPGGCTSQKWAQCGGIGFTGCTTCVSGTTCTKLNDWYSQC

SEQ ID NO: 47860 - protein, 309 aa, Thermochaetoides thermophila
MRSTPVLRTALAAALPFTVLAADGNSTRYWDCCKPSCLSPGNSQVSQNVFACDTNFNRIYDFGAKTGCEGGPAYSCADQTPWAVNDQFSYGFAATNIAGGNEASWCCACYKLTFTSGPVAGKVMVVQSTSTGGDLGNNHFSLNIPGGGVGIFDGCTPQFGGLPGERYGGISSRSQCDSFTDALKPGCYWRFDWFLNADNPNFTFERVQCPSELVARTGCKRNDDGNYPVFTPPSGDSPSSSSAAPTSTSTSQQPQQPSDSSSQASVPTSNPGGCTSDKWAQCGGXGFTGCTTCVSGTTCTKLNDWYSQC

SEQ ID NO: 47861 - protein, 309 aa, Thermochaetoides thermophila
MRSTPVLRTALAAALPFTVLAADGKSTRYWDCCKPSCLSPGNVQVSQNVFACDRNFNRIYDFGAKSGCEGGPAYSCEDQTPWAVNDQFSYGFAATNIAGGNEASWCCACYKLTFTDGPVAGKVMVVQSTSTGGDLGNNHFDLNIPGGGVGIFDGCTPQFGGLPGERYGGISSRSQCDSFPDALKPGCYWRFDWFLNADNPNFTFERVQCPSELVARTGCKRNDDGNYPVFTPPSGDSPSSSSAAPTSTSTSQQPQQPSSSSSQASVPTSNPGGCTSQKWAECGGIGFTGCTTCVSGTTCTKLNDWYSQC

SEQ ID NO: 47862 - protein, 309 aa, Thermochaetoides thermophila
MRSTPVLRTALAAALPFTVLAADGNSTRYWDCCKPSCLSPGNVQVSQNVFACDRNFNRIYDFGAKSGCEGGPAYSCADQTPWAVNDQFSYGFAATNIAGGNEASWCCACYKLTFTSGPVAGKVMVVQSTSTGGDLGNNHFDLNIPGGGVGIFDGCTPQFGGLPGERYGGISSRSQCDSFTDALKPGCYWRFDWTLNADNPNFTFERVQCPSELVARTGCKRNDDGNYPVFTPPSGDSPSSSSAAPTSTSTSQQPQQPTSSSSQASVPTSNPGGCTSQKWAQCGGIGFTGCTTCVSGTTCTKLNDWYSQC

SEQ ID NO: 47863 - protein, 309 aa, Thermochaetoides thermophila
MRSTPVLRTALAAALPFTVLAADGKSTRYWDCCKPSCLSPGNVQVSQNVFACDTNFNRIYDFGAKSGCEGGPAYSCADQTPWAVNDQFSYGFAATNIAGGNEASWCCACYKLTFTDGPVAGKVMVVQSTSTGGDLGNNHFDLNIPGGGVGIFDGCTPQFGGLPGERYGGISSRSQCDSFPDALKPGCYWRFDWFLNADNPNFTFERVQCPSELVARTGCKRNDDGNYPVFTPPSGDSPSSSSAAPTSTSTSQQPQQPSSSSSQASVPTSNPGGCTSQKWAQSGGIGFTGCATCVSGTTCTKLNDWYSQC

SEQ ID NO: 47864 - protein, 309 aa, Thermochaetoides thermophila
MRSTPVLRTALAAALPFTVLAADGNSTRYWDCCKPSCLSPGNVQVSQNVFACDRNFNRIYDFGAKSYCEGGPAYSCADQTPWAVNDQFSYGFAATNIAGGNEASWCCACYKLTFTSGPVAGKVMVVQSTSTGGDLGNNHFDLNIPGGGVGIFDGCTPQFGKLPGERYGGISSRSQCDSFPDALKPGCYWRFDWFLNADNPNFTFERVQCPSELVARTGCKRNDDGNYPVFTPPSGDSPSSSSAAPTSTSTSQQPQQPTSSSSQASVPTSNPGGCTSQKWAQCGGIGFTGCTTCVSGTTCTKLNDWYSQC

SEQ ID NO: 47865 - protein, 309 aa, Thermochaetoides thermophila
MRSTPVLRTALAAALPFTVLAADGKSTRYWDCCKPSCLSPGNVQVSQNVFACDRNFNRIYDFGAKSGCEGGPAYSCADQTPWAVNDQFSYGFAATNIAGGNQASWCCACYKLTFTSGPVAGKVMVVQSTSTGGDLGNNHFDLNIPGGGVGIFDGCTPQFGGLPGERYGGISSRSQCDSFPDALKPGCYWRFDWFLNADNPNFTFERVQCPSELVARTGCKRNDDGNYPVFTPPSGDSPSSSSAAPTSTSTSQQPQQPTSSSSQASVPTSNPGGCTSDKWAGCGGIGFTGCTTCVSGTTCTKLNDWYSQC

SEQ ID NO: 47866 - protein, 309 aa, Thermochaetoides thermophila
MRSTPVLRTALAAALPFTVLAADGKSTRYWDCCKPSCLSPGNVQVSQNVFACDRNFNRIYDFGAKSGCEGGPAYSCADQTPWAVNDQFSYGFAATNIAGGNQASWCCACYKLTFTDGPVAGKVMVVQSTSTGGDLGNNHFDLNIPGGGVGIFDGCTPQFGGLPGERYGGISSRSQCDSFPDALKPGCYWRFDWFLNADNPNFTFERVQCPSELVARTGCKRNDDGNYPVFTPPSGDSPSSSSAAPTSTSTSQQPQQPTSSSSQASVPTSNPGGCTSQKWAQCGGIGFTGCTTCVSGTTCTKLNDWYSQC

SEQ ID NO: 47867 - protein, 309 aa, Thermochaetoides thermophila
MRSTPVLRTALAAALPFTVLAADGKSTRYWDCCKPSCLSPGNVQVSQNVFACDRNFNRIYDFGAKSGCEGGPAYSCQDQTPWAVNDQFSYGFAATNIAGGNEASWCCACYKLTFTSGPVAGKVMVVQSTSTGGDLGNNHFDLNIPGGGVGIFDGCTPQFGGLPGERYGGISSRSQCDSFTDALKPGCYWRFDWFLNADNPNFTFERVQCPSELVARTGCKRNDDGNYPVFTPPSGDSPSSSSAAPTSTSTSQQPQQPTSSSSQASVPTSNPGGCESEKWAQCGGIGFTGCTTCVSGTTCTKLNDWYSQC

SEQ ID NO: 47868 - protein, 309 aa, Thermochaetoides thermophila
MRSTPVLRTALAAALPFTVLAADGKSTRYWDCCKPSCLSPGNVQVSQNVFACDTNFNRIYDFGAKSGCEGGPAYSCADQTPWAVNDQFSYGFAATNIAGGNQASWCCACYKLTFTSGPVAGKVMVVQSTSTGGDLGNNHFDLNIPGGGVGIFDGCTPQFGGLPGERYGGISSRSQCDSFPDALKPGCYWRFDWFLNADNPNFTFERVQCPSELVARTGCKRNDDGNYPVFTPPSGDSPSSSSAAPTSTSTSQQPQQPSSSSSQASVPTSNPGGCTSQKWAQCGMIAFTGCTTCVSGTTCTKLNDWYSQC

SEQ ID NO: 47869 - protein, 287 aa, Corynascus heterothallicus
ALPVLALDQLSGIGQTTRYWDCCKPSCAWPGKGPSSPVQACDKNDNPLNDGGSTRSGCDAGGSAYMCSSQSPWAVSDELSYGWAAVKLAGSSESQWCCACYELTFTSGPVAGKKMIVQATNTGGDLGDNHFDLAIPGGGVGIFNACTDQYGAPPNGWGDRYGGIHSKEECESFPEALKPGCNWRFDWFQNADNPSVTFQEVACPSELTSKSGCSRPSSSTSSPVNQPTSTSTTSTSTTSSPPVQPTTPSGCTAERWAQCGGNGWSGCTTCVAGSTCTKINDWYHQCL

SEQ ID NO: 47870 - protein, 223 aa, Thielavia terrestris
SGSGQSTRYWDCCKPSCAWPGKAAVSQPVYSCDANFQRLSDFNVQSGCNGGSAYACADQTPWAVNDNLAYGFAATSIAGGSESSWCCACYALTFTSGPVAGKTMVVQSTSTGGDLGSNHFDIAMPGGGVGIFDGCSSQFGGLPGDRYGGISSRDQCDSFPAPLKPGCYWRFDWFQNADNPTVTFQQVQCPAEIVARSGCKRNDDSSFPVFTPEPTPEPTPCTT

SEQ ID NO: 47871 - protein, 223 aa, Thielavia terrestris
SGSGQSTRYWDCCKPSCAWPGKAAVSQPVYSCDANFQRLSDFNVQSGCNGGSAYACADQTPWAVNDNLAYGFAATSIAGGSESSWCCACYALTFTSGPVAGKTMVVQSTSTGGDLGSNHFDIAMPGGGVGIFDGCSSQFGGLPGDRYGGISSRDQCDSFPAPLKPGCYWRFDWFQNADNPTVTFQQVQCPAEIVARSGCKRNDDSSFPVFTPEPTPEPTGCTT

SEQ ID NO: 47872 - protein, 223 aa, Thielavia terrestris
SGSGQSTRYWDCCKPSCAWPGKAAVSQPVYSCDANFQRLSDFNVQSGCNGGSAYACADQTPWAVNDNLAYGFAATSIAGGSESSWCCACYALTFTSGPVAGKTMVVQSTSTGGDLGSNHFDIAMPGGGVGIFDGCSSQFGGLPGDRYGGISSRDQCDSFPAPLKPGCYWRFDWFQNADNPTVTFQQVQCPAEIVARSGCKRNDDSSFPVFTPQPTPEPTGCTT

SEQ ID NO: 47873 - protein, 223 aa, Thielavia terrestris
SGSGQSTRYWDCCKPSCAWPGKAAVSQPVYSCDANFQRLSDFNVQSGCNGGSAYACADQTPWAVNDNLAYGFAATSIAGGSESSWCCACYALTFTSGPVAGKTMVVQSTSTGGDLGSNHFDIAMPGGGVGIFDGCSSQFGGLPGDRYGGISSRDQCDSFPAPLKPGCYWRFDWFQNADNPTVTFQQVQCPAEIVARSGCKRNDDSSFPVFTPRPTPEPTGCTT

SEQ ID NO: 47874 - protein, 223 aa, Thielavia terrestris
SGSGQSTRYWDCCKPSCAWPGKAAVSQPVYSCDANFQRLSDFNVQSGCNGGSAYACADQTPWAVNDNLAYGFAATSIAGGSESSWCCACYALTFTSGPVAGKTMVVQSTSTGGDLGSNHFDIAMPGGGVGIFDGCSSQFGGLPGDRYGGISSRDQCDSFPAPLKPGCYWRFDWFQNADNPTVTFQQVQCPAEIVARSGCKRNDDSSFPVFTPEPTPEPTRCTT

SEQ ID NO: 47875 - protein, 223 aa, Thermothielavioides terrestris
SGSGQSTRYWDCCKPSCAWPGKAAVSQPVYACDANFQRLSDFNVQSGCNGGSAYACADQTPWAVNDNLAYGFAATSIAGGSESSWCCACYALTFTSGPVAGKTMVVQSTSTGGDLGSNHFDIAMPGGGVGIFDGCSSQFGGLPGARYGGISSRDQCDSFPAPLKPGCQWRFDWFQNADNPTFTFQQVQCPAEIVARSGCKRNDDSSFPVFTPRPTPEPTPRPT

SEQ ID NO: 47876 - protein, 223 aa, Thermothielavioides terrestris
SGSGQSTRYWDCCKPSCAWPGKAAVSQPVYACDANFQRLSDFNVQSGCNGGSAYACADQTPWAVNDNLAYGFAATSIAGGSESSWCCACYALTFTSGPVAGKTMVVQSTSTGGDLGSNHFDIAMPGGGVGIFDGCSSQFGGLPGARYGGISSRDQCDSFPAPLKPGCQWRFDWFQNADNPTFTFQQVQCPAEIVARSGCKRNDDSSFPVFTPDPTPDPTPDPT

SEQ ID NO: 47877 - protein, 223 aa, Thermothielavioides terrestris
SGSGQSTRYWDCCKPSCAWPGKAAVSQPVYACDANFQRLSDFNVQSGCNGGSAYACADQTPWAVNDNLAYGFAATSIAGGSESSWCCACYALTFTSGPVAGKTMVVQSTSTGGDLGSNHFDIAMPGGGVGIFDGCSSQFGGLPGARYGGISSRDQCDSFPAPLKPGCQWRFDWFQNADNPTFTFQQVQCPAEIVARSGCKRNDDSSFPVFTPKPTPEPTPKPT

SEQ ID NO: 47878 - protein, 223 aa, Thermothielavioides terrestris
SGSGQSTRYWDCCKPSCAWPGKAAVSQPVYACDANFQRLSDFNVQSGCNGGSAYACADQTPWAVNDNLAYGFAATSIAGGSESSWCCACYALTFTSGPVAGKTMVVQSTSTGGDLGSNHFDIAMPGGGVGIFDGCSSQFGGLPGARYGGISSRDQCDSFPAPLKPGCQWRFDWFQNADNPTFTFQQVQCPAEIVARSGCKRNDDSSFPVFTPEPTPEPTPEPT

SEQ ID NO: 47879 - protein, 219 aa, Thermothielavioides terrestris
SGSGQSTRYWDCCKPSCAWPGKAAVSQPVYACDANFQRLSDFNVQSGCNGGSAYACADQTPWAVNDNLAYGFAATSIAGGSESSWCCACYALTFTSGPVAGKTMVVQSTSTGGDLGSNHFDIAMPGGGVGIFDGCSSQFGGLPGAQYGGISSRDECDSFPAPLKPGCYWRFDWFQNADNPTFTFQQVQCPAEIVARSGCKRNDDSSFPVFTPPPPPCTS

SEQ ID NO: 47880 - protein, 219 aa, Thermothielavioides terrestris
SGSGQSTRYWDCCKPSCAWPGKAAVSQPVYACDANFQRLSDFNVQSGCNGGSAYACADQTPWAVNDNLAYGFAATSIAGGSESSWCCACYALTFTSGPVAGKTMVVQSTSTGGDLGSNHFDIAMPGGGVGIFDGCSSQFGGLPGAQYGGISSRDECDSFPEPLKPGCQWRFDWFQNADNPTFTFQQVQCPAEIVARSGCKRNDDSSFPVFTSPSPGCTS

SEQ ID NO: 47881 - protein, 219 aa, Thermothielavioides terrestris
SGSGQSTRYWDCCKPSCAWPGKAAVSQPVYACDANFQRLSDFNVQSGCNGGSAYSCADQTPWAVNDNLAYGFAATSIAGGSESSWCCACYALTFTSGPVAGKTMVVQSTSTGGDLGSNHFDIAMPGGGVGIFNGCSSQFGGLPGAQYGGISSRDQCDSFPAPLKPGCQWRFDWFQNADNPTFTFQQVQCPAEIVARSGCKRNDDSSFPVFTPEPTPEPT

SEQ ID NO: 47882 - protein, 308 aa, Thermochaetoides thermophila
MRSTPVLRTALAAALPGTVLAADGKSTRYWDCCKPSCLSPGNVQVSQNVFACDRNFNRIYDFGAKSYCEGGPAYSCADQTPWAVNDQFSYGFAATNIAGGNEASWCCACYKLTFTSGPVAGKVMVVQSTSTGGDLGNNHFDLNIPGGGVGIFDGCTPQFGGLPGERYGGISSRSQCDSFPDALKPGCYWRFDWFLNADNPNFTFERVQCPSELVARTGCKRNDDGNYPVFTPPSGDSPSSSSAAPTSTSTSQQPQQPTSSSSQASVPTSNPGGCTSQKWAQCGMIGFTGCTCVSGTTCTKLNDWYSQC

SEQ ID NO: 47883 - protein, 234 aa, Acremonium thermophilum
MRSSPFLRAALAAALPLSAHALDGKSTRYWDCCKPSCGWAGKASVNQPVFSCSADWQRISDFNAKSGCDGGSAYSCADQTPWAVNDNFSYGFAATAIAGGSESSWCCACYALTFNSGPVAGKTMVVQSTSTGGDLGSNQFDLAIPGGGVGIFNGCASQFGGLPGAQYGGISDRSQCSSFPAPLQPGCQWRFDWFQNADNPTFTFQRVQCPSELTSRTGCKRDDDASYPVFNPPS

SEQ ID NO: 47884 - protein, 236 aa, Unidentified
MRSTPVLRTTLAAALPLVASAASGSGQSTRYWDCCKPSCAWPGKAAVSQPVYACDANFQRLSDFNVQSGCNGGSAYSCADQTPWAVNDNLAYGFAATSIAGGSESSWCCACYALTFTSGPVAGKTMVVQSTSTGGDLGSNHFDIAMPGGGVGIFNGCSSQFGGLPGAQYGGISSRDQCDSFPAPLKPGCQWRFDWFQNADNPTFTFQQVQCPAEIVARSGCKRNDDSSFPVFTPPS

SEQ ID NO: 47885 - protein, 396 aa, Melanocarpus albomyces
QKPGETPEVHPQLTTFRCTKADGCQPRTNYIVLDSLSHPVHQVDNDYNCGDWGQKPNATACPDVESCARNCIMEGVPDYSQHGVTTSDTSLRLQQLVDGRLVTPRVYLLDETEHRYEMMHLTGQEFTFEVDATKLPCGMNSALYLSEMDPTGARSELNPGGAYYGTGYCDAQCFVTPFINGIGNIEGKGSCCNEMDIWEANSRATHVAPHTCNQTGLYMCEGAECEYDGVCDKDGCGWNPYRVNITDYYGNSDAFRVDTRRPFTVVTQFPADAEGRLESIHRLYVQDGKVIESYVVDAPGLPRTDSLNDEFCAATGAARYLDLGGTAGMGDAMTRGMVLAMSIWWDESGFMNWLDSGEAGPCLPDEGDPKNIVKVEPSPEVTYSNLRWGEIGSTFE

SEQ ID NO: 47886 - protein, 230 aa, Thielavia terrestris
SGSGQSTRYWDCCKPSCAWPGKAAVSQPVYSCDANFQRLSDFNVQSGCNGGSAYACADQTPWAVNDNLAYGFAATSIAGGSESSWCCACYALTFTSGPVAGKTMVVQSTSTGGDLGSNHFDIAMPGGGVGIFDGCSSQFGGLPGDRYGGISSRDQCDSFPAPLKPGCYWRFDWFQNADNPTVTFQQVQCPAEIVARSGCKRNDDSSFPVFTSPSSPSSPSSPSSPSGCTT

SEQ ID NO: 47887 - protein, 388 aa, Melanocarpus albomyces
QKPGETPEVHPQLTTFRCTKADGCQPRTNYIVLDSLSHPVHQVDNDYNCGDWGQKPNATACPDVESCARNCIMEGVPDYSQHGVTTSDTSLRLQQLVDGRLVTPRVYLLDETEHRYEMMHLTGQEFTFEVDATKLPCGMNSALYLSEMDPTGARSELNPGGAYYGTGYCDAQCFVTPFINGIGNIEGKGSCCNEMDIWEANSRATHVAPHTCNQTGLYMCEGAECEYDGVCDKDGCGWNPYRVNITDYYGNSDAFRVDTRRPFTVVTQFPADAEGRLESIHRLYVQDGKVIESYVVDAPGLPRTDSLNDEFCAATGAARYLDLGGTAGMGDAMTRGMVLAMSIWWDESGFMNWLDSGEAGPCLPDEGDPKNIVKVEPSPEVTYSNLRW

SEQ ID NO: 47888 - protein, 255 aa, Staphylotrichum coccosporum
GKSTRYWDCCKPSCSWPGKASVNQPVFACSANFQRISDPNVKSGCDGGTAYACADQTPWAVNDNFSYGFAATSISGGSEASWCCGCYELTFTSGPVAGKTMVVQSTSTGGDLGTNHFDLAMPGGGVGIFDGCSPQFGGLPGDRYGGVSSRSQCDSFPAALKPGCYWRFWFKNANPTFTFRQVQCPSEVVARTGCRRNDDGNFPHFTPPSGGQSSSSSSSSSAKPTSTSTSTTSTKATSTTSTASSQTSSSTGGGC

SEQ ID NO: 47889 - protein, 302 aa, Melanocarpus albomyces
MRSTPVLRALLAAALPLGALAANGQSTRYWDCCKPSCGWAGKAPVNQPVYSCDANFQRIHDFDAVSGCEGGPAFSCADHSPWAINDNLSYGFAATALSGQTEESWCCACYALTFTSGPVAGKTMVVQSTSTGGDLGSNHFDLAIPGGGVGLFDGCTPQFGGLPGARYGGISSRQECDSFPEPLKPGCQWRFDWFQNADNPSFTFERVQCPEELVARTGCRRHDDGGFPVFSPPSGRPSGGSPPGGSPPGTTTTRRPATTTGSSPGPTQSHYGQCGGIGYSGPTVCASGTTCQVLNPYYSQCL

SEQ ID NO: 47890 - protein, 218 aa, Thermothielavioides terrestris
SGSGQSTRYWDCCKPSCAWPGKAAVSQPVYACDANFQRLSDFNVQSGCNGGSAYACADQTPWAVNDNLAYGFAATSIAGGSESSWCCACYALTFTSGPVAGKTMVVQSTSTGGDLGSNHFDIAMPGGGVGIFDGCSSQFGGLPGARYGGISSRDQCDSFPAPLKPGCQWRFDWFQNADNPTFTFQQVQCPAEIVARSGCKRNDDSSFPVFTTPTTPTT

SEQ ID NO: 47891 - protein, 234 aa, Aspergillus oryzae
MRSSPLLRSAVVAALPVLALAADGRSTRYWDCCKPSCGWAKKAPVNQPVFSCNANFQRITDFDAKSGCEPGGVAYSCADQTPWAVNDDFALGFAATSIAGSNEAGWCCACYELTFTSGPVAGKKMVVQSTSTGGDLGSNHFDLNIPGGGVGIFDGCTPQFGGLPGQRYGGISSRNECDRFPDALKPGCYWRFDWFKNADNPSFSFRQVQCPAELVARTGCRRNDDGNFPAVQIP

SEQ ID NO: 47892 - protein, 270 aa, Staphylotrichum coccosporum
ADGKSTRYWDCCKPSCSWPGKASVNQPVFACSANFQRISDPNVKSGCDGGSAYACADQTPWAVNDNFSYGFAATSIMGGNEASWCCGCYELTFTSGPVAGKTMVVQSTSTGGDLGTNHFDLAMPGGGVGIFDGCTPQFGGLAGDRYGGVSSRSECDSFPAALVPGCYWRFDWFKNADNPTFTFRQVQCPSELVARTGCRRNDDGNFPVFTPPSGGQSSSSSSSSSARPTSTSTSTTSDKATSTTSTTDTKATSTTSTASSQTSSSTGGGC

SEQ ID NO: 47893 - protein, 279 aa, Acremonium thermophilum
GKSTRYWDCCKPSCGWAGKAPVNQPVFSCSADWQRISDFNANSGCSGGNAYSCADQTPWAVNEQFSYGFAATAISGGSEQSWCCACYALTFNSGPVAGKTMVVQSTSTGGDLGENHFDLAIPGGGVGIFNGCQSQFGGLPGAQYGGIQDRSQCSSFPAPLQPGCQWRFDWFQNADNPTFTFQRVQCPSELTSRTGCKRDDDANYPVFSPPSGSPSGGSPPGGSPPGTTTTRRPATTTGSSPTPTQSHYGQCGGIGYSGPTVCASGTTCQVLNPYYSQCL

SEQ ID NO: 47894 - protein, 279 aa, Acremonium thermophilum
GKSTRYWDCCKPSCGWAGKAPVNQPVFSCSADWQRISDFNAKSGCDGGNAYSCADQTPWAVNEQFSYGFAATAISGGSEQSWCCACYALTFNSGPVAGKTMVVQSTSTGGDLGENHFDLAIPGGGVGIFNGCQSQFGGLPGAQYGGIQDRSQCSSFPAPLQPGCQWRFDWFQNADNPTFTFQRVQCPSELTSRTGCKRDDDANYPVFSPPSGSPSGGSPPGGSPPGTTTTRPPATTTGSSPTPTQSHYGQCGGIGYSGPTVCASGTTCQVLNPYYSQCL

SEQ ID NO: 47895 - protein, 279 aa, Acremonium thermophilum
GKSTRYWDCCKPSCGWAGKAPVNQPVFSCSADWQRISDFNAKSGCDGGNAYSCADQTPWAVNEQFSYGFAATAISGGSETSWCCACYALTFNSGPVAGKTMVVQSTSTGGDLGENHFDLAIPGGGVGIFNGCQSQFGGLPGAQYGGIQDRSQCSSFPAPLQPGCQWRFDWFQNADNPTFTFQRVQCPSELTSRTGCKRDDDANYPVFSPPSGSPSGGSPPGGSPPGTTTTRRPATTTGSSPTPTQSHYGQCGGIGYSGPTVCASGTTCQVLNPYYSQCL

SEQ ID NO: 47896 - protein, 279 aa, Acremonium thermophilum
GKSTRYWDCCKPSCGWAGKAPVNQPVFSCSADWQRISDFNAKSGCDGGNAYSCADQTPWAVNEQFSYGFAATAISGGSEQSWCCACYALTFNSGPVAGKTMVVQSTSTGGDLGENHFDLAIPGGGVGIFNGCQSQFGGLPGAQYGGIQDRSQCSSFPAPLQPGCYWRFDWFQNADNPTFTFQRVQCPSELTSRTGCKRDDDANYPVFSPPSGRPSGGSPPGGSPPGTTTTRRPATTTGSGPGPTQSHYGQCGGIGYSGPTVCASGTTCQVLNPYYSQCL

SEQ ID NO: 47897 - protein, 279 aa, Acremonium thermophilum
GKSTRYWDCCKPSCGWAGKAPVNQPVFSCSADWQRISDFNAKSGCDGGNAYSCADQTPWAVNEQFSYGFAATAISGGSEQSWCCACYALTFNSGPVAGKTMVVQSTSTGGDLGENHFDLAIPGGGVGIFNGCQSQFGGLPGAQYGGIQDRSQCSSFPAPLQPGCQWRFDWFQNADNPTFTFQRVQCPSELTSRTGCKRDDDANYPVFSPPSGSPSGGSPPGGSPPGTTTTRRPATTTGSSPTPTQSHYGQCGGIGYSGPTVCASGTTCQVLNPYYSQCL

SEQ ID NO: 47898 - protein, 279 aa, Acremonium thermophilum
GKSTRYWDCCKPSCGWAGKAPVNQPVFSCSADWQRISDFNANSGCSGGNAYSCADQTPWAVNEQFSYGFAATAISGGSEQSWCCACYALTFNSGPVAGKTMVVQSTSTGGDLGENHFDLAIPGGGVGIFNGCQSQFGGLPGAQYGGIQDRSQCSSFPAPLQPGCQWRFDWFQNADNPTFTFQRVQCPSELISRTGCKRDDDANYPVFNPPSGNPSGGNPPGGNPPGTTTTRRPATTTGSSPGPTQSHYGQCGGIGYSGPTVCASGTTCQVLNPYYSQCL

SEQ ID NO: 47899 - protein, 279 aa, Acremonium thermophilum
GKSTRYWDCCKPSCGWAGKASVNQPVFSCSADWQRISNFSAKSGCDGGNAYSCADQTPWAVNDSFSYGFAATAIAGGSEQSWCCACYALTFNSGPVAGKTMVVQSTSTGGDLGENHFDLAIPGGGVGIFNGCQSQFGGLPGAQYGGIQDRSQCSSFPAPLQPGCQWRFDWFQNADNPTFTFQRVQCPSELTSRTGCKRDDDANYPVFNPPSGNPSGGNPPGGNPPGTTTTRRPATTTGSSPGPTQSHYGQCGGIGYSGPTVCASGTTCQVLNPYYSQCL

SEQ ID NO: 47900 - protein, 279 aa, Acremonium thermophilum
GKSTRYWDCCKPSCGWAGKAPVNQPVFSCSADWQRISDFNANSGCSGGNAYSCADQTPWAVNEQFSYGFAATAISGGSEQSWCCACYALTFNSGPVAGKTMVVQSTSTGGDLGENHFDLAIPGGGVGIFNGCQSQFGGLPGAQYGGIQDRSQCSSFPAPLQPGCYWRFDWFQNADNPTFTFQRVQCPSELISRTGCKRDDDANYPVFTPPSGNPSGGNPPGGNPPGTTTTRRPATTTGSSPGPTQSRYGQCGGIGYSGPTVCASGTTCQVLNPYYSQCL

SEQ ID NO: 47901 - protein, 279 aa, Acremonium thermophilum
GKSTRYWDCCKPSCGWAGKAPVNQPVFSCSADWQRISDFNANSGCSGGNAYSCADQTPWAVNEQFSYGFAATAIAGGSEQSWCCACYALTFNSGPVAGKTMVVQSTSTGGDLGENHFDLAIPGGGVGIFNGCQSQFGGLPGAQYGGIQDRSQCSSFPAPLQPGCYWRFDWFQNADNPTFTFQRVQCPSELISRTGCKRDDDANYPVFNPPSGNPSGGNPPGGNPPGTTTTRRPATTTGSSPGPTQSHYGQCGGIGYSGPTVCASGTTCQVLNPYYSQCL

SEQ ID NO: 47902 - protein, 279 aa, Acremonium thermophilum
GKSTRYWDCCKPSCGWAGKAPVNQPVFSCSADWQRISDFNAKSGCDGGNAYSCADQTPWAVNEQFSYGFAATAISGGSEQSWCCACYALTFNSGPVAGKTMVVQSTSTGGDLGENHFDLAIPGGGVGIFNGCQSQFGGLPGAQYGGIQDRSQCSSFPAPLQPGCYWRFDWFQNADNPTFTFQRVQCPSELVSRTGCKRDDDANYPVFSPPSGRPSGGSPPGGSPPGTTTTRRPATTTGSSPGPTQSHYGQCGGIGYSGPTVCASGTTCQVLNPYYSQCL

SEQ ID NO: 47903 - protein, 294 aa, Acremonium thermophilum
LAVISAFLATARALDGKSTRYWDCCKPSCGWAGKASVNQPVFSCSADWQRISDFNAKSGCDGGSAYSCADQTPWAVNDNFSYGFAATAIAGGSESSWCCACYALTFNSGPVAGKTMVVQSTSTGGDLGSNQFDLAIPGGGVGIFNGCASQFGGLPGAQYGGISDRSQCSSFPAPLQPGCQWRFDWFQNADNPTFTFQRVQCPSELTSRTGCKRDDDASYPVFNPPSGNPSGGNPPGGNPPGTTTTRRPATTTGSSPGPTQSHYGQCGGIGYSGPTVCASGTTCQVLNPYYSQCL

SEQ ID NO: 47904 - protein, 309 aa, Chaetomium olivicolor
MRSTPILRTALAAALPLAASAADGKSTRYWDCCKPSCAWPGKALVSQPVYACSANFQRIADPNTKSGCDGGSAYSCADQTAWAVNDNLSYGFAATTIAGGSESTWCCACYALTFTSGPVAGKTMVVQSTSTGGDLGSNQFDLAIPGGGVGIFDGCTPQFGGLPGARYGGISSRSQCDSFPDALKPGCQWRFDWFQNADNPTFTFQQVQCPSELVARSGCRRNDDSNFPVFTPPSGGNSQSTTAKPTSTSASSSKPSTSSSSAASQTSSSGGSCTAQKWAQCGGSGFSGCTSCVSGTTCQKQNDWYSQCL

SEQ ID NO: 47905 - protein, 270 aa, Thermothielavioides terrestris
SGSGQSTRYWDCCKPSCAWPGKAAVSQPVYACDANFQRLSDFNVQSGCNGGSAYACADQTPWAVNDNLAYGFAATSIAGGSESSWCCACYALTFTSGPVAGKTMVVQSTSTGGDLGSNHFDIAMPGGGVGIFDGCSSQFGGLPGARYGGISSRDQCDSFPAPLKPGCQWRFDWFQNADNPTFTFQQVQCPAEIVARSGCKRNDDSSFPVFTPPSSPSSPSSPSSPSSPSSPSGCTSQKWAQCGGIGFSGCTTCVSGTTCQKLNDYYSQCL

SEQ ID NO: 47906 - protein, 225 aa, Thielavia terrestris
SGSGQSTRYWDCCKPSCAWPGKAAVSQPVYSCDANFQRLSDFNVQSGCNGGSAYACADQTPWAVNDNLAYGFAATSIAGGSESSWCCACYALTFTSGPVAGKTMVVQSTSTGGDLGSNHFDIAMPGGGVGIFDGCSSQFGGLPGDRYGGISSRDQCDSFPAPLKPGCYWRFDWFQNADNPTVTFQQVQCPAEIVARSGCKRNDDSSFPVFTSPSPSPSPSPNCTT

SEQ ID NO: 47907 - protein, 225 aa, Thermothielavioides terrestris
SGSGQSTRYWDCCKPSCAWPGKAAVSQPVYACDANFQRLSDFNVQSGCNGGSAYACADQTPWAVNDNLAYGFAATSIAGGSESSWCCACYALTFTSGPVAGKTMVVQSTSTGGDLGSNHFDIAMPGGGVGIFDGCSSQFGGLPGAQYGGISSRDECDSFPAPLKPGCYWRFDWFQNADNPTFTFQQVQCPAEIVARSGCKRNDDSSFPVFTTPTPTPTPTPGCTS

SEQ ID NO: 47908 - protein, 225 aa, Thermothielavioides terrestris
SGSGQSTRYWDCCKPSCAWPGKAAVSQPVYACDANFQRLSDFNVQSGCNGGSAYSCADQTPWAVNDNLAYGFAATSIAGGSESSWCCACYALTFTSGPVAGKTMVVQSTSTGGDLGSNHFDIAMPGGGVGIFDGCSSQFGGLPGARYGGISSRDQCDSFPAPLKPGCQWRFDWFQNADNPTFTFQQVQCPAEIVARSGCKRNDDSSFPVFTTPTPTPTPTPGCTS

SEQ ID NO: 47909 - protein, 309 aa, Thermochaetoides thermophila
MRSTPVLRTALAAALPFTVLAADGKSTRYWDCCKPSCLSPGNVQVSQNVFACDTNFNRIYDFGAKSGCEGGPAYSCEDQTPWAVNDQFSYGFAATNIAGGNEASWCCACYKLTFTSGPVAGKVMVVQSTSTGGDLGNNHFDLNIPGGGVGIFDGCTPQFGPLPGERYGGISSRSQCDSFPDALKPGCYWRFDWFLNADNPNFTFERVQCPSELVARTGCKRNDDGNYPVFTPPSGDSPSSSSAAPTSTSTSQQPQQPSSSSSQASVPTSNPGGCTSQKWAQCGMIGFTGCQTCVSGTTCTKLNDWYSQC

SEQ ID NO: 47910 - protein, 309 aa, Thermochaetoides thermophila
MRSTPVLRTALAAALPFTVLAADGNSTRYWDCCKPSCLSPGNVQVSQNVFACDRNFNRIYDFGAKSGCEGGPAYSCQDQTPWAVNDQFSYGFAATNIAGGNEASWCCACYKLTFTSGPVAGKVMVVQSTSTGGDLGNNHFDLNIPGGGVGIFDGCTPQFGGLPGERYGGISSRSQCDSFPDALKPGCYWRFDWFLNADNPNFTFERVQCPSELVARTGCKRNDDGNYPVFTPPSGDSPSSSSAAPTSTSTSQQPQQPSSSSSQASVPTSNPGGCTSDKWAQCGMIGFTGCSTTVSGTTCTKLNDWYSQC

SEQ ID NO: 47911 - protein, 309 aa, Thermochaetoides thermophila
MRSTPVLRTALAAALPFTVLAADGKSTRYWDCCKPSCLSPGNAQVSQNVFACDRNFNRIYDFGAKSGCEGGPAYSCEDQTPWAVNDQFSYGFAATNIAGGNEASWCCACYKLTFTDGPVAGKVMVVQSTSTGGDLGNNHFDLNIPGGGVGIFDGCTPQFGGLPGERYGGISSRSQCDSFPDALKPGCYWRFDWFLNADNPNFTFERVQCPSELVARTGCKRNDDGNYPVFTPPSGDSPSSSSAAPTSTSTSQQPQQPTSSSSQASVPTSNPGGCTSQKWAECGGIGFTGCATCVSGTTCTKLNDWYSQC

SEQ ID NO: 47912 - protein, 309 aa, Thermochaetoides thermophila
MRSTPVLRTALAAALPFTVLAANGKSTRYWDCCKPSCLSPGNSQVSQNVFACDTNFNRIYDFGAKSGCEGGPAYSCEDQTPWAVNDQFSYGFAATNIAGGNEASWCCACYKLTFTSGPVAGKVMVVQSTSTGGDLGNNHFDLNIPGGGVGIFDGCTPQFGGLPGERYGGISSRSQCDSFPDALKPGCYWRFDWFLNADNPNFTFERVQCPSELVARTGCKRNDDGNYPVFTPPSGDSPSSSSAAPTSTSTSQQPQQPTSSSSQASVPTSNPGGCTSQKWAQCGGIGFTGCQTCVSGTTCTKLNDWYSQC

SEQ ID NO: 47913 - protein, 309 aa, Thermochaetoides thermophila
MRSTPVLRTALAAALPFTVLAANGKSTRYWDCCKPSCLSPGNVQVSQNVFACDRNFNRIYDFGAKSGCEGGPAYSCEDQTPWAVNDQFSYGFAATNIAGGNEASWCCACYKLTFTDGPVAGKVMVVQSTSTGGDLGNNHFDLNIPGGGVGIFDGCTPQFGGLPGERYGGISSRSQCDSFPDALKPGCYWRFDWFSNADNPNFTFERVQCPSELVARTGCKRNDDGNYPVFTPPSGDSPSSSSAAPTSTSTSQQPQQPSSSSSQASVPTSNPGGCTSEKWAQSGGIGFTGCATCVSGTTCTKLNDWYSQC

SEQ ID NO: 47914 - protein, 309 aa, Thermochaetoides thermophila
MRSTPVLRTALAAALPFTVLAANGKSTRYWDCCKPSCLSPGNVQVSQNVFACDRNFNRIYDFGAKSGCEGGPAYSCEDQTPWAVNDQFSYGFAATNIAGGNEASWCCACYKLTFTSGPVAGKVMVVQSTSTGGDLGNNHFDLNIPGGGVGIFDGCTPQFGGLPGERYGGISSRSQCDSFTDALKPGCYWRFDWFLNADNPNFTFERVQCPSELVARTGCKRNDDGNYPVFTPPSGDSPSSSSAAPTSTSTSQQPQQPTSSSSQASVPTSNPGGCTSQKWAQCGGIGFTGCTTCVSGTTCTKLNDWYSQC

SEQ ID NO: 47915 - protein, 309 aa, Thermochaetoides thermophila
MRSTPVLRTALAAALPFTVLAADGKSTRYWDCCKPSCLSPGNVQVSQNVFACDTNFNRIYDFGAKSGCEGGPAYSCADQTPWAVNDQFSYGFAATNIAGGNEASWCCACYKLTFTDGPVAGKVMVVQSTSTGGDLGNNHFDLNIPGGGVGIFDGCTPQFGPLPGERYGGISSRSQCDSFPDALKPGCYWRFDWFLNADNPNFTFERVQCPSELVARTGCKRNDDGNYPVFTPPSGDSPSSSSAAPTSTSTSQQPQQPSSSSSQASVPTSNPGGCTSQKWAECGGIGFTGCATCVSGTTCTKLNDWYSQC

SEQ ID NO: 47916 - protein, 309 aa, Thermochaetoides thermophila
MRSTPVLRTALAAALPFTVLAADGKSTRYWDCCKPSCLSPGNTEVSQNVFACDRNFNRIYDFGAKSGCEGGPAYSCADQTPWAVNDQFSYGFAATNIAGGNEASWCCACYKLTFTSGPVAGKVMVVQSTSTGGDLGNNHFDLNIPGGGVGIFDGCTPQFGGLPTERYGGISSRSQCDSFTDALKPGCYWRFDWTLNADNPNFTFERVQCPSELVARTGCKRNDDGNYPVFTPPSGDSPSSSSAAPTSTSTSQQPQQPSDSSSQASVPTSNPGGCTSQKWAGCGGIGFTGCTTCVSGTTCTKLNDWYSQC

SEQ ID NO: 47917 - protein, 309 aa, Thermochaetoides thermophila
MRSTPVLRTALAAALPFTVLAADGKSTRYWDCCKPSCLSPGNVQVSQNVFACDTNFNRIYDFGAKSGCEGGPAYSCADQTPWAVNDQFSYGFAATNIAGGNQASWCCACYKLTFTDGPVAGKVMVVQSTSTGGDLGNNHFDLNIPGGGVGIFDGCTPQFGGLPGERYGGISSRSQCDSFPDALKPGCYWRFDWFLNADNPNFTFERVQCPSELVARTGCKRNDDGNYPVFTPPSGDSPSSSSAAPTSTSTSQQPQQPSSSSSQASVPTSNPGGCTSQKWAGCGGIGFTGCATCVSGTTCTKLNDWYSQC

SEQ ID NO: 47918 - protein, 309 aa, Thermochaetoides thermophila
MRSTPVLRTALAAALPFTVLAADGNSTRYWDCCKPSCLSPGNVQVSQNVFACDRNFNRIYDFGAKSGCEGGPAYSCEDQTPWAVNDQFSYGFAATNIAGGNQASWCCACYKLTFTSGPVAGKVMVVQSTSTGGDLGNNHFDLNIPGGGVGIFDGCTPQFGGLPGERYGGISSRSQCDSFTDALKPGCYWRFDWFLNADNPNFTFERVQCPSELVARTGCKRNDDGNYPVFTPPSGDSPSSSSAAPTSTSTSQQPQQPTSSSSQASVPTSNPGGCTSQKWAQCGGIGFTGCTTCVSGTTCTKLNDWYSQC

SEQ ID NO: 47919 - protein, 309 aa, Thermochaetoides thermophila
MRSTPVLRTALAAALPGTVLAANGKSTRYWDCCKPSCLSPGNVQVSQNVFACDRNFNRIYDFGAKSGCEGGPAYSCADQTPWAVNDQFSYGFAATNIAGGNQASWCCACYKLTFTDGPVAGKVMVVQSTSTGGDLGNNHFDLNIPGGGVGIFDGCTPQFGPLPGERYGGISSRSQCDSFPDALKPGCYWRFDWFLNADNPNFTFERVQCPSELVARTGCKRNDDGNYPVFTPPSGDSPSSSSAAPTSTSTSQQPQQPSSSSSQASVPTSNPGGCTSQKWAQCGGIGFTGCTTCVSGTTCTKLNDWYSQC

SEQ ID NO: 47920 - protein, 309 aa, Thermochaetoides thermophila
MRSTPVLRTALAAALPGTVLAANGKSTRYWDCCKPSCLSPGNLEVSQNVFACDRNFNRIYDFGAKSGCEGGPAYSCADQTPWAVNDQFSYGFAATNIAGGNEASWCCACYKLTFTSGPVAGKVMVVQSTSTGGDLGNNHFDLNIPGGGVGIFDGCTPQFGKLPGERYGGISSRSQCDSFPDALKPGCYWRFDWTLNADNPNFTFERVQCPSELVARTGCKRNDDGNYPVFTPPSGDSPSSSSAAPTSTSTSQQPQQPTSSSSQASVPTSNPGGCTSQKWAQCGGIGFTGCTTCVSGTTCTKLNDWYSQC

SEQ ID NO: 47921 - protein, 309 aa, Thermochaetoides thermophila
MRSTPVLRTALAAALPFTVLAANGKSTRYWDCCKPSCLSPGNVQVSQNVFACDRNFNRIYDFGAKSGCEGGPAYSCADQTPWAVNDQFSYGFAATNIAGGNRASWCCACYKLTFTSGPVAGKVMVVQSTSTGGDLGNNHFDLNIPGGGVGIFDGCTPQFGGLPGERYGGISSRSQCDSFTDALKPGCYWRFDWFLNADNPNFTFERVQCPSELVARTGCKRNDDGNYPVFTPPSGDSPSSSSAAPTSTSTSQQPQQPTSSSSQASVPTSNPGGCTSQKWAQCGGIGFTGCTTCVSGTTCTKLNDWYSQC

SEQ ID NO: 47922 - protein, 309 aa, Thermochaetoides thermophila
MRSTPVLRTALAAALPFTVLAANGKSTRYWDCCKPSCLSPGNVQVSQNVFACDTNFNRIYDFGAKSGCEGGPAYSCADQTPWAVNDQFSYGFAATNIAGGNEASWCCACYKLTFTSGPVAGKVMVVQSTSTGGDLGNNHFDLNIPGGGVGIFDGCTPQFGGLPGERYGGISSRSQCDSFPDALKPGCYWRFDWFLNADNPNFTFERVQCPSELVARTGCKRNDDGNYPVFTPPSGDSPSSSSAAPTSTSTSQQPQQPRDSSSQASVPTSNPGGCTSQKWAQCGGIGFTGCSTTVSGTTCTKLNDWYSQC

SEQ ID NO: 47923 - protein, 309 aa, Thermochaetoides thermophila
MRSTPVLRTALAAALPGTVLAADGKSTRYWDCCKPSCLSPGNVQVSQNVFACDRNFNRIYDFGAKSGCEGGPAYSCADQTPWAVNDQFSYGFAATNIAGGNQASWCCACYKLTFTSGPVAGKVMVVQSTSTGGDLGNNHFDLNIPGGGVGIFDGCTPQFGPLPGERYGGISSRSQCDSFPDALKPGCYWRFDWFLNADNPNFTFERVQCPSELVARTGCKRNDDGNYPVFTPPSGDSPSSSSAAPTSTSTSQQPQQPTSSSSQASVPTSNPGGCTSDKWAQCGMIGFTGCTTCVSGTTCTKLNDWYSQC

SEQ ID NO: 47924 - protein, 309 aa, Thermochaetoides thermophila
MRSTPVLRTALAAALPFTVLAADGKSTRYWDCCKPSCLSPGNVQVSQNVFACDTNFNRIYDFGAKSGCEGGPAYSCADQTPWAVNDQFSYGFAATNIAGGNEASWCCACYKLTFTDGPVAGKVMVVQSTSTGGDLGNNHFDLNIPGGGVGIFDGCTPQFGGLPGERYGGISSRSQCDSFPDALKPGCYWRFDWFLNADNPNFTFERVQCPSELVARTGCKRNDDGNYPVFTPPSGDSPSSSSAAPTSTSTSQQPQQPTSSSSQASVPTSNPGGCTSQKWAQCGMIGFTGCQTCVSGTTCTKLNDWYSQC

SEQ ID NO: 47925 - protein, 309 aa, Thermochaetoides thermophila
MRSTPVLRTALAAALPFTVLAANGKSTRYWDCCKPSCLSPGNVQVSQNVFACDRNFNRIYDFGAKSGCEGGPAYSCADQTPWAVNDQFSYGFAATNIAGGNEASWCCACYKLTFTSGPVAGKVMVVQSTSTGGDLGNNHFDLNIPGGGVGIFDGCTPQFGPLPGERYGGISSRSQCDSFTDALKPGCYWRFDWFLNADNPNFTFERVQCPSELVARTGCKRNDDGNYPVFTPPSGDSPSSSSAAPTSTSTSQQPQQPTSSSSQASVPTSNPGGCTSQKWAQCGGIGFTGCTTCVSGTTCTKLNDWYSQC

SEQ ID NO: 47926 - protein, 309 aa, Thermochaetoides thermophila
MRSTPVLRTALAAALPFTVLAANGNSTRYWDCCKPSCLSPGNVQVSQNVFACDRNFNRIYDFGAKSGCEGGPAYSCEDQTPWAVNDQFSYGFAATNIAGGNEASWCCACYKLTFTSGPVAGKVMVVQSTSTGGDLGNNHFDLNIPGGGVGIFDGCTPQFGGLPGERYGGISSRSQCDSFTDALKPGCYWRFDWFLNADNPNFTFERVQCPSELVARTGCKRNDDGNYPVFTPPSGDSPSSSSAAPTSTSTSQQPQQPTSSSSQASVPTSNPGGCTSQKWAQCGGIGFTGCTTCVSGTTCTKLNDWYSQC

SEQ ID NO: 47927 - protein, 309 aa, Thermochaetoides thermophila
MRSTPVLRTALAAALPGTVLAADGNSTRYWDCCKPSCLSPGNVQVSQNVFACDRNFNRIYDFGAKTGCEGGPAYSCEDQTPWAVNDQFSYGFAATNIAGGNEASWCCACYKLTFTSGPVAGKVMVVQSTSTGGDLGNNHFDLNIPGGGVGIFDGCTPQFGGLPGERYGGISSRSQCDSFPDALKPGCYWRFDWTLNADNPNFTFERVQCPSELVARTGCKRNDDGNYPVFTPPSGDSPSSSSAAPTSTSTSQQPQQPTSSSSQASVPTSNPGGCTSQKWAQCGGIGFTGCTTCVSGTTCTKLNDWYSQC

SEQ ID NO: 47928 - protein, 309 aa, Thermochaetoides thermophila
MRSTPVLRTALAAALPFTVLAADGNSTRYWDCCKPSCLSPGNVQVSQNVFACDRNFNRIYDFGAKSGCEGGPAYSCADQTPWAVNDQFSYGFAATNIAGGNEASWCCACYKLTFTSGPVAGKVMVVQSTSTGGDLGNNHFDLNIPGGGVGIFDGCTPQFGPLPGERYGGISSRSQCDSFTDALKPGCYWRFDWTLNADNPNFTFERVQCPSELVARTGCKRNDDGNYPVFTPPSGDSPSSSSAAPTSTSTSQQPQQPTSSSSQASVPTSNPGGCTSQKWAQCGGIGFTGCTTCVSGTTCTKLNDWYSQC

SEQ ID NO: 47929 - protein, 309 aa, Thermochaetoides thermophila
MRSTPVLRTALAAALPFTVLAADGKSTRYWDCCKPSCLSPGNVQVSQNVFACDRNFNRIYDFGAKSGCEGGPAYSCADQTPWAVNDQFSYGFAATNIAGGNEASWCCACYKLTFTSGPVAGKVMVVQSTSTGGDLGNNHFDLNIPGGGVGIFDGCTPQFGKLPTERYGGISSRSQCDSFTDALKPGCYWRFDWFLNADNPNFTFERVQCPSELVARTGCKRNDDGNYPVFTPPSGDSPSSSSAAPTSTSTSQQPQQPTSSSSQASVPTSNPGGCTSQKWAQCGGIGFTGCTTCVSGTTCTKLNDWYSQC

SEQ ID NO: 47930 - protein, 309 aa, Thermochaetoides thermophila
MRSTPVLRTALAAALPGTVLAADGKSTRYWDCCKPSCLSPGNVQVSQNVFACDRNFNRIYDFGAKSGCEGGPAYSCADQTPWAVNDQFSYGFAATNIAGGNEASWCCACYKLTFTSGPVAGKVMVVQSTSTGGDLGNNHFDLNIPGGGVGIFDGCTPQFGGLPGERYGGISSRSQCDSFPDALKPGCYWRFDWFLNADNPNFTFERVQCPSELVARTGCKRNDDGNYPVFTPPSGDSPSSSSAAPTSTSTSQQPQQPTSSSSQASVPTSNPGGCTSQKWAQCGGIGFTGCSSNVSGTTCTKLNDWYSQC

SEQ ID NO: 47931 - protein, 309 aa, Thermochaetoides thermophila
MRSTPVLRTALAAALPFTVLAANGKSTRYWDCCKPSCLSPGNVQVSQNVFACDRNFNRIYDFGAKSGCEGGPAYSCADQTPWAVNDQFSYGFAATNIAGGNQASWCCACYKLTFTSGPVAGKVMVVQSTSTGGDLGNNHFDLNIPGGGVGIFDGCTPQFGGLPGERYGGISSRSQCDSFPDALKPGCYWRFDWFLNADNPNFTFERVQCPSELVARTGCKRNDDGNYPVFTPPSGDSPSSSSAAPTSTSTSQQPQQPTSSSSQASVPTSNPGGCTSQKWAQCGMIGFTGCTTCVSGTTCTKLNDWYSQC

SEQ ID NO: 47932 - protein, 309 aa, Thermochaetoides thermophila
MRSTPVLRTALAAALPFTVLAADGKSTRYWDCCKPSCLSPGNSQVSQNVFACDRNFNRIYDFGAKSGCEGGPAYSCADQTPWAVNDQFSYGFAATNIAGGNQASWCCACYKLTFTSGPVAGKVMVVQSTSTGGDLGNNHFDLNIPGGGVGIFDGCTPQFGGLPGERYGGISSRSQCDSFPDALKPGCYWRFDWFLNADNPNFTFERVQCPSELVARTGCKRNDDGNYPVFTPPSGDSPSSSSAAPTSTSTSQQPQQPSSSSSQASVPTSNPGGCTSQKWAESGGIGFTGCATCVSGTTCTKLNDWYSQC

SEQ ID NO: 47933 - protein, 309 aa, Thermochaetoides thermophila
MRSTPVLRTALAAALPFTVLAADGKSTRYWDCCKPSCLSPGNVEVSQNVFACDRNFNRIYDFGAKSGCEGGPAYSCEDQTPWAVNDQFSYGFAATNIAGGNEASWCCACYKLTFTDGPVAGKVMVVQSTSTGGDLGNNHFDLNIPGGGVGIFDGCTPQFGGLPGERYGGISSRSQCDSFPDALKPGCYWRFDWFLNADNPNFTFERVQCPSELVARTGCKRNDDGNYPVFTPPSGDSPSSSSAAPTSTSTSQQPQQPTSSSSQASVPTSNPGGCTSQKWAECGGIGFTGCTTCVSGTTCTKLNDWYSQC

SEQ ID NO: 47934 - protein, 309 aa, Thermochaetoides thermophila
MRSTPVLRTALAAALPFTVLAADGKSTRYWDCCKPSCLSPGNTQVSQNVFACDRNFNRIYDFGAKSGCEGGPAYSCQDQTPWAVNDQFSYGFAATNIAGGNEASWCCACYKLTFTSGPVAGKVMVVQSTSTGGDLGNNHFDLNIPGGGVGIFDGCTPQFGGLPGERYGGISSRSQCDSFTDALKPGCYWRFDWFLNADNPNFTFERVQCPSELVARTGCKRNDDGNYPVFTPPSGDSPSSSSAAPTSTSTSQQPQQPSSSSSQASVPTSNPGGCESQKWAQCGGIGFTGCQTCVSGTTCTKLNDWYSQC

SEQ ID NO: 47935 - protein, 309 aa, Thermochaetoides thermophila
MRSTPVLRTALAAALPFTVLAADGKSTRYWDCCKPSCLSPGNVQVSQNVFACDRNFNRIYDFGAKSGCEGGPAYSCEDQTPWAVNDQFSYGFAATNIAGGNQASWCCACYKLTFTSGPVAGKVMVVQSTSTGGDLGNNHFDLNIPGGGVGIFDGCTPQFGGLPGERYGGISSRSQCDSFPDALKPGCYWRFDWFLNADNPNFTFERVQCPSELVARTGCKRNDDGNYPVFTPPSGDSPSSSSAAPTSTSTSQQPQQPSSSSSQASVPTSNPGGCTSEKWAQCGMIAFTGCATCVSGTTCTKLNDWYSQC

SEQ ID NO: 47936 - protein, 309 aa, Thermochaetoides thermophila
MRSTPVLRTALAAALPFTVLAANGKSTRYWDCCKPSCLSPGNVQVSQNVFACDTNFNRIYDFGAKSGCEGGPAYSCADQTPWAVNDQFSYGFAATNIAGGNQASWCCACYKLTFTSGPVAGKVMVVQSTSTGGDLGNNHFDLNIPGGGVGIFDGCTPQFGGLPGERYGGISSRSQCDSFPDALKPGCYWRFDWFLNADNPNFTFERVQCPSELVARTGCKRNDDGNYPVFTPPSGDSPSSSSAAPTSTSTSQQPQQPSSSSSQASVPTSNPGGCTSQKWAQSGGIGFTGCATCVSGTTCTKLNDWYSQC

SEQ ID NO: 47937 - protein, 309 aa, Thermochaetoides thermophila
MRSTPVLRTALAAALPFTVLAANGNSTRYWDCCKPSCLSPGNVQVSQNVFACDRNFNRIYDFGAKSGCEGGPAYSCADQTPWAVNDQFSYGFAATNIAGGNEASWCCACYKLTFTSGPVAGKVMVVQSTSTGGDLGNNHFDLNIPGGGVGIFDGCTPQFGGLPGERYGGISSRSQCDSFTDALKPGCYWRFDWTLNADNPNFTFERVQCPSELVARTGCKRNDDGNYPVFTPPSGDSPSSSSAAPTSTSTSQQPQQPTSSSSQASVPTSNPGGCTSQKWAQCGGIGFTGCTTCVSGTTCTKLNDWYSQC

SEQ ID NO: 47938 - protein, 309 aa, Thermochaetoides thermophila
MRSTPVLRTALAAALPFTVLAADGKSTRYWDCCKPSCLSPGNVQVSQNVFACDTNFNRIYDFGAKSGCEGGPAYSCEDQTPWAVNDQFSYGFAATNIAGGNEASWCCACYKLTFTSGPVAGKVMVVQSTSTGGDLGNNHFDLNIPGGGVGIFDGCTPQFGGLPGERYGGISSRSQCDSFPDALKPGCYWRFDWFLNADNPNFTFERVQCPSELVARTGCKRNDDGNYPVFTPPSGDSPSSSSAAPTSTSTSQQPQQPTSSSSQASVPTSNPGGCTSQKWAQCGGIAFTGCATCVSGTTCTKLNDWYSQC

SEQ ID NO: 47939 - protein, 309 aa, Thermochaetoides thermophila
MRSTPVLRTALAAALPFTVLAADGKSTRYWDCCKPSCLSPGNVQVSQNVFACDRNFNRIYDFGAKSGCEGGPAYSCADQTPWAVNDQFSYGFAATNIAGGNEASWCCACYKLTFTSGPVAGKVMVVQSTSTGGDLGNNHFDLNIPGGGVGIFDGCTPQFGGLPGERYGGISSRSQCDSFTDALKPGCYWRFDWFLNADNPNFTFERVQCPSELVARTGCKRNDDGNYPVFTPPSGDSPSSSSAAPTSTSTSQQPQQPTDSSSQASVPTSNPGGCTSQKWAQSGGIGFTGCTTCVSGTTCTKLNDWYSQC

SEQ ID NO: 47940 - protein, 309 aa, Thermochaetoides thermophila
MRSTPVLRTALAAALPFTVLAADGKSTRYWDCCKPSCLSPGNVQVSQNVFACDTNFNRIYDFGAKSGCEGGPAYSCADQTPWAVNDQFSYGFAATNIAGGNEASWCCACYKLTFTDGPVAGKVMVVQSTSTGGDLGNNHFDLNIPGGGVGIFDGCTPQFGPLPGERYGGISSRSQCDSFPDALKPGCYWRFDWFLNADNPNFTFERVQCPSELVARTGCKRNDDGNYPVFTPPSGDSPSSSSAAPTSTSTSQQPQQPSSSSSQASVPTSNPGGCTSQKWAQCGMIGFTGCATCVSGTTCTKLNDWYSQC

SEQ ID NO: 47941 - protein, 309 aa, Thermochaetoides thermophila
MRSTPVLRTALAAALPFTVLAADGKSTRYWDCCKPSCLSPGNTEVSQNVFACDRNFNRIYDFGAKSYCEGGPAYSCADQTPWAVNDQFSYGFAATNIAGGNEASWCCACYKLTFTSGPVAGKVMVVQSTSTGGDLGNNHFDLNIPGGGVGIFDGCTPQFGGLPGERYGGISSRSQCDSFPDALKPGCYWRFDWFLNADNPNFTFERVQCPSELVARTGCKRNDDGNYPVFTPPSGDSPSSSSAAPTSTSTSQQPQQPTSSSSQASVPTSNPGGCTSQKWAQCGRIGFTGCTSCVSGTTCTKLNDWYSQC

SEQ ID NO: 47942 - protein, 309 aa, Thermochaetoides thermophila
MRSTPVLRTALAAALPGTVLAANGKSTRYWDCCKPSCLSPGNVQVSQNVFACDTNFNRIYDFGAKSGCEGGPAYSCADQTPWAVNDQFSYGFAATNIAGGNQASWCCACYKLTFTSGPVAGKVMVVQSTSTGGDLGNNHFDLNIPGGGVGIFDGCTPQFGGLPGERYGGISSRSQCDSFPDALKPGCYWRFDWFLNADNPNFTFERVQCPSELVARTGCKRNDDGNYPVFTPPSGDSPSSSSAAPTSTSTSQQPQQPSSSSSQASVPTSNPGGCTSQKWAQCGMIGFTGCQTCVSGTTCTKLNDWYSQC

SEQ ID NO: 47943 - protein, 309 aa, Thermochaetoides thermophila
MRSTPVLRTALAAALPGTVLAADGKSTRYWDCCKPSCLSPGNVQVSQNVFACDRNFNRIYDFGAKTGCEGGPAYSCEDQTPWAVNDQFSYGFAATNIAGGNEASWCCACYKLTFTSGPVAGKVMVVQSTSTGGDLGNNHFDLNIPGGGVGIFDGCTPQFGGLPGERYGGISSRSQCDSFPDALKPGCYWRFDWFLNADNPNFTFERVQCPSELVARTGCKRNDDGNYPVFTPPSGDSPSSSSAAPTSTSTSQQPQQPTSSSSQASVPTSNPGGCTSQKWAQCGMIGFTGCTTCVSGTTCTKLNDWYSQC

SEQ ID NO: 47944 - protein, 309 aa, Thermochaetoides thermophila
MRSTPVLRTALAAALPFTVLAADGKSTRYWDCCKPSCLSPGNVQVSQNVFACDRNFNRIYDFGAKSYCEGGPAYSCADQTPWAVNDQFSYGFAATNIAGGNEASWCCACYKLTFTDGPVAGSVMVVQSTSTGGDLGNNHFDLNIPGGGVGIFDGCTPQFGGLPGERYGGISSRSQCDSFPDALKPGCYWRFDWFLNADNPNFTFERVQCPSELVARTGCKRNDDGNYPVFTPPSGDSPSSSSAAPTSTSTSQQPQQPTSSSSQASVPTSNPGGCTSQKWAQCGGIGFTGCTTCVSGTTCTKLNDWYSQC

SEQ ID NO: 47945 - protein, 309 aa, Thermochaetoides thermophila
MRSTPVLRTALAAALPGTVLAANGKSTRYWDCCKPSCLSPGNSQVSQNVFACDTNFNRIYDFGAKSGCEGGPAYSCADQTPWAVNDQFSYGFAATNIAGGNQASWCCACYKLTFTEGPVAGKVMVVQSTSTGGDLGNNHFDLNIPGGGVGIFDGCTPQFGGLPGERYGGISSRSQCDSFPDALKPGCYWRFDWFLNADNPNFTFERVQCPSELVARTGCKRNDDGNYPVFTPPSGDSPSSSSAAPTSTSTSQQPQQPTSSSSQASVPTSNPGGCTSQKWAQCGGIGFTGCTTCVSGTTCTKLNDWYSQC

SEQ ID NO: 47946 - protein, 309 aa, Thermochaetoides thermophila
MRSTPVLRTALAAALPGTVLAANGKSTRYWDCCKPSCLSPGNSEVSQNVFACDRNFNRIYDFGAKSGCEGGPAYSCEDQTPWAVNDQFSYGFAATNIAGGNQASWCCACYKLTFTSGPVAGKVMVVQSTSTGGDLGNNHFDLNIPGGGVGIFDGCTPQFGGLPGERYGGISSRSQCDSFPDALKPGCYWRFDWFLNADNPNFTFERVQCPSELVARTGCKRNDDGNYPVFTPPSGDSPSSSSAAPTSTSTSQQPQQPTSSSSQASVPTSNPGGCTSQKWAQCGGIGFTGCTTCVSGTTCTKLNDWYSQC

SEQ ID NO: 47947 - protein, 309 aa, Thermochaetoides thermophila
MRSTPVLRTALAAALPFTVLAADGKSTRYWDCCKPSCLSPGNVQVSQNVFACDTNFNRIYDFGAKSGCEGGPAYSCADQTPWAVNDQFSYGFAATNIAGGNEASWCCACYKLTFTSGPVAGKVMVVQSTSTGGDLGNNHFDLNIPGGGVGIFDGCTPQFGGLPGERYGGISSRSQCDSFPDALKPGCYWRFDWFLNADNPNFTFERVQCPSELVARTGCKRNDDGNYPVFTPPSGDSPSSSSAAPTSTSTSQQPQQPTSSSSQASVPTSNPGGCTSDKWAGSGGIGFTGCATCVSGTTCTKLNDWYSQC

SEQ ID NO: 47948 - protein, 309 aa, Thermochaetoides thermophila
MRSTPVLRTALAAALPFTVLAADGKSTRYWDCCKPSCLSPGNSQVSQNVFACDRNFNRIYDFGAKSGCEGGPAYSCADQTPWAVNDQFSYGFAATNIAGGNRASWCCACYKLTFTSGPVAGKVMVVQSTSTGGDLGNNHFDLNIPGGGVGIFDGCTPQFGGLPGERYGGISSRSQCDSFPDALKPGCYWRFDWFLNADNPNFTFERVQCPSELVARTGCKRNDDGNYPVFTPPSGDSPSSSSAAPTSTSTSQQPQQPRDSSSQASVPTSNPGGCTSQKWAESGGIGFTGCTTCVSGTTCTKLNDWYSQC

SEQ ID NO: 47949 - protein, 309 aa, Thermochaetoides thermophila
MRSTPVLRTALAAALPGTVLAANGKSTRYWDCCKPSCLSPGNEEVSQNVFACDRNFNRIYDFGAKSGCEGGPAYSCADQTPWAVNDQFSYGFAATNIAGGNEASWCCACYKLTFTDGPVAGKVMVVQSTSTGGDLGNNHFDLNIPGGGVGIFDGCTPQFGGLPGERYGGISSRSQCDSFPDALKPGCYWRFDWFLNADNPNFTFERVQCPSELVARTGCKRNDDGNYPVFTPPSGDSPSSSSAAPTSTSTSQQPQQPSSSSSQASVPTSNPGGCTSQKWAQCGMIAFTGCTTCVSGTTCTKLNDWYSQC

SEQ ID NO: 47950 - protein, 309 aa, Thermochaetoides thermophila
MRSTPVLRTALAAALPFTVLAADGNSTRYWDCCKPSCLSPGNSQVSQNVFACDRNFNRIYDFGAKTGCEGGPAYSCADQTPWAVNDQFSYGFAATNIAGGNEASWCCACYKLTFTEGPVAGKVMVVQSTSTGGDLGNNHFSLNIPGGGVGIFDGCTPQFGGLPGERYGGISSRSQCDSFTDALKPGCYWRFDWFLNADNPNFTFERVQCPSELVARTGCKRNDDGNYPVFTPPSGDSPSSSSAAPTSTSTSQQPQQPSSSSSQASVPTSNPGGCTSQKWAQCGGIGFTGCTTCVSGTTCTKLNDWYSQC

SEQ ID NO: 47951 - protein, 309 aa, Thermochaetoides thermophila
MRSTPVLRTALAAALPGTVLAANGKSTRYWDCCKPSCLSPGNVQVSQNVFACDRNFNRIYDFGAKSGCEGGPAYSCADQTPWAVNDQFSYGFAATNIAGGNEASWCCACYKLTFTSGPVAGSVMVVQSTSTGGDLGNNHFDLNIPGGGVGIFDGCTPQFGGLPGERYGGISSRSQCDSFPDALKPGCYWRFDWFLNADNPNFTFERVQCPSELVARTGCKRNDDGNYPVFTPPSGDSPSSSSAAPTSTSTSQQPQQPTSSSSQASVPTSNPGGCTSQKWAECGGIGFTGCTTCVSGTTCTKLNDWYSQC

SEQ ID NO: 47952 - protein, 309 aa, Thermochaetoides thermophila
MRSTPVLRTALAAALPGTVLAANGKSTRYWDCCKPSCLSPGNVQVSQNVFACDTNFNRIYDFGAKSGCEGGPAYSCADQTPWAVNDQFSYGFAATNIAGGNEASWCCACYKLTFTDGPVAGKVMVVQSTSTGGDLGNNHFSLNIPGGGVGIFDGCTPQFGGLPGERYGGISSRSQCDSFTDALKPGCYWRFDWFLNADNPNFTFERVQCPSELVARTGCKRNDDGNYPVFTPPSGDSPSSSSAAPTSTSTSQQPQQPTSSSSQASVPTSNPGGCTSEKWAQCGGIGFTGCTTCVSGTTCTKLNDWYSQC

SEQ ID NO: 47953 - protein, 309 aa, Thermochaetoides thermophila
MRSTPVLRTALAAALPFTVLAADGKSTRYWDCCKPSCLSPGNVQVSQNVFACDRNFNRIYDFGAKSYCEGGPAYSCADQTPWAVNDQFSYGFAATNIAGGNEASWCCACYKLTFTSGPVAGAVMVVQSTSTGGDLGNNHFSLNIPGGGVGIFDGCTPQFGGLPGERYGGISSRSQCDSFPDALKPGCYWRFDWFLNADNPNFTFERVQCPSELVARTGCKRNDDGNYPVFTPPSGDSPSSSSAAPTSTSTSQQPQQPTSSSSQASVPTSNPGGCTSQKWAQCGGIGFTGCTTCVSGTTCTKLNDWYSQC

SEQ ID NO: 47954 - protein, 269 aa, Thermothielavioides terrestris
SGSGQSTRYWDCCKPSCAWPGKAAVSQPVYSCDANFQRLSDFNVQSGCNGGSAYACADQTPWAVNDNLAYGFAATSIAGGSESSWCCACYALTFTSGPVAGKTMVVQSTSTGGDLGSNHFDIAMPGGGVGIFDGCSSQFGGLPGDRYGGISSRDQCDSFPAPLKPGCYWRFDWFQNADNPTVTFQQVQCPAEIVARSGCKRNDDSSFPVFTPSPTPSPTPSPTPSPTPSPTGCTSQKWAQCGGIGFSGCTTCVSGTTCQKLNDYYSQCL

SEQ ID NO: 47955 - protein, 257 aa, Staphylotrichum coccosporum
GKSTRYWDCCKPSCSWPGKASVNQPVFACSANFQRISDPNVKSGCDGGSAYACADQTPWAVNDNFSYGFAATSISGGNEASWCCGCYEITFTSGPVAGKTMVVQSTSTGGDLGTNHFDLAMPGGGVGIFDGCSPQFGGLAGDRYGGVSSRSQCDSFPAALKPGCYWRFDWFKNADNPTFTFRQVQCPSELVARTGCRRNDDGNFPVFTPPSGGQSSSSSSSSSAKPTSTSTSTTSTKATSTTSTASSQTSSSTGGGC

SEQ ID NO: 47956 - protein, 257 aa, Staphylotrichum coccosporum
GKSTRYWDCCKPSCSWPGKASVNQPVFACSANFQRISDPNVKSGCDGGSAYACADQTPWAVNDNFSYGFAATSISGGNEASWCCGCYELTFTSGPVAGKTMVVQSTSTGGDLGTNHFDLAMPGGGVGIFDGCSPQFGGLAGDRYGGVSSRSQCESFPAALKPGCYWRFDWFKNADNPTFTFRQVQCPSELVARTGCRRNDDGNFPVFTPPSGGQSSSSSSSSSAKPTSTSTSTTSTKATSTTSTASSQTSSSTGGGC

SEQ ID NO: 47957 - protein, 257 aa, Staphylotrichum coccosporum
GKSTRYWDCCKPSCSWPGKASVNQPVFACSANFQRISDPNVKSGCDGGSAYACADQTPWAVNDNFSYGFAATSISGGNEASWCCGCYELTFTSGPVAHKTMVVQSTSTGGDLGTNHFDLAMPGGGVGIFDGCSPQFGGLAGDRYGGVSSRSQCDSFPAALKPGCYWRFDWFKNADNPTFTFRQVQCPSELVARTGCRRNDDGNFPVFTPPSGGQSSSSSSSSSAKPTSTSTSTTSTKATSTTSTASSQTSSSTGGGC

SEQ ID NO: 47958 - protein, 257 aa, Staphylotrichum coccosporum
GKSTRYWDCCKPSCSWPGKASVNQPVFACSANFQRISDPNVKSGCDGGSAYACADQTPWAVNDNFSYGFAATSISGGNEASWCCGCYELTFTSGPVAGKTMVVQSTSTGGDLGTNHFDLAMPGGGVGIFDGCSPQFGGIAGDRYGGVSSRSQCDSFPAALKPGCYWRFDWFKNADNPTFTFRQVQCPSELVARTGCRRNDDGNFPVFTPPSGGQSSSSSSSSSAKPTSTSTSTTSTKATSTTSTASSQTSSSTGGGC

SEQ ID NO: 47959 - protein, 257 aa, Staphylotrichum coccosporum
GKSTRYWDCCKPSCSWPGKASVNQPVFACSANFQRISDPNVKSGCDGGSAYACADQTPWAVNDNFSYGFAATSISGGNEASWCCGCYELTFTSGPVAGKTMVVQSTSTGGDLGTNHFDLAMPGGGVGIFDGCSPQFGGLAGDRYGGVSSRSQCDSFPAALKPGCYWRFNWFKNADNPTFTFRQVQCPSELVARTGCRRNDDGNFPVFTPPSGGQSSSSSSSSSAKPTSTSTSTTSTKATSTTSTASSQTSSSTGGGC

SEQ ID NO: 47960 - protein, 257 aa, Staphylotrichum coccosporum
GKSTRYWDCCKPSCSWPGKASVNQPVFACSANFQRISDPNVKSGCDGGSAYACADQTPWAVNDNFSYGFAATSISGGNEASWCCGCYELTFTSGPVYGKTMVVQSTSTGGDLGTNHFDLAMPGGGVGIFDGCSPQFGGLAGDRYGGVSSRSQCDSFPAALKPGCYWRFDWFKNADNPTFTFRQVQCPSELVARTGCRRNDDGNFPVFTPPSGGQSSSSSSSSSAKPTSTSTSTTSTKATSTTSTASSQTSSSTGGGC

SEQ ID NO: 47961 - protein, 257 aa, Staphylotrichum coccosporum
GKSTRYWDCCKPSCSWPNKASVNQPVFACSANFQRISDPNVKSGCDGGSAYACADQTPWAVNDNFSYGFAATSISGGNEASWCCGCYELTFTSGPVAGKTMVVQSTSTGGDLGTNHFDLAMPGGGVGIFDGCSPQFGGLAGDRYGGVSSRSQCDSFPAALKPGCYWRFDWFKNADNPTFTFRQVQCPSELVARTGCRRNDDGNFPVFTPPSGGQSSSSSSSSSAKPTSTSTSTTSTKATSTTSTASSQTSSSTGGGC

SEQ ID NO: 47962 - protein, 257 aa, Staphylotrichum coccosporum
GKSTRYWDCCKPSCSWPGKASVNQPVFACSANFQRISDPNVKSGCDGGSAYACADQTPWAVNDNFSYGFAATSISGGNEASWCCGCYELTFTSGPVAGKTMVVQSTSTGGDLGTNHFDLAMPGGGVGIFDGCSPQFGGLAGDRYGGVSSRSQCDSFPAALKPGCYWRFDWFKNADNPTFTFRQVQCPSELVARTGCRRNDDGNFPVFTPSSGGQSSSSSSSSSAKPTSTSTSTTSTKATSTTSTASSQTSSSTGGGC

SEQ ID NO: 47963 - protein, 257 aa, Staphylotrichum coccosporum
GKSTRYWDCCKPSCSWPGKASVNQPVWACSANFTRISDPNVVSGCDGGSAYACADQTPWAVNDNFSYGFAATSISGGNEASWCCGCYELTFTSGPVAGKTMVVQSTSTGGDLGVNHFDLAMPGGGVGIFDGCTPQFGGLAGDRYGGVSSRSECDSFPAPLKPGCYWRFDWFKNADNPTFTFRQVQCPSELVARTGCRRNDDGNFPVFTPPSGGQGSSSLSSSKAKPTSTSTSTTSDKATSTTSTASSQTSSSTGGGC

SEQ ID NO: 47964 - protein, 257 aa, Staphylotrichum coccosporum
GKSTRYWDCCKPSCSWPGKASVNQPVFACSANFQRISDPNVKSGCDGGSAYACADQTPWAVNDNFSYGFAATSISGGNEASWCCGCYELTFTSGPVAGKTMVVQSTSTGGDVGTNHFDLAMPGGGVGIFDGCSPQFGGLAGDRYGGVSSRSQCDSFPAALKPGCYWRFDWFKNADNPTFTFRQVQCPSELVARTGCRRNDDGNFPVFTPPSGGQSSSSSSSSSAKPTSTSTSTTSTKATSTTSTASSQTSSSTGGGC

SEQ ID NO: 47965 - protein, 257 aa, Staphylotrichum coccosporum
GKSTRYWDCCKPSCSWPGKASVNQPVFACSANFQRISDPNVKSGCDGGSAYACADQTPWAVNDNFSYGFAATSISGGNEASWCCGCYELTFTSGPVAGKTMVVQSTSTGGDLGTNHFDLAMPGGGVGIFDGCSPQFGGLAGDRYGGVSSRSQCDSFPAALKPGCYWRFDWFKNADNPTFTFRQVQCPSELLARTGCRRNDDGNFPVFTPPSGGQSSSSSSSSSAKPTSTSTSTTSTKATSTTSTASSQTSSSTGGGC

SEQ ID NO: 47966 - protein, 257 aa, Staphylotrichum coccosporum
GKSTRYWDCCKPSCSWPGKASVNQPVFACSANFQRISDPNVKSGCDGGSAYACADQTPWAVNDNFSYGFAATSISGGNEASWCCGCYELTFTSGSVAGKTMVVQSTSTGGDLGTNHFDLAMPGGGVGIFDGCSPQFGGLAGDRYGGVSSRSQCDSFPAALKPGCYWRFDWFKNADNPTFTFRQVQCPSELVARTGCRRNDDGNFPVFTPPSGGQSSSSSSSSSAKPTSTSTSTTSTKATSTTSTASSQTSSSTGGGC

SEQ ID NO: 47967 - protein, 257 aa, Staphylotrichum coccosporum
GKSTRYWDCCKPSCSWPGKASVNQPVFACSANFQRISDPNVKSGCDGGSAYACADQTPWAVNDNFSYGFAATSISGGNEASWCCGCYELTFTSGPVAGKTMVVQSTSTGGDLGTNHFDLAMPGGGVGIFDGCSPQSGGLAGDRYGGVSSRSQCDSFPAALKPGCYWRFDWFKNADNPTFTFRQVQCPSELVARTGCRRNDDGNFPVFTPPSGGQSSSSSSSSSAKPTSTSTSTTSTKATSTTSTASSQTSSSTGGGC

SEQ ID NO: 47968 - protein, 257 aa, Staphylotrichum coccosporum
GKSTRYWDCCKPSCSWPGKASVNQPVFACSANFQRISDPNVKSGCDGGSAYACADQTPWAVNDNFSYGFAATSISGGNEASWCCGCYELTFTSGPVAGKTMVVQSTSTGGDLGTNHFDLAMPGGGVGIFDGCSPQFGGLAGDRYGGVSSRSQCDDFPAALKPGCYWRFDWFKNADNPTFTFRQVQCPSELVARTGCRRNDDGNFPVFTPPSGGQSSSSSSSSSAKPTSTSTSTTSTKATSTTSTASSQTSSSTGGGC

SEQ ID NO: 47969 - protein, 257 aa, Staphylotrichum coccosporum
GKSTRYWDCCKPSCSWPGKASVNQPVFACSANFQRISDPNVKSGCDGGSAYACADQTPWAVNDNFSYGFAATSISGGNEASWCCGCYELTFTSGPVEGKTMVVQSTSTGGDLGTNHFDLAMPGGGVGIFDGCSPQFGGLAGDRYGGVSSRSQCDSFPAALKPGCYWRFDWFKNADNPTFTFRQVQCPSELVARTGCRRNDDGNFPVFTPPSGGQSSSSSSSSSAKPTSTSTSTTSTKATSTTSTASSQTSSSTGGGC

SEQ ID NO: 47970 - protein, 257 aa, Staphylotrichum coccosporum
GKSTRYWDCCKPSCSWPGKASVNQPVFACSANFQRISDPNVKSGCDGGSAYACADQTPWAVNDNFSYGFAATSISGGNEASWCCGCYELTFTSGPVAGKTMVVQSTSTGTDLGTNHFDLAMPGGGVGIFDGCSPQFGGLAGDRYGGVSSRSQCDSFPAALKPGCYWRFDWFKNADNPTFTFRQVQCPSELVARTGCRRNDDGNFPVFTPPSGGQSSSSSSSSSAKPTSTSTSTTSTKATSTTSTASSQTSSSTGGGC

SEQ ID NO: 47971 - protein, 257 aa, Staphylotrichum coccosporum
GKSTRYWDCCKPSCSWPGKASVNQPVFACSANFQRISDPNVKSGCDGGSAYACADQTPWAVNDNFSYGFAATSISGGNEASWCCGCYELTFTSGPVAGKTMVVQSTSTGGDLGTNHFDLAMPGGGVGIFDGCSPQFGGLAGDRYGGVSSRSQCDSMPAALKPGCYWRFDWFKNADNPTFTFRQVQCPSELVARTGCRRNDDGNFPVFTPPSGGQSSSSSSSSSAKPTSTSTSTTSTKATSTTSTASSQTSSSTGGGC

SEQ ID NO: 47972 - protein, 257 aa, Staphylotrichum coccosporum
GKSTRYWDCCKPSCSWPGKASVNQPVFACSANFQRISDPNVKSGCDGGSAYACADQTPWAVNDNFSYGFAATSISGGNEASWCCGCYELTFTSGPVAGKTMVVQSTSTGGDLGTNHFDLAMPGGGVGIFDGCSPQFGGLAGDRYGGVSSRSQCNSFPAALKPGCYWRFDWFKNADNPTFTFRQVQCPSELVARTGCRRNDDGNFPVFTPPSGGQSSSSSSSSSAKPTSTSTSTTSTKATSTTSTASSQTSSSTGGGC

SEQ ID NO: 47973 - protein, 257 aa, Staphylotrichum coccosporum
GKSTRYWDCCKPSCSWPGKASVNQPVFACSANFQRISDPNVKSGCDGGSAYACADQTPWAVNDNFSYGFAATSISGGNEASWCCGCYELTFTSGPVAGKTMVVQSTSTGGDLGTNHFDLAMPGGGVGIFDGCTPQFGGLPGDRYGGVSSRSQCDSFPAALVPGCYWRFDWFKNADNPTFTFRQVQCPSELVARTGCRRNDDGNFPVFTPPSGGQSSSSSSSSSAKPTSTSTSTTSTKATSTTSTASSQTSSSTGGGC

SEQ ID NO: 47974 - protein, 257 aa, Staphylotrichum coccosporum
GKSTRYWDCCKPSCSWPGKASVNQPVFACSANFQRISDPNVKSGCDGGTAYACADQTPWAVNDNFSYGFAATSISGGNEASWCCGCYELTFTSGPVAGKTMVVQSTSTGGDLGTNHFDLAMPGGGVGIFDGCSPQFGGLAGDRYGGVSSRSQCDSFPAALKPGCYWRFDWFKNADNPTFTFRQVQCPSELVARTGCRRNDDGNFPVFTPPSGGQSSSSSSSSSAKPTSTSTSTTSTKATSTTSTASSQTSSSTGGGC

SEQ ID NO: 47975 - protein, 257 aa, Staphylotrichum coccosporum
GKSTRYWDCCKPSCSWPGKASVNQPVFACSANFQRISDPNVKSGCDGGSAYACADQTPWAVNDNFSYGFAATSISGGNEASWCCGCYELTFTSGPVAGKTMVVQSTSTGSDLGTNHFDLAMPGGGVGIFDGCSKQFGGLEGDRYGGVSSRSQCDSFPAALKPGCYWRFDWFKNADNPTFTFRQVQCPSELVARTGCRRNDDGNFPVFTPPSGGQSSSSSSSSSAKPTSTSTSTTSTKATSTTSTASSQTSSSTGGGC

SEQ ID NO: 47976 - protein, 257 aa, Staphylotrichum coccosporum
GKSTRYWDCCKPSCSWPGKASVNQPVFACSANFQRISDPNVKSGCDGGSAYACADQTPWAVNDNFSYGFAATSISGGNEASWCCGCYELTFTSGPGAGKTMVVQSTSTGGDLGTNHFDLAMPGGGVGIFDGCSPQFGGLAGDRYGGVSSRSQCDSFPAALKPGCYWRFDWFKNADNPTFTFRQVQCPSELVARTGCRRNDDGNFPVFTPPSGGQSSSSSSSSSAKPTSTSTSTTSTKATSTTSTASSQTSSSTGGGC

SEQ ID NO: 47977 - protein, 257 aa, Staphylotrichum coccosporum
GVSTRYWDCCKPSCSWPGKASVNQPVFACSANFQRISDPNVKSGCDGGSAYACADQTPWAVNDNFSYGFAATSIMGGNEASWCCGCYELTFTSGPVAGKTMVVQSTSTGGDLGTNHFDLAMPGGGVGIFDGCSPQFGGLAGDRYGGVSSRSECDSFPAPLKPGCYWRFDWFKNADNPTFTFRQVQCPSEVVARTGCRRNDDGNFPHFTPPSGGQGSSSSSSSSAKPTSTSASTTDTKATSTTSTASSQTSSSTGGGC

SEQ ID NO: 47978 - protein, 257 aa, Staphylotrichum coccosporum
GKSTRYWDCCKPSCSWPGKASVNQPVFACYANFQRISDPNVKSGCDGGSAYACADQTPWAVNDNFSYGFAATSISGGNEASWCCGCYELTFTSGPVAGKTMVVQSTSTGGDLGTNHFDLAMPGGGVGIFDGCSPQFGGLPGDRYGGVSSRSECDSFPAALVPGCYWRFDWFKNADNPTFTFRQVQCPSELVARTGCRRNDDGNFPVFTPPSGGQGSSSSSSSSARPTSTSASTTSTKATSTTSTASSQTSSSTGGGC

SEQ ID NO: 47979 - protein, 257 aa, Staphylotrichum coccosporum
GKSTRYWDCCKPSCSWPGKASVNQPVFACSANFTRISDPNVKSGCDGGSAYACADQTPWAVNDNFSYGFAATSISGGNEASWCCGCYELTFTSGPYAGKTMVVQSTSTGGDLGTNHFDLAMPGGGVGIFDGCSPQFGGLPGDRYGGVSSRSQCDSFPAELKPGCYWRFDWFKNADNPTFTFRQVQCPSELVARTGCRRNDDGNFPVFTPPSGGQSSSSSSSSKAKPTSTSTSTTSTKATSTTSTASSQTSSSTGGGC

SEQ ID NO: 47980 - protein, 257 aa, Staphylotrichum coccosporum
GKSTRYWDCCKPSCSWPGKASVNQPVFACSANFQRISDPNVKSGCDGGSAYACADQTPWAVNDNFSYGFAATSISGGNEASWCCGCYELTFTSGPVAGKTMVVQSTSTGGDLGTNHFDLAMPGGGVGIFDGCSPQFGGLAGDRYGGVSSRSQCDSFPAALKPGCYWRFDWFKNADNPTFTFRQVQCPSELVARTGCRRNDDGNFPVFVPPSGGQSSSSSSSSSAKPTSTSTSTTSTKATSTTSTASSQTSSSTGGGC

SEQ ID NO: 47981 - protein, 257 aa, Staphylotrichum coccosporum
GKSTRYWDCCKPSCSWPGKASVNQPVFACSANFQRISDPNVKSGCDGGSAYACADQTPWAVNDNFSYGFAATSISGGNEASWCCGCYELTFTSGPVAGKTMVVQSTSTGGDLGTNHFDLAMPGGGVGIFDGCSPQFGGLAGDRYGGVSSRSQCDSFPGALKPGCYWRFDWFKNADNPTFTFRQVQCPSELVARTGCRRNDDGNFPVFTPPSGGQSSSSSSSSSAKPTSTSTSTTSTKATSTTSTASSQTSSSTGGGC

SEQ ID NO: 47982 - protein, 257 aa, Staphylotrichum coccosporum
GKSTRYWDCCKPSCSWPGKASVNQPVFACSANFQRISDPNVKSGCDGGSAYACADQTPWAVNDNFSYGFAATSISGGNEASWCCGCYELTFTSGPVAGKTMVVQSTSTGGDLGTNHFDLAMPGGGVGIFDGCTPQFGGLAGDRYGGVSSRSQCDSFPAALKPGCYWRFDWFKNADNPTFTFRQVQCPSELVARTGCRRNDDGNFPVFTPPSGGQSSSSSSSSSAKPTSTSTSTTSTKATSTTSTASSQTSSSTGGGC

SEQ ID NO: 47983 - protein, 257 aa, Staphylotrichum coccosporum
GKSTRYWDCCKPSCSWPGKASVNQPVFACSANFQRISDPNVKSGCDGGSAYACADQTPWAVNDNFSYGFAATSISGGNEASWCCGCYELTFTSGPVAGKTMVVQSTSTGVDLGTNHFDLAMPGGGVGIFDGCSPQFGGLAGDRYGGVSSRSQCDSFPAALKPGCYWRFDWFKNADNPTFTFRQVQCPSELVARTGCRRNDDGNFPVFTPPSGGQSSSSSSSSSAKPTSTSTSTTSTKATSTTSTASSQTSSSTGGGC

SEQ ID NO: 47984 - protein, 257 aa, Staphylotrichum coccosporum
GKSTRYWDCCKPSCSWPGKASVNQPVFACSANFQRISDPNVKSGCDGGSAYACADQTPWAVNDNFSYGFAATSISGGNEASWCCGCYELTFTSGPVAGKTMVVQSTSTGGDLGTNHFDLAMPGGGVGIFDGCSPQFGGLAGDRYGGVSSRSQCDSFPAALKPGCYWRFDWFKNADNPTFTFRQVQCPSELYARTGCRRNDDGNFPVFTPPSGGQSSSSSSSSSAKPTSTSTSTTSTKATSTTSTASSQTSSSTGGGC

SEQ ID NO: 47985 - protein, 257 aa, Staphylotrichum coccosporum
GKSTRYWDCCKPSCSWPGKASVNQPVFACSANFTRISDPNVKSGCDGGSAYACADQTPWAVNDNFSYGFAATSISGGNEASWCCGCYELTFTSGPVAGKTMVVQSTSTGGDLGTNHFDLAMPGGGVGIFDGCSPQFGGLAGDRYGGVSSRSQCDSFPAALKPGCYWRFDWFKNADNPTFTFRQVQCPSELVARTGCRRNDDGNFPVFTPPSGGQSSSSSSSSSAKPTSTSTSTTSTKATSTTSTASSQTSSSTGGGC

SEQ ID NO: 47986 - protein, 257 aa, Staphylotrichum coccosporum
GKSTRYWDCCKPSCSWPGKASVNQPVFACSANFQRISDPNVKSGCDGGSAYACADQTPWAVNDNFSYGFAATSISGGNEASWCCGCYELTFTSGPVAGKTMVVQSTSTGSDLGTNHFDLAMPGGGVGIFDGCSPQFGGLAGDRYGGVSSRSQCDSFPAALKPGCYWRFDWFKNADNPTFTFRQVQCPSELVARTGCRRNDDGNFPVFTPPSGGQSSSSSSSSSAKPTSTSTSTTSTKATSTTSTASSQTSSSTGGGC

SEQ ID NO: 47987 - protein, 257 aa, Staphylotrichum coccosporum
GKSTRYWDCCKPSCSWPGKASVNQPVFACSANFQRISDPNVKSGCDGGSAYACADQTPWAVNDNFSYGFAATSISGGNQASWCCGCYELTFTSGPVAGKTMVVQSTSTGGDLGTNHFDLAMPGGGVGIFDGCSPQFGGLAGDRYGGVSSRSQCDSFPAALKPGCYWRFDWFKNADNPTFTFRQVQCPSELVARTGCRRNDDGNFPVFTPPSGGQSSSSSSSSSAKPTSTSTSTTSTKATSTTSTASSQTSSSTGGGC

SEQ ID NO: 47988 - protein, 257 aa, Staphylotrichum coccosporum
GKSTRYWDCCKPSCSWPGKASVNQPVFACSANFQRISDPNVKSGCDGGSAYACADQTPWAVNDNFSYGFAATSISGGNEASWCCGCYELTFTSGPVAGKTMVVQSTSTGGDLGTNHFDLAMPGGGVGIFDGCSPQFGGLAGDRYGGVSSRSQCDSFPAALKPGCYWRFDWFKNADNPTFTFRQVQCPSELVARTGCRRNDDGNFPHFTPPSGGQSSSSSSSSSAKPTSTSTSTTSTKATSTTSTASSQTSSSTGGGC

SEQ ID NO: 47989 - protein, 257 aa, Staphylotrichum coccosporum
GKSTRYWDCCKPSCSWPGKASVNQPVFACSANFQRISDPNVKSGCDGGSAYACADQTPWAVNDNFSYGFAATSISGGNEASWCCGCYELTFTSGPVAGKTMVVQSTSTGGDLGTNHFDLAMPGGGVGIFDGCSPQFGGLAGDRYGGVSSRSQCDSFPAALVPGCYWRFDWFKNADNPTFTFRQVQCPSELVARTGCRRNDDGNFPVFTPPSGGQSSSSSSSSSAKPTSTSTSTTSTKATSTTSTASSQTSSSTGGGC

SEQ ID NO: 47990 - protein, 257 aa, Staphylotrichum coccosporum
GKSTRYWDCCKPSCSWPGKASVNQPVFACSANFQRISDPNVKSGCDGGSAYACADQTPWAVNDNFSYGFAATSISGGNEASWCCGCYELTFTSGPVAGKKMVVQSTSTGGDLGTNHFDLAMPGGGVGIFDGCSPQFGGLAGDRYGGVSSRSQCDSFPAALKPGCYWRFDWFKNADNPTFTFRQVQCPSELVARTGCRRNDDGNFPVFTPPSGGQSSSSSSSSSAKPTSTSTSTTSTKATSTTSTASSQTSSSTGGGC

SEQ ID NO: 47991 - protein, 257 aa, Staphylotrichum coccosporum
GKSTRYWDCCKPSCSWPGKASVNQPVFACSANFQRISDPNVKSGCDGGSAYACADQTPWAVNDNFSYGFAATSISGGNEASWCCGCYELTFTSGPVAGKTMVVQSTSTGGDLGTNHFDLAMPGGGVGIFDGCSPQFGGLAGDRYGGVSSRSQCDSFPAAVKPGCYWRFDWFKNADNPTFTFRQVQCPSELVARTGCRRNDDGNFPVFTPPSGGQSSSSSSSSSAKPTSTSTSTTSTKATSTTSTASSQTSSSTGGGC

SEQ ID NO: 47992 - protein, 257 aa, Staphylotrichum coccosporum
GKSTRYWDCCKPSCSWPGKASVNQPVFACSANFQRISDPNVKSGCDGGSAYACADQTPWAVNDNFSYGFAATSISGGNEASWCCGCYELTFTSGPVAGKTMVVQSTSTGGDLGTNHFDLAMPGGGVGIFDGCSPQFGGLAGDRYGGVSSRSQCDSFPAALKPGCYWRFDWFKNADNPTFTFRQVQCPSQLVARTGCRRNDDGNFPVFTPPSGGQSSSSSSSSSAKPTSTSTSTTSTKATSTTSTASSQTSSSTGGGC

SEQ ID NO: 47993 - protein, 257 aa, Staphylotrichum coccosporum
GKSTRYWDCCKPSCSWPGKASVNQPVFACSANFQRISDPNVKSGCDGGSAYACADQTPWAVNDNFSYGFAATSISGGNEASWCCGCYELTFTSGPVAGKTMVVQSTSTGGDLGTNHFDLAMPGGGVGIFDGCSPQFGGLAGDRYGGVSSRSECDSFPAALKPGCYWRFDWFKNADNPTFTFRQVQCPSELVARTGCRRNDDGNFPVFTPPSGGQSSSSSSSSSAKPTSTSTSTTSTKATSTTSTASSQTSSSTGGGC

SEQ ID NO: 47994 - protein, 257 aa, Staphylotrichum coccosporum
GKSTRYWDCCKPSCSWPGKASVNQPVFACSANFQRISDPNVKSGCDGGSAYACADQTPWAVNDNFSYGFAATSISGGNEASWCCGCYELTFTSGPVAGKTMVVQSTSTGGDLGTNHFDLAMPGGGVGIFDGCSPQFGGLAGDRYGGVSSRSQCDSFPAALKPGCYWRFDWFKNADNPTFTFRQVQCPSELVSRTGCRRNDDGNFPVFTPPSGGQSSSSSSSSSAKPTSTSTSTTSTKATSTTSTASSQTSSSTGGGC

SEQ ID NO: 47995 - protein, 257 aa, Staphylotrichum coccosporum
GVSTRYWDCCKPSCSWPGKASVNQPVFACSANFQRISDPNVKSGCDGGSAYACADQTPWAVNDNFSYGFAATSIKGGNEASWCCGCYELTFTSGPVAGKTMVVQSTSTGSDLGTNHFDLAMPGGGVGIFDGCSPQFGGLPGDRYGGVSSRSQCDSFPAALKPGCYWRFDWFKNADNPTFTFRQVQCPSELVSRTGCRRNDDGNFPVFTPPSGGQSSSSSSSSSAKPTSTSTSTTSTKATSTTSTASGQTSSSTGKGC

SEQ ID NO: 47996 - protein, 257 aa, Staphylotrichum coccosporum
GKSTRYWDCCKPSCSWPGKASVNQPVFACSANFQRISDPNVKSGCDGGSAYACADQTPWAVNDNFSYGFAATSLSGGNEASWCCGCYELTFTSGPVAGKTMVVQSTSTGGDLGTNHFDLAMPGGGVGIFDGCSPQFGGLAGDRYGGVSSRSQCDSFPAALKPGCYWRFDWFKNADNPTFTFRQVQCPSELVARTGCRRNDDGNFPVFTPPSGGQSSSSSSSSSAKPTSTSTSTTSTKATSTTSTASSQTSSSTGGGC

SEQ ID NO: 47997 - protein, 257 aa, Staphylotrichum coccosporum
GKSTRYWDCCKPSCSWPGKASVNQPVFACSANFQRISDPNVKSGCDGGSAYACADQTPWAVNDNFSYGFAATSISGGNEASWCCGCYELTFTSGPVAGKTMVVQSTSTGGDLGTNHFDLAMPGGGVGIFDGCSPQFGGLAGDRYGGVSSRSQCDSFPAALKPGCYWRFDWFKNADNPTFTFRQVQCPSELVARTGCRRNDDGNFPKFTPPSGGQSSSSSSSSSAKPTSTSTSTTSTKATSTTSTASSQTSSSTGGGC

SEQ ID NO: 47998 - protein, 258 aa, unidentified
GKSTRYWDCCKPSCSWPGKASVNQPVFACSANFQRISDPNVKSGCDGGSAYACADQTPWAVNDNFSYGFAATSISGGNEASWCCGCYELTFTSGPVAGKTMVVQSTSTGGDLGTNHFDLAMPGGGVGIFDGCSPQFGGLAGDRYGGVSSRSQCDSFPAALKPGCYWRFDWFKNADNPTFTFRQVQCPSELVARTGCRRNDDGNFPVFTPPSGGQSSSSSSSSSSAKPTSTSTSTTSTKATSTTSTASSQTSSSTGGGC

SEQ ID NO: 47999 - protein, 220 aa, Thielavia terrestris
SGSGQSTRYWDCCKPSCAWPGKAAVSQPVYSCDANFQRLSDFNVQSGCNGGSAYACADQTPWAVNDNLAYGFAATSIAGGSESSWCCACYALTFTSGPVAGKTMVVQSTSTGGDLGSNHFDIAMPGGGVGIFDGCSSQFGGLPGDRYGGISSRDQCDSFPAPLKPGCYWRFDWFQNADNPTVTFQQVQCPAEIVARSGCKRNDDSSFPVFTPPPPPPPPP

SEQ ID NO: 48000 - protein, 220 aa, Thermothielavioides terrestris
SGSGQSTRYWDCCKPSCAWPGKAAVSQPVYACDANFQRLSDFNVQSGCNGGSAYACADQTPWAVNDNLAYGFAATSIAGGSESSWCCACYALTFTSGPVAGKTMVVQSTSTGGDLGSNHFDIAMPGGGVGIFDGCSSQFGGLPGARYGGISSRDQCDSFPAPLKPGCQWRFDWFQNADNPTFTFQQVQCPAEIVARSGCKRNDDSSFPVFTPSPNSPNSP

SEQ ID NO: 48001 - protein, 308 aa, Thermochaetoides thermophila
MRSTPVLRTALAAALPFTVLAADGKSTRYWDCCKPSCLSPGNSQVSQNVFACDTNFNRIYDFGAKSGCEGGPAYSCQDQTPWAVNDQFSYGFAATNIAGGNEASWCCACYKLTFTSGPVAGKVMVVQSTSTGGDLGNNHFSLNIPGGGVGIFDGCTPQFGGLPGERYGGISSRSQCDSFPDALKPGCYWRFDWFLNADNPNFTFERVQCPSELVARTGCKRNDDGNYPVFTPPSGDSPSSSSAAPTSTSTSQQPQQPSSSSSQASVPTSNPGGCTSQKWAQCGGIGFTGCQSVSGTTCTKLNDWYSQC

SEQ ID NO: 48002 - protein, 231 aa, Thielavia terrestris
SGSGQSTRYWDCCKPSCAWPGKAAVSQPVYSCDANFQRLSDFNVQSGCNGGSAYACADQTPWAVNDNLAYGFAATSIAGGSESSWCCACYALTFTSGPVAGKTMVVQSTSTGGDLGSNHFDIAMPGGGVGIFDGCSSQFGGLPGDRYGGISSRDQCDSFPAPLKPGCYWRFDWFQNADNPTVTFQQVQCPAEIVARSGCKRNDDSSFPVFTPSPTPSPTPSPTPSPTGCTT

SEQ ID NO: 48003 - protein, 231 aa, Thermothielavioides terrestris
SGSGQSTRYWDCCKPSCAWPGKAAVSQPVYACDANFQRLSDFNVQSGCNGGSAYACADQTPWAVNDNLAYGFAATSIAGGSESSWCCACYALTFTSGPVAGKTMVVQSTSTGGDLGSNHFDIAMPGGGVGIFDGCSSQFGGLPGARYGGISSRDQCDSFPAPLKPGCQWRFDWFQNADNPTFTFQQVQCPAEIVARSGCKRNDDSSFPVFTPSPTPSPTPSPTPSPTGCTS

SEQ ID NO: 48004 - protein, 227 aa, Thielavia terrestris
SGSGQSTRYWDCCKPSCAWPGKAAVSQPVYSCDANFQRLSDFNVQSGCNGGSAYACADQTPWAVNDNLAYGFAATSIAGGSESSWCCACYALTFTSGPVAGKTMVVQSTSTGGDLGSNHFDIAMPGGGVGIFDGCSSQFGGLPGDRYGGISSRDQCDSFPAPLKPGCYWRFDWFQNADNPTVTFQQVQCPAEIVARSGCKRNDDSSFPVFTPKPTPEPTPKPTGCTT

SEQ ID NO: 48005 - protein, 227 aa, Thielavia terrestris
SGSGQSTRYWDCCKPSCAWPGKAAVSQPVYSCDANFQRLSDFNVQSGCNGGSAYACADQTPWAVNDNLAYGFAATSIAGGSESSWCCACYALTFTSGPVAGKTMVVQSTSTGGDLGSNHFDIAMPGGGVGIFDGCSSQFGGLPGDRYGGISSRDQCDSFPAPLKPGCYWRFDWFQNADNPTVTFQQVQCPAEIVARSGCKRNDDSSFPVFTPEPTPQPTPEPTGCTT

SEQ ID NO: 48006 - protein, 227 aa, Thielavia terrestris
SGSGQSTRYWDCCKPSCAWPGKAAVSQPVYSCDANFQRLSDFNVQSGCNGGSAYACADQTPWAVNDNLAYGFAATSIAGGSESSWCCACYALTFTSGPVAGKTMVVQSTSTGGDLGSNHFDIAMPGGGVGIFDGCSSQFGGLPGDRYGGISSRDQCDSFPAPLKPGCYWRFDWFQNADNPTVTFQQVQCPAEIVARSGCKRNDDSSFPVFTPDPTPDPTPDPTGCTT

SEQ ID NO: 48007 - protein, 227 aa, Thielavia terrestris
SGSGQSTRYWDCCKPSCAWPGKAAVSQPVYSCDANFQRLSDFNVQSGCNGGSAYACADQTPWAVNDNLAYGFAATSIAGGSESSWCCACYALTFTSGPVAGKTMVVQSTSTGGDLGSNHFDIAMPGGGVGIFDGCSSQFGGLPGDRYGGISSRDQCDSFPAPLKPGCYWRFDWFQNADNPTVTFQQVQCPAEIVARSGCKRNDDSSFPVFTPEPTPEPTPEPTPCTT

SEQ ID NO: 48008 - protein, 227 aa, Thielavia terrestris
SGSGQSTRYWDCCKPSCAWPGKAAVSQPVYSCDANFQRLSDFNVQSGCNGGSAYACADQTPWAVNDNLAYGFAATSIAGGSESSWCCACYALTFTSGPVAGKTMVVQSTSTGGDLGSNHFDIAMPGGGVGIFDGCSSQFGGLPGDRYGGISSRDQCDSFPAPLKPGCYWRFDWFQNADNPTVTFQQVQCPAEIVARSGCKRNDDSSFPVFTPRPTPEPTPRPTGCTT

SEQ ID NO: 48009 - protein, 227 aa, Thermothielavioides terrestris
SGSGQSTRYWDCCKPSCAWPGKAAVSQPVYACDANFQRLSDFNVQSGCNGGSAYACADQTPWAVNDNLAYGFAATSIAGGSESSWCCACYALTFTSGPVAGKTMVVQSTSTGGDLGSNHFDIAMPGGGVGIFDGCSSQFGGLPGARYGGISSRDQCDSFPAPLKPGCQWRFDWFQNADNPTFTFQQVQCPAEIVARSGCKRNDDSSFPVFTSPSSPSSPSSPSGCTS

SEQ ID NO: 48010 - protein, 227 aa, Thielavia terrestris
SGSGQSTRYWDCCKPSCAWPGKAAVSQPVYSCDANFQRLSDFNVQSGCNGGSAYACADQTPWAVNDNLAYGFAATSIAGGSESSWCCACYALTFTSGPVAGKTMVVQSTSTGGDLGSNHFDIAMPGGGVGIFDGCSSQFGGLPGDRYGGISSRDQCDSFPAPLKPGCYWRFDWFQNADNPTVTFQQVQCPAEIVARSGCKRNDDSSFPVFTPEPTPEPTPEPTGCTT

SEQ ID NO: 48011 - protein, 265 aa, Humicola insolens
GKSTRYWDCCKPSCGWAKKAPVNQPVFSCNANFQRLTDFDAKSGCEPGGVAYSCADQTPWAVNDDFAFGFAATSIAGSNEAGWCCACYELTFTSGPVAGKKMVVQSTSTGGDLGSNHFDLNIPGGGVGIFDGCTPQFGGLPGQRYGGISSRNECDRFPDALKPGCYWRFDWFKNADNPSFSFRQVQCPAELVARTGCRRNDDGNFPAVQIPSSSTSSSPPVQPTTPSGCTAERWAQCGGNGWSGCTTCVAGSTCTKINDWYHQCL

SEQ ID NO: 48012 - protein, 265 aa, Unidentified
GRSTRYWDCCKPSCGWAKKASVNQPVFSCNANFQRITDFDAKSGCEPGGVAYSCADQTPWAVNDNFSLGFAATSIAGSNEAGWCCACYELTFTSGPVAGKKMVVQSTSTGGDLGSNHFDLNIPGGGVGIFDGCTPQFGGLPGQRYGGISSRNECDSFPDALKPGCYWRFDWFKNADNPSFSFRQVQCPAELVARTGCRRNDDGNFPAVQIPSSSTSSSPPVQPTTPSGCTAERWAQCGGNGWSGCTTCVAGSTCTKINDWYHQCL

SEQ ID NO: 48013 - protein, 292 aa, Thermochaetoides thermophila
MRSTPVLRTALAAALPFTVLAADGKSTRYWDCCKPSCSWPGKAAVSQPVFACDRNFNRIYDFGAKSGCEGGPAYSCADQTPWAVNDQFSYGFAATNIAGGNEASWCCACYKLTFTSGPVAGKVMVVQSTSTGGDLGNNHFDLNIPGGGVGIFDGCTPQFGGLPGERYGGISSRSQCDSFPDALKPGCYWRFDWFLNADNPNFTFERVQCPSELVGNGGIGIDGNYAPGSGQISDGGGSQQPQQPTSSSSQASVSTSNPGGCTSQKQAQCGYIGFTCVSGTTCTKLNDWYSQC

SEQ ID NO: 48014 - protein, 223 aa, Thermothielavioides terrestris
SGSGQSTRYWDCCKPSCAWPGKAAVSQPVYACDANFQRLSDFNVQSGCNGGSAYACADQTPWAVNDNLAYGFAATSIAGGSESSWCCACYALTFTSGPVAGKTMVVQSTSTGGDLGSNHFDIAMPGGGVGIFDGCSSQFGGLPGARYGGISSRDQCDSFPAPLKPGCQWRFDWFQNADNPTFTFQQVQCPAEIVARSGCKRNDDSSFPVFTPEPTPQPTGCTS

SEQ ID NO: 48015 - protein, 223 aa, Thermothielavioides terrestris
SGSGQSTRYWDCCKPSCAWPGKAAVSQPVYACDANFQRLSDFNVQSGCNGGSAYACADQTPWAVNDNLAYGFAATSIAGGSESSWCCACYALTFTSGPVAGKTMVVQSTSTGGDLGSNHFDIAMPGGGVGIFDGCSSQFGGLPGARYGGISSRDQCDSFPAPLKPGCQWRFDWFQNADNPTFTFQQVQCPAEIVARSGCKRNDDSSFPVFTPQPTPQPTGCTS

SEQ ID NO: 48016 - protein, 223 aa, Thermothielavioides terrestris
SGSGQSTRYWDCCKPSCAWPGKAAVSQPVYACDANFQRLSDFNVQSGCNGGSAYSCADQTPWAVNDNLAYGFAATSIAGGSESSWCCACYALTFTSGPVAGKTMVVQSTSTGGDLGSNHFDIAMPGGGVGIFDGCSSQFGGLPGARYGGISSRDQCDSFPAPLKPGCQWRFDWFQNADNPTFTFQQVQCPAEIVARSGCKRNDDSSFPVFTPEPTPEPTGCTS

SEQ ID NO: 48017 - protein, 223 aa, Thermothielavioides terrestris
SGSGQSTRYWDCCKPSCAWPGKAAVSQPVYACDANFQRLSDFNVQSGCNGGSAYACADQTPWAVNDNLAYGFAATSIAGGSESSWCCACYALTFTSGPVAGKTMVVQSTSTGGDLGSNHFDIAMPGGGVGIFNGCSSQFGGLPGARYGGISSRDQCDSFPAPLKPGCQWRFDWFQNADNPTFTFQQVQCPAEIVARSGCKRNDDSSFPVFTPEPTPEPTPEPT

SEQ ID NO: 48018 - protein, 223 aa, Thermothielavioides terrestris
SGSGQSTRYWDCCKPSCAWPGKAAVSQPVYACDANFQRLSDFNVQSGCNGGSAYSCADQTPWAVNDNLAYGFAATSIAGGSESSWCCACYALTFTSGPVAGKTMVVQSTSTGGDLGSNHFDIAMPGGGVGIFNGCSSQFGGLPGAQYGGISSRDQCDSFPAPLKPGCQWRFDWFQNADNPTFTFQQVQCPAEIVARSGCKRNDDSSFPVFTPEPTPEPTPEPT

SEQ ID NO: 48019 - protein, 282 aa, Thermothielavioides terrestris
SGSGQSTRYWDCCKPSCAWPGKAAVSQPVYACDANFQRLSDFNVQSGCNGGSAYACADQTPWAVNDNLAYGFAATSIAGGSESSWCCACYALTFTSGPVAGKTMVVQSTSTGGDLGSNHFDIAMPGGGVGIFDGCSSQFGGLPGARYGGISSRDQCDSFPAPLKPGCQWRFDWFQNADNPTFTFQQVQCPAEIVARSGCKRNDDSSFPVFTTPPTPPTPPTPPTPPTPPTPPTPPTPPTPPTPPGCTAERWAQCGGNGWSGCTTCVAGSTCTKINDWYHQCL

SEQ ID NO: 48020 - protein, 270 aa, Staphylotrichum coccosporum
ADGVSTRYWDCCKPSCSWPGKASVNQPVFACGANFTRISDPNVKSGCDGGSAYACADQTPWAVNDNFSYGFAATSIMGGNEASWCCACYELTFTSGPVAGKTMVVQSTSTGGDLGVNHFDLAMPGGGVGIFDGCSPQFGGLPGDRYGGVSSRSQCDSFPAPLKPGCYWRFDWFKNADNPTFTFRQVQCPSELVARTGCRRNDDGNFPVFTPPSGGQSSSSSSSSSAKPTSTSTSTTDTKATSTTSTTSTKATSTTSTASSQTSSSTGGGC

SEQ ID NO: 48021 - protein, 279 aa, Acremonium thermophilum
GKSTRYWDCCKPSCGWAGKAPVNQPVFSCSADWQRISDFNANSGCSGGNAYSCADQTPWAVNEQFSYGFAATAISGGSEQSWCCACYALTFNSGPVAGKTMVVQSTSTGGDLGENHFDLAIPGGGVGIFNGCQSQFGGLPGAQYGGIQDRSQCSSFPAPLQPGCYWRFDWFQNADNPTFTFQRVQCPSELTSRTGCKRDDDANYPVFSPPSGSPSGGSPPGGSPPGTTTTRRPATTTGSSPTPTQSHYGQCGGIGYSGPTVCASGTTCQVLNPYYSQCL

SEQ ID NO: 48022 - protein, 279 aa, Acremonium thermophilum
GKSTRYWDCCKPSCGWAGKAPVNQPVFSCSADWQRISDFNANSGCSGGNAYSCADQTPWAVNEQFSYGFAATAISGGSEQSWCCACYALTFNSGPVAGKTMVVQSTSTGGDLGENHFDLAIPGGGVGIFNGCQSQFGGLPGAQYGGIQDRSQCSSFPAPLQPGCYWRFDWFQNADNPTFTFQRVQCPSELISRTGCKRDDDANYPVFNPPSGNPSGGNPPGGNPPGTTTTRRPATTTGSSPGPTQSHYGQCGGIGYSGPTVCASGTTCQVLNPYYSQCL

SEQ ID NO: 48023 - protein, 279 aa, Acremonium thermophilum
GKSTRYWDCCKPSCGWAGKAPVNQPVFSCSADWQRISDFNAKSGCSGGNAYSCADQTPWAVNEQFSYGFAATAISGGSEQSWCCACYALTFNSGPVAGKTMVVQSTSTGGDLGENHFDLAIPGGGVGIFNGCQSQFGGLPGAQYGGIQDRSQCSSFPAPLQPGCYWRFDWFQNADNPTFTFQRVQCPSELISRTGCKRDDDANYPVFNPPSGNPSGGNPPGGNPPGTTTTRRPATTTGSSPGPTQSHYGQCGGIGYSGPTVCASGTTCQVLNPYYSQCL

SEQ ID NO: 48024 - protein, 279 aa, Acremonium thermophilum
GKSTRYWDCCKPSCGWAGKAPVNQPVFSCSADWQRISDFNANSGCDGGNAYSCADQTPWAVNEQFSYGFAATAISGGSEQSWCCACYALTFNSGPVAGKTMVVQSTSTGGDLGENHFDLAIPGGGVGIFNGCQSQFGGLPGAQYGGIQDRSQCSSFPAPLQPGCYWRFDWFQNADNPTFTFQRVQCPSELISRTGCKRDDDANYPVFNPPSGNPSGGNPPGGNPPGTTTTRRPATTTGSSPGPTQSHYGQCGGIGYSGPTVCASGTTCQVLNPYYSQCL

SEQ ID NO: 48025 - protein, 279 aa, Acremonium thermophilum
GKSTRYWDCCKPSCGWAGKAPVNQPVFSCSADWQRISDFNAKSGCDGGNAYSCADQTPWAVNEQFSYGFAATAISGGSEQSWCCACYALTFNSGPVAGKTMVVQSTSTGGDLGENHFDLAIPGGGVGIFNGCQSQFGGLPGAQYGGIQDRSQCSSFPAPLQPGCYWRFDWFQNADNPTFTFQRVQCPSELTSRTGCKRDDDANYPVFSPPSGRPSGGSPPGGSPPGTTTTRRPATTTGSSPTPTQSHYGQCGGIGYSGPTVCASGTTCQVLNPYYSQCL

SEQ ID NO: 48026 - protein, 279 aa, Acremonium thermophilum
GKSTRYWDCCKPSCGWAGKAPVNQPVFSCSADWQRISDFNAKSGCDGGNAYSCADQTPWAVNEQFSYGFAATAISGGSEQSWCCACYALTFNSGPVAGKTMVVQSTSTGGDLGENHFDLAIPGGGVGIFNGCQSQFGGLPGAQYGGIQDRSQCSSFPAPLQPGCYWRFDWFQNADNPTFTFQRVQCPSELTSRTGCKRDDDANYPVFSPPSGRPSGGSPPGGSPPGTTTTRRPATTTGSSPGPTQSHYGQCGGIGYSGPTVCASGTTCQVLNPYYSQCL

SEQ ID NO: 48027 - protein, 279 aa, Acremonium thermophilum
GKSTRYWDCCKPSCGWAGKAPVNQPVFSCSADWQRISDFNAKSGCDGGNAYSCADQTPWAVNEQFSYGFAATAISGGSEQSWCCACYALTFNSGPVAGKTMVVQSISTGGDLGENHFDLAIPGGGVGIFNGCQSQFGGLPGAQYGGIQDRSQCSSFPAPLQPGCQWRFDWFQNADNPTFTFQRVQCPSELTSRTGCKRDDDANYPVFSPPSGSPSGGSPPGGSPPGTTTTRRPATTTGSSPTPTQSHYGQCGGIGYSGPTVCASGTTCQVLNPYYSQCL

SEQ ID NO: 48028 - protein, 279 aa, Acremonium thermophilum
GKSTRYWDCCKPSCGWAGKASVNQPVFSCSADWQRISDFNAKSGCDGGNAYSCADQTPWAVNEQFSYGFAATAISGGSEQSWCCACYALTFNSGPVAGKTMVVQSTSTGGDLGENHFDLAIPGGGVGIFNGCQSQFGGLPGAQYGGIQDRSQCSSFPAPLQPGCYWRFDWFQNADNPTFTFQRVQCPSELTSRTGCKRDDDANYPVFSPPSGRPSGGSPPGGSPPGTTTTRRPATTTGSSPGPTQSHYGQCGGIGYSGPTVCASGTTCQVLNPYYSQCL

SEQ ID NO: 48029 - protein, 279 aa, Acremonium thermophilum
GKSTRYWDCCKPSCGWAGKAPVNQPVFSCSADWQRISDFNAKSGCDGGNAYSCADQTPWAVNEQFSYGFAATAISGGSETSWCCACYALTFNSGPVAGKTMVVQSTSTGGDLGENHFDLAIPGGGVGIFNGCQSQFGGLPGAQYGGIQDRSQCSSFPAPLQPGCYWRFDWFQNADNPTFTFQRVQCPSELISRTGCKRDDDANYPVFNPPSGNPSGGNPPGGNPPGTTTTRRPATTTGSSPGPTQSHYGQCGGIGYSGPTVCASGTTCQVLNPYYSQCL

SEQ ID NO: 48030 - protein, 279 aa, Acremonium thermophilum
GKSTRYWDCCKPSCGWAGKAPVNQPVFSCSADWQRISDFNAKSGCDGGNAYSCADHTPWAVNEQFSYGFAATAISGGSEQSWCCACYALTFNSGPVAGKTMVVQSTSTGGDLGENHFDLAIPGGGVGIFNGCQSQFGGLPGAQYGGIQDRSQCSSFPAPLQPGCQWRFDWFQNADNPTFTFQRVQCPSELTSRTGCKRDDDANYPVFSPPSGSPSGGSPPGGSPPGTTTTRRPATTTGSSPTPTQSHYGQCGGIGYSGPTVCASGTTCQVLNPYYSQCL

SEQ ID NO: 48031 - protein, 279 aa, Acremonium thermophilum
GKSTRYWDCCKPSCGWAGKASVNQPVFSCSADWQRISDFNANSGCSGGNAYSCADQTPWAVNEQFSYGFAATAISGGSEQSWCCACYALTFNSGPVAGKTMVVQSTSTGGDLGENHFDLAIPGGGVGIFNGCQSQFGGLPGAQYGGIQDRSQCSSFPAPLQPGCYWRFDWFQNADNPTFTFQRVQCPSELISRTGCKRDDDANYPVFNPPSGNPSGGNPPGGNPPGTTTTRRPATTTGSSPGPTQSHYGQCGGIGYSGPTVCASGTTCQVLNPYYSQCL

SEQ ID NO: 48032 - protein, 279 aa, Acremonium thermophilum
GKSTRYWDCCKPSCGWAGKAPVNQPVFSCSADWQRISDFNAKSGCDGGNAYSCADQTPWAVNEQFSYGFAATAISGGSEQSWCCACYALTFNSGPVAGKTMVVQSTSTGGDLGENHFDLAIPGGGVGIFNGCQSQFGGLPGAQYGGIQDRSQCSSFPAPLQPGCYWRFDWFQNADNPTFTFQRVQCPSELTSRTGCKRDDDANYPVFSPPSGRPSGSSPPGGSPPGTTTTRRPATTTGSSPTPTQSHYGQCGGIGYSGPTVCASGTTCQVLNPYYSQCL

SEQ ID NO: 48033 - protein, 279 aa, Acremonium thermophilum
GKSTRYWDCCKPSCGWAGKASVNQPVFSCSADWQRISDFNAKSGCDGGNAYSCADQTPWAVNEQFSYGFAATAIAGGSEQSWCCACYALEFNSGPVAGKTMVVQSTSTGGDLGENHFDLAIPGGGVGIFNGCQSQFGGLPGAQYGGIQDRSQCSSFPAPLQPGCQWRFDWFQNADNPTFTFRRVQCPSELTSRTGCKRDDDANYPVFNPPSGNPSGGNPPGGNPPGTTTTRRPATTTGSSPGPTQSHYGQCGGIGYSGPTVCASGTTCQVLNPYYSQCL

SEQ ID NO: 48034 - protein, 279 aa, Acremonium thermophilum
GKSTRYWDCCKPSCGWAGKAPVNQPVFSCSADWQRISDFNAKSGCDGGNAYSCADQTPWAVNEQFSYGFAATAISGGSEQSWCCACYALTFNSGPVAGKTMVVQSTSTGGDLGENHFDLAIPGGGVGIFNGCQSQFGGLPGAQYGGIQDRSQCSSFPAPLQPGCYWRFDWFQNADNPTFTFQRVQCPSELTSRTGCKRDDDANYPVFSPPSGSPSGGSPPGGSPPGTTTTRRPATTTGSSPTPTQSHYGQCGGIGYSGPTVCASGTTCQVLNPYYSQCL

SEQ ID NO: 48035 - protein, 279 aa, Acremonium thermophilum
GKSTRYWDCCKPSCGWAGKAPVNQPVFSCSADWQRISDFNANSGCSGGNAYSCADQTPWAVNEQFSYGFAATAISGGSEQSWCCACYALTFNSGPVAGKTMVVQSTSTGGDLGENHFDLAIPGGGVGIFNGCQSQFGGLPGAQYGGIQDRSQCSSFPAPLQPGCYWRFDWFQNADNPTFTFQRVQCPSELISRTGCKRDDDANYPVFNPPSGNPSGGNPPGGNPPGTTTTRRPATTTGSSPGPTQSRYGQCGGIGYSGPTVCASGTTCQVLNPYYSQCL

SEQ ID NO: 48036 - protein, 279 aa, Acremonium thermophilum
GKSTRYWDCCKPSCGWAGKAPVNQPVFSCSADWQRISDFNANSGCSGGNAYSCADQTPWAVNEQFSYGFAATAISGGSEQSWCCACYALTFNSGPVAGKTMVVQSTSTGGDLGENHFDLAIPGGGVGIFNGCQSQFGGLPGAQYGGIQDRSQCSSFPAPLQPGCYWRFDWFQNADNPTFTFQRVQCPSELTSRTGCKRDDDANYPVFNPPSGNPSGGNPPGGNPPGTTTTRRPATTTGSSPGPTQSHYGQCGGIGYSGPTVCASGTTCQVLNPYYSQCL

SEQ ID NO: 48037 - protein, 279 aa, Acremonium thermophilum
GKSTRYWDCCKPSCGWAGKAPVNQPVFSCSADWQRISDFNANSGCSGGNAYSCADQTPWAVNEQFSYGFAATAISGGSEQSWCCACYALTFNSGPVAGKTMVVQSTSTGGDLGENHFDLAIPGGGVGIFNGCQSQFGGLPGAQYGGIQDRSQCSSFPAPLQPGCYWRFDWFQNADNPTFTFQRVQCPSELISRTGCKRDDDANYPVFNTPSGSPSGGNTPGGNTPGTTTTRRPATTTGSSPGPTQSRYGQCGGIGYSGPTVCASGTTCQVLNPYYSQCL

SEQ ID NO: 48038 - protein, 309 aa, Thermochaetoides thermophila
MRSTPVLRTALAAALPFTVLAADGNSTRYWDCCKPSCLSPGNVQVSQNVFACDRNFNRIYDFGAKSGCEGGPAYSCADQTPWAVNDQFSYGFAATNIAGGNEASWCCACYKLTFTSGPVAGKVMVVQSTSTGGDLGNNHFSLNIPGGGVGIFDGCTPQFGGLPGERYGGISSRSQCDSFTDALKPGCYWRFDWTLNADNPNFTFERVQCPSELVARTGCKRNDDGNYPVFTPPSGDSPSSSSAAPTSTSTSQQPQQPSDSSSQASVPTSNPGGCTSQKWAKSGGIGFTGCTTCVSGTTCTKLNDWYSQC

SEQ ID NO: 48039 - protein, 309 aa, Thermochaetoides thermophila
MRSTPVLRTALAAALPFTVLAADGKSTRYWDCCKPSCLSPGNVEVSQNVFACDRNFNRIYDFGAKSGCEGGPAYSCADQTPWAVNDQFSYGFAATNIAGGNEASWCCACYKLTFTSGPVAGAVMVVQSTSTGGDLGNNHFDLNIPGGGVGIFDGCTPQFGGLPGERYGGISSRSQCDSFTDALKPGCYWRFDWFLNADNPNFTFERVQCPSELVARTGCKRNDDGNYPVFTPPSGDSPSSSSAAPTSTSTSQQPQQPTSSSSQASVPTSNPGGCTSDKWAESGGIGFTGCTTCVSGTTCTKLNDWYSQC

SEQ ID NO: 48040 - protein, 309 aa, Thermochaetoides thermophila
MRSTPVLRTALAAALPGTVLAANGNSTRYWDCCKPSCLSPGNTQVSQNVFACDTNFNRIYDFGAKTGCEGGPAYSCADQTPWAVNDQFSYGFAATNIAGGNEASWCCACYKLTFTEGPVAGKVMVVQSTSTGGDLGNNHFDLNIPGGGVGIFDGCTPQFGGLPGERYGGISSRSQCDSFPDALKPGCYWRFDWFLNADNPNFTFERVQCPSELVARTGCKRNDDGNYPVFTPPSGDSPSSSSAAPTSTSTSQQPQQPTDSSSQASVPTSNPGGCTSQKWAQCGGIGFTGCTTCVSGTTCTKLNDWYSQC

SEQ ID NO: 48041 - protein, 309 aa, Thermochaetoides thermophila
MRSTPVLRTALAAALPFTVLAADGNSTRYWDCCKPSCLSPGNEQVSQNVFACDRNFNRIYDFGAKTYCEGGPAYSCADQTPWAVNDQFSYGFAATNIAGGNEASWCCACYKLTFTSGPVAGKVMVVQSTSTGGDLGNNHFSLNIPGGGVGIFDGCTPQFGGLPGERYGGISSRSQCDSFTDALKPGCYWRFDWFLNADNPNFTFERVQCPSELVARTGCKRNDDGNYPVFTPPSGDSPSSSSAAPTSTSTSQQPQQPTSSSSQASVPTSNPGGCTSQKWAQCGGIGFTGCTTCVSGTTCTKLNDWYSQC

SEQ ID NO: 48042 - protein, 309 aa, Thermochaetoides thermophila
MRSTPVLRTALAAALPFTVLAADGKSTRYWDCCKPSCLSPGNEQVSQNVFACDRNFNRIYDFGAKSGCEGGPAYSCADQTPWAVNDQFSYGFAATNIAGGNEASWCCACYKLTFTSGPVAGKVMVVQSTSTGGDLGNNHFDLNIPGGGVGIFDGCTPQFGGLPGERYGGISSRSQCDSFPDALKPGCYWRFDWFLNADNPNFTFERVQCPSELVARTGCKRNDDGNYPVFTPPSGDSPSSSSAAPTSTSTSQQPQQPTSSSSQASVPTSNPGGCESQKWAGSGGIAFTGCTTCVSGTTCTKLNDWYSQC

SEQ ID NO: 48043 - protein, 309 aa, Thermochaetoides thermophila
MRSTPVLRTALAAALPFTVLAANGKSTRYWDCCKPSCLSPGNVQVSQNVFACDRNFNRIYDFGAKSGCEGGPAYSCEDQTPWAVNDQFSYGFAATNIAGGNEASWCCACYKLTFTSGPVAGKVMVVQSTSTGGDLGNNHFDLNIPGGGVGIFDGCTPQFGGLPGERYGGISSRSQCDSFTDALKPGCYWRFDWTLNADNPNFTFERVQCPSELVARTGCKRNDDGNYPVFTPPSGDSPSSSSAAPTSTSTSQQPQQPTSSSSQASVPTSNPGGCTSQKWAQCGGIGFTGCTTCVSGTTCTKLNDWYSQC

SEQ ID NO: 48044 - protein, 309 aa, Thermochaetoides thermophila
MRSTPVLRTALAAALPFTVLAADGNSTRYWDCCKPSCLSPGNVQVSQNVFACDRNFNRIYDFGAKSGCEGGPAYSCQDQTPWAVNDQFSYGFAATNIAGGNQASWCCACYKLTFTSGPVAGKVMVVQSTSTGGDLGNNHFDLNIPGGGVGIFDGCTPQFGGLPGERYGGISSRSQCDSFTDALKPGCYWRFDWTLNADNPNFTFERVQCPSELVARTGCKRNDDGNYPVFTPPSGDSPSSSSAAPTSTSTSQQPQQPTSSSSQASVPTSNPGGCTSQKWAQCGGIGFTGCTTCVSGTTCTKLNDWYSQC

SEQ ID NO: 48045 - protein, 309 aa, Thermochaetoides thermophila
MRSTPVLRTALAAALPFTVLAADGKSTRYWDCCKPSCLSPGNVQVSQNVFACDRNFNRIYDFGAKSYCEGGPAYSCADQTPWAVNDQFSYGFAATNIAGGNEASWCCACYKLTFTSGPVAGKVMVVQSTSTGGDLGNNHFDLNIPGGGVGIFDGCTPQFGGLPGERYGGISSRSQCDSFPDALKPGCYWRFDWFLNADNPNFTFERVQCPSELVARTGCKRNDDGNYPVFTPPSGDSPSSSSAAPTSTSTSQQPQQPTSSSSQASVPTSNPGGCESEKWAQCGMIGSAQXTTCVSGTTCTKLNDWYSQC

SEQ ID NO: 48046 - protein, 309 aa, Thermochaetoides thermophila
MRSTPVLRTALAAALPFTVLAANGKSTRYWDCCKPSCLSPGNVQVSQNVFACDTNFNRIYDFGAKSGCEGGPAYSCADQTPWAVNDQFSYGFAATNIAGGNEASWCCACYKLTFTSGPVAGKVMVVQSTSTGGDLGNNHFDLNIPGGGVGIFDGCTPQFGPLPGERYGGISSRSQCDSFPDALKPGCYWRFDWFLNADNPNFTFERVQCPSELVARTGCKRNDDGNYPVFTPPSGDSPSSSSAAPTSTSTSQQPQQPTSSSSQASVPTSNPGGCTSQKWAGCGGIGFTGCQTCVSGTTCTKLNDWYSQC

SEQ ID NO: 48047 - protein, 309 aa, Thermochaetoides thermophila
MRSTPVLRTALAAALPFTVLAANGKSTRYWDCCKPSCLSPGNSQVSQNVFACDTNFNRIYDFGAKSGCEGGPAYSCADQTPWAVNDQFSYGFAATNIAGGNEASWCCACYKLTFTDGPVAGKVMVVQSTSTGGDLGNNHFDLNIPGGGVGIFDGCTPQFGGLPGERYGGISSRSQCDSFPDALKPGCYWRFDWFLNADNPNFTFERVQCPSELVARTGCKRNDDGNYPVFTPPSGDSPSSSSAAPTSTSTSQQPQQPTSSSSQASVPTSNPGGCTSQKWAQCGGIAFTGCATCVSGTTCTKLNDWYSQC

SEQ ID NO: 48048 - protein, 309 aa, Thermochaetoides thermophila
MRSTPVLRTALAAALPFTVLAADGNSTRYWDCCKPSCLSPGNVQVSQNVFACDRNFNRIYDFGAKSGCEGGPAYSCADQTPWAVNDQFSYGFAATNIAGGNEASWCCACYKLTFTSGPVAGKVMVVQSTSTGGDLGNNHFDLNIPGGGVGIFDGCTPQFGGLPGERYGGISSRSQCDSFPDALKPGCYWRFDWFLNADNPNFTFERVQCPSELVARTGCKRNDDGNYPVFTPPSGDSPSSSSAAPTSTSTSQQPQQPTSSSSQASVPTSNPGGCTSQKWAESGGIGFTGCTSGVSGTTCTKLNDWYSQC

SEQ ID NO: 48049 - protein, 309 aa, Thermochaetoides thermophila
MRSTPVLRTALAAALPGTVLAADGKSTRYWDCCKPSCLSPGNSQVSQNVFACDRNFNRIYDFGAKTGCEGGPAYSCADQTPWAVNDQFSYGFAATNIAGGNEASWCCACYKLTFTDGPVAGSVMVVQSTSTGGDLGNNHFDLNIPGGGVGIFDGCTPQFGGLPGERYGGISSRSQCDSFTDALKPGCYWRFDWFLNADNPNFTFERVQCPSELVARTGCKRNDDGNYPVFTPPSGDSPSSSSAAPTSTSTSQQPQQPTSSSSQASVPTSNPGGCTSQKWAQCGGIGFTGCTTCVSGTTCTKLNDWYSQC

SEQ ID NO: 48050 - protein, 309 aa, Thermochaetoides thermophila
MRSTPVLRTALAAALPFTVLAADGKSTRYWDCCKPSCLSPGNVQVSQNVFACDRNFNRIYDFGAKSGCEGGPAYSCADQTPWAVNDQFSYGFAATNIAGGNEASWCCACYKLTFTSGPVAGKVMVVQSTSTGGDLGNNHFDLNIPGGGVGIFDGCTPQFGGLPGERYGGISSRSQCDSFPDALKPGCYWRFDWFLNADNPNFTFERVQCPSELVARTGCKRNDDGNYPVFTPPSGDSPSSSSAAPTSTSTSQQPQQPTSSSSQASVPTSNPGGCTRQKWQAEXGIGFTGCTTCVSGTTCTKLNDWYSQC

SEQ ID NO: 48051 - protein, 309 aa, Thermochaetoides thermophila
MRSTPVLRTALAAALPFTVLAADGKSTRYWDCCKPSCLSPGNTEVSQNVFACDRNFNRIYDFGAKSGCEGGPAYSCADQTPWAVNDQFSYGFAATNIAGGNQASWCCACYKLTFTDGPVAGKVMVVQSTSTGGDLGNNHFDLNIPGGGVGIFDGCTPQFGGLPGERYGGISSRSQCDSFPDALKPGCYWRFDWFLNADNPNFTFERVQCPSELVARTGCKRNDDGNYPVFTPPSGDSPSSSSAAPTSTSTSQQPQQPTSSSSQASVPTSNPGGCTSQKWAGSGGIGFTGCTTCVSGTTCTKLNDWYSQC

SEQ ID NO: 48052 - protein, 309 aa, Thermochaetoides thermophila
MRSTPVLRTALAAALPGTVLAADGKSTRYWDCCKPSCLSPGNVQVSQNVFACDTNFNRIYDFGAKSGCEGGPAYSCEDQTPWAVNDQFSYGFAATNIAGGNEASWCCACYKLTFTDGPVAGKVMVVQSTSTGGDLGNNHFSLNIPGGGVGIFDGCTPQFGGLPGERYGGISSRSQCDSFPDALKPGCYWRFDWFLNADNPNFTFERVQCPSELVARTGCKRNDDGNYPVFTPPSGDSPSSSSAAPTSTSTSQQPQQPTSSSSQASVPTSNPGGCTSQKWAECGGIGFTGCTTCVSGTTCTKLNDWYSQC

SEQ ID NO: 48053 - protein, 309 aa, Thermochaetoides thermophila
MNSTPVLRTALAAALPFTVLAADGKSTRYWDCCKPSCLSPGNVQVSQNVFACDTNFNRIYDFGAKSGCEGGPAYSCADQTPWAVNDQFSYGFAATNIAGGNQASWCCACYKLTFTSGPVAGKVMVVQSTSTGGDLGNNHFDLNIPGGGVGIFDGCTPQFGPLPGERYGGISSRSQCDSFPDALKPGCYWRFDWFLNADNPNFTFERVQCPSELVARTGCKRNDDGNYPVFTPPSGDSPSSSSAAPTSTSTSQQPQQPSSSSSQASVPTSNPGGCTSDKWAQCGMIGFTGCATCVSGTTCTKLNDWYSQC

SEQ ID NO: 48054 - protein, 309 aa, Thermochaetoides thermophila
MRSTPVLRTALAAALPFTVLAANGKSTRYWDCCKPSCLSPGNSQVSQNVFACDTNFNRIYDFGAKSGCEGGPAYSCEDQTPWAVNDQFSYGFAATNIAGGNEASWCCACYKLTFTEGPVAGKVMVVQSTSTGGDLGNNHFDLNIPGGGVGIFDGCTPQFGGLPGERYGGISSRSQCDSFTDALKPGCYWRFDWFLNADNPNFTFERVQCPSELVARTGCKRNDDGNYPVFTPPSGDSPSSSSAAPTSTSTSQQPQQPSSSSSQASVPTSNPGGCTSQKWAQCGRIGFTGCTTCVSGTTCTKLNDWYSQC

SEQ ID NO: 48055 - protein, 309 aa, Thermochaetoides thermophila
MRSTPVLRTALAAALPFTVLAADGKSTRYWDCCKPSCLSPGNSEVSQNVFACDTNFNRIYDFGAKTGCEGGPAYSCADQTPWAVNDQFSYGFAATNIAGGNEASWCCACYKLTFTEGPVAGKVMVVQSTSTGGDLGNNHFSLNIPGGGVGIFDGCTPQFGGLPGERYGGISSRSQCDSFTDALKPGCYWRFDWFLNADNPNFTFERVQCPSELVARTGCKRNDDGNYPVFTPPSGDSPSSSSAAPTSTSTSQQPQQPRDSSSQASVPTSNPGGCTSQKWAQCGGIGFTGCTTCVSGTTCTKLNDWYSQC

SEQ ID NO: 48056 - protein, 309 aa, Thermochaetoides thermophila
MRSTPVLRTALAAALPGTVLAADGKSTRYWDCCKPSCLSPGNVQVSQNVFACDTNFNRIYDFGAKSGCEGGPAYSCEDQTPWAVNDQFSYGFAATNIAGGNQASWCCACYKLTFTSGPVAGKVMVVQSTSTGGDLGNNHFDLNIPGGGVGIFDGCTPQFGGLPGERYGGISSRSQCDSFPDALKPGCYWRFDWFLNADNPNFTFERVQCPSELVARTGCKRNDDGNYPVFTPPSGDSPSSSSAAPTSTSTSQQPQQPTSSSSQASVPTSNPGGCTSQKWAQCGGIAFTGCQTCVSGTTCTKLNDWYSQC

SEQ ID NO: 48057 - protein, 309 aa, Thermochaetoides thermophila
MRSTPVLRTALAAALPGTVLAADGKSTRYWDCCKPSCLSPGNVQVSQNVFACDRNFNRIYDFGAKSGCEGGPAYSCEDQTPWAVNDQFSYGFAATNIAGGNQASWCCACYKLTFTSGPVAGKVMVVQSTSTGGDLGNNHFDLNIPGGGVGIFDGCTPQFGPLPGERYGGISSRSQCDSFPDALKPGCYWRFDWFLNADNPNFTFERVQCPSELVARTGCKRNDDGNYPVFTPPSGDSPSSSSAAPTSTSTSQQPQQPSSSSSQASVPTSNPGGCTSQKWAECGGIGFTGCQTCVSGTTCTKLNDWYSQC

SEQ ID NO: 48058 - protein, 309 aa, Thermochaetoides thermophila
MRSTPVLRTALAAALPFTVLAADGKSTRYWDCCKPSCLSPGNVQVSQNVFACDTNFNRIYDFGAKSGCEGGPAYSCEDQTPWAVNDQFSYGFAATNIAGGNQASWCCACYKLTFTSGPVAGKVMVVQSTSTGGDLGNNHFDLNIPGGGVGIFDGCTPQFGGLPGERYGGISSRSQCDSFPDALKPGCYWRFDWFLNADNPNFTFERVQCPSELVARTGCKRNDDGNYPVFTPPSGDSPSSSSAAPTSTSTSQQPQQPTSSSSQASVPTSNPGGCTSDKWAQCGMIGFTGCQTCVSGTTCTKLNDWYSQC

SEQ ID NO: 48059 - protein, 309 aa, Thermochaetoides thermophila
MRSTPVLRTALAAALPFTVLAANGKSTRYWDCCKPSCLSPGNVQVSQNVFACDTNFNRIYDFGAKSGCEGGPAYSCEDQTPWAVNDQFSYGFAATNIAGGNQASWCCACYKLTFTSGPVAGKVMVVQSTSTGGDLGNNHFDLNIPGGGVGIFDGCTPQFGPLPGERYGGISSRSQCDSFPDALKPGCYWRFDWFLNADNPNFTFERVQCPSELVARTGCKRNDDGNYPVFTPPSGDSPSSSSAAPTSTSTSQQPQQPSSSSSQASVPTSNPGGCTSQKWAQCGMIGFTGCTTCVSGTTCTKLNDWYSQC

SEQ ID NO: 48060 - protein, 309 aa, Thermochaetoides thermophila
MRSTPVLRTALAAALPFTVLAADGKSTRYWDCCKPSCLSPGNTQVSQNVFACDRNFNRIYDFGAKSGCEGGPAYSCEDQTPWAVNDQFSYGFAATNIAGGNQASWCCACYKLTFTDGPVAGKVMVVQSTSTGGDLGNNHFDLNIPGGGVGIFDGCTPQFGGLPGERYGGISSRSQCDSFPDALKPGCYWRFDWFLNADNPNFTFERVQCPSELVARTGCKRNDDGNYPVFTPPSGDSPSSSSAAPTSTSTSQQPQQPSSSSSQASVPTSNPGGCTSQKWAECGGIGFTGCATCVSGTTCTKLNDWYSQC

SEQ ID NO: 48061 - protein, 309 aa, Thermochaetoides thermophila
MRSTPVLRTALAAALPFTVLAADGKSTRYWDCCKPSCLSPGNVQVSQNVFACDTNFNRIYDFGAKSGCEGGPAYSCADQTPWAVNDQFSYGFAATNIAGGNEASWCCACYKLTFTDGPVAGKVMVVQSTSTGGDLGNNHFDLNIPGGGVGIFDGCTPQFGPLPGERYGGISSRSQCDSFPDALKPGCYWRFDWFLNADNPNFTFERVQCPSELVARTGCKRNDDGNYPVFTPPSGDSPSSSSAAPTSTSTSQQPQQPTSSSSQASVPTSNPGGCTSQKWAESGGIGFTGCTTCVSGTTCTKLNDWYSQC

SEQ ID NO: 48062 - protein, 309 aa, Thermochaetoides thermophila
MRSTPVLRTALAAALPFTVLAADGKSTRYWDCCKPSCLSPGNVQVSQNVFACDRNFNRIYDFGAKSGCEGGPAYSCADQTPWAVNDQFSYGFAATNIAGGNEASWCCACYKLTFTDGPVAGKVMVVQSTSTGGDLGNNHFDLNIPGGGVGIFDGCTPQFGGLPGERYGGISSRSQCDSFPDALKPGCYWRFDWFLNADNPNFTFERVQCPSELVARTGCKRNDDGNYPVFTPPSGDSPSSSSAAPTSTSTSQQPQQPTSSSSQASVPTSNPGGCTSQKWAESGGIGFTGCATCVSGTTCTKLNDWYSQC

SEQ ID NO: 48063 - protein, 309 aa, Thermochaetoides thermophila
MRSTPVLRTALAAALPFTVLAADGNSTRYWDCCKPSCLSPGNVQVSQNVFACDRNFNRIYDFGAKTGCEGGPAYSCADQTPWAVNDQFSYGFAATNIAGGNEASWCCACYKLTFTSGPVAGSVMVVQSTSTGGDLGNNHFSLNIPGGGVGIFDGCTPQFGGLPGERYGGISSRSQCDSFPDALKPGCYWRFDWFLNADNPNFTFERVQCPSELVARTGCKRNDDGNYPVFTPPSGDSPSSSSAAPTSTSTSQQPQQPTSSSSQASVPTSNPGGCTSQKWAQCGRIGFXGCTTCVSGTTCTKLNDWYSQC

SEQ ID NO: 48064 - protein, 309 aa, Thermochaetoides thermophila
MRSTPVLRTALAAALPFTVLAADGNSTRYWDCCKPSCLSPGNVQVSQNVFACDRNFNRIYDFGAKTYCEGGPAYSCQDQTPWAVNDQFSYGFAATNIAGGNEASWCCACYKLTFTSGPVAGKVMVVQSTSTGGDLGNNHFDLNIPGGGVGIFDGCTPQFGGLPGERYGGISSRSQCDSFTDALKPGCYWRFDWFLNADNPNFTFERVQCPSELVARTGCKRNDDGNYPVFTPPSGDSPSSSSAAPTSTSTSQQPQQPTSSSSQASVPTSNPGGCTSQKWAQCGGIGFTGCTTCVSGTTCTKLNDWYSQC

SEQ ID NO: 48065 - protein, 309 aa, Thermochaetoides thermophila
MRSTPVLRTALAAALPFTVLAADGKSTRYWDCCKPSCLSPGNVQVSQNVFACDRNFNRIYDFGAKSGCEGGPAYSCEDQTPWAVNDQFSYGFAATNIAGGNEASWCCACYKLTFTSGPVAGKVMVVQSTSTGGDLGNNHFDLNIPGGGVGIFDGCTPQFGKLPTERYGGISSRSQCDSFTDALKPGCYWRFDWFLNADNPNFTFERVQCPSELVARTGCKRNDDGNYPVFTPPSGDSPSSSSAAPTSTSTSQQPQQPTSSSSQASVPTSNPGGCTSQKWAQCGGIGFTGCTTCVSGTTCTKLNDWYSQC

SEQ ID NO: 48066 - protein, 309 aa, Thermochaetoides thermophila
MRSTPVLRTALAAALPFTVLAANGKSTRYWDCCKPSCLSPGNVQVSQNVFACDTNFNRIYDFGAKSGCEGGPAYSCADQTPWAVNDQFSYGFAATNIAGGNEASWCCACYKLTFTDGPVAGKVMVVQSTSTGGDLGNNHFDLNIPGGGVGIFDGCTPQFGPLPGERYGGISSRSQCDSFPDALKPGCYWRFDWFLNADNPNFTFERVQCPSELVARTGCKRNDDGNYPVFTPPSGDSPSSSSAAPTSTSTSQQPQQPTSSSSQASVPTSNPGGCTSQKWAECGGIGFTGCTTCVSGTTCTKLNDWYSQC

SEQ ID NO: 48067 - protein, 309 aa, Thermochaetoides thermophila
MRSTPVLRTALAAALPFTVLAADGNSTRYWDCCKPSCLSPGNVQVSQNVFACDTNFNRIYDFGAKSGCEGGPAYSCADQTPWAVNDQFSYGFAATNIAGGNEASWCCACYKLTFTSGPVAGKVMVVQSTSTGGDLGNNHFDLNIPGGGVGIFDGCTPQFGGLPGERYGGISSRSQCDSFPDALKPGCYWRFDWFLNADNPNFTFERVQCPSELVARTGCKRNDDGNYPVFTPPSGDSPSSSSAAPTSTSTSQQPQQPTSSSSQASVPTSNPGGCTSQKWAESGGIGFAQXTTCVSGTTCTKLNDWYSQC

SEQ ID NO: 48068 - protein, 309 aa, Thermochaetoides thermophila
MRSTPVLRTALAAALPFTVLAADGKSTRYWDCCKPSCLSPGNVQVSQNVFACDRNFNRIYDFGAKSGCEGGPAYSCADQTPWAVNDQFSYGFAATNIAGGNEASWCCACYKLTFTSGPVAGKVMVVQSTSTGGDLGNNHFSLNIPGGGVGIFDGCTPQFGGLPTERYGGISSRSQCDSFPDALKPGCYWRFDWFLNADNPNFTFERVQCPSELVARTGCKRNDDGNYPVFTPPSGDSPSSSSAAPTSTSTSQQPQQPSSSSSQASVPTSNPGGCTSQKWAGSGGIAFTGCTTCVSGTTCTKLNDWYSQC
